United States Patent Application Publication US 2014/0325702 A1 - sequence listing, part 49

SEQ ID NO: 150316 - protein, 600 aa, Heterodera glycines
MSLYLLAQLSYGITLVFQAHVNYLITDLESAIKSFARFPEENKREKTPRKSTGRKRRLAELDGVVEAVMAVPRGMEQEDMEEEDDEGAKRRRISAPRKASKLDLADPSAYVDQQLPAARDVNDQSMLMDESSRLDDMFMDQTVQPALPPPDWVAEPNDSLPFGESAEGVRRSSQQKVSMMSILMGEDTLMEEVGKTVTVAPNLSALQPPVEDLELELPMEMTRDPIYKKRSTDEQQSIDVVADSDDRLQLDALPDIDHQPKSAHPKKRKRLLVDEQLQLGNQEMIDRFNNYGDLLRTRDDLHREIIQPDKPTLSQLLDPRPYHIKALNPELFPLFDTVRAEHRERPLTFDEAQAMTFEDMQKRRLEFDLQSWHSNDEPTPLRQRVEESFGDAGGEQRREETQGKEKVSVSDALVETADKEKEGTAELAAHRPSSVLEGEAMRRDTTGEGNRRITDYSFGQLGNEFIMADLDRTQPPPMDEIVADTELMQESVVTKEHSSMGPLDEQSKKRGCNPDDASLSRLNRGGVASFEELLKSESFGETKRLPITRAVVARKFFALLNLLKHRMVKVRQRKPYGEILIRARNLENDGEQPSFTEHLQ

SEQ ID NO: 150317 - protein, 213 aa, Heterodera glycines
MPKIISDFFLQQALFVAAFSVASAEQTVTPGRHDDSLGHRCNYSGPGHCPSGDPKGQNAKLFCLFRSPSPDQSSVIALPFSQGSPVSTPNAFVAASSVAIAPRASSAKAISFACERNAPRGTPNVARIVPRQCQANREEAVNDALVFQICIDHSECPSDGWGCVLLKCRRVGQCANFLWLLVNGCFDAPPPLRLQNAVPAPIVPPIGHVWSGF

SEQ ID NO: 150318 - protein, 105 aa, Heterodera glycines
MYYYDSIGSFVSFLFRIAHLFTYGAKYYSYLVARAGASLIYERLFADDPLSGRNGLKWAKVQSHGGEHPSDVLMAMALDSPEGKAPTAAELVAALDRHSSAENAM

SEQ ID NO: 150319 - protein, 112 aa, Heterodera glycines
MRFSAPRQVLKYFYKRTNAFWDKSMLHKERVAYGKLRLKLYGALDHVQTVLIFEGQIVGECARNAGGTSDGIVRKVSLMRGTSNEEEEEEEEKRRSQKNGTLKANREQSHIL

SEQ ID NO: 150320 - protein, 229 aa, Heterodera glycines
MSSNNALTEMMRREKKKLLGNVDVQDPLAFVIPATLREKRGEDIVLYDSRNVRHGEILCDFEKAEMAAVRAVFPTALIKCCMFHYGQSLYRNFKRLGLVHLYGEKTEYGEAVRNTFSCTRDNNFDHQFGTQLCGYTNTVRHRLTGTINSYVANHSWEDEIVRAPHFPIPLWNMHSQATSAIARTNNGLEATHLHFMVFKLTFPSSPYMIRNLCSFLIQLINSNPYFQML

SEQ ID NO: 150321 - protein, 81 aa, Heterodera glycines
MENRNFQCPSKFSIDYILSIPAKKPRHGVQAGAGPSSAKPAKDYVKKLENSLEHVPRFQYVKAKSKFSIEDVPANPEGLLA

SEQ ID NO: 150322 - protein, 67 aa, Heterodera glycines
MPKMNKRLPHELIWEIVAAIPIMYLFGGVSKKPDRSCSKFREALCTEEVTVRRIVHPIWIHTIWFRK

SEQ ID NO: 150323 - protein, 130 aa, Heterodera glycines
MALEIERRRNREMTTGATQTDHLVGSTVLNLPKFFINFIKIIAPQFCTFNQQRNESDEAELDAQLKRAALAHAEHLERVIRTQKQIHDMETQQIVQETIAIERDKFGKQIDNGLVKLAAIEEMLKSRATK

SEQ ID NO: 150324 - protein, 176 aa, Heterodera glycines
MSAHSHVKERLFPAATQPAPAIVQPAAAAVVPPASVVVLPAAAEAPPADVEIELDIDGEQLTNFPAQQHPQQLFPAQQQQPQQLFPAQHQQQLLLPPRPMISQIVDNAVSVLQMHFHNMSPLRPAFPPFFINSPFPRLQGALELPSLQFGQQHAFAPPPAPALQIVPFDDAPTPQP

SEQ ID NO: 150325 - protein, 110 aa, Heterodera glycines
MVEVRRHRKRSPNGKTKRMPKQETEKRRKVSDQGPHSASVGRAPSINVPKNNAIACGDGTSVASPLGPFGDLLKNALRFNIKVNNGEGGRNEMAVFQKMILEIKNFKFPN

SEQ ID NO: 150326 - protein, 130 aa, Heterodera glycines
MAKQVLDLYELYRLVVHHGGLVEVINKKLWREIAKGLNLPTSITSAAFTLRTQYDKYLYDYECKIHKFSDRAALEAAIDANKREGRRNPPPPGAAGVTSNSAGATPAGAQHHNGSNNHNNNSHHQHNYSG

SEQ ID NO: 150327 - protein, 211 aa, Heterodera glycines
MAIEAYETAMRRAPKDHQLAEKIGNAYVKCHLYNKAITFYEAAVKSGRHNLRIRFAEQLFQLGNLEKCKKVLKEMLEEQGEPMGSKKSNSNFGVSFGKMKNSKNKEIAPMREHVAYLMLMSRLHIEQNDLEQSCKDLQRARQLQLKVIARGTVASTRDGIVNMAEEKQLAAKLAHSRGHITADRYPPKMPLQHLSTDCRNACQQAGLEQVN

SEQ ID NO: 150328 - protein, 115 aa, Heterodera glycines
MIEICLNPDNEIMGADLGEQQQQLSPEDAHEANESYKAADRFFQEDDANLSAGAILGTARALLMAQTDAKGKGAAQENGWGMRGIWRRRNICSNVKIWENEKGMVKRRDSRPRLW

SEQ ID NO: 150329 - protein, 87 aa, Heterodera glycines
NDSTTASAKATQTDAHALLVGHGATSAGSSGLSLISQEETLSLLAIIEDALDETIDRQSRIKTNEFIASTARKQANNQSITNQIRAF

SEQ ID NO: 150330 - protein, 125 aa, Heterodera glycines
IVAKEAEQNDDDQPSPITKADEEIRVLEKVIADAQKVIADATARLEYWKEHRSTMVSFFYIFHFYPIGLAHADAALSAQCGARPVSARPTCAVARPASAGAATALCHCARTAPLAAVAARRSTTV

SEQ ID NO: 150331 - protein, 88 aa, Heterodera glycines
MAQKPNLNLFFSEHQPPAICEAAQTLRDAFIKWLLCQRLKMCAVKMFMRLEDDEIDARPLQPPQNGAQGQLLLSSTAGDLTQYKTLLR

SEQ ID NO: 150332 - protein, 133 aa, Heterodera glycines
MKLFDEKEMRSLSSTQHYMKVLRSFISFLETTFGRNQTDLNHVGPLLSGMTIIKYRIRGIKSRAIAEREQARRTSTKQQTNPQHIPSYGTVMALINHPQINAAHTNFRNKYIHGASAAETDDEWPTYEEFKFI

SEQ ID NO: 150333 - protein, 202 aa, Heterodera glycines
MNAEDNNNPSPTDPEHDISNNDDGTASVVDKHDLIWRTKELFEYISKRAAAGRLTTASRQGKVTLGREFFEEELENIDKECHGIYLNKTAAEAAKDWNGNMKHRHAASWATAMRGTFSIGAHEENATSDHRVAMRELTKRRAAAATEKMEIEAKSAAIKSQLSIENAKLGLLLKKQRLAKGHGTYHKDVIKYLASTATTSKR

SEQ ID NO: 150334 - protein, 102 aa, Heterodera glycines
MRELEQSGNCGVLVKLKITGRFLWQMPDVRAEECLEEISDNDDSHVRDEASRHLPKPSLPSASAVFRRSFVDGGNENSEEFGIFKRGFLGEGDENSEVIFID

SEQ ID NO: 150335 - protein, 102 aa, Heterodera glycines
MLNLNERRYNCGSAIADWTIADDSCGPYFCGRQLRTVLLRTGQLRTVLLRTTVADRTFADDSCGPYFCGRQLRTVLLLKKLTGRANSVYLGLSNDTKIVGFR

SEQ ID NO: 150336 - protein, 236 aa, Heterodera glycines
MPPLQSFLASIGRVASTALSTRVQRLIGKTATELPEIVTEKMDRIYVKLEQQQSLLSATIDEKMAKHEVSLLIATDQRIVHFLLLAFLLIAAVCLTLLLIKAIVDQFLKQKFEQNNNTTDGEEEKRTEEKEETEENGKGGEKGRRGEESTLGENDGEEEEEEEKKQNGKGREGGEKGGRKEEQILEENDGEEEEEEEEEKEGNKREEFVREENEENEKEEEDGTEALLEEFAHLQL

SEQ ID NO: 150337 - protein, 34 aa, Heterodera glycines
MIIFLLTLLFGLVFVALKNWNPTNYKVVKPYKVN

SEQ ID NO: 150338 - protein, 248 aa, Heterodera glycines
ICEKQMSRKRKTAAEEQRNKRKKRSDRKKENGKEMLYCRHPPRAILEKHQRREQQQNAVNDQQQQQNEQQQQNGHNEQQFDEQQHEQNDGDEQQQQNQNDGGEQQHAEQHQPNNNNNNSLIFEEEEEEEMTNADEEEQQSGIEADESTHEQQQPEEEEDGNEGEHHQHGNDQQQREEEVREGQYELDRAYACYTHSNGQRAFYVKWTLAHKWNTGAAKASEHDILWAADTDKRTRQTAEKQLRAFIDK

SEQ ID NO: 150339 - protein, 86 aa, Heterodera glycines
MENECDNERARTQKTTRSENVTCDCSLGNKGVDWANALNTPPPITKKRQGCVGGWLDAKGYGQTIKIYCFDGYEICYAARCFKVMF

SEQ ID NO: 150340 - protein, 23 aa, Heterodera glycines
GGLFFNILRKGDIIGDRAFNGDR

SEQ ID NO: 150341 - protein, 143 aa, Heterodera glycines
ANQELAAQFFAENVKPRFKFAGEDEEIAVNLFDLTRSLIGIWKFYFNSKEGKKYKWKLSNLFKYSFEPILLNENEFKKNEEGMDGRNKTAAESSSQSLAANEQTGNADNDLLKLMEDKFKNLVKKMAKIAQKMNKTWRTSIYF

SEQ ID NO: 150342 - protein, 79 aa, Heterodera glycines
MTSALILGAVAFGAFTHLGAHEWVAIVMVLGIVGFAVFFLIGLFFCFSCCFRKAAEKVALKEVISSTPPAVIVITYNPI

SEQ ID NO: 150343 - protein, 271 aa, Heterodera glycines
MGICHKIGENGTKKMQIDDADGNPLPIPRNPLPNKVIGFRRIQINYIDQNVIEFLHRFHRLFPICSTTMNITTENVRILDYFLLHIWPMFCDSMHLMLLNTILFRRFRQLAPSSLSDCPSLRVVWLDDGTFPEFPPDDSAMASDGQAVTKWVLTPRPDGQPKLLKSPVNSPDQWSSTMEQFKAEFSNASSPVSFSINFLPSSPLDSAVPFDLINQATGEQLTLEQYANGFWLSRCPIGWDEMKWDNVWKELIDARTNPIDIVIKDGGYDDG

SEQ ID NO: 150344 - protein, 43 aa, Heterodera glycines
MGVWHLFICISGQVAKPSDFIISRLGSIPHWDRIFFIFSLPLF

SEQ ID NO: 150345 - protein, 120 aa, Heterodera glycines
MNLTSIQPIPNLYKRTGNYSDNLSVDELWRAKHLYDSAFHPDTGEKVLLLGRMSARVPVVTLMSTPAVFGWQFVNQTFNAITNYSNRSGDALSNSQLLQAYVMATGGATGVALGLDRAVT

SEQ ID NO: 150346 - protein, 74 aa, Heterodera glycines
MGKCPPNFGRIMVLFFVQNMNKTLKNYYGVAQSSLECYLRSTNYTFMRLDLTEDIRAKKYCVQHKQVLYSKCLG

SEQ ID NO: 150347 - protein, 117 aa, Heterodera glycines
MKMMRKMKPTFVYLAIIGSFSTILCLITLFHQYRPLRISSVEENKNSNKKLLYTLPNAMTIGPKTPYLKRENMGKCPPNFGRIMVLVFVQNMNKTLEKKFDFFLFINLKKNIFYKFV

SEQ ID NO: 150348 - protein, 44 aa, Heterodera glycines
MPPIWVSLMPFATVAFANCVNIPVMRRKCGKLQLVKTHFIFLRP

SEQ ID NO: 150349 - protein, 21 aa, Heterodera glycines
MAYSYASDKDLRFIILKLKSQ

SEQ ID NO: 150350 - protein, 76 aa, Heterodera glycines
MLILLLLHSRRLHAELSETIDRFTEENSLLGYMNDQLTEQLEPLTAAPRPAERWFVIPFVPLKSLSVLSLTTQHEK

SEQ ID NO: 150351 - protein, 255 aa, Heterodera glycines
MGSLAVQPPSGVTRNLTEVFVFLRNNAQQEHLVELNSQQRVNLDTGKKELPFAHCFCYCILRLDDKMCLIAIDEGKSVGFGGGKIQKQLTDLDFSDDKGASAEAGKVAELTEELTAMFGHSKRLINQSAFLRQLDSRTANLDTFVLKSSTNVVPTAASVCAGDSGTTDGAMTSCTRDADKQQQEELTIDQIQYIMQNEHVSKEREQEVLKISKSILELHSMFKDIASMIIDQGTILDRIDYNVEQSASRITSAFK

SEQ ID NO: 150352 - protein, 49 aa, Heterodera glycines
VICGCIRGALEALHMEVQAVLVSDVPEPTELRIKVHRVLQESIPAGDEP

SEQ ID NO: 150353 - protein, 256 aa, Heterodera glycines
MKCDWPTQPLDGYLLHCARDNGIPLLDGRNLDMKRIIAMRDIKELTESHGILMCTLEPLRRQENYELYEGQGSNSYSSTSFNNYENNQYFSDRECANELLSPEINDNELSRSYERIKPTFFDKEMRGVHERTASRRLRSSYEDQAHRESYEETENRRNRLVTYYDNDESPNNYSRRERQRYNDAPHQPEYNEEIQQNSPITYDGRESERDALANYQPTGYDETQQNSARSQSQGRIRERPTHNEKEVPKQTKNRRG

SEQ ID NO: 150354 - protein, 21 aa, Heterodera glycines
FLLHFCYEIYGKRPKYVLKFE

SEQ ID NO: 150355 - protein, 98 aa, Heterodera glycines
MDARLGSKAFEEDCNESNDANATNGSVPQQATDHETEKTGVIPMTLDKKAENSEDNDADSMATEQMQENSEDNDADSMATEQMPENSDEEYSMASEQM

SEQ ID NO: 150356 - protein, 41 aa, Heterodera glycines; identical to SEQ ID NO: 139690

SEQ ID NO: 150357 - protein, 85 aa, Heterodera glycines
MIATVGSNCADGQGSGLKGIGLDLYFLKKLDPNMKISEYRAQSYGKYKPGPNLISTLCQVDTLYRLSTTVGRSIGMEPQNKAMQI

SEQ ID NO: 150358 - protein, 54 aa, Heterodera glycines
MALLCAAEPDCMVPIGQTKACIYTPTAPNLTCHRQDQSLAEILRYNMEYRQQIE

SEQ ID NO: 150359 - protein, 126 aa, Heterodera glycines
MVYTLKMNDSRIIRGKKFNCSLTWLLERYKLSDKYAIKEKIEVCFLIYFYYIFINFNHFYVKYPGHPKFVFVTAANDFYYPFIRTVIANVKENFGCKQKIIAYDLGTVTKNKEWVKNSFIYFKINN

SEQ ID NO: 150360 - protein, 102 aa, Heterodera glycines
MALKGHNQSDHCTTEANANAETGLRTARSDRVALRKRRFIGDLIDIGKFTFDTGCKLFHTAICDLGKKRKREAVYGKNEPAPNPLTSSKSCRAPLLTSLWKR

SEQ ID NO: 150361 - protein, 61 aa, Heterodera glycines
MLSFIYSDDLSELDGDNAMAVLYAAKKYGIDRLVSPCLQIPIPKLSNVFLAFCQARLFDLE

SEQ ID NO: 150362 - protein, 94 aa, Heterodera glycines
MSSSSKQGNPIERMKHLVSSGEDADIQFLLLPAHKLILKHASEVFEAMFRFDSQKEKTENGFILGIWCPVFRCPIYQSTIGINDVPSVLLPNKI

SEQ ID NO: 150363 - protein, 662 aa, Heterodera glycines
TAWKCSASEQQPQQSNLASSIDARISKFYYDAESGNTFEQWFKRFGTLIEDDGKDLPEATKVRLLLGKLSDEDYNKYRDSVSPTQPDQISWADTLDKLKSLYAETRSLFVRRYECFKIRQQPNQDITSLIAQINASCENANLSLTKEQLKCIILVIALRDEHHDLRQKCLKMLEDGQKNGTDITLKQIEEELRTIQMVKESALSLMAQPAATNAIHTRPQQWKDSKGKSKPFVKTEQRSHNQQNCSKNVDKGKHRQPTDPCPALNTTCTEVGTADHWYWRILITVNGVKIRINVDTGAQATIITSKTWCKIGKPKLSPADIEARNCNGEAVPIKGKFFGIVSMGNDEPKMLTAYVSDAIKHDLLGMPWIVALEVIPREIMFQEVNTKPTIIQKEAMPKAKVIQDEKSLISALQKDFSDVFSNELGHCTKAKAHLILKSDAKPVFCKARPIPHGATEAVNAELDRLQQLGAIKPIKFSHWAAPILAVKKKNGKTRVCIDFSTGLNNARELNRHPLPRPDDIYAALNGAAYFSNLDLSDAYLQMELDEQSKQLCALSTHRGLFQCQRLPFGVKSAPSIFQHLMDQICSGIPGVFAYLDDGLIASKTLEEHVSALYQLFARFNEYGLHIQLEKCKFLQKELLFLGHIMSSERIHPDPEQSEFIRK

SEQ ID NO: 150364 - protein, 81 aa, Heterodera glycines
MYADPAGSRTKIKFADPVAGLEFKIFCRTGSGRINPANPAFSKKCRIADWDPAKSCAGSGPAPGSSEIHKFFGENLLQNRL

SEQ ID NO: 150365 - protein, 72 aa, Heterodera glycines
MVLNPSVARCNLPKIYDWGTKTVYFQPQTGKAMDEKAYVGYIYFVPPTLDPMRLDIGNIYDWFTNPLPYQVI

SEQ ID NO: 150366 - protein, 32 aa, Heterodera glycines
MNTSSSVRTRRPSSRSPLHSSPTVQAEPKKPC

SEQ ID NO: 150367 - protein, 35 aa, Heterodera glycines
CVPICRLKLGRLLLLHRQICVGITTMPNENTEKRW

SEQ ID NO: 150368 - protein, 56 aa, Heterodera glycines
MNTSSSVRTRRPSSRSPLHSSPTVQAEPKKPCRIYNMYCGIIIALSVCAVVYFYVY

SEQ ID NO: 150369 - protein, 46 aa, Heterodera glycines
MALLAFMGHAGFVAQSQTSSQSVTVTPLNTMIENMRVTEIRHGNQK

SEQ ID NO: 150370 - protein, 78 aa, Heterodera glycines
MFNFKVLLFLFPLLSFITYGAILPNYEATAKNGPNETPKFQNNDLIGDKFMKCCKDNEISCSEVCTYPPPAFSFSEQW

SEQ ID NO: 150371 - protein, 26 aa, Heterodera glycines
MRAKDISTSVGDIGYTLELRIPINLQ

SEQ ID NO: 150372 - protein, 77 aa, Heterodera glycines
MYYAEAELCANRQFGGMREQRLFVVRLANKWWSRGLYVKDKARGELCRLRMECRSVLRGQSMCRRAVHKGKNDGQRE

SEQ ID NO: 150373 - protein, 32 aa, Heterodera glycines
YIGAMDVGLPYQLLKLLFFKKDTKTGITPFRD

SEQ ID NO: 150374 - protein, 57 aa, Heterodera glycines
KSHFGDFVTKIVKNHYFGVLSLFFTISTFFGKFLNKNAIKPKNTPLRIDKKNFKKHS

SEQ ID NO: 150375 - protein, 256 aa, Heterodera glycines
MDKGNLWIVPGFTILVFAGLWTTKLSKIALEESVCRSGSIYDLSGTTLDDDAQRHCQTAKSGFYGFGRPLCSSCINFNNVVNASQNVLMDNDGIMEVDTDKLDERIPTIADNFKVATYSRAFAGFIFFELSLVFAPIVLLMFVLPLMVGAGYRTWGLDVARAWWERKEWHGTTLTPVLGAVDEHQQQRLFQRPLRDWERSPPRIPLIPRITYCDYNYVSLGNTHTLTYRCYLDANWHERTALFTWWTKYGGLINGN

SEQ ID NO: 150376 - protein, 130 aa, Heterodera glycines
MDDEENILQKIYLEFYFDRKMFGDPNAIILYVNQPDLFPVCHFEQLQFVMFQVEKLAKQDGNHVLVRRASFIELRKRLRLDEAGDYSLYFDGTKRVALVHMAYGYLPEHYPEKDFDLRVMMERSTAIVKI

SEQ ID NO: 150377 - protein, 42 aa, Heterodera glycines
MCFEFWPPVEGRWGRNVPMCRRTPVGFSSFRQVEDEGLATAK

SEQ ID NO: 150378 - protein, 53 aa, Heterodera glycines
FHKKIMNPCTIGSIFHMFFKMLTIRQNIANFFTANHFFKFNFPFKQKLLHELT

SEQ ID NO: 150379 - protein, 131 aa, Heterodera glycines
MDTQRKEIETFGMQPFHAIVTPANTTIWLKCSQCLHPDDTEELEDVWKPSPSVIGRKIQQFLKKIREKIIRSKSPYAKSRRVNLATYCWQKLGNINEKDTSKKKWVTIKSPTFQKTGGRDNQTEVTKFVEE

SEQ ID NO: 150380 - protein, 108 aa, Heterodera glycines
KAVLEEVATRLEEHKGDETSVESQAEEVTSTTLQRGLLQHEVGGMEAQQMVVGEQAQCPSAEGVPHAFLCAGCQFRADCANLLRAIGALLKDFGSAASVDGGRNNGTT

SEQ ID NO: 150381 - protein, 25 aa, Heterodera glycines
TCTCCVVVKLSTFHNFSPGFNSPLG

SEQ ID NO: 150382 - protein, 388 aa, Heterodera glycines
MHEREFRFEAILAPKIEEEEVQALVGTEGLVDGLVRFGRNGTVLAYGPTDTPAERRESLVGCPSPSEEQLPPTGFTPTRWKCFDARRKGRGGRKGRTQLRIRRHWEYGHSFSLSPSIPPLLNNSNSLPGGRSRPSNAPPANNESNAATPKVPKLPRLGTSLFDSLRDQHLANSERQHRLRAAAASEFRTLRIGIGTEGEEGHSEGMRSAANARGDGERAKVRKGGGESADGSGGQRATDERIGRHSAQIGESFETGRANAAANGGANEVKPNQSRSERTKVISQFQRVGQRPAAIANRRKQENQLKRIKQYERIVDRLIGADKNLEGEERAKLHREYRLLRSQLDRMLPVDNGLPSWNTQILAERNAKAGPSKNEKPRLRQSESISLN

SEQ ID NO: 150383 - protein, 28 aa, Heterodera glycines
NQFHIILEFLRGISRNYRMNPRISVNFY

SEQ ID NO: 150384 - protein, 798 aa, Heterodera glycines
LSPPPSFRHFFRRLSDNPWHCDCRLRWLKRLIAPQIRCYRPTHLFGRPLNQISSQAVKCRGGGGRRDRTTQVWPLRCPPGCVCTESAPDAVVVDCHDRLLRAVPQRLPPNTVELDLSKNAIERVEPAAFAGLGRLSSLMLFSNNLTDLPERVFDMLFSNNLTDLPERVFDGIGNSLQVLLMNGNQLECLRNEVFRGLNQLKLLSLYDNKIRSISQATFAPFALSLQTLHLARNPLICDCNLTLHLARNPLICDCNLVWMVWMALLLVDRPVETSGARCHSPKRVAQRRIATLSADRFRCVGSERLVTQRAGQCEVDRECPEECQCRGTTVDCSSLHLSSLPAAFPRFTTSLLLRSNRLSPRGSLLPNADLPNLVHLDLSDNQINALPPDFLSSVPSLRELDLSENSLRQFSAHDLSENSLRQFSAHSLDLVISLSFRSLRQNPLNSLDGPVFEQRTSRFGWVGTFICDCQLRPLIRRLRKGKIWTNEWEEEEFGGPRCAGIPGGQCSTEGEFCPSGCSCVRPVVRCSGLVVRCSGLGLSRVPIGIPEDTTELFLDNNRIEHLSGDSFARFPQLIKLDLSHNDLSHNLLRHIPSGTFVHLSVLSTLILAFNRIQCLHNGAFDGLSQLRVLSLHQNDLSQLSEATFAPLSNDLSQLSEATFAPLSNLSHIALSANPFWCDCQMNWAIRWVRSKFIEPGIAKCEGPLHIAKCEGPLHRKLIFFQIQFNFYGSSPSSPPPPISVLSKCRPCLDRSLCANLALCHSLENGKFRCECPLGFHGTFCEHPMENCDTSRMMSNPCR

SEQ ID NO: 150385 - protein, 29 aa, Heterodera glycines
MVVQLTFLISIKETVCQRFKMAERKPLQN

SEQ ID NO: 150386 - protein, 24 aa, Heterodera glycines
FRSILAISSLISLSVCKTNLSSGD

SEQ ID NO: 150387 - protein, 103 aa, Heterodera glycines
NDKADKKREKGEGVGDSVDGIFCSRPPPATAFAVFVTSVEKNSTKNEEKAAKTLQIDWMDEVKRRENDGENLAKCHNDGKNDGAEVLDGQINEHLAKANSKKG

SEQ ID NO: 150388 - protein, 366 aa, Heterodera glycines
YIKFVFFHSGFQVTLICMGFFQERIVTRGYPHRTEPKRTDFFRDTQFLVFSNRIVALALSGAYLFVTRKVALALSGAYLFVTRKAQPPHVAPLYLHSFSSFSNVIASWCQYEALKYVSFPAQTVCTVCKASKIVPTMLMGILLRGQRYSTSQYAFALTLVLGTSVFFLATSSDSSHFTSARGTFSGFLLMLGYLLFDAFTPNWQKTVRSSPHHFLSIQMMFCVNAFSVLICLVPLLQQWTLPSSVHFLFVHESVLVDCLFLSLGSSLGQVFIYLTIQNFGPVVLSVIMVFIYLTIQNFGPVVLSVIMTLRQIFSIILSSLYFVHPINLQGFCGLFLVFGAIFFDACNKHSKAVAGGGREQKMPSTE

SEQ ID NO: 150389 - protein, 108 aa, Heterodera glycines
MQSDEDIGRMVASVPVAIGSAMEVFAEKLLLAAAESVQHSSTKTLSPMHINGGESQANPIAKKGGESEEQGQSVPDFHSFPIFPLKAAAVVQITAEQLLREAKERELE

SEQ ID NO: 150390 - protein, 75 aa, Heterodera glycines
MAVSCWLADKMICDLWLQLGTPYLHAIWHLLAAYAGCYRIAFLFSAKNIYKMNKGRFGASPSFWTVNFFTVNQIQ

SEQ ID NO: 150391 - protein, 49 aa, Heterodera glycines
MAQGNEEAIKTNAFTRRFNKTENGHRNGQKNDGQTKLTPKFLLNAFLKN

SEQ ID NO: 150392 - protein, 146 aa, Heterodera glycines
MFLEQFARHHIVVEQHRRVRHQTRGHHVQKEQFVHQLAEQRKGGVVISRREPIKCEKSVGTNGHGVHPAEKGPQADDVQQGQQQQRKPIILKKGRNIEKITTTHSATNGTILYLLSDSDSHQGMPDSKANQWSIKVTNCQLSDKTF

SEQ ID NO: 150393 - protein, 150 aa, Heterodera glycines
QFVTLMDHWFAFESGMPWCESLYKYKIVPFVAEFANTISNLPLLLLPLLNVVRLWPFLSRVNPVAICPHAFLALNGLASAYYHATLSLFGQLVDELFLLHMMTTCLVAYTPVLRFFPTKFFSPLGLIRLAVILLSVSVSVLGFIDPAVNA

SEQ ID NO: 150394 - protein, 95 aa, Heterodera glycines
MLFLPLLLVLLLPLYSSVFVQSVSQRRPVRITPFLYSDALNIAAAGGSVAPLKKENAMFDVPTKFGWDSQTMRQITPFLYSSVNSGQQQERKRFE

SEQ ID NO: 150395 - protein, 436 aa, Heterodera glycines
MASDIQMMHLKRAFDWYEEMKSQLEIIRFKKQALENESVEVNSRLANEESRAIELQKERKRTEAECESLRKNITDMDVGMRKLEAEKQAKDNQLRTLADELHKQELTESKLAKERKQQQELAAKLQNDLQMEAERNAAEKAHRQKLQQTLEVAKVSNSFNGTPRVENEMDRERRARAEQEKARRKFEGEVRIARENLDEMGKQRQDMETSLKRKEADLFALSVRFEEAQSQGAKLQRQAQEMDARCKEMEAELEAERQARARSERGRGEIQYEADELQERLEQQAQATQSQIEANKKKDAEVAKLRREIDQLKLTFESQATALKKKGASGCTELHEQIDQVQRMKNKAEKERIAMQRQLEMQQRVAILQAAPAGRVRRVRAPSGGLGVAVDRYRTPQVAILCPSGGVEACRNGGTAREAGTEHAREEPAARVGAAQ

SEQ ID NO: 150396 - protein, 287 aa, Heterodera glycines
MENAEIKSQRKNKKLEHEGCLFEFKLVKRVRHEIELPPPVPVTLQELELPEQYRIYKRTEETQELFLLADSGTYTDQNREGQQRRDKWVFPVLHCLLTCKSQSTYDRMFDMVRHRWPTFWPTNASMDFEQAMVNAFRAKHPQCSINFCLFHLVRNMKARLTDEQTHRFKTDAAFARAAKMVTSLAFVPLADLTPALAALEDYLPNELEGVLDWFVINYVGRLRNNGTRTRPLFRPEEWSVYERTMNGTTAQTTSPKRTIARCNMRSESDKHTRQYGNSSTFCVSTKK

SEQ ID NO: 150397 - protein, 60 aa, Heterodera glycines
NERDLIDPFIFNFQSLINSWAGMFLFCRCRRRWHRFLLNCRCQTSVLFNAAAVSRAGNYC

SEQ ID NO: 150398 - protein, 138 aa, Heterodera glycines
ITNKLKKKILIAFSLWGLMDDSQKEYFTGWIKWCEIGTQYIPLSFGTQYIPLSFLLGFFVAVVVARWWEQFNWISWPDKFMMCVSTCLPGRENLETRRTLARWTSLQSAIAWTGISVRTLKRFPTERHLVESKLMTEE

SEQ ID NO: 150399 - protein, 110 aa, Heterodera glycines
MDIWSAGITIYEIIFSNYFVIETNSMTINQGDLWPNLANKMTKIGELYRSAKLFENPSAVTQQLFAKLDLPNGNWNPGRKDWWTRYSGVILNILDIWGTHGMPEIACLLG

SEQ ID NO: 150400 - protein, 181 aa, Heterodera glycines
MHTLIPLPPVALTPAEIILSKILFNMPADGSWKRSIKKCDDQRIWINLSSSDIVPNLAIKGRLPLLFKDIVPNLAIKGRLPLLFKDIVPNLAIKGRLPLLFKDIMPNLAIKGRLPLLFKDIVPNLAIKGRLPLLFKDIMPNLAIKGRLPLLFKDIVPNLAIKSPLSNLLMIFFIFMAKFKF

SEQ ID NO: 150401 - protein, 21 aa, Heterodera glycines
MVKQHQQEQRRKLAMLREVES

SEQ ID NO: 150402 - protein, 106 aa, Heterodera glycines
MPIANSALYAKMDQCDCAMFADCPLGKTRATPAQRCRHSATPRHTKKRHTVGAAQSTPWTRTEMPQAASSEDIDDANEDDYHDEKSVPSLSCQCRKRQCPECAKHA

SEQ ID NO: 150403 - protein, 231 aa, Heterodera glycines
MKRTNASNITPPRAKRSMAPAQDLDPNAVALAEQERQRTLVFIGLPESNAIRPSERVQEDREAATKILDHLEVEAQPTAVFRLGRYDPQRTTPRPLKVVMPTTTHQHMALGGWKRERARLRSQQNLARLFVRPALTKEQLKEEYEARVRKRQQNPAPVAPAMQPRQTNVPTPVKENAPNQKEASDDISKPLEVFDQTILVCYEALKSLPPNDKIVHQIQSLEKQYPRLFNK

SEQ ID NO: 150404 - protein, 86 aa, Heterodera glycines
MIITFFQQNGETLPPPPTQFTMVGGVPVALSPAQTAAAAGVQFVPKNDSKYETLASLDANIFVKLTCIGFEPGTPLLVTSTYICIN

SEQ ID NO: 150405 - protein, 305 aa, Heterodera glycines
QVSSNQMSDEPPPPAAPETPKEPPTQAQEVPPPAAPETTKEAPTQASEVPPPAAPETPKEPPTQASEVPPPAAPETTKEAPTQVQEVPPPAAPETKEAPTQASEVPPPAAPETTKEAPTQAQEVPPPAAPETTKEAPTQAQEVPPPAPTRLQPRSAPINSFKDVRPVLREMLDQLHHPIIDTVERQTGMDREQLFFTVVALLTFYLLFGSYNMFVSNVLVKSYPFYQSVMTIRSQSKTDDTQWLAYWCAFALFSLVDHFIAPFGLYLLLKTAVLVYMLLPQTYGAHNCFVNYVQPMMERFAERRV

SEQ ID NO: 150406 - protein, 102 aa, Heterodera glycines
MRHHQLRTRKNKSEAFVFGLKVGNLIENYEKLSKVFGTRTKKTSDGGALVWTFEQKQCKMAFGRDNDAEIHDVITDLGLQVEGYAEKLKDYENMEDSSMDVA

SEQ ID NO: 150407 - protein, 17 aa, Heterodera glycines
QKLRVHTIGGDGKNECE

SEQ ID NO: 150408 - protein, 111 aa, Heterodera glycines
MRRALNLNIDYTASDYLAIIQIYNMIKYFNLLIFLRNYSNQPIKAVENHVGEIAAKFDNLKHYFVLLPIANRGIKALFTAKRNVILSKMQCKQTEMASFVKKFKMEQSAKR

SEQ ID NO: 150409 - protein, 39 aa, Heterodera glycines
MEVERRNSSKRLLLGNNQSKTPEALCVVKLDGNGAIYCY

SEQ ID NO: 150410 - protein, 210 aa, Heterodera glycines
KSDYDYPIPIMAQNPINCDSDYDYDSDSAHPCWICNDVWMDIFPTFDHAQLGLKLALLSPRFNALVDKHFDGKSELTIWRTIEISKCIGTKPKLSVRMDDKFVEFPLPDRPLPSKIRFKHLHIDYIDHSVIAFLRSNHQIFDKRGTNLDLWIPSPHTTDGQRIWDVFVREIWPIFSENIRHLGFTGADHLDNLMVALSEKRWTTQAIALR

SEQ ID NO: 150411 - protein, 287 aa, Heterodera glycines
SPCHSVRTFTAARSAILLATLLWVDIFFVGLMPLMWVAQCCLAHRSGTPNRTSRTRIGRLSCALFLVSVLCFALMGACLYGNEHVNKSVRESTGALAHVANAFRVAMETVLFKFWGNEVIPGQKVLYLETFTLHFTHKLNESQWHLSRHIDQLTLLIEQKSKDVINQTTMIREADSLLTELSDKVDELKQRLGRTLAILADTQFLEAAKRKGERVELERWLLCLLLPLIMLSVLFAGVIAFCRQSRKGAIIFSGLGLVIFLVTWLLFSAAFPLTVRVFCNRLSDLCI

SEQ ID NO: 150412 - protein, 248 aa, Heterodera glycines
MDRVVVRKKAEFAKAPSTNCLPIAIFVTSYARLHLYDYMEQVLRLGHKLLYCDTDSIYYVTNNGRQQVPEGEALGQMKREHCSRRIYEFVSGGPKNYGFRHCDRINGEDERAELKVRSFRLSYSAQQLLNFESMKRIVLAHYNIDGQIDDVLDMEGVHVVPGSNASIRIEFPQIGRTPCSDLYTYDAHKDYQPHYVKGRIRPSMETVPFGFREAQTVQEQAEHHQRQLNDFDDNLLIVNLPGCSNWNQ

SEQ ID NO: 150413 - protein, 518 aa, Heterodera glycines
MRRRRRRRGQQQQQQNNNNDDEDDDDDNDGNEEGDDDHGHDADNEEEEEVGTNRSVRLCFFDAETSQDLPLQLRTKVVQKHVPMLIIAEIICEACINEGISVHSGVGQYANGCVCGPPAGPRGRRWCSPPFLNAPEDDNALPANVHYNPRRLFFHSFDDATNNDPVDDFINFLTGSGPHGVKTICLSHNGGKYDIHLILEALHRRNLPPKRICTTGLKIFSMTLKGNHQRHVIFKDSLNYFFCELDALPRTFGLNAEVATAKPFFPYLFIRRENLHQRLHGLPGKEFYQPDHMKASKRDSFMSWWEVENRSARFQLREQLILYCMNDVAILRESVLQFRQIIAENTRGLDPFKISSTAAGLALATLRRCFLPMNKLVNAPEGGYLRGRRASAESARYIRYYEMTHPGVHVRSAQWSIGEANVEDTGYRLDGLVTREPPQRNLAIEYMGCFYHGKKKVALFNRTKKKCLKVAPSVTLTTDNKNWQVEGQPKTCMNEPRGGYLNCRISMALSWKLSGDAK

SEQ ID NO: 150414 - protein, 237 aa, Heterodera glycines
MNYSDSPSRRASAVANCLPSPSIMELAKSAGLLSLNPSDLVFESSVLGIAYYDFVLSVSEVEYAPAPSAGAEHEQQKNEKSPNKKALAKRRVHETGSAPLNGTPTMGGAGANAAPIQRKRCQTMEKEKGGRSLVAMLQKQRTEMQLVNNKSNNTKSSSLLPSFEKGSMGEIQEKCEIEEAEKNSSNTTRTPSKSPSIERKNNKNNCNNTLYRIFLAKFDAHTNVQWFESVLVPRRYF

SEQ ID NO: 150415 - protein, 26 aa, Heterodera glycines
MNYYVNGKHRHSNGEDTRGPELGFQY

SEQ ID NO: 150416 - protein, 100 aa, Heterodera glycines
MPKNQKSKRFSKKSSSASAALSSPPALLDISALPNPVYEDISSPEGSVITGAVVANTIVSTIEPNLDNAVLTTLSPEDVDRIFADDPGMAEEVGRTDRGS

SEQ ID NO: 150417 - protein, 85 aa, Heterodera glycines
MGPPCTSPKTPNDEQIVPEKLAVDDEEEVQSNEPSEADNSNQESSESTVTNRQNVTNQTVADISGDKRYSLRNRLAITKPKRFTE

SEQ ID NO: 150418 - protein, 46 aa, Heterodera glycines
MFIRNMIFIDHLMSRLLKIITIDGNFTSYRATRILEMYKNKENNKR

SEQ ID NO: 150419 - protein, 62 aa, Heterodera glycines
MEYVLKLRGLTLNYDVINNQGFRYKNSKSNVMLKQERLNQLMEENSLIKNKNTNTWKITVRE

SEQ ID NO: 150420 - protein, 68 aa, Heterodera glycines
MAEQSAFQSKLMLLRLKKVTHLPIDTDIKGNGEKEAEFPLTDFTSIMMYSILENIWDNRSIDVMAIED

SEQ ID NO: 150421 - protein, 63 aa, Heterodera glycines; identical to SEQ ID NO: 130392

SEQ ID NO: 150422 - protein, 27 aa, Heterodera glycines
MSWRETFCLCLLGDHENEKKKSEWKMD

SEQ ID NO: 150423 - protein, 188 aa, Heterodera glycines
IHLTDGGGGFKEAQLHTLAQCHANNGPKQTANKPYGIEFRLPREGEICDDGYNLSAGQHKFSVLFALNQTAVPFTRFSSVKNDFDGSAMQNDFLRSNGPSFLSDYADLWLLGLDMLPMAHQTEQQREQLKMKLFISRSSKCSMEAWLFRSNLIPLKFVQASHSLVPSDPKMQFNGSLCKPNPTEDVYE

SEQ ID NO: 150424 - protein, 52 aa, Heterodera glycines
MVHIKSIMKKEIVLAIEKVISAHHPYPCYDEVRKVQVIKLKANDYLKKLKAK

SEQ ID NO: 150425 - protein, 101 aa, Heterodera glycines
MMTLLEQLPGGGVVTATESPHQIGHLHHHHQQPQQQLKAQSASSNGPSNNSAAGSGHGQSPGGGILLSATSTPDGTLMPAGTTDHQTAGGHQNVAHMGAGP

SEQ ID NO: 150426 - protein, 91 aa, Heterodera glycines
MCSPGSSSNSATSSSLYNNNNQQHQQQQNFALSITNNQQHHNNNMEQHQHHQQHNHGNSRPSAGGGGGGHHHNHTREKKNNQEERVKRPMK

SEQ ID NO: 150427 - protein, 106 aa, Heterodera glycines
MAVENPKMHNSEISKRLGEEWKKLEELEKRPFIDEAKRLRNEHMQVNFKTGNFTGPSGLQIQAQTEGQAATAPTAAQQPSPAAQQQQSSCQEKWCQQSATPKSSSS

SEQ ID NO: 150428 - protein, 104 aa, Heterodera glycines
MSEYGKNCIQIICNTCTPVLASFPSKDATKKVIKRLRRDENAPRVEPLNLEQLEIPNTYRVYKRTEIDEEQFLLADTGVFQIHGQNGPQPKISFKPLNDGHLHY

SEQ ID NO: 150429 - protein, 94 aa, Heterodera glycines
MNYMKAKAPIRIHRLHLITMRIINTFRIENAPTSFYHQKEMITNCQEVMNESNQNFSIRKCGEYMREQLREDSGAPMKTKLTAKVMKKRKTDAK

SEQ ID NO: 150430 - protein, 136 aa, Heterodera glycines
MTPLNSFIFITIFAPFSGIFLFGQSPGCDQNTFVSNLASILHCMGVRYPILVHMENSTRAKLDLNALKKMKCDWPTQPLDGYLLHCARDNGIPLLDGRNLDMKRIIAMRDIKELTESHGILMCTLEPLRRQGLKRE

SEQ ID NO: 150431 - protein, 281 aa, Heterodera glycines
VCAASVALTGRRKSAPQMSAPQMSAPQVSAPQMSAPHMSAPQMSAPQMSAPHMSAPQMSAPQMSAPQMSAPHMSAPQMSAPQMSAPQMSAPQMSAPQMSAPQVSAPQVSLLAPMSATQMSAPQMSAPHMSAPQMSAPQMSAPQMSAPQMSAPQMSAPQVSAPQVSAPQMSAPHMSAPQSAPQMSAPHMSAPQMSAPQMSAPQMSAPQVSAPQMSAPHMSAPQMSKPQMSAPHMSAPQMSAPQMSALQMSAQMSAPHMSAPQMSAPQMSALQMSAPQMSAPP

SEQ ID NO: 150432 - protein, 106 aa, Heterodera glycines
MYNRRMRKIWICNDVWVDIFPFFDRPQLGLKLAMLSPRFDALVDKYFDNKKELTIWKSITICKDMNTDEPVLDIISKAMPWPLPLPERPLPKNIRINYLQIKYLLI

SEQ ID NO: 150433 - protein, 84 aa, Heterodera glycines
MDTGGERSSKHLMPNGEDNEQQQQQKMPKVVEVEKFPAAVDSSPSVAADNLVEGQNDHQQQDNNEHLDRVIITDTMNELVEVMD

SEQ ID NO: 150434 - protein, 117 aa, Heterodera glycines
MPKRCKKKDGTLREAQSAKVEQSLRELKQMLSDLCKSDRRLRRKLRAAAQRQQNHHSSSSSSANSDNEFLDEEEVGSEEEEEANGYENNGEMRGGSEEDEGREEQTDEEEEEEEHAK

SEQ ID NO: 150435 - protein, 78 aa, Heterodera glycines
MNETTTIPGVHNRKFANQKRRTPNTTEDEERRKKERKRKGRKRRDTSEDSEEEDEEWHESGRREEEVLFWVFGFSSSG

SEQ ID NO: 150436 - protein, 90 aa, Heterodera glycines
MEVVPGRCCHFSLFCLALPERLLTDAFQFVRRRYPAATAGGRGPTDASVDDGDEPTAAAEGTCPSPSPTPSRRIHANTGHAQPTAAATTG

SEQ ID NO: 150437 - protein, 69 aa, Heterodera glycines
MRFILLSKDPSNSRNSGRDHNFFEGLYFEGEIPRGFVLLLIWKILKAEEKSLVLQLVFGNLWINNQNFL

SEQ ID NO: 150438 - protein, 26 aa, Heterodera glycines
MISTEIELPMPQRCILGCPDHDEGVI

SEQ ID NO: 150439 - protein, 160 aa, Heterodera glycines
MRPARNIKVLFCRTTLQKPISNVSMLFTRKFLEITVTLDKKDIANKRAVPPKSVVSASDDLSNSDKRVKKPKAAERVAKDDYDEKDDLGEEVLCPDKCVRKEDVEEKIDEGQRHFGTFTLPGVLLQRKCRAFFALEEPTGKFLKVQLKVEHKWADTSRGN

SEQ ID NO: 150440 - protein, 395 aa, Heterodera glycines
MPKIALGTRADSGESERQSSPDTPLGICLDPHEANYLDVAVLRCLLIRNWAEEGTFWAVQYLLGRLIAMRQHRCTHEGTFRSRFNSDSATIPTRKTSKTEAATIDTKGYLTWADLQEHNGATFSGGTKRTDKMQPKDTREERTDEAVAGRTGKGVAFERDEMQLQQRSKSDGKQQQRERQQTLGAERTAERRRRISLSAMPSDGVAMLPGTTSGSMPRPSISSPRRMQRASSIPASFPRLTELLQGFASTCNSPAMQQRRRHEQIAPEKTESKRKNSHFFTEAIGAASFIEPNGHLSFPIVLKVLGTLMERCCVVRVSEVVLTGCDTFLNMPGSDAAELFPKVLHIVLRISLQLGCSNGCNEGVHTPQAEFLRIKVRNLIAQMHRTKSVFGDKMA

SEQ ID NO: 150441 - protein, 269 aa, Heterodera glycines
LQDASCMTFERVIVQNILHTFERVIVQNILHGISPSLSDAIGSVSRWSLVRAAFPHIVQCCAALLTERCAECCAALLTERCAEEEDVPMSGSLVKSLYILHWLLIDAAAECNENKVKLTQSKILITFHVSSVQLFVYLLAPLFDIVREDEIKGHYRLESGVRLWQCLWQSRLPELICFCAPVKQRRSQMPQMNILRLLGILRLLGFSTAAEQGIYIGDNKPSASLSSLIPPPKPPLIPPPKPPRTDAKVLKELEEEEEEEEPLSPDFLP

SEQ ID NO: 150442 - protein, 196 aa, Heterodera glycines
MSPNDMSRTNYAVVSRCRIGKTSAVHNQIGAFNSGINILSVNLVPYSVNDHPAVLALASLCPIFWSMTRGVAQYCAHLAKNVAQYCAHLAKNVAQYCAHLAKNVAQHYLHLSSGVAQHCAHLAKNVAQHYLHLSSGVAQHCVHLAMAATKGLYRIVMLESLDVIWPRLDSWKRSPAWFLGSRSEARGQFLNREKFS

SEQ ID NO: 150443 - protein, 114 aa, Heterodera glycines
MEPSLLRYFCPRQFRRLATTSFCTLSPRHRIIAEGGMPPLEYEFEREKWAMGERFGRYGLRGGVDISKLWPTVEEIEEVKAVRRFRTAKEAQHIAKMESVLELKKSKITSISKQ

SEQ ID NO: 150444 - protein, 285 aa, Heterodera glycines
MALYVALAGIQPSWCLPVQIDVGTDNQSLLNDPFYIGLRRNRVRGEEYDQLIDNFMNACRKKYGQNVLVQFEDFGNKNAYRLLERYQDEYCMFNDDIQGTASVVVAGLLACTRVTKLRMRDTKYVFFGAGGGTALFASGSPFKNVELGGKVYKPGQGNNAYIFPGIALGVILFKVSTIDNKLFLMAARMVAESVTEKSLADGRVFPRLKEIREISIRIAMRVAEECYRDGTAKLYPEPTDKEMFIRSQIYSVEYGELINETYDWPSHDMKHGFPVPVVRRDSMDD

SEQ ID NO: 150445 - protein, 131 aa, Heterodera glycines
MLGLDPEQLRLYKLYRPERLTPSVRGVDLLKNPGLNKGMAFTLYERQYLGVHGLLPPAFMTSEQQEYRVITKLRKQPDDLARYIQLDGLQDRNEKLFYRVLCENLKELMPIVYTPTVGLACQKYGLIYRNP

SEQ ID NO: 150446 - protein, 105 aa, Heterodera glycines
MDNDANILETEFCRSVIRSCAKLAYEHAQDIIDNPKKQFAIAEMPPIHCDRKIRDIKQGAQRCQLSGGRVHVAVDKCALLGIKINSISSKTLADSLKVYEHREEY

SEQ ID NO: 150447 - protein, 249 aa, Heterodera glycines
EFGVHQTTVLNYLHQLGFINKKGAEVPHALTQQQKHQRVVTCTELLARLSAGMQLSQLITCDEKWVYLNNKTAQKQWLKPNELGEPTPRRLQHAPKVLLCVWWCSSGLARYELVPAGQTINADIYQQQLQRVHDQIRRPPFSAKFRGGVFLLHDNARPHVAFSTQQKIEQLRWAVLPHPPYSPDISPCDYYLFRSMEHFLRGKEFADQNEVENALDDFFGSKNDQFYKKGIEICPNDGGGSLIKMYIID

SEQ ID NO: 150448 - protein, 317 aa, Heterodera glycines
MSCNSKPSAECLADRMKPAWEVINSSNPIVVSDVEVVPFKIMLSYIYTDQSHGINGDNAIAVLHAAKKYRVNGLVKLCTNVTISELSDVFFALAQAKLLEDEALLWADEKCRQNGIDCSGDNRRAVLGPALFQIRFPLIPKEDFSEQIVPSGVLTNDEMFAVLLYHSSREIATECQAPSELKFATIRRNYICKRTFLVKIEQFSALPRASDKNYEPIDSAVVDIKGIRWQLDYSFFLFQVNKKSGYFRLSLTCNQNEKGNTQLRNLKVINCAITNTIKLPIGSAIVGQSHEQWHNKKRAKNALSGREMTFFVAAGQT

SEQ ID NO: 150449 - protein, 70 aa, Heterodera glycines
NAPHSMAQLYCPPQLVPVPGEGAIPYRYCSPSAPINDGIQGCGINRHCQYSTTLERYICYGLESNVRLPN

SEQ ID NO: 150450 - protein, 98 aa, Heterodera glycines
MSTEISNSKLVLMILMTHLPTFHDQRHKQSSDAFAGDHFVGQCRRLSDQSERLSVGLLLPATARLLCPRLAIHFHFRLSAEHLLSRQRTDSFCEQVEN

SEQ ID NO: 150451 - protein, 21 aa, Heterodera glycines
MKKKGWPAETRGVSEPNFVGG

SEQ ID NO: 150452 - protein, 47 aa, Heterodera glycines
MPLEKKKKRGAKKCLHQRMARQIFGGHGKGVGTEANSAAKSIDRAKV

SEQ ID NO: 150453 - protein, 90 aa, Heterodera glycines
MGNGIGRNEKNGFKVGRYGMFGVRTYFICELCDQKWICRENGFTDRLYPCVCVTRVRHLVDAPLGVLSEQQTCALVHQQRGDRTELTLFE

SEQ ID NO: 150454 - protein, 300 aa, Heterodera glycines
LPPPLIISSFARLSSLHFPINWASSAIAFLCSFPSLFPPTVCVSTRTALVLSLSMPPPPSRTYRTPNIPYLPTLNPFFSFLPIPFPIFRIPAAPPAPLRIHFPLLFSYGPCAPAHGPVGWYKCLVVCLSAPPIAALPPPPLAPVPPPPPAPAGRLIPQALPGAPCEPGVECTGGSALPGAPCEPGVECTGGSVCSMGICLCPPELVQEGTVCVSRTIYLCPPELVQEGTVCVSRTIYGVVPPPGGPPPLPAAPAYAPPPPAPVVQFAPAPCVPAFPMAAAPPPLPACPPPFRAACVARRS

SEQ ID NO: 150455 - protein, 193 aa, Heterodera glycines
TLPKIEQLCSELLVNEQLEKISLMSREVVQREMMHDLQNMYILLKPLSNALPVLMQEFEIYIQKSGMNCMEMTINEPAEFVSNIQLLHEKFTQMISTIFNGDNEFVAGLERAIQSVVNHRDDPKQPPKISEKLNRYIDSLMRTNSKRGKSEQELDALLSKAILIFRFIDDKDLFQKFYSKMLSNRLVFEIKLP

SEQ ID NO: 150456 - protein, 69 aa, Heterodera glycines
MTRKSKNMLIFMDLVLLHFLTFCHGFGSARPVVNYFDFFPNNKYYSPSIFWLLLNFLNFLCLMIISLIF

SEQ ID NO: 150457 - protein, 150 aa, Heterodera glycines
SQKHHRSSSMFDQKCSLTSNANGLPNSHKKINPILRHWSLVLPLIMFMRKTHWSPAKRRCIDAKFFESNNRGEWNFNGNHARRLLCGRGNFKLENMFKRFFSIAPQFHRAQSDCEALLQVCLSYGMDFVKFVDRNCSSFPDCFYTSSKKT

SEQ ID NO: 150458 - protein, 131 aa, Heterodera glycines
MNNFGQQISQNPCRRRGKLATEPHSPIVLDEIAGQWRKTKQILGAIRLKNQRSHPLEHVLQFEIATSAQQPPGMVTIEIPFTAIVAPKRKQSISECLNFHGLKKFGVNAAAFGRRPMRFAHELYRVNIATE

SEQ ID NO: 150459 - protein, 270 aa, Heterodera glycines
MPTDGNRFPKITEMAYMSVPRVLFLEGTEQMSARHLSSMSQDGEESIEPVQVVTNVHVRQLNPQLNDKERFKYEELQRKVPTVCCPGVLLKQSDLTCKCTFAQEWPGVVHLLQTVPKPACLVAHNGLNFDFRILCHELRKSDLFRTHPIPEQVTLKIDWVFWLQLLFNQVYFLDTLSCFYELEKEYNREIELTMENVDWTLVLSQFQPNSETVVATAEIEETVQQNGTASEGTQNSNGHKSTTVLHRLFDQKCSLTSNANGLPNSHKKIK

SEQ ID NO: 150460 - protein, 72 aa, Heterodera glycines
MLNRLSLDDDFTLRLDDIYTVGVVHFKNLFPSNPSPQVITARRIVERSKAISTPTVAQDLASTKKIQQVGIA

SEQ ID NO: 150461 - protein, 65 aa, Heterodera glycines
MSEQHMAIGIYEAWKSYRDPNAIVLMVSNKFSRWHEFIQIDLLIEEISKKKIKIIYLSLFECAEK

SEQ ID NO: 150462 - protein, 71 aa, Heterodera glycines
KKNKIIIYRVGELNFRRRKKYGRHNHQATDAHIGFTFFENDIEKAKRKSFISRPEASFSKNKKKFIIQRGG

SEQ ID NO: 150463 - protein, 204 aa, Heterodera glycines
PPPPFAADFDDTSSMVCQWMFWLLSWLLLLFTFPVSVCFCIKIVKEYERAVIFRLGRLIGGGAKGPGLFWVLFWVMPCIESFVRVDLRTVSFSVPPQEILTRDSVTVSVDAVVYYRILNADSVTVSVDAVVYYRILNATISVANVENAHHSTRLLAQVANVENAHHSTRLLAQTTMRNMLGMRTLSEILSDRDAIALNLTQIIK

SEQ ID NO: 150464 - protein, 76 aa, Heterodera glycines
MNENRERFYEPGMTQADVAKAAGEEWRRLPESEKAKWGQRSAEERGRQGGQGERRKGHGFGMIKTVPFSDVEEEEQ

SEQ ID NO: 150465 - protein, 42 aa, Heterodera glycines
PPLKEAPETDWSCHLCVKEFGAEASIAKATKSTEDGTSSPAK

SEQ ID NO: 150466 - protein, 309 aa, Heterodera glycines
MPEFQLHGGGGQPNSSSNVPLQQQYFATFHPPQQQSYEAWMSAYQNYMNQMAAAQFYQQQPYTSAAHMAQQQQQAYAFFGGQMPPTVQHHHHQQLFATPMVPPPPHFGQAQQNHNNMMMMAVPHQQHQHQQQQQRADEAPAMVQQQQQQQRMVGGGGVGEAAAAAGAGADLLDIVYKSVRFALLAMVLYVYASLERFFLVLAVVAFFWFVHRRRNQQQQRDNAAAAHENGAIANVLPPQHALPQQNQRPNDNNTEADGPPAATEAEDTTSTASASVPHQPSAWNVFFTVVQSFFTSLVPNPMPAPLDIN

SEQ ID NO: 150467 - protein, 63 aa, Heterodera glycines
VDQRNVGKGDGVRPFGRRVKHRHGIIGGFLYIRQNGSIIVIFRCGNYTFFAFLRIKQFPLINR

SEQ ID NO: 150468 - protein, 80 aa, Heterodera glycines
MIHRFVQEKCNNSIKGVQQNFVLQLKTHLAEECVTKPDPSRQRLIYAGRCLDNEQKVREVLAQRRDGIVRNEVAEKQVTH

SEQ ID NO: 150469 - protein, 61 aa, Heterodera glycines
MPWHFGTWHTHSDNSYPAFINIVGHVLIVEGICATVYVDIYVRCNSWAFTVIWLAIMKLPI

SEQ ID NO: 150470 - protein, 84 aa, Heterodera glycines
MFTVIFAEGLFGGASYVNTFDRIHKTAPKELREFSLSIVAASDSFGVTIAGFSAILLHNHICMLYGTHLYIENNTTYGKRDYRK

SEQ ID NO: 150471 - protein, 173 aa, Heterodera glycines
MLSLNFCEKQNWQMQGLQQREFKPSEFLPNTFSDDIGSNNSGFYELKFGVSFYFDWSIQLSDSTNITRFIFKCLITHQGRSSNSGHYVAWVRVGDDDQKPNTTKWVVCDDNNISPVSEEEILKLSGGGDWHCNDMELIAFSHSHTLRCLCSYLRTQKDSEALRAERRVKFDVD

SEQ ID NO: 150472 - protein, 316 aa, Heterodera glycines
MTQKELTAELIEQWGREPNAHQKLLFLNEMTQSFPNGTFPLIGIDRKKLFLSHLFDTWALASEQIRLQQLHFLRIILRDKNTVDLDCYISILTLLSRLAKLSADYFEECKSEPIEIVLESEKCLINLLFNSAKARDFFCTQKKPFDRLMSRIRSVIAVFDGSNSLFVGFDYLSEWSFVQVEELLLYDLKIAFITTALVQQLRNECVNDTDKTVVFLSVIICSLDKMSPPMATKCVNEALNTLFNVYHDSKVFELETAKKCADECARIVKSAHLDLGTKQNAVNLLSVLTSALPSLCPKVDTKGAYEGFAAKDGYDI

SEQ ID NO: 150473 - protein, 125 aa, Heterodera glycines
LTRSLLVVTTVFIVLNLPNYVYRISIQFFVISEQSSFQINLSFSSFQINLSFAAHVLLYTHHAILFYIYIFNSPQMRKRLIPTALKLLECYCLKPMRKRLIPTALKLLECYCLKPRHLNDFSDNL

SEQ ID NO: 150474 - protein, 103 aa, Heterodera glycines
KSLESEPKLIELLQKFCKSQFGVCLDILHELRDQMESELVTLIERGQLKAKIDSYNKVLHAKFSDNRTDTYDRIMALRKQFDHRINAILLRAAILNHRIYEQK

SEQ ID NO: 150475 - protein, 194 aa, Heterodera glycines
MLKRQLKLMLVFCCLSACLGMIRKSPPWATGKSNATVPDDENTVATPSKKVKKPEQIKPSFSKVPVEVKIRVNIFCNEPIHVYVAAGDYGKTKQKHTVGRHDIDKTLDASDETKAQPFKDNGRLFVTPEKMEKIFFEMCERFWSSENYHEQKANCLDFVFNFVNTLCEGNAPKKTVNLRKGTDISSTGTACQCK

SEQ ID NO: 150476 - protein, 26 aa, Heterodera glycines
MTNSMQANTIKCWTPTYLSRHKDVKF

SEQ ID NO: 150477 - protein, 69 aa, Heterodera glycines
MSRIALLVLLVALFCACALVDHASAQYWGGRGGWGGRGGGWGGNRWGGGWGGNRWGGGWGGRGGGWGGR

SEQ ID NO: 150478 - protein, 40 aa, Heterodera glycines
MFPHTLLAIVLLSVSLKCSVAQWSMMGTNPMIGMGGWGES

SEQ ID NO: 150479 - protein, 326 aa, Heterodera glycines
MSPRLFVLQRHPSATVPMREGAGSVPGRRVHRREFRLRRVPTGGKQKVDRQMRRVRPFAAILALRPNVAVSKICRQKHLSEGPNVWTDRQSHRSTVKSLKIHPTLSLFRSSLGPCRFCPQLSSSIVGTEIEAKKQQRTDIYPLERLLPDNFNPFEGQGVRHRRCVEGERIVNRHDCARFMECVDGDWFSLSCPLGHYFSLENETSKFNEIENPGPLIQGCLLASSSNSSSAAIPMCNELLTVAEKATSITTELKDTNSKSDSAGAFSFCDANAAKRLPNAYDCTRFRECALTGADIRGKAMRTRHTIRPDIWAVHFQVTKCQSEFE

SEQ ID NO: 150480 - protein, 287 aa, Heterodera glycines
MLASNDILVHFDLEKPLFLATDASDYGIGAVLFHKDAKTGKVGVIAYASKTLSSSERKYAQIEKEGRGVIFGVEKFNQYLYGRKFTLQTDHEPLKRIFGPKGQMPVVAARRLHRWSLILMNYEFDIEYCSTTNFGHADGLSRLPTPEVDKICKESFDIGEIQKECQNALPITANGIAKELRKDPTLKIVKNFTEHGWPTNKQIDAEIRPFYVVHDEIEIQNGCLMLGTRTIIPAKFRGEILKLIHETHPGIVRMKSLARQKVWWPGIDKDIEAIRKNAKFARKMLQK

SEQ ID NO: 150481 - protein, 428 aa, Heterodera glycines
MPKIEMDKLGEESFENEFNEEADQNVSSADHNDSANEMESQKKLGEKRERMEKSKEIKMELIRNFDKMRKEKIYGFNYDKKKRNKIENEIAIEIGINRNKIYKLKKELGQKRVKTEESEETKMELIRKFDKMRKEKIYGFKYDKKKRQKIETEIANELGINRNKIYKLKKELGQKRVKTEESEETKMELIRKFDKMRKEKIYGFNYDKKKRNKIENEIAIEIGIKRKKIYKWKKELEIGIKKKVSTQQQIEKVKEFEKVKEEFAKNFNLEPNWKIKEKIAEKIGARMNTISAWKRKLDSIAREKKRYSDAEKLEYVKRSEEIRKSNPMMNFVWFLGNLFTVVIFFFIQMKFMRLCFAIQLLIFPLRELLFIRKPNKKLTDLYPLDKFVEPMTYHYCIHVVKKDIILDTDVPRNMHEHLMNLMDRNGNC

SEQ ID NO: 150482 - protein, 55 aa, Heterodera glycines
MTDVLLIGTQCLPAVRFGEKAFPIKINKIILLAYYERKHYGRMNYCKKVKFTKEI

SEQ ID NO: 150483 - protein, 175 aa, Heterodera glycines
MTSHTPEWKNLAAGGSHGIRSSVLTSLNGTTPSRNPNYVKGKVNEGDRYLCLRNSNLIDWSKTNCVAVGLGSKIFQWNAGTGAVDVSSFTVFSTKSCEFKEIKDFSETHSHPTLVKWSCEGQYLAVGFNDGQLKDEVLRIWHVWKMDESMRKQTQESVTANARKQLQGAAGNIIR

SEQ ID NO: 150484 - protein, 155 aa, Heterodera glycines
NSTDVGVKENSAKTNDPNKFEKAGWLYKWTNYVKGYRQRWFVLNAEGILSYYRHPSEVNRSCRGSHPSEVNRSCRGSINLSEANIHSNQGESSIITTPSAQTFHLKASNEIDRSQWLKAIDRSQWLKALEYAKHRAIIQAVSHEEDEEESQLLLN

SEQ ID NO: 150485 - protein, 60 aa, Heterodera glycines
LQNIRPSRQIVKVFVYKFLKLDGILVLRLIDSNTGQIHMADIVHQLWLSFNEKSYFKETS

SEQ ID NO: 150486 - protein, 184 aa, Heterodera glycines
MENDKKNILERISEMEKQTKKKVFLKFQENCWDAFACHKDIQISGDKSLIVQHKGNTFGISVFAKCPILLNKHLSDFFYYEISVMKKKNWVIFGFAVKQQTKLDESIQLEKGTYAFDNYGFLWINGKGKGANAEYSYGVGDTVGIGVNSATRQIIFTKNGLRLAAADQFSKILEKITELEKDGS

SEQ ID NO: 150487 - protein, 187 aa, Heterodera glycines
MKVAELMCIKTALNEFIAYQRLAQMVANGTLNGVAFRSFVSGICTSFLTTCVAEVNGDAISLENDGQLFDGNSETITDQQQQLKEFHEKFAKLETELKMAKLELENKALEQKLMHQELVGEQKALKEKVVKIEQKNVSGDHLKAILERIGELEKQQQQQTKGEANLTKMKFLGFSLVTAQLDIFRIL

SEQ ID NO: 150488 - protein, 183 aa, Heterodera glycines
MTPLFLAVRHANLPLCRVLVARGANIDLGTDFATTPLMHACKRSQTEIGFHFALKSAAMGGSLEVCRLLVEEWAADVNQQTIQERYTPVICAASKGHLAIVNFLVEHGADLQRVDVDGHNALMWAVKFGKIEMARHLVAIGADINQRNIEDSKTINSRCDSTERANQWPKAADGFLRKTLIDH

SEQ ID NO: 150489 - protein, 122 aa, Heterodera glycines
MATSNNCLEKGADPNEPIIFETHDHRTMNFLIEHGADLQRVDVDGHNALMWAVKNGKIEMARHLVAIGADINQRNMEGKRAQDFAEESGNAEMVDIFRATATDNGRHAAEGTDGQQNDQEQM

SEQ ID NO: 150490 - protein, 170 aa, Heterodera glycines
MNREFLIYIIIKTNLNFVVPEKNGTLDTLGRRYLYSFYWSTLMLTAIGEVPWPIKSVEFVIVCADLLFGVLVFATTVGNVGTLITNAGSARLDFQTNIDKVKSFMKHRSVGKKVFSPKDYVCRKGDVGREMYIVKKGRLQVVADDGVKIFHTLVEGAVFGELSLLNIPEL

SEQ ID NO: 150491 - protein, 717 aa, Heterodera glycines
MSFPFPEEQNCTLPVETPPLTVKSNLYIPIRIPRVFPAFKCWNITTIACTESFLRVITLDHPDKKIETEASVEDCQASLHHLPMNRVSETRWESLSPIQREYGWYGVNCFDNVQTIVEEGTAGILEGKRLITSWGDSLKVDKSLGEEGSWIRLPGAMELLMWRIPSEEFWHSHFAIGPVVTEIWPNKAVVVDELQYTFPISKNQERKFPVIGVPNDALKTENNVYVHVIGKVNSTKITRARRDANPKKSNVPRANPTKKPNIRRNQNDGLPSNSSVSTMAIPTTTIPVTTTKIPTTAIPTTTIPVTTTKIPTTAIPTTTIPVTTTKIPTTAIPTTTIPATTTKIPTTAFPTTTIPVTTAKIPTTAIPTTTIPATTTKIPITAIPTTTIPVTTTKIPTTAIPTTKIPTTKIPTTRIPVTTIRSSSALATPQSSTDTTNNIPATLKELNELAQQITDDDVLRHSAPTPFIIQNEPSEESPTTVITKREVSESNEVGSEKFWKEKNLYHENSRLSYLGWKTHRVNIQNAREKWISDCHERNNALAIAKALARQMPEDAARSLYKRDDITAFWTQPSREQKWSIALCRQMKAEEVFWDQKVETKCFRELPVKVTRQILFVKPGTRDLTYIGTEISCDAQGNNPWAAEHSNNNSELNNANLGHRFITDQYSNAQNPLIFFNRGSIFESEQARLERNLKELTERITRPELDFPEIGTIDANQT

SEQ ID NO: 150492 - protein, 185 aa, Heterodera glycines
MSSSIASPDTFLRSETDQTPAASAAEEVGKYEVFSWHGNLSDQLSAELFVTDQQLLKECREKLAKSELKETKLLWNNGELNAENRALKAELEKQKLMTEHIELKAKVFNMEQEKQQFEKKYVSVDVFNSLAERIKRLENQQQEKREEDRNVSVGQLLEKFLAGEKQQKQQKKDNAQQRLDGKCSV

SEQ ID NO: 150493 - protein, 386 aa, Heterodera glycines
FSNLKSVPSNSFVRRLAVCLIEKIDGNFVDFCRLWTKFLQILRHHWEYNLNLPKSVSPMPQLSCCLLHQKLQMINFPQLSCCLLHQKLQMINFCISVKKRKHKEMEANETENLGGSAKDLPANRNTAGKFGEISGKTDRRQTDFYDEFFDEFFDAIESFDQFDVATSSECPRGRSLPDSNEFLKSNPNQRIFVPFTQEEGPMTEDQIEQREEEGPMTEDQIEQRESFLCNLEDANLRTKAQSELLLSDMQAFKAANPGCELVDFLRWAANPGCELVDFLRWHSPRDLTEGEGEGERIFDNDGSNRLRGELSDRMKIAGNFWQETWDSARAIPATQQQRLFNETREVEQILQYFANICIKELVELILQYFANICIKELVELLLPIVS

SEQ ID NO: 150494 - protein, 128 aa, Heterodera glycines
KRTDKSSAVVSGAIRLHIKVDINGEERLAPFHLQYTCLHEHLFLVRYTHATNDLPLNTYDTAWTLYFDENGQQIVDEFAMRYGIEQIYQAMTHFACLCTKYMCDGVPAVLSMLLANINAHFAHATANV

SEQ ID NO: 150495 - protein, 118 aa, Heterodera glycines
KQLVYRKCLQALIYPISATTTPHNFCTTNFQQTPPIWCYECEGLLWGLARQVIRDRMKAQERNKPEVFRRISDAFSVDDKTQQQVGPIGGRVDGVLESVLEINIPKITQLWNLENPGE

SEQ ID NO: 150496 - protein, 447 aa, Heterodera glycines
IRWVHRWAWTSRRLCSSTKIIYEQNGNPAEVLKLSNEKIDQNAIGVLKLSNEKIDQNAIGANEVFVRWMASPINPSDINQIQGVYPIKPPLPAVAGNEGCARVEIQGVYPIKPPLPAVAGNEGCARVEKIGSNVRELKVGDIVLPTNAGLGKIGSNVRELKVGDIVLPTNAGLGTWCTHGIYQSTQLFPIDSSLQLDSIATAMVNPSTAYRVNPSTAYRMLHDYAKLVPGDIVVQNGGNSAVGRFVIQMCRNLGFKSISVVRDRPQINEMKDELKQLGATEVFTEEEFAKAFAKAVKSKIGAKLALNCVGGKSTTYLTRALANGGCMVTYGGMSKNPVQVPTSSLIFNDITLYGFPTSSLIFNDITLYGFWMSRWYNCGHSEKERANMYKVFDDWKERANMYKVFDDWYKSGKLSTPPFRKWKIEEYKEAVENAMEPMTKFQHVFAY

SEQ ID NO: 150497 - protein, 50 aa, Heterodera glycines
MEFLRGLCPAFVVFAAAVFVLSVHFEQCAGRQRWAEVTHRVDFVAKVYAL

SEQ ID NO: 150498 - protein, 221 aa, Heterodera glycines
MRKGNQFGFYFSIVDTKCQRSCDLSARCCDVSPPPPPMDRRRRHSNELRQSLEKGAEGQGLLAKRTNSIQQLISALSENSPPSPKTRIPALILHEWNFKEYPVSDIALKFLLDNADQPVFDVRLVNPGLYRRAKNLRKFRKLRVKISHMWPFVQMCKLAAELMTENGILRTMFASVPKRFLSLESVDVYSLLDFERIANKNLIELVEPLALKGAAHIENCE

SEQ ID NO: 150499 - protein, 137 aa, Heterodera glycines
MGAAIEARLEVCRLLVDEWAADVNQEAIDGTTALIRASDEGHVDVVNFLIERGANLHHTDMDGYNSLMCAVRNGKTEMARHLVAIGARTDQIGTDGKRARDLAEEGEIAEMIDIFRPAAEQRENVDGQQNEHQQQRM

SEQ ID NO: 150500 - protein, 165 aa, Heterodera glycines
TQPSSIQSLGLNPPTFQSLGLNPPTFQSTGLNPPTFQSLGLNPPTFQSTGLSPPAFQSLGLNPPTFQSLGLNPPTFQSTGLNPPAFQSLGLNPPTFHSTGLNPPAFQSLGLNPFSRIQITGLNLINPSSTQLPGLSSPTFQSPELNLSNGIQNYLKGIQKLKYNP

SEQ ID NO: 150501 - protein, 21 aa, Heterodera glycines
MHHKISKKARYRFFNASFICN

SEQ ID NO: 150502 - protein, 39 aa, Heterodera glycines
MTAFANASSPVNFIVICFQLSADSVVPFDLINELIVDKD

SEQ ID NO: 150503 - protein, 21 aa, Heterodera glycines
MNEQEIQWKWIDLLNSCFGLN

SEQ ID NO: 150504 - protein, 142 aa, Heterodera glycines
MKCRPRIEEAIRFAFSSVRRAYERRQLSTFFEQNKINLSFPPLSTKRSGPSASAAAALAILSLATGRPVQAGVCVTGKVTTIGHISKISQMKEKTIAAAEANMVKMAFPRANLSEFKKVPYRTRKNLRRKTLNKVDDLFSLY

SEQ ID NO: 150505 - protein, 149 aa, Heterodera glycines
MHPLLIYGNVDPVLKEAIRFAFSSVRRAYERRQLSTFFEQNKINLSFPPLSTKRSGPSASAAAALAILSLATGRPVQAGVCVTGKVTTMGHISKIGQMKEKTIAAAEANMVKMAFPRANLSEFKKVPYRTRKNLRRKTLNKVDELFSLY

SEQ ID NO: 150506 - protein, 61 aa, Heterodera glycines
MRSFFFASLALVLICASTTVSKPHATPAHLSRPMKKVAIKCALSLCASTFALRPRLAFFCL

SEQ ID NO: 150507 - protein, 61 aa, Heterodera glycines
MRFTAPTGTPIINAQKLNLEHLLFSLCPNEILFKVFYYFNFFSPLAKFAWAQLTLLAAAAT

SEQ ID NO: 150508 - protein, 78 aa, Heterodera glycines
MIGVDEHALTLITQELEPETLQEARFFADTVKNGANKLRNDCNKMFELQALKKHDSSFSSDLKTIHAQVIKAAENASA

SEQ ID NO: 150509 - protein, 58 aa, Heterodera glycines
MSEADSESKYGAVRKQVSKGRKATEQQMPNKNEMDGLPTKKKKPIPAHGTLKILFEYF

SEQ ID NO: 150510 - protein, 66 aa, Heterodera glycines
MVMPSLVIIVSTSTSVPLQERHRPASSKGRKRGDERRGPLIVIPLVQKIVFTYFIHFLLTNYQLRK

SEQ ID NO: 150511 - protein, 148 aa, Heterodera glycines
MAINMQDKKGLLHQILGEADITITTSGITISGPRLSSPRFLPFDEAGRCRSCKGTEVEVDTMITKEGITIWCTRFDKVQFVPFDIIYDLPGHCFFRVKNKARVFNIPYGELPAITFPKHQEQQQQQQQQQKNDLRQKANAALDLMERD

SEQ ID NO: 150512 - protein, 47 aa, Heterodera glycines
MEGQVWSEGTISLIKVEKNDLNNKKITGETRRSINYSKEITATLNYG

SEQ ID NO: 150513 - protein, 657 aa, Heterodera glycines
MSDNPEENDKEEVMRTFRKSLTFKEGRYECGLPWNERVKDLPTNFQQARARLCGTVKKLRELNLVEEYQKIFNEWERNGIIERVPDPTQSTGPVHYLQHRPVIKIDKATTKIRIVMDASAKPANRKGAPSLNECLHTGPLLLNELTGILLRWRRMKDLILADIEKAFLQLSVREEDRDATRFLWLEDPQKTEISSPTYVRTVVFRFCRVSFGLTTSPFLLNATIREHLSFYDTVLPQTIMENLYVDNILINVKKNEDMAQICHESIELFRQGGMKLQEFFCSKPIAIRSLPVELLAKNQREIKVLGIPWTNEDDEICFRFKKFAGKHTKRNILAHIAKIYDPLGLVAPAVLPAKHFLQKRFEAKNGWDEGLEEELIHEWNQIMETWQTREGTEVQIRFARRVDNEDEVDKEMHCFADASGKGLGVAIYIRESTEKMSANLVFAKSLVKPSNISDVAATIPKMELQSITLGVKLLKYVLQHLKFKPSQTTIWTDSLCSVERIKEHKKCDRFVSNRLAKIRGQFEIKHLVSADNPADVASRGTTPRELSRNLLWKHGPKWLSEEKALWPKPAKVYHPDEEKLRGSAEDEEIKTAAVMNGVPFQPTIDMNRYSSWKKAKTVGAYVLRWIHSVAKNKYNGNLLPILSKMGPKKHWNQDKGV

SEQ ID NO: 150514 - protein, 177 aa, Heterodera glycines
MMVSNPSKWLDPLHKAGIDQFTFHWEALGEDEAVDTLIDRVKSKGIRCGLSIKPMTPVIHGIEDNQWDESSAGQTDEVLRKDRHSTHNVLTVEPGFGGQKFMQDQMEKVRQLRKAYPNLDIQVDGGVGLDNIEHCANAGANMIVSGTGIVRSADPRQTMQKMRETVEIASSKETLGV

SEQ ID NO: 150515 - protein, 99 aa, Heterodera glycines
MSLNGKDALGKSNIFMDRGTYLSLDAKDALEILTKYLRIGLALDAKDALEILTNQICLRTGIIFVHWNCTVGDVQPIKSLVVNRSMKSKKHFYISRNGI

SEQ ID NO: 150516 - protein, 217 aa, Heterodera glycines
IPTVCQTERFRVPILDGVLPQSVSLNSNGRPIFLGIEYSRTQSDSLNAVSADVKVLFRLHASVDHKAFYGLNITNSAILNNTGNGGVLGIQGQICPSVHKYIRFSKSVLTIQGHIKASQIRDRFALHNVSVEGNQGLAGLLVQDGAADVWLNDTSFSWNWGDVNSDWPSVSLFAGLSSFAKVLINWVEFSDNIYHPHVEVFACQSANQRLMHVDLSG

SEQ ID NO: 150517 - protein, 112 aa, Heterodera glycines
MFTMDDLLQLANGRLLADIEAIVRIFTAHITEECEICRGNAFFCELCTDNQRIYPFSENVAICKSCCAVYHRPCFDRASKRCPRCLRRKARRKAVMEENEGDEEEEEDGQQP

SEQ ID NO: 150518 - protein, 102 aa, Heterodera glycines
MFCYFLIAFLLLVLAKGFEGYTFSCLDGCECDTDDELISVIFSFVMSPIDPDKMALLKRLFPVLGKHLRKGDCGKIGVIGGSPDYTGGILQRNECIFMAFPR

SEQ ID NO: 150519 - protein, 151 aa, Heterodera glycines
KIDRVLVANRGEIALRIMRTSKQMGIKTIAVYSDADSKSLHVQFADEACRIGEASALRSYLCADRIVQAAAALSAGADAIHPGYGFLSENANFAEQCAANGLIFMGPSAEAIRVMGMKNTAKNIMTEVKTMPIVSYLNHKIKHQHVAILAD

SEQ ID NO: 150520 - protein, 411 aa, Heterodera glycines
PRELAQDFANFCLIFLSPSKVEHPITEAITGLDLVQWQFLVAQGDRLPLTQQQIALNGHAMEARIYAEDSEAGFMPTARIYAEDSEAGFMPTAGHLEHLFFPSSMPHLRVDSGVHLEHLFFPSSMPHLRVDSGVREGDEISVHYDPMVAKVIAWGADRSEAIRRLDEGLRQTRIGGLRNNVRFVRACLAHERFRLGDVYTDFVAEHIDQLLPLQIADCGGAWAGKCWWIACGRTRSIVAVQGSLFIWMFLKKLCGSNEALLQCTRQKRTRRPFYASPAFFRMNHSRRTLRLDAEQSAEVEIQGRTLPYQFEGIVVSISGAVPLLDGVAGKARSPIPGLVEKVFVKADDPVVKGQPLVAMSSMKMEFIIRAPFDGTAISVAPFDGTAISVFCTPGQNVAKDVVLLLLNVAKT

SEQ ID NO: 150521 - protein, 277 aa, Heterodera glycines
MKSNSKTADIGDFYEILGVPRNASEQEIKNAYRKLALTYHPDRNPGNEQAQEQFKKVSIAYSVLSDPNKRRQYDVSGPSMAMNDFEGLDISELGGVVIIRCKSLAMSKFKLVLFDQEGAVRHIRESQKKKKYTSAELFFVPFQRINISEFIPIRFYMEDKDTPLPFHFLDTLETHGANVMELQPGKHILCVYGDNFLRMPVLASKKSEMQEFQKEYMDLKRKWEAAKEKLKKEEEDISSCLKAREKAYDELYDACSKPYQSQALTAKPSGFLSSLFG

SEQ ID NO: 150522 - protein, 223 aa, Heterodera glycines
MQDNLSHITEARQAVNALRDENERQRREMLRAEHDRRQSQLRHKMEHMRQMKHEMLLNERQLAIQRFQNNERQIMQQRMLVQQPQQIHQYQMPPMVSPYPHQQHYQQIPNSMPPNTAVTMNAIPSLPQNITTPMPPNEMLTNVNLVGIRAFQSNEHQIMQQQMMGQQPQMHQYQMPHLASPYPHQQQPHYQQIPNSMPPNAITADEQKNQMTGVQEDLLITFD

SEQ ID NO: 150523 - protein, 75 aa, Heterodera glycines
MPHNQNQQQFVAAANPRFGNFRDRLFQAMLVIQNLEEYRERLSRKESAQNEADDSSDGEDTHQGQKLKCCQFANK

SEQ ID NO: 150524 - protein, 187 aa, Heterodera glycines
MKKSGGKRRSNFCSTTFKRLTSEYVPGGVFAKKEPKNKKKKGVEAKKDGQKKGEEGQQQQQKDNESRGEKTTEGKNEDEKTPFLEQEKSEEDSEFVSPPPTVPLAPLPKEENKTDETVQMAEKAQNEGERNCSSRSESRSSSKKDGTSGSEGDDAEEGTQTGTDDSNSWEKLSENSHRSGDGGKKTL

SEQ ID NO: 150525 - protein, 355 aa, Heterodera glycines
MTIFKGKFLNEKELAIVPEGGYERNDRASVFAIKYLDWRSKRDGVRIQHAGNGLEKRWRQFKLDGWIAEQNKCIEVLGCYWHGCESCFKPDDELVDGKTCRELNDATKLRLLKLQEPVPAEDACGEADEEGLDVEEIWECQIREQLKRDDEMRDFFDDLGTDRGPIDPRQTFYGGRTGPLQLIAEPKEDEKISVFDIVSLYPWVNYATDYPTGIPAVIHPTIEEMIVDWTRPEHLQYQGIYRVRVIPPKGLRIPVLPLKIDERLLFCCCHRCAAKFRKLNTRRVHKCTHTDEQRAFTGNFTHIELARALETGYRVDRFWRAWHYDEWWRPAVFLMVPTLWNNSSSSRTSTEESTV

SEQ ID NO: 150526 - protein, 217 aa, Heterodera glycines
LIMDHKIEVSAVIPLSDTAVRVMYKSKKNFVSEHTSSNIVISLWTTSRARLKLLDFMTQIDRTEGAKLLYTDTDSVAVLHKRDIVPIQTGEYLGQMSEEYLDYEIKTFVCGGAKQYGFRMLNKRTGEVEYVQKIRGITFDVNNSKALQFEHFLQKVKNYGRNTGDDNDDAPAVFSYDKIMPTRDSRVITRELRKKYMPICQKGIINEQYEVYPFGYE

SEQ ID NO: 150527 - protein, 186 aa, Heterodera glycines
MLSEEEVRGNSVERTSICGTEGLEDLPGRLAAVSVTPLRTTEQQQHEPDRGRTGSDQLLERRRTRKRDYNLVRVLCRFNNCGPYRLTKQLQKRRTENLAYLSQLDIETVHLRKNIKIIPDALCPIGANQVFAYRGFLGITVQQHLYTRHRVMLKYPTLPCVVQFGGGHHRDIFPIELLRVSKTETL

SEQ ID NO: 150528 - protein, 243 aa, Heterodera glycines
AGLIYELNAIQCFAFGSMISAVDPLITLAIFQALKVEVQLYMLAFGESMLNDAVSIVLATTAQELSSPDVATMSSFAMVQFAFLRFLVMFFASAALGALIGLISALLFKHIDLRRTPQLELALLLVFAYLPYGLAEAISLSGWQLWNGNHRFPVFKNGPQTQGGQGSIMAILFCAIVMSQYTHFNISPITQITFQQTFRTISFVAGSSLCKPCGQRFPTVRPRQSVQQDENFDEKSDHHLVQR

SEQ ID NO: 150529 - protein, 30 aa, Heterodera glycines
MCCLLKGGGAIEKYLLENDNSKNGQLTNIK

SEQ ID NO: 150530 - protein, 19 aa, Heterodera glycines
NYYRHYMIFTKPYKIKKRL

SEQ ID NO: 150531 - protein, 136 aa, Heterodera glycines
MAVLRNAPARFLFCAVVTMTHRSCFNKQLGQLIIWLLCGLRKQVTNCCWQLTVAWIVEIGTIVPTFAMPFLAFCGAMAIIRCQTGKMPWHGWHQIMPETMPTSETITMCNSNEEQQNAIIFTFNVSLLKMAPHLGT

SEQ ID NO: 150532 - protein, 55 aa, Heterodera glycines; identical to SEQ ID NO: 126013

SEQ ID NO: 150533 - protein, 70 aa, Heterodera glycines
MNALETGILGIIGAVYCDYPLLIYTTGSMGLSLWFAETAAEFLLAINRCLELLKPELAYVIFNGIFSLHY

SEQ ID NO: 150534 - protein, 32 aa, Heterodera glycines
MAMFTKPILFSGLNLAWFFNPYVGYTDDFGKI

SEQ ID NO: 150535 - protein, 29 aa, Heterodera glycines
TRAEIYVQGSLLLAFAASVRHWGQHFMCR

SEQ ID NO: 150536 - protein, 28 aa, Heterodera glycines
NPCGNIKARKSSARLCSLCTALGPTLYV

SEQ ID NO: 150537 - protein, 69 aa, Heterodera glycines
TRAEIYVQGSLLLTFAASVRHWGQHFMCRSFYANSGSFLRTRAEIYSAGSLLLAFAASVPHWGQHFMCR

SEQ ID NO: 150538 - protein, 68 aa, Heterodera glycines
FSLSFFHVSLPSVFFLCSFFPLKEPFLPPLKPLTNQFYSPKFVTQFCTLESVAHPSLLIFILYFCPSP

SEQ ID NO: 150539 - protein, 649 aa, Heterodera glycines
MEELLEMYGVRKSGETVAEEGVPSVKNSWASTYLRERKANAQQQQQKTGTNNEKGGKSRTAQNWEEGKEREKQETNTGNEDKQFRERLLNAHQTVDELLKKRGIGDLKKEREMLLRQYEALLAAADEELETEWARMRKRGGGAAGNGRRDSSDSGLSEDYSEREKAPTEGKMEEEEKIDEEEEEEQEKEEEEEEEEDENEKEEEEVKEEEKEEEEREEEEVRIEEKLHKKEETEKVKRQVKCHQRIKEKCEQKIKESEERKVEVTLKLREKKEKEAKAEKIVTEKRRMRKEHSIKNEGKEEAKIKDEEKKREEEKKREEEVRKKEDEERKRKEEEKKRKEEEAKRKEENRKVEERKRKEEKEKKEKKEEEKKRKEEEAKRKEENRRVEERKRDEEKKREEEHKREEEVMKKEDEERKRKEEKEGKEEEKQRGDEERKRKEEEAKTKEEKKPKEKAQSSRKMANVSLQHCSFSLGKESGEKEKGQKEGEKSVRAHFRLTMPTEEKKTTKKTIQVRKQKSGAERTMKERKGREREEKKMEENKEERETDREEKGVKEREEENEEGRETDREEKQVKEKVKEQLTRKKPAKEAQEVRELLQSLRGNLRRTEKPKRQFPVEKQSKTTREKGKRTQRERETMEKGVQAEKQRTR

SEQ ID NO: 150540 - protein, 45 aa, Heterodera glycines
MTRDGKNMDIKSQNMAIKYGLKSRNMDINAKNQPKKRNFGFFAYF

SEQ ID NO: 150541 - protein, 89 aa, Heterodera glycines
MATNNTAKIKKFGKNDRIRCFNIAIWRDVCENIMMRGLRKKFGQQGMLKQMLIKTGSKTLVESSPHDVFWVSRHLRTDICGPLFLDRTV

SEQ ID NO: 150542 - protein, 96 aa, Heterodera glycines
MRESFNYGYNDLQSIFGKIQQKIPNIIGPQRFFNAMFIHNQNFWTSECTIQLGVAYIPIGSMPPFNFVEFYFSDPQPWFFNFRYRLYLILCMLCFV

SEQ ID NO: 150543 - protein, 206 aa, Heterodera glycines
MLRPAHANNEQQQSLCAQLPTNVWCTPSAIGRMATILRQMHAVVSEEMGRELMGRQRLMDHLCLVHGYFFMLRGDFASALEHILFIKTAKTTATKKCATPFSSRKNVSHSTKIAEKCVNDALAMCSPPANVANLMHLLCGVKLTKREQMKCKIFSEKFMLKSRLREGQRNEYRSSFYSMLIILQKVRMFLNRLAHYVFEEVQTNSN

SEQ ID NO: 150544 - protein, 72 aa, Heterodera glycines
MEEKTAAKENGEKRKDEIEREGNGGREAENSFSAKIIMFSGRNKMLYNMQKITSLYDLYPLRYGHFNFVKIY

SEQ ID NO: 150545 - protein, 143 aa, Heterodera glycines
MKLCILFFLIAFLIALIEIGAEKKKFEQNTFDEIFGEKWEEKEEKGNDQNENDQKKREIIEKFNKIKEKIKQKGRKYSRKEWKRNYAEIVKKIRVGQVVIKRWKKQFGMGEGMTEKEKMEKVKIYLQMKGQNPKMSDEKIAKY

SEQ ID NO: 150546 - protein, 218 aa, Heterodera glycines
MASCKSPISLLSVLLIMLLIDPCFNYYFFNPASDDCVVAIRNRTQIPPGLDSYVDLAVRYDQREAAQKANVFRNTFTADCVPGGELGHIWGGFYGCLTFTCTDEHGKDLFRINGCATENDKQCPKFFNTFCRESGGNSSDCRHCDELVDGKVCNSFDQLINLDQSEEQMNSNLKSHSHHSNSSSKAEKLGPASAFTWISSNLLLLFGIEIIITKALIK

SEQ ID NO: 150547 - protein, 33 aa, Heterodera glycines
LPLRWWSTGTASIWRRALPHGDDVEAQYRWMLT

SEQ ID NO: 150548 - protein, 75 aa, Heterodera glycines
CCRQIFNSFISSEAAHLGYWKKELRADNCQLWVAFEKNYQQNDAEHYCHWHQQQQKQAEVTHCLCPVVNGLLKKN

SEQ ID NO: 150549 - protein, 265 aa, Heterodera glycines
QVALCNRCVTGVLKPDIVFFGEDLGGAFHDQMGADHTQLDLLVVIGSSMQVRPVSLIPFNIAGDVPQILINRQMLRNYTADIKLLGSCDPILVQIALAMGGQMRQKMLDELQLRRGVKHSGGVPPLPSDLLARADQLLLSRKTSTAAVAQISNSNGAKMEENGEEETAATEKASSFPRQMTVDQFKQYINTTDNNTGDQGDDMEELTETARKRCKMMPIREDEEEGTVPEMETQTIVRQQSKRQQSLWQSNYARVDAHLPSTDTL

SEQ ID NO: 150550 - protein, 21 aa, Heterodera glycines
MSGRGKGGKAKTGGKAKSRSS

SEQ ID NO: 150551 - protein, 47 aa, Heterodera glycines
MAPDPGVVEETHSKHAVPGQDITRATKERRPQGLLQTCKLPTGAPFV

SEQ ID NO: 150552 - protein, 125 aa, Heterodera glycines
MDDGKDLYHWRASIKGPPESPYEGGTFHLDIVLRRDYPCTPPIVKFVTDIYHPNVGERGDICLDILKQMWAPALTISKVLLSISSLLCDPNPDCALRQDIATMYRDNREEYNRNAREWTRKYAMT

SEQ ID NO: 150553 - protein, 123 aa, Heterodera glycines
MLPAAPLDNNNGTSSQTIGDRIGLDDAIMRLAEAEKNDGLEWCATPFCRPTPALTKRSMRSKMPSADFGMPSLTDVLTGTFEFVQKTSERHSIALRCIQQQIEDQQKQLDSEKANDSIAVKMN

SEQ ID NO: 150554 - protein, 137 aa, Heterodera glycines
MNSLSKTPLNNSIFIKFPQWHTLLAPTECRLEDDVLAAAAPAVPLVERWRPVQSTADLVLLRRRAVVPTRIAAPTPWPAPAGWRIGPRPTVTGPTPVPEHEEQQKLRHTVTTLLMMVMVQQLPNEPKQMQEAHELCH

SEQ ID NO: 150555 - protein, 36 aa, Heterodera glycines
MPRGVDWYLFCRNSCVFSNWTVQSQRHMAISVPGRK

SEQ ID NO: 150556 - protein, 220 aa, Heterodera glycines
MALLSYRFDVLVDKYFGGKSELTIWNAMTIFDCIGSLEPIWDVFVCEIWPIFATNIRHLRLGRSYNLDNLRRRTSPTIFTDLDQLNPIDSVDLLPDVFADDGPNATAGQALAKWLHTPSTDGQSKRLLCRNYSLNFEWLNNFIETFLRATTSVSYKIRNDMSSSTRPIEPFELVNERTKEKLTLTNDGFGWLLKRCPIIVEMAAQKYEIFGYWNRVIFRL

SEQ ID NO: 150557 - protein, 133 aa, Heterodera glycines
MSLFSSQLCRGALCQLRSQLAQLGYLIDLTTEEIYFLAGDAATVGPSSTGAAMAAQQQKGEKPPAARCALCRFLLYNQKNNSSLLLINKAAVPLAQCSDHWSNWYEIGCGWIINVQMDLNDSHTKNGAWSFIP

SEQ ID NO: 150558 - protein, 154 aa, Heterodera glycines
MSDNRKEGEEKMAKAILISADCLFKVFNLLPPTQLGLGIALISHRFDCGRTFQIAQMGAKIYSNSKRNWTEWRKKREWKLSIALTISQATPRRYLFVQALRAISEKFEKKLAYLSAKSWGEKAGICTGLTQKNNHFMHNPPWGIIRENTAKHPM

SEQ ID NO: 150559 - protein, 97 aa, Heterodera glycines
MSFHFPIFVFFSAIMWFCFECSNGSGIGDVKMAEASSNSNMNTTKRKQANPDEEKHNKKAKTEIRKTENHWDATACDTRLRIIDGLTVIHSAKQSGI

SEQ ID NO: 150560 - protein, 893 aa, Heterodera glycines
MHREVRELMHMQLHRCSDSWCGPRDPNFGRCKKGFPAPYSKCTILHPDRPALYYRPSPTDGGAQIEVNGLIYDNSQVVPYNPYILLRYRVHHNVLFAYGNKANIKYALKYPFKGPGHCYVECKEESGSKIGIDEPAQYAKMNFRGATEAFAVVHSMPFAKLSHHVVHLSIHLPNQQPVVYRAFQLVSKAEEIQRGELPETPCSAYWKQWQNEWQHVPSLKDMLFEKVPEQFRWAKDRWVFYKKKPIKRPPIGRVVPVPPTDRERFALYALMRHFPGDPDHLKLVNGQQYNTFTEAALQHGLLEDDQIWHKTLGEAALHRWPDQMRWLFVSILVFGQPSNALELWNKYKDQMYNPQGITSAAIRQAREQEALADIDWRLHFFNSSCMHCGLPDPPNSKAKNINLAVEEAFFGDDDLNMPPGQPNPRQQQNAPPPLNSDQQKVFDAVVRAIQSDPKDPTVPRRFFIFGDGGTGKTFLFGQIIKRLRKPPYTYKVLATASTGCAAILLPYGKTAHSTFRLGREVSLDKLPSIPLESFFARRIREAQLIIIDEITMLHNTVIAVIDRVCKEMAIRQHKDLLFGGKTVIFSGDFKQSLPVVPHEGLTAQVAACFQTSPLFCQFLTMKLTINQRLGQGQQAYLQMCRQIGLGETGEHFWIPPQFLVKSRDELIDFVYPDFQKLLGNDKELLNRLILAPHIDTCDEINEIMMANVPGQVREYLSSDKPLDERPLDIDEIESEVAALNRRTDSGMPPHRLRLKVGSVVVLLINKSDKEGLINGTRIVLEELGDDRLVGRVINSNAVGGQVKFFIERTRNVYEDKTPGGIKYERLQFPIKPAFAMTILKGQGQTISTVGIDLERDVFSHGQLYTAFSRATDGNNVRVTLPEGRPTTQTESKC

SEQ ID NO: 150561 - protein, 25 aa, Heterodera glycines
MIIIIIFPEYLGIHLNVQKKVKSRK

SEQ ID NO: 150562 - protein, 114 aa, Heterodera glycines
QKPFQSELEKKLMEQIVTVQSKVDKMGMAHQQQKANKIHISKETCILLHENSEGGAYLTESRGEVIIKGKGVMETFWLLGNAKISGGTIGTNHSQAAERQMAMESDKSEKEMYK

SEQ ID NO: 150563 - protein, 35 aa, Heterodera glycines
ALYESNQLTMPGFYTITLFMFEQTLYFLASFESTK

SEQ ID NO: 150564 - protein, 339 aa, Heterodera glycines
MKFCGSVLLKLFKSAQVVELGFCADFGYCQGMKNGGEKCTNAVNTSLCSFCPFHTQQRARQLSMARGALNRSYNLPPKKMRSLEEHSNSFDTPTQIGVKTIARTQISDGKIFTKPLSVVQQRLESKTAEMKEKRMDELKKLVTEKVNENEGIFSLIIMGKENILLVLAVWLWCEEFVAEAAEGQREPKPAGGSVGTVAVAQSKVASVHARIHPLATNDSKAQKENGSKSDDGETNFGGSFSDEQIRTLLEKTSNHDKEAKRAELNQQNVYFDRRQIEEQIETNATSLMELKNCKVVTCSISCGAKEFCRVAMKDERKVLTERERLKLKEEEKNFSSLKA

SEQ ID NO: 150565 - protein, 20 aa, Heterodera glycines
YTRKQDNFNISRKLQTKIIS

SEQ ID NO: 150566 - protein, 51 aa, Heterodera glycines
MVLSDLSNAVNNGATLSLQELRRRHIFWSEFALSWWSKKMGFELIDGGAVE

SEQ ID NO: 150567 - protein, 38 aa, Heterodera glycines
MDILLNILMVDVGTTFVKFSDCTNSALNTNCGRIPSTI

SEQ ID NO: 150568 - protein, 92 aa, Heterodera glycines
MAVRRRVAHHEAGHIMANHLNKDGAECLASDIVEDQFMCEQFKKREVKEAIKQVSLLEQFKNSRIKLANALLQRNVLQCNDIKRLEIFSNDK

SEQ ID NO: 150569 - protein, 200 aa, Heterodera glycines
MGGKDLDFGNGIGEEWHSTNTIFNENPVIFGESPEISSMNNDDDNNNNYHPYYYYNNYGYGNDSNFPGNNNWYNANAYTDNWYSVNDGDDDTSGYGSTTSGNYGFETNSYSSSTLGGNYDYGNSSESSSAPALTKKKKELQQIFRGNIQIRETDSDGLCFEVYCGTSNLTDGIFTDHYGNFEETLHKEQEEALKKMQIWN

SEQ ID NO: 150570 - protein, 174 aa, Heterodera glycines
MDRERKREKEKRQKERERWRERENGRKKRDRRSERDGEREKTGERKETEGAREMERERKREKEKRQKERERWRERENGRKKRDRRSERDGEREKTGERKETEGAREMERERKREKEKRQKERERWRERENGRKKRDRRSERDGERGIFKCYYLNQQCAIPPHIQRLLNKTHSLT

SEQ ID NO: 150571 - protein, 289 aa, Heterodera glycines
MSDHKGPTAFVKIAKINFQFWKLVDDHLRNKKWLLDYLEIDEEEQMDGTTEMVIYDGTGKILPIPQNPLPTKISGFQTIWITYLDANVIAFLHLFQHLFTSCEITLTIEMTNGQFLFSLAQNIWPLIKNNVKRFSMPTNFEHFRHHFPSILSSDQWPSLQFFYCENVLPDFPADDCANASDGQVLSKWLFSAHFGDLPPKVAQCECSTDLQGITSKMALVKSAFVNASSRANFIVYIWFNASSSDHVTDIPTFKLSNNSTGEHMTLKRIRDKYANITVGLVGLRQVKEI

SEQ ID NO: 150572 - protein, 53 aa, Heterodera glycines
MPITKCAIHSGGNIMAYAIGYDWSKGFEYSTANNVTKIFLHGCDEEMKPKPKK

SEQ ID NO: 150573 - protein, 22 aa, Heterodera glycines
HYVSTRMNGAFCDWHWQGIGTL

SEQ ID NO: 150574 - protein, 129 aa, Heterodera glycines
MGLKGSKPKLSKEDLEFLKKNTNFTEEQIKEWYKGFVVSPYTLRGLRPFTAFCPRLARLSQGPSDQRAVHQSVQGLFPLRLRGRLLRTRVPDLRHGQQRVHRLQGVLAGHQRHFLRHTRAETRMGIPGF

SEQ ID NO: 150575 - protein, 109 aa, Heterodera glycines
MSRPFTAQANVFPPISSGHAQPPAFSHGMMIIDTSVRPPPINMIAGHTMPMPSNCPGPSTRMAPYPPQYLPSYAEAAQQAPSNSNSNRRIDVKCYRCGKIGHFSKRCRT

SEQ ID NO: 150576 - protein, 232 aa, Heterodera glycines
MRRNVDNDSGANNGANISSDPKIAHAVDTGNGANDALGDGMDIGHCPNCSWHCNVCKKVYQGTVRLEDAANRSLRVINRRAVQNTDAINQVSVTVNANMDTLSTRLDQVVDKVETLESQVENWDNPNTDNLSQNGDATVVLRSRVGLLEEEDDEDEFLNVLTTVDPFASQLPACKDENLTSFDNWAQKFRDLLDYAGTTWSEKEKLGRLKFSLEGQIRMGSSQIQWMLLYCS

SEQ ID NO: 150577 - protein, 121 aa, Heterodera glycines
MPAGPEGAEASAKPTGQSAAPGGTSAAGGTSAVGQQPADASKKSLAPAGTASAAVPSTYAAPGTGTTLSTASQKSAAPAGGASALSTASQKSAAGGAMSQKSAAPAGGASALSTASQKSAA

SEQ ID NO: 150578 - protein, 74 aa, Heterodera glycines
FILYPRKMAISFLEKFYASQKRLRMRRRAVHNRHFISQRIFIFRGYPRKMAISFFDKFYTHTNALEHDREGGAQ

SEQ ID NO: 150579 - protein, 44 aa, Heterodera glycines
MKGPEGSELPREFYGIGDPTLGKFRIPDPASYNFLTICGSKIYW

SEQ ID NO: 150580 - protein, 224 aa, Heterodera glycines
MFYSIAIPLIQIIFVNLCFGNDESPNDGQKTQINLLKEAGKKPGNELNLNEEGNSNGNQSADNEENELMVLSRQIQNKGKEKEKDSLEKESHLITKTKEQQNIFELPTELNEFEQDLLPLPWAFDNDLLLLSEQIQKQSEMLQLAKSNEKVQKTPAVEKRQENGKAKAAWVDYGSKILETGFSKSAGPDRSDIFRSNRFPGPASQKPVKPENRIFKLPGPEPVW

SEQ ID NO: 150581 - protein, 242 aa, Heterodera glycines
MPAGPEGAEASAKPTGQSAAPGGTSAAGGTSAVGQQPADASKKSLAPAGTASAAVPSTYAAPGTGTTLCTASQKTAPAGGTSTLGTASQKTAPAGGTSTLGTASQTPAGGTSTLGTASQKTAPAGGTSTLGTASQKTAPAGGTSALGTASQKTAAAPAGGTSALGTASQKSAAAPAGGTSALGTASQKTAAAPAGGTSALGTASQKSAAGGTTLKSAPVGGASALGTASQKSAAGGAASQKA

SEQ ID NO: 150582 - protein, 143 aa, Heterodera glycines
ESLLTQYQNDNSLLQFVEEEIRKEFFGAEIEGFAEDLQEIKFIGNEMKEKIMLSYLKKNKFTENNDNFNKALNELQQIIEEWSDEARLQVTGALMIKYENESFSPICLLPGEFNRAKIFGNLICDFKKRTLCQDESLYCIFCK

SEQ ID NO: 150583 - protein, 223 aa, Heterodera glycines
MFHWCKTEEKADEIREKIKNTKKLEDLLTKFCQNALKDREKVNEMKTMLAILMVLENIWPSNEEIYKEKVVEIKKRSDLKVFVQSLAYLEKWAIDNYIFNSELGYLDSNILKIMLSKIIAIYPNSSAPFIIHKFFLTFSLWHWPLPVQLEQLTYEQSGELLLMWSPGREWVLKKQNVKSKSLRKRHQRILTMPIIGPMFPQQNLGHKINSLTAKVIQRKMQEG

SEQ ID NO: 150584 - protein, 330 aa, Heterodera glycines
MDRVNPLNVVLPDALLMKDGENTLLYDSRLLDVLKRARKISVDGTFKVAPAAWTQCFVIGAFVNRRLALCVHALLPGKQRKYYEEALNAVKAVIAPNTPAHIISDFETATIRAMRETFPAAQLTGCLFHMSQAVFRKWREMGLAELYANDEEQGEVARNSFRKLLALALIPGQHVRRGFAVIVNHAPEGLAAFFGYFARVYVGLTAHEQEAGAVAFVPGTDQSRRSSISTNATEDAEYSRRNSFGSDFLAAILDDVDKQVDIARSARVFPHKRRIKYILKEQLIGDALDEAEYNTDEDVMNILSLLSLQMQGYVGGLRARGAQHEHEDRE

SEQ ID NO: 150585 - protein, 151 aa, Heterodera glycines
MDGTEARSILELDRMARPLDLQKCHPVGMSRFILGMDSNAILARIYDGEVNPESNYKSVLISRRTCCAEVLQMLCQMSRPSFVSADCRLRPARDAPSKAQYCQQLGLDAISELRLFVDSPRGAESALIPAKCPLAGVYTALMPGQRIALRR

SEQ ID NO: 150586 - protein, 115 aa, Heterodera glycines
MKKKINKKEEERRKRYRPGEKALKEIRRYQKSTDNLMPRQPFRRLIREVISEITWNSHRLETQAATALQEAAETFLTTFFEAANRCAVHANRVTIMPSDFVLIRWILHTFGNNIV

SEQ ID NO: 150587 - protein, 88 aa, Heterodera glycines
MKMLPKEQKQTPQTDTSSAKLFLLHLFTISTIILHILPTTECRPSFAKENGDDDGQNAILINDETTKTSAALPTDFEKTQIIRQNVPA

SEQ ID NO: 150588 - protein, 69 aa, Heterodera glycines
MKRVMADQNKKYKKGIYQYKFYHSNPEENLQFRRLGWPAAANWSKFERGIRDDGHGYGYGHPSDRKSKK

SEQ ID NO: 150589 - protein, 117 aa, Heterodera glycines
MGLNPPTFQSTGLNPPAFNHWDSTHQHSNQQDSIHHHLINGTQPTNIPINGIQSTSISISGTQFFCISITGTLFSCILGIFIISSCFLWHFLMAQHSWHFHHLLVFWHFLMAQHDTN

SEQ ID NO: 150590 - protein, 122 aa, Heterodera glycines
MMIWIIVVVGIIALALLSCVLSRACHRSSTSSASAGANDIEMAPTSSASTSNRLPGFNYSSDVRSVHHYLPRVHDRRVQNFEKSVCLDQGSLLDLDLHFQDKNQENSGPGKTRLVETCIFEI

SEQ ID NO: 150591 - protein, 127 aa, Heterodera glycines
MLLAIVFFVCSIAFPQPIFSVIKSKPQNLVLIDRQIYEQKLAENDGTGELREFIQKLEDQNETMAKVIEKCEAIEEREDAKLAQIYLSLRTKLGEIKGGEVLESVCDEAAVERLRKNAVEAVFLLAK

SEQ ID NO: 150592 - protein, 42 aa, Heterodera glycines
MHSVFAKLGWTSNRKAAGGTLRPGAHRSIALKALIAYKKVLT

SEQ ID NO: 150593 - protein, 182 aa, Heterodera glycines
MELHQQGEPGTEKGTEKLEQAKLTFSPPPAAANEEALSISESDANDEKEDKSNRKEAKSKSEKVEEKANESNGKTENGTTEEEIGQNVAEKAEQQREEAKGRTIAAIRKGGNGARSLPPIIDVGGIAAEEANEEEEQKKETDEKGKTELTWWDKIVLGLRCARHDCRETLIVKNEQLPRMIN

SEQ ID NO: 150594 - protein, 71 aa, Heterodera glycines
MLNKFYLDRLIENGQTAYFENLYAYFMCIIFNIKRPFEYHVPTPCVCAGDDQIFIRDLDISWAGHFVGQRH

SEQ ID NO: 150595 - protein, 50 aa, Heterodera glycines
MSKKLEAKKYSLTLSKSTSKNWRSQSANRGHLGLSNDTNNVEIGWQIKKL

SEQ ID NO: 150596 - protein, 89 aa, Heterodera glycines
MEEKTEENFADFVFPLNDITSDCFQQILAWMREHHNLAEPIVKEDPVTQERIWFKFTDWERQFFDVDFERVKEYFLASNFLDIRSLYLY

SEQ ID NO: 150597 - protein, 112 aa, Heterodera glycines
MAFSWEKMQKMVLWPLDSDKAGRSVYLGWSIFLGGHFDKRIWRGIVLAFPNADGHSRVVIAGVHHLLFFPLFLFQIHWLMALLRFAETKTNRGKILLSRGGYEYTFEVKKLI

SEQ ID NO: 150598 - protein, 59 aa, Heterodera glycines
MTMHFLGPGQFSTCQEISTVADFDSDRFRQWISTVADFDSDRFRQWISTMADFDSDRFR

SEQ ID NO: 150599 - protein, 104 aa, Heterodera glycines
MKERWPHNNSHPSSVGCGLVAKTTDPRFNAFVHLCVSFISDSTSKAMPVNGTGSIITMFVPSALNPIFSICMIKSYRSAFAKEALKIGKFQEISYFLHYKPPLD

SEQ ID NO: 150600 - protein, 67 aa, Heterodera glycines
MQSLSKRNSKQRKFITIFTQIWFFFQPYAFVTKYFCLLLPKTPLLVMVFTNFHLPGQHSDCLQKYDG

SEQ ID NO: 150601 - protein, 60 aa, Heterodera glycines
MFNGMWTNCWPIVRTVVHKSMLVSNKHTAVAGWRTLSRADSTDKKIDLLTQLKKEKKLAN

SEQ ID NO: 150602 - protein, 87 aa, Heterodera glycines
MPGAQNDGRDYMFAIFKHVSSSAKVDIGTVPSSETTAAVSANGTVATTGANGTSADNATAESWVGKGCGAFDVAVPPLVPIVAATFG

SEQ ID NO: 150603 - protein, 317 aa, Heterodera glycines
MAICAHFWDTSAQSAECVGLSLGPVGYSNDDIADAVRERLAEMELTMERGKFIRFTVDKSSSFSSYNARPSFFNPFPFVGGGSFASAMALPFDWQLVDCSPEVLEAFFNNDAEEDDAGGEEAEIGLGEGIEVTVCAARRLETVLRTVLERDQQMVQLRKVEHKISDPSTLLRVRSNIERFLDVVESPFGFGTIRRVRAPIIGTAKEQNAMGEERDQIDMEIMEYLDIVQLDSSESCAQFWTKHGQVRKERERETIKDGERGEKWGEIKKEVRDAEMGRVKRGELRKEGERLREEKERVKRKGKREGERNREEENERG

SEQ ID NO: 150604 - protein, 124 aa, Heterodera glycines
MNNANSGGPPQMRGGGIAQQQQTAGNHPQQQMLGCAGQPQDPKTRKLIQQQLVLLLHARTCQQIERSEPLQNRAPCTLPYCSVMKGVLEHMVGCSAGRQCQYAHCASSRQIIAHWKNCNKDDCP

SEQ ID NO: 150605 - protein, 53 aa, Heterodera glycines
MTRLVNNFKKGAKCQKKINIWLGYNFSSLYFQNFLNGLGASFSNLGCDLRVPK

SEQ ID NO: 150606 - protein, 108 aa, Heterodera glycines
MAIKILFSFVIFFILSEQICGVNPRQSKGKSKSLNKVDQTEEEESHAFCIECLRKYTEAAHEEMPFARGGLGLKRNKVPAPGSAQLNSSIGKSLCRILCVVSGRSMLG

SEQ ID NO: 150607 - protein, 47 aa, Heterodera glycines
IPIKFFKILPINWLIFSENLFINDQNFQFFFPAAPIGTAAPPKLLFF

SEQ ID NO: 150608 - protein, 146 aa, Heterodera glycines
MCKFAPGSFCKKALINNNFLFYRLLHKTKRADFWRRINEAEREEHAFYTYQERNYHALLPRIPTHRCLGTMFCRLDPLAYLVHEADDEQMAERTMYISLRVGTVAQRLVLQNHFQNQEDQIQEALNLVAFTFMELPAQEGVVRNLI

SEQ ID NO: 150609 - protein, 86 aa, Heterodera glycines
LLNAIKNGQNNYTLEVANKVYVKDGFEVLDTFKAQIAEHYGGQFEAVDFADSGNWADKFDSKFTKKRTFYVDEKNSKEVNESQTFI

SEQ ID NO: 150610 - protein, 1361 aa, Heterodera glycines
MAFIDPRTMILSSDARLAPCSEYRKQLIFLRGSLHEVDQIDAQVKQVNANRIDGFSLNLSLAPTYARHSFLHLALVNVSDFIGQFYDANFARESELTFQLKSEDTVITKTLSEQWEQVNFLIRFGLMIRDEYVGRGTTRRMTFGGNKTQKIVKSPAHLNMMNLNASVEFGNEIELSPVKLIEPAQTQAYKFAGKRKRPVKRTRFSFRAPKVLIGLLVIFLPNAFANPDVNNQISIQFTSPSMIYLLIIPFLIFITISVLLRSKRNSDLPMLPNLNAISPHHAVVQTLINSTPVRCLMDTGASLTVAPRSIADELNCRTFSSDLEAMSASGHVIRLKEYAQVNLNIAGYTVRSLIYFVDDSEFTVARDYSVIVGWDVFEKLPPIKFDHLNGKFFVGNNESKLCYRSILLLNDLRVSAEKNTLIPADSQILVDASIESSPNPKNSFCIDRPDISLIKKGLSVINSVSPAGQKQIKVAVVNPTMEPKWIWKGTHLAFANELLCDRNGLLKENSTKEILTLNSERKKMEIDPTFVVDFSKAMVEGKDLEKLKALIEEFSDVFSKFRYDLGLFTAAEHHITTTTEEPIASAPRRMPYKYKEELKKHINQLLEAGVMVESDTPWVTPIVIVQKKDGGIRPCLDFRKLNEVTVPDKYPLPRLDSIMERVGNCQFYSSLDLASGYFQIKLSEETSRKCGIITEDKVYQMITMPFGLKNATAAFSRAMAIVLSGLEDTSLAYVDDVLIFTKSPNFSEHLTAVRKVLERFRLYNLKLSPKKCIFASNEMNFLGFVLTAEGFKPSLSRIEILKEMPVPLNVKEVKRVLGQAGFYRRHIENFAMVVEPLLKLTRQGNKFEWGREQQNAFDKIKELLTQAPSLIFPDYDKAFHIFTDASSTGQGGVLMQKDDVTGTFSAISYCSRTLSAAERKWPAVQIEMSAIIYALREFRTFIFMSDIELHTDHKPLAFLLKKSETNQHLARWLIELQNYQVKIVHVAGKANTLADALSRAAEDKPLSEIYNVDELEDIIEFPVCLALAAHSRVVAYPFLHTLTIRHEDGNTYEVNLLEEQAGDPEAAAYIAFVRDGEFPADLDEKEKELFAVGTANYKLISGILYFEDKPEFDEFLDAANFCYNTSVHASTGETPFFLMFGRDPIFCVDQIIDPKVRDPIAISDRNEFKQKLVVAIRHAWHAAADEYAKAQRKMKEQYDRKARPQQITIGDRVLIRNYDGRVGTSKKFQLPWRRIFRVIKIEGIYVTVISCTSPNSNPKRLHLNQIKKCFEILGPPCTMPTQPVEEKKCLEKTQNVEEVSSERSGIRNEMDPESREGENLEEIHARGPETRPEIEADEEKNEQKKIDTEPRKYDLRKRTRT

SEQ ID NO: 150611 - protein, 91 aa, Heterodera glycines
MEQRNQEIKTKRNKQKLEHEGALYVLHQISDDGLRKYWRCEFFGPNNKCKGRIHTDINGNVLTIIGSHTCDMSAAQVECQRRVTPAQAACS

SEQ ID NO: 150612 - protein, 149 aa, Heterodera glycines
MDNYTGRPWFNGGLTVPRFAKYRAADARILRLLQSYNAINNNQAHQNDHNYHALINVNPYNIINFSLMISASAKKLDRITIEKILHKCFQVLVLTNVFGLSRFMRPFNAVSRCKHRLPNGTVHKHALGNKVDGLGNANTPFRLQFSKQP

SEQ ID NO: 150613 - protein, 61 aa, Heterodera glycines
MNFLNSVKFLDCERWKFRQWLISTVTDFDSGFRQWLISTVTDFDSELFSFILLFSDISDSG

SEQ ID NO: 150614 - protein, 71 aa, Heterodera glycines
MTSNHYEELLQNFFTLNFVLDNYEFNIAAKDYTPEYFFNKISKQMGRRVDEICLTSMFPLYLQKVNTVINY

SEQ ID NO: 150615 - protein, 41 aa, Heterodera glycines
GSPLQGIPRSRTIIAMSDPNHGKFSPVYQPLSGKDKHADFA

SEQ ID NO: 150616 - protein, 100 aa, Heterodera glycines
PSRLLDCLHYVCEECVPEQCLLLDNLEPDEIRCPNCSQVEMSSISGQSTESSRVEICIKHEKFTRFCLSCARLLCVNCEQQLSLPTAQVNNVTNVVAVPQ

SEQ ID NO: 150617 - protein, 37 aa, Heterodera glycines
MATAFDRYFNFVNENKCETVQENETSLNTGKLIAKYS

SEQ ID NO: 150618 - protein, 284 aa, Heterodera glycines
MDPKLITDPGSVERTAECADRSANCGVLKKNGFCWEIRYVRLIRIQCQHTCGFCENEHGNGATKKQGKNGIGNQNQGQNMGKDNGQDLKINVGLDNADGQDGNEEYDMQNGGQEWEHGIDLPTGEDRTMNGNRGQELSMFGLDKTEGQAEENHGKMGVHDLDYGNGIDEEWHSNNNNIADGNDSGTRHGNDGIGTTNSQNGNANGQINGQEEQKQAESNFMDKKKQKKKLLLLTTSDEADLNNPKLLNKVDEHYTKWTFPKRRKPIGNGDETDQAVEKKTWHET

SEQ ID NO: 150619 - protein, 57 aa, Heterodera glycines
MDLTPVGPSVAPLAFSSSSTDASAVELPYAVPNFGTPTEKLLLGGELIAVPSALLAD

SEQ ID NO: 150620 - protein, 133 aa, Heterodera glycines
MGATESVEHSKSDLQQLKGDIFVNGRPFPDQICQRIVALAMGGMPPRDILRNLLVSSGCVSKILASCGTIDGRSGPQMLSQEIVEKITLYKTEYPSIFAWEIRDRLKQDSLCTAETLPSISSINTVLRSHAIL

SEQ ID NO: 150621 - protein, 165 aa, Heterodera glycines
MSNFRMDLIICAISFRVSCHIVAQTYSRTFLAIEQRKTTRDWQMSSPLIIGDIDTILDQLEIGENALPLHSYKNFILNASMTSTRTFYAINAQVKMLKKSIDSTNRNVMTKCIEEEEKHWSREKDGVSKRNEFKSHRSQKAEAKAEIKVERNDNKRKQKDKSYSE

SEQ ID NO: 150622 - protein, 299 aa, Heterodera glycines
MRIIASIPSAFIFAVLFTGAYLWYLTQAHLEFRFGVLLPLSFLMCAVGHWERMQRQGVFSDFYITLIWLFSYMKWSYRFISGENFDQMDEIIVSMSPMMSGLDICQSLVVFRCSIAKKETDCDSDYNYRESISRIFNGEMDRILTLLDEEHAIRLSEKNTLEGTKFRLEVHIFFDDSWTDDKECGRIPNEYFKLLFEVLMELTRFYLISQLVPWYFCFVLSSSDNAEADMYSRILLNTPYGGRLVLALNGGSLLFVHLKDKRLIRHKKRWSQVMYMYFLLGHRIMDSHLSVEDKQLQVF

SEQ ID NO: 150623 - protein, 129 aa, Heterodera glycines
MPIGHNAKSVIRRFLRLPFAVEIRAIGGKRNKWIFVHFALKLGTAKGTNGKSTGKWRRCHSLRGRVSERAASHNEATHRRNTQAHLLSLVAPWGKRVVNVGRSTGDETVRSGDCHRLFSHNPNNLNPYE

SEQ ID NO: 150624 - protein, 147 aa, Heterodera glycines
MAPPGQYHHEVLTVGEPQLMACSYGEHDERHITRVENTAFAAAAAGGGAMGPPPMPPPQGIMVSSAPGTSALGMPPMPVPTTAMGGDNGAPPHHLLGANNDFEQHIQQQQQQQQQMPPGGLWNPLPPATSAGPGGNGGDQAMGGNGG

SEQ ID NO: 150625 - protein, 201 aa, Heterodera glycines
MDENANADDAGEGREKRQPKANQINYASLGHLLDRLIVSQRRTSLLPVVPIAFFPLTDFEKRNVSLCTRTNPTEVFDALSCASKSSTETMHRQTDQQEIERRGTDTLAPTQLRPNSNIENEMCAIEMNSELALQRHDGLVDEEMNENGPTPALTQQPQIDFENEMFDNDSTLVPPSPRDFLEVRDSKLAKMVVRFELSGSN

SEQ ID NO: 150626 - protein, 137 aa, Heterodera glycines
MGRSDAPRIDGRKIMENKHNRRNFPTVGKCRNGEESAREAFQRKVREKRKKQKSEIEFSRKNIQMPSNAGRTQANIAAIRKKLDTALAEGTSGTAQNEGETEQRGEEEEEDMLMSENVLSAKDPITKRDIKEPVKNS

SEQ ID NO: 150627 - protein, 149 aa, Heterodera glycines
MRHCFSTNSGQMVRSLFVGFVPFTFSSAICAACTVMAHFDLVALFLCCFELVHSDVFGPFALFCFCSFASSATLLAHFALLRSSDLFQISSSDFVEYCRTFVTILAFGYAFTPVIRTLTTSISTDTIYACAILLFFASLFVHDYGINVP

SEQ ID NO: 150628 - protein, 606 aa, Heterodera glycines
MSGPIRSKIGPCAARTKAYIEAATVNLGKDTTDESIQADLTAERRGLRRAIRLLEDCNDKWQSLLLKFNGADRQQEEQRYDDFKPSGKHFMEWSDKARGAVDTIDGVIGPEDDDEITGSIISQPANPPQIQHVQPPPPRHEVNLPPISLPKFAGEPREWPMFWRLFRSSVDNLPIDDFKKHIYLLGCLPHNSPARRAVDLYPPSDENYPRVVDILKKRFGDSKTITESLQAELLHLPKPGESVLSLRNFAESVERICFQLMDFGESEDNMFMASTIKSKLPFSILTHVVEKELSSGKTFSCLDIRKALQTIVEVKEEVQRCAHVLRGDERPRSSAFNSPPQQRGAWDQRGDHRHSNNRQSQPPRPFNRGGTPQPEYRAFSAINKNPERAKTPARKWGRSCSLCSGTDHLPSECPAFPTPGARRKRLTEQQRCLNCLVQGHNTEECTSPYRCRNCGNKHHFLICFKREESHSRSNGNRSASSPKSGREPGGRKFHQRQVESQTHLITAGFQQNDQSNPPPREGEIVQSMGMSTVDTSKGRANKVPKCKNPHAYLMMRRLLAKSSRDSRNIIKVAVLFDPGSQTTYGADPLIDKLRPHKLTSEEMEVH

SEQ ID NO: 150629 - protein, 30 aa, Heterodera glycines
PALTFSAYKKGTLFIKCSLPHFHSFISAAA

SEQ ID NO: 150630 - protein, 247 aa, Heterodera glycines
MSTSSPPSSESDPPELLQTPHSPSSRPFWRDQEELVISGISGRFPRSDNVKQFGDLLLAGEDLVTEDELRWPPGFYDLPKRHGKLKELRKFDAQFFSVTPKQANYMDPQVRILLEVAYEAMIDSGVNPMEFRGTKTGVFVGCSASETGGALTQDPEMVTGYTLTGCVRSMFSNRLSYAFDLRGPSFSVDTACSSSLLALQLAIDAIRQEQCEAAIVAAAFRRASYLCDCCAREEQHGRLQRAGHHLS

SEQ ID NO: 150631 - protein, 101 aa, Heterodera glycines
MVAADSSSCLLHLIVINCGDLRCRDEVNKGEEQRERRGRGARRIGGAKGGGGKGGRRRRGGGKGGRRRRRRRKETDGRVDGRKESTEEKSRCSEFVLCRRR

SEQ ID NO: 150632 - protein, 31 aa, Heterodera glycines
LRSLSNGSQRRRQSTNSEQRLFSSVDSFLPS

SEQ ID NO: 150633 - protein, 23 aa, Heterodera glycines
MGGSKGEREKKLEEVKEKERAAR

SEQ ID NO: 150634 - protein, 18 aa, Heterodera glycines
FGREILFFETKLKTYITY

SEQ ID NO: 150635 - protein, 51 aa, Heterodera glycines
MTLFLFTANFFLAYKVLPSDPENPPSSDKVPALTVGAHEFTCHVMPYLDIQ

SEQ ID NO: 150636 - protein, 97 aa, Heterodera glycines
ETLRLTNLVVFNNPHMTLDEIKVGNFTVESGTPIVPQVDKKSGEIFFSFIFQISSVLFSEKVLPSDLKNPPSSDKVPALTVGAHEFTCHVMPYLHIQ

SEQ ID NO: 150637 - protein, 670 aa, Heterodera glycines
QKKQLRKGRHGIDLLEGARPCQQRPYRYPVALQPEIKRQVKELLRQNVIRPSSSAWASPIVLVRKPDGSYRFCVDYRKLNQLTKRSTYYLPRIQSILDEVTGKKYFSVADCSSGFFHIKLAKGHEERSAFICHMGLFEWLRCPFGLAGAPTTFQRAMEEVQMCSATFLVYLDDCIVGSMTEDEHLRDIDIFLKTMAEVGFRLKPEKCRFALGEIRYLGHLISEKGVRIDPKDLEPIQRLKKPANITELRSLIGMLSYFRKFIFGFAEILQPIYELTKNENTTEWGQIHENALEELKQRLMTAPVLAPPKFGKPFVVETDASTKAIAGCLLQENRDGEVHPISYFSRVLTKHEKRYSVVELEALAICASLKNFRPYLEGAESTVITDNSALTSLFRRKDLEGRLSRYQLAIMAFDVDIIHRPGKRNQFCDHLSRYLEESAEPQINWLNVEAKTSQSEMVEAQKRDAEIQKIMIRLKTTVDGEESNENEKKRWKLFEELLCIMDKGDLRSKIMGEYHSAFQGAHLGEKRTREKIRRSLFWEGLDGDVQRFVKTCDACQRRKIIGIQMSAELCPIEPASRPCERLHLDLMGPLKTAKGGFQYILMIVDSFSKYMMAIPLREQSATTVTAVFVDKFLCLFGLPKIVVTDCGTQFLSTTFESLAKIARQQKKRKI

SEQ ID NO: 150638 - protein, 139 aa, Heterodera glycines
MVVVGIAVVGILAVLTGIVVVGNAVVGILVVVTGIVVVGIAVIGILVVVTGIVVVGIAVIGILVVVAGIVVVGIAVVGILVVVTGIVVVGIAVVGILVVVTGIVVVEIAVVGILVVVTGIVVVGIAIVETELLDGSPSF

SEQ ID NO: 150639 - protein, 138 aa, Heterodera glycines
TTTIPVTTTKIPTTAISTTTIPVTTTKIPTTAIPTTTIPVTTTKIPTTAIPTTTIPATTTKIPITAIPTTTIPVTTTKIPITAIPTTTIPVTTTKIPTTAFPTTTIPVRTAKIPTTAIPTTTIPATTTKIPITAIPTT

SEQ ID NO: 150640 - protein, 37 aa, Heterodera glycines
MPVLLFLMCWFCPICPLAKKLRERKEEEAENSGEMDE

SEQ ID NO: 150641 - protein, 177 aa, Heterodera glycines
EIYERAVKPLREKLWDGLLQMLINYDWVPVPLAYSQVYSQVVFLATRVYFLLCLFGRQFRIWEQRDSMAYFEYYFPLMTFLQLMCYMGWLKMAESLLNPLGEDDEDFESGYIIDRNLAVGMTGYIIDRNLAVGMTMVDEFYGQLPTQKPDKFGKEGEVPSAYTELAGVSHWHFANSI

SEQ ID NO: 150642 - protein, 41 aa, Heterodera glycines
MKIHCIFFILLINELFVVPLIFGQPIKEKSVLEGVPVTLNE

SEQ ID NO: 150643 - protein, 569 aa, Heterodera glycines
MERNLQQQQQQQQLEMGNNQFRKSSPDNLDGMALKSVIKKRDRLSFALVDERERQQTPSCCPPSSPGKVRRRRTAHSVTPLLDARLFLNGLDESAVERTADGAAEMKKDGIIIEQSLEAVVDQALMRKEIVSARETKCTKIDEEKKGQQQEEKHMEMVAQQMANSTLQHEKLVLASQTMPTEEAKFSARQQHREQQNMPPKEENLLQNEAVPPSPALVTMSTKAKKHLLTDRNSTAETQQQKRQRVKANAQRTHGQTVSERVGGQQQQFGTNNNRTAAASTINVKPNALRVLPPAAAGVLRTAQKRTNNNLAPAPKCTANITADPSSAPKCAPAVCRIRIVAKPNSNNNNVHGITTTTIEADQHQQKRAPHQQQMCSSSSSMPDRPLKPSQVKACQPKVQKPAAAHGGVGTLGQKATVTASAGPFKTDKNVTTIGGGCATATATAAVVAKMKPSSATPTSNNSNGSSTGSRRSVTTAATNTTVGSCQMMMMICRGQTPQCQEKQQQQKDGKAMAPAQPTQPQQQQHLRATKPTLTRRLSTSSRPTLVHSTGRSCTTTAGSREREKPKWI

SEQ ID NO: 150644 - protein, 690 aa, Heterodera glycines
MATPITRRCSAFHKGWQCAAAAAKHFPEYCDSGKLGDKKCADCGAHLFSHEDSNICCRKGRVVLPMLNPHPDELKELIVGNKQSREGKEFVRHMSRYNNLFQFASVSAGNKPSPAGGPMAVILNGEFHRRISSMQAGTTQIPGFGQLYILDPVEAMEQRRNNPRFTGEKITNEDEFVQGHQLNEQTLEILEKMIQVHHPAVQAYKQAREQLTELLQQQNQEELRFFRMTLLDSRRAPAGLKDPKLHPHQIITPSTGEGMFAIHADPTGAPPPKGIWVENKQGQLNEIAPFSPWTDSLTYPLIKPMGDDGYTTGIKYAKPPSRKRKGVQNASGLFDSEAESDNESCETQSIASSDAGSVADSDAESVASVSSQHRRIDKSKQFISLRDYCKYYLAIRDENVELQYHHILSCGGGLGQRWILDQAAKIDWQIATFLRRPDMDLRISTPKNLLQYLVNQYNRQQARQNPNAQQKTVDDIGSVVRLSEHNVNSLQYWKKMYEDCNTVFARCHDAKKARLFITFTNNREWPEFKENLHKNGQVFTDRFDMWMRVWSSKIAEFREELYDKKFFGTILGYGESMEFQGRGGPHAHIVAQTDLDAVPYVIQEYIWAHIPSLPDKDDDTPIAKMHREIRETMHMQLHRCSDSWCGPSDPIYGRCKKGFPAPYSKCTILRPDRPAMYFRPSPTDGGAQLE

SEQ ID NO: 150645 - protein, 42 aa, Heterodera glycines
MAPPSMSNTVLMPDIGDCAAAEAGGASFTAPSHKESTDIMRK

SEQ ID NO: 150646 - protein, 103 aa, Heterodera glycines
MRIYLCLLSLLISVHYATVNEPQNKTNDDDSNLTLPSVKLANNVKLADENDQQKNNGPPKNGVAFVVEGIERSDFGQSLRTSNFQRSRAALGIIKLQKLKLLT

SEQ ID NO: 150647 - protein, 107 aa, Heterodera glycines
MSEMAELKAIINRLSAIEKLISTNNNNTLATEMTAQFSAIADRLGEIERKLNNNNNGIGSAEDKERKRSLVLIGLPESEEEVPSLRAKDDAKTVEEVLDRLDVEVCP

SEQ ID NO: 150648 - protein, 257 aa, Heterodera glycines
MVTIQSNSQTLFLSSSRGVWSENKALSVQLPALAEGEALASPLVSDVDSDGQLDILMPVCASAACTIVARLWCYSRQTVRTVQIDFRQVTLVPEIDGQTIVPFRIGDFSQNGFPDLLATVTPPGGSKTPMIFENIPDDGSYPRKFELTKKPERILPPLNDKLSGLTMSAFFDLKEDGNLDMMVEYLDEVKGSSVNFIRCDDKGDTTFLKVQVFTSTECTGPCCEQQYLPSSHSTNGVRQIKIGQSVVRVGDFYRQQL

SEQ ID NO: 150649 - protein, 240 aa, Heterodera glycines
MPKSLVMSLLASVTAASIVSIGDKPMQPIPGRVCAIADMDKDGNTDLVVQQNDVLTFQADLNIIDKVKALFTTTAESQYAAILYLNDGNDTFTEHQVCDENSLEGTTPVSPDPGPPTPPLHCPTKFLDHPTLVDINGDGVTDLLGFVQRKSADNAKEFTELFCLEGVRHQSSASVPKFRHCEHQFPPVPSGGVFPGFTPIFADLDKDLSAEFVFLAADKRSLVVWSQSRFISFCSFLVTL

SEQ ID NO: 150650 - protein, 536 aa, Heterodera glycines
TIVKISMKETLFLYLGFGLRVLANPITTDASAVAYAGALMQSADENQMHAVGFWSRTLNSTEAKFPPTHVELAAIVHAVQNFKPIIYGAELIILTDHRPLTFLFSKSSSNPKLNRWLMSLQEFEPKVVYLEGKANRVADALSRVPIKWDQIESKCKEDIPFLLVTDEENGFEINREKIEKETSLDPILSQIVSKIKENWAEPIQEELNVYYKQRDQLYLEGNLIRKKPLRQIVIPEKMRNSVLKLVHRAHFGIVRNKARARNQIWWPEIGDDVENFVKSCWICQKNGSTPKTDAAYKWPDSKFPFERVHADLAGPIWGTNFFILVDAYSKFPFVYQMNSTHSSALINSLRELFGIFGSPKTLVTDNGTQFVSNEMETFLQGEGIRHLTSPTYHPSSNGEAERFVRTFKEGMGKMLEDGKSIKIAQFIFLQEYRATPSEGQSPSQKFLGRELRTELDKIKMSASAIERKRRLLPEANREKNLVTKNFKPGDLVWVKEPNGWTPGVLLRPIGERIWKVEPEGCTISKSAHLDQLKARR

SEQ ID NO: 150651 - protein, 133 aa, Heterodera glycines
MPGAPVTVASVNIDTDTLLRTRHTDAKHSNDDENRENDGKFDDANDDGEDGEDQQKGGEETVAKEGEEEEDNGMGIERRGRHNAKAETIGGAQLAPMVSVRRGTVVAETRGGNYKVSIPFRALIYTGSDPKLF

SEQ ID NO: 150652 - protein, 167 aa, Heterodera glycines
MVVSELFVSDCNVRIELNDGTTVAMQKRRWDGGDKSGGRREAMDWRFRPFETREIGHAKVLGNLERNSTAFIVAKLRRMGSGDGWRTTHSPSSPSAPNDATAQRQQKNDGSDDRKMGGDDSDAKKAVPKEQQGQLWHNHRKKQPNAGEEGEGDDPFAQLLVVAIGVQ

SEQ ID NO: 150653 - protein, 120 aa, Heterodera glycines
MPISCGSTTSQSAELAEETNGNQYDDNIKENMCRPVQCIVSVIQSPPSLQIANEQFVDSAFAIVHNVQSGGDMIIQNATMCTQLPCYFLLVSTKNGHLTHGILKVENYKTMAAMPKTCPW

SEQ ID NO: 150654 - protein, 922 aa, Heterodera glycines
MDEFYIVLPSNTPGSTNTASNFTVRLPHTLELDSNWTVALASIIYPYSFPSVGIDEDDIISIKLVNPNYRFLDDKKFLHIELKVPSMQFSSVEHLRLTLNSLIREVYQQQQFSSGHDGASRTKRQVTDLFFHENPVDYWEKIGELRTKQEQFEKEVKQEESELSADTTDVERKKLIQSELPLKRIRMQRKKEELEELERAAERRDQESPENEQRKISDFFQHHPEDYNKKLNESRLIFTQHLSGLQEVMSKYIGEKDINKIRQLNTEKIEELQAKAVGLKDNASFEKQIERAKQMIEYRRKRFAALEFEAKKRDEQQQFVAAAANTITAPTASALIGREALKKRTGISARTDGEVGDKADVGPQTATTTTHGEVLKEKILEQQKHTDNDDKADVGPQTATTTIHGEVLKEKILEQQKHTDNDDTADAGPQAATTTHGEAVREKILDQQKHTDNDDTADAGPQAATTTHGEAVREKILDQQKRTDDDDKAAVGQQTIPTATKTRGETLKEKISQEQKHLVDDKSNSANAKQDDGSGTDEKIAHGQTLIARLKQSEEQKKEWGDPPQDNDDDGRAPKHGEMLWKLLRSTVPTNQQQMGDVIHHQFADAEQTRGQVLMELLKNILEEKTDTADAQQNYHHLQKSAYLSSTLRRGEALKELIKKTQNEPLHKSSAKTRGEILKLMLEHMKFSREEEVSFEKLVAKQQKESTAAEFVFNDLAQRFVLITGAGVLHVDVSKHLAYVLGFDNTRLFHGEQARYMPDLSGGVKQLYVYAPKLIEDNKMTHVTFNPDSINWGPLLALEQVGGGEMQYFVGTRHQRGAGLLRNVARFLMPVASNMLKAVSREGVTAGSRIMEDLSQGKALKESIQAHAKHGMENLAEKLKQCGKGAPTRKRKRPVKKVKVPLPMHSLRGNKRQAIDQLTFAP

SEQ ID NO: 150655 - protein, 113 aa, Heterodera glycines
MRCSFALSLLFAVGVQLLILRMANSEKEFVMAKREMRDGTVPLSFKMDRNAFRMSFGKRNAALLLPFPAVRSSVPRPLDIDRNAFRMSFGKRMPISDGSGERMENVILIIFRF

SEQ ID NO: 150656 - protein, 19 aa, Heterodera glycines
MANWQCFFVSDHWPTLIAY

SEQ ID NO: 150657 - protein, 40 aa, Heterodera glycines
MDKGGEVTGGRTVMCDGAAVEYRGTLFIRRDAYREEKLPY

SEQ ID NO: 150658 - protein, 162 aa, Heterodera glycines
MLGKNIHGIELPVGIFHRLRQFTPSLLNECPSLRISNAYYFCFFPEFPCNDNAAASDGQAVAKWLFTPLQDNVPKVFNCWLQNDEANLTSKVEVLIDLALLWALGFSDKNINNYIIKNCFCLGFISVQFHHFHFVSFAFCFLRCTICSNQRIDSGAIGVEKN

SEQ ID NO: 150659 - protein, 24 aa, Heterodera glycines
MVFHSITEKILDSVNHSHQMTKKK

SEQ ID NO: 150660 - protein, 33 aa, Heterodera glycines
AASRPRTGALRPFFKFCWAYTCASRPFLNLLGY

SEQ ID NO: 150661 - protein, 294 aa, Heterodera glycines
DKLLAGAVNGMALLVAKGITEFPSNVKLSGYLDVYWIVRDGGLCVLITFLLKQSKVWRSCKTRIVAVARPQENSAKLKKQLQHYVYQLRIDAEILVTELNDPELSTTAYERTLLMVTELNDPELSTTAYERTLLMEERTKMLKQMQRRGMPSLQSTQPKRTLELTDPFGANGLPLSVAFQPNTQSQEEETQEEQTKASTDEDASEEQTETKGRKEGQGTTEVHKMHGAIRLNELILEHSRCSQLVLFSLPKPPFFEDEDDYIQYLEVISDNLQVISDNLQKVLFVRGTGAEVIT

SEQ ID NO: 150662 - protein, 116 aa, Heterodera glycines
MHGSIGVGDFIIGPDSSDSDGKENSGQGSASTSFVAGQSTDSYISSLKAKIIELEKVKTELEVEKKRQEEANQQFYTYWCNENAKFEKVQNEFQKFQLYHCVRKAILDKIVGTNGG

SEQ ID NO: 150663 - protein, 608 aa, Heterodera glycines
YAWQRECLEDERLVEGRENFVLWLPTGAGKTVVAELMMLRECVRWRRNCLLILPYVAIVQEKVISLSSFEEKLGIIVEEYAAAKGRFPPIRRRTAKSIYICTIEKANGLVNSLIENGRAHELGLVIVDEIHMLGEQGGRGALLEQCLCKLLFRPTNEQQQERVQLIGMSATLGNASELCRFLGANLFRTHFRPVALIERIKLHDKLFRVDEQGEWRMEKELEKGNLLERRDPDGLFKLLGNLLKGSVLIFCPTKQSCENVCQMLSNFSPKQLRHRADERNALIGRLMQLRHRADERNALIGRLMDEHEGLICPVLSACIRNGVAYHHSGLSSDERQLVEGAYKSGISGIISVICCTSTLAAGVNLPARRVIIRSPHVGREQLKKAQYLQMIGRAGRAGLDDKGDSIVILHHGTEAQTFKKMHEGPIEPCLSGLSDFKKMHEGPIEPCLSGLSDQVQLEGFFLDLIVLKLCSSLDDLFLCSSLDDLFRFLRHSLFGVQHTDDKLLSFVERTVQSLLDKKMFDKKLFPTQIGSATFNANFNPQMATQIGSATFNANFNPQMALDMCNDLGANLGKGIVLISHFHLLYNCVPLDVAVQVDWNLFYNEVSQS

SEQ ID NO: 150664 - protein, 489 aa, Heterodera glycines
VADGHRVKPMRVEALFVFPGERYDILIRGLISPRRRGLISPRRRLYRIIVETMEYINWDWTHTKVDVDIGWQLALFSNLISNYLDVDIGWQLALFSNLISNYLKVDWTHRQCTPEAKCNVLNCPFEQFPPSLNLTCVSAHLLESAEPIEDTELLEQKVFPNSFQEVFANMHADNHFDGWLFEHPFGIPYFNRDNLSRIARLCDTSESCSPKTNAHWDRSCDCDRSCDCFVHFNFTLGSVVQITIYNMGDMGNPHGPGYSHPLHLHGTHFYLVGYSHPLHLHGTHFYLVKVGFGGYHANNGSIWTMNKDIPCIDDKVRCVGLKWANSTWLGGRCVGLKWANSTWLGGNVPAMRQRPSSRDTVNIPVGGYITIRFRALNAGWWFSHCHLMLFRALNAGWWFSHCHLMLHNMGGTAFAFRVGTDEQMPKPPDGGTAFAFRVGTDEQMPKPPDAYPHSCGIRRKVKLGTPFLAFSGCQFQMFLMNLMTINMFN

SEQ ID NO: 150665 - protein, 345 aa, Heterodera glycines
MYEVPFPSPARPRVLVELGSDMIAFESSDDSQTPLTGANFVETLKCLGTENLLYAMLLTLLEQKLLVHSLRPWLLTCVAETLCALMFPFSWNLPYIPQCPLPLGFVFNAPLSFMAGVDSRYFDLYEEPPSDVTCFDLDTATISQSAVRKLYQLSMLPKKPLKRLRAALDEIGTKISEKQPKKGSGAGGGAMDYEQTARRMHSELAIRDAFLRFMCCLMFMCCLMDGYTDFLCPIMDSPWKKGATDVCKLFDWEHFMQSRDKNSMEFYAKFRETTCFNRFIEERSTVEDKSVFYVFFDDCIAKLRAGEGNDFEKGANYKNNLVKIDNIFERIRFFFLINNLLKQTE

SEQ ID NO: 150666 - protein, 233 aa, Heterodera glycines
MEQIGVPFHDQVCYRLLMHLCGAYGRPEMAIIVLKRMLNMGIIPNAITYKVYHKALIQSEWPSELSLSAIAAWRRVQFRLDVCARFRAMLPNSANILPPPATHEQKLNDMTTLSTTNTTALEEEEEDDDNSKDCSNIVQEIVPMKIVEIDEPICEQQQQLLTNHHFCNNNNNNNNNKITKGKSTTMANANLFDPLGASVELETALNNVSIVGNGTPVSRPPQHQHNPPPKPPR

SEQ ID NO: 150667 - protein, 138 aa, Heterodera glycines
NLDTVSRDDSLVSDARSASTSSAAVGSPSILSLANKMRKRAMRTYNEVVGQGVINDLLERSGLNSPAQIFKEAKLNLSRSYRAADQSGLSTMSSSDDNLFAMSIHYWMNDILPDDDAELRDVWLRYSAGPVSSPEEYL

SEQ ID NO: 150668 - protein, 107 aa, Heterodera glycines
MPEESNNNNNNTSNNNSVNANAQLWKLLRKKYILTFNLCHCCSQKLFNSTKNNNNSGEAASLIITQHLAISKTIARTLTLGIIKATHTTTTTAMKVDKWYITTMPDG

SEQ ID NO: 150669 - protein, 266 aa, Heterodera glycines
MNSQQRQAERAQLRARLNLLVDEVDFVVQGLINNYQADGLINAAPADVQLMEMDNGHEQQQQPWELDPPMPAQQLEIGPQLPDAWELVPYQPPQWDQVVHVEQQQQQQHHQQQQQHQQGAWDEGWEEQLSPNALAQIQDEADGLRQDLTFWLDEGTAGIPDQQQQQQHPMQGWETPRTHFERPVPQRTPSPSGDAPAALIRELNFSDQCLLCMGEHGLDCEVTVRGNNCGCVTICDTCCENGWWARSRGTMCAPSVSAARRAESTT

SEQ ID NO: 150670 - protein, 137 aa, Heterodera glycines
MEWLEMLPIKIILLIFLICTPNSAENITENAKSRNERDLISVGLIIGAVTAVLTPIIIGSVVAGYVIGSNTAHANNDQSKLVKVFFQVQVTVHDQLLSISLENFTNEFLFEQIERITKNPSIQSICLHGVVLLFAYN

SEQ ID NO: 150671 - protein, 32 aa, Heterodera glycines
CGRSTKNSVWAIHKKSQCGQSTKNLSVGDPQK

SEQ ID NO: 150672 - protein, 16 aa, Heterodera glycines
MTRCLVYRFTRNVSLN

SEQ ID NO: 150673 - protein, 30 aa, Heterodera glycines
MGYQMVPRIKSLCHIVNVIQFEVLIGHIKI

SEQ ID NO: 150674 - protein, 47 aa, Heterodera glycines
MWSMPNLDEICFFDLKGTKRRHTRSGQIEIFLFYLSKMELPVSLNAC

SEQ ID NO: 150675 - protein, 200 aa, Heterodera glycines
MTYFKKVNNESSQNLSKSTLERYLSRIKTSVGKYSTKADETKYIARQCITKNDQEKLFLIGKEQEDNWRKFGVTLIYNNKFYISCIKCQIIQQKLFHPEINQLEEYIRNHKMPAIDATEMFKWASNIDFLAAAKLFQLNVIVCSPNIQTSQSNIKYTWAVYSPDSNNSLSISLKSDINSIFVYYDCHGHFEAIINPQEIN

SEQ ID NO: 150676 - protein, 177 aa, Heterodera glycines
MPNWCHLNGKINFLALIYCFNQQIQLLRTIEGEDGKPIQTNGFQKAESFDVATDTETLSEQSLSFHYPTYNSVRRSYNRRRQQAHGISTDSYNLPESLLITRFGSIKLALNKELSSQDNWVIYRNREDGIIIFATKTASQAMQKCPIIALDGTFEVAPKPFMQLYIVHGLVLDFIFI

SEQ ID NO: 150677 - protein, 310 aa, Heterodera glycines
MNESVLDLMKRGIETYNGLPDQALIQSQPKPLLLVLDDLMLNVGSDFLDLLFTRGSHNWNVSVIFVTQSLYGRNIRTARANSHYLVLTRNPSGQLQVRTVGSQLFPKRLNYFMEAYNEATSQPFSYLVINMHPNAPENERLTSKIFPGESRELNIWSRKLLQLHRHNNKMKHTKKMLLVPESEYLALINLLKGGAGGTDSLQAEKAAIDASIQKNLNDNKTGADVKMKRHSWLYKQRHQIKDMIENKPQKLKTGPEHYDKLHEMIERNPEKYGVDKSSGEILTNFKKPVIRSNYIDSLMYLTGQRADVPK

SEQ ID NO: 150678 - protein, 107 aa, Heterodera glycines
MSHQPFANFEIVRLEAMIIGLEIDKEQLQRDVYHLKNRKTQIHNKKFELLQQKEQLIREINVLRETKATLVNETKDLREEILELRDTDGSTDDPLCAVCYTRKVVSV

SEQ ID NO: 150679 - protein, 46 aa, Heterodera glycines
MASIWVPIRIPNPDRKETKVFIEIIQKLIAKETRAMNRLRRDQKEK

SEQ ID NO: 150680 - protein, 89 aa, Heterodera glycines
MGAAGYQGTPGNEGEEGREGAQGRTGPDAAYCWRQRWRSLPPKAPKVTLNFTSTVEEGEENNGETGNVTTKMTTLANDQTKRKVGPKKL

SEQ ID NO: 150681 - protein, 226 aa, Heterodera glycines
LRRRHLRRPCHPQVSAPQMSAPQVSLWLAPQMSAPQMSAPQVSSKQVSAPQMSAPQVSLWLAPQMSAPQMSAPQVSSPQVSAPQMSAPQVSLWLAPQISAPMSAPQVSSPQVSAPQMSLWLAPQMSAPQMSAPQVSSKQVSAPQMSAPQVSLWLAPQMSAPQMSAPQVSSPQVSAPQMSAPQVSLWLAPQISAPMSAPQVSSPQVSAPQMSAPQVSLWLGAANLSS

SEQ ID NO: 150682 - protein, 231 aa, Heterodera glycines
MDNPEQFVDEKEAKQIINKQCYHNFGKMDVPMSNAHITVPIPVQLCKKAYLSKLLTYYESSDSSCSQFQRYCYMLNCSTMNNNNQIELITEWGCTDANYDTDDLIHGTGRALAQAYIGPIPDNSLCVSAVALQTNAKLVMKLWATKPQLANVLQTLIYAMQSNAMTVNLPINNLFHSEFGPNPFFCLKVISQTNLSKSGAVLRAFQMFPSFAWIKLLNLASDLTSVCANVI

SEQ ID NO: 150683 - protein, 53 aa, Heterodera glycines
MAKKVGVRAIIFCFFVGNASRTLAQNRKSEHPSENQTISPSRKQSTKFQKNLL

SEQ ID NO: 150684 - protein, 186 aa, Heterodera glycines
MAFPYVVNLCANEKPNWSFLLTLGPKLMKFIKINTKLPPELNNELLHFVPEFYYRRVLISSNFLVYYFFNNGKRGKRLKCKDVAEREAGTTYTFGAGTPIRSFLPLDERHRVANFLATMNIYQFFHPAEGGGHYALVSLRMSGPDERQQIRSYFQREGIAMNFDNRFCTSGIRLFLMNNLVIIQYT

SEQ ID NO: 150685 - protein, 91 aa, Heterodera glycines
FSAVRYERKIQPKEEASFDYAFIPSDAFVGRPLGLVVNLHYVDTKRNPPNWALLAIGNSRRRSPAEKGKTKGGTMTKRKVCEFAKQSVILM

SEQ ID NO: 150686 - protein, 56 aa, Heterodera glycines
MSTNAASPTPKATTAPSVQRKSSTGEAQQPPPQKRPKRVVDEAELSEGEILSDEED

SEQ ID NO: 150687 - protein, 184 aa, Heterodera glycines
MEGGAMVLADGGVVCIDELTTMREDDRVAIHEAMEQQTISIAKVRASAIGHSDHCASTRGGGPPQRGACQNGIGSVCGRTPRGRSTPTVQSVDHCCGAERQSVGPFSVGVEGFTSAEDQESFTRVEKQLKKRFQVGTYASEQLIIEEFARQGYPEGLVRKAIDFYVRRGDLQYRMQRKLLYRFK

SEQ ID NO: 150688 - protein, 40 aa, Heterodera glycines
MPSKQQMITKCRSNIYELNDAIMAKENDHEMRTSARCVYR

SEQ ID NO: 150689 - protein, 44 aa, Heterodera glycines
MIPSMLNLDASGKSYGVDQKLIFYGDQLFNQCILGVPVHYKGVI

SEQ ID NO: 150690 - protein, 144 aa, Heterodera glycines
MFSWKSPGPPDKISNNGSFPTISDSVKVITNAFEINLEKAPNKVYQYELRFSARYLNTKVDIELSRGPHNDESNETRRELNLSLWQILLDENKEFFGKNKNMFCYDCERQLYSTKYLTARVFQIKEENKIRERIFKFILIFSAA

SEQ ID NO: 150691 - protein, 31 aa, Heterodera glycines
MEISFNQKIKLISFINRKGIGMKILHCLIDY

SEQ ID NO: 150692 - protein, 33 aa, Heterodera glycines
MAIPIDERFLFYGKWMCRKKYVFIKVGETKQKE

SEQ ID NO: 150693 - protein, 87 aa, Heterodera glycines
MEYRREKHRNIGEGVKAFGIWQNAGAGLEMGFHFLCKMPSQKCITQSKLNVNNSKIQLESITAQQIIHFCRSIGSRVSSRSIKTRRL

SEQ ID NO: 150694 - protein, 118 aa, Heterodera glycines
MNGGVCIWSMIERIMTKEELRRRLLVVSIERSQPKYLPNNGVNAPTNLQCHGDIQYAAVNPVTAPSNAQKFLAQNQQKFTRQAFQMPEMNQEPRHFPTYLYPPGLAVIEFPITDIREP

SEQ ID NO: 150695 - protein, 294 aa, Heterodera glycines
MKRVSKDLGFESIDCAAHVLQLCIKEGLKKIDEEERLKELIENVKKFVRKVRKSRVLTEKLAEFQSNEEILQTVLLKNTEVRWNSSYKMLERFLINRSAVNLLAIEHAELPKLNADDWTLLSSVKNVLAPIYEATLLLQNRNASSSIIIPLFKYTDDLLVENNASGSSSTDIFSQFEKDAEFDQLINTAPSPSPSALEIKQKAEVEVNEYWRDAKIKAKSDPYAYWEINSQKWPMIGRIVPKFLSPPATSSESERLFSTAGLISNDLRKSLAPENLAKLLFLHHNLILTGFSSE

SEQ ID NO: 150696 - protein, 119 aa, Heterodera glycines
MEQPAGNESKVPPHEIRGIAPVGVLLNAFELNLSAVPDKVFRHELRFVAEYPNTKWGQADIQELTRELRNDGGQRVPLDKQTLQAEAQQLFPLALAFAASNEQIEKIEPTNRGSQHIYN

SEQ ID NO: 150697 - protein, 73 aa, Heterodera glycines
MALLLLTFFSFRFASPRHRWWWAPADCECVKHPFASAQMNVHQHVEPVADQRHAEAEFVDVHAFEGVEQDVVA

SEQ ID NO: 150698 - protein, 66 aa, Heterodera glycines
MVAQIVVYKWRTVWRQMPAATLVDGGEQRQLQQVSKRTDRTLPIPQGPLPDQVVGFKGICIHLILY

SEQ ID NO: 150699 - protein, 203 aa, Heterodera glycines
MVDVERLKVAFETCPPSSVRNVCIIAHVDHGKTTLADFLVSSNGVISARLAGKLRYMDCREDEQMRGITMKSSSISLFYEPLLLNLIDSPGHVDFVAEVSSAVNLADIAILVVDAVEGVCSQTESLIRQALSCKLDILLVLNKLDRLVVELKMREQEAHRHLQRLLESVNSCLSQAIHGQLLEEDWHTFEQVERTIKENQFIA

SEQ ID NO: 150700 - protein, 46 aa, Heterodera glycines
MRTCAIPTTAPAQIALKRVEIAKDSAWRMSDSVWEQTPSTSKDAMD

SEQ ID NO: 150701 - protein, 400 aa, Heterodera glycines
CPPSSVRNVCIIAHVDHGKTTLADFLVSSNGVISARLAGKLRYMDCREDEQMRGITMKSSSISLLYEPLLLNLIDSPGHVDFVAEVSSAVNLADIAILVVDAVEGVCSQTESLIRQALSCKLDILLVLNKLDRLVVELKMREQEAHRHLQRLLESVNSCLSQAIHGQLLEEDWHTFEQMESLLHFDPSKGNVLFASALYGYAFASEDFADLWTKRIFGQQKIGDKSPNDHREIVKAQLNANLFSSDHFFATNSKQILPGAEQRGKKPLLEQFVLEPLWELHRCALVEGDMDKLRQMAAKLSLPLLKGRRAEEVAKGGRAFTEMMRQWLPLSSAVVRACARMRSAQKAFQTNNRLEQLLPIGCEVGPARLCFCHSFYALSSFRSLRPLSSMPYATATPWTN

SEQ ID NO: 150702 - protein, 44 aa, Heterodera glycines
MFDFVDKEKIKFLVENGGADIAIVASDGLTALKAAILTNKVEIL

SEQ ID NO: 150703 - protein, 62 aa, Heterodera glycines; identical to SEQ ID NO: 125756

SEQ ID NO: 150704 - protein, 53 aa, Heterodera glycines
MAGWDVRKPKKKFLKTLKNFPYSKNIKVFHNHLNIRKSRSIGERTGERKGEFS

SEQ ID NO: 150705 - protein, 34 aa, Heterodera glycines
MDNVWSFWLIKYLILFAIKQLSVHLITKNLGHIT

SEQ ID NO: 150706 - protein, 66 aa, Heterodera glycines
MHFSLGLFLFFFPLLIFGQDLDFMPVPVRPISAVNSSAGGGGEHLQLRQEPRCLESVEAGTGTDTV

SEQ ID NO: 150707 - protein, 20 aa, Heterodera glycines
SVTVFIYIFIIIFMDISSNC

SEQ ID NO: 150708 - protein, 243 aa, Heterodera glycines
EHLKPGPPKAAAHQPIYCYICGRQFGSKSIGIHQPQCLKKWKIQNDQLPKEVRRTEPEPPKIVRKADNSIDVNATNMAAYEASLAQLIRCENCGRKFAPERLQQKFLGGAYGNDVDNLDAPKQHILGGVGGEKQLKPEDAQPRRMRGAWPWIPPRNDTNGQEQRKFLGGAKVETVVIKPEDAQPRRMRGAWPWIPPRNDTNGQEQRKFLGGAKVETVMIKPPEADDQKQQQTILGGVHGNDAN

SEQ ID NO: 150709 - protein, 196 aa, Heterodera glycines
MAQIVKVTHDLATDLWDWPLQINLSADHLFIYCHHEERVDEHSWVKRELHRSYKVPEDVDAGTIRSHFTRNGILQLKAQKKNTIRRPSINVEVIAEETPKKGQKAQRKYGAAAEAAQKSGKKVVVEVEKEKMPVARPKSPRENLFTSADDFCSSQMPLGPFGWSANLFDLTDNLKEILLRSANNSSSSINALVGKS

SEQ ID NO: 150710 - protein, 173 aa, Heterodera glycines
MRLSPVLLLTIVVIVVLAKNAKDSKTDEAKRAKEPRNRPAMSRRRRSAYSAIWSELKLAKEATSIGCKVLHTKTCDAIARSERGTPTTLEDIVPSDVDALVEKATVALKKATETDGFNELSEAEQRRVLLETAEKQGEIVKVKQQDGTKMSTEQSGKSCGNRLFVSSTTNKMF

SEQ ID NO: 150711 - protein, 79 aa, Heterodera glycines
MIKVAQPVLKWLKEAEEGSDESEDDDLDVAFDDRSRNIGMTVEVEKGAKDGVTRVQNGQIATNGKMDDGNADDIDIDNI

SEQ ID NO: 150712 - protein, 86 aa, Heterodera glycines
MEMLCLFSTDDLANVFATYCYAKGFIWSQEEPRNAGCWAFVGPRFQSAFGLTLKYAGRTEMEWFATSIIETHKEEEMHVMDSTFAQ

SEQ ID NO: 150713 - protein, 556 aa, Heterodera glycines
LLELFGMASPKFVFALFPSSSRSTPPPSEQFIFDGAHRGRLALQTVLFRFPPGQLFRKMRGLAEFPGDVKGIGDKMRGLAEFPGDVKGIGDVLVLTHQHSHFDYESPAGGRVHVSTLPNPSHLEVSLAVCSGKARARAVSLAVCSGKARARAQTLRSNRGGGGGGEGMEGEGVLPVHHHGDGAFTGQGIVWEVLALSQVPVLALSQVPHFRVGGAHFRVGGAIHLIVNNQIAFTAESAVGRSSLHCSDVAKAIDSPVIHVNAESVEDVIFAAQLALDFRQKFRKDVIFAAQLALDFRQKFRKDVFVNLICWRRYGHNELDNPRFTQPLMYHSVDAKRCLVDSFVDRLANRFTQPLMYHSVDAKRCLVDSFVDRLANKGLFSTDQSESIVSGHSEMLSEQLELVDSGRTPPIAEHLGGLWKGFCQAPAAVTKWDFCQAPAAVTKWDTGMDMDLLRQIGVASVTIPEGFIVHPHLKKTHIEARRRKIEQGQGFIVHPHLKKTHIEARRRKIEQGQQQIDWSTAEALAIGTALLHRVRIGDSAGGRATFTHRHAMLVDQ

SEQ ID NO: 150714 - protein, 317 aa, Heterodera glycines
MLSLYPQLTEAQKLSRVRILLTGQARAELDSIDPHPTTLGDALNHLKGKFENENTRSIARQALSICRQAPGEKVYEFANRLNEAIRTALAGENEGSIRKRLLEEFLERLNPDLQFEVKAGRPANYSGAYELAQHFELLLASKRETQISVADSMAELSTRVVTLALTQQRDGDFKGQDRRRCYYCRRQGHVVRDCRIKKKDENDSRRWGSNNDGRRWGSNNWHPRENWDRGRDDRGKILRQIAEDKGTKETIGKWRTDLQEKGNTLMGQKIKETAEPRLPLVGRKMKDMSKQIHHQAEYTLGDGDLPPQDWRVLFSWP

SEQ ID NO: 150715 - protein, 116 aa, Heterodera glycines
MTEQNMNNSQSGSNIQMPACSMGSDFDAIYFSQEENQTMANLLNRMRIFESSVYHQFRAVQQEISNFTAEIPKQKAIGRLEELERSMNDLENMEEMDNFENTEKWAKMETKVENLT

SEQ ID NO: 150716 - protein, 93 aa, Heterodera glycines
MAIKYGQQIAKYRHKIAKISKYGHKMTKYGHKFFKLRVTRFNPIPDPVKKLGLGPGPGFSIPGNTHSDPVFGQILGPGVPYIKAINEKYTPKN

SEQ ID NO: 150717 - protein, 118 aa, Heterodera glycines
MPNPLLLLIIVVQLFQAIHAQPARLRVPSADFFGGIGHRLSGDENVAMVFMLLMITILATNTAILIMQIVMFWTVISRPRAAAGEQQTEKKKTDNYKKMMSNTNGKVTSPVFLYCYYQ

SEQ ID NO: 150718 - protein, 58 aa, Heterodera glycines
MHQFIIISFCFNYLLLVHFVVNKSINSQNIKKIEFFKFQSSRVKSVTNTADRLTSVLA

SEQ ID NO: 150719 - protein, 183 aa, Heterodera glycines
MKFQRNLCRFWRQILIQNLIRQTNSLISRSLGTKEGVVLVSFGTNDAFTGPGDAQFVKALAGTMDKFPNILFIWKLTQGIEGQLQFKWDNVITQSWINQKELLAHPKTKAFVSHCGMNSLLESVFHGVPIICVPFIGDQYYNAELMAFRHIGLAVDRENDQQTVQNDLINALSEALGRQQGKK

SEQ ID NO: 150720 - protein, 189 aa, Heterodera glycines
MLVPITDATYKLTNKNDEVQLNVRYFVQKKTKPLHEFIMEGDLSKMNDRIYHEIADDFELMDELRAEKFDVGMAEAFCFTEYSLALFHFLQIAVTISTQSQPMSPFQLYLMGHLSKMNHSEGMPTEFIGISTMNFFRNGGERMKLLNMRTKEQMDEELKWRRDEVWKNCVEQTLAKIKEHINMVEIIII

SEQ ID NO: 150721 - protein, 16 aa, Heterodera glycines
MTSKEHPTISEYLPIL

SEQ ID NO: 150722 - protein, 53 aa, Heterodera glycines
MPTEPALDGTELSRSMCQKGGQTTNIAGQMQQNNAKGFGKSFSGRLIQCHAYK

SEQ ID NO: 150723 - protein, 43 aa, Heterodera glycines
MIQFFHFSKFENLCVGLSNAYTSYLYNYKMRPTCSSTGGCGSP

SEQ ID NO: 150724 - protein, 75 aa, Heterodera glycines
MGIYCEYLIGKKFNISIPLTAPLITTEGYAQLTAYTNLPSNKCKKIEESDGSVFYFIHNHEEHVKSRNIEEKLQF

SEQ ID NO: 150725 - protein, 60 aa, Heterodera glycines
FFAYQIFAINAHLFKKYSILLKCSVFCYILRIAVHLKASVIEQISQISRKVQAVAVKIVI

SEQ ID NO: 150726 - protein, 81 aa, Heterodera glycines
FFAYQIFAINAHLFKKYSILLKCSVFCYILRIAVHLKASVIEQISQISRKVQAVAVKIVYIKTMAIRISALGPFTKLMCFY

SEQ ID NO: 150727 - protein, 223 aa, Heterodera glycines
MTQNKIAPRKQRTHELSWLRDDEMRALAKLTDVQSIWSLLRPILVERQVGTPQHDAVAHYLKTKVEEFGFTAEWDSFMAHTPMGVKRFHNLVATFDPLIHRRLVEFFTTLPFPHYLVAYLSLGKKVTAFPKQRQQFQFRHPQQWPVGPPSSPTWPNIGHRRRRRRATLFVPPPPPPTSSGGGAILAQLPQSRASVVPNSWPIPPQSPPPPANTRRGGGEKVDS

SEQ ID NO: 150728 - protein, 78 aa, Heterodera glycines
MAPPPLDVGGGGGGTKSVARRRRRRWPMFGQVGDDVSYGYFLGFLVTIILKRNKRKSFVLNRTIQEIFYDSKILIDCD

SEQ ID NO: 150729 - protein, 80 aa, Heterodera glycines
LISSQKSCQLKTAKKAEFSKFFISIFFYSSKFFVIFSRLIEPVKSFRMISRLFDSVNNFKSYIDSKLAQTELARRSWPVP

SEQ ID NO: 150730 - protein, 19 aa, Heterodera glycines
MCQKKQRKEKIKRKEKSAK

SEQ ID NO: 150731 - protein, 281 aa, Heterodera glycines
MRYDELRFPCRRQGGDGSSGTFCQQCRFVFPNADCFEAHRRRVDVAPAPPPGVAAAAAAAVPHGGEEATGGDGDDAVSLAAAVGAAVAPAFADRRRGRPHRSMCEERRLCEWCNVVVWARSGPHVCCRRPQQQQQQQQQENRAVLQQQQQNHHHQQPSRPKCEKCGGPHDPERTPHFIQPKQYARQCQWRRGAARGAHDNADDGAVANAATAVEDDDDDDNVSEEEGAAAVAERDGAGDGARGRVRKPKPVRFIFWDVECAQERVGEQQEQLEDGNQFVFK

SEQ ID NO: 150732 - protein, 421 aa, Heterodera glycines
MDAVQQQQQQLPELLKHVPVLVCAEVICERCIAYGVDIEREPLRRAPQCQCGVPWRGANRRRWCSRIGEELFDDDDTGGPATAQQQQQQMPPDGLNPRRLRFFCDGEPGTGRGAMAQFVDFLLHTGPKGTRTVMLAHNGGRYDVHLLLEELQRRGERPKKAVQHGLRVYMLELRGTHQRQLICKDSLNFFHAALATLPRTFGLHGVLDKPFFPYHHIREQNLDVELPAGTLPPAAAYDPDRMRAAQRADFMAWYERELHRPGRQPFVLRRELLRYCWNDVRILRAACLRFRELVGECADGMEPFLAATTIASLAMAVFRQHHLRPHTMVHTPEGGFLRGRRASAESRRFFALLAAMRPDLGPLRTARWSVGEMVVDNSSWGGDDDGFRLDCVAYRRPPLRPLCIEFNGCYMHGCRECYPDA

SEQ ID NO: 150733 - protein, 225 aa, Heterodera glycines
MTKRPRSQSEYSPMSKQSDIHQLIDSQMKFAKNTIDALNKLQDSFTLDQKPILSHLISTLSTQFDLLNSSIVHLRSADPTQKDVPISAEELERQRSVVIIGLPEHNDISPSKRGEMDRSKINCLFDSLGIECGTISYRMGRPYNPAQKSARPLKVLLPSRAFQRQALVEWRNKSNTIRSKDPSLQNVRVRESLTKAQLDERRRLHAQCVEKRQRDGQDWIVYAGS

SEQ ID NO: 150734 - protein, 103 aa, Heterodera glycines
MLNPAIYCSCFVEQMSHKIDSKLSQGFEARIITPTLLRMVNDFERNLKNGKCKFSTTPAISEYFLRTIVAGKNQIYGQMKIGHSNTFRLALCQLLHLNNFLAE

SEQ ID NO: 150735 - protein, 61 aa, Heterodera glycines
MKVLDKLKLVKNYACFKPPPIRKKNANPLHLAVHRNPLQLVQREIAILKKLSHPNVVKLIE

SEQ ID NO: 150736 - protein, 33 aa, Heterodera glycines
MSSDLAPPTIQTNPVETGDGAESSYIQLNQASH

SEQ ID NO: 150737 - protein, 192 aa, Heterodera glycines
MVPSTSILERDRINIFHLYTKSKLSFFLVFGNFPFCYSKIGLFVFKFDFHAKKRCSVLKLVISGLILVAFIMTLSFLFVFTELSEHVNKISSYVAQKSPFTACSLCTDIKVIGGEEYTKFEKWTDGNGCLRLTITCGLEQETEAIIQWFNEDKNMGASFMERFGQSNVIRSLECNARGRYELFENGNRGISK

SEQ ID NO: 150738 - protein, 24 aa, Heterodera glycines
MNFDAADIVEQGKNISRSPSTGTE

SEQ ID NO: 150739 - protein, 54 aa, Heterodera glycines
TSSGPKAWKICFLVIVKQLFELLAPILSFLFSLNPKKFNKTYVDLFCVLLKIYE

SEQ ID NO: 150740 - protein, 97 aa, Heterodera glycines
MQFEDDSILIAFIEEIFLNLLNDKNFVDELQGENNFNNMRLKIVHWKCSPSGTDYDAYVAFLKKILLGRKFCKFCRLLALILRYFFAKYSIILKTTD

SEQ ID NO: 150741 - protein, 77 aa, Heterodera glycines
MSGITSAVVNLEQTDSQTSCAVKPNLHPMLHNVIWHLLNWQNFLRHRNGKINYLFQQLVYTFFMLFIYFCHSFIPSN

SEQ ID NO: 150742 - protein, 60 aa, Heterodera glycines
MSLTRASNGTILSAKWSDGTNTHYGNPLKVADRTPWYTPEHRPKQDSPESNCVFMLLTNS

SEQ ID NO: 150743 - protein, 82 aa, Heterodera glycines
MKNVPPNHWIERMEWPPGKENEVVLTPCRRGEQKKVAPKCCFLLAFWPKALFECYLSTDERIDDAPAGQKVLEQKYEQCQKI

SEQ ID NO: 150744 - protein, 163 aa, Heterodera glycines
CFIGVLIILHGLAKKKSINFWQFANLCLLFGIKNLPIFFVSLFFWARPQFHWSEAQNWFPNDKFYINPHNIMAVLLQDYDKASNPTGGVIEVQAEITVQDISSLSETSSSFVVDLWFSQIWSDPRLVYSHLSCKSNLSLDESLAQQLWTPNLCFINSHDTYIH

SEQ ID NO: 150745 - protein, 66 aa, Heterodera glycines
MRAWTKLYQYNVNGQRQSMMLPAVPTGTTTATTTTTPAHLCHNLEQIRIYYLRNKDTYEASIIQIN

SEQ ID NO: 150746 - protein, 21 aa, Heterodera glycines
LGIGRRHHISLAYSPTLKMED

SEQ ID NO: 150747 - protein, 392 aa, Heterodera glycines
MNFWRHTAEAIVAFIREALNDFQIQEEKISALTRDTENTMKKCIKEGLRSIEEEERLKNLLENVKRFVRKVRKSRVLTEQLAELQQKEEVPPTVLIKNVEVRWNSSYKMIERFIRNRSAVNLFSIDHCELPKFNADDWLLLSSIKSVLSPIYEATILLQNRSSSCSIIIPLFKAISFGLREDKDNRFSNIKKTIANAIELRLKQAEEQKNLVLATILDPRFKTIYLDSSRLNQYKDWLISEVESYHAKTDEIDLQIDVRDCSGSSSAGDIFSRFEKDAEFEQILNTATSPSPSALETRQKAEVEVNEYLRDPKIKSRADPSLYWEVNSQKWPMIGDVVRKFLSPPATSSESERLFSTAGLISDDLRKSLLPENLAKLLFLHHNLLLTGFSIE

SEQ ID NO: 150748 - protein, 231 aa, Heterodera glycines
MSNLNPGNWWYYFERQGKATAKCKADGCSYSKTLNASLSTTVLTFHLKNHHPELYKQREDFVQAEKQKTEKKGQSGINPLKRAFANAFCGSSQQITDDEEKEAPISSKSPILIGLNAKRRHTAEAIVAFIREALNDFQIQEEKISALTRDTENTMKKCIKEGLRSIEEEERLKNLLENVKRFVRKVRKSRVLTEQLAELQQKEEVPPTVLIKNVEVLFFYISPFYIKAINF

SEQ ID NO: 150749 - protein, 71 aa, Heterodera glycines
MRRNASSAGGGSVRSERGGGGGQKATTPAGMAQQNSNNNRQTPPQLRPEREEEGGNIIEACELRPTKKDYV

SEQ ID NO: 150750 - protein, 91 aa, Heterodera glycines
QFSEGGSNGEKCQSVDDGLSCVPSRSDNRAHRVNAVNKQQRRTTLILVTIVLFFFFAWLPHNIREMVIEYDEQLLHRDGINYTYFLSMVTH

SEQ ID NO: 150751 - protein, 63 aa, Heterodera glycines
MARDRHFEKSLYLDLDLDSMLDLDLDFLDKNPGKSRSRKNPGSSGPGSRPGPGFFETHFKIKK

SEQ ID NO: 150752 - protein, 112 aa, Heterodera glycines
MTLTNEGANERQQCLHYVDQQPDPSNSQWAIALFLGLYSNIFVLGLLGNLAIVLVTVQCRQLRSVQNIFILNLAISDVIVCLLSLPFTPVSYIYKGVGCLARPFAICYRWFR

SEQ ID NO: 150753 - protein, 99 aa, Heterodera glycines
MAELWVNHSPALPAPASDNNWSINGLMMMASMRERVCIGETDGLEKRGILSAIGTEKSGTGKGAVARKDGMGMDKPHKSSIGGTNPSPRSPSNRNTISI

SEQ ID NO: 150754 - protein, 77 aa, Heterodera glycines
MLLDTIHQPLSLCDGHNIAIVHRSGTINGRFISNLVILQRYNMSGKYLVFKVLVIISTIKVIVDKCVDYYGSSKHWE

SEQ ID NO: 150755 - protein, 75 aa, Heterodera glycines
MCRRICSAINNFMRHKQIKQLSPILKCWQLQRIRMIASIVYHNWLKLQVLYRCHVVIIWPKHGLVCLSVHRTVGN

SEQ ID NO: 150756 - protein, 125 aa, Heterodera glycines
MLLDTIHQSISLCDGHNIAIVHRSGTINGRFISNLVILQRYNMSGKYLVFKVLITICLTKVIVDKCVDYYGSSKHWEKLVRCELSDPANQSEIIGYTVYNILIIEVAEVLCYAMLWLISWWNQCQ

SEQ ID NO: 150757 - protein, 54 aa, Heterodera glycines
MRPTGNNFIQFIFLYISFVFKFSNLNNNYVIKYRFVPNDNIFYLADRFTPNAIF

SEQ ID NO: 150758 - protein, 132 aa, Heterodera glycines
MCDNVPRKIWRPPFRRNLPLGPQKIGKCQPFRQKIIFRVWFQGVAAKIGTSVPFPCTENDGTVIELSAHFPSNGRVVDTLAAGDCFVAGTVHFLNAGDGLRQALIKATFLAGESVGQRGLMGLKVPSDDSSI

SEQ ID NO: 150759 - protein, 32 aa, Heterodera glycines
MSTWTIIIYCAASAISSLFILAIVCEIRKSLK

SEQ ID NO: 150760 - protein, 469 aa, Heterodera glycines
RLIITLQIVHLLCLILFYAFAYLWVSHIYKLREVTSEKTKAAAKSARQLDSPGKWSTVLLGYDTIIPRQVFETSRQVFETSCQRVHRYCADKGQKLRGVRGPSGGKGPPGPVGPPGRRGPSGRMGRRGPSGRMGPIGPVGDIGAEGPPGSDGRCNCSLPDLYVQRVPVPGPPIIEKLVPVPIIVLKEMEVTKLVPFEVPFEPTPPGFAPPLGWVPGMPMPDLSQTRLPPLGWVPGMPMPDLSQTRLVPPTVRPTASSQYRHVVAPVAASLHHKRNGNNDDGDSNTTASTPTPYTGPPTLSENRRECRLNAVGIPVCRLNAVGIPVLHAESQYGTTGSWFRDSMPRSGKWKEKRWVTDGDASPVLYEYANERELMNKKQNIKYYVDFLASGTGSTVNNGSYFYHRHGSNILVRYDLESNDQIQSDALGPIASLDCEKLPNWCHNFDKGPWKPDQTFTVNLIFAVNSFTLF

SEQ ID NO: 150761 - protein, 115 aa, Heterodera glycines
MISDHSISYHFTWHSEAPPYRTDRGQPRSKIAVQSEAKQIRDKRKANEDEAEKHENGGLAISAPNLGKLSPVQLSILTKQRSVLRTVPRHFLLLMDTNPFVQFMQGQMVERFIGQ

SEQ ID NO: 150762 - protein, 114 aa, Heterodera glycines
MANFCSKDSTSAEMRIEIHFDITLHKLSCPLVTIDVMSQSGESQDGIQHDVFKQRLDKQGNNMEGAQPEKQVVNTNASKSANVSRRTSSDEECGSCYGAIKGSVGQLGRSSDSS

SEQ ID NO: 150763 - protein, 115 aa, Heterodera glycines
SPIFMTPERMNEMGYSFKSDIWSLGCVLYEMAALQSPFFGEKQNLLALVRKISKCEYPPIPANIYSQQLRLTIANCICTNPSRRFDAQDVLTISEHMHSHFSALSKSAPVSSAHL

SEQ ID NO: 150764 - protein, 149 aa, Heterodera glycines
FPAPPPSPHSICHFVHDFHSVSPARFDASHTINHLSFGKPFPGKTHPLDGKQFITNKGGIMHQYQLKIVPTRYIYGVGIMHQYQLKIVPTRYIYGVTRKEETLVSHQFAITRVERDIMTGASGIPGLFVQCELSPLMVQYEERKRKLAK

SEQ ID NO: 150765 - protein, 66 aa, Heterodera glycines
MERQCKCAEIKPCKDRYQKTMEPCLDTCQSHITSLGGNFRQVKACFTPKESLLNSAMRCTERQHDN

SEQ ID NO: 150766 - protein, 417 aa, Heterodera glycines
MNSKTILHVFLLLFLFSSLFVIISLAMQIEEQQTKSIHNGDDDGNENEKNGNDSNFMLSDASAFKTYQKRENPKSAKTGKNDELDGAGAEKSNRRGKANGVEKAPQKQKKTDRIASKQRPMDKSKARNAITKQRRLNEEEAAAVAVDQMSEPAGIDGEEAEPSRHQSLTPSKRQRSARKKPNKSQWDVQLTPTGTVSDAEIPADDNSTRNLSPAADGPSEEPSSSKGVNNSPLALVDNWQRPQIKNRIREQTRRIDELGQEVAELKQWKAQQEQKQLNQSQEEALRQQWHCFVSIQQMMALQVQAQQMAHFQSANIQDLEQQSETDQQQTLFRPIASHGSVTERTVTAEEKEKQHEMQENGQHEQGGHQDEEVQQQQQFEEGKQQQTTNALMSSYHGLPREAQQEEEEQHQMHHHQQ

SEQ ID NO: 150767 - protein, 307 aa, Heterodera glycines
FKFCGEYNGEGHMQLKLAYGISLLVIQFLIPTSIMAYCYWKILQKVRQDWMVPASFSSTMTVEQQAQTLQKVRQDWMVPASFSSTMTVEQQAQTAMRKRRVMFVLINKVLIFMGSWMPLTIVNLVEPIIVIFVQLRDMDFLRDATNMYFKLLNVHAIAMTSIVSNPLLYFWMSKRHRRALRDDINWFTNMRRQQQQNVGGLLNKFTPSPSIGLLCRKNLERHLLMNAARRGTLADPTCISRERALQEMHANCFLLVPLMPLCESFTPTTTSATTSSNGHTHFTAIDFPRKRSNAFYKKCLLGFSFLI

SEQ ID NO: 150768 - protein, 68 aa, Heterodera glycines
MFNNLLPQRRHCLFLMRRLHLKTFLRPPPEIFKESQFLRLFVTLITNMTFVLLNSETWTRTRAKIQIH

SEQ ID NO: 150769 - protein, 122 aa, Heterodera glycines
MDRETLKRLQTMEIVDAMSNSGGQLVTQQIEKVIRRHQRLNKDQVLLLRKQCLDEQFFVVQFAFLTKLRWANRKVAKNGQMTDSDLLDIKNAQFRAGRRALWTDQTVLEIADVEEACLYQTN

SEQ ID NO: 150770 - protein, 104 aa, Heterodera glycines
LRFEPKNVLVTGACGFIGSNFVNFAFEKWPQSNFVNVDKLILNSDCNYVARKVRNSARYKSELADIRNGKVLKKVLEQNEIDTIVHFAADCTSKRCYNNPMESV

SEQ ID NO: 150771 - protein, 254 aa, Heterodera glycines
MVGLFAICISPVNIFHFPITASHNPKEDNGFKAYWANGAQILSPHDTEICRIVAEESKPEEAYWDTVQLGTSAFLHSADSVLEKYFAGESAICCHHKFHAAHFWFSLPFPFSVAQPNFVPPSHLFRFPWRRLQIRPPNEQDEPDADFGTVPFPNPEEGHRVLKLCIETANANDSTLLLVNDPDADRLQLAEKEANGEWRVFSGNEMGILLTWWAWTNWRAANPTADSSRVFVLHSAVSSQMVATMAKKEGLSLN

SEQ ID NO: 150772 - protein, 98 aa, Heterodera glycines
MKQTPMRQHQQRSRISEHEEQQHKAEEAAVDAVTLQYQQQIGGPLSQRGTSERRSYYSKTTHIGPSTEMEKRKRVERLFATSGGSNIVFEDGTLQTQV

SEQ ID NO: 150773 - protein, 95 aa, Heterodera glycines
MTQQIVQLSTTGKAQAANVWRKNWPNFTDENIPNWLVICAVWGKPQTQIGASSVKNLLIGTEECDDGMIDTPEKQMLYINISENPLIYSIRRRLN

SEQ ID NO: 150774 - protein, 70 aa, Heterodera glycines
MFAGTVQTNPNAVGNAGPLRVGRLALKTGLKIKRNHEISLSTFRVRGLAILTKRNEYNCDMYKINMCMRM

SEQ ID NO: 150775 - protein, 79 aa, Heterodera glycines
MSSGFSFFPLESDVSVGNCETYNENLRHHSKLSHSIIPADAQRTQCSKCLRDFLSFRWIPLFQSTFVSLDPIKWTAIPV

SEQ ID NO: 150776 - protein, 115 aa, Heterodera glycines
MSTETTESNEKKENPEGISSTVFFEHQQELLNETVSSGDEDFRCMSVTSNESEPIAEIESRLFFLKIQEPRLSTPTSQLPTETSDSSGKKENPEDISSTVFFEHQQELLNESVSS

SEQ ID NO: 150777 - protein, 63 aa, Heterodera glycines
MHSGIFGVADHEYDLSFGQFRVPDPNLDPKAKIKTDFYVVIWAADHEYDICFSKFRTLIRTKI

SEQ ID NO: 150778 - protein, 101 aa, Heterodera glycines
MCTFFKIECLFLIDYKNSILPNNTVFRTKGSTGEKQAEKHDNGTGCAKKDEAEDEAGEPTLKMLYPPDEEGQNNEAAVEDNDAEPEEENSGAEDEATSSPW

SEQ ID NO: 150779 - protein, 191 aa, Heterodera glycines
IGFPTKMPISTLPPPTQTVLSLLGMVHPRPISRSLITTDQAFTMREECYHRYANSDHHSSLLHWLHRKNASHYSPISPSYQQALLKLRQAQELAHGLQVTSGQAQELAHGLQVTSGASSCNSRKMKVISASTPLRERALCQFEYVLNYKPNRIPSTFTEVRIPSTFTEVKCSCPRPSIRMVGNRMFECEPL

SEQ ID NO: 150780 - protein, 53 aa, Heterodera glycines
MVTVSVGIRDWAKLGLALEAEAEGEAQFFSKHEVRSSKPKNREVFEARSTKLE

SEQ ID NO: 150781 - protein, 101 aa, Heterodera glycines
MPFLKIMDQHHSFIQVHWNFFKAIKKSQLCPNSRKSGRTNSSSSDSGREDDDQQERERVEGQTVRQNHLSDQRAVINDTFLTNTRTILVILSLAMGHFLLF

SEQ ID NO: 150782 - protein, 76 aa, Heterodera glycines
MALLEEFKSLSFFCYKCNGFNASKNELTIMHKKSAATAAAAETEEVEEEEEEDEEEENNNDDDNNEEEEKEKGKNE

SEQ ID NO: 150783 - protein, 94 aa, Heterodera glycines
MQLGTPVPMSHNVCADKPDYAVEKPALEKWSIGIQAFQHQPPASSTGFFKRMHKIVKSVRKNGPAGVEDGADNENNNKKDNEANGKKAKEHQKR

SEQ ID NO: 150784 - protein, 34 aa, Heterodera glycines
MVLDDDFINMSMEEHAAMLQNKGLIQHNVSSKRK

SEQ ID NO: 150785 - protein, 65 aa, Heterodera glycines
MAYTANVNTANFHGTLPKNNTHHSLATKLLNCLPSVAIPLPSPDTTSTNQRKQQKQQQPGRLKKL

SEQ ID NO: 150786 - protein, 134 aa, Heterodera glycines
MNLKRKRKRENEIEKEKEKEIENEIERKRKKKMNRKRKMELKLILKRKMNLKRKRKRENEMEKEKVIENERKRKIKLKMKMKLKRIREKGKVKMDWKRKRKMKMKLKLKGKGKGKEKGKGRGRGEEKGMGTEFF

SEQ ID NO: 150787 - protein, 145 aa, Heterodera glycines
MNRKRENEIEKEKEIENEIERKRKRENEIEKEKEKEIENEIERKRKKKMNRKRKMKLKLILKRKRENEMEKGNEIERKRKSKKKMNRKRKMKMKMKLKRKRKRENEMEKEKEKENENEIERKRKRENEMEKEKENENGIERKRKM

SEQ ID NO: 150788 - protein, 322 aa, Heterodera glycines
MAPPKRKQKFHADYEREFQAIKRSKKGDEYAYCVPCSFDINLESMGKAAIPVHQRSEKHKQNLRAMCMAYHLCRHAQSFKSSDCVSSDGLFRTMFSDSAVAKKFGCAQKKASKIITGNFSKFNVVFVSLFKGVLAPYSVQNMLNELGDQFFFIALDSSNHKTTKLFPIVIRYFCAKKGIQVRLLDLQALPGETSEEVYQWIIKMLQKHGLKFERIVAFCADNTAANFGSAEHRGENNVFYKLKTHKNNLIPVGCPAHLLHNAEKRGADNLPIDIESIVFKLTSHFKNSTRELNNCSTFAMILRGQMPYSLNCYKKWKDSSQK

SEQ ID NO: 150789 - protein, 251 aa, Heterodera glycines
MAASTVALGKVRMVNHRWGRKLNSFLAGRNRKSERQSAIPSAWGADSAGRPSTDPLAVLDGGGLLPLGGVSEEDGSHKGTGIEGRFRYVPFEELIERSDFLILSASVNDQTKGLFDKEKFERMKSDAILVNIGRWGKKKAAKIGRGIRLAHLRGCLVRTDDLYEALNDRKLGGAALDVTEPEPLPAEHPLFSLPNCGAKNELETMNCLSFFSNNPSHWFRQRRGPKTDDGNGTGECNRRAEGRRNAIANSN

SEQ ID NO: 150790 - protein, 78 aa, Heterodera glycines
MGKVSKTKSAKKSAGGSGNKTVIWAVEDIVDGPKYETIGTKRQKLYKVRWGETYELASNIPPGLIDLYEKREKVITNP

SEQ ID NO: 150791 - protein, 89 aa, Heterodera glycines
MKMIKILNFPQSDRNDLFGLIQLAMIRTMSNGATSFRDKCKKGTTRQCTNWALREKCIKFVIYTKYFMNDLSKEYHNSEGSPDSVSLDG

SEQ ID NO: 150792 - protein, 481 aa, Heterodera glycines
LLEQKKTTQILNIRKSKYLVFLSQLLNKIQNFFLAVQYIFLKVIEHFDRLLLEIVAHSEKGTVFPSVKTIGGFFSRLFADKNLKRQQQMDAPMGIYLHGAVGNKTMLMDLFFESVQIQRRERIHFHEFMQQFHKDLHRLKISSALHRLKISSAVPSADLVPKIAEAIIGRAVLFCFDEFQVVDIADAMILKRLFTELFSRGLVLVATSNRPPVTSNRPPVDLYKNGLQRHQFVPFIRLLEQKCRVICLDSGIDYRKENDGECRGINVPTNRANNNNNIGLNKCSVVGPKTLNILGRTLKIERCCGRVADVHFDDLCKKPLSANDLCKKPLSANDYLAISSVFHTVLIRRIPFFTRAKLSEARRFITLIDTFYDQKVRVICSADAEPDKLFQFEEEAKVRVICSADAEPDKLFQFEEEALSDTQRMLMDDLSMCDGEESATANVFSGSEEMFAFARTVSRMAEMRTETFQKHRRPSRKLSLL

SEQ ID NO: 150793 - protein, 29 aa, Heterodera glycines
MDLLSRANALDVLNLTDNVQKKRSRLSSL

SEQ ID NO: 150794 - protein, 36 aa, Heterodera glycines
MQGGQAIRQFLSFCLFHYWFVYLIKIFSIKFYLSKK

SEQ ID NO: 150795 - protein, 66 aa, Heterodera glycines
MQSLGILRNYPHSLIFEGSMDEKEIAVDELKCPYALGPAGLATGRDHGSRKSRDFWGAVITAHGFP

SEQ ID NO: 150796 - protein, 83 aa, Heterodera glycines
RSLGRRRKCEKWERIAKECEKFEINVCYLKKAEEIQFDDGQTLKFGCKWDIEAQKCGPNDETEKALKGEEKEKPRNLLAWLIQ

SEQ ID NO: 150797 - protein, 53 aa, Heterodera glycines
MFTNFPLLFSLTLVFLLSLTLQFPLKMLGMFANYNAQKNDVNFLSKKGIILKN

SEQ ID NO: 150798 - protein, 216 aa, Heterodera glycines
MVDFSINYCVDLKSADGTVRGGSLDRLMSMAQNGSYNGTTMEFVDKKLSGQSDVTMVPDEEEAKNEDTMDGEVATTNFVYRPSCPPALRPVEFDTLSEGDKAECYEEEEDGNQQAEEEGEEEEEEEEEEEEEDDDEYEYVYEEEEQQQQDENGDGRQPGAVAATIKEDEDGDIKVVMELPPKKRTSIRRKKFSASRSPAPERVDGAQAELDAEVRI

SEQ ID NO: 150799 - protein, 106 aa, Heterodera glycines
ALPFVLIDTDCALSGLRLRNARQMQFGWWLTVLGLAKCKAAVRAANGEFEETDCTFVSTHEDISIRRTISTTDVRISNGAFGCVPTQTATNCKKNLCYHLKFRSFD

SEQ ID NO: 150800 - protein, 131 aa, Heterodera glycines
MLSSASEIPVRWNALFMQWGQFIAHDVAKTTMLNNQFWTIFVLTSRQISTGRFFFEFALAFLCIFLFKIYGSSTRDQFLFRQGGFMKTNILRGRIFPPVDNNQNLIAGDDRANIFVGLAALHTLFVREHNR

SEQ ID NO: 150801 - protein, 277 aa, Heterodera glycines
EYSATVVLGKKFNELIGPYRGYNPKVDPSVLNEFTGCAFRFGHGMIQEFYPFFNEKFQQIGGIPFNDGMFRSIHIINNGIDPLIRGLMTLPAKMPQRLTIAVTEKIFGNSDLGSINIQRGRDHGIPGYTAWREVCNLPPVRDFNDLNSTITNPVVRENLRILYKRVELIDMYVGSILEDPVEGGMIGPTLACIIGKQFRALRDGDRFFYENRKVMSEEHIRQIKRASLARMLCDSGDGMKLVPKHAFNQIQGQNELFTCDQIDSPNYFKWKDTSFFS

SEQ ID NO: 150802 - protein, 30 aa, Heterodera glycines
AEGDDDDEEGDDDDEDAEGDEGGEEEEEEE

SEQ ID NO: 150803 - protein, 77 aa, Heterodera glycines
TPSCLSVPSSLTCAPPPTILSVFAFSLCYAALSLSFLYDCPCRCSSPWIVVPLLCVFVRRRRRLCRGVPQIAVISLG

SEQ ID NO: 150804 - protein, 59 aa, Heterodera glycines
MHFRFAALYGIGKPYGRKPIYKDSQKCKKSSVNAVEKGEKKEHLFPIFASQEKYFVILI

SEQ ID NO: 150805 - protein, 105 aa, Heterodera glycines
MKLFVYRIYSFDGDGCFQSYKFFESRRMEIRQIFQFGHQLCLNVTAFKNELFGNDQSHKFCVHTRRGDFVKRGWDSKKEPTEKGIDLGFEYLKATHKLSIQDTLR

SEQ ID NO: 150806 - protein, 73 aa, Heterodera glycines
MPRANDLAFAVLGCDSLFLSAQTSTFAWWIAYLMPDDATILYNSDFLPGLHTRDHFLPEWIPIKLINGSMTRD

SEQ ID NO: 150807 - protein, 106 aa, Heterodera glycines
MKLFVYRIYSFDGDGCFQSYKFFESRRMEIRQIFQFGHQLCLNVTAFKNELFGNDQSHKFCVHIRRGDFVKRGWDSKKEPTEKGIDFGFEYLKVIHMANGHFLIFN

SEQ ID NO: 150808 - protein, 189 aa, Heterodera glycines
MTATGDTAVNTSSTNKMNQKLFLIALFGVIALLALIDAIGLPQQNQCCQQQQCCQGGCSSGCCGGGGGGCCCCQGGGGGGLGGLGGLGRRRRRRGAKELGQVSAIQPHYKAVETPCPQTAWQETLEKSILAGDAIGSVSAIQSGLYARFGQKFLVTCADANETKEGQSVPNRVHFSSSGDGYCNMVKEK

SEQ ID NO: 150809 - protein, 152 aa, Heterodera glycines
MPLLHVHLFKCFHRLHFLRLRHFAVLLSNPTLLQSQLCMPFGCEVNVGQALDARQRFLLRVGRALFCRLESGGNLGVVDEAVLGVLLLERLQQLGGVVVARRWANPCRAKVGIRRRQKAAKTHPVGMAYSAGANTEEGGDQHQKCRGSNVMV

SEQ ID NO: 150810 - protein, 167 aa, Heterodera glycines
MALKSDGQMPKETHRQRNSARKGNCPMMPMLLLLSLLAITVILSEGRPNMWRGDGERKQTEIGREKREQEKQRDKEEKLTERGEGRRRYRRQSLPTDNVLVYSSNSNVSIADRIQVLSKESQIRILERNLNTTVWSNASLLQAKNAYDIMSNLNFVIRCHKMVSKFR

SEQ ID NO: 150811 - protein, 330 aa, Heterodera glycines
MADPSELFTFRHSFPPPSVSPSSAGPSSTEFESLVTHNESASAFPSPDSELFTFPPSLVPDADFLVGQFETVPSQRTTQSLFPLSATISALQFPEETAEEQQQHIAEQFPGIRRENLLIWRPEENEGTEGKEGGEKLETYLVDEKEEEGEEGKRPRRTLNDDVNGRKTEERMPRAEMEVDIAVEGEEDVRAERLRRELGEGIERMLEECEEKRTKTMERETDREETLRNETNREDEKITESDGASAVRVTEVKLKYLGKMDSSKKEVIRMHFTLEGEQNELEKGIRRIGQMDRETADKTLKHQVTNEGREQLGGTDKQWQKINSIQISEK

SEQ ID NO: 150812 - protein, 85 aa, Heterodera glycines
KNRFFCFWAVPPNRCAQIYGETESSGNSFPIACTLILRWIFAPHNCLSTPNGHLKKSIFLFSGQSPRTDAPRFMGRPNPSGIASL

SEQ ID NO: 150813 - protein, 60 aa, Heterodera glycines
MAMSAIPIEHDAASQWDYQHGSVKREIHRQYRLPNDVDAATLKSHLSTRGVLTLTASKKD

SEQ ID NO: 150814 - protein, 129 aa, Heterodera glycines
MPFRLQYRLLPFSGHQKHHNTVFTKHGHSEEDGGDQQQLQDGEITLHNECYFRYAETDHHYAFLRWLHHKNVSHYTPISPSYEQILRRVQPVHPNMPIIDRALCQYEYILNYKPNASGQITKNKIIIYD

SEQ ID NO: 150815 - protein, 101 aa, Heterodera glycines
MIGPIPAAMALLLLVLCSFLNMEKRDRFQMYPHRPQFTSFINFAPNGNRQSVEQQPTLTNTKLKKSVVAKVAKTANTRTKKNQQPKSLIENLELRIFGKTA

SEQ ID NO: 150816 - protein, 124 aa, Heterodera glycines
MIYLVTLSLANQCDHPVWVFSNAIPNVQMPLTDDEKQKNLICNPAGADKLSLFEWTFDGISQFIDVSYVDGANVPMGVHVPEFPDKDIIINTPTGTTHTVEQLFEDSNGQLVVPLEMIIHDYAG

SEQ ID NO: 150817 - protein, 154 aa, Heterodera glycines
MLQIWPSLAILLLRLLIRLGTVQSQIDVQYDDVNSIYVDEIDDDRSMVLDGENTAESSAGKLPFSRMFRSRPSSAPSSTRPNILVLMVDDLGYGDLQSYGNPTQEWTPVDQLMAEGVRFTNAYAADSMCSPSRAGFMTGAPSLPSSNSRLPSCP

SEQ ID NO: 150818 - protein, 80 aa, Heterodera glycines
MYPLVDSAGEWTVSVVLDKVGTILEKHIGTMFPVPPQLGHFSPEVKRCCDWPKCRCDYLTKERPKSEEEADTFKERWTGI

SEQ ID NO: 150819 - protein, 65 aa, Heterodera glycines
QCFVLNFRLCSSCSALSSSEFPLRLAVPNDGIRRWQNLIENFLFANKKKKERNVRLAIKIKMNFQ

SEQ ID NO: 150820 - protein, 160 aa, Heterodera glycines
MTTNDPSVSGDGTATNSATGARIGEGNIATEQKRMFRFLHSALAIVSILWATVCLFLYFHAPSSQVKCPIDALSSHRFLPLAPLSPLFSPESTAFRLSMAFVRSAGPSFVWPCVRLLLAQCPPFLCRFRVHSICHCLLTAHFGHLLVGHRFAYALSPPIG

SEQ ID NO: 150821 - protein, 132 aa, Heterodera glycines
MDSEMAQADQQWTETRKRETKWRVRQNECQCQHLLSMIFESLSVATGLSFVFSMCLLGAVGFYAVRLLRFCLILSAYISLNLFVTASLLLFAFIQDFFFLATTLDDEVKKKARRGGANSPSMLALISDHCSD

SEQ ID NO: 150822 - protein, 90 aa, Heterodera glycines
GNGQRGRMGDENGGGGAIGGGKKRTTEKRFSDALIVSGVKTTCKTLFTVEPPPSDESDSSGGAEKEPFLRAEEKGKEADEVLRAVAIVSF

SEQ ID NO: 150823 - protein, 55 aa, Heterodera glycines
MDGGKRGKEWQNQINNAFGDGDFTEKFNLRNESITFQPYRPAKSVPPSGRCARNN

SEQ ID NO: 150824 - protein, 202 aa, Heterodera glycines
TEQFADFDRQISLGHSQFRGGRTAADPRIWTRGGQSGKAGRDGDHYMCARVGTDRTATLRGPLKADPMAGRAGFEEFQHEPTIAYLYQDLNGRHLKVCELDLENKELHSPLWQQSLRTYTFLNKKNTTNWAGNIEAATTLLVPVPSPYGGLIVVGQESIIYQKDNSVAFVGSRLGDSQLIRLSTEPVDTELNSFVNVIDTYP

SEQ ID NO: 150825 - protein, 38 aa, Heterodera glycines
MIHWRANCFFNVIAVIGDANRIFLGLSSDIKDVKFWWF

SEQ ID NO: 150826 - protein, 138 aa, Heterodera glycines
MGSCLENLLDSVEVSRPTFKESRHFLKNVLYSVPFDCLQIAPVDRPDSATLLKILEDENRRGENEMTKDIATNQPIDETIDSIKEQIRNESELAKFGFNGQTINEMFFLWKLCGSSVESILIRNGVIKNRPPVLTLPR

SEQ ID NO: 150827 - protein, 455 aa, Heterodera glycines
IIDNLKLPFCRIYDIRVPKFVWKEPSPTVEDSVQSLVVRERDIAYQFERMRLFRRFERMRLFRRLLSAFPFKSDLFRFECQKDIPPVYRGAIWATLLGVLPTSSFYNIDTFSEHSADRQLQVDIPRCHQYDELFYNIDTFSEHSADRQLQVDIPRCHQYDELMASPMASPMAHHRMKLLIKALLVSHDDFVYWQGLDSLSAPFLILHFNDLSTAFRCLNAFIERYLRGFFLRDNDLSTAFRCLNAFIERYLRGFFLRDNSTVIRNYLAEFMRMLEFVDSELFTHLISLDFLPELFAIPWFLTCFAHVLPLHKLWFLTCFAHVLPLHKLFHLWDSLLLADSFHLWDSLLLADSYFPLFIGVAILIQLRSRLISVSFNEAYFPLFIGVAILIQLRSRLISVSFNEAILLFSDLPEVPMPCLISLDHLQKQILDTVRQIMRKGYSVTQMLIQLADVLL

SEQ ID NO: 150828 - protein, 105 aa, Heterodera glycines
IPESAKAAVYLPGMKGPNWNIKPGTVVDTQMCNSLAYCHKIINTPTSLPAPVYIALMYAKRGRDIYKVNRETIQERRDDGQLDYQAISERLCYAHTQLRDQRVNA

SEQ ID NO: 150829 - protein, 150 aa, Heterodera glycines
MCRKHGMIISNPADQQMIDATPGDVENTIVECKRYHCNFVFFITSDAVKALHEVIKACEQKYEIVTQDLKLSNACEISRRGKPETVENIVAKSNEKLGGINYSVRVTNPDVQRMLEEGTLFIGLGVSHPGAMGSYERARGATPRDPSVIG

SEQ ID NO: 150830 - protein, 164 aa, Heterodera glycines
EEHVIIGGGNTYLINASNHGFVAEDGPVLSQHNKYLAIGIHKSIRYVEGPRGRGNKKVGLIVESKKTPFHNIDGTLLDKVSSIVGPNNIKGDGQVRPNLIGSLNAQLKGLHVNVNYPKGRTRDVRLSGVSTATASNHIIDVQGEKVPVSEYFKRKYEYELESVG

SEQ ID NO: 150831 - protein, 311 aa, Heterodera glycines
MQNFMARSSGKTITVKVICVSRSKSISARGRELLMERRQSDRIVECTAISEKVQEPRKKLSLIRYREQFDFGNVVPVFIVDTAKKEGTDQTHFTGEINPEFRAIIQITQSAKPAAKKDGTDTDQSENTAQMFDSGELRFGRVIGVNKTKKGRVVCLSLVRSDEYDFNELKQNINTQKRTKESVNSAEENVEEEEGGKNNEKEESEEDEKENEERGEGNSTMEKTEEEGRDGEEAQTNGEHKEPTFCFGLPDEHSLASAEEYEKLLIADSNLSSAWIGFVRFYLTHEGLKVCRRYERGRAVAERALKTITFQ

SEQ ID NO: 150832 - protein, 386 aa, Heterodera glycines
MQNLGRKSVPTVTVCPNEVNSHLIPSLLIANSVLNGAVISTEEKGAVIDLGFSTSSVNGFVHSDDLPPHLSLDKLHVGQVALFRVKESPTPSTRVIKLSGFTEMGCLIGEEGQDVLEFKHLTPGSIVEVEPEKIVTDGLFVGLIAEFRVGSRINGCVFFVDKQRNVYFKLDDDSEKHLLTAKALRIHIDDVETNRKLSIIYGFMFLYVLVSKFAIGSVHECRVIGFSMSERQLFVTTRSADLQQSVVCAEEALPGMKISGRINSVNANGIKVTFGRDISGYVSAIHALDNPNKHWQKRFQKGQKVSCRVLYLDHNLNKLFLTAKHSLVKQSKTEKQIVAISNDVVGVVSTGTVIKHLDGGSVLVAFYDRTIGFLPSRLLRFTINAF

SEQ ID NO: 150833 - protein, 127 aa, Heterodera glycines
MPKIRQIVPAFYLLRQRANELGIQVVPIAGQPIAIFDYFGRVITVLKKEERIAADKLRQYELDPTQGIRIRERKKTYRENDLAIRNLVEGFDAIENPNEDEILAHLRSLQYRLMRNDFENWDDPNGD

SEQ ID NO: 150834 - protein, 30 aa, Heterodera glycines
MAPAHPKAATKNPFPDYYYVFMEFNTFKNE

SEQ ID NO: 150835 - protein, 56 aa, Heterodera glycines
  unsure (1)..(56): unsure at all Xaa locations
NGTGTSKGXYVDVERERARKRYVQPQIQSRAIRLAFAQWTPNGKCHTRDVALFDLK

SEQ ID NO: 150836 - protein, 94 aa, Heterodera glycines
MPSSAGRPIARGGGDDWTPLCSASFLISSQKKGKKDLVVNDEITKCIPECLVYMPLKKFMDPANGWYDEEKDSVILVTELFVDEANREEEEKVK

SEQ ID NO: 150837 - protein, 27 aa, Heterodera glycines
AKENLVDAVIDGMKVRVDYSVTRGGGQ

SEQ ID NO: 150838 - protein, 103 aa, Heterodera glycines
MFFLNFIFFFFVFNVEQHFTLGDGSNGTRFWLCYKSALNATNLSWKLAKRFRFDKMLSSNPMINDSDDDGDQFCGQNDRKIQFLIKNESITIGGQQLFSRSIN

SEQ ID NO: 150839 - protein, 146 aa, Heterodera glycines
MNISNEFFDHSNFGSFLTDYAGLWLLPADIAPKLGQKSTKLTFVVPDECIFMPNRTIVPPLKCRTFNFEAVTRHGRAKRRINPLIYNGTNTEIKHLPWTVYFEGIKPFNATANILESCTASLISSQFVLLAAHCLKGVNKIKLGKN

SEQ ID NO: 150840 - protein, 21 aa, Heterodera glycines
MIDIEEEEPLLEKMDKDGKNR

SEQ ID NO: 150841 - protein, 248 aa, Heterodera glycines
DNVMDAMISLFVVSTFEGWPDLLYVAINSNEENRGPVHNARQPVAIFFIAFIVVIAFFMMNIFVGFVIVTFQNEGEREYENCELDKNQRKCIDPEMDVVLDVLNLIFTGVFAFEALFKIIALNPKNYFGDRWNSFDFVIVLGSFIDIIYGKIGGTGSNIISINFFRLFRVMRLVKLLSRGEGIRTLLWTFMKSFQALPYVALLIVLLFFIYAVIGMQVFGKVALDDDTEIHRNNNFHTFPAAVLVLFR

SEQ ID NO: 150842 - protein, 359 aa, Heterodera glycines
MRLWIGPKPIVIFWKPESAKAILEKAAMGTQLDAQRGGNPKYVEAVKKMCELSFLRMRSPWLWPAPVWWLSGKGGEFKRNLKAITEFTQGVIASRKRERAVQQQQKQRKQQENDIKMQQNGVQSHQQNDTTVISQNGNGIDVDVKTGTKSAAACFLDILDEDIREEVETFMFEGHDTVASSVGFTVFSLGHRPQLQERLHTEMDNLFGECAERDITYDDLPRMRYTEQANITMRKLTNITETTEICGFKIPAGCTAMVAPFSIHRDKRYYHAPDDYDPEHFSEENVLWRNKEPFAYLPFSAGPRNCIGQKFAGTEQKISLAKIFRRFRVISVQHELESRGLPELVLKPSDGFWIRIERR

SEQ ID NO: 150843 - protein, 126 aa, Heterodera glycines
MAFLAETRIGNSQEKSATPNRQQTTEEEEEQVAAAQLQQQCASFGRFASERIQRRDQSPMVAPKQRKSQSKLSRETAAAAAQKNAASAKEKQQQQRVKAEEEAKLKDEVDSSQEIVLLKREEEEMV

SEQ ID NO: 150844 - protein, 84 aa, Heterodera glycines
MATLSRQQKYGLIFLVGWLANLFLCCLVAFVLVRALFAVAEPDHWVLVSFWTHICLFLGFSIAFLLFLLFNNYTDVIFATVFTE

SEQ ID NO: 150845 - protein, 355 aa, Heterodera glycines
MAIPQHKDLLFGGKTVIFSGDFKQSLPVVPHEGLTAQVTACFQTSPLFCQFTTMKLTINQRLGQGQQAYLQMCRQIGLGETGEHFWIPPQFLVLSREELIDFVYPDFQRLLGNDKELLNRLILAPHIDTCDEINEIMMANVPGQVREYLSSDKPLDERPLDIDEIELEVAALNRRTDSGMPPHRLRLKVGSVVVLLINKSDKEGLINGTRIFLFSFPRRMSIPRRPPPIVAAFAIVPMALFGSASSATQQNHLDYSSASSPCPSHPFAFECRHSACCASYHQRFLMLLFSLAIFAFALLVLIIWLAIEWRPRRWRRSHRNGKRMSEVEIRSSEETRYLRRMSELNPNARREIVDG

SEQ ID NO: 150846 - protein, 294 aa, Heterodera glycines
VLNFCSSVSRCAINSHPSLDDPFAVQLAVAHSQKPFVHIGTVADAEFVGDRKAKSGGALKLFDGATDGHAICTFGMEEFALSGVHELVVFVNMHGVSSRPPISVSGRSRIVGLSLKEPFLHVLSEDGSIIFYDFFPIPPSFSTVDAHLVQSLAFPTDEVQEVRQNICGRSPAPITCQLENIDGVILIASPGDSALYELVPVSVVVQELNHLRKKLAFLLLQNANFSDGIALLSSIDGTDCALTFLSLVVNQRPQLGMDPVTQNGQSQVPIDGTFPEIPLEFVKQYLEETIRQRD

SEQ ID NO: 150847 - protein, 347 aa, Heterodera glycines
NGMNSTEFRHYGRKMVDYVADYLETIEKRRVFPAIEPGYLRKLLPVFPAIEPGYLRKLLPMDPPIQPENFDQILQDTESYIMPGVTHWQHPRFHAYFPAGNSFPSIMADMLSDGIGCMGFSWAACPALTELETHMLQWFGQMLGLPAFFLPYSKNSIGGGVIQTSATSASEAILDALLAARFDKLKQLKEENKTEGELLDKLIAYCSKEAHSSVEKAAKISMVRVRLLETDSRLRLRGETLQKALDKDRKKGLIPFFVSITLGTTSCCSFDVLSEIGPVATKNNIWLHVDAAYAGSAMICPEFGSAMICPEFRYLMEGIEHAMSFNTNPNKWMLWMLIAFDCSAMWL

SEQ ID NO: 150848 - protein, 43 aa, Heterodera glycines
MASLKWQRQKPIRTQVKALTFPELTSNSRPVPFAKFRPSSEGV

SEQ ID NO: 150849 - protein, 312 aa, Heterodera glycines
VLPLDEFDAYMAGTVRNGLLALDLPSMADHAADAPAQMKKMWKMLSDGVWTHVSLNEHVDTLRWRKSETEKAMMRRTCAVGGEALNAMVRECRKATNESHIVGFLEFECRRRGANFLAYPPVVAGGSNANTIHYIDSNMVSFAAMCVPFYNVFVCLKPIRPNDCVLVDAGCDFGGYVSDITRCFPVSGTFSATQKTLYDALCHVQQQLLHFVQNTRPLRLNEASFVIFADTWKPKPIYLLYAFMLARMANALSSIVFFKRDGLSEDELIAVGWGRGGGQKATMKRICAIPKECDKLCPHHVSHWLGLDVHDT

SEQ ID NO: 150850 - protein, 271 aa, Heterodera glycines
MCSGIPEGTYELKIGASFLCSNKSRPPEFNTLRCFSTEFIPLNAFPFSQVVVFGEAQKKTIFKGAKKEIKGDKECLLVYNRKSKELCLERVSANINVKKTRDTDLDQKAISEIERLQKRRRPKQSPPSPKAPVENATAVEPPAEQRKERTFSTSSAGDEIDEDDEENVSALEQLMAPTKVERSEAEEDIFHPAQQRPKMELKTEEHQNQMEESANGTTEREEKQSPQQKHPMAVKKTSSFVRKSILAEDLQLSESSSEDEEEGGRDSEDTD

SEQ ID NO: 150851 - protein, 57 aa, Heterodera glycines
EHPVSAVLWTFKRLRSVSDHSLLRSVRVFAVPPSFLLILRTALAQLQIFRQNAFPYE

SEQ ID NO: 150852 - protein, 207 aa, Heterodera glycines
ATLPFGQSKRRAVLLEVRKGADMATPSAAENGTAHCQSPHKEKVIIGNRTTPDGAAEGEKATQRAGEAGKWHKWGAKTRGNGAKGLARVYDQHFLLSQTQPSTSGTVIPLAPSADTEHPPNIHLKQQQPHFAASVWHPSHGQEAGPGSPSVSVFIALAKEGRRRWWHCWRSGCEERRRQRRHEGNGIGTAAADQSVAAHFAKFGDCF

SEQ ID NO: 150853 - protein, 26 aa, Heterodera glycines
MNANGNAEKSVENGQRENEEEKVTIC

SEQ ID NO: 150854 - protein, 322 aa, Heterodera glycines
FWHFLPICPIKVSVFAPSLFSLPFLSELVSLLIPAAGGGFLFVMATLFKTAFSDPGIVPRASPREVLEWERQCQETGEFDGTQFPPPPRTRVVNIRGQPVKLKYCFTCCIFRPPRSSHCSICDNCVLNFDHHCPWVGNCIGLRNYRHFFLFIFHCPWVGNCIGLRNYRHFFLFIFSLSVLDAFLGVSVGIHLYLCDEKGSFVEAVKLSPASILTGEKGSFVEAVKLSPASILTGLINIISWSVLGLSGFHTYLIALGQTTNEDIKGTFNRKLHPQVKNPYSSGNCVKNLIATLCAPERPSLLDRRGWLPPENLGPTIYVDGA

SEQ ID NO: 150855 - protein, 71 aa, Heterodera glycines
MPLVWLLRRVFLFVAIRLLRLWSFFWHENCAASKKDNLFQKQCFLEIFKNHESLSTANTSADKTQQIGSGD

SEQ ID NO: 150856 - protein, 52 aa, Heterodera glycines
LAFWTHPPVWSCTCWQCCWLHFAPSSSLWHCCAAAVVAAVDGTNRSAVNAIS

SEQ ID NO: 150857 - protein, 60 aa, Heterodera glycines
LRSLISEKSNGGGFTLFLFADATAFDERMRAEVPFSTTAGGEAAKLIRKKSQPSAGLATS

SEQ ID NO: 150858 - protein, 141 aa, Heterodera glycines
MTTDTINTILNRFNDVAQSKKQDGVTLWGEPFTVTMTTVNRNGLPEKRQLKGGAARKLTHIQNFDGDNYCLFLAMQATMIRTLGGLARQRFYDYMNGNHCFHGKLKTEAREMMNAVNAPPNLPNYDAETLFHLYYLIKYVH

SEQ ID NO: 150859 - protein, 107 aa, Heterodera glycines
MSALWSLVGLLWQGITKMRRSVEAYERLAFFNAFFYAFYWCLYAVLSFNLLFYWTDLWTCVNFQADHTMVPLTILVFSIVLMCLYAKEFFLRKPAWIHRINLQLRRN

SEQ ID NO: 150860 - protein, 64 aa, Heterodera glycines
RLAFLLQHPAQLRTVRLARENHRRFSPGLCLIRMKKNNFFFIFIVYGIFQNTENWLQSKKGNDK

SEQ ID NO: 150861 - protein, 87 aa, Heterodera glycines
MKIYLLLLLYASSQFVISNSKKNEMAKKIGPLKMDNSNSIKKAFEGKEKPNGVEECKLIKSLEDIVITELISEELDQFAAGNENDTI

SEQ ID NO: 150862 - protein, 43 aa, Heterodera glycines
MDWSNGRWQAVWLVVSEEGKELRFLFPTNSLIYYYSYLQIIVC

SEQ ID NO: 150863 - protein, 289 aa, Heterodera glycines
MTWEWSSKCFIKIEPEPITLNPVVVNACQGEKKFDFENIPLPVPEGIREFSRIQVSCLDENVIRFLGQIKYLFKEGIILELENVHQIMPSIFAAIWPIIKEDLYALSVDYHGLNFMRQCISNTVLTSCPKLRWIEASNVFPQLPDDDDSAETAENALRDWLHLPLSDPAKPKILQCRTNDQEELKIEETADIQTKFNNADTRSSYILGLANPLIEQNEHENLTEIRNGISECMQFELKVNGDDDRDNWFLLSGRTLDTDNDWSSFYDEATSELTKKRNVVCIKIVNEQA

SEQ ID NO: 150864 - protein, 99 aa, Heterodera glycines
MTGLKLNELYELMQMTSPSILRECANLRIVGCDNTFPESPSYDGPGASQNQALSKWLHTPRDDERPKMLKCYYLYNIERQLEDLKMINICDTYITNRTE

SEQ ID NO: 150865 - protein, 28 aa, Heterodera glycines
MIDRLIDEISLSVEQFMTSSDAAFEEMG

SEQ ID NO: 150866 - protein, 24 aa, Heterodera glycines
HFGNIFTYFECYLAYLNLGSQDLQ

SEQ ID NO: 150867 - protein, 32 aa, Heterodera glycines
MSEEEYSEEEVEVEEDVEEVSQMSPTVKAPPE

SEQ ID NO: 150868 - protein, 361 aa, Heterodera glycines
EHTSELHQLERRRDQWREEKNTLASSKVNRLALFGANMPKLVKLIEMNRESFRRLPIGPIGSFIKLRDQKWANAVEFHMKKTLSAFICDSSEDRAALDDIFKRNGLDPPEIITAAPRQTSRWPSPCYAHEQKVRGAGHALSEVNSTISEFDRQLNQLTEQRFKVEDELQKLDQLCFSGEMIDNLQGTIREISKQLAQCTGQLNELNTKYAQKTEEQKETKRQIDEADKKVAYLKNNVNQIEVIRFDYYEDWSLWSIHEQGNDIDSFDLQQRKIDEKIENCEIGSDQQQKKIDKLQKEITNWENENTELQQHIASMELAPDQEEFPPDLTKIPPTDELKRNLREIERFIKTEENKYNNMIKI

SEQ ID NO: 150869 - protein, 69 aa, Heterodera glycines
MAMLSVRFDCLVATHLKTRKWAFKRMGIFYSKENGGGAGERPGSNWTLIFRIQHHPDLTFSKYPDYPIL

SEQ ID NO: 150870 - protein, 187 aa, Heterodera glycines
MGITLKHMGDGMDKQRSWGLFIHKILPLIGIPNIHKLYVTCGGAKRLRGLLASTSTTFLIDCPNLRSIYYDGNTTGLDRPVDANAKEFLSATSAVNFIICFTSFCIDEQPAEPDDVELFQLDNKRTNERLALERMVLDQQSKVCMTRAPIGRDERKWAEWMRKAWEEEEPSNLLIFWITEANMGPDI

SEQ ID NO: 150871 - protein, 188 aa, Heterodera glycines
ISAMSGVTTCLRFGQLNADLRKLAVNMVPFPRLHFFMPGFAPLTSRNSQQFRSQQFRALSVADLTQQIFDAKNMMAACDPRHGRYLTAAVIFRGRMSMKDVDEEMLAVQKRNKSFDVDEEMLAVQKRNKSFFVEWIPHNVKTAVCDIPPRGLRMSATFIGNSTAIQELFKRVTEQFNAMFRRKAFLHW

SEQ ID NO: 150872 - protein, 276 aa, Heterodera glycines
MQNKQRKLLRKRVRENKGKEEEFMEIENQPKRRRKGNKLRVKDLLHAVGRKCGIDPSEIDKIDLENIVQRQIALNEGREPPPDTNDDPPPPKEPRPPSPEEQKPLLQQRLPLPPKKPPHPSPPPMALADQRFFGGPPEERTFPLDESHHKREKQLNLELCKFIAIDMDELPNAVEVLPEEQALSWTDPPKVNVRPQQNLVEPNPDIASPAQLVAQTPPQVIVDDTTHRMIDLEPKKFKEKKEKYGRNPKKLYETYQEEWDRLEKLSDKKLGPRRKS

SEQ ID NO: 150873 - protein, 256 aa, Heterodera glycines
MREIVHIQTGQCGNQIGAKFWEVISDEHGFWEVISDEHGISPDGFYRGDSDLQLERVNVYYKEAAEFKFVPRAVLADLEPVTMDAVLADLEPVTMDAVRNGPYGNLFRPDNFIHGQSGAAVRNGPYGNLFRPDNFIHGQSGAGNNWARGHYTEGGELSDAILDVIRKEAEDCECLQGFQMTHSLGGGTGFQMTHSLGGGTGSGLGTLLLSKLREEYPDRIISTYIISTYSVVPSPKVSDTVVEIGEPELRPRNVSQ

SEQ ID NO: 150874 - protein, 345 aa, Heterodera glycines
RELRPSVTNWDLSGRYTGLSDRVKVLLERMHGSPAPEELPEPPVDMEHLLSASDLNFATVPEELPEPPVDMEHLLSASDLNFATVKAKTGRAYHVNPYYVAAWSSLFQERYVAAWSSLFQERLCNGISSDGVPKIYCPCSSEELKYFLMAIYPPQLRITECNIAPVLMAACKLESHGLLRCNIAPVLMAACKLESHGLLRKCASLLLSPHTQLSVFVRLSLLDRCRLQQLLAQCLLMVHRAENIVEMSQQQTYECLSVRAKECLSVRAKSEMVSEENVPLDTSVYTRAFGRCKTQSNCAEVTWQCVQCKTYTSPQTIRRNVGNVLTAYLTISHRNALNGKYKRFV

SEQ ID NO: 150875 - protein, 246 aa, Heterodera glycines
KQIFCITIGIPMTMIIIANIGQFLNQFAGIIANIGQFLNQFAGATRKNIEAFRERRRRSRVSLNGEEIGDSSIEVMSVGLLVAFLLYVCFGAVLVMSVGLLVAFLLYVCFGAVLLPLLNGKFDFYNGIYFNFLCFDFYNGIYFNFLCLTAIDFGQLVPFRWAFLPITFRWAFLPITFLYVCIGLAITTIAIDIGSEYMKKLHHFGKKMKNVASTKIWFGGKTVKRNIFQCIGARKVPICGHLDAIL

SEQ ID NO: 150876 - protein, 38 aa, Heterodera glycines
MGGKTKVETMDEIRNWHTKRRYFCYLEVIKELRKKVVA

SEQ ID NO: 150877 - protein, 81 aa, Heterodera glycines
MACCLSEEAREQKRINQEIERQLQRDKRNARRELKLLLLGTGESGKSTFIKQMRIIHGSGYSLEDKRQHIRLVYQNVFMAM

SEQ ID NO: 150878 - protein, 70 aa, Heterodera glycines
MELDIFCSLFACEHLCDIPVVKNESLESIGLLYQEYNEMPNFRVLILARNSAFLLAKFSSARQNSDCRNF

SEQ ID NO: 150879 - protein, 161 aa, Heterodera glycines
ECEWQFRYHRWNCSTPQELKEHIGPIHKKGTREAAFTYAILSAGVTHEIGRRCRLGFLRSCGCSESDNAPNRQQSRGVNEDWTWSGCGDNIDYGYRFSRDFIDVREKEESNKRSAEWHGRSLMNRWNNEVGRKIVKRHAKPKCKCHGRLMQFKDMLDAIGV

SEQ ID NO: 150880 - protein, 394 aa, Heterodera glycines
MPKRATENWQLGTIAKECMGADKYGMEKSSAKILRINCLNLKLKVKRERKANFSGQTQTDAGICWTSVCSQKDAEHELCTALKLGELDPVLGQSGPGAMIVQSPLQALLAVFLLRSGTVTSNTAARTFVEMIIKSGPQMEMATYSEKRGDYVGTGKFPQENDQVKALEKCFEMCFVARAALSATGYKPLAMAPPIGLELLAGADQEGWKEVFDQSAWFLERARAKIIHKTESFVSHERVFVGDSSARHLQGFFDRSLYIGPNEGPVADVIRTFKPVVISSRVKVMVVFVGRDSLAAGETPEAIIEQCKLLAELCKRFPVQVLWSCPPYIHKKQREFETLVAQMQGLINDPPQILPICTTPNGRSALEIFRFGDHFNTHMVEEDGKLKKCGLSGT

SEQ ID NO: 150881 - protein, 307 aa, Heterodera glycines
MDIRKYSNSKQNWRKWHQGNGNCQFRWKTIANSANSNATQSHRIQMHPDPVKAKNLAAFSHLCIFSFIDQNAIAFLHRFRQLFASNCPINLAIHTNNVRILLFILRNIWPMIGNNICGIGLFTNIFYRLRKLVPSILNDCPSLRVVSSYFDEFFTDFPCDDSAMASNGQAVAKWLFTPLQNNVPKVLRCWLHIDDGNLASNIEALKAAFSSASSPANFIVVIPFPPSFADSIVPFDLTNEFTREQFALKRIKKSNRFLLIRCPIVRDESKWTKWEDEADDWRIRDQCNQINIRINNEREIGDGSANK

SEQ ID NO: 150882 - protein, 81 aa, Heterodera glycines
MITQQQQQNQEVQAVQQEQQILMGNEMKMDNSKNGETREEEGNSIGEGGETEEKERKRKNSAQKGGENEAEKRKEQQQIGT

SEQ ID NO: 150883 - protein, 569 aa, Heterodera glycines
MVIKVEVLGERTKAMLDGGAQISVIDAAFLYKLMKNKNLNPNDLRVAKSETRISDANGNPLACLGVVCLPILRNDCTKEVQVALHIAQAPIGFDLLFGTNALSSLGFKLFDDTTNTKINFEEVQLRKSDSLTVIYQTILAPKSTQIVELGIKEEFEGKDLFLWSEGHQNFRIEPTVGIGKDGKVIVLMTNFTSLSIKLEPGNSIGKNEVVNHVEECENFLSASNECFRINCVATDDQNVSIDKILIEILEKGTFPDSEKQNLLELLSQFKNIFAVSDSQLTQTTLVQHEIETGIAAPVRSKMRPVPYAYREKLAEMLKDYLERDLIRPSYSPWASPIVIVPKRDGSLRFCVDYRAAAKNDPMRNFIIMTDASKIGISAILSQQDEKGRIRPIYFASRQCNKFESRYAPTELEALAIRFGVKKFAQFVTMIPTRVITDHKSLIGMFKSKKETGNARVDKWILELNSKFILKVEYQPGKKNVIADVLSRTFETKEREMLKFAAPEDVALIGMLKIAGQETELTVDEKTEWTRETKESEMKFVYDFLSQRIIPEDPRQQKSLIGLGMSDFHM

SEQ ID NO: 150884 - protein, 44 aa, Heterodera glycines
MALSFSQIIMYAIMQKSVREGEELHLTNCALSEIVFAGAGMICW

SEQ ID NO: 150885 - protein, 97 aa, Heterodera glycines
RPVNTSAGSGRVPASSSASSWACWPFLRWTFSRTKFCRQPESIATVRRKCERGNTMQREQPSPATVHTHTKYQYKFLIYHLLFVSCQLLSVSKIKRI

SEQ ID NO: 150886 - protein, 101 aa, Heterodera glycines
CPFAESGHPADQQQQFGQSDCAQLAAGDEERMLLCQLYESSALLAQLGILVNEGIGRLAVSQGMGKFMGKFVVAEAGREKRKHEYLRFGKRKHEYLRFGRK

SEQ ID NO: 150887 - protein, 108 aa, Heterodera glycines
MAMVSLLVGIYYNVIVAWSLIYIFTIITGNHHDISSCNSTFNTIYCASSLEDARCAHQLNATGAFFFNKSCHLLTDRLAATLRNETYNKLPAVSPAEEFFECLFNIIN

SEQ ID NO: 150888 - protein, 296 aa, Heterodera glycines
NYVLEKAPTMDSFGGLNLKMVIALGFAWLITVLVLIRGVEVMGKIAWLTGTTPYIIIVILFIRAVTLDGAKIGLDFYLLKPDVSAIFLAKTWRTAATQVCYSLAVGMGGLLSLSSFNTFHNDCFKDAFIITAADAISSIFGGTAVFSTLGFMAKQLNVSIEAVVQSGTGLAFIAYPEAMSRMPGWTWLWQLLFFLMIFILGVASHFGLAEVMCTALYDQFPALRRYKSGLVIGVCLSCYLAGLTICSRAGIFYFNIFDDYAAAGIFYFNIFDDYAASFSMMLLVFLELILVAHIYG

SEQ ID NO: 150889 - protein, 157 aa, Heterodera glycines
WNNYKADIQAMLGTPRNLLSKFYGPSGLCIKYIYSYIAPILLIVVLVFAFMQQVFTTRVTYGRDKRLYVFPAWSIVFGWFLSLISWIFLPGLIVANTVKFIRQGKPLNELLKMQPKWPSYERVTRGVGKSKTSNIMSANRNQPPLNITMNEFANGSS

SEQ ID NO: 150890 - protein, 53 aa, Heterodera glycines
MYSCGAEYAAALQKLNKLIMFIVGPFTFIGLSSLLDCPTVGLSVSLESVLSRI

SEQ ID NO: 150891 - protein, 109 aa, Heterodera glycines
MSTTIFKIFLQDIPDNVFPDRLLKLNHHLLLLGRHHAGIAAAGLVKHHLLLGRHHAVIAAARLVKHHLLHENSKFVVLTSAKNTYDQNFHFSWSSPFGTTEGPFPFFQH

SEQ ID NO: 150892 - protein, 62 aa, Heterodera glycines
MPTILANAAATANDAATSNHTATANDAATRTNYTSIGLSVCLLYAAGTGFLGFSHILFEDSI

SEQ ID NO: 150893 - protein, 107 aa, Heterodera glycines
MESAGETILSVPPLLHLLAIQQQQKQKQQQNNGNNADTNNATNEMTLSSSDGNFCIAEQQMQIGTNGSESAEESGASDGENGSGEKRREEEDEKQQGKVSMGRSITK

SEQ ID NO: 150894 - protein, 573 aa, Heterodera glycines
LEIVEESATPPPLFRQQTLQFAEEMMDVKIESPRDLHIQIPPLNAFNGYGTPSMAQSAASTPTEQQSNKPLPVIKPPGDEKEERPSLSYKDLIIEAIESSPERRLKLSEIYQVIKYLHPYYQRRSDQWGWQNSIRHNLSLHDCFVKLPLKQTSANGVVGHFWTVVTRGPDEKPLGPTRRRTRGSGKAKKGTMASMPFNGSQNGGTASNTLSGIKHGTIKGLKGRQSVSSDSGIMSDEGGACSHSNSPTEMGTRSVPLLHANAEAVAPARAAQFSANLFQFPRPTAQMPTLAQHHHQVQAVHSPAPTPAGHGHAQSQLSPLELVLQMQHQHNQQQQLQQQQQQLQQQQQQNLHPFASLQQFSPIPKSDSVAAGVADEVNSAPAAASTPTLIMPNDAIGGAAANNNAFLPCELQQLLAIAALTQQHHQPQQQQPMVPVSAANGTNTNNNSNNNLPSFHSLPPPAAPDHNTMTLLQLLNTAGTSSGTPPSDGGLGLLSNLATQLAPAVSPAPPQHPNNVAVGNNLLASAAAAATAELQRLHMIQLYAQQQQQQLQQQLAALLEQQQQQQQLHFQQR

SEQ ID NO: 150895 - protein, 332 aa, Heterodera glycines
MLCVLSVPFVYNYIQQAHSVVQNEADYCKGRPGMPGPKGVPGAQGTLSDQPGPPGPPGKPGPKGLSGEKGAPGIAGKNGVPGPKGPPGEPGQVGPPGKVGTRIGREFVHGRQRTERIVQRGQGIRSDVENDTPNQRRGTRGAMQKRQIDSEWQRFFECPEDACDGKSALLLVNKKHEPKAKSYSFVYVGKMLVNEVTVAEVSAEQLECVRRECAEESVPVVEEAIRWRRKAKDERKELAQGKDKFKVFKECAVKRRRIGKDGKAMGGKARIETLVAHVKMDKLVLFFVSLPKVTEKGIGDHLNFREWAAICTRAKAFCQANARRTNCSREAK

SEQ ID NO: 150896 - protein, 490 aa, Heterodera glycines
MASNGSGAINNYHNRNQQAPLQYAYGSRRRPSPSFYTPLAGLAAAGGAAAAPRSPRSFGGGGGDRSGIVMQQLPQHRLPYTNNNYRRGGSMRTFCAVAPGADCCEPGDASAGVAGDYAVQRRQRVSFSPPAASVLSNCSPSSISQHHQNALALLRGTDGRRSAGPAVAAGDPSGNSNSRQQMASLINFGPIVQNNNHHHHITSLISFDPKSNTLIRVREHRRPSSSSSSLEEATGDRYPPTQPAATSAATGDCSESVPSSPATELSPSSCPTVGRFELLQQPVSAAGNDHMKGRVHAPPLVNNGMYSNSAPPTRIANVPSSDGRGQQKQYYYDYGGLDNSSNSYGGNGQIGPNNNNNQNNNNNCIDGHENGRTMPNNTNANVPSSAGVSMYEAYVGTAVPLDSPRTAFPALIDGSPRQRQQQQPSATARRSLLFDCSAASAIRLSSHSVDNGTSVIDAVATTGGDCGDRSQTATAATTAFRPRVGTTNET

SEQ ID NO: 150897 - protein, 127 aa, Heterodera glycines
MLFYIGVTDMVSPIIGITTKAQMPIISVGHADEWPRDGVIWGADHEYDIYFSKFRIPNPNSNKNSKFINYKENIFLGVLEVAENDYDMHFGQIRNSNPDLNKKPRFNLLKNLKVVIRKDHQILMLIG

SEQ ID NO: 150898 - protein, 140 aa, Heterodera glycines
MSCFGIRVATMIGIGFILKTEQQILKTKRKLVRVVYNVKIQPRSSALIEVAVNDEIDEQAILIKVASEVSEHKIEPTLITPKFGKATIPVTNFSPLPIVLAENDQIGTGVILEKQITGETFLKLGLFESFSCCYLHSVFK

SEQ ID NO: 150899 - protein, 624 aa, Heterodera glycines
MFVLRFLALMFKRGEETIASLEKHRKEIRQISKSGEFKAEDFSLAERVLIRLDQMDDAEEFQHLKTVIGDDGILRLKTRLEMSEKPYSFSHPILLAIHSALAKLIILDRDQKRHHLGVDTTLTEFLSEFWMPSARLNVKRTLRDCLHCRRMNAQQFALPTMPPLPEKEPSRTTKAHDTKTSVNRRKGMVVLISQDLVPRNQWPMGRIVETHGRPGAIRSVKVEIPVRGTNNKKPKDMPRKTVLTRPVNRIFPLEAGPEMTDPGTEAVAATEQPNENHPKLARVPGHQTVTRRKAKLTRKSLPVVAIDPPRHFALPFASGFPIGKCDECGLTCYTKGIVVTVPPEIQKFEICCAESCIVRQGIKALNFELPIEVLLNNHHCEARFWTDSQHTFTSNTTRPAVDECDLIDCYFCFTQLVNPTCQPVIAAMLAGGLSLSLLCFIFTMCSMVGYAMAGLRILFWIFSVLFARLFKPRKETWVLSEEEENLLYPHRRIRRPRPATRNWTSGRVSQMAMLVMASLPFVHGGIETVAIMAKSESCLNNGTTKMCQVKGSVTLALLPAGQPNVLSIKTDDGLILGTLQVILKGLSLECQAFTKAWKRSYEIASLASKRCPSAGSCVGDFCTK

SEQ ID NO: 150900 - protein, 115 aa, Heterodera glycines
LLMSLDKILKSDEKPYISPVINIRQFLADASAQMDRLRQYFDDIPSASAAADCSAVEQSTSSNASDPRKNFLKFVMDRGFSTEDAAKAIASGEVLHNIREGHQSSAVKKVLVERG

SEQ ID NO: 150901 - protein, 32 aa, Heterodera glycines
MAIKYGPKIAKYGYKIWTKNMDINFKYGEKNL

SEQ ID NO: 150902 - protein, 742 aa, Heterodera glycines
KYIREHQKELCAESYFELAEWLEDEDQRENKKLTKIILPSSVTGSPRYIEQNYQDAMAMVRRFGKPDFFLNPKWPEIVMNLFPGQRLEDRPDLIVKVFRLYMKKLIDEIVKDKIFGNVRAWLYVVEFQKRGLPHIHLLLSMSNNDKIRNPNDVDSFISAVFPDPTKDHKGFDLVKKHMVHGPCGGLNPSCVCMEEYECSKNYPKEFCMETAMDCSKNYPKEFCMETAMDTDGYPTYARPNNGMTAIINGKEIDNRWVVPHNLYLLKRYDCHINFECVHNIKSVKYLYKYVHKGHDRAEIEIIKQQDNDEIKEYQDVRYVTPPEALWRIFGYEMQKRSYSIKRLPIHLPQKQIVYFDKNWSEDKIEEKLKKPTELMAYFELNKKSPEARQLLYYEIPEKYIFKDNQWVKRLKHFNIIGRMHFVKPHNTELVCLRLLLCHVKGATSFEDLRTVNGILNKTYQEACFRIGLLKDDQEWIDCIKEAINFAMPNQLRSLFARILVHCNPSKPKELWELFKVELSEDFSRHNNKEIAKKPIRILQKKMKNEGKPLENFPEMDQIETKLTNEQKLIVDTVFEKLHNKKRPALFFINGAGGYGKTFTYEVICHLARSENIRVSVMAPTGIAAILLPGGQTIHSRFGLDLNLHDQQLTQIKKNGKLNDSEIFIIDEAPMMHKKILELINEKLKEITGINLFGNKIIILGGDFRQTLPIQKFATKSQLIDLSIKKSHFWRQFQKFNLSKNLR

SEQ ID NO: 150903 - protein, 48 aa, Heterodera glycines
MSKPRNVHKDISNTNEDAVNLGVELCEPNAVIIFDNVEQQTLNEAEVQ

SEQ ID NO: 150904 - protein, 21 aa, Heterodera glycines
GPGSRSRVLKSSGPGPGPGRA

SEQ ID NO: 150905 - protein, 181 aa, Heterodera glycines
MLIPNRTCAFDGPHGLTQRLTGIWTLKCPANAVKLSLPEVSYMKAIDSWMNMCMAFVFAVMVEYTIAHFAKNQEHLFQMARQNVPPSLVVDPDTLNSLFSSVAAASTPNSNDPTDEAVAVRHELEQFLTSEQLHRCIGNQFANNGGGAEAAQNQQKPFECRLLRHERNTDEAIFKVNEHNV

SEQ ID NO: 150906 - protein, 199 aa, Heterodera glycines
MMEVKMMEEERTEEEEQNNNNGKRGEKEKMKGDKMRRTREEAKKKHKRRKRQIGRRKRTERTIEKRRKKEGRRGEKGGGKETNRGRRSENGRKAKEGRGGGAGEKKQPLPGSKMVQHLTIIFIYSMCIGHRKSILYEYWLPKGRVRGSVGRRRAESLGVLATGGPSSSEYWMPVGRALGVFGYRRTELLGMLAIGEPSS

SEQ ID NO: 150907 - protein, 97 aa, Heterodera glycines
MAEQFVQPETAEEQQVKAKKPHVDERFLWKITRGQFVLAIRLCSEDWNNLFHNKDKARRLEDGRVAIGLEMCEECARINCCVSDMIADQKKKPKTTE

SEQ ID NO: 150908 - protein, 179 aa, Heterodera glycines
MVLVIEFCAQILGCSPKSLRDKLNHPEDRVKALKELVGKKVQTTYKDRNGMQKTFFVDGISDHGAALTPAYGRLRQPYNINIAAHFYARHRIKLHLPYVPCVVEKYTGCGEDRYYPMELLEIVDDDYTNKERWLGKLFTEIEDDFIPVKRLGRVDEVEEIDDNDGGGRYECSQPSYVYW

SEQ ID NO: 150909 - protein, 204 aa, Heterodera glycines
MPPPHDLSNLRSFLGALNYYGRFIKSVLEIANNWTNFADASKDGIGTTISHIFPDKSEKPNRKGTIGCQKFHRMLFGRKFTLFMDHKPLLANFDSKYLLPERPKESTQAPLALWTSCSRPFKCIHIDFAGPCSDGHSYLILIDSLIAYRLGFPEEIVSDNGTQFHAAEFKEFSVNLASRIPSLHRITRSRMAKRSDSSIRSKRQ

SEQ ID NO: 150910 - protein, 47 aa, Heterodera glycines
MSSKFIDRLSYQKNLDNENYQRNDSLLLCYSAANVHMVPKYFRVPYQ

SEQ ID NO: 150911 - protein, 30 aa, Heterodera glycines
DLIRNWFIESHEKLYGVPIAAEETELIWFA

SEQ ID NO: 150912 - protein, 155 aa, Heterodera glycines
MSIDTVHALNFVHRQEENSRKSNRIDEENQISSIINQSNPDPKHYNLGSDQGNLRKFILQFNDKISTQNEKLMEAKKIAKDEQNKMHERFLKKEIRSIQLDHPFQKYNIITMVLRAQNITIGRYFLANFLNGGNQQQLGIVKILFKNLLIFLNEV

SEQ ID NO: 150913 - protein, 203 aa, Heterodera glycines
RLLNELSERYKCKWGFDFETERPLESADSRFEFEAVPANSVPGFYRASNALSPLNLSSSNSDTENHHSAFVEEEPMLIEGKEFGSEAGHCPRNKKRTEKGGAVLRKLQQKSIQTPKRRRSELGQTRVTDFLSTRKHSSVHAKKADLCDDSNDVGSIADYSPHSRRRRSLFLFPEEMPTPKKSIVRQRRCGAVGPSSVVSTLFK

SEQ ID NO: 150914 - protein, 95 aa, Heterodera glycines
SYSAKTGGRNGGAGKAKKRRRDKSWERKGRAKAAEAKANLWGDKAKAEVGRTVKRERNDGRREGTEAEGNADEEKQLLGPGNRQTFGKHSLNLEF

SEQ ID NO: 150915 - protein, 296 aa, Heterodera glycines
FAQLSKFLFSKLVAEFVGTLLFVFIGILSAVSSILSAVSSQHSDSVPVLSVAFGHGLAIFVVISSLGHVSGAHFNPAVSLGIAGAHFNPAVSLGIALSGKMRPFLVPFYWFAQLSGGFCAAFLVSVGEPKGKREAIGSFDTVSSFPQALCAEALLTALLVLCVLCCAIDAPAQNALFAPLAIGMSISAAILGGASISGASISGASLNPARSFGPCLAASLFIDHFHFVYWVGPFIGAALSAFLYSFILSCQPAIHQWLGIFLGFSSPEGWAVRRTSARGRLKSEGQRNIPKELNPK

SEQ ID NO: 150916 - protein, 95 aa, Heterodera glycines
MDSERTIGQMHTPTTENKLKQVYIPTYNKPSVHLLGAANAQPTKNPCESCKNRLSIGRNGLSQSALKGSGVSSLLGQKGRVAFYLNAALEARVAR

SEQ ID NO: 150917 - protein, 108 aa, Heterodera glycines
MAKPAQESQTQAKPSQAKPSQTKPSQNPSQAKPNQAKPSQAKPGQAKPNQAKPSQAKPTQENQPKPSQTKPSQANSVKRAFEQRFCHCVFACPTKVEVRPVSRHFSRI

SEQ ID NO: 150918 - protein, 246 aa, Heterodera glycines
MSEGRSRKPFSRDGGMGTLQRKFAHSPRLHLRPLDGFPFADSQCFSAEQRRSVVFPKFLSLFFAKVRQKEDVFLYLWKAHNLVNGRLRGRETEDPKFPKYQFPPKFLCPECRRGDKFDEGKVREFLLKYYGRVRPIDGEQRTTENGRGNGEHGGGGEEKEEEADKQRNERMPKVIGGTAEEEKNDGGRKVIKGKAEDKSDQIGKTEEKSDQREKMNDGGRKVIKGKAEEKKDIAPHLISFALSPKH

SEQ ID NO: 150919 - protein, 33 aa, Heterodera glycines; identical to SEQ ID NO: 129788

SEQ ID NO: 150920 - protein, 71 aa, Heterodera glycines
MAAAGVPPLSWPQFLQRLAAVEMNKTCSSVCVLKKFGELIDLCKCCLRHKCCGELSTGDAEPKVWWLVLVY

SEQ ID NO: 150921 - protein, 586 aa, Heterodera glycines
AALGGNPLAQMAGYRFANGVGTKQNCETALMWYKKLMWYKKVADRVASQVKLTGTPSIQRIRIPDELESSSITGTLLDNNVFESSSITGTLLDNNVFSYYKYLAETGDMQAILGLAQLYLTGLGLAQLYLTGGKGVAMDLNSAAKYFTIASEAGSSQANSAAKYFTIASEAGSSQANGYLGKMYLEGTHATPQNNITAFQFFKKAADKGNSIGQAGLGMMFLYGYGVKQEPQKALKLFALAAEQGSPDAQLHLGQMYYKGLGVKRDFKQALKYFQLASQSGHIDFKQALKYFQLASQSGHILAIYNLAQMHAKGTGVLRNCRVAVALYKNVAERGRWGGRFMDAYLRFQNGGAVDEAAFRYLFLAEFGYEAAQTNFAFLLDREDTHLFAKEEAYRRAFMNWLRAANQDYPVARVKLGDYKYYGLGSEPSMEEAAEHYKLAATSHQSAQAMFNLGYMHEHGLGVQKDLHLAKRYYDLAAETSTEAVWPVAMALMKLRVEFMLEYLLMVNPERDLSKQIPLDAVLGPDLDAVLGPDWDLYLMSLLLGLIVWLAYCYFRNRQNGGAALCEDPSGQEEQSEAPFVQGAPH

SEQ ID NO: 150922 - protein, 53 aa, Heterodera glycines
MEYVLKLRGLTLNYDVINNQGFRYKNSKSNVMLKQERLNQLIIKQRKTQFVNY

SEQ ID NO: 150923 - protein, 60 aa, Heterodera glycines
MQQMMFVAEKIADTAFIHKILKFYGRMSLFYQENKKKFFGKGEIGTKCHKNDLIRPRITF

SEQ ID NO: 150924 - protein, 143 aa, Heterodera glycines
MTPKSGINLDSTFFGRPKSVQVQYKASSSKAGTEPGIDDEQSNSLNEPVLQRLLTQRRDSNPNSIPFHFEHKRQDLKNNSGLHFEQGRQSFGASSSTNPAGLNPLYRSLSVRSDSSTLNRIDKINKISQIEEEEITVKEKFVI

SEQ ID NO: 150925 - protein, 266 aa, Heterodera glycines
MNFLFPLIIFCFVTFAANGMDLTKIDFSKAQPVVDDPPRLRSRTMPRKTHRFSAELTKESRQEMYGITKTHFNNTTPSPSSSSVNRLNNKQLELFNKLLQELNKNLAQILKNIRRPNWFVKLFEHEKKAENPKVMKEHIYKTLDNGAMESPCEKIMPICDPKTSKLYNDHELRQKVKEILDQLTSWTELKDSISSAFKNSSETDLFDGVDSTGTTPFYWSNEHLNSFEPLWDFRIFTNHFEIYDPGMRSYDFLNNLFIFHIPFYWM

SEQ ID NO: 150926 - protein, 123 aa, Heterodera glycines
WFRHHRFFLSFSICNSFNDCGEHDFSDEHLSMCSSFSEYGDCSTDEFKCSNGKCINATLACDRKDDCGDATDEIGCAKNNGKSCHSKGDNGGCKHSCTDVQDGYYCHCRDGFRPDPANPFDCV

SEQ ID NO: 150927 - protein, 100 aa, Heterodera glycines
MHKFTITRIIGGKMMQHNCETVVQMPIQIPRFDVGNTSLAYTKRPVNEEAMANLAISQRHSWTNGGTFGSQRMDVPEKNANAANSPAERPAKLNYRSLCQ

SEQ ID NO: 150928 - protein, 151 aa, Heterodera glycines
MQCNCDRDWIVHRDLLPIQSVKVHAGEQLQQRVTHAQATVRKVDDQPGRSAQCLVADHCAAGGIQIAAPITSRSDSAKNSQPRHGCTTTATSSRNLISNCRCTNWLPDNPSVAIRQWSIRQWTIRRTEIIAYSAMSPHPYFYHFGIAPLCT

SEQ ID NO: 150929 - protein, 19 aa, Heterodera glycines
MGRTPVRVQHYMRTKQYKE

SEQ ID NO: 150930 - protein, 198 aa, Heterodera glycines
MIKTEQKEENESIEINNYVNQYGGDNENMEINDQQKRETIHKFDKIKEKLRKKAKYNRKNLAKTETKIGKLLGASREKIYKWKKELNLLMKKSFYEGKKNEFIERFDEFKSLYGQRKQKEFAKELGIGERTFIKWKKELLPNYHKTQYSNEEKLRKMKQYFKIKEMNPKISDEKIAKKLGIGSQTLIRWKKKFASIPI

SEQ ID NO: 150931 - protein, 41 aa, Heterodera glycines
MGVWAFDLFCSHGPWRTLKEKMNSLNEFFHNFKNICEFTLY

SEQ ID NO: 150932 - protein, 60 aa, Heterodera glycines
MNKLIICFMIFASVAEWDVMAKRGLKLRKFAKTAGKKTGEAALVGSLLELAAIGVDKIKK

SEQ ID NO: 150933 - protein, 21 aa, Heterodera glycines
MPQEIYIYYRSYFEEITDNKS

SEQ ID NO: 150934 - protein, 83 aa, Heterodera glycines
MGTAIVRLFDAADCCHHHSGIVDWSAWFAMAFVLLHFWWLSDVRMGRVAGTLVHNVSIFGPSVSFFENFQIKKCQKCQDSWRK

SEQ ID NO: 150935 - protein, 44 aa, Heterodera glycines
MSSNPALIKEGFVEKYKSGFLSSKWKSVFARLYSDSTLALYSDR

SEQ ID NO: 150936 - protein, 428 aa, Heterodera glycines
YFLTGNFFQKMSSNPALIKEGFVEKYKSGFLSSKWKSVFARLYSDSTLALYSDRADSRPSETIFLKNVIPYVCIGFMTDRMPVRRPSLPPGTAVQRLIGIGMDPRAEKVHWILFPSVQRLIGIGMDPRAEKVHWILFPSEQILEEWLNGIMSTLPPPPNPPPQEWLNGIMSTLPPPPNPPPQQPTVPQQNIGFVPPPKYPDQPPPYGGQPIQPQQQSPYYPPPAAGGYGAQPQYPQTVAQQTVVIDRTTTPSGGYGGYALRSSGFGTGLAAGMGGAMLGSLLGYGIGSYFAPHGGWGGGGWGGGGYGNGLGGGYIQVENEGYLKKNNLQDNDTYITNNYYGNNDDSSTPTQNAGGNKLALFEILIKIFIDYSTPAQNDYGDSGGGGTWDDGGGGTWDDGGGFGDGGFDGGGKFMKNPLKKNFFPGGAY

SEQ ID NO: 150937 - protein, 181 aa, Heterodera glycines
MWHTAGQGRSICIGRQGLDDALLIRELPASADDLSVRHAVVRFTDVEPLNVRLAASRLFAFIQMGSLFDAEMAHHKLQRTCLYIDNCADVQIIDQTTHNQSSSSSTANSVNTPFGILPICCMKFFVCFLIAFCLAEPDPAKFQYEHSSGYFYDPATGFYHDPKTEFYYSAKSRSVSVIILV

SEQ ID NO: 150938 - protein, 48 aa, Heterodera glycines
IYLCFKFVNCLLMICCFSLLWNFKNFFFVFFFFFIHFDQSAAMSFLFV

SEQ ID NO: 150939 - protein, 135 aa, Heterodera glycines
SQQRAFSVRYLRPTVNSIKCSLSRPIARSFSFAIRLRSSKRGLAKLGSASLLQAVELFRQSATQRLTAIFRQLNELKPKIRQRQQCVRVAEQRIVRIAQSMHFLVFPTTNAEQTAVDKMGEVQHKLSKCAEQTAK

SEQ ID NO: 150940 - protein, 778 aa, Heterodera glycines
MDADKLKPVMDLPMPTTKKQLHSLLGFLTYYRKFIHSFGTIAAPLFKLISEKAEFKIGEQEKQAIEELKSKIIRDVVLHFPDFDAAQNDLTRQFIIMTDACKTGIAAILCQPDPEKQIRPIYFASRQCNVHESRYSATELEALAVRFGVKKFAQFITMIPTRVITDHKALIWMFRSKNETGNSRVDRWLLELSSRFILKVEFQPGKKNIIADVLSRSGKSNESVTESLQEEDIAFIGKVRVFELSNNVEDFTEHREKWIEETKNSEMRPIYEFLEKKIMPADPRIRQSTMDKCHRFVLIEKFLHLCENDGKLRLFVPLSFRENLVKERHEGKCSGHMSAKKLYKQLAELYFWPNMFSDCIHAHNACRICAHTRNARSNEPPLKVVHSSEPLELVCMDILDVGPSQSNFKYICVIIDHFTKYLVAEPIPNKSADSVAKVFVEKFLLIFGTPKKIHSDKGKEFMNTIFKRISEILGFERSFTAGYDPQANGLAERVNGVLIQILKKSTASNWTWDERLPYSVFAYNITPSESTGFSPFLLMFGRSAKIPMDKITEMNFNPLYTIDYENYFQLFLENLLNIQNEAKQNLDEYRKRSKDWYDAKPQVKANKFEISERVMVAFPGMHRNSRHKKLLWNHFGPYTITKISESSAELVPVDKTAADPITVPLERLIKVPKAVPDIATLPRGKNPYKNVLNAMIFMISAQLNFENMPKRATENWQLGTIAKECVRADKYGKEKSSAKILRINCLNLKLKDKRKRTPGFVGLRFAVKKMPSTNSARL

SEQ ID NO: 150941 - protein, 103 aa, Heterodera glycines
MRDFLRTDQRPKERRWADDGETAQGKAPQQKQRDDERGGGQAQKRRRRRGSSATAQPTTAPQKQRETTAPANGAGGGMGTEENEQRKEKQTQGNTSGGGEGGT

SEQ ID NO: 150942 - protein, 118 aa, Heterodera glycines
LDGRLIAVAVIDLLPHCLSAKYFFYDPDFAFLSLGTYSALREIAFTQQLAQHRPDLHFYYMGFYLFDCPKMRYKNRFRPSELLCDHCFNWVPVTECDRILEASRFSTFHPSAEPTRAE

SEQ ID NO: 150943 - protein, 128 aa, Heterodera glycines
MCQFLSPVPFFLLLLPLFLPSLCPSILAHQNNAFAAAENLNEHGQIEQQTTKNNDGMLGKLRVAVANENGKMVEKQKKQRQIEGEEEKQRQQHKLMMKMREGAGTLTDKNDATNDDNDNNEQSVETEG

SEQ ID NO: 150944 - protein, 96 aa, Heterodera glycines
CRRSSNVLHTASNNALDGTSYDCAPPLPPSIIISMSLCCCSSSACVQQQVQVHGAVSTVQQRLQKIRPRRTVGPSWSRTGAVDSVDAVVVVVGPKS

SEQ ID NO: 150945 - protein, 38 aa, Heterodera glycines
MRRGTTFVKRGTTVIRRGTIVIKRGTKVIRRGTTVIRR

SEQ ID NO: 150946 - protein, 158 aa, Heterodera glycines
MMDHANCWFGAAAVDAVEEERRLRTVVVTNVPESKSDKAAERAREDRAVVDEILNATDVDQAPIVFRVGKRMDGRPRPLKMEFPTKHAARHVIRMRGKVQALNGLHNVRESMTKEQLSERRKLIEDCAKKRQTDSGDWVIYANQVVLRQDIDHIRKIF

SEQ ID NO: 150947 - protein, 21 aa, Heterodera glycines
GPGSRSRVLKSSGPGPGLGRA

SEQ ID NO: 150948 - protein, 188 aa, Heterodera glycines
QVRVRDRNWSKMSFVLINIFYQMNQRNVYYMWTIGNFSLRPIGNFSLRPEQMGEFMKSSTFSAGPNDKLKWCLHINPKGLDEESKDYLSLHLLLVQCDDEEVHAKFKFAIQNAIGEETKALGEIKWRELDSQRACRFVQGTDWCFKKFIRRDFLLDEQNGLLPNDGLTISCEVSILYDSVSNSFMSSF

SEQ ID NO: 150949 - protein, 167 aa, Heterodera glycines
FDFLYKIYELEIVNDRFPFFIANFSLCPEQMGEFMKSSTFSAGPNDKLKWCLHINPKGLDEESKDYLSLHLLLVQCDDEEVHAKFKFAIQNAIGEETKALGEIKWRELDSQRACRFVQGTDWCFKKFIRRDFLLDEQIGLLPNDRLTISCEVIILSDSVSNSFMSSF

SEQ ID NO: 150950 - protein, 180 aa, Heterodera glycines
MPPYGPAHNQQQQMMPPSALVGVPPGAAATNTWMDWNSSAAMPPRGTYPMAPTNAMKAGTQTGTYIPPQSGGMMPPPAGQVPYYAVGMPTSTTAVHGQPMEPAAYHQQQQQQHYQAVQQQYTNYHQQQQPNMIYNSQQQQQMLFHQQQQQQLNQQMMMQQRQQQQPKKTLGPNRAGDELR

SEQ ID NO: 150951 - protein, 134 aa, Heterodera glycines
MNSTIFLSTICCFLFLAFNNLQSVAAVVKQVCFPGIENYEISMFNDRDESIEEIETETVVTDGGKQCLMLNADKWDGYEEDDVICFYVETEMLGSAPVSLLRTDDSNYVLDFSEGLRHYYYYFNPAIGGMDFGF

SEQ ID NO: 150952 - protein, 290 aa, Heterodera glycines
METHVATAQPRPERQGTSFTAKRASRVPPRKPASAAAVACPRPDCPDLPARSDSPDLTECREHLDKQGQMAKPVRVVADPLARAVVNVSLPNPVCLARPDFPVLPETRDFLARTEAKGRWDRLVHLGLMVNLVSLASLANPEPPAESQGTARQSSDPRDHPDPTVKRKDCQKDLIFMGFQGTQVLLANQDCPARLDSPGGWDSPATRESPARPETPERTAVRELPAKLEIWAHATTAQRHAPPRAIKRKKTERTKEIRRRKLLFSVGPDEIRSENVYFIVLKIYLSQKYF

SEQ ID NO: 150953 - protein, 27 aa, Heterodera glycines
METNKQQIKKEAEELRRLAFFGVVMST

SEQ ID NO: 150954 - protein, 92 aa, Heterodera glycines
METGRLFCNLLRKGYIIGDRQFNGDWHIKRANTVFDHDVNRQRVSRAQLPAVIDEIMNEANEGARAFILANLENVRKVNMGLNGREGSVKKN

SEQ ID NO: 150955 - protein, 96 aa, Heterodera glycines
MHFILFWSAQNSESSTTETELISGFLAPCTNHILTKRNLNFCTTFWKSKVAIELNAMKVIRRAKMEELLGPQVAGGQLNDDGDDEEGEEEEGSDDE

SEQ ID NO: 150956 - protein, 34 aa, Heterodera glycines
MPDRAQTRGYPAFSRPDLKLIIYYFELESFSGVS

SEQ ID NO: 150957 - protein, 96 aa, Heterodera glycines
MKKELSVNGDKRRMGEKYKEICAKLGASSRSIYKWKRKFGSKAKGHSKKEKIEIMKRYQKLKKEGKKLDEIAKELKISKSNLRRWQKELNFEIGSN

SEQ ID NO: 150958 - protein, 91 aa, Heterodera glycines
MKNDYPQMTNKQILRELQVGTTLYRWQSKFKIGNGNGEKTILSDKEKIKIIHKFDKMKNSYGKDITQKDAKQIAQQLGYCIRTIYNWKKKF

SEQ ID NO: 150959 - protein, 32 aa, Heterodera glycines
SNLELLVDGLRVHVNAAQPAAVAGWDWYQPTT

SEQ ID NO: 150960 - protein, 86 aa, Heterodera glycines
MTSSEDGDEAVGETKHGKSARKMAKNHLPKDEFKQAFSPLVPIELAQKKFERRIDQMEKQLSEVIANVREDNCGGKKREEEDEEEK

SEQ ID NO: 150961 - protein, 252 aa, Heterodera glycines
DNHLSIFKDELKASIHFLIPFAPKLKLLPAHKLILKTASNVFEAMFRFDTENLKAPVEVPDVEVGAFKLPVEVPDVEVGAFKLMLNFIYAEDLRELNGDNLFAVLYAAKKYGVVGLVKACVNYKLDPTNVFLVLAQARFYEEEDLDLSRRCWEYIDRNVGAVLFSKEFLQMEHKLLCEILDRELIISGEIVIWNAVLRWSDEQLRQKGKECSVENRRKMLGPAFFKVRIPLIPMQDFAEKLGKYLILRVENF

SEQ ID NO: 150962 - protein, 124 aa, Heterodera glycines
MNERLEANYDVELWENAEFCRNYIKFFESFRRFRARCDRDHKGVSITGNWRKATEAEPLQEFFDADYILHDRLVYAVKGAEGIPRENGEEANGEEKEENKEGKEANREEKEENKEGKEANGEEK

SEQ ID NO: 150963 - protein, 50 aa, Heterodera glycines
MRKLSSSKSLKASTTHNNEKKVAFLTKPIKKLTDEAQQNRAEKQQMDEDF

SEQ ID NO: 150964 - protein, 422 aa, Heterodera glycines
MPPPPMGAPQPQQQAPGPAMTPTTDPNYGTLKNLDADIFTKNAPAKPAAAPKAGQAPHGGGGPAQTPTTDSNYVTLKNLDADIFTKNAPAKPAAGGAASQKSAAGGAMSQKSAAPAGGASALSTASQKTAAAPAGGTSALGTASQNLTYDFPLDYLNMSSQWGGGRPVKPAAAPKAGQAPHGGGGPAQTPTTDSNYGTLKNLDADIFTKNAPAKPAAAPKAGQAPHGGGGLAQTPTTDSNYGTLKNLDADIFTKNAPAKPAAAPKAGQAPHGGGGPAQTPTTDSNYGTLKNLDADIFTKNAPAKPAEAPKAGQAPHGGGGPAQTPTTDSNYVTLKNLDADIFTKNAPAKPAAGGAASQKSAAGGAMSQKSAAPAGGASALSTASQKSAAGGAMSQKSAAPAGGASALSTASQKSAAGGDMSQ

SEQ ID NO: 150965 - protein, 24 aa, Heterodera glycines
IGFLAIIGIGDLIGIGFCLARHIP

SEQ ID NO: 150966 - protein, 748 aa, Heterodera glycines
KCSKKLTLSRQSSKRKQCQRPKPDDIYAALNGAAYFSNLDLSDAYLQMELDEQSKQLCALNTHRGLFQCQRIPFGVKSAPSIFQHLMDQICSGIPGVFAYLDDGLIASKTMEEHVSALYQLFARFNEYGLHIQLEKCKFLQKELLFLGHIISSEGIRPDPKRSEAICKMPPPHEKTTLRSFLGALNYYGRFIKEICQIRAPLPTAQKGKLEMGGRTTESLRKGKGADASKDASKDGIGATISHIFPNKREKVIEHASCTLSSAQRNYSQIEKEALALVFAVQKFHKMVFGRKFTLLTDHKPLLAIFGSKKGIPIYAASRLQRWALILSNYEFDIKYVNTEAFGQADVLSRLIANYPRPEEDILIANICTESFINSVFQVQIDQLPLTAAEIADATAKDEILSEISRLSKNGWPNKCSNPNIAPFIPKRDEIVEVEGCLLYQQRVIIPGILRDRALKALHLSHPGIVRMKALGRRHIYWPGLDSEIEKTVKSCEECQNAQKNPTKNTLGQWTPTSKVLERVHIDFAGPCDDGFMYFIMVDSYSKWPEVCQMKSINSQATVGFLRSIIYRLGVPEEIVSDNGTFRSADFAKFCTEFGIKHTFTPPYHPQSNGQAERFVDTFKRAMKKCSINDDWAEKALLSYRTTPTNGYSPDQLFFGRKLRTKMSLVHPRMSDQFDKKMSDQFDKKHGAKHTEFGPGDPVLLLNYRNNKSHWLQGTILERVKNSNFSSQCTDLGGRTVHRHTNQLRRRL

SEQ ID NO: 150967 - protein, 355 aa, Heterodera glycines
MNAAQLEQILNAVLTQSETRMQQLLGNAVPANNNLNNANLASSIDARISKFYYDAESGNTFEQWFKRFRTLIEDDGKDLPEATKVRLLLGKLSDEDYNKYRDSVSPTQPDQISWADTLDKLKSLYAETRSLFVRRYECFKIRQQPNQDITSLIAQINASCENANLSLTKEQLKCIILVIALRDEHHDLRQKCLKMLEDGQKNGTDITLKQIEEELRTIQMVKESALSLMAQPAATNAIHTRPQQWKDSKGKSKPFVKTEQRSHNQQNCSKNVDKGKHRQPTDPCPALNTTCTEVGTADHWYWRILIAVNGVKYGLMSTLVLKPPSSPAKRGAKLANRNCRLPTLKQGTAMEKQYR

SEQ ID NO: 150968 - protein, 289 aa, Heterodera glycines
MAMPPSCLKRSPSVSNYGPAKRVKFNDILQMEVYIRNPEEWTAFDGIVKRVQQAGGNSTAKIIEEDRISKLKEKRCSTEAGPSGTSVHDNELELLEEKENIESVDKELPMEIPLEFDDSEQMQPSADYLEGNEDEQMAGPSNGEGEENNRELIAEMLGLLQSPIPSNEKSETEHIREEEEERATERKEAREDTLTDKNDFLNQSSEPEDSEDSNLVEPAGQVVKERQKETQHQPTSESLFANGLNITQRRDSGTDELQMEEEEQREKEQKGREEEEEETDDDEIIVIEQ

SEQ ID NO: 150969 - protein, 125 aa, Heterodera glycines
MEAILTKKNRTKLQHNGHSYIFHKPSADGEVHFWACEHHHAKDITFKGRLHTNLNNNVLREVGNHQCEPSAARMEAQRVITGIKRRAEQTMEPPATIRSLALQNVATPVLAQLPTKNAIKSFFLL

SEQ ID NO: 150970 - protein, 33 aa, Heterodera glycines
THFVFINFEKFWTFRGFLLFWTFRGLDTLWGCH

SEQ ID NO: 150971 - protein, 108 aa, Heterodera glycines
MLAGRRNSATSITIPFTVTDIRPTNTIGVELMLLPTTNTPQIGPSIISSHFYTFLFVFFYIYFFLSYPFSLSGYKPCSFYGSYTYAPYRPNKSPSGYYYGWYNGISGF

SEQ ID NO: 150972 - protein, 46 aa, Heterodera glycines
CMERMSEEEEEEEFGMDAKKVNIHFQFKLLNINKTMNFFPGHFPIK

SEQ ID NO: 150973 - protein, 70 aa, Heterodera glycines
MFHLRFVVLLLLVIVGLFIGPNFVSADWDKKVAGWDDKKVNKGWEEAEAPLNIRARRGGWDERILGIREQ

SEQ ID NO: 150974 - protein, 80 aa, Heterodera glycines
WYNPNNPFRRDPQLRLFTIPALVCLFRAGANGSWMNTAKDLCQIYESEDHFASVATLERILTNFLDIAAERQGMSVSEGR

SEQ ID NO: 150975 - protein, 414 aa, Heterodera glycines
MPGFRQLNRNTMQKYTSIKCKGYGTSNIPIRPITKSDVTDYQFPILLYHNNNHFDGIKTLSKFFNKRYYCLSCESVYERKSQHSMNCSSLCHGCREVGVDYPCEPQQGYFKKCEHCNNNFYNKVCYERHLHKDLCTKFQRCEDCGVIYNVKYHGNVGHQCGEKFCRLCKQFHVKEDDEDNPCSSCFIQPLKPHKLKPYRIIAYDFEATQDKKVGNKFEHEVNFAAATIICTDCIINGDWNKSLQGKKCQICGLHRSITFSPFDYTETTVDQKIITQQPLREFVEWLLFDHNKKFPTVAFAHFGGRYDMTMIIKEVLAQGIHNPDIIKQGNRLYELKINQNEHGPLTILHDSYNLMPIKLSGLIKSFGLHIKDKQHFPHMFNKSSNYDNILSHLPPREQYCPDQMKIPDQQKFDK

SEQ ID NO: 150976 - protein, 45 aa, Heterodera glycines
MQHHHHHHHHGTAPSAFTPLQQHKQQSPAATIVPQGTRILAFNYP

SEQ ID NO: 150977 - protein, 46 aa, Heterodera glycines
FSIQMALNFLKLSEILPTLALNFLKFFGIPNPKYLNFQSLTSTIRL

SEQ ID NO: 150978 - protein, 40 aa, Heterodera glycines
MCQKKSAVRKVAALTFYARMGYIISNEDISYPKGESECWH

SEQ ID NO: 150979 - protein, 241 aa, Heterodera glycines
MPPIFVPSEFTLLLIMSLLILMTSNNYHNHYGPVLAQSDLETAADLTIFTNRPPRARLFVGKSALHHHHQQVLAPVIAASPPSPTTLAQMMRANPLLATLSMFNDNNNSDNDDISINKLETLDIRHGSRFGTETTTTTVPKTVSMPSLLAKSQFKPTTAKGRSMQMAATANASSSLSDSIANFGTTKTTAPPQQQQQQQMDNFDLLYQIFNVSMFDLADQQEEKPEVLTKFGGKNENAGFF

SEQ ID NO: 150980 - protein, 76 aa, Heterodera glycines
MLHLPFDQHSKLHVRPNVSCREAISTILKKRNIVPEMCTVCVSEDPQSEQIDLSVELEVLARQLVRKELWVHSEVR

SEQ ID NO: 150981 - protein, 278 aa, Heterodera glycines
MEEQLRSVCEKYDGPHEEIAKILSNLLPTTSATTNSNNNNHSANANNNTPTTLTPRSSERTTMDSNADIHYTQQQHHHNHVQQQQQHHFGDNSAAASLTAVHEPCNCGGDGGAAPAVVGDDGTTTAETDNEQQNRQCHHHHQHCYHHHQQQCQCQQGHHHYYFDGRTRDRSSSAPNINSVIRGGGVGGGIMGRGGGGGICLKLHTNSMHSGLHNIINSIQFPPNSAGMCRRSQTPTLLHEVECSTTVVANVGGAGGGHHRHGKGRGQGGSASTTTQWT

SEQ ID NO: 150982 - protein, 35 aa, Heterodera glycines
MPSSLNSEYIGAKSFGTGDAARRHERKNQAFLPMF

SEQ ID NO: 150983 - protein, 226 aa, Heterodera glycines
MAPLTQAQTEQGRIDSLSSDTQLENEAILVQDRDVAQQNEDHAKHNWTRCKGDCDCTSAAQCQQNAQAYIASAKYDREFTPKKTMPLKLTKMAKQCHHKHACASSGTNHRVDYYDSGQFGDANCQHCGAVLLANEAYAIRKQGRVSPCCSNGQCHTEQMKAEFAELQNPPQKLKDLVAAPDERIRFEFLDNTMPLNNTFSFASVHSEKAPADQMAGRMDTVKYNGD

SEQ ID NO: 150984 - protein, 26 aa, Heterodera glycines
MACSIIQSNLVNILIKKEVIPLIRSS

SEQ ID NO: 150985 - protein, 73 aa, Heterodera glycines
MCLSLSPPVICPLLLLSNLGPIFNFWTEKTKFCGTRQAETKNSDANHQVFSTHHHHHPSKKRPMLETVGERER

SEQ ID NO: 150986 - protein, 64 aa, Heterodera glycines
MPRIYNSATVRLGAIKGPTVRSVHNSLIKAVIIAVGQCRKSDVIVPLNANLRNWTMSSKHNTTT

SEQ ID NO: 150987 - protein, 645 aa, Heterodera glycines
VVLCFDDIVQLRKFALNLFDGGLYTKEYVYIMPDNDLYLSFNLSRLPNLSRLPFWVQRSNNSIVLDGRDADANNSIVLDGRDADAEAIGRLFFWWHYDITFSTLSNRNYYGFYERVVNRTYGWPFYCPESDCGTVVNGSVYSILLYDTIYNYGIALNESGSVYSILLYDTIYNYGIALNESFKQFGIRPEVYRNGSLLASFRKPFMGLSGLSGYVITESDRNTRVLVLSNRRSEGSKNAFRILMQLGWKDGELNVSMSAGSSLINVSMSAGSSLIWSSHGGSAPLAVPRCGFDGNGCAVSVFDMYKGYFLSGIALSALLIIASVTIIVYLIHAKIVETRKNNLLWKIPFGLAKIVETRKNNLLWKIPFGLLKRQKQRRPERTAERSQHSLRSNQTNLSSLTNSTTDSLAQSKTFTLYSYNGEKCIVRIYCSTSLATMAFSVAQMAECRTLRLFDHENLNRFLGLSLDGPNVLAVWNFCARGSLKDVILSENAMVKDVVFIQSAINELCEGLYFLHSSPLQFHGRLKSSVCLINDRWQVKISYFGLRWLKNVQKIETKDFLWLSPEQLRKMGDNTNNNNTKDFLWLSPEQLRKMGDNTNNNNNDQQIDGSKQPDIYTLALIFTEMDMCPCEESDNTPPIRGKRAAS

SEQ ID NO: 150988 - protein, 57 aa, Heterodera glycines
MEYFVLDETVAKLDCDHIFHPDCLKPWLARNNTCPICRKQIDPSKWGPVISDVDELD

SEQ ID NO: 150989 - protein, 28 aa, Heterodera glycines
MSLQCLTQEEVNTICKDVLESKMEPKCR

SEQ ID NO: 150990 - protein, 92 aa, Heterodera glycines
  unsure (1)..(92): unsure at all Xaa locations
NAFLAFLTQITCRAKSQAHSMPAFWCHKCRSRCIALERYEDGVRCGRCHEGSLRKSTIFRKTILSVPRPIHRSKRRRRFVLQXHENPFGAFP

SEQ ID NO: 150991 - protein, 79 aa, Heterodera glycines
QQTLWPQPPQSPRQQQFGAYGPQQQQPFGAPPMQNPPRTRGHVPTAPLNTLNGTQQQTRPLRNTCPNCQKHIDPSKWRP

SEQ ID NO: 150992 - protein, 23 aa, Heterodera glycines
MRLPFGGYTFFSQTFEPLITASE

SEQ ID NO: 150993 - protein, 236 aa, Heterodera glycines
MSLLLEYPNLLNEQQSAKLFNGAFVLSQFFGICAVLFVAVWMGGEGGFAWRSDPDRQFRYHPTQFRYHPTFMAMGILFFMAMGILFLQGEAILVYRVFRNERKRFTKLLHMSIHSVALLLLHMSIHSVALLLAVVSLKAVWDSHDFFHRSPNGELQPQPNLYSLHSWFGISAVSFYFIQFIIGFLTFLFPFIIGFLTFLFPGASLSLRKFVLPFHQLFGLIIFLCCTGAAFLGISE

SEQ ID NO: 150994 - protein, 320 aa, Heterodera glycines
TIQMEQPNQEIKTKRNKEKLEHEGSLYVLHKLSDDGLRKYWRCEFFGANDKCKGRLHTDINGNVLKIIGSHTCDMSAAHVECQRHITQLKRRAVETCEAPATIRAQVIKRVRHDEDVPPAAPLSLDALELPPSYRMYNRTENDEENFLLADTGVFQIQGQAGPQRILIFTRSSTSEWSGIMKNCCPYNVATLSCAVLLFPFSGKYEETNCCRGFNSGIAFLYFSNRIVHIKTYNNNAVFAEKSKMITSMAFLPVHHLSAGLTVLQAQLPQQLMGVFNWATMPSTITRLSKMTTITMPMSMLIPITSIICSLVFLAIMKCA

SEQ ID NO: 150995 - protein, 97 aa, Heterodera glycines
MINRGEDIDERTVQKAGERSIKAELSALKRRAVTIGGDHTLSSKLPDNNSQEVSSSSNMDHPASPFLRYQGSLTTHPYTEGVTWTMFTDPLVITDEQ

SEQ ID NO: 150996 - protein, 28 aa, Heterodera glycines
MSFKRVNSFQPDVPMAKKWDFRSIGYTP

SEQ ID NO: 150997 - protein, 89 aa, Heterodera glycines
KGCGLVAGVSRTSPCLWEGCSPLKLPPHQKSTMGGCFKTKTYWTTLKLPPDQIRFPKLLRVFFSRAAQRRGKVINHPPVTKVTGGGNSI

SEQ ID NO: 150998 - protein, 244 aa, Heterodera glycines
MVEMGTEIQTSRNELKSFQEEVDKAKNITLEHVEKNDLKKAKKSADVAKGIARQAKTKYTSTLEEYNDKSEKGFSGMVVRLNEALEAEKGPQKRERLANEDVQFNYDSIDQKFIVYLSSAVTHIDLSKHLAYVLGFKNTRLFHAEEATYMPDLTGGVRQLYIYAPNLIENTIIGNQMAPLLRIVNVVDDPGSISEVIYSTEYFHRLQSKRISEITIEIHTPFGEFVKFHWGSCILTLHFKKSIF

SEQ ID NO: 150999 - protein, 35 aa, Heterodera glycines
MAQQMGEATNSLALALSKDTELADSISTTNYLIRD

SEQ ID NO: 151000 - protein, 163 aa, Heterodera glycines
MPKAAKSNAVLNRHWISKFPEGTYSTDGKINPGLYKLIDIAKILTGVLKQLPPLMKPIFIEQYFYCSLIDVVTMLNDICKFWQNDQNKFLFTSVIWEMDLVNEEELNYEIKENKSGENASTNGTETKIAKLRIEFERKMKNFCENAKQNAMVATDQLEKAAKI

SEQ ID NO: 151001 - protein, 289 aa, Heterodera glycines
MLIAFMKCHQQTQISKYSTQKYEAYLGTVYFMGKNLQCAKIGKRFEQYERTECQKYRKYLGILYEYLFREFAGHNTVKPKFMLKRYQFEMEEPSIIYVLHSLAKVLRFYLNPFISNLYQYKLNNLFSNKHFINEFEPKLLNAFGNDNEQEEMPINEPILKLAIYTANDGQSDEIVEEIINRIIFDRNLKKMFKKAEQRAKENGPWSANEISEDAHKIIWRSKFDDSLIWLYLRRVGFLCSIFLPPRQLGLGISLISHRFDFYVDEHFKEDRVKLDTRKLDTGRLDTILK

SEQ ID NO: 151002 - protein, 26 aa, Heterodera glycines
MDTVNSPSVSDQQLKSIGEQKRIAQL

SEQ ID NO: 151003 - protein, 174 aa, Heterodera glycines
MNIYSAQTYYNNTSPAEVKKAIQMELDFVHRLLLGIQNDNLWAIEARRIQNFVIFVKAPYYPVAKKLLPDMHKKATLENFYGQQKSIESMENWQQNRTHYTEIIDESSEQQNNNYGQGRSKRQLANCKICGRQCQYIFYGVKSCESCKQFFRRVVTKQILFTCPRRNGVGSWDN

SEQ ID NO: 151004 - protein, 153 aa, Heterodera glycines
MEFGKRPSTHLSTLSDNASKKPTSDYHYTILNDQLEAISQQMVNNCADSITKQLLQICVDLVQQVQQYQCVIPEPMTTGSSKRETRQRTAPQCRGAKHAGTAGDKHRGESPPTGLNYCMYSTSLAPSARFLITELGLHTKLDKATARYTYQRY

SEQ ID NO: 151005 - protein, 260 aa, Heterodera glycines
NFNLLTQKLKYWQDEFLRWEPSKFGDIRQLHVPAEMIWRPDLLVYNNANMNVRESEMMTNALVQHDGRVSLFRAIITDITCHLNLHRFPFDQQICHHRFPFDQQICHLMLASWSYDGSQVEVQRASSPAGGPKSTRRPSFMQTLTHYIPNMEWTLIDFRTRSNLKWYDCCPNPYPDICYYFSIKRNPSYYLFTLIMPSALITTITVVGFFTPHSTTGENTEKVSLGVTSLLSLAVSLGVTSLLSLALILGMVSDKLPATS

SEQ ID NO: 151006 - protein, 48 aa, Heterodera glycines
MALVSFGCNRYDWHGHSFLGRSRNGGQTNKLFVIDKKTIHENSKNAVQ

SEQ ID NO: 151007 - protein, 92 aa, Heterodera glycines
PNIPTLAPSVDDGLFFRNGRGTSADDNRATEHSEERSGSNSTLQKDVIDALLDKNAVPPDLITSLMAGVGGSAFSKALELVPSYNQSSQKMA

SEQ ID NO: 151008 - protein, 147 aa, Heterodera glycines
MSVLIARIAELNRANTIEPSIASSADLFGQDGNGSDDNEFHLDDECGQKKEESEMPTNEEEAKTAVEQKHEQQSWVVFGFAVKQQTKLELMIKKGTYYAYDCYGDIWINEEVKERNAQYSYGAGDTVGIGFNSSNRQIFFTKNGLRL

SEQ ID NO: 151009 - protein, 235 aa, Heterodera glycines
MLYCDTDSVYFVRARRPPGPQQQQFLRSEGDAFGQLMREWPGRRIVQFFSAGPKNYGFRHRCAASGGDERAERKVRGLELTCTASQLLPFERMRQCSTSSAGEHEGVGGITMECVCVCVCMLPPNRMPDAEQRVAVPCTRFVRTKRAEVFTRRGTKLYQPVYTKGLVVALDAREAGGGAGNAYFTRPFGWYDDDDDDDDADRDDAEEEEAEDGELSDESDTDDDDDDDVDFLVLG

SEQ ID NO: 151010 - protein, 621 aa, Heterodera glycines
MTLKHTVRMLLIPEDVYRRLMDNPSAAAATSSTTCMNKLPTPATPIEHTARKMVAASSKHTNDDERLIHYQQEFKRYQKLLEEEAERPLNVQLSQRTTNALRDTVLQKASPATATPPPARPQRTTPLSRRRGLQHQNQAPSASSSSSTRPTKSSSSSSNEQQQPLPQQTAAPQKIGDLPKQAEPRIHAAMAYAQQNPGLLGVGGEDASIMVIGSNAVRSLTVESLLDPIYKDERSPACFTSVEPLLREAKRRHPDARLTRAEISRYLAGQRVYTLHRQVRRRFRRLPTLASGLHTDWQADLADFQRLRAQNRGYAYLLVCIDTLSRQVYVQPVKSKRSDDMIAALKRTFARCGYTPWRLLTDKGREFTASAVQRYLRDEAEVRHHCMETSPLWHAGMAERANRSIKERLYRYFTHRGTQCWTRVIQRIVSSLNASPNSSIFGMRPNEVCFDNAESLRQRIADRAEAERGGRASQHARFRPGDHVRIERARGAFRKGYLPRFTDEVFTVDRVCTGRRPITYKLRDMNGEPITGLFYANDMCLVLVVPPSLDDSSIRSRGSIDKRKTRKRLPDGIDNNNNNKVYAIERILERRYRKDGTECCLVKWKGYSTRHNSWIPAHTII

SEQ ID NO: 151011 - protein, 240 aa, Heterodera glycines
MDSFGTVAWILRPTAQTTGTAVGSMEYEEEENGTGKLVHSVTATVTTPTTAEFRLEKEAPSSEKDGAEEGSGGHGTLLFIESDDGEEEEEDEDIEDTPVATDSPSAATATVVDDSSDTVKGVEQQRSSEHSDVTDGAGGGGGSEGAKLLGGGEEEEPVRMPLLNYLCAFNDCSMKELQLLFHSVHARQRMVSHLQQHCRLHTAHLKPAERNIALHCHDLSVQNANRTFACGGYLELTVIR

SEQ ID NO: 151012 - protein, 23 aa, Heterodera glycines
MNSFNTTIFINDNFKDLMNNFEG

SEQ ID NO: 151013 - protein, 18 aa, Heterodera glycines
MDSDNKDRRAVVGVMSSH

SEQ ID NO: 151014 - protein, 86 aa, Heterodera glycines
MYFSPPTAFVAESLLGPVGYKFFAGTFIISFCSTCCYVSIFVIIRCKNGAVQTIGTNQVRSANPNNKMNKIRSSQQRNVHTINLNR

SEQ ID NO: 151015 - protein, 68 aa, Heterodera glycines
MPPKRKTVIIIECVWKAANTGRFAHFQHGGTVQTIDTIQVRSANTNNNMNNIRLSQQMNVHSINLNRY

SEQ ID NO: 151016 - protein, 358 aa, Heterodera glycines
EETQLGEDGYALYKRANNGDFEYVKGIKLTNQNIAPYNPYLLLRFQSHINVEVCSEINAVKYIYKYIYKGYDAAIVQCVKEGPNGEQILLKYDEVGQYLEARYLSPVEACYRLFKYELQGKSHKIERLDVHLENEQVIYFDENANDDNLEEAMQKRSKLIAYFDFFKDCPNAPKFKYVEMPTYCTFDNKNRKWKWPRKGTHKVIGRIYTVNPKNKELYYLRYMLLHKHATSFEDLKTVNGIKFKTYAEACLAMGLTRDDMEWDKCLNEASQFKFPKGLRALFANILINCEPKYPSLLWEKYKDALKDHIINPKEELNLTLNKYSIMNEEQKNIFDYIKDTIEHPGENKKNCFYIDGPG

SEQ ID NO: 151017 - protein, 157 aa, Heterodera glycines
MANFFIIPRRKTIQLLLFIILFKITLQQDSLIETKQLVDQAKSLFNQIKKGNFGANSAIEWIQKNAIGILCNSEFESKMDESLNKLQNKFCDSLENGNYQNLKEMLQTTKIEEKTFDKSQMDKAIAKDQINKGKNKQMFKQLFNNSSNLFEISEKIL

SEQ ID NO: 151018 - protein, 207 aa, Heterodera glycines
MKWIQKNAIGILCNSELKSKMDESLKKLQNKFCDSLENGNYQNLKEMLQTTKNEEKAFDKRQMDKAIAKDQMLNDNNKRMFKKLFNNSSNILEIHEDLIEAERLAVRQQQMPNGFMGRRKKRARDSAIKGCVTAVLLTLISAPYLGYYSNKYANEGNVMVQVNRCKKRFNVRHCYQVQQSVVTQIFEWTILLAIGLICALIFCSCVR

SEQ ID NO: 151019 - protein, 407 aa, Heterodera glycines
EKGGREEEQIKQEKLAKLFEGRVIVPTSLRSRILKALHIAHPGIVRMKALARRHVYWPGMDSEIEKVVSTCEECQLGQKKPTKAPLSPWPTTDKVFQRVHVDFAGPCSDGHQYLILIDSFSKWPEVYRMNTISAYATVFVLRSIIFRLGIPEEIVSDNGTQFRSAEFATFCKEFGIKHTFTPPFHPQSNGQVERFVDTFKRSMRKMSKGEDWIERMLFAYRTTPHVALNGFSPDQLFFGRKLRTKLALVHPKGEKDENFDQNSFNKMAQNFDRKHGSKLINFFPNDHVLLINYRNNKTEWLQGKIVERLHKSPTYRVYVPVLRRVVHRHANQLRRRSFGRRSRKRGTSSQTAAAGCRIASGGETLSQKIIGSVLQIGKSPTKKGKEVNEESSSAVEQEAFALDRNEN

SEQ ID NO: 151020 - protein, 101 aa, Heterodera glycines
VILGAEYVPTKHQREFLQIVGRGPDLTIISRVSSKVWLGFHRLAIVQPGDSPSEQPICADGLSVVCNGEIYNHRTLKDNSLLDNSSSDCPLPPPPFVRANF

SEQ ID NO: 151021 - protein, 64 aa, Heterodera glycines
FYLILLKRAKIITQNNKTKIALTFKFHSANFRPFCSAVHECLLRLLVLFQRFVFVVKWEVQILA

SEQ ID NO: 151022 - protein, 238 aa, Heterodera glycines
GPINTPKPGGEDEDGEVVDTPPRPPAPPPPPPERRAWRGPSPPPPPPPPGRRPRPPPIPPAPPSPPGSPPPRPERPPRPSRRSPPRLPSPSRAKPKPPPRQPTTKREQQKPKKLELKPPKIEPKFEPDSRPSTSKVAPRSKKEPEFPLDPRPSTSRQAGYIPPPAPKIVPKHEPTKRPVPYRIPKREPKIVEETPQRQQQPLPAAVVEEMPPVPPPRRDQTPPPPFQEPKLLRLGSPM

SEQ ID NO: 151023 - protein, 203 aa, Heterodera glycines
MPSNGTETMALDNNSDKMGFEIGQNVTQIHSNNGSKNLSSGIGQHLLEQFGMINDCVFRPTFDNYLMIFAFCVIFCLSVVGNSIVVVVILQQRSMRSVTNLYLLNLALSDLLLSVVSVVVTASAYTLAAIALERYYAICKPLHSRVWHTPTHAMFVISLVWLVSVIANVFMLFMYEERTYNRNGLNCAPKFEPIVHFGYQVAF

SEQ ID NO: 151024 - protein, 262 aa, Heterodera glycines
RRPKEIPALFVPGGRRESALPPRRAHSPLFSRTTSAQSLPAPTTDQSSLYERTLYQLTNDPHFQKEIALGKRIGFYRLGKEIALGKRIGFYRLGKELGAGNFSKVKLGVHVLTKEKVKVAIKVMEKSKLDQKALRLLTRRLLTREMENMELMHHPNIIRLFEVVTTLSKHHPNIIRLFEVVTTLSKTYLVTYLVMEYAGGGELYTYVHETGKLTEEVAKPIFAQIVSAVAHLHGKGIQIVSAVAHLHGKGICHRDIKGGGGG

SEQ ID NO: 151025 - protein, 99 aa, Heterodera glycines
HHKIKNSQVFFVCFVVFPTSLSALSLTISSFFSLIIRLTSVFTFACLTADAFFGGAIDLKPFLGPLVGAPFCARFIDFCFAPAGKVVFFFIPCCAICAA

SEQ ID NO: 151026 - protein, 408 aa, Heterodera glycines
AVSSAKSSSALKWVSLIVLIGQTTALVLTLRYSQTQKSHPSDGPKYLSSTAVLMAEIVKFFTCVSVLGYQNKWNFGRLLHDFDRDSLKVGVPALLYVVQNNLLFLALSKLDAATYQVVQNNLLFLALSKLDAATYQVTYQLKILTVTYQLKILTTAFFSVTMLNKKLDLIKWMSLILLTFGVALVQVSRNEKAFGADNPPQKSTGDGFVGLFAILAACCSSGFAGVYLEKILKTSQVQLWVRNLQLAFFSIFGAFAMFFSIFGAFAMTLLYDWAQLQQWGFFHGYNWIIWTVIALQAIIWTVIALQAYGGLVIALVVKYADNILKVIALQAYGGLVIALVVKYADNILKGFAGFAVSLSILLSSFVSWAFLADFVPSLTFTLGASIVILSTFLYGYEPKRLVQPAERS

SEQ ID NO: 151027 - protein, 155 aa, Heterodera glycines
MMRSSAVRTVGILDKSLSKGKHEINLSTFALLFVEMVRYAQNKVTTIQGLQERLTGYGKFVGVRLLDLIAIREAKSKTNGLYFLIEKEPIVNTFISLPKDKGSLNCAAFIAGIIEAFLTESNFPCKVTAHWHMGTAYMIEFEEEVILREKMEASR

SEQ ID NO: 151028 - protein, 304 aa, Heterodera glycines
MKKKNCQCRQLIGRIWLFSRYSTGWACNLHADYTELVASNCVSNKLSAIEGSRHKRRFFLTTSRHKRRFFLTTFLRNPIDRFISEFTHVSERGATWGRARLFCRGRSPTPEELPACFDPKVGWRNISLDEFLSCPYNLAFLSCPYNLAFNRQTRMLSDLNLINCYNSSSMDSTVFNRQTRMLSDLNLINCYNSSSMDSTVRDRIMLESAKFNLRHFAFFGLKENMTESQFLFEKTFGLTFDSDLALWFDSDLALWNRSKSAHVIPTDRQLGQIRQRNLLDLELYAFARRVFKLRLSKQKTAVIR

SEQ ID NO: 151029 - protein, 53 aa, Heterodera glycines
MKSPTNEPVLEYRKGSAESDALEKELQKLWAEPMEVPLAIGGEKTFRKEKAIS

SEQ ID NO: 151030 - protein, 292 aa, Heterodera glycines
TWSFNMGNDGHFPQGPMFSIPFPDEELLFFDVEVCMKDPRLTTLTVALSTTKWYSWCSERLADPSTELPGLVLPEHLIPMTSAKSRLVIGHNVAFDRTFIREQYYLQETAMRFWDTMSMHETAMRFWDTMSMHIAIGGMADHQRDLFNKMKNNKKEEENEENEAEKATECETESKKQSEWDKRMQSFFKTATIDQIRSNGCVHHQSFHAFLLNLRHAFKILKVLFDYCASDVQATQAVFRKLYPIFKNRFPHPVTFCGMLEMGNPFPHPVTFCGMLEMGNPYLPITKFWPRN

SEQ ID NO: 151031 - protein, 141 aa, Heterodera glycines
ELKDEIAIKSRARENLMFAVEEKPKEERIKLSQQKDELILKCSFNQYDCDIQKLTSDAICQRVRVFANLGSSWLPDNCARQVDSAICGCIWLQCTDGVHVFIWSANVSDPVARDCIKNTSRMLGDLIATGALRNCKCHQPC

SEQ ID NO: 151032 - protein, 120 aa, Heterodera glycines
MISDELNSDETISDEMIGHQYTDHYFLSALLYSIFLGPFAVDRVYFSSKLHFKILVEYFGGNEIGGSGWKRQRIKRILILLSIIGTSTAAFKLGGGSGSVVTILGFLVLKIPVQLICNCK

SEQ ID NO: 151033 - protein, 244 aa, Heterodera glycines
MKLCLFLFLFMFLIVEIAKVGSEEKKLQQKSFDEIFGEKWEEKEEKQRNEQKKREIIRKYYKIKEKIKQKGRKYPKKEWHKIDQKIAKKLGTNSNYIQKWIKEFGVQKNKCHKSKTDEEKIEIIQKFIKMTNEYKQKRKYSLKEWKQNYAEICKKIGVSQFAIGKWKKKFGIRCRITEKEKMEKMKKYWKIKSENPKMSDKETAKILQIDRTTISKWKKQLGGEILEDLNKFSNKKIIYDIKTD

SEQ ID NO: 151034 - protein, 100 aa, Heterodera glycines
MEIKKEEKEKMGKGTKFKSERKIKWEEVSNTFRSDQKFASLVPESPQGNPRSFNGASSGASNSFSFGWDGGLVAEDGPERLPQNGLHHPTTVLEESRRWR

SEQ ID NO: 151035 - protein, 325 aa, Heterodera glycines
VKTKWDTKVKKQKRELKNVIEKHKNVFSTHHYDLGDCKGKAPPILTTSDVPAKTKPYPVPEKYERELKSQIEKMLKAGVITESFTPWAHNVVLVKKSNGQLRPCVDFRPLNKITIPDPYPIPRMDKTILRVAGQTFYSTLDLASGFWQIPLDSESSYKCHILNGKGYRPSLNNQEVIEGFPEPKNAREVKRFLGMMSFFRKFIQNFAEIANPLQQLTRGKIPEFVWGNREKEAFEKLKNNLLNAQCLRAPNYELPFYLFTDASAIAYAALMQSQNNDLYSVGYWSRTLSTTEKLPPTHGELAAIVHAVQNFRPIISGRCIIESCN

SEQ ID NO: 151036 - protein, 63 aa, Heterodera glycines
MNGEEWVILVRYICDNCRRFPNMMVSVLFGEFGKVMRPIMPPHEISGSGFASHNAKMCPMNHF

SEQ ID NO: 151037 - protein, 174 aa, Heterodera glycines
VHMSCCASTGRHQQNDAQNAVDPCAHVVHVLMCYQMTISNCFNSLQFGVSFNCAFENISLSTDGSFSELPDHWCSIAYFELDTQSGELFKVPWQIKEVAIDGGMDPSGALSARFCLGALANVHRSHFMDFEFGGGSGGGDSIVHKICPGVERKVFDLRWAYVEMCRRRENAQLS

SEQ ID NO: 151038 - protein, 80 aa, Heterodera glycines
MRTPSPAFPRKCPRLRCAVNAVPKRGSTICEGSGQNSGNCCCAFVTLLLFRCAAPFRLVLSKDGAKGTDGGQSKRRHVGL

SEQ ID NO: 151039 - protein, 86 aa, Heterodera glycines
ELSKLLEIADYGMQYRAVSHVGAVLGSSRDTGTKSADPNDPTVPKEQVPPRWLENWRNRRAKAAQKRESNEKGKESEVILDGNRDN

SEQ ID NO: 151040 - protein, 249 aa, Heterodera glycines
MLENVMANADNQFGTGKPRQTINGRWTIGQMVEKQRQLHQQMISQQQQQQQQQKEFATMAMQIHGKRSEQNKRKLTNERRKSQKREITEVAKARDSRAVLWKISIKISQKLLANGIERPKTLILTNERIAKLPDLPNGQKSNNLTLKGYYGPLKAIDRENEQTNGREDTDINPPPEGTRIKMDGRNDGKANERERQWHRKDGTISPYVNAPEEITGSRFRNIDEQFNAMNGGNGGRGQNRYVKMDLLNE

SEQ ID NO: 151041 - protein, 272 aa, Heterodera glycines
CRIKFLTEKLRISYGNEYVSSQPYKSAVVSIQLYPNAKYYRIYDNFGDETSRADLILHDIAIIKIKNPIKFTIKNPIKFTSNVRPICLFGFQKNKTLRFNARKISDEKFKIRNTKFIIAGWGMTRPQCAKDQNKTRNDQLNYGKMRMISTQKCREMANEKKNCKLSASDDAEIESASDDAEIESMLNEFETYGLDTTFCVVPDPSIGEPGDSGSPLMLKIGTNNWIQLGVATKTSCNSKDPTSTEELFAQYTPIDCAWIANGTHGEVKCIGW

SEQ ID NO: 151042 - protein, 119 aa, Heterodera glycines
MLSTICYLSIVLGSSSVFFVALYPLAKRYTNWPQLILASGSHLAWQLGTLHVDDPSDCWQKFLANQWLGTVIFCGILLSNLLKKGETNDGNSEEELEMDEQEKFMMYFVQRNMNVNFYT

SEQ ID NO: 151043 - protein, 35 aa, Heterodera glycines
MLRLRREPKNMDLEDNPEEQRMQLTRHMANRMQIF

SEQ ID NO: 151044 - protein, 84 aa, Heterodera glycines
MEIDDFIKKFTEKRVIGHTRRLKAEKLAELLRQQCQYQPQHPSPSALGMTTQTQYSSQGVAASMYPVLGQAYTSPANFRHSYMS

SEQ ID NO: 151045 - protein, 277 aa, Heterodera glycines
MLIAFMKGHQEIQFSEYSRQKYEAHLGIMHFMRMNWQCDKIAVEFEEYERTECQKYRKYLDILHEYLCREYVGIHTKKPKFVLKNKIEIEGPIIYAVNCLATIFQFYFNSEESEFNEYKLNRLFNYNYEPKLLNNEKRLDYEQKLSINEMILQLAIDTANEWQTNESLDGIIRQNCGDKFDKKLEKMFKKAEKRTKEYGPWGANEINDDKHLIIAYSEFDDQWKWIDDALFSEFVKGLATNLENFFKMAKEYSNYLRLKKEKGYYIIFNEKRMIFFW

SEQ ID NO: 151046 - protein, 80 aa, Heterodera glycines
MPVVAAVGLAPAVANAVAVAVAGHAVAAAVAAAVADVRSAQLSSARPLKRPKPENQLILNFFVFYLKITTHCLRSIYENV

SEQ ID NO: 151047 - protein, 76 aa, Heterodera glycines
MPSLIGTAGPSVPSFLKNCTAKKCQPCFVIKVARECEIGMIGNRKVRVIGITIFTRDEGFTGMTKSKFICGRINFH

SEQ ID NO: 151048 - protein, 500 aa, Heterodera glycines
MPSKQQNKRKKELERYRRRTEQSVSPVRSPVPDGSADGNGAASPRGFNTPNISALQLSTPASSTGSKRRGRPQKAGAKPILATQERVSLIDTPRTAVTQSDQGSPCKKRGKVAECGQPMFANEAIALTPLSTQSRGGRPVKQLGGHAGKGRGKTNECMSKCSEMDQTVENALSPAPSHIVFEKIDFSSVQINFATSRNFACKIWKWAAIGLYERDGETPIAPRSGPRYIETCWNDMTQFLNDGFAATYLAYLATISQRKVVVVDPMVWSNGLDRVMPYKNMTFGYDPNVPAEVILLPVHFPGHWTLIVHDVQFGTHFADSLPTTYGRLDPQLTDKIKNIISDILPSAVLTGIVDVENLTVQHDGNSCGYFVCLYAESWLMNNRTFVLPDLSINYEKKRILWHINELYGSDNVPYHPREGVPTPCPIVYRHTDEAQSTSKAAELMEVDEYDDIMIIEPHTSGQAVDAILTQAQVAGENQADTLGLVSESCIPQEPIAQADD

SEQ ID NO: 151049 - protein, 80 aa, Heterodera glycines
MAFPLGGPATCMAKASASLGVISISWSQSRPIWVPWSQSRPALCHGRKADRHEHFFSVKCKDFLILFWSLCVTKCTKLNS

SEQ ID NO: 151050 - protein, 56 aa, Heterodera glycines
MSMIQTELVSMYTETNQTIEVILAVSRRSAKVFCLSLRADMLRYCSEYDDSQSCEF

SEQ ID NO: 151051 - protein, 192 aa, Heterodera glycines
MASNPNAQLLDACEKGAALNHIKSLIERGANVNFADENGLSPLMGACVFGHIRIVSYLIELGATIEQKDVKGLTALGHAVNENQIESVKMLTGKNANCLVFANDNRSPLVIACQEGRMEILSHLNLNHCDEHGITPLMVATQEEKLDVVCFLLQNGADKSQTDAKGRTALAFADDLCDSKERNQLLKLLSDR

SEQ ID NO: 151052 - protein, 47 aa, Heterodera glycines
LTRHISALVFISQKIKSLFLRTHGCSMHPPNFIPKLHGHLKTFLCVA

SEQ ID NO: 151053 - protein, 45 aa, Heterodera glycines
MIHSQIVYGPESYTDFYGLRIFILNPYECLIRNPDPYFLKMPISN

SEQ ID NO: 151054 - protein, 57 aa, Heterodera glycines
MGQLPIELLTEHSEEIEHLILDENELDEQALEDIPRLDKLETLSLNGSVDRQFNRRK

SEQ ID NO: 151055 - protein, 109 aa, Heterodera glycines
MLHPSTHCARKISRKQYSNAPDGAEECGGNADALLRKASRKLSQLSGLGDFQQRCNTATSRRRCSSTESLLAALNGHGSVVSAGADSSTASHRSSTDDLTVLDCSNLSL

SEQ ID NO: 151056 - protein, 233 aa, Heterodera glycines
MIAEVERLLTRKRSAPVHASFGNIDDDDEEEGEILDVSFVEEEEDNTGEAPLNPLSYLTKQSAAQQETLRHEKWAQEERKRREEEQRKQRENERRRREEEERRRKTEEDRRKTAEKAAKEKKAKEEKEASEKKAREEKLAREKKEEQRIAKEKKGEKETKDKKAEEERVAKERKAEDERVAKERKAEEERVAMVTKAEEERAAKAEAERVAMVTNAEEERAAKAEAERAENET

SEQ ID NO: 151057 - protein, 96 aa, Heterodera glycines; identical to SEQ ID NO: 149635

SEQ ID NO: 151058 - protein, 111 aa, Heterodera glycines
IESKFILNSNTLVYHFIYFGYELLHAPTYPSWTSVSILKDKRSAVAKYNCCGQETLWASQTIWTLWTMTQFCSPILSAKYGYSDCDLAFFEHVRDGRCANWILIKTNYLLN

SEQ ID NO: 151059 - protein, 178 aa, Heterodera glycines
MFSVIPLNDLCQLANNSCLLSKHFNNSPILNGILKNAEIIDHLSKKLQFDESEKGRDIQFIAVWRSSLLLALLSIVKRNVDRLHQLCNEWINTGHFSSIPDHYRLLYAFCCAVRAKLSYLLKDYFFDQLSLRHCDDGLLKGNDLEDESLSKFASFLCRKFLPPPSEVPEHQTDVFYPE

SEQ ID NO: 151060 - protein, 19 aa, Heterodera glycines
MCAATDWSSWRTPNELNDD

SEQ ID NO: 151061 - protein, 209 aa, Heterodera glycines
MDGDGDESYCDSDLELERSSSANNVNQLPLVPTEFTSIPEAMQNFNAVFDSRYGAQHAPFFHGSLQDAIAEAFDSPAGGAEHRRPLAIYLHDDQSVAAHIFAQTVFTPFLLDSCYILENEWVTLIKHVETSDSGVMSNVNVSNLLKCQFILWAWDVSLADNKKHLFDWLELANLTEVSNYIKMVPRSKFPMLIVLIKERAVISRASAIQ

SEQ ID NO: 151062 - protein, 75 aa, Heterodera glycines
MALSLEAKRHIYRREFNSLIRTSELMRSLKPRNFVLRSSFIDHLKQLSNYLSSPFQFPFNDRFAVQNELAISTFY

SEQ ID NO: 151063 - protein, 526 aa, Heterodera glycines
MQSIVVASPGLHPYQRLFKRQFGAEFDEEIQPGMVVMRRRFGSSNFSVHRSFGSRLSHFTISTVPEVTHSTTNSFTAWIYQWLETKKQLVDYAKRWEEDQPLQMKLSKADKAKPCGHGFIIENWREKLETGFYLKIKIFMSYQDAKKYDAYEDFLRIRDGGDEGEFRPMQSLDSLNKREFRFVGRTFSDWASGDMDDARIGQALLGLGEKLPVQGLTWDSLTQRHPALSSLCEGQQQTALFMMDPIRRLVFMQAPPGTGKTYCSATIAAAILSEDPDATVLCVAPLNIATARLCEEMQKALQKAGSEIPLLALFSGNGKYRYAVHLQKISKHLLATAVSGPDLQEALKDGLEKKKVSRSIKKVLVTGDKYQLHVNMMELPPAVHHGFGLDTAIINFDNSLPVDSTTLTTSFRSHPFITKCIEAGTYADKGEKIAAGRTEDEMTLLTKNSNFKLPVKNSPLLFMHITDQMEQEETSFSSTNPRQTDATIALLHILVPNLQGTIRVVCLYAGQTLTLLSGATRKALRK

SEQ ID NO: 151064 - protein, 48 aa, Heterodera glycines
MPMTRNSPFHDSSVIAIGFGTLESKIWSTAKIGSLPKTRKKGLSPVDS

SEQ ID NO: 151065 - protein, 178 aa, Heterodera glycines
HTDGNTYEVNLVDEQRDDPEAATYIDFLSTGEFPPDFTDEEKDNLAAQVPNPIAITDESEFKQRLISCLRKAWKSAAEQSHEAQLRMKIQYDKNVRGLDIKIGPACTLPALPKDEQETLQKADAEEMNDLPGYDHPQQALEAKQTDEPVNLGMHRRRQTSMNQFPANQFLMLITFFRP

SEQ ID NO: 151066 - protein, 397 aa, Heterodera glycines
HKSRPFKFTKPKQSQNNKLGRHTQINQISLSCLMDSGSSITVGPRSIAHQLKCKVEPTFLEAISASGHLMVCREKADVEFELVGIRTKITLYFLNDSEFNYIRNYQILIGLDTFEKLPVISFDVAARKLIINGKSTPLGKSYNNLVENLRIAALKNCTLGPNSQNLIDAQIEAIIPSINTITVTNPESKLIQANVGLNDLNALKSLINEFDDIFSKSQYDLGSFTGGEHNFLTTTEPISSPPLRMPYKYREELKKHIDQLLASEIMVESDTPWVTPFVVVQKKDGGIRPCLDFRKLNDVTVPDRYPLPRLDAIMEKGNCSFYSSIDLASGYLQIKLGDETSYKCGVITEDNVYQMKYLPFGLKNATAAFSRAMAVVLSGLDDSSLAYVDGILDCSKN

SEQ ID NO: 151067 - protein, 113 aa, Heterodera glycines
MSGGDQNDLSISVIDRNFWVGKTQVKVNDVERAHLDVLRLEDGMNRAAQITTLTDQIVNPTTGTTKGTGVSKASTQSVGSQRTNTMAPQLNVPPQNTPALAEDELQGIFALTS

SEQ ID NO: 151068 - protein, 31 aa, Heterodera glycines
LTHKMSSPRNVQVSNLSFYYSDGPKVRQGVI

SEQ ID NO: 151069 - protein, 84 aa, Heterodera glycines
MSEADPNFVKSEAISNGSSICAMSSNNALTEMMRPWEDEIFRAPHFPIPFWNMHSQATSALARTNNGLEATHLHFMVFNFLKAN

SEQ ID NO: 151070 - protein, 36 aa, Heterodera glycines
MARKDFRFPTFLGSEFRLPKFLMKSRNFFKFFFSKN

SEQ ID NO: 151071 - protein, 153 aa, Heterodera glycines
MELPNSTFDFVGGIGHRLTHLNLQIDFSSSAYPRTQRTFELFKFQMSDMLQPARAVELEQNFHRFLATTPELGELFARLPSRVVYYPLIADCYNRQIDQFVYLFLIRIYLLPSGSSMDDRSIRSIARARSAANCPHCLDSNVPWADVAMNILP

SEQ ID NO: 151072 - protein, 50 aa, Heterodera glycines
MGRPQICGEAGQCAKRLAALARNHQPRPNVHCAGGAEFHAPLSQLEHGTT

SEQ ID NO: 151073 - protein, 285 aa, Heterodera glycines
MKHTKKMVMVPETEYIALMNIVKSMGSRGDPIQDEKTSLDSNIHKNLNDKTIGADIKMKRHSWLYKRRRQLKELMENKPQKVIIEGNPSSAIPNVAPYMGIHKIPKIETAVEQENKRQPLRLIRASRKKKSENVFESSADYSSATECSSSTPIRSQDVKLSQKNFSKIMNIIGKNPDKFGIDMQSGQVLTNFNKPVTGSNYTESLKLLSGEDISLPRGHTFFVQRLKREPEIAKYLFNLQQGKGKKRRTKRKLVLVQVNPIKTQGLNREKPPFKPDYGQNYRKST

SEQ ID NO: 151074 - protein, 118 aa, Heterodera glycines
MEKNIQLSVDKELEREPLPPPDQQMEREQPLIQPKIEPPDEDFPQEKSSSFIPTAPQTFENDLSCEKFPPLAKISESDPQTLFKTAKLTTEWSQKETVELSGSSADLTQWLEYIMKPE

SEQ ID NO: 151075 - protein, 101 aa, Heterodera glycines
MLSNLAFILCLFTGDEANVDAISGEEENAIGEHRQKHGDEQRNGETEGGRGKTRRTNAGANGDKRSQLGEKDQRKDDLMPSPGDEWDDQRRHKQMSSPAKT

SEQ ID NO: 151076 - protein, 173 aa, Heterodera glycines
MKRSATKNNSFHFSIIFYLALIGTASGAGETSKSTKQKNETNLPVEIENELITLTQIVQESKDDRIADLFSWALKTQPSIRARTFEKFCDERKITEGKTTEERVKNCVMQCILEKSIPFSFHNAENIADLLKMLLMERKNLLAHLMHKELMGPEMKVNDGGIAYLLNLRPLIK

SEQ ID NO: 151077 - protein, 69 aa, Heterodera glycines
MCVCVWNCSIGGFFVRRRKRSLGVLLESENFCRKRLNASLYFVNGSRLTGQFISEKCDSSPFIVHPTDH

SEQ ID NO: 151078 - protein, 86 aa, Heterodera glycines
MYHTVILLIICHLLHTVISLASVLVSSPFDNFRIECPQSSGAQRLSIRMVESQGQKRQDTVFVLSCQHIVEVMCSTVYEIKEEKCK

SEQ ID NO: 151079 - protein, 86 aa, Heterodera glycines
MSVRKSRSANVGPQKSVRKSRSAKVGPQKSVRKSRSAKVGPQKSVRKCRSAKVGPQKSVRKCRSAKVGPQKSVRKCRSAKVGPQKS

SEQ ID NO: 151080 - protein, 384 aa, Heterodera glycines
MAPPAEKKKKHSSADRRLISSTNANQQKQPLGSLVTSYGKRRSVRVAVKKNRRWVCNDILMDIFPLFDRLQLGLKLALISPRFDALVDKHFDGTNELTLSRTIRILKTGVKTKLTVLMDSNLNNFVRFPFPNKPMPIKIRFHLLRIEHIDHFVVTFLRSNQQIFDKGTAFRLYVPLSYKPSVQPIWDVFVREIWPIFATNIRHLHICDGHHLDNFRRLISPTILTDLNQLNSIDSESVFPEAIIGDFDGPNATAGQILSKWLHTPTNDGQPKQLNCRNYYHASMTVHEWLRNFKEAFLRATASACYQIRLELSKSTQIEQFELKNERIGEKLTVEKKGENGHTYSVDWLLKRCQIGKTVQWEEEKTTNNLNNGPLYTFWSFIHW

SEQ ID NO: 151081 - protein, 119 aa, Heterodera glycines
MMPFYFHIFPYFRATSPSPSALETRQKAEVEVNEYLRDPKIKSRVDPALYWEVNSQKWPMIGAVVRKFLSPPATSSESERLFSTAGLISDDLRKSLLPENLAKLLFLHHNLLLTGFSIE

SEQ ID NO: 151082 - protein, 18 aa, Heterodera glycines
PGLADENFQKPHLASKKA

SEQ ID NO: 151083 - protein, 116 aa, Heterodera glycines
EKNLAEARAKFEKIMKKMYNKAKENATKMEQNEMEQKIFLTGNGQLFGMDMAQTSSSLSSSSLSSLTLAPSPSPSFSSSSSSSSKSASKNADANKNYGEKKDELILHLLNYEVESV

SEQ ID NO: 151084 - protein, 45 aa, Heterodera glycines
MIIWARKLMDPDEGFYDKNEDNVTLAIDFTVEEEKGTKKRKLADG

SEQ ID NO: 151085 - protein, 139 aa, Heterodera glycines
MLNSKIWTFEFLFEFASGVQNWPKWIPDSCASLRRMVKNGEFLIALINFDYQRWKLELQMFYHLSNCFTKERNGGFVAKNDHTFNKEENDWGFKYFITFTKLMDPDEGFYDKNEDKVTLAIDFTVEEEKGTKKRKLADG

SEQ ID NO: 151086 - protein, 81 aa, Heterodera glycines
MQIPIPNLSNVFLALVQTRLFDFEALRWADEKCRQDAIECSAENRRSVLGPALLKIRFPLISTEDFSESIGRMKSLKRESK

SEQ ID NO: 151087 - protein, 107 aa, Heterodera glycines
MKMNFYEEKKKEFIERFDEFKSLYGQGKQKEFVKELGIGEKTFRKWKKELAPKYHKTQNKYSNEDKLRKVKQYLEIKERNPKINNEIIAKKLGLGISTLNRWKRKFA

SEQ ID NO: 151088 - protein, 93 aa, Heterodera glycines
MAKINLWLLIFIIFCLFYEIKSGKIRQNFDEIFGDRWDKNKSEENVIKKEQNDQNEQNENSATVDQMGGKMEIVQMINKKEKPFRNLMQLKKS

SEQ ID NO: 151089 - protein, 154 aa, Heterodera glycines
RDKLIDIKIKILPIFTNAIETNADLKNNQDIQIAIQVFFKIYFTVFCPTPPHSQCDHRDFGAINLFAVYIRILAQTVLPPSTHFTSQENGAPSIVFLLLNKTIRNDCRKIIKNIFGPTKIAGRIFVSIKKIFHLNHVYPQQNAVIVLPTPPNRY

SEQ ID NO: 151090 - protein, 272 aa, Heterodera glycines
MRRQIRIERPPFAISVQPDQNRRDGLGRGLLPTDGLSLPDPSAAQKSEMDQPIGRGLGAQLARVAAIVETHRNCQSLNQNATNLELICRGGPIHLGSWKIGPVPVQSLIRAKFQDNFEFLQWSVSFPFIRSFLFPLAAKPPAAQPLVGPSPAAPRRASPRFMGSSQRPPSAVGRHPPQQTNGGRTGGSTGGRPKTASAFASKATPKAASTATEVNNLKQQVQTLETQNSEVTANLAIERERAQLMERERNFYFDKLRSIEILCGACALSDGE

SEQ ID NO: 151091 - protein, 71 aa, Heterodera glycines
MGTPIKGEEGQLVLVACFLGLFVSANLMPIFHHSAAPQQQMLQQHQSFNAFVPPIPLLNTHQPNASQISKP

SEQ ID NO: 151092 - protein, 540 aa, Heterodera glycines
MNLFFPASSREQKDKNDGGGTTTNNNGSSGSDQLTGNDPANAGDATANLPPGVPPEIAAAISGGNDLFVHIHLGDAIALAVGNDVQHIHGPATIRMVSQSTTPQSAIPMNVPEGHIVQQILDRQGNLSHIIMSQEPPAGVGPMLGQHVITATTVMSQIPSAPSTTAAQQRQMGYQSVQLHPSAATVPLKHFRSNNSPPRSTDVSPLNDAVTLSRQKQHQGMATDSGAVYPSGVVPLLKWSDLQQHHQQQREHYQSQSGPFGRQHQQGRGHHTVPSPFNVYNLADSETVSSAPRHSPGFYVHGSTTMGGMDNRVGPSETLPTVAYHQNHQQQHSQHQHSAPGGADTFDSVNFPTQISSVIDDDEKERLRDTLSSIQPPILSKVTDRDAEVIWQVIDTSEAAASGGPFPQIDTSEFVYKLTLFDPVKHSQTFHKTEAGVNVLHLQQLNPGTEYMGKMASFETVYDGAHEQTVVSGMDSGALYRFRVFARNEMGQSESSPVLTVYPERSDTGGRMPPAYHHHHVQHHYHAQQQQQHGGIVQRG

SEQ ID NO: 151093 - protein, 97 aa, Heterodera glycines
MSRIGPPLRPTSPSWRRTPNTWRRRANLMRMTRTQDEEEDVLDVVHITVSVQLCSSDESEPEDFCTDLEVGRSLWFVPVGPELEVADEDHFFIQFGV

SEQ ID NO: 151094 - protein, 25 aa, Heterodera glycines
MIKKEKAVATFYIHKCESPGGGRLG

SEQ ID NO: 151095 - protein, 84 aa, Heterodera glycines
MQMRMGELVAVICWHQHEQRQNTVKNACLRVGCVVDKHPYEFKCCQQKQSEWEKGCACFGIYMKALLETITAVKPGLWINGNVG

SEQ ID NO: 151096 - protein, 149 aa, Heterodera glycines
MAADLHIINQTFSIKKSNLKVGPKLASISSPGLRKETAGWRPSIESTKKFNDWQFPTGQSDAVLRENDLFAGQIDAAADDVANLEFGIRIERYFENIFFCQLAIKMAIVEIGKSAREFSGHLMAQRSVFCHKANANAKVTMGITVKTWA

SEQ ID NO: 151097 - protein, 91 aa, Heterodera glycines
MKIWRSFIFLFLWLQKAISIAAADIQANESNMDSIIRQLIEKNRDKIDQIFADLIRDTITIDYQWNTSDCQSDRMILIPTIIKVKHYGKKK

SEQ ID NO: 151098 - protein, 68 aa, Heterodera glycines
MSSEYLASRAQIVTKIAKYPYVEDYRWASKFFWLYTKFLAHFLAVQFSTWTRSSSSTSANLKIYIKNV

SEQ ID NO: 151099 - protein, 129 aa, Heterodera glycines
MGRGWHFLASAKVQFIAVGTHCQGWTSTKMWTSSRSDPILPVPCGGEQTSGDEVAKKLQKLDCQRDTAALLNGTPVYGFAKGSVNCNEKLAELIDELRPLLRRQQFRRVHSGGMSERNAQRGVGSGRFP

SEQ ID NO: 151100 - protein, 229 aa, Heterodera glycines
MDELKARKKLRESGEQQQQQRAKVDFIDLFLETEQNEQQQLTEQCQNEGEAMLSKTALQRVAKRCTLEEITSQLLMFLLAGFDTSANTLSLVCHALALHAEVQAKVQEEIDSVCFDEDPTYEQLSQLKYTEAVVKETLRLLPIATKWLEAGHQLPPFYAFGGGPRICIGMRFAMIEEKLALVRILRKYSIVQTADTEKELAFSGQLVIAPKSVTVGLKLRDEERHGTFE

SEQ ID NO: 151101 - protein, 192 aa, Heterodera glycines
ACSLEEEHRLVNTVRSLIRIKNPNDRLCLARAVLFGLHDWRSRSPGGGGPTAFKSFANRQHTHGPDARNLLRRAAIPRNKHKYTIDDVQKVQDWIDQQYGPGEIRIAVFEKEREYRIVFKAASGEAAKFNLCLLFENQHFNYIGRIEQLFRVQGYCIDCERRVTRWYHPQECKVVCRLCLRFGAGYPCKQQQ

SEQ ID NO: 151102 - protein, 279 aa, Heterodera glycines
MYSSSSEEGEIHEHPQPNPPVQEFHPNPQAHDPLPNLQPNEKMFFVAETTQHRVVLLADGFEYNFEADSRMADVAQMTLRTSAEAANPMSTRQAVDNTRASIPEGVRAALAPSSSAMGRSYRREVARQRADAGDNLLDAQDPDAIVIGQILQPITIFDGYVEGQRVFAAIKNTIPGWAPVSIMSDFEQSAIAAVRGEFPQATHSGCLFHFAQSLYKKVQTLPHLNTLFLAANQEGHQTKTLIKSLISLAFTPPGEPLYNYFCAVIHQFDHHPDVEGPKS

SEQ ID NO: 151103 - protein, 99 aa, Heterodera glycines
MRTNNSIEGWHQSFNSQFRFLHPPLSYFVKKMKAEDSHWNLVVQDFNNNPQNGIRGRGMARKNVYVQQDEAIRAIFLDRANRPFLAYLRAIAYRMPDPN

SEQ ID NO: 151104 - protein, 45 aa, Heterodera glycines
MPKLETGPLIFSEFLWSKTKSDITKRNKRLRGFLRSSLATLSSCF

SEQ ID NO: 151105 - protein, 183 aa, Heterodera glycines
MAKSHGITKNGAMGRNGGEKVANGLQQQRDTISVLHEHVDEQHNNEAGGGPTANEQNVGMVMDERAFVATPLLQQRRRMPMTPSATTSNNNNMYCSNLSAPPPAPMNNTSSPPTNDQQNGTYERQKPPTIRVQMANGANASLPIAVAPPGEAKPLVWRQKHCQRQNDQPNRWPSAPIAPKDEL

SEQ ID NO: 151106 - protein, 145 aa, Heterodera glycines
MQTKLEKKEEQHMNKFEQLQKDIFIAHQQQNELVGQIKQLKDEQKNYLARVDELEEEQKHLQQEKNVKFQQKAFQEGLEKKQLLEQIVTVQAKVGKIEMENQQQKVSIDQIEKLQNEQNRKINALEKERKEKHMEMVNEYNGNKY

SEQ ID NO: 151107 - protein, 612 aa, Heterodera glycines
MDEDRREEAKAHPHHHHHHHHCDHHQKDQKKQRVNCRRCLASAGGGGDHHHLHHHNYCRFNNTDNHHQQQQQEEGEEGQQDYFNHRRYNNKNAGGSDLFFDGFVLPLPPPPLEAASSFEQQQQMMMMANGKNDCAAPDEQIVAGEGGVGGQNNSASALLSPLSSAVGHDQQQHKLGGTDRRHNINQNAADANSDGTKFDNDDAIAMITSTKKAKKKVKDKLPQSKSNATNGSAKNGGGGNIKGNKSPGVEKSRSKFGQLLRAMLSSSSASPAAVGREKFLASSPTVDDVKIDGKKQPIGAEANGTSTKSAIPSSNCGGQICEGGRHGTEKGTPEHGSGIYVKNIIEGSPADVDGRLAPGDQLLSVNGNSLIGVGQDLAAQKIVSAGPVVHFEVAKHAAQANGLGPYFHQPHPKQQQQQQQNNHSSAVDGAAMMTQPLQSQQRLNGNGAAAAGVQPQPRIASSVSRQSMNGNYTNNSKGGVVPVPLSVHPVVVPKQQKRSMSASELLNTAGGSSSSSNCAIAGAVVVPPPSSSPTGAPVAASSPSFSGGTPFPLVRHSQQQSSSSALSSAASLASSSASRLPAHYRPSVNRPQVVVMQPARRSSAAAATSPSG

SEQ ID NO: 151108 - protein, 91 aa, Heterodera glycines
MPFWFSFRRKPSLLHAVRSSFDTKICEKYFFVRDDDWESVEATPLLRKLIRYLYMGLGYGHLWQRVTTEHYSAFFMAKFMVQIKSPRVVKI

SEQ ID NO: 151109 - protein, 40 aa, Heterodera glycines
MVEECSVCCELIINDQLPMQLKECELQCSCFNLMNFNLIL

SEQ ID NO: 151110 - protein, 130 aa, Heterodera glycines
MPIVQFESEIAKMLGTNRAKIYKLKKKLGQTRKYRVNKDINKDTMIRMIRKFDEMKKEKIYGFKYDKNKICKIECEIAKELGITRQKIYQWKKKIVTEHGYALSSFCPSGAAKIRMKNGDRLGHFGGRVV

SEQ ID NO: 151111 - protein, 159 aa, Heterodera glycines
MEKQLIVAETSRQIAYVSIYSSSDDEEEEKKTMDSGTAEENDGSGREGEKGQKMGNGDEANANCVDGRRGRMAEEAIKKVLVLEDRPLPPLPPVTDDEEEDEIGDGTTAVYVNSTGDSGIGGSSKAPQDYANTNIRKTKEARGDPSKFLSYKTHLIALK

SEQ ID NO: 151112 - protein, 277 aa, Heterodera glycines
MSDCGNEAKRKRKEWRQEHGRRVGSTPKSLKQTEADTTADGEGTSTQAAESGPSTSTLDLSTPIRRHVRVHQKTADKATNMDFTTTDSATEVDLTTVDKATDVDLAYEDAATQTDQLDKQLKEQEQVISFLRQQVRNRDAMITALRRQLEEKMAPPMETPTTSKTTPTGRPKMNVDHLQRTSRRKLADQIADVINRDRSRSASRASLEGISREVRHKFAHYTPQKKKQQLSRQKKSVDPEDALLILGLVGTQKAYRRLKSTIRLINAKFDVMPPLEK

SEQ ID NO: 151113 - protein, 27 aa, Heterodera glycines
KKLLWVFSPHRGSRRALRARFSNFVGL

SEQ ID NO: 151114 - protein, 258 aa, Heterodera glycines
MNRRWICGDVWMDILPSFDHAQLGLKMALLSDRFDILVDRHLDGKSEFTIWRAIEIRKKEGPKTKLSEWIDGKSVAFPFPDRPLPNKIRFKNLRIYYIDHSVIEFLRSNKHIWDRRGTNLEVFVDAIDMGVQPIWDVFIRQIWPIFATNIHHLGFRNADALNNLRSRTSPTILTDLDQLVSIDSGFLFPDGIADDGPNATAGQALTKWLHTPTKNGQPKQLRFRAYVVPPNLEWLNSFKEVVSPEFSSICFCFTNFCV

SEQ ID NO: 151115 - protein, 287 aa, Heterodera glycines
RDEVEKLCNEIEQLRAMSVKAGVTPYWNTEGAQGTVAKGGKEEEQPQQNGRGSKKSWPRLSQRQQKEQAATAEGEQRRRGQQLAQFVLLLRPFQSQQKCQCHHASWTTEKLALTDVQLDALDKAKEIDILRETVNRLQHENKLLKYNYSLLERKVRSESRTSSHLSLNTTGIAGGGALEFDAVVQDEVLAEASEQLAPPYEFAASSPSSGDISVNTTTTGSNNSAGGTTPFIPPPADLAATKSVNRCSFASSTTTSSKRSSHGALSTALPSAKVVLCVDLSGRVDSL

SEQ ID NO: 151116 - protein, 45 aa, Heterodera glycines
MAKIFRLIRKARCKESKEFTVSFLIEKYAYMILIKTTMIIFPTFL

SEQ ID NO: 151117 - protein, 32 aa, Heterodera glycines; identical to SEQ ID NO: 125422

SEQ ID NO: 151118 - protein, 602 aa, Heterodera glycines
MPYRKPQKVKKAYRCAIKRTKEYFYTNLLGDQFVRTEKEFLPVQKRICMAMIEQHKCQYEDKPMTPIEGGGWSSNNPLNDEFPGRFSSLISGERESVTLNCFVEKASLFYRPHNFELISPLYLHLEDCNYLTGNCNMADNTTLNWETECNESCKSCDYHFVESMDGEHTGSTDWAGGTWISKSKEQALTFSKEAKMETACNGKPIRLSDQSFGILEDEYLKIVNDRGLGKRAIQEEQLAAQLTAGQLATSRSIAQLFSKECRRSSRGGNPTIQARRLLRRKDVWLNEDTMQIFSCAEFSMQNVEYQAVNNCYRYIPVQIRIDKKTLNAFLDPELHILTASSPFADCGNFRYHYLQLSQSNWIKIDTRTATIQKIDSSSISEIHEASGDKSLLEITPLVFHRWTIDNETGEGLFAHLDEWLRLDQWKSKEKEHKTARALTLGALPNGVIGLTEEWFMDKLRLLVSYWTTACCIYVTFIFGRDVLIPLVWVYLMGPVIVTIRNLVTGNQWTQRNRVTRGTRRAPAISRIEAIELVPPSMPQEMRANETSSSHQEDPEPSPLVMELKRQMVAFRSKRRFQSRGNVAAERQPRMSVERTNEEDGEE

SEQ ID NO: 151119 - protein, 878 aa, Heterodera glycines
MDKDERKSEQTAYEQFQTTEKLNTKMEAANTKLTELKDLEMKVEAGAKLQRSKADRDARVEQREHAKAMSKSNAEADKGNNRARGNEMTAALYQLPTLRIKPFGGDKREWPMFEEAFKVAVDQKPGSKTEKLNLLKSLVEREAALLIGGLRLEEKNYEIAMKLLKDTYGDKGEYVRRLHTELSNLKRCYSVEDTKQFCMELERLARELEAAEEDIEGPPIYLMLEKKLYKPFLREILEEKAKNPDFWDTSSLRKALGSALSKELAIKEVMREYGFEGKEANPEHGFKRQLRRNRFGGSVNVATTHFGKPNGERRKIPEQKMPSPRQGQRSFQQTPQNSAFRERKGQGRSPKIQRNPTAVNTQGELFLCVFCGGKHRHDSCEKARTVQQRFAVLQEKGLCYKCLKGNHIGRNCPCPMKCFKCQQAHPTALCHQANPQRATEWRNMANKVMNVRKEEKPDKRDEFKEVSFTPSQCNSVQGNSRVLLRTAEVTIFNPSNPKRSMVASVFVDDGSERSFIRANVAKQLGLPVIETEECHLTGFGEKEAKRYVSNVVRVGFLGVNGDPYICALNEMEFIVKAMPIVTLNSMDEAELSKKKLSLPSRPRQPDILLGMDVRHDLKIRDETEKLPSGFTLSTSRVGRMISGYGQVQGPMDMSVQVTYTGALISALQCASSRRDADEEMEEQIKTFFGLNIIGLSDNPEEEDKEEVMRTFRKGLTFKEGRYECGLPWNERVKDLPTNFQQARARLCGTVKKLRELNLVDEYQKIFNEWERNGIIERVPDPTQITGPVHYLPHRPVIKMDKATTKIRIVMDASAKPANRKGAPSLNECLHTGPLLLNELTGILLRWRRMKDLILADIEKAFLQLSVREEDRDATRFLW

SEQ ID NO: 151120 - protein, 200 aa, Heterodera glycines
MSTHLPSRPNSGLFTALRSLPNSFRPPLLAETLPTELTENVTFRAFLSSFFASSPITVEKLDKFLKQMQQFPNLDALVFRSPASMNEFQFDPSDVLYESLCASMASDSEDGQDECFFRIFPNLFDSDLSKAPYILLKQRVQHISHGTTGLNVTFDPSLFPPFAQLLRLLLCVESVPGGVVALICCTVRDKSTEDHFLQII

SEQ ID NO: 151121 - protein, 170 aa, Heterodera glycines
MDTELDGLIWQIDASRENILDLLLIEDRNEFLRQIFGEKEKFDTKNNETKIEETLEELLNEEKKKKKNKRNKKKNGKEKIDKSIKNTTNTETKNSGEGREGEEGRDREEEKNVIEKRKGEEIGNCESDNYSKLDGNKNGNTTDEQMTAKMPTNDAIQAKELDKFGTFRGC

SEQ ID NO: 151122 - protein, 62 aa, Heterodera glycines
MSERVGLVSTRAGRDHGSRLTDHGNHGYLLGCSDRHEGLSMLVQKIFSASKVSLEKFFSLHK

SEQ ID NO: 151123 - protein, 103 aa, Heterodera glycines
MPPVVGLLRENYLYMLLYQNVATMLSQFLVPLCTVPNWFICCGGAVAWTFCSVGLMAKVRHPSRAAVPPALCPPALASWANSDCLPPFYPKGANAHRRHFWCP

SEQ ID NO: 151124 - protein, 26 aa, Heterodera glycines
HRRSSSGLSTEIVIDAMANAIRVKKC

SEQ ID NO: 151125 - protein, 63 aa, Heterodera glycines
MDPSKGLYNKDEDKVTLAIDFTLIFQNELTESCILISTKSGNKTCLMDIDFVLPVKWKENAYF

SEQ ID NO: 151126 - protein, 18 aa, Heterodera glycines
TVFALIIPQSPLIPQSPI

SEQ ID NO: 151127 - protein, 19 aa, Heterodera glycines
FFYCAPFSHFLLLHFKTSK

SEQ ID NO: 151128 - protein, 21 aa, Heterodera glycines
GPGSRSRVLKSSGPGPGPGRA

SEQ ID NO: 151129 - protein, 123 aa, Heterodera glycines
MVMVPESEYLALINLLKGSSGVYPPLADPLQGEKTLLDVQIQKNLADPKRNAEIKMKRHSWLYKRRHQLKDIIDNKPQKVIVESGSVTAPNVAPYMGIQKQQTPSHVSTPHRNSASIQSIGAA

SEQ ID NO: 151130 - protein, 114 aa, Heterodera glycines
MAFQSLGLNPPAFQSLGLNSPAFQSLGLNSPAFQSLGLNPPAFQSLGLKSPAFQSLGLNPPTFNGIPKHWDSNLRHSKHWDSTHQLSMTFQSLKLNPPAFQYWDSILRHSNLWD

SEQ ID NO: 151131 - protein, 88 aa, Heterodera glycines
NSYRPFCERRAEADCPAMARLLQTLSCADKAMAEGGRVQAQLLLRRLFQWRHSSACLAGFEARADTTGGGRDDARQTHNTTSTATTTT

SEQ ID NO: 151132 - protein, 236 aa, Heterodera glycines
MLSDILLNSVYGENEIWRERQVIIREAEEVAQNMQEVVFDHLHAGAYAGCSLSRTILGTDENIRRMHREQLIAYIGKYYKGRTINGPRMLLAAAGGVDHSHLVELAKKYFGKIEHGDEHVLDYEPGIFTESHQLIEDKQMEMVYGSLAVEGTSWTSEDNIPVQVVNTTSYKDTGLTGLFFCAEPDALFNLAQSVCKEWRQLCEEVDVDELERAKRSLLTNSLLMLDGSTPICEDIG

SEQ ID NO: 151133 - protein, 90 aa, Heterodera glycines
MSLNRDENSQSPVLDGPYPRAQDDIEFVEDEAPVLLEVLDRLSREEFVKSGLWARGGRVVSMPMQNCYRPFVGKGIVGPNFKVLNFGHTL

SEQ ID NO: 151134 - protein, 85 aa, Heterodera glycines
MKKSVTISVPEQKEINQPNAEAEPPKTDTTKKRKVEDRELWKLAKGKFMLATYLCAEAEPPKTDTTKKRKVEDRELWKLTKGSSC

SEQ ID NO: 151135 - protein, 115 aa, Heterodera glycines
MTVKEIGQNGRAERVREEIDNRKGTGKRYSAQKDRETIIAKWTVGKGHRERDSGRVTLGKETAGKGQREKDNWRGTLGKETTGKGQLERDTEERDRGKGTTGKGQLERDTGERDS

SEQ ID NO: 151136 - protein, 248 aa, Heterodera glycines
FMCSKYSKNVNNQNNDQNLDDLLLNDSVGTFNNIRFHIHTLYCFSRKSHHPTLVVSFSAVPFQLYSFKMFFPTIKNCVAVVDTKTTLDIEKIYLISPSTKYNPRKIHAVIMKVYNPNATAIIFSTGKFVCTGAANEKECRQAAEHVTERIRQCGYQEALIHKFDVKNLIATADVGFHIRLGELSDFLGECCSFTPELFPGLAYRNINPKMSIIVFSSGKLNFTGNNSIDDIKIAFNQFYPILYKFIHS

SEQ ID NO: 151137 - protein, 199 aa, Heterodera glycines
MDTATINRILTMNEKTKEHYLGCFPCNKIPLNINKFPSVLVANNDPSNKEGTHWVSIFIKDYKTVYYFDSFGRTPNKCIEKFLSQFKTVEEHKEFIYGGITKDNARKQMAYNGFKNVTVDQHFYVRHRICLRYANNPCVIEKNKNGHDRFYPLELVRMIENDQADIYLGQNFPKVVPSAQESSNNAHFIKNYYDSYPLW

SEQ ID NO: 151138 - protein, 155 aa, Heterodera glycines
ELVKNSSKCILFTIVEKLNEVRLELIRDLFNIQDHMKKYQGVTDGRTIQALNEEALRMRTAMKHRRKNLNAFNKAVLKKDLQISAEEYERTSYEQNKDYVEPFFDSHPTDYWEHIHKKYEGLQDDYKKIRELREQQQFLTDEQKKQSIQDEIDQL

SEQ ID NO: 151139 - protein, 368 aa, Heterodera glycines
MSNLFYVLLPSDSPGYDNKPNKFRVHLPRTLTFGGQWLCGLHSIIYTNSWPAIGTTENQWIKVHLKNGDKIKIDIPAGSYQNEQELENAINESIKNGIKQPATRVKRQTEYGVDLFFHYNPDDYWEKIEEERQRYKELLKLIVTKSRERDDETDTHRKRKIEDEEIDPLQNQSLTKKARIEALEEAARQRDDGKEEKEERTGQEFLEMYSVNYREKLNEVRLELIRDLFNIQDHMKKYQGVTDGRTIQELNETALKMRTAMKHRRKNLNAFNKAVLKKDLRTTAEEYERTSYEQNKDYVEPFFDSHPTDYWEHIHKKYEGLQDDYKKIRELREQQQFLTDEQKKQSIQDEIDQLRRLVDYRKKRFAAL

SEQ ID NO: 151140 - protein, 207 aa, Heterodera glycines
ERDDETDTHRKRKIEDEEIDPLQNQSLTKKARIEALEEAARQRDDGKEEKEERTGQEFLEMYSVNYREKLNEVRLELIRDLFNIQDHMKKYQGVTDGRTIQELNETALKMRTAMKHRRKNLNAFNKAVLKKDLRTTAEEYERTSYEQNKDYVEPFFDSHPTDYWEHIHKKYEGLQDDYKKIRELREQQQFLTDEQKKQSIQDEIDQL

SEQ ID NO: 151141 - protein, 46 aa, Heterodera glycines
LKITILAFCHYFFTISTFFEKFFNKNAIKPKNTPLRIDKKNFKKHS

SEQ ID NO: 151142 - protein, 39 aa, Heterodera glycines
TPFQKTRDEPINRECGEKNISLFGVLFFISVNREKPNLL

SEQ ID NO: 151143 - protein, 19 aa, Heterodera glycines
TIENFLESNMENLKMLVHI

SEQ ID NO: 151144 - protein, 206 aa, Heterodera glycines
MFWNRWHNEYLAVFWDRTQWQHKGPKSQEKRVPKEGEVVLIKDDFHPRNTWKIGKIISLNGQKGAIRSAQIKLAPKALYGPYSAIKFLWKLKDNKNNANELEKGLLNEISKKEKLQKRRNRRLFKLANITLVLIYLNTITKIVNGAAEVVSIQSNSEDCERKSNGSVCRIRGTTELTILPAGQKVTLALKDDKGKLAGSLDLFDIG

SEQ ID NO: 151145 - protein, 42 aa, Heterodera glycines
MAFERGKLLTCQLSAKNPLFLPNLLALFIAKHKTNNLFLAQQ

SEQ ID NO: 151146 - protein, 108 aa, Heterodera glycines
MFSTKFSSFLLLSLLVCIVYPTKSFAYRGDGSFVGEAKHEKMARKLVKSGLTQDEFEQTFLPLLPIELEQKKFERRIDQMEKQLIKVISSVHDGNCMTKKSAKEEEEQ

SEQ ID NO: 151147 - protein, 90 aa, Heterodera glycines
MISKKVWLNKRTNEILTLEKEEDYDENTEKDKYTYGDWLLKRCQIGGTATVQWEEENPSILSNVNFKFYSGTNCIGPLSASKAGNCMGEK

SEQ ID NO: 151148 - protein, 114 aa, Heterodera glycines
MIKIQIANVCRKNWPNFKCKIIPNWLDIFGFIGVWHIQLQIGVFAKNLLIGTEKFDDGMVNVPAWTNMVPFERLLPICGVYFQICLAISPCHQCRQLQNSVYCSCAVNVNHGAI

SEQ ID NO: 151149 - protein, 409 aa, Heterodera glycines
MCDDQMEKKATTKRTEAQKLHPKATAKKNSQLTREEKQQQAAAANQRRGRGKRRPAQTTGVSNKNRQKAQGGGTKHYGSPTTSRRPKQTSGSSKTDNPKDKKEGTSKGGGSTKNEPNAMVDEATSKGGSSSTKNAPKAQVGPTAHRRPKQTSGGSQMDKQKAQEEGTSKGGSINTKNAPNAQVGPTAPRCPKQTSSDSQMDKLKAQEEGTSKGGSINTKNAPNAQVDEATSKGGRASITQQIPRSQRTRRVLTKGGGTTSKGDSKTDMPKDKKEATSKGGSSSTKNAPKAQVDEATSKGGRASITNKFPSHNERAESQRTRRVLTKGGGTTSKGDSKTDKPKDKKEATSKGGSSSTKNAPNAMVDEATSKGGRASITQQNAPAQGEGPSSEGGSTKKPITDKPDYMRQP

SEQ ID NO: 151150 - protein, 30 aa, Heterodera glycines
DYFSKHLVDWGIIGDCGINIDWAIIRAYTV

SEQ ID NO: 151151 - protein, 548 aa, Heterodera glycines
MVRKKQSFSSETKDTNVSSLNKGVQSSPEKKRSEGVQSSPEKKRIDYEEGVPSSQQKRIVFDNVRTYEKQSKDNVILINLDDEDFEPCTSKRTICNVVSEQKIDQLRRDREKRVRYRENEAEAERDKRTKQHRLHMQNVRENEMEVEKNERQEADKLRKRNIKENDSHLHQYKAKNTKQISKVSFGFMNIACTFCGALHWAYQKVQGKNSFDDCCNHGNIFLSEIPEPPQILRNFLIGKDKKSRNFFDGIRYLNSSLAFATMNPMRVKLPNYGPYCFRIHGQIYHRINIALHPDDDESPSHGHLFILDPEDAINSMKQNNLNVDTDVLDLLYKTIKESSPFVDGLEMMIEEENVQKEIALKENRKPYEVQLLLSDNKNLDKRRYNLPRANEVAAVFVCDSEGIIPEPRIVIKERGKSLKILNCNCAEADPLLYPIFLPYGNKQWSPDIQNKKEKRISRSQFIRWQLAIKENRFNSFLHGRKLFQQYCVDQYVRIENDRMKYIREHQKELCAESYFELAEWLEDEDQRENKKLTKVILPSRVTGSPKIY

SEQ ID NO: 151152 - protein, 64 aa, Heterodera glycines
MTKDTHGDSLVEEIGDISPPRGLSKFAYGKKEKIEEDAEQKERHQQQQQRRTNGKTKTKENDLA

SEQ ID NO: 151153 - protein, 161 aa, Heterodera glycines
LLCVGECEFAFFTATKFKNAQLDNARKGKCWDWKRMAFGTFYDWILSAKILNEEKKDESTCKSKKLFLTFHFANNWIKTMELPEGEIGVNVSSPAEVFSVRLGCQALVKFGHGARPFALEICEGERMIFTAGVDNYICIWRWSMDEKKGAIKNIFCSKIEK

SEQ ID NO: 151154 - protein, 64 aa, Heterodera glycines
VSTRDESHLNNKYEILMEINTTDGGKQTILLDAKALVFLHDQLDALTRTFPKCYVCVDEKNKQF

SEQ ID NO: 151155 - protein, 330 aa, Heterodera glycines
MPAAPPAAVATTVSTRVERDREFWANPGPGPFRVEKPGIFGLENRGKTRDWSRSKPGPRYSVVRVLVPVPLYSSVNDTDDDDTDAAADEEGSDGEEETTDEIEDNGEQQPNAAPTPSAASSVDTKSGPIPSPLEAFLKPQLNNAMSDPSQNCLILLQVLYGLNTFWWRIFDANDADTDEDGNDAAADEEEGSDGEEETTDEVEDNEQKQPQTNLPPITHRPIIAPSFFYSPKLNSKVTRQLSDFLTVATQQIPKWTLDLVRAVPFIFNFSSRHSFLFCTAFGRDRALMHLVNETSNDEQDGAGHDTASRLITRLERRKVHFVPSLVQMLI

SEQ ID NO: 151156 - protein, 132 aa, Heterodera glycines
MDNSECKTEKEMDLKPEEKGHGEEKGEEEIVFLGMTINETPKDEKKELPPSTSSGDSRKRRHSFDGSATSMLGAMIKAQGEARAEWVERSEEKVRDWEAAHCSNGNQMMMMIITKLKNSYRLSSRRGPEFFN

SEQ ID NO: 151157 - protein, 189 aa, Heterodera glycines
MRNELGANRVITKPQEFYKLILDHKVDQKNFIDEHSSSNIVLSLWTTSRARLKLLDYMQQVYNTEGAELLYTDTDSVIVKHSRDLAPLQTGEFLVQMSEEYTGFSIKNFVCGGITFDVQNSQTLQFEHFRQKVLNYGRQGEEPAVFHYDKIQPTRASQIVTREQRKRYLPVCQKGIITDELDVLPFGYQ

SEQ ID NO: 151158 - protein, 172 aa, Heterodera glycines
MAELDKLGQSDGEDGGIGVGENSGEALDKRSLLLSEPVQITVTCLTPPTGAGRPRFYPYQHWGYNEAHRIRIRDWEDNYCMFHALIGARAYHDPMLFNDWMLADQQPQQQNLARLMLMQDFCETKEAFRRLIINRELMSSSVHRLMHAAGVPEGQHAYGMDHLQTVQHYWVQ

SEQ ID NO: 151159 - protein, 31 aa, Heterodera glycines
MEHCQFCDRRFLNKKGLGVHMQIHNRQKKAI

SEQ ID NO: 151160 - protein, 358 aa, Heterodera glycines
MSGLSRFQLSTATAGQQKRKSDGAPAKTKTLKEVLDFKSAGVFHVTAKVVNLQYKIYKACPLKNRGFFCRKKLDDEMRCTSCDHIVKSPMKSLFLRVEIADRVQPESSVVTTMFSYVGEKYLGINALDVDELSEKEPEKLAEILEAKLDKEVVVKVQIKESKGHFEGQDFDWIIMSMCADNKDVEKEEEEKAKKKVKKEDGELKEESEDDDGDEIQLVGETKSTSTEAQPSPPEQSSALSTSQQQQTDDDNDEHQQGEGRGTRAEGGSQSTGNDLFQQVSHSVHRLERFSVSRHITEFVLNANVEEPDEVLRGAFQILMERAIQNAEQQSGRKVLKIGVTLQGRGLIGRLVALLFLTY

SEQ ID NO: 151161 - protein, 95 aa, Heterodera glycines
MDESKREKFSPQNDDDVITIGDNNTQTLLDLQPGPSKRGRKPRLDKIHEEIASAMKKAKAMEAEVDESPKKQPTNVFEYPTIFWKLARPKVLANI

SEQ ID NO: 151162 - protein, 906 aa, Heterodera glycines
MKRVRQSEKLGEFPEIEFAVNTMGVTVYCPRHLQTPRFVPWDQPGRCSSCRSGTVELDYIIQPEGVTIFSNRLKTDGENFVPFDAIGKLQVCHKHLSIFLSIVDILMDYPRINESELAFPIPSGIIVSGPSSSGKTQLVLRLLRHANVMFDPPPKAIGMCKGGFCAVGCCYLVWAYGEYSTQIPDLERQGVVPHAGAPSDEMLKKLPKPCLIVYDDLMGDIEAKKLADLYTKKSHHNNFSVIFLTQNLFDKSMRVPRSNAQYIFLMRAPNDMLSIRNLASQMFPREQGFLMDAYRQACALPYGYLLTTRRESFLPPKMVKREQKIGERVVHNYDYLKKLGKTTSEKKRRHLLNSAGCEELLTLVEICLNVLNGSFCLSRKQKQRLEPFAKDIRQLARVRTRETKNDDDDDIAERTNLGFVKRQVTAAVQKRKGNVSERNAMYNQHLRRYLKMRKEHKERPVRVQLSNGAQLLNKTVETGVQVRPGPDEPKDKSVMVTDEDEEEEIEVPKFLTPTSPTQGSSRSPRTNKKAAKQQKLIEKKDHLLAIIMSDPQRFGATDRGKIINPKTGREFIDSDLAWSIERLVDPRPENAPSPRGTKELKKKLAQNPLASSLLNRLFVGSGFVGQADLADFQALSRKNSGNRYLLLAVDVLSRRMFGSPVKSKRPADMKRAFEELFEQMPRVPDTLYTDRGLEFVAKALKEFYAEKGIQKFETSSKKKAAVAERAIRTLKTRLYKYFSSNNTSVWVDVLPKFLSAINNSVCRATGLRPREISDTNAREVWKRVYGEGLVQSNKTPKIRAGETVRIPEPKHIFEKGYIPNYSDHVYTVDEARSTNPQHYLLKDYYGTKLKRKFYLPELTKVQVDENTMYRIDKKYKERVRDGKREMLVKFIGFPEKYWVTNEEMNV

SEQ ID NO: 151163 - protein, 138 aa, Heterodera glycines
MPQLVVGPFCTQKPAHKDGDRGMPCRVGQAAEQHQNRNQQHRPADGEILDGHGQHLLRLQVRTQRPSSWRPAAWGTHRRVPQPHHYGICVRWTQGLWIVAAQQRHGGGRVQGQTARHHHGLGRLREDDVREDEGHGVE

SEQ ID NO: 151164 - protein, 210 aa, Heterodera glycines
MAIVGGGETAGAIRARDAKRTHAIARDFEVEVVWECEIADQLEDDPAMRAYFDNCPDSGPIDFHDAFFGGRTGPEWLAATVINPKNGEWKSRTIKVKDFNSLYPSREEFTGFSTSVTHIELEAALRSGYKVTHVYRAYIWPLVCDWSDSVFHSYMNKFLKIKFESSGYPAPCREVGIDEEERERRQQDYINKPWEGNKVCLDASKIMPNP

SEQ ID NO: 151165 - protein, 539 aa, Heterodera glycines
MKFVLPQQRFSEYKKDERRQLENVQALCRACNIDMDLPFYCVDYYQRLHPGLFWLYCFETSGRMKPSWKSCAGDREHELCVLFTEDVNGENGHYDAVKSVGKLVRCRTFNTLNIRPNANGNVTIASAWAGRSEETVTIIKTSLSLVNFCFAHVTCTRCIEKGVWDQELERACALCGRFRTYSWAPFEFWRTDVECANVVDDPLAAFTKWLLNFEAEVLGMELGAKKRRKRKNAENNNDGEAMEGDEEDDAVDLDAENNWMLGYDEAGEKPESVTTYAYAHAGSRYDHVLIYGEMLRMGVRPELIRQGNHLLEMKARKRGAITTTVFRDSYKLIPIKLASFVKTFDLEIEGVDNKKYFPHKYNKAKNYGTVLDTLPPMEEYYPGSLFPAERTKFEQWYEENRETEFDLCEVIADYCKTDVQILAHGLVKMRQLFLSQTKHDITDSITIPSACMKFFVVLMHCDNERIAIIPHLGYEKRGKQSTVARKYLKWRSEEEKREFDRTIRHVESPGGEFKYGNYSLDGMVERPEEEKDLAIEVNG

SEQ ID NO: 151166 - protein, 206 aa, Heterodera glycines
MSNLNPGNWWYYFERQGKATAKCKAEYLRDQKIKSRADPSLYWEVNSQKWPMIGAVMTCERVLPENLAKLLFLHHNLLLTAMAQSNPFKHSFVLFLFTALVIVIAITLAENNTTDAENVTDADNAAVAAVMPSAITDGMTCVANNLTNEADTQRMEKLEKEQEYVDILNEAQNYWTAVVHENFALMDEEMLRNMVGSLETPRYNAN

SEQ ID NO: 151167 - protein, 78 aa, Heterodera glycines
EEKSMGRHNHQATHSHIGFTFFENDIEKAKRKSFISRPEASFSKNKKKFIIQRGGNLPTLKVSFGSPMVTWVPLLCKG

SEQ ID NO: 151168 - protein, 53 aa, Heterodera glycines; identical to SEQ ID NO: 125524

SEQ ID NO: 151169 - protein, 147 aa, Heterodera glycines
MRLKQLACKSTGGRMPRKQTAYKCAGGRPAKRSFFITQWKMKKVVNEDLSNGKELNKLRVLNTYNDEEMDSFEYITSTEKGENVVDIPNTNGPIMRPSGRYQVYFKDPEIGWALQTLEDIDAGTPLFEYAGMLENSKSVGTTAENDD

SEQ ID NO: 151170 - protein, 153 aa, Heterodera glycines
MDRNKIEILQKSRKLRPWEEPVVRRALFPIPYWNVHSHAASALARTNNGLEATHLHFAKGLCHHPALSDFIYEVSRSIDKKVDAARSARNFIHKRHKRYVLQDAVIMRILADATYDNDAEIHDVMTALGLQVEGYAGKLKDYENFDDSTMHVP

SEQ ID NO: 151171 - protein, 170 aa, Heterodera glycines
MDEHQIPVWYVMDEFGVRIGHSLQPNSGRLLDLIPSGDQSPTVNFQKSVDDPDILVCASDLQLIGHLRRFRVQETNDPMKAHIIWRPAVQSFVENCQDVHPDQQLVDELSLRWSPEWFPLTFNLHIELPQFVAYFQRRAAKNLDNCWIVKPWNLARAMDTHVTRNLNTII

SEQ ID NO: 151172 - protein, 42 aa, Heterodera glycines
CHFTYTNSLASPGADEEEWCANDTLVEMEPDNAIKPVIPLYP

SEQ ID NO: 151173 - protein, 284 aa, Heterodera glycines
VQQVHREVSRLQKFEERLSPDQKHDKLNKNDRKTSATSKKDETKLKIKPTFEQNQDQNATRSSSKTKQKKGNEKPINDQRPSRNLEQTTSIASNSDQAKSKKEINLANRQGSGQISQNATAASKSDQIKDKGKKPISEQIKSSNEKKSEKHDTTEQEMNVNRKQKQKKFIRTTSFASPSTRQISKKTKNFQKNENNYVQKQITSAKKRRYENLKMEMENGRNGRSPKRLKMENLNEKTDGQQDKKSEYGANDRKEKTDEEEEERDGREEEKGAAKTITIIGRAN

SEQ ID NO: 151174 - protein, 621 aa, Heterodera glycines
MDPNQLKLILEAVLKASAEQNNSSAALATSIDARLSTFEYDPELGHTYDVWLKRYGQTIAQDGQALSDQSKVQLLIGKLGEVEYKRYIDSIAPKSQNDFNWDETTAKLKHLFGETRSLFLRRFDCFQIRQDAHQDVQSLIALINSSCENADLSLSKEELKCMILIIALRDEFTDLRQKCLQRLEDSRTSGRSTSLQELGEECRKYQILKESALSLGSNPCSTSAIRAKPQQIRDKQKSKTKPQQSHKGHFQPNNSTAIKKEVGLPDQPCHSCGGKNHWQKDCWFKNSTCEKCGRIGHIAKRCKNGTETRRVRAVATNSGNDMHIHTVSLQPTCMAIEGSSNKWWRIVTEINGMENPMNVDTAAQITVITADSWQKLGKPKLGKTTIAVKNCNEKAFAIKGKFNCQVSYNGRTAKLIAYVSDEIHQDLLGMPWIEELEIIPKELMFPNSSQITNSVPMKHQKMPAVNFKNFGKFQQKHQNMERQFNDKYGAKPITFQNGEPVFIWNLKGNKANWLPATIIERVGNSPTYRVDVPTLRCAVHRLANQIRRRFPVELEIPQIGQANGNVLIGNQPNRTPIKEIKKAKSPIGQSQNAPRRSTRAKTAPQRLDMDPSKSKYDVIRP

SEQ ID NO: 151175 - protein, 290 aa, Heterodera glycines
MDPTQLKLILEAVLKASAEQSNSSAALATSIDARLSTFDYDPELGHTFDVWLKRYGEIIAQDGHALSDQSKVQLLIGKLGEAEYKRYTDSIAPKSQNDFNWDETTAKLKQLFGEIRSLFLRRFDCFQIRQEAQQDVPSLIAQINSSCENADLSLSKEELKCMILIIALRDEFTDLRQKCLQRLEDSRTSGRSTSLQELGEECRKYQILKESALSLGSNPCSTSAIRAKPQQIRDKQKSKTKPQQSHKGHFQPNNSTAIKKEVDLPDQPCHSCGGKNHWQKDCWFKNSTCE

SEQ ID NO: 151176 - protein, 135 aa, Heterodera glycines
MENDDTKEWHGNEQMAFGQQMGGGLRQFEMFENLEHARGGQERVANNRAFGEQRPLLSRPQLPPQQSFIHRQYIQSVQPLPPSLPYANERITSAPTYPQPNFEQQRYQPQQNSANPTKILMFCMASNSSRTGKNF

SEQ ID NO: 151177 - protein, 295 aa, Heterodera glycines
MQLPGKFERHPKPNAIGRKFTLFTDHKPLFAIFGSKKGIPNYSASRLQRRKPIIFQSRHDKSRNRQPKMTLQKIVNFVIYGWPTKCNEPKISQFHPKRNEIFGKWRCLLYKSRVIIPNQLRGRILKALHFAHPGIVRMKALACQYVYWPGMDSEFERVVRQCDEYQGAQKSPIKAPLAHGQSSTRPSNACTSIWLDPAKMDLFILLWWTPSPNGQKSIKCLQLRPRMAKQFDGRHGAKEKVFSPAEPVLLLNYRNQKTYSNQLRRNYVFKENSKHNPGADHQPIPPATQPSSLCL

SEQ ID NO: 151178 - protein, 499 aa, Heterodera glycines
LHMLTQFDNRVVHTNERDALAVYDASNGIPALSLPKGERFDQSVLSYLEDFDLVYLWPSIHERFAKDYASYMNATRCYIYASYMNATRCYIITAPLRPVELLRDGRAKEVLHNIQGDAVRVRYKGFRSVGDLRDAVRSEIVQSKSRLGGIAQWRRYTLLNNYLRGFRPGEITVISGGHGKTTFLCEYSMDLYSQGIRTLFCNFEMPEDKILKWMIIQFAGYMSLILKWMIIQFAGYMSLMIVFFMKSKSVYKNIYTNYVKFFLTFIRYHSSVEMWLDKFERTQGDLLIMKSDEFRDKTLKEIAIRDQVITSGIQHLHLVIDNLQSLVDLATVSIDTMSASQSLVDLATVSIDTMSASERIHQQDRFVSMLRRLANNQELHITLVVHPVREPNEVEFVVHPVREPNEVEFRLQHIGGASAKIAQERLQHIGGASAKIAQEADNVLVIQRRRDFDDRRRFRKFLYILKNRYGGRCIEVDQILKNRYGGRCIEVDQVEKIFG

SEQ ID NO: 151179 - protein, 226 aa, Heterodera glycines
MTDVQVDLADLQSLSRHNKGYRYLLVAVDVLSKRLFVVPLRSKRADEMLLAFKQLVEQMPMTPHRVFTDKGTEFRNRMLKEFFEEHDIAKHEPVHSAVKASVAERAIRNKQYGLKLRRKATGKIEHVLKLRGITLNYDVTVNQNLQYTAFRERVLQYAENRDVEPISVFNPCAIRPNIKKGEVTLIPTTKIYRPYVGKGIVGPDYRILDFGYTPFTSFPIEILIIF

SEQ ID NO: 151180 - protein, 220 aa, Heterodera glycines
EVFRGHRGLYDFNIGMFYDQHEHQLHPSFLPKVALEYVNNCPQDFLLSTLLSEHFQNHKIVVIDVNSFGPDASCRSETEAFLARRIVNKLSAADLLVGTVDAAQGKEFDYVIVSVGRNNTSTLGFLADSYHPTLRMWKNGRVNVMFSRHRKALIVLCDASSFLANPLLTINTAPEGTEAVAFESGIEAGRFMPYTKQSFMVFLKEARREGLIFDAKDLEL

SEQ ID NO: 151181 - protein, 140 aa, Heterodera glycines
MTLILMQPCISSTAGRGWVPNSSVLELKVLGIENEPFTSCFFQENHEALFGVGHKATSFDAGLECNGLSSFRSSIYRQQRILNIMIPTIFQEFMEQIMRHIFIVILNRNDICYSGFVRHIYDNNHIRRHTILFPNAAPKC

SEQ ID NO: 151182 - protein, 146 aa, Heterodera glycines
YVIYHLIVDNGQRSEIAYKLRYNEFKVAKVVGTGENTVRMCPLLDSKTDSTDAWIGWSNRLYKLTKRLRIYVEQHQQKLSAVSAPQITEHDYLFRMPQNPLRGISRKHLNEALRTFFGRFRDVNPIPFTLHKIRAIVASQSVNYAR

SEQ ID NO: 151183 - protein, 139 aa, Heterodera glycines
MHNSLHYRHAPFQSIGIDFLGPTTISLAGEKIKAWILIITCLATRAVYLEATLDLTSESFINFLRRFISRRGKRDIIWSDNATTFKLAQKTLELLSAPGPDQEVQNFLTQNRIKWRFIAQISLGQEAFTSASSYNYFQH

SEQ ID NO: 151184 - protein, 302 aa, Heterodera glycines
MATNMHDKKTLLNQILGEADITVSNSGITVSGPRLSTPRFVPFDEIGRCHCCKSTEVEVDTMFTKEGVTIWCSRIDKVQFVPFDVVYDLPGHCFFRLKNKARVFNIPYGEPPPMTCKNQNSQSDQRELKRKAKVALDLLETGLMADALQDSESWKKAKTAMNVLGNVLLAESLPTVKKENKNSPASPVDQNIAQPKAEPQKETTKKREASEEKKAPTKSHHSQRQSSGTRKSSKELMNEKPSSPRAESIPVQHLDSASTQIDDVSVPKADKIPKSNNEEDLGDIDKTLDEFFASIKAATTGM

SEQ ID NO: 151185 - protein, 831 aa, Heterodera glycines
MANKFILVPQEIYRGLTSAPSTGDINLDTVRHDLDRTRGERANPSTKNVRYNQQLRRYLQMRREVADRPSKVELTKGISVLLKRGGEDGDGQVVDTPPRPPGPPPPPPHRPRGPPPPPPPPGRPPSPPGPGPSPPGSPPPRPQRPPRPSRAAPPRRNRRLEQWRKRRYDIQQRRQPAVRDFLAEAAAAPLPESDEEADYMLENGFALPAPSQYYGDLPVLPDNADEIEEMDTVQQRLASRRKLKKDDDDDDDDWQDKKYKIYYPPPPARRPPSRPAKIEPMHPPRPNPKREPQPKVDPRPSTSKQADIKPKREPKFEPDPRPSTSRQAGYNPAPPAPKKEPKHEWKQTKRRHSPPRTAPHRIPKREPEIEETPQEQPPAAAAPADVEMPHVPPPRRGTKRRYPPENVEDGQPRLRKRVRQARRARVYYSPEPGPSTSAQSDEQQQQRELFSIPTNQLTMAQRVELICIKCNRYSDRMGVRGNAIINTKNGQPLVRSNLRMAISSTKETITEYNHQDGIENQKRVSPEKMELINATLDKLYNDPSSPAAFSGVTALWKEARKKIKQLSKKEVQNYLESHRTYTLMRPRRVHFRRAKTVAAGFMTDVQVDLADFQALSRQNRGHRYLLVAVDVLSKRLFVVPLKNKRAEEMLEAFKELVKQMPMVPHRIFSDKGTEFKNQLLKKFFDEQEIQKHEPVHSSVKASVAERAIRNVKQRLYRYFAEKETLNWVDIVEEIVEGINHSPSRVHGMRPIDVNFKNAQRVWKRMYQTRPPIRRPPRFYKDDFVRMTREKGQFEKGYLPNYGDEILEVDEVLKGVQPVRYKLRDDHGEKFR

SEQ ID NO: 151186 - protein, 133 aa, Heterodera glycines
SGLNHFSFVRSLTMDKWKDAELARMRAGGNAHAREFFESQPDFRPHWTIQEKYNSRAAALLRDKVATEADGRVWSYDTSLARNYQPLLSKGTMKLRGIFKFKVFLEDETYQNRVTEWYRIWQKSSSSRYTGFG

SEQ ID NO: 151187 - protein, 164 aa, Heterodera glycines
MRVTASKHIVVQMPKEGQPDAGLTKEFTNSSLHRFKKPGSKNYMVLNALGILKFGFSNYRIFIRQVRLCTCQIFQTEKDHKMALLQLEDVENAIDFLVTMHVRFWTWIQAWIFSESRSFLGSGFSGAFVQEIQVKINLEIQAQVFAKCRTLFALLCVRKIFFFV

SEQ ID NO: 151188 - protein, 60 aa, Heterodera glycines
LILKIKLLTHIREKEVYCDADFFEVPEDYDFTTRVTSHIDHVELTETRHYELDGCCFVNF

SEQ ID NO: 151189 - protein, 238 aa, Heterodera glycines
MQNVEFGSSSDNPIMFFDDESEQTVQNWQMKRPMKSSELLEETEKQTKRDGKRTAEEAEGEEKQRQNRESTRRLLGIKKAFLNEIWQIVTVSFAMLGIAVEPIEQQMNGGKWPQFELALRQIGTAQALLVLDKEQLQTTWNFGAKTITAINSESQTFLGSEIFKIMEVGGRDENVKFIGVMDTNGDKKLKMLFFFVRLIRKLAGELETPYESYSQKDTVRTSTVYSSVSVQMIKEKQH

SEQ ID NO: 151190 - protein, 283 aa, Heterodera glycines
MTDQQQRDGAVCASMTSPVAVDQQKSLIPSLSISPASTLFSPFITQRSNKDKVMILNCFPIYQRFALQRMRKKRRKSRQIKQKQRRRQMPRDKPVPAAAAEVPTDQCGMPRKRQHQSIFLFDGRRQFVANHHHHLLLLVVLFILLCFCSPSVRAIPSASSTQQRHHQQRLTAPMLNGDEPPLVVTKLGKIRGFNQKFNGKTVRTFLGVPYAQRPIGGLRFAIPKMIDRWEGELEATSSARTCFYPIGKICTKLRQFDLIVESINGERRLIRTQKLRSIPDVEH

SEQ ID NO: 151191 - protein, 150 aa, Heterodera glycines
MFVPFLHQTFFHCATVCIFFILLGVFFRCQQVTRGTLALCAKLSLSSTRSIRSMKNDARSVADFDRSGNNKIGESPISMPLPVGAARSPFEAFVQVNAGVVDAGKTRFGVECSVSSCTRNSRLVVSALRPLFSNSVSFGIANLLTLLQVE

SEQ ID NO: 151192 - protein, 105 aa, Heterodera glycines
MMCQVKLPAPSDVLSLLLFLISVTIWSRSRPNSSFMDQKSPTNPTTIQMSMETKTETAKGRETMRYEELIGGTKCRLPIRALRRSFLAAFHDHPRAVQRTNWALH

SEQ ID NO: 151193 - protein, 34 aa, Heterodera glycines
RFAPSADHSSPHSMITREQSNERIGRCTETEPHR

SEQ ID NO: 151194 - protein, 102 aa, Heterodera glycines
MFVFPCCQYDVDVMLEDLNGKVLYKEARKQLDTHTYKKGLCHHPALSDFISEDAVIMRILADATYNSDAEIQELMTALGLQVAGYAGKLMDYENVEDSVQAP

SEQ ID NO: 151195 - protein, 136 aa, Heterodera glycines
MSLSSGSFSDSICKQRNKGSTRQALNDLSICLTRGNNWWSKMAFGYPPKSDHLTCTPGTVQSKFGRNSETFPDFGREFRAENCSRAKPKRELGNTPSHSEVGTRHSAKHLPMYNTVLMWAIIFGVILAKCESESHR

SEQ ID NO: 151196 - protein, 304 aa, Heterodera glycines
MPSAAMLAFCLLLALFGALNLPTECKVSFSTTYELLETGTMLLDEVKKQTDNERVEHEADDELDSQKAKALEEKGDKFLIAVENLCNSEIEVRKPVAEKIKPKEDANLLAVKNVCQNWKNRKSIRKEQKEAENGSVAPAMSNLKVNPQIHESFLRTLSEIKILNPKNKEEFGKLAKVGIDLLPKVTKILKELKTIADSPSDQTSASPADQPKGISKRREKKDNDRWNLFKKRVHDRERCSLYVVLALTSSILFTDMTVRLTQQHTFSIGNSSRTDEHRTGVETFFQVLELVAWIYSLLTILNEI

SEQ ID NO: 151197 - protein, 16 aa, Heterodera glycines
MDTKFQLNSERFLSKF

SEQ ID NO: 151198 - protein, 135 aa, Heterodera glycines
SLGDTIGVGTAGTVAHLLDEVLRAVPCKSVAVHFHDTYGQALSNVLTAIDRGIRVRGIRVADSSIGGLGGCPFAKGATGNLATEDLAYLLHGMGFHTGIDLDKLIGTSVWICAQMGRKNESKVTNAMQNSRKCGE

SEQ ID NO: 151199 - protein, 242 aa, Heterodera glycines
MSREIDQFNNAILLDKGDESVRRVGSSAFAGADEKEQLRFVGLVLWHLVFRDCPIIDPTADEFVFIAKVEPSIDATDPNVAMAFCAELDNELARKSQPKEQKEEKKVAEEMQEKIEKEFELFERLEDKILKDTAFKGVELEKYNELHEKFELLRMYWDWQKGKRRRRNIPFYGIIDRAFIAFGSEAPVLIVFIRVLLEGAIGWTDFSEYIQYPTRNTIRIKDIEKYYQMMRQLEEIWDGYGL

SEQ ID NO: 151200 - protein, 745 aa, Heterodera glycines
MAADIGQILQQLVKNQTEAFQALLQNAQTNQNSNNHSTIYATINSQLSQFTYNPELDLTFQAWLDRFGPSIQVDGKDLPDAMQVRLLLGKLGQEEYARHAERVLPKLPTDFTLAQTIDKLKILFGETKSIFTRRYECFQLTKSFSQSPLDFASQVNAMCERSKMDLTKDEIKALIFLTGLSDEDRELRERCLRILEEAKKKTPPEVITFEKLTEECRAFLSLRNTSQSLATVSGTNAITLKPQKLKEQQLKKRSTSQRPSTKAQSNNNRSPSPFQRQPKPPSPCRFCGQMHWVRDCSRAPTCSKCNRRGHYSSECRSSSSSRPNSQRYNATMSVFNITDDDLSEWIMINCSINNIDVVLMADSGSRLSVIQIGLWEKLGKPKLISGIKKAKSYSGHFFEILGFFVCSVTYQGCTLQLKCHVAPDGPMNLFGLPWIKAFEMALQRPIATTLNLAQAHAVTVCDDPNTLAKNLKQKFSKVFSSSLGLCTKMRAHLQLKPDAQPIFCRPRPVPHAAKAAVDDELDRLLACGAIKSVDFSKWAAPIVVVKKKCGNVRVCIDFATGLNNSLELNRHPLPRIDDIFASLEGCTVFSQIDFRDAYLQVELDEESKELVDINTHRGLFQYQRLPFGVKSAPSIFQKLMDELTAGLHGVFGYLDDFIVATPTLEEHDALLKLFFGRLQDWGLRVHLNKCKFLCPQIKFLGHIVSAEGIRPDPDRSAAIESMPPPHDFATLRSFFRCTTFITTLH

SEQ ID NO: 151201 - protein, 282 aa, Heterodera glycines
MIYGRRFTLLTDHKPLIAIFGSKNGIPIYAASRLQRWALILANYDFEIKYISTNCFGQVDVLSRLVAQQRETVEAEERVIANVDKTSLQISDDSALDESETAAVDYIFMANIDQLPVTADEVAEHTQLDTTLRKVFDFCRNGWPKKSPSDLSAFFTHRHKLSEVNGCLLFGPCSDGNLYLIIVDAFSKWPETFQVKSTSADNVIVQLEIKGIKQTFSPPNHPQSNGQAERFVDIFKRQMKKCSHGDKKWITNSLFAYRNTPNAALKGQTPAELFLGRSPRTQ

SEQ ID NO: 151202 - protein, 35 aa, Heterodera glycines
MDQLLSTLIQYDGKHRRVITVNGKRLNAKFFFYSV

SEQ ID NO: 151203 - protein, 79 aa, Heterodera glycines
MFYKIIIIIIVIHFLTFRQSKAWSFWEKQLEMARPNEDGIYEFDLTIEHGMTMVTTQNDGITPIIDYSPEQVYYFIINS

SEQ ID NO: 151204 - protein, 103 aa, Heterodera glycines
MRLNIFLLLIVHLLFVCSDVFGDEQSAEKQRQIQQNGIASLKSMNSYTSREFEEIFGITPIKPGKLNKNQKKELKKLRRTEEKKAKEFKKDLKYLPFNKERVN

SEQ ID NO: 151205 - protein, 43 aa, Heterodera glycines
MCTFGTEFHLFLKSCYNARVRLGGARPNQHTLSLHQHAPLVVS

SEQ ID NO: 151206 - protein, 127 aa, Heterodera glycines
RGVLMKGKRVLIWSSSAETDPGIVSFAEIWTPILQNLGATLVGIGPGEPFASKSSANLEEKMEFCSKIEPPVDVLLAETDCQAEVAKLVEERGGLAVSSEWVIQAIVTGSLPDLGEPGGEKFRYDFV

SEQ ID NO: 151207 - protein, 52 aa, Heterodera glycines
MCFGRKKKGKRQSSPEYTKVTDEAPPDFSVPSSLLSDASSAEQKVKLPGNTK

SEQ ID NO: 151208 - protein, 180 aa, Heterodera glycines
MDALKRLASRARQKSAEIILSAEKTEIGAELEQLLTKTDKTEEHMKKLVHAIEVYLQPNPAVRALDPRKDKSGRQNTLDGLGEAMKKERSVLNKKRLDLDATKSRWKRASDDKKPAVEAELRKAQDEFDTQLETISTALEALQTAVDRQAEQLVQFVAAQIEYHSSSLKLLKDLKRDLGA

SEQ ID NO: 151209 - protein, 48 aa, Heterodera glycines
MQPLWRKSGTWSCECKCGGGEWRPQSRKVPKFRNFFTTQLLAHFLNLA

SEQ ID NO: 151210 - protein, 93 aa, Heterodera glycines
MLFHIFKFIFIFLVITTQKQQFVDGQQYFCYEVVRDITTGANDCPPPLVYQPSVQLCCGQQPIPNGTIQQTFDQLPQPGSPDAIPDGCERPLN

SEQ ID NO: 151211 - protein, 15 aa, Heterodera glycines
KYGYAEKLTIQKLCE

SEQ ID NO: 151212 - protein, 228 aa, Heterodera glycines
EFESFLNNELENKPVEEAPEWLKCEEEQRNCLIGQLSDSWIMLGAPITKDEQLMKQDKYCPSELIAELIEAKNVFDTMDRKEVEAARSRANPYETVKAGFFQNRAAMKTANLDKIFDWRLSWEFDDERRLAKNPLNENERDNVERYLSFDRVSLHKPITSRPANSERYIFCENLNLFGSTKVKKYLMEVNKRMESMDRKKEDIMELVPDEVISEDDTFMAYIRQSIEQ

SEQ ID NO: 151213 - protein, 23 aa, Heterodera glycines
LRQIFILIISINIYVTIHKRQYM

SEQ ID NO: 151214 - protein, 94 aa, Heterodera glycines
MRRIVRSDPQGPTGKEGMPGLNGEPGLPGPPGISGVQFGEQMFSRPCIQCRQGPPGKMGRRGDVGQSGPLGPPGVPGAPGRMGNPGKEGKVGEQ

SEQ ID NO: 151215 - protein, 247 aa, Heterodera glycines
AQSFFAFLLRWCWLRMGKLFLVESTLALSFPRAQRYTPIPQVLSKQCVSIADSKFFSRWFYKKLQLELNDVTARSSTAGRIIHGIQIRDLEAGMNSPVVNNVRVESFQLSEDDPDLFEELVLLLDVDYRGGFQMSVDANMAFGKFAQLSVKSTHFCFVLFVLLYTLKLKEPNSHELRVANVEPGSNADKSGFRVGDTLVAVNNIPVRNERQATRLLTGTAGDLLVLVERELNESVKGSEESAGEETE

SEQ ID NO: 151216 - protein, 53 aa, Heterodera glycines
KTGTGTKFFDRDRDREKTRDRDFCFSKNRDRDRDRDLKNPGFPAPVPVSRSTL

SEQ ID NO: 151217 - protein, 103 aa, Heterodera glycines
MTFAGRFTLSPNQSIRWIIFIQLSFVKAKMEKQGKRREIALGKEERRKRKRGKGKIRRKEEEDERRMKQKREEQQQIDTFENFEVGPKPKSTDIVRFGLRRKK

SEQ ID NO: 151218 - protein, 109 aa, Heterodera glycines
MVPFEFLNEWTKEKLTLAKAKELGNRWIMKRCKIIGETAAVQQQKKDENWGNNCNNVFIWLYICNNCIGPLSPPPFAEESGQSITKGPSSADKMSDGQNNKNSDQPQKK

SEQ ID NO: 151219 - protein, 289 aa, Heterodera glycines
QKRKKKEEDKKEQIEEEKEEEKETKEKEKEYKKEQTGEEKEEEKEKKEEEKEDKKEKEEEKEEEKEDKKEQTEEEKEDSNLISDKRSGKEESKNEQKMEEDAHEKGNSNLNYVLLEHENLMAFVERYSNFIVINCVAEQKNVYDNLCKFLKGKIRTKLMDKIEIKNIKKIEIGVMDTEANREVTLKIVDELVNRGFSINFGKVWLFGIKIPANGNENLKEHLMNFDIEMKMEYLQQLGLLSVEMDETEIINEFQKLGANVLSTVAKKWFLMDILEDKKHWENDEVTIYE

SEQ ID NO: 151220 - protein, 129 aa, Heterodera glycines
MKQTEKRTKKEKCKKGRKKRRTKRSRQRKKRKRKRRPKEKEKEYKKEQTGEEKEEEKEKKEEEKEEEKEDKKEQTEEEKEDSNLISDKRSGKEESKNEQKMEEDAHEKGNSNLNYVLLEHENLMAFVER

SEQ ID NO: 151221 - protein, 79 aa, Heterodera glycines
MSMSFSTFLTREEKELDQAFDKLKQIREQINKRKGVKVEATKNAKGEVIIAQGLFNGNFRIPKKKPRMDDQEFGVEFFK

SEQ ID NO: 151222 - protein, 186 aa, Heterodera glycines
LEVLKTRLALRRTGEHRGLTGEHRGLCHFAREMYHREGFTCLYRGYAANCIGYAANCIGIIPYAGIDLAVYETLKNLWIRRKNSPGTDPGVVVVVVILGCGLVSSSVGQVITYPIALIRTKLQARAGQVPNCECSLMSLFAYIVKHEGYRGLYRGLAPNFMKVLPAVSISYLTYEQCRKWLGAKMT

SEQ ID NO: 151223 - protein, 66 aa, Heterodera glycines
MAARSNTNKETLKNHQTSKTIATKKLVVQDYKNRLKDSIKSLNDNFECILGASKVLLLLIRGFVGI

SEQ ID NO: 151224 - protein, 90 aa, Heterodera glycines
MLKVNCDDATHRSNSAGKLGEHYAIRNEAIARAALLVKATNELKMLTKAEEDFKKRLKQYENDYSALRMSISTMASEIDRELVENSLYRF

SEQ ID NO: 151225 - protein, 94 aa, Heterodera glycines
MSESINVRDLWREFNEIKSALQKKMLKKPNFHEAIVQCRRIATLLDILCKDWKSFYGATAFAEGGKIILLCADDDPTNEFGMYLGKGLIVAMGG

SEQ ID NO: 151226 - protein, 119 aa, Heterodera glycines
MFPGKSNIQMLKFMMDLRGKFPNKVIRKAVFKDQHFDYNCNFLYHETDKVTGKDKVTVLTNIKLLRNLPAELSGDQELDRDGFAKVDHFRSLLEQMTALDPSKRISCSDALKHPFIVEK

SEQ ID NO: 151227 - protein, 218 aa, Heterodera glycines
MAKQAEEYEREEKMRQFLEEKQREKIERCKGESAEVVEESEQQQKEADTADGSLQFDMFADDAPVELLSKAATIQSLDTTTAALKDNWDDTEGYYRVRIGEQLDGRYRVYGYTGAGVFGNVVRATDTHRSNSKVAIKIIRNNDMIFTGNFTIGITCVWSSKISGVFFCRHFGSAEEVRQQRRPSHESGPQLCTTITFGNETAEKMQHFACGHKAGQYF

SEQ ID NO: 151228 - protein, 683 aa, Heterodera glycines
MTGIISTEPSVNTVDDSKSSGSSASKRFSANGLTDTLLIQTLKSVLNRNSVYMNLKHFLILLALACNYFPPKRAIYDSGDVHKFTHALEKRITHYDKSILKKMTETTDHQVQEESKELLKRSAEIVRYRRLHRNANIAIQQLSMCLPMLENYTHLQKLMEQKKYLQALKILEELEHNYLNQLHKYRFAHQFVKSIKPIRDQIREKSYSELTDFLEKLITEKFYTQFHSNSAEKTQKANQMGSANILVGKMELLDIEISEDGSLLRKTANAAKPMQRDNEGKTTEKPKPMARKMLPANKQQHQHVQFHSQDKLELGPVHRCCQIFNVMGDRDKFEAYYRKQRCDQLQLIVGRQISMTDSVEVFVPYLNEIVGFFVIENRIAQIQSSLVTAGHKDEAWELALNSISDSINAHFGSCQNVSLMLAMKKLILLFTLTTKSCGYDPTTLYSLLQNFSFFFWDKYNQILIEEYSEQFENALENDDYTPIQVKDEREYRKVVEEFPVNKRSVDQEDAFPRKFPFSRFVPKVYCQAKEFVANCVRFMEDLQLSHSEVSDTVRRYANILLAKWSNALRKFVSSRKRSLIQLIQITINMGYLERSCEFLERFIAEMARNLSGEFVGSLGNSGGTLFEGGGHLVALKNQLFRDSRSEVEQLIDEAFREKVQVFLDNSHYVWELEQSSGVASEFM

SEQ ID NO: 151229 - protein, 147 aa, Heterodera glycines
TCKFLADRMSSMLLSSEHRSVSIGALEQFSLDVMQCELFTAQCPVPGFEDNALAITFAHLRQLLDLVMGPDWTTFFAERDEGNSHRKGGSSGTKYARVKASSAAALLEKVIEFEKKNSGFFAIGRADSRDKQKLYETILRKLRSFTD

SEQ ID NO: 151230 - protein, 162 aa, Heterodera glycines
SNTIGAGQFGTVYAGTNVKDGHRVAVKVIRQITYFICCVGSLRNCCVGSLRNEFILLKKLKHPGIINLEMLTESSKEIFAVMERADKDMLEFILSQENRRLDERHTKFLLRQILSAIHILSQENRRLDERHTKFLLRQILSAIHFLHGRRVAHCDLKPGKDK

SEQ ID NO: 151231 - protein, 473 aa, Heterodera glycines
LAVRNILRYVPNRFHHFLGPEFADELVHCGHIYAFRFMPYFVLKAPPLDKIAPPLDKIETRSRQAAAIILMLLNNLDPEVAQFPQELVTYGGNGQVFSNWIQFRLTLRLLAQMTDEQTLAMYSGHPLGLFPSHKDAPRMVITNGLFPSHKDAPRMVITNGMMIPNYSTKSLYDKFFALGVTMIPNYSTKSLYDKFFALGVTIYGQMTAGSYCYIGPQGIVHGTTITLMSAIRKYLGKGISPAGKVFGTTITLMSAIRKYLGKGISPAGKVFVTSGLGGMSGAQAKAAVIAGCVGVCVGVIAEVSESALKKRHGQGWLDTFSAVSESALKKRHGQGWLDTFSADLEVIVRWVRESRSNRRAISIGYLGNAISIGYLGNVVELWERLAEEPELIVELGSDERLAEEPELIVELGSDQTSCHNAFRGGYCPVGLSFDEANRMLTEDKPNFDRMVRQSLLRHILLRHIAAIEKLFAR

SEQ ID NO: 151232 - protein, 255 aa, Heterodera glycines
DRLVELQTFNGLLAKPLSVSEWRREQYEDNLLWIKNAEKHQLVVGSEARILYSDGMGRVELARAFNAAIRERKLEGPIVISRGPIVISRDHHDVSGTDSPFRETSDIGDGSAYTADMAIQNVIGDSFRGATWVSINVIGDSFRGATWVSIHNGGGVGWGDAINGGFGMFLDGSAEADQRLSSMLAWDVANGVAREADQRLSSMLAWDVANGVARRCWAGNEKAMETVKRMEGMDPVLKVVVPERVDEELLDGLKF

SEQ ID NO: 151233 - protein, 212 aa, Heterodera glycines
MSGQIKTPTNQKLLTNVAIVRMKKCGKRFEIACYKNKVLNWRNKTEKDIDEVLQTQTVFVNVSKGQLAKRDDLQASFGTEDQLEICKLILEKGDLQISDKERQVTSESSFKALEMIPKLRESLKIDRAKMRIRVSVPAKNAKMLHPKLKAFFDTTEVEDWDKGDLEMVGLIEPGSYKTIVELVKGDKKEKVEQIGLELLSLKVIGENEVEIS

SEQ ID NO: 151234 - protein, 278 aa, Heterodera glycines
MVSKNIFRVLPPSDNSEFDPEEDEPTLEVSWPHLQLVYELFLRFLESTDFQASIGKKYIDQRFVLQLLELFDSEDPRERDFLKTILHRIYGKFLGLRAFIRKQINYMFLSFVFETESFNGVGELLEILGSIINGFALPLKQEHKVFLVKVLLPLHKPRCLNLYHAQLAYCVVQFIEKDSSLTPQVFDSLLKFWPKTYSSKEVAERALYFWNNEYILSLIEDCSAQVMPIMFPALYRISKEHWNPTIVALVYNVLKTFMEMNGKLFDELTTNYKLERQK

SEQ ID NO: 151235 - protein, 207 aa, Heterodera glycines
MQKTVLFTPLTNLVMTGAKGYIKGVKGPFDWYIVSKIQKPIIVNIIALTNLGTGIKLNSLTITEFEFKYNPRKFNAAVIKCTSPIKATALLWESGKMICLGTKSLIDCENAIKKFIEIIKSSGCPGASYTGHTVENIVSTFKFGREIELNEFRKNRRAFYEPEIFCGLNFKRGKSMAALIFWTGKVVITGTKNNSELRKCIMIFSPI

SEQ ID NO: 151236 - protein, 242 aa, Heterodera glycines
MLLLVVVLMFICLLEEVTMCIDHSVITFLRSNQKIWDNGTKLVLNVRCSHKTGTDSQPIWDIWARQIWPIFVPNIRRFQFLNADNLDNLRRLISTTILTDLNLNSMHSGNLLPDLIADDGPNATAGQALSKWLHTPRKDGQPRRLRCRIMNTPKDWVNDFKEAFLHATTSTSYIISFALFGSMPIEPFELVNERTGEKLTLMSKKTNNFYIWWLKRCPIGEEATVWQNEENLNNVYFYLSAH

SEQ ID NO: 151237 - protein, 252 aa, Heterodera glycines
MVDSDFEEEEEYPMDNHHHHHKQRACMQNNHRHQPNNLKNGDISAAVPSSFSSTTTAPPVGATSANASSSSVSHKRAPRRLNADGTPAERLKPGRKSVDELREKFAQKLTAVWQDVHNLKVGNAFLDPWMYNQIEHHTRAMGDRALAEPFEYLPCDKTFPDYYRTITKPISLMCIQRKIKEQRYADSDELLADLRQMFANARIFNKPDAQICADVTILESVAVGSMRTHTEGVTLFYPYRRTDKGWSEKASI

SEQ ID NO: 151238 - protein, 216 aa, Heterodera glycines
SLSTNADGTNLSSVPSTTAATAQQLAAHHQRQQQQSLPQLQQPTHNQQQHHPSAICAQQQRSLAAASSSAVYVAPPLPPSSVCQTLNNNNNNNAIASTSGAVYYAAGGGYLVPQQQQQFILHHHNVMPMAQAQPPQQFAAPHSVVHVQQQQKYLHQQQQQPMALATSVKHLQQQQQCHQSQQQQQYFSSTSALINGGGIPPNAALQQALHNGPIAA

SEQ ID NO: 151239 - protein, 186 aa, Heterodera glycines
SLCRVMERILSQNIYNFLLKNNKISEYQFGFVRNRSTTSQLITVVEDWYEAIINGKNVDCIYIDFQKAFDSVPHNLLLYKLEKIGIRGKLLMRIKGFLSNRTFRVKIGDSLSSSKKVTSGVPQGSVLGPLLFLIYINDLPDALPSGVKIKLYADDVKLYIYKARADTEIMHKSKHNLFEWANKWQI

SEQ ID NO: 151240 - protein, 136 aa, Heterodera glycines
MTKLIIDDQYLFVNITCQVEVNPGQIGGPGAATAVSKCHRKMLDKVEIMHVKKLPILAKAFVPENRPGPGIARTLYQACLIFRLSLDEAGDYSLYFDGTKRVALVHMAYGYLPEHYPEKDFDLRVMMERSTAIVQI

SEQ ID NO: 151241 - protein, 52 aa, Heterodera glycines
MVRPFEKPHQEEVNSEMGIYGSLIGDQSTGKVLVNSVNGHLQMRVNSALSFH

SEQ ID NO: 151242 - protein, 64 aa, Heterodera glycines
MINLIFPLFIYGITMLSELADHENDFPTSLDLRYTRRGERRIPYPQNQDFVLSNDTKKIGFVRA

SEQ ID NO: 151243 - protein, 79 aa, Heterodera glycines
MGKREKGRGKEKEEKEEEEGKLKWKKKRGQRIWIREEKRKGRKRKKEEEKERKMEEEKEEKIGRKRDKGREKKKREEER

SEQ ID NO: 151244 - protein, 124 aa, Heterodera glycines
ELRKWYKDFVRDCPSGELRLDEDGHISFKEFIAALSITSRGTLDEKLDWAFSLYDVDKDGFITKAEMANIVDAIYSMIGNMLELPKDEDTPQKRVEKIFANMDLALTMEMNGAAGEEQTPQKAA

SEQ ID NO: 151245 - protein, 34 aa, Heterodera glycines
DFNVVQKINQVPVYEKSGRPREEISIISISLKSV

SEQ ID NO: 151246 - protein, 245 aa, Heterodera glycines
MAVDAPNDQQKSEPSSESIPKNEFRRPADPNIKENGGRAKKARVEQQKTLKHEEVYLRAIPRSDQYEKSFMHRNVITHVKCTENDFIITASEDGHLKFWKKKHNEGIEFVKHFRCHLKGFSDIAINHSGTLMATCCAHDKSAKVFDVANFDMIYTAAFDVAISFATSVKVEAADNPNLRINEPDPMLVTCAHRNNRFYLFTNVEPYAEEADGSTHSRDVYNEKPLKEDMITAIEEEAPQSKLCNK

SEQ ID NO: 151247 - protein, 179 aa, Heterodera glycines
MSNSLIESLVRAAGFLIYRKNTAGQIEYLLLQVSYEPFHWTPPKGNFDANLEKRPIIVIQNVKLSLGPILGHVDPGEDEWTAAIRETMEEAGIDVNKLRIHKEFMYEMRYLSKSTKYGEEQKKVTYWLAESTDPEVKVMLSDEHQNWKWAELKSALELAKFDEMKKLLNKAEMFIAENL

SEQ ID NO: 151248 - protein, 105 aa, Heterodera glycines
GFCVALEGSRFKGTEMLRDFVTDEATSEKYQRIADEQPMASAFYEVMFSSLNESGEAENVTLIAIDEEEGMGTTPNGNRTKKREEQNEGKEMERTAENGTVPTNN

SEQ ID NO: 151249 - protein, 280 aa, Heterodera glycines
VFVLLGHNGAGKSTTFAVLTGSVRASGGDVLICGQQLEHNLRDCQRRIGFCPQYNPLFDKLTVREHLLFYGRMKLSQGEGAEELRRQLDVEVAELVAELAKNLSGGQKRKLCLAMALVGRSPVVLLDEPTAGMDPGARNEAGKVLERIKRDRTILLTTHYMEEANTLGDRIGIMVQGRMVCNGSPEFLKQRFGVGYVLSVVVRAGADFPRAVGKVFDAITKHSPGAKLEQNQKPPEFSIVLPLGDKRKFGDIFAELEQCTDEFGVDSFGVSSNTLEQVFL

SEQ ID NO: 151250 - protein, 234 aa, Heterodera glycines
MLKDLFKDVMGNMGAAMSVITAFSIMTATMVMPLVEERGSRFKHQATKAFSALMCWFMVGSMLSTIGTALLKLNAGAIGERTALLLNMLLGIVLPTKALSGGILNLALIATYQQLIGQHFDDGSDNSFFGTAGPIGELWKEFRRELFAMGIAGLIFWVLLALLQSRRVAWAWHKMSNNIAVRDNAFGVPSPDNATAFRWSSTAIGRCLRRTKTKTYGKSGTECYGRPTRATPLP

SEQ ID NO: 151251 - protein, 556 aa, Heterodera glycines
MMLDQNIIRESESEFASPIVMVPKADKKSWRFAVDYRALNKMTKKRVFHLPNIQELLDLMGAKKYYTCMDMQQGFMQIPMAKEDIEKTAFISHLGIYEFITMPFGLTAAPDTFQRSLDGKGKYKKVHQEKVKKFHGPATLPLREADEPINWEKYVHDPNLEQEEAEESEEEGFEIVLSKEKEMSGEMIGKSKKFSKFGFESSEEEENGNTIAFVQNQEEISDDEGPEIFFENRNFVFENDETPTLLAVMLNEKWSLKTENERESYWEIISGINGVMYEINQIPEIFISEKENYDDQNEFRMSINVIRSEKNEEMGQFMKNKERNKQLLGLIENMNKKGRLNEPKEKNGKIYESHSFFKMELLSKEEEESLKRLKRKLEHQLLKVQQSLTESEKWKSGTSDDDPVGPQEREENEEETTKKGKGMEKKEEEEKKGREEKEKETEKKKEEMKQKDETETKRSLSVGTTKDDEISIVDSEEKERDAFENPPKPTNERMAFWESTLNNEAKKDLREDKEKALQNTGQGIVVSSRKRTINEVDPPTLSNEAATKFGEKCGKH

SEQ ID NO: 151252 - protein, 92 aa, Heterodera glycines
MLKTFAARKVYAPYNYGSVDFELRAQESSTVALIEALPKAKPSNEEKAFFTFLSHKFSFAAGVLTLTSYDESALVRHNDKTITYELTEIEYP

SEQ ID NO: 151253 - protein, 81 aa, Heterodera glycines
MQQQKCKKPKYLIFMERKIALDLMRTTEEKKRNTIHGSRSMDHPIRSLCIRILIHGFFDPRISDSWITIRGSDPDLYAYGY

SEQ ID NO: 151254 - protein, 286 aa, Heterodera glycines
MAARFNEAMVARLIELVQSRQDDLNPPTRTAKANEKQKEAWKFVTDSMNREFPQEVPQGGLTIAQIQTKFKNLKQRAKDERQTEKKLIICAPVLGFSIFFRHQRATGGGKKFEMTEVSRNVQDDLNPPTRTAKANEKQKEAWKFVTDSMNRVPGGVQTGLNIGDTIFFEGKEQEESAEFSSQQVVVEEGKSYAVLGTVPRGEAVKTPKFESSTSRVPFRSRAGTASTVTAADVMELQRSVLEMQFEEMTKKQEIFKKFEDVLDDAKTFFTEGREFFRGKHSNEKET

SEQ ID NO: 151255 - protein, 341 aa, Heterodera glycines
MRMEIKVECVREESISLEREEEIRIAINVQQKDSNGQVTAVLERKKKAEEINEKAEAGRESCGSAEVNEEKERKEAEANGKRDAEEKAKKEAEAKKKEEEMKKQKAKPEEKPAAPAEAKALVPEQKKAEETKEKLKQEEKAAEVPTSPEEKKRKEAEAKAKRDAEEKAKKEAEAKKKEEEMKKQKAKPEEKPAAPAEAKALVPEQKKAEETKEKLKQEEKAAEVPTSPEEKKRKEAEAKAKRDAEEKAKKEAEAKKKEEEMKKQKAKPEEKPAAPAEAKALVPEQKKAEETKEKLKQEEKAAEVPTSPEEKKRKEAEAKAKRDAEEKAQKRGRSKEKGGKK

SEQ ID NO: 151256 - protein, 243 aa, Heterodera glycines
MPNLAEFQWMVNNFEVKDGKNVEIKQMVENHEQITFKKPIEGRVEVHAVNKLGKDSQGTKVIVDYEDGVVEEQQQKDTKTGKGKEMVEEGTVESGNSMMEDTVEGEDGRIKDTVEREDGKIKDTVIVKEAEKGTEKASEAEEKQQQKADLISIEKEEERYAVLVKVAESVAEQMMLKIIVNAMEEAAEELKWEEEEQLRRGKEEEEEQLEMEVRLGRDEEQKEEVQAKVEVIWDTGQQNELLQ

SEQ ID NO: 151257 - protein, 275 aa, Heterodera glycines
MNLLFKFFIIFVILHCECETLGSCAPGGGININFLSKLRKKPIASSTETSADNRPTISAAEFDQRLKKIEQMLGPLLKFENADQVLAQLEKRIESLAKRMEALETKITAWNVTFEIKEKQMMEQQRKQLHEEGLSVVASSQGRQSTATAADHHSHKLVLNKNSIVPQTATTTVVGQQYGNGKMPIYGMASAQMGRRNTVAHPGQRHPPHQRDALNMPSQHSIIQSDALNTPSQHLPTVEKNDQRLESQRSGPSNLEEHTEDMDKLWIVSSDEEKH

SEQ ID NO: 151258 - protein, 79 aa, Heterodera glycines
MAPQLTEADGHNDAIPWALIQFRLRKFGMFALGFEHFLYSIPKNGFSNDIFNENPKIFRKWMYVYRCNRPNSTKPLDRN

SEQ ID NO: 151259 - protein, 82 aa, Heterodera glycines
MQNFFLNRYAKFGVDLTNRKKVKQDEVNVVLYIIKNEEIVRKKNRRDMQRYYPPASNLKKSNHCQTPHTPRNKIFLITPSNS

SEQ ID NO: 151260 - protein, 31 aa, Heterodera glycines
ERPFSSHVPLTKMLLAQKVKGEKEYKSSDQG

SEQ ID NO: 151261 - protein, 84 aa, Heterodera glycines
MPFPPIFALRRAPDFSTVDFSTEDFSTEVLFDSKGHFDRNIIKMGAGLFDSGFFDRGLFDRRTFRQQRTFRQKYYKIQEGTFRQ

SEQ ID NO: 151262 - protein, 57 aa, Heterodera glycines
TSSGPKAWKICFLVIVKQLFELLALILSFLFSLNPKKFNKTYFDLFCFCSKFMNKNV

SEQ ID NO: 151263 - protein, 45 aa, Heterodera glycines
MTEVVTSPNIEKEAVSPWRRAPPIVSNKRTEVTDFPAFTADCPFC

SEQ ID NO: 151264 - protein, 152 aa, Heterodera glycines
LANNSNNCLYFETAADPSSLNSSNSAAVESMDSEGVYLFADRTQSSNSLTPEQAFVHMVKAMLGTGLLSLPYAFSHSGLYLGLILLVLICLVCMFCMRQIVHSGLYLGLILLVLICLVCMFCMRQIVFAAHYICTKNGREIIDYNGREIIDY

SEQ ID NO: 151265 - protein, 528 aa, Heterodera glycines
MVITRRRRQAEETLQSAEGDRQRGGDQRLGESDREEEEINAEEGEAATQPINYVLGVPLLDTIGESFHCRLCVPIPKIFKRHGDLSKHLKRYHPNQRIVFQCNTCLIVFDTVKKCKAHQQKTPACRNARAVPEEMPQRPLAAPGAAIVQRNFFNPRARQVENVDRPQPIQRLVTPARKRSAQSDPNIDLSVGSAQNRTEQGDESGELGEEDVAHQYVLGVPIALPLPCRFCAGRSFNTHAGLSKHLKKDHTPQNTWNLAFRCNGCRQTFTQLRTCNAHQKKSAQCQGAQPIQEERHQPQHANVVRQVRPRAPRLQEPVSPAQPAAADQSGTTPSGTGARTDRMQCRRESDVPSGRSTPPALVAQRHSAGTASPNGSDRSARTAHSRTARQNQTPPTQLVVNAQPEQHDDQAVPVVAPRQPNAQQREWVGRFNAVTSAQQLDDLLNEFINAVRQQAQVAFTQRPAQQKRRPRPPPNQHGRRRNQMNADDGPPFDPAAAARIQKLYRASRARAYREITEQTSPLCQLSAE

SEQ ID NO: 151266 - protein, 61 aa, Heterodera glycines
FNDPPPPAGFSRRSPPGALIANNFRHFPRPYSMPHLSDFISNSSTVRKLVFFKCNFLSPPQ

SEQ ID NO: 151267 - protein, 193 aa, Heterodera glycines
AMADLLVGLLVMPLTLIYEIVGVWVLGSVLCELWLALDVLFVTASILHICIISLDRYWSVTQPLSYPAKRTPRRISIMIVSQGLSISLSRFPAKTNTDQSGPWDQCHRFPIGFVQPEISSNDDVIESDHSYTRPGECTVSSELDYVLYSSLGSFYIPVAILVVVYMRIYMITKRAQSAATEGHPTGWAKRCAN

SEQ ID NO: 151268 - protein, 129 aa, Heterodera glycines
AAPLSSSSSSIFTNPNSTLVVVVKQYQQQQQLNNHHHNHRNNHAAAAAAAVLLPFNNNNNLTDEITELAHATVRGDGDRHSDYFADGTIILFHGAAEWCPNVSNAVVWPSCITLAEALAMALFLLIVML

SEQ ID NO: 151269 - protein, 76 aa, Heterodera glycines
IFFFQFLGGVFSKKFSSRFLGVYFSFFVNEFSGNPEKFVKNGEIGIKHKKSKIGKVRHYKSHRRHAKSSGKCVFRA

SEQ ID NO: 151270 - protein, 179 aa, Heterodera glycines
MLVYGLISTLSTLFTPMTVKFGGFFPLLFLQFLQGIAISIGWSGAGVISSSWSPPDTYGIFLSFGPVITMPLAAALCTSEKFGWPTVYYVLGTSTLLFSAIFLLFYRDTPRQQKNVSKAELALIEQTELALNNAEKVRQKIPYKAIFTDLMIWAQICVHVTRNMGYMIPLVYGAIYFNK

SEQ ID NO: 151271 - protein, 24 aa, Heterodera glycines
MKKWKSPRLAVAVGWLLISPSFAW

SEQ ID NO: 151272 - protein, 81 aa, Heterodera glycines
MSVPTPNWPIWLSSSENKLAQLTPTVLRWAFMLGKSAWALSRETIRKCMTLRVCLVTLAPAGLTSAFKCIATIPMMSSFVD

SEQ ID NO: 151273 - protein, 82 aa, Heterodera glycines
MEIFRKIIMTSIPRDPAGLVKWSGGIPVRDPDEIPIPINPDEFKKSFWTDPEVGIPNLIPRDPVEILRDPYPVRSLVNNKSA

SEQ ID NO: 151274 - protein, 93 aa, Heterodera glycines
MAYNFETQMDFGEEKPLTGLRALKHDLHQSVRVFAMQMEQYAGDDQPHHAMGLFLDVEEEFCAATKRGNGGSSDNKCSTAAPTVTTASRNCVK

SEQ ID NO: 151275 - protein, 73 aa, Heterodera glycines
MPEISQMCDRGNVMDWASERLNALKQRHREQKGMVWVISRLLLNKKGLGFASISSIKMKNFGISLWDFKKPLS

SEQ ID NO: 151276 - protein, 140 aa, Heterodera glycines
MNLWLFKIRGKHNAKNVYKQSLVTHWQSVLFWASLANSFVEALRLGGLIHPVISMGAQAACRPVYQGQEPSLNCQKNAHSWESQSWYLALFKLGSIATRIRQFVQKATRRIVNSYKSQKTLFFRMIPKIRVCSNMNKVTV

SEQ ID NO: 151277 - protein, 98 aa, Heterodera glycines
QPPHKSASDSRVAALSADAAQQQQNQQGQEGATNGGRTGGGNGRRRQQSQPQHEEEYAALKYGASHVILLFVPVSICMAVVTMTVASVGFYSKNDGLY

SEQ ID NO: 151278 - protein, 83 aa, Heterodera glycines
MCMSRSDLVAVLSPKGPLRILVETTQERNEPILPALIYSSTVTVLYSYVLHGVVSSAFIVAAGVGTNGDDEDEQQQRQPQPND

SEQ ID NO: 151279 - protein, 80 aa, Heterodera glycines
MVVNSVLPNLLNVAQIVNIVTPSQNQVTPSQNQQQQQQQQQQQQQPNGEIFVEFPSQNIMPAQQMPITVDNNEQFQNTHY

SEQ ID NO: 151280 - protein, 69 aa, Heterodera glycines
MAKFLSGIMFCALLALLDTTSAWKREFLRMPKSNEIGTADDSSESGKNLKSQSELIASMLPKRKILIFF

SEQ ID NO: 151281 - protein, 72 aa, Heterodera glycines
MFRTTRGTEGGAFEEVKCDDEDYDRCLIGKCKGQNFVEVRKFCATKDGCAAFGCAVEEELECKTCFGELCNL

SEQ ID NO: 151282 - protein, 100 aa, Heterodera glycines
MFPAGPKKKFCSICRATIEVFDEKVMTERHIVHKKCFNCGICNTPLLIGRCAMDDVLYHQFGHIFAYFVGLEWNPMGLEMSAPGQSISDGQSVSGQTIRQ

SEQ ID NO: 151283 - protein, 85 aa, Heterodera glycines
MGMPTAFTDNANFEGISGKKTLLLSEVMQKAVIEVNEEGTVAAAVTEGEVSDCGSSKEYRFVADRPFCAFLIRDDTVLFSVIFRK

SEQ ID NO: 151284 - protein, 206 aa, Heterodera glycines
AQADFALKLLREVSTDDRSCIVSPFSAAVTLSMVYAGAKEKTGEEMGQLLANGAPESEVHKYFGALLKSITSGTNSSNTLETANKLYVRKGSKVKDAFKEQIEGNYGGQFETVDFLDGKGTAEKINKFVKEATHKKIRDLVTPDNFDGNTRLVLINALYFKGTWADKFDSKFTKKAKFHVDAKNFKELEMMHLEAYFIYYKNDQVV

SEQ ID NO: 151285 - protein, 126 aa, Heterodera glycines
MPLPLPPSNAEVVAEPNATTSITTAAKVIASRNTGCSTSSTALTMVTRSAQRRAAEEEAVPALAIPPPPPAGCSSSSSTAANVPQPSSSSLSAEEITRQKKRDKNNKNKFNKKQASFNKKFKFHSI

SEQ ID NO: 151286 - protein, 28 aa, Heterodera glycines
TICQQLAHFFAGLFLGARVNLGQSDGGR

SEQ ID NO: 151287 - protein, 208 aa, Heterodera glycines
YRELKCKVGRAQAQTNSKKLEEVKTGKCAFEQYFCLMITCVVVGNPSYAFTDWQCSYSNNAEVCAERTEQKLRELNQFKNPRCKCEFGKFNEEMANEKPAAQLPTTPLPNLFCLRGAYDYKGYGIVEDRECAREDRHCFIANCKTADSKDGIMAWGCAESDNCTAITEKLSTNKHKNYECRCAFGGFGGNMTNENMTIPSWIPPPTLP

SEQ ID NO: 151288 - protein, 51 aa, Heterodera glycines
MCKFNFFFNKNYRKFQVNPRVKKTLRTYVGNGELAVEAGRYSVAASGGGDK

SEQ ID NO: 151289 - protein, 126 aa, Heterodera glycines
MFLKIKIESSGWPDNTTTEKQKNEFMSMYKRKYDIELDPNNINKNPGLLLIAKLGLNSLWGKFSMRNSLCQTKVIDSSAEWYNLLLDDSIELSSPIIINDEMIRVIYRKKDSFIKEHGVSNIIISL

SEQ ID NO: 151290 - protein, 177 aa, Heterodera glycines
MSTFAGFPGGGSVGIGVPIRIESASPHQATAQPQNANHQQRQNGAAAQPSSSSSSSVVDRLQRLEAEMDAEAVAGAIHLPDDRELTARLAAFLAERFPDADLQLTVSSVRRTITTKQQYETETPGMVGLPVDQLQELQRKLMAKISAQPFEHAKSTEKGEESEEKREEWARRGPEGA

SEQ ID NO: 151291 - protein, 42 aa, Heterodera glycines
MTDRQTNEFNYKLWQSVNSITFVCFYDHPLNTVPIIKRILKR

SEQ ID NO: 151292 - protein, 71 aa, Heterodera glycines
ALVVQWLERNTHCVKARVRFRCSLTFCFFQTVSFLSDPLSIFINIWSIFENSFPFLMIFLKFTVFKCFVSY

SEQ ID NO: 151293 - protein, 454 aa, Heterodera glycines
MRREADEVVQREAGRQLKAEDESPISPIKGTDEQIVTIVTQPIESHAEELATQAQAVPAQHQQHRHGEEEDHQAVQEEEPKPEKIRNEIEIIQQEAIETPGSVEVKEIESPKLISRIEPIITVEPPSGVFEESPPESPTRDEMKTVQAEQAERHDTEVEKYVPEEEEAFEKRVPEETFEKRLPEEMIERRVPEEKEAFEKGVPEEEAEEETFERRLLEGEPKEEEAVERRIPEEAFERLIHEEDKPFERHVPEEKGAFEGHRVDEAFEKRFPEEEEISEMPLTKMEKPTDLSVKEEVESELETKTQKEVEAVPEEPHVKSEAVIGKYLPFGAETPGRDEKALVEEEEIEQKGTEEITLKGAEREKPNKSNLVVGARKRKKHISSSLIPIKQWKKGDKKLAKMPKIDAAFKGAKKSFIPKPKKVAKIQKPKVMSCRIKLAVIKEESSLGTDVVKK

SEQ ID NO: 151294 - protein, 240 aa, Heterodera glycines
MTPVEQQIEQEMPSVVEPSTIEQLQQIQGQQRLDETESPITEIAEKKEEEAPMIHVLHQSQTEHKPIVWLEETPLEQAPYEAEDVAKLQALHGVQSESAAQQPKEAPDASSSTKPWFSAVIGGIAGAVAAVGIATDKAKLNENGEEEQIEAVQERNLELEDSLAFEDQHHPTEEEVKFPEHVKTDEVPEDLRTVEEYPEDVRTEEIIPEEHLENVVSIANHPEEETTPKHVTAVKSFRKT

SEQ ID NO: 151295 - protein, 42 aa, Heterodera glycines
NCRKLTSFLKKKLKKFPTFHQKFRKSEFRPQKCRKPEVFPCH

SEQ ID NO: 151296 - protein, 80 aa, Heterodera glycines
MNNFISAFYDAVLLYAIALNETLAEGLDPRNGQSITSKMWNRTFVGITGNVSIDNNGDRYSDYSLLDLDPDQDKFVVRLI

SEQ ID NO: 151297 - protein, 68 aa, Heterodera glycines
MTWKIKWEELDGEDVRREKKKKRQQNSSTKLARFDAAEQSEALLRCNSRMSVGSDKVQYRLALELTIK

SEQ ID NO: 151298 - protein, 248 aa, Heterodera glycines
MNLLYLIFILIFFIFVIDSDKMRPNFDEIFGNGWDKKESEQTVKIEQNERNENSQSAAVDQMGEEMGNDRNDQMKNDHKKREIIRKFEAIKEKLKQKGKYENKNRTKIERKIAKLLGAKITLISKWKNELNLNKNKIKKEFYEMKKSEFIERFDEFKELYGQGKQKEFAKELGISEDTFRRWKKEMLPKYHKSQKHHTNDDKLMKMKQYYEIKEANPKVTDKIIAKKLGIGWTTLKRWKKECSHPIDQ

SEQ ID NO: 151299 - protein, 33 aa, Heterodera glycines
IKPLNLVIYTNSTLVYEIPEKIWRKFWAKFLEG

SEQ ID NO: 151300 - protein, 90 aa, Heterodera glycines
MIKIEQNENSEVDQLGEEMANGPIDQMRNYTDQNHSKTPNKYSNEDQLEKMKHYFEIKEANPKVTDEIIAKELRIGITTLIRWKKKCLSI

SEQ ID NO: 151301 - protein, 76 aa, Heterodera glycines
MPSPFVGTFTHLSRNCSALGCQRDGQPFDTTAPLKCQVLFWRQSDGKVPRDTGCKVRQVQHQIVLLEDGGATHRHF

SEQ ID NO: 151302 - protein, 50 aa, Heterodera glycines
MAFLEAFARFSYYEFIWKVKLSYEDAKVFAKYKNVNPVKWMDQKSLLINH

SEQ ID NO: 151303 - protein, 99 aa, Heterodera glycines
MQILQQKTGPEPANVELVLTEDLSNGAEPCKVRVLNQVNAEQPKPFEYITSRENASDLEDDCAHKLSNIARPDSFFQVVNRTSDVIIYQKIFITINMQS

SEQ ID NO: 151304 - protein, 85 aa, Heterodera glycines
MVRLVFRPYTQVRRSICTSESLRTSTRVSSGFILLRNSSPSFGSQRIRSVSAPSHAIETGLCCAPTPQCQGSHISSVRSLHFHCA

SEQ ID NO: 151305 - protein, 387 aa, Heterodera glycines
KTVPICCQSRDLDLSAVDAILVSNTASLVALPFYTEGTGFTGTVYATDPTYQLGKLVMEDLCDMFERVDRPAEDVSWAWKTLCRSFPNAPLSDPNEWRTFYTRETMEKSLARIRRVFFREEIVVNGELRVSAFSSGYAIGSSNWIVVNGELRVSAFSSGYAIGSSNWLLQTEHHRIGYLAPSSLRHSHTKPMELTAFGQLDSLLITSLSTADTPDLTVYKFSSAVIETLVYKFSSAVIETLKMGGNVLIPVTPTGLVYDMFECVLKTIEQNVSRNIPIYFVSTQNVSRNIPIYFVSTVAESSLQFAQIFPEWLSEDKSSRVYKPEEPFFHSELARTGRIRVYDSLHGPFSRECRQPCVVFAVHPSLRIGEIVHLDLWGDVAHAIIMI

SEQ ID NO: 151306 - protein, 118 aa, Heterodera glycines
MPVPLIEPRLTTANSGNVYVWGDFDQPLPGMPPQGTHVRILRVRNLNMTGPPKYDQQPQQQMPMGGGGGYGWQAPPGGASGAPPYPAAGGPAPGGGYGYGQGAAGGAPPPPYSYQQKQ

SEQ ID NO: 151307 - protein, 233 aa, Heterodera glycines
KCEIRKLNFQLFSLKMNFHCVGRVKFLFALKVQSQAGGTAFALVSQSEDYGQYVMHVWRLNLSADGMQMASAASLLQAPLVIDEEWICTMREDAPELVVVHGPGLNVVRVHADAYGPQQPIDRFSVPGSQLSHFYDGFLSRGSIYFVSSIYFVSASPDGHFGHSRIHALNLDRGPALLPLRGFPAARWRAALVSVSGAVLLAGGGGVARLEVLPLDLTNFTSCKPAQMPVPIE

SEQ ID NO: 151308 - protein, 18 aa, Heterodera glycines
MSEKSILYFELILFLIFG

SEQ ID NO: 151309 - protein, 30 aa, Heterodera glycines
MRHRIEKKNGVTVLVKAVPTCPQNIASSPL

SEQ ID NO: 151310 - protein, 16 aa, Heterodera glycines
MLYITRELNGQYKSIL

SEQ ID NO: 151311 - protein, 48 aa, Heterodera glycines
MFLFQFSPIIMIFMFLLCPSDQMMQGRNGINDFCLILNYFDVFFAIFF

SEQ ID NO: 151312 - protein, 183 aa, Heterodera glycines
MERAMLPRMDQSAPARQCHGGLQPVPPLRFGRTANIAAHCGVPPEHPAAPVSIVRGMEPIANVEKHRAEFSELHNQCFPGRPKRLSNITIADESRRAKCRGCAQTISKKRRLLHLLEKHLKKPIYKCKYCLFTSTHDKATVDTHQKEKHSGKAPHVLSTLSRHKAELKRLATECFNEPDLKLE

SEQ ID NO: 151313 - protein, 231 aa, Heterodera glycines
MALRRRAALRWSTQKQFERRTVRFVQMPPLRIHKFEFRVGSAKAQPRAARQRRATDQSGGEAQVGNSAAKRSEKHGPIAEEEGEEEDEQQQESGTTEEQTEEDEWRDNASPSDKAPTTAADECAAGNDRLCHLCMEESKYPGRHIAQRHLKRPLYECPICAKFGSYESCTVSKHINKVHPKEAKNAMPISNLEKYADEIRELQALTKLMACHFLTHSLDTFYRFAASPTDK

SEQ ID NO: 151314 - protein, 151 aa, Heterodera glycines
MNSEKSEKANTILVEAAKKETERAWRDVAALAEEVGDFAKSSRETLNQAIKSREKAPYANGVRELYLKMSDSIWEIFKIEDQINLESVKAESAWREFERCKTFDQATKFEEQAQNSLMEARRLHFESRRVQSQMLNYENRLKTIVWEHVGI

SEQ ID NO: 151315 - protein, 79 aa, Heterodera glycines
MYSFQKYFEEALEKEAFFWPKNREEVEALLFDSSDYKIAIHRDYDSAYSDYITMYNRTSIFCFTMVERNRVGWNMGATL

SEQ ID NO: 151316 - protein, 155 aa, Heterodera glycines
MSKKNFQETSKEIRRSKNTKNYFKNSANLGKCFEEVESHTNENKKFGIKEHVTTFYFKCPENEDPEQMFKKILKKLMTDAMNREAEPDWKIEKISVDLYCSALSDPVIIPARPFQHSNPDIVFNEFMHRQQSFGEVNLLDQRISIIIATYSFPVK

SEQ ID NO: 151317 - protein, 878 aa, Heterodera glycines
MVLELMEKAGISMGDKTFGIQQLEAVQKFWDAQYPDNFRIVAFEMKTRLKPIFKGEGVRRNEVCVIREGNHWDGIKSASWFFGVRNFCVACEVTYDRTERHRMECKDRCKKCCRMGFGFPCVDVCDEIHCGECNLKFYNRECFEAHKKMACKEYKKCEKCGEVYQTRSKHVCGEKFCKICKVNHPGRQCFIKPIKVRPQKAYRIVAYDLETTVDGGEHRPNLVSASHTCSICAGEERECEICEGPKKITWSVADGFDPMSEFVAWIMGFQRFETVAFAHYAGRFDSHFVLSELTKKEIATELMMADLKIYQIKAGKVYFRDFWMLSQNKLGDLPKTLGLNIAAKLYFPHKYNKNENFGKRLSHLPPLGDYCPDSMKEEEAAKLEAWHNENFQTEFELGEQLRVYCENDVEILMAAILKFRQLFLGITGDLDVMKDSVTIAGVFMKIFRAKFLKDRHIPIMPEGGYERAENQSKIAVKYFEWLAQRKGVKVRHACNGGEVEFGGLKVDCVIGAEKKIIEFQECDVSEELKKNKEMKKFFESVPDKGPINPRDAYAGGRTMPFCLYAKATEEMEISMFDIISLYPFVNYDTPYPVGVPKIVVSRNFNVNWTVPDDVPYDGLLKVKVIPPKNLLYPLLPMHIDDMLLFPNCWACAKRAKNEFVMAKDVKKCNHRPAQRAFLGTFTSIELRKALELGYRVTGFYRAYHFEQFDRQLFKGYVRMFLKIKVEASGWPTEVKSEEEKRAFLEMYKAKYDINLDYDKIGLNPGLRMIAKLGLNSLWGKFSMRNTLSNTEIVGSMERWMELGRDNTIEFGRPVKISEELSRVVYRKKEAFIKEHKVSNIVLSLWTTSAARIKLYEYMEQVYREEGSKLLYCDTGRQE

SEQ ID NO: 151318 - protein, 188 aa, Heterodera glycines
MQQPLPLRALPQFGIPPPNVPAVRVQPQPLRDFPPIHHPPRNVTSIWIKLWLLFLSLWVFLQAIHVRQIQREYAVPQFAHPPRNVPYHPPENVPVMLGLVFVRFSYFPDVSSGHSTSTTMATTAAAERRATIRPTVAKWTGNFRPCLLPNTKTSFLKPIHPNPPRVLEVIRRLGEWRGRPRDPRRPPQ

SEQ ID NO: 151319 - protein, 235 aa, Heterodera glycines
MFPDDDGYESEDDEILLPPPPIPPQLGHPPPNVPAVRVQPIHVGQQRLPLRDLPQFDYHPQNVPAVRVQQPIPLRDLPQIHHPPPNVPVIRVQQVHQPVPLRALPQIHHPPPNVPAVRVQPQPLRDFPPIHHPPRNVTSIWIKLWLLFLSLWVFLQAIHVRQIQREYAVPQFAHPPRNVPYNPPENVPVMLGLVFVRFSYVPDVSSGHSTSTTMATTAAAERRATIRPTVAQWDR

SEQ ID NO: 151320 - protein, 93 aa, Heterodera glycines
MEIENVENWSCKSSATLRIVSQKNGTEDLIGRIGDRIFNKEWSIYGFNYFISFAELLDPGKGFYDKDEDKVTLAIDVNDATPIWGWNDFISFL

SEQ ID NO: 151321 - protein, 25 aa, Heterodera glycines
HVKSIAKVTLSSSLLYNPLLGSINS

SEQ ID NO: 151322 - protein, 320 aa, Heterodera glycines
MNQQQQIKTKRNKVKLEHDGALYVFDQLSADGLKKFWRWRLHTDLNNVVQKLVGVHSSDMNAAHVECQRLVTGLKRRAAETCEAPATIRAQVLQNTCTPVLAAFPSKSATKKWVIKRLRRDENAPRTEPLNLEQLEIPNTYRIYKRTEIDEEQFLLADTGVFQIQGQNGPQRFLDNYMGRMRFNVPMAAPLFHPHEWNVHQRTLDGADRTNNFAEAFHRKLQRQFSCTHPTIWRFIDTIRCEQKAIDADISRCVMGESAPQKKKKYREADARILRLVHRYNEINNIHLPQNDHNYANANVNPENIINFLTGVSRNYEMRP

SEQ ID NO: 151323 - protein, 214 aa, Heterodera glycines
MPFKVPVMPSSGPGRQPTIKRGPSPLKKRFISSKKRHPLESANSGLSAAQIARTQSVLAPMSSSAFMQQLEQQQMSDSGGIGQRLSLGTGEEGGPVLDDVQAMQEMGDQIDEYYYGVRIFPGQDLSNVWVGWVTPQFHAYDKLFDANASVRKCRTEYRNCYMLNAVELLNAVADVSNTKVSGLQVIEYQWECNQPNDKSLLHEMPKAFRRLAIH

SEQ ID NO: 151324 - protein, 155 aa, Heterodera glycines
MTLAAGQRGKFNFGQDSNSLKFFTTCGLQEGYEPFCVNMFRTMPFWYAKRLPRFEEIDERSKLDVQRLPATATMPPCLKLCQKTGSNDGTGGQQEKTRMEFIRLSLPVNCNRVFVKNKEKEALRSRMEELQQRRNASLSSILKGKEPEEERPRVR

SEQ ID NO: 151325 - protein, 264 aa, Heterodera glycines
MNDPRNGQQFALLIAIMKGHTEIAALLLEKGADVHQTTVRQVNHVNMAVTPLWVAVNMRQLEMCRVLIAHGANVDLGSDASLTPLLLACDKGSTEIVTLLVENGADVNLGDSEGMMPLMVICRAGRIELARFLLSHGANVEQMDNSGMRFALLYAASKGHLEVCRLLVEEWAADVNQQATDGITALMGACIRGRLDITVFLIEHGAHIDHADMDGYNALMWAVKQKKTEVARHLLAIGANADQVGIDGGQQDEQPQQQKEMPCN

SEQ ID NO: 151326 - protein, 111 aa, Heterodera glycines
IEIKNGKKKLFENKRKRTVKYLKINDVDNPKETAPLIANNQMPTQSKGKSSLLKRYLENKEKFPRRTLRGHAKDLCVKLKTLKNVRNKLKNKTHYTKEEICKKEAFVIEDF

SEQ ID NO: 151327 - protein, 300 aa, Heterodera glycines
MYKDKEDPLLHVYTSTQEKLDALVQQYNQEKQKEEAGYLFCTLYKKWLITFLKKVQALESDMHDLSSEFELNRLDYLETIRKQDQQLKLFHQILERIQPAIHKDSNYANIERVKREAAWNIEAEQWTLPELTFRQALPSASAVSQNAKNGLKNGQMEKSELQNEPEEEESRLKKRLNESMDNDFVQRYFKPISRQNILDKYDPEKHRMLEAKKVAEFKKRNQFASGVVYTDALYGNENWQQQNGTKQSKMPSNHQRNGTSKAGTSDASPAVGVNRPISGMQRKPPPRLEAIQVVRNKSFT

SEQ ID NO: 151328 - protein, 51 aa, Heterodera glycines
MCIFDELNKTGIIFGIFFSILGVYFLKFLGHLLTYQVFSTVVDFDSDWFRQ

SEQ ID NO: 151329 - protein, 268 aa, Heterodera glycines
FVTLNNQQLNGLQFVTSTTVLRDCANLRGIEFHRLPYLGEIMDEFDSDIEMMDGDGGGGEHIYVIEDNNDDELAEEIDQQFIGIMANFGGNNSGGAFGAENWINGLGVIANDDDGHEDQEHMAVDQYQPVEMDEDEPLWPCRALYQWLHKGREDGQPKLLKYIERGHVTPADLAPLKEAFLNNRSSPISYIIRLEATLVDIEPFELENRWTREVLVLRRFFEDLWLFERGPMGRAESACDSDRVVLKCGWEDHQNGMINVALYGDRDV

SEQ ID NO: 151330 - protein, 33 aa, Heterodera glycines
MLRFGLQQPKKVSSWDPDEKALTPRLSSITLIE

SEQ ID NO: 151331 - protein, 193 aa, Heterodera glycines
MDNADNNICDYLNISTTTKSDVGNLTGKFAILDASKNLTVFEWLFSSMIHQLIVAKCAYQFKVAQVASDWYHNTVLMFFDKLNCISPVLPWIVFPNIFTPISILFNLSLIWVTCTKMTDHKVCNWLIAFDSLCQLFVVAPFGVNLLGVIFQYSTIDYRCCLATLMAATVASYASIMAMYLISLERLLIIMYPI

SEQ ID NO: 151332 - protein, 93 aa, Heterodera glycines
MRKMLRSVFLLLLVLLIGWLISSAARNLITVFFRDSITLIINSLFSDTDTQNRLITDITSWVIVTIIGLRTKKRWAEETIRRELGRFLAAKLL

SEQ ID NO: 151333 - protein, 116 aa, Heterodera glycines
MVKKLTTVGTENANGKRMKEDKEKEREKERMDEEQRGEDREAEGGKERCQFSERWLNNFKRRYGIQTTMEGTVNAEGDEETEDDEAERERRGGDTILVEGTEEKNSENEGKGKGAQ

SEQ ID NO: 151334 - protein, 62 aa, Heterodera glycines
MDSLYCTVPYILAGIVAPGEEQNARVVLLPVAGNEHELDRDQNGEQRFYETPVKINWIFKKK

SEQ ID NO: 151335 - protein, 239 aa, Heterodera glycines
MPKKLMSMRWQLGAVCWSVPSLNMLRMRVGGIHSGDATLITPPQDLNAFTTRKIHEIIRHIARRFNVTGPFNLQLIAKDDNLFVIECNLRVSRSFPFISKTLDIDFVALATRAMMWTQEPTKFIQSFTRPEQSNNKVGVKAYLKALLSTGFQLPKRVIFLSIGYKQRAEMLESVRMLDRLGFTLYGSKGTADYYASENNIRIKNLEWPFEEKDNYHVYGAKMNTVDEFVEKKIIDFMMG

SEQ ID NO: 151336 - protein, 65 aa, Heterodera glycines
MRRVTFAPTAEGGADGKAPEFRSFKMRRMSIIIPKEPQFGDAMKEKGNAFIISTADSANCANNYR

SEQ ID NO: 151337 - protein, 218 aa, Heterodera glycines
MELAPSEDGTKVSAKEEEEEESEEDEPQWDEEAEFGEDEAPNAVAKRNRAVRRWHRKLWCLSPKSAKWRSPLSAAQSSAAPPPFSNCAYASNANGGRDGERQWGEERTEEKGTEEKAKGGGGRRRRGSGGGAAVAERGGGGRGGRPRHDGTYHGTVTAGDRSAPIHQSLRRHRQNSTAPRVGNEAIPKEPQFGDAMKEKGNAFIISTADSANCANNYR

SEQ ID NO: 151338 - protein, 99 aa, Heterodera glycines
MSRLRLNSLNFGLCSTDRSRANSGVEGNSDNLNGSPLRTAMSPTSLSGPLTQSTTVTGEETSDGSVHPIQEIVSKNNPKTQLRIKITEKSQKSVSRNPS

SEQ ID NO: 151339 - protein, 69 aa, Heterodera glycines
MNPFMITLISGMPDPEQKRAIVMPKWTEQTTDRLGGDVFADQSGGTDKNDKKADPRDESRQRKAKGNWD

SEQ ID NO: 151340 - protein, 77 aa, Heterodera glycines
LALRVFADHAHEPAERRRLLELCSAQGATEFTKFVRQPNNSLVELLCTFSSLTPPFIYSSNKSPKEGTKAAYTFGRE

SEQ ID NO: 151341 - protein, 754 aa, Heterodera glycines
PPFNFGLCFGRLRSVFNTLSAKPDLLQKYDSIIQEQKNMGIVEIVKNPFEFSPPLHYLAHHPVISPLKTKVRIVYDGSAHVGKELSLNECLFPGPIILPDLIGLLLRFRIPPIVITTDIEKAFLQVNVHPAHRDCTWLKNTSLPPSKANTQILRFTRVSFGLTCSLFLLAATILHHLSAFPSNLSTEISQNIYVDNILISASNSTEGQKKSTSAISLFQKAGMPLREFACNYPEAISHLPSQLKLPGTEQKFLGLKWNTEKDFLILELSVPPPDFPTKRSVLSFIASHFDPLGLISPLILPLKLFLQSLFELKLNWDERFPTEIITNWQTIESWKRTDKVTIPRSPISSPLSAREYQLHCFTDASTLAMCAAVFLRVSHPKFSPETFLIFSKTKVKPIHNVPLTIPKLELIAVEMGTRALKFTQAQFPSLNLDPNLNLWTDSAIVLSWLNCHKSTEIFVQNLLKAIKSVDHLVRHLPGPENPADIGTRGISSAPTLSALSAWWSGPQWLSLPANHWPNKISFNEQRKALQELILREQTLNPPSDQVTKILGLYSDPQKIIRAKGRLGKSQLPPSAKNPIFLPKSPLTNLIVHEIHLNNVHSSPLLTRRGGHYERLISLVKHHLHTSFRPRAVPLAQLMTSLSEIEMIVNSRPITFHSANPMDPNALRPIDFLRPLNPNQNPLSHLIIPINAETELRTQKSLQKWETASQQTERFWTNGSLIIYRPENGTKNRPDNKIEIGELVLVIIHTRSLWK

SEQ ID NO: 151342 - protein, 289 aa, Heterodera glycines
MNSLILSHPYHLLYLLAVPHKLTSEGLPPNENIETDRASSKDQADIVVDKLCKRWRQPFSSSSQFSLARLSFKAYKGQITVLLGQNGAGKTTTFSILTGLLKYNSGRVLICGIDQKKHMRECQNKIGFCPQYNPLFDYLTVREHLEFYAGTKTGHFNGPYGKKALIQEIHTVANELHIEALLDMPARALSGGQKRKLCVAIALIGKSSVVLLDEPSAGMDAKARRDLGDLLKNIKQDRQGILWPSYLIQTIAMLTILLTTHYMEEADTLADRIVIIANGRLKSNGSPQF

SEQ ID NO: 151343 - protein, 166 aa, Heterodera glycines
MFVDAPAEKFGPKVRKNPKQGKYEVQAILATTTYKKDGQLRRIFYVQCYSQKDYSWVLNEWMDTQELVTEFTVNSVISWVFKAIRGEEVPEEIAEKLRTNPEYISRSFYGEIDEIINKFNCLMNELRRNVDIRTTPIGFSSTLAGDVRQQRIAAERLKEFLKKKKS

SEQ ID NO: 151344 - protein, 450 aa, Heterodera glycines
MPRRRAGKRYRQSHPKTEDAIHLIEKRCKTIEIVEIEEPTTATDVQQIVAQIEEPTTSADVERIVALFTTKKLVILQGPHGCGKTHTANCVAKQRNVPLKVLQINEQYDSKFLQRDCVILWENWDHGGSDLASAIVGLAERGHAVLANGRHIPMGSQCRILGTISREEHQHHTAMIWRDYPFTVRMAPIQPAQMDSILAQMTKSHHELFNIRSKLLQTFVTVSALINHRKASMDRALNAKDLFRVISHLVNSTDQQHSPNSLVSDRNALFGELFDAWAAHLSGDELRRCVAAVIGEALSLSPEQQQCHIDVRFPDVSILENNNNENIRSSRRIPKQAQHQQKRVQFQFGRVVLEQRTDAAQQEQQQSNNDNRSGKSCAGAVAPFVLTRDAAQLLERVAACVSRSPPEPVLLTGDTGVGKTATVQHMARLLRVPLHVVNLSQESEFSDLVG

SEQ ID NO: 151345 - protein, 24 aa, Heterodera glycines
MIQKFIIAIQMNPNIGKDHLFLFW

SEQ ID NO: 151346 - protein, 425 aa, Heterodera glycines
TSQPIRVLVTGAAGQIGYSLVLQIAKGDVFGKDQVLQIAKGDVFGKDQPIVLVLLPIVLVLLDVPPLAAVLTGVHYELVDCALPNLVGVVETVTTEEAAFQDIDYAFLVGAMPRKEGMERKDLLAANVKIFKSQGEALAKFSKPTVKVLVVGNVLVVGNPANTSAFICAKYAANKIPANNFSAMTRLDHNRAMAQVAQKCADGNFSAMTRLDHNRAMAQVAQKCADGTTVGMVKNVIIWGNHSSTQFPDIRHAKIVKGGSETLAYDAVKGSETLAYDAVKDTAWIQDQFIKTVQKRGAVIIEKRKTVQKRGAVIIEKRKLSSAMSASKAACDHMRDWFFGTDHMRDWFFGTPSDGRWVSMAVPSDGSYGIPEGLVFSFPVTIEQKEWKIVQGLDLDDFAKQKIDITKKELLAERDEALAACKCKR

SEQ ID NO: 151347 - protein, 59 aa, Heterodera glycines
MFLSPTVRRDSSKICATFYCGKSKYLIGQLRVNEHSRLWPVVERKNGNIRWEQIILLGD

SEQ ID NO: 151348 - protein, 30 aa, Heterodera glycines
MVNLAIKFICFFRIKTIFEPKIFIKKNVLN

SEQ ID NO: 151349 - protein, 24 aa, Heterodera glycines
MLRRIILEIRDEFPKIIKTFILDN

SEQ ID NO: 151350 - protein, 247 aa, Heterodera glycines
QFRRRVSADIMGVLEHEHTWQFDVIQLERVTDHHPLANLGAKVFERWNVCEALQCPSQVIVRWLTVIEANYQAGNAYHNATHAADVLQATSFFLNSDSVGQMIQDQHASAALVGQMIQDQHASAALIAATVHDLDHPGRGNAFLMNTRQRLALLYNDQSILENHHVALAFQLTLSSGVNIFAKMPREEFTQMRQAIIDMVLATDMSRHFEHLKFQQLMATDNTEEEDANSLIICRMVRDSRINRAKE

SEQ ID NO: 151351 - protein, 114 aa, Heterodera glycines
MPREEFTQMRQAIIDMVLATDMSRHFEHLAKFQQLMAIMPDNTEEERDANSLIICRMCTFVDMFAREAFTLWCEFADLPHLPVQLEENYAQWKTRSAEWDPKKDNDNLLKRTER

SEQ ID NO: 151352 - protein, 93 aa, Heterodera glycines
MGHQNCGKSEFTPKQTLIFPDGKPLNMILDDGEIDPINALQAAMEELYTKYGTPDAYKTGLYLLPKQLDEEVARLHLDKLGAKLTKLSKDQAE

SEQ ID NO: 151353 - protein, 349 aa, Heterodera glycines
MTLNNGIWKVQLSVGQLRQFDAAMICTGHHCEPLMPQITGLENFKGQILHAKQYRDYKGFEDKNVFIVGIGNSALDIGVELAKIAKNVTISTRRGTWVFNRVIQNGLPYDVVYQSRFYDWLMRTLPWTIANDFHEHRMQQRIIRFRENIITSKSRDHDIYGLRPAHRFFQQHPAVNDCLANLLASGRITITDDISTIGEHSICVKDGREFSADVIILCTGYTFGFPFIRPAELIPIRKQNEIDLYKYVFPPSNYVAKRLAVIGLVQPIGSVAPIAEMQSRWAAAVFAGRLQLPDNGTMCEDIAQTRAQMRRQYFESAKHTVQVPFIPYMDELAELVGCKPNLAKVVGTL

SEQ ID NO: 151354 - protein, 57 aa, Heterodera glycines
MAREEYCFDATAAAAAEQSRPSATTSTLVQGDGLSSSFVDAIIRKVRQSPVQRFTDE

SEQ ID NO: 151355 - protein, 301 aa, Heterodera glycines
MNRKKIENLQKCRKRKFLDNNDSENETLSADHREQNENNNDRDDDFEEHAIVNFELGETKRGGVCIWFNGFRFTHKQNELWRCSVRDCPARVKIVSKSDNGMSGYQMQKDHSHLPEPQKQQVWMVNIESAKEIQAEKRRQQILERVRDKPRVKPTRLLAEMRRSAADETYVAMGSDNALSCMMRRQKKKILGNGLCRPIGIHNSGQIAAEGWRGHSALRQSHGQNWRKGRCACFWERTDFGHFEQKQCNLAFGRDIQGSTKHVGAVLCCGRVCQPPNVHWSLGSSARETSTLLRGSAELST

SEQ ID NO: 151356 - protein, 163 aa, Heterodera glycines
MATLLRKAIFNFMHCPKDVSVLLIFSIVRQISKNLANCPPSHSSARFAHHLSTLTTYVSLRIKCPASVIRCSLAVCLLGKMMLLRCACTISNASHSVPDPLRNTCDGCQNNSVAAREETKKIRDLDVKNAGIRDLDVKNAGIRDLDVKNAGIGGEKCRNYGFG

SEQ ID NO: 151357 - protein, 114 aa, Heterodera glycines
MPEIALTLTVPASRGEYEMMMLQLEKERFGKERKPYNALAQEEREKIAKERIKESQVGAGGGAVGRFGHPETGPATRGALRLAAVGAQVHSELLLRLRDAQGLPLVLHGNGRIF

SEQ ID NO: 151358 - protein, 232 aa, Heterodera glycines
MPLPPELLFEIVEALPSSKLSTVFLSNHLMSTWAKKRIRGTFNSLMSQKQEWRNLLKISRLVFESHNGLNQKCQNFSFSFWVSLLPCFSCCVCWFRWCSLFFVQHGIIGQKKNNQKNLMIFQNTHRLINEIIFLLKCVMKKLGIFYALEFAKLYQTIGREISRNKFRHIMQTGKKQHELALVLMEKAGINTQEKAFGLKHLEFVQNFWDKEFPDIFRIVAFDMVNEDFLNCL

SEQ ID NO: 151359 - protein, 36 aa, Heterodera glycines
MTTVTPQQTAATAAGGNCDKDPVDLMFIIDTSTSVQ

SEQ ID NO: 151360 - protein, 50 aa, Heterodera glycines
LFEYHKRALEKIDFFVFGAVPPNRCAQIYGETESFRNSFPIACTLIMRWI

SEQ ID NO: 151361 - protein, 151 aa, Heterodera glycines
MSSQVDLMFIIDTSQSVQEAFEQQLQFAVDLVKRLPDQDFAQRVQVGAVSFNKKAQLQFTMGQLKEKPVILDALLHINHTGGGTSVVSGVNLAMDQVAKHRRKGTRLMVVLISDGTSQDPWADVIRSAVRLRAAEADVYAVTVSHDYFFRI

SEQ ID NO: 151362 - protein, 38 aa, Heterodera glycines
MILFCCFIKKKKIDFLTLLRRNWLDEFAPTAIGAASKF

SEQ ID NO: 151363 - protein, 66 aa, Heterodera glycines
MLFSNPFILCLLLNFLIIGPSQFIGQFITLLVNVFCSHFSIMFTQHFFSYFNSNIDINFYQKVLAS

SEQ ID NO: 151364 - protein, 160 aa, Heterodera glycines
MATFNVAHLITLIGVGSIASSVVADEQQNQNKTQNGAGGLKHLFGSDVFTELRDKQNAMAEKMSGTEAKLEKQNENGMRETQTLLSTKLEKQIENGIQNNQKALSLMKNMATLAFFHFPLPIYHRWNASDCHPKIVINESTNAIQRNGTESDQKSLKLNA

SEQ ID NO: 151365 - protein, 816 aa, Heterodera glycines
MFTDRFDMWMRVWCSKIAVFHQELYEKSFFGTILGSGESMEFQGRGGPHAHIVAQTDLDAVPEVIQEYIWAHIPPLPDKDDDSPIAQMHREVRDYMHMQLHRCSDSWCGPRDPNFGRCKKGFPAPYSKCTILHPDRPALYYRPSPTDGGAKIEVNGLIYDNSQVVPYNPYILLRYRVHYNVLFAYGNKANIKYALKYPFKGPGHCYVECKEESGSKIGIDEPAQYAKMNFRGATEAFAVVHSMQFAKLSHHVVQLSIHLPNQQPVVYRAFQLVSKAEEIQRGELPETPCSAYWKQWQNEWQHVPSLKDMLFEKVPEQFRWAKDRWVPYKRKPTKRPPIGRVVPVAPKDIERFALYVLMRHFPGDPDHLKLVNGQQYSTFQEAALQHGLLEDDQIWHKTLGEAALHRWPDQMRWLFVSILVFGQPSNSLELWNKYKDQMYNPQGIISAAIRQAREQEALADIDWRLHFFNSSCMHCGLPDPPNSKAKNINLAIEEYFYGDDGLNMPPGQPKQRPQQNTPPPLNSDQQKVFDAVVRAIQSDPKDQTVPRRFFIFGDGGTGKTFLFGQIIKRLRKPPYTYKVLATASTGCAAILLPYGKTAHSTFRLGREVSLDKLPSIPLESFFARRIREAQLIIIDEITMLHNTVIAVIDRVCKEMAIRQHKDLLFGGKTVIFSGDFKQSLPVVPHEGLTAQVTACFQTSPLFGQFSTMKLTINQRLGQGQQAYLQMCRQIGLGETGEHFWIPPQFLVKSREELIDFVYSDFQKLLGNDMELLNRLILAPHIDTCDEINEIMMANVPGQVREYLSSDSRLTSVTGHR

SEQ ID NO: 151366 - protein, 34 aa, Heterodera glycines
MIGHLIYLHHEHQINTPSNFCPPHQFCCKNTRRR

SEQ ID NO: 151367 - protein, 89 aa, Heterodera glycines; identical to SEQ ID NO: 132504

SEQ ID NO: 151368 - protein, 175 aa, Heterodera glycines
MALGNSSGINFRCLKKCASVGHSSAAPAEEAMEPPPPTPGPVPTPEMDEEILEFCFSLPSASVTPIGDLVPFSTTPTAPMDTGETTPPPLAIDERSERIEQLEKQLKDRDDTIKFLRKQVRNREALISDLRRQLEQCAAPPTATPTHSMKNSLRNMDIESSKFSKSFNFPECSSI

SEQ ID NO: 151369 - protein, 481 aa, Heterodera glycines
IVVYPKGTKRIKEIYALDKCVDPMCYPLLYPSNIEGYNVNIKRHQEKRCRYVTTVNFLFFRENEKFFPHFYASKLFRQWLVDQAAKIEWDRLEYIRTHQAKLWSSNYLNVEDFLKNRASKTGAEIRKKVILPSTFSGGPRSMHEHFMNAMAIVNESGKPDLFITFTCNPNDPDILKCLLPGQTPSDRPDIVTRVFYLKKTHLLDLILNKHIFGEVIANCWVIEYQKRGLPHLHLLVTLHPKNKWHSTADIDKFSCAEIPSEKEDPVLFKIITNCMMHGPCNEKSMCWNKLKKKCGKKFPKTFRENTELNEDGYPLYKRPDNGRFIYRKGQKLTNQYVVPYNPFLSKTFNAHINIERDSATVECIQIEENGTKKILKYDEVGAYLEARYLSPCEACWRILKYPMQGKSHSVDLLDVHLENMQRIFYKNASEEQIEEASVKDTTLTAYFKFCQQNPTLKENGSIQDKTIKENGSIQDKTIKKR

SEQ ID NO: 151370 - protein, 325 aa, Heterodera glycines
MVRTKQNFPKDSACCSSSLQYLDAEPVQSSGKQKRIEPVQSSGKQKRSETNLTNEKNGNKESINLDEMNDFSYTSDEEHTMKSYVAQRKAKQRKLMDNDEKEKELFENRFRIGLKRAKMTEEEISYLYKKIPENAKGNFVRYTISPRQNIKIPNFINLASLILNVWNNPFYKNFIKNIRRYNSIFACASISCFKFKFPTPGPPCYKIQGQIYHKFNPSAMPKNEKDLPTNGQLYFIDSEEAINIRCEIDKECLPDLLEYIEKYLRKNNPFAQSYLMMKEVYEQEEKKCKERGHKMPNIKLLFSLKENYDQRRYNIPLSNEVCAIM

SEQ ID NO: 151371 - protein, 50 aa, Heterodera glycines
MSENSKINENSSLSKSVTVEISHCRNPLSKSVTVEISHCRNVTAPSFPGT

SEQ ID NO: 151372 - protein, 93 aa, Heterodera glycines
MQNEEVLVHDAGGGWHSTWNVHLRGNQRPSSFARKMIEEDELWRIRVADYQIAPADGIKGPHRQDQNLEALVQDFFNRDPIQFLRACAYHLHF

SEQ ID NO: 151373 - protein, 393 aa, Heterodera glycines
MALLRFAETKTNRGKILLSRSGYDYTFEAVSKTEDGMEYWRCPNRPPYCPGRACVQCRWEVDADGSRYKIGRTTGQHNHPPVLGGHMTCPRGFTQVYTMAVVIDHCAVPAVYGLLPSKTLATYTRFFETIRQSVGNNWFPYRIMSDFESGAITAAGNVFPNSIRTGCLFHFGQAIWRRIQRLPNLLTRYRDDEVVRTSLRSLQALAFVPVDFVYNYFCIAMSILEPTPELQELIIYFINTWIGPRRIMQNEEVLVHDAGGVADNWIRGRIEALNLAQTDALFPIELWNVVDRVAEGLGRTNNSLEGWHSTWNVHLRGNQRPSLFARKMIEEDELWRIRVADYQIAPADGIKGPHETRKAKYIRQDQNLEALVQDFFNRDPIQFLRACAYHLHF

SEQ ID NO: 151374 - protein, 64 aa, Heterodera glycines
PIPSFMRHQLHSFLVLPNCLKCIPKNALKMIKPVFSRIYCQYFPIRNDTVNSFASLIHSCFASD

SEQ ID NO: 151375 - protein, 28 aa, Heterodera glycines
MKGCKKAILGKNIAKKYLDIFLSVKWLI

SEQ ID NO: 151376 - protein, 87 aa, Heterodera glycines
MEKIEVKETDMKSNLIDQTIEIVRDGLQKYGQDKDIASFVKDTMEQRFAGTWHCVVGRSFGSRVSYELESFALFKVNQHTVLIFKCG

SEQ ID NO: 151377 - protein, 173 aa, Heterodera glycines
MGVPAEKERATHRTMGVPVEKERATHRTRGVPVEKERATHRTRGVPAEKERGATHRTTGVPAEKERATHRTMGVPAEKERATHRTMGVPVEKERATHRTRGVPVEKERATHRTMGVPVEKERATHRTRGVPVEKERATHRTRGVPVEKERATHRTMGVPAEKERAIHRTRGMP

SEQ ID NO: 151378 - protein, 125 aa, Heterodera glycines
MQRKQTNNVIIIIQNCLFFKFGLVTRFAERQRQPWECRRRRNAPHTEPGECRRRNAPRTIARAWHFRDAKRGGDGIGNQGPDVGDESTHDDDADVFVGCAPNEGDDLNRHPNEAATDPFGGHSGP

SEQ ID NO: 151379 - protein, 175 aa, Heterodera glycines
MALACHYRIAVSSPKTQFALPEVMLGLLPGAGGTQRLPRLISLQNALDMMLTGKVIRPDKAKKMGLVDQLVQPLGPGLSDPISGTHRYLEEVAISACEQLAAGTLKINRERPLMERIQNVLLTRKPLLDAVVMRMARDKVMKQTHGNYPAPLRILDVVRTGLVDGQQEGYEEETK

SEQ ID NO: 151380 - protein, 20 aa, Heterodera glycines
MATFYGLEFGTQTMVYARET

SEQ ID NO: 151381 - protein, 131 aa, Heterodera glycines
MTRPLMPQLNELMAPMYNIVVSDVYNPDYFCVTLISKNIKINHSEVIRFPNTQMGRSMTVIQGQWQRLRLALVNTHLESTREVGEERKTQFKLCMEKIRSMSGTDSEETLAVFGLFLVVFRFEGNSRFHRR

SEQ ID NO: 151382 - protein, 98 aa, Heterodera glycines
MNRRWICNDVWMDIFPSFDRAQLGLKLALLSPRFNALVDKHFNGKSELTIWRPIEIRRKDKGPEPNLSVRMDDRFVPFPWPEDRPLPSKIRFKDLRIE

SEQ ID NO: 151383 - protein, 134 aa, Heterodera glycines
MNRRWICNDVWMDIFPSFDRPQLGLKLALLSPRFDALVDKHFDGKSELTIWRPIEIRKDKGPEPKLSVQMDDEFVPFPLPDRPLPSKILFKRLQIEYLKAALLQFTGHKKRHDHKLFLSTLVHPFSRSIQIKHY

SEQ ID NO: 151384 - protein, 268 aa, Heterodera glycines
MQLGQPSRALVNANTAVEDPSIRVIEEEETGQTILEGMGELHIEVMRERLLREFDLNAFFGPLRVNYKEIPQKRAVSTEHMENVIDKRQWCTMKLEIEPIPFVNTGTVVHQFRKVSIDLDREEDVEMADQALKNLLFHPDWLKSINAGALSTSGHKIPVTLLNACASRCLSKALEQANLVLYEPMMLVEVVVLSESAEMPDPDTVVRALSERRATILDVSMDGAKGRIAVVQANIPLAETQGLSRILRTVSSGMASFHLQPNGYQQMD

SEQ ID NO: 151385 - protein, 99 aa, Heterodera glycines
MAAKELFLAQQPDLFKPIQSSRENLDASSHFHFTHSFKIFLVAQVACYAIPVLIIYDRSRTDGPAAAGHEQIANVHPFGVTTDGCEQHYQSMQHERPIV

SEQ ID NO: 151386 - protein, 164 aa, Heterodera glycines
PLPPFVLCFSIFNLLYLLPQPVELVRPNSVNILWQMPQVFVMTVGEILLSVTGLEFSYSQAAPSMKSVVQALWLLTALWLLTVFFGNIIDIVVISQVQISDPVEEFFIYAALMFAVIGLFVLLAMRYKYVDGNDDRLELGRGPRRGASARTDRKSGQMSSERKW

SEQ ID NO: 151387 - protein, 95 aa, Heterodera glycines
MAFAEAFSFFASHGMAFRRWMNDDQTAFSDRKQKGSQITILQSLSWHPKNLILGSKSLIFTKFIQNTFKIFKCYICDVHDQFGQFFIRNKHFMKF

SEQ ID NO: 151388 - protein, 46 aa, Heterodera glycines
MDVNAELPPDFEFDSILRPINNSPFFSPHYGRWYHNQIAGHLSSVI

SEQ ID NO: 151389 - protein, 105 aa, Heterodera glycines
KCAIFLVVLLFYRLPLFAPTAEFFGQFTDPQRVISWAAFAMFFLRYLYIFLHVLVAINRATAIWIPLKYDKVISVVQPTGTKENLFTLSKMKSSKFCADISSPMP

SEQ ID NO: 151390 - protein, 33 aa, Heterodera glycines
MIWNTVIANRIQYFKLYIIYWSNDLNIPSLISS

SEQ ID NO: 151391 - protein, 364 aa, Heterodera glycines
MSEAVNEIDSGFEAEGGTNETEEEKDVSEVVKESNETETKEKKAQKGEEGKKQKGTAGDDLLVEIEYIKTEEELKREEQFRQVRTEIPEDTLSKAAISEQILQEELNQRRSTPRADVVEWADVTSRDPFLLVELKSYRNTVMVPRHWNAKRKYLAGKRGFERPPFELPEFIKRTGIMEMRETMWEKEEHQSLKNKMRERTRPKLGRIDIDYQKLHDAFFKWQTKPQMTKMGELYYEGKELEAQMREKKPGTLSDELRIALGMPVGPVTRQQIVPRVNSTGGWGKPPVDEYGKPLYGDVFGLTVPQVADDVDESRIERRHWGEIGSDEEESEEESEAEEDDEEGTGALPPPPPEGGYVTPAPTEG

SEQ ID NO: 151392 - protein, 58 aa, Heterodera glycines
MSDDERECECRKGAIGPQSEEKDGGGTAAEKAHSDAPPGDEADGGGSRVGGGAGGAAE

SEQ ID NO: 151393 - protein, 131 aa, Heterodera glycines
MVQITQGFAYQNQPMVQCCGHTAYATKEEAEEEVYDILNLYARVYTDLLAIPVVKGRKSEKEKFAGADFTTTVEAYVPVNGRGIQVVVIPVGITVKLSDEKRVELIEKSEALVKMLKEEHGVRAGLDQRDN

SEQ ID NO: 151394 - protein, 111 aa, Heterodera glycines
MAGGFEKLNPSKAQKAVFLELWGPDFEFFPINALHALFLAWVRRATVRVSLLRRFNGFCVLFDYVESAIGPVTQRSLYETVKGQRQRLTADCTTTDIYIEDLALLSADRDK

SEQ ID NO: 151395 - protein, 99 aa, Heterodera glycines
VPSQCSPSALPNCPVPTPARPPRTAALLVAPDGSAICRLFIGLGGQRSSRTEVSQRGRLRMRLLTEEKALRRYKRPPGRTQKIPQKWDAPKIGKEINTP

SEQ ID NO: 151396 - protein, 906 aa, Heterodera glycines
LKVGVFVNKKKTKFVADSGTEVNIIDEEAYDKIGRPKIQECEEKGKLFDGTKVAFIGKGIATFQFGDIAIDQEFYVAKRGSLNLLSISTMDAFGLLDDLKRKISNSAADKFIRELKATFSTTFEEAADKFIRELKATFSTTFEEGLGLCTKELAHLQLKDGATPIYRKARPMPHHSKEIVEMELDRLEQLGIIRKAEHLTWAAPILVVKKGDGSARLCIDYSTGLNDALLDFQHPLPIPDDIFATLNGGKLFSQIDLKDAYFQIQLDDDSKKICGISTHKGNYLMERLPFGVKSAPGIFQSIMDKMLAYKPIVDMPAPTNISSLRSFLGMVNHYQQFVRNMRFIRKPLRSAQARSKMELVRQLSQIISKIVSAIVSADASELGIGAVISHRFANGTIKAIAHASKSLAPAEKNYSQIEKEGLALIFAVQKFHKMIYGRKFILQTDHKPLLSIFGNKKGIRQCSVNRLLRWSLILLAYDFKIEYVKTTDFGQADALSRLIAKGGEEENERVIALITAEPILEEILHSASKNLPIKFEDLVIASKNDYNIQKVIKFIRQGWPNEKKIEKESDTIKLFHRRKSDLTILKGCLMYGERVVIPRIFQAKILRLFHKGHPGMKRMKQLARQYIFWPKLDKEIEDYVQNCEPCQLAAKAPIKTDLHSWPKPTGPWQRIHIDFAGPFFGKTFLIVVDSFSKYPEVFEMANSTASATIEKLRYLFTRHGIPETIVSDNGTQFSSSEYAKFVAANGITHLFSAPYNPMSNGQVERFVDIKRTFRKLKGEGKPNKEIIDTFLITYRTTPTDLKCPAELLLCRRPRTTIDLLRPPMERQFNKKFGTKNRRFIMERQFNKKFGTKNRRFILNEKVFARHRSSQHWKTGVISGTSGVIFEVKFPDGSFGRFHANQLRNRK

SEQ ID NO: 151397 - protein, 129 aa, Heterodera glycines
YRNFIIKISDLNSKILFVLVILFFAFGLQRYIREHVRLAKYFVSLMSADPTFEIVGDVIMALVCFRIKGSEEVNENLLKELRLSSHIHVIAAAPDNRTTIRFCVNKEDANEQDVLFAFKVIKETALYVS

SEQ ID NO: 151398 - protein, 159 aa, Heterodera glycines
MANACCFGLLLLYVMFGGLLLLRFERGQSERAKDELIRRKTECIRHFLRYQRHFFNKIKLAFAIFIAINIVLKSKKLLAGDGIFNGQDRSNESAAKAPTLISAAERITEHCLFGIVDPAEGRRRQTWNFRNAILYGFGILTTLGECETGESAVNTANCS

SEQ ID NO: 151399 - protein, 342 aa, Heterodera glycines
MKKHFGFSLFSVGISAVLIIMLMLITILPPSIADDYLEIFAKPPIADANPKSVRLKKTDSVETLKKEIGKKLGITPRTLTHNSPYALQLDDKKTMQDYSIEEGDIIYYFLYGVIKIPEGEFEVFVKNGEKKYSIKVKITDTVEILKKKVQKATDIPAENQTFAHYPVRGRVLDEDNKTMQDYGILEEATVQMVFPFEIAVCCAGKTYSVKVKETDTVVTVKEKIETIIGIPPKRQLMSKQQSDVLDDKKTMAYYGIVKGKTVDVCWDQFEIYVQNGDEVITVNVQAIDTVATVKEKIQKKTGILTEKQTLRPKHSRALSKDNYRYGEINPNAILALGENTKQ

SEQ ID NO: 151400 - protein, 54 aa, Heterodera glycines
MAPHNKFKIRLYLAIVTIISAFYGCFNSFKGLNDGNFHANFSFCQSSVLLYVFW

SEQ ID NO: 151401 - protein, 91 aa, Heterodera glycines
MQNDGQKIKAHTFITADAAKSVEQICFNFKLFICTNFLVTVKAFKWEIVPKPDNDDEDDGDDLWGYQIKLKYDFPPIKKQTLFFAEIQEGG

SEQ ID NO: 151402 - protein, 44 aa, Heterodera glycines
MANEAPYTHIVTEQMHEYVKIIVPPAVILSPASVSCQLKISKTC

SEQ ID NO: 151403 - protein, 70 aa, Heterodera glycines
MANGSDKFSKLPQLASPSLYQICLSVDVDTCKFKGKETIHLEITKPTNFLTLHAGALEVEKASLKLEDGT

SEQ ID NO: 151404 - protein, 146 aa, Heterodera glycines
MINRLARPLRGLASFSWLFLQSPRLNPPTFQSLELNPPAFQSLGLNSPAFQSLALNAPTFQSLELTQPTSIPITGTQFSCISITGTQPTNISITGTQPTSIPITGTQFCISITGTQPTSIPIARTQPTRINHRDSILWHFKQRDSN

SEQ ID NO: 151405 - protein, 19 aa, Heterodera glycines
MENLNFRLFVRNCLKWVPD

SEQ ID NO: 151406 - protein, 87 aa, Heterodera glycines
MIVGEEPAPAQAGAAAEDAANKSAKRAALAAQKRQLALDRSSFKSQHPDLAEGSSTASGGSGTPKTGQQQQPVDMASGGALDECEPA

SEQ ID NO: 151407 - protein, 111 aa, Heterodera glycines
MLSAIDFGFAVREQTKLDGLIMKGASIYSSSGSFWCNGSSTAGKSYGAGATVGIGFSFTNRQIIFTKNGVLLDFFTLLDDSSFSTNSLFPFVSLCIMVKLRRILGRSSNSI

SEQ ID NO: 151408 - protein, 104 aa, Heterodera glycines
MAGQQKIGPDFVGQKCLVQIQTVQGYQNGVGVVFAWAVFAWGEFLNYNFFLCQPNPIILVSFDSPKCSLLAYKIWKNFVKANSASEGLSKDIKNIGFGWQRKKL

SEQ ID NO: 151409 - protein, 272 aa, Heterodera glycines
MKKIIYYFVLQCCLISTLLADFVERGKEKIPLYYARQSNPKSSIAPIEKEFLADSSEMDKNEQTMADLITLYLNEKKKPSTESNGKTMAELFNMESIEKKEFNEFLNEITENEHLIDIVFEPHQTGQSNKLETQQKINEKMTEKLRKLSAIKENDPVMSQIIEKLSIFIKEVKSGNVLNSLKEYLLFVIKICIMREQIPLSEIITNKKFETKLMAKLVKLLLEEKRKNNQHKKEKNDERTNKSNGKQILGLMHSAVENLNIAANIKYECKNN

SEQ ID NO: 151410 - protein, 182 aa, Heterodera glycines
MKLKKIAQIFQNFSSFYLLHPPLLHRPPYDKGGGQQQTGRGGVGAVQQRQSEGGVGAVQQQQIGDGVGAVQQRQIGEGVGAVQQQRTVGGGVRAVQQQQIGEGVGAVQQQRTVGGGVGAVQQRRTVGGGVRAVQQQQIGEGVGAVQQQRTVGGGVGAVQQRRTVGGGVRAVQQRQTGGEVPF

SEQ ID NO: 151411 - protein, 766 aa, Heterodera glycines
MSKNIGQNGRNRTEQLTVGEEAAAAPMGGNWAQRKTTPPGVWRESGEGPESVRRTLKKEVGTGGGPSAGQEITGWFQRHSVEANRSEQQPRKGKALEEFDYCWRGDKAKRTESDDGMGNEWLKRQFAAENIRKRENEQKTEIIERQRERCENGEEKGNPWDYLGRKNETNGEKKLEEEIDKLFEQLGLLDRKHLMNNGEFKSIFESMRKHLPTKETQQKQQQQSIGQGQQSFCFTTNGAQKTERQQNAYKKGRRETLLGRSASNNALAERANGTTTTQSSSSASASLLLSSLSNGEKRQQQRRQSLPKNQPKYGGNLENFWQSVGVSFTSFYPNHSQMVKTRAAETSPSKQRLPLGLSSVEKLQGICQFTNQTVEEPNQPINVYPRRYGGVIETVAMRRNNYLMEAARTASPSGTSTPTTNSGRATPNFSCGRFGPNRLNGQNVRISIQQSIQIGLSVDRRSIKHGLFGLGDSVRKRMSKERENRKGCGRFPTVTEEEKGEAVEALANQNGTIIISIGQPQKIGNGNLRMDSQRQQRTSRSPDNVSAKPTTLPQPTPKHNLRDKLISAGFPISCQTTSFFGGNAKNPFYGQKQPDDHQKQKQQSNSAPNFPLTNTVISRVNLFESQQQVDKSATDTERVPIKPTSVASEVGNLSQHSLETNRQHLDIVNGTTSGNGQLSPRSSVFRTKSVIVFDFDNLGGTPTKAMAKEQAEENKRKSGGKTKEQPKAKQQKKEEQRRTTAKGEEQNAKKVKLIKQIEKGSKEKRK

SEQ ID NO: 151412 - protein, 226 aa, Heterodera glycines
MITAGGSIQTEMQNPNNFISKMSNQINRMPQNSLAFADENHNPNLNNENTPPNTRTNTSSSEQNGRPGRTRRVTPVASPLRPINANNDGGNDAVHQPRQSTNIGNLSNNNNNYIEEIVQHYMRNNMEYMITTYSGLNDQTLQSAMNEQQQQQQRSVATTTGSADSSNSIEYLKQQMQDNECCDSENNDGETNCTICLEKITPTSHAKQLTSCQVFKIWKKLFIKEN

SEQ ID NO: 151413 - protein, 107 aa, Heterodera glycines
MQQHWNNSSKQKDIGKLKKKTKKKKEKMEENWERKSKKKRKKKLKKEIEEEKNKIGNLETKIKTNKEKAKRETKSIWEKFKEMKKHFANKLEANNSNVGEGGAKEIA

SEQ ID NO: 151414 - protein, 42 aa, Heterodera glycines
QTERASLALSISLIWAVEVCSLRSSDKSCRKAPEVMLKWAPI

SEQ ID NO: 151415 - protein, 39 aa, Heterodera glycines
FVRAAFFCEAANRFLLNCAPKLKDGKVRHKKTNERSIEG

SEQ ID NO: 151416 - protein, 163 aa, Heterodera glycines
MDSYILQDQFSFPVNLYSFYHFKRAENANAKSVLTDEAATTAMHCQAHSFCCNEGASVAHKLVIGVSANSFEDEKKMAHKKLEEENNENRTNGKGVVGTAKAEETAKEEKGEEKQCQTEEAAKCQQTQQQRQQPFCIRLNSSPMSPKLEAKNGQRFKKAISDF

SEQ ID NO: 151417 - protein, 45 aa, Heterodera glycines
MPKSAAKEAPVGGRQQHKTMNAKNGSGGGSTELMRFILDDKLETS

SEQ ID NO: 151418 - protein, 86 aa, Heterodera glycines
MKTRSFDWEPENPTLENPTLENPTPENPTLENPTLENPTQAENPTPVENPTPENPTLEKPTLENPTQAENPTPENPTLEKPTPTKF

SEQ ID NO: 151419 - protein, 35 aa, Heterodera glycines
MTFLKYSLRNEKFSKIRLKNLFIYFLDQLHLCCRN

SEQ ID NO: 151420 - protein, 22 aa, Heterodera glycines
MGALSTHQISFGNPTDTWGPSF

SEQ ID NO: 151421 - protein, 414 aa, Heterodera glycines
RWLDSDCASSDGNGFHIICIALQELPFAQFLRVTDINNTWSLHITSWMNAHNLALASELYVASNALLIYFSWNMLNMVLHIIEFYYYKYLYSTNTDFPPKVDSIEDRWIRDSIFGKGTMSTKIAFRNKTVLVFVTSHFFADTKFHMERIKQYQVGRRCTFPEEKSAKKFVIWQGDLNSRIEGIANATELIQRLNSMEEGDEMKAEIAKLLQSHDQLTKARAKREAFGEFTEAEIGFKPTYRTLVRSGAYDSLRVPSWCDRILCEGDMDALRITKYSSCPSITLSDHFPVSAQFELHFQKEKRHQLSEVEQRLQTLSLMEAEHRQSSPWLIRVEHIPTWEEFIPLVCRIAIPNDIWADLCSYRDWIGIYHNSLNSITKPLEWMYTFSCPTDDERRIDTERTLIVEFQPLKSGFYR

SEQ ID NO: 151422 - protein, 416 aa, Heterodera glycines
MILIIALRDEFTDLRQKCLQRLEDSRTSGRSTSLQELGEECRKYQILKESALSLGSNPCSTSAIRAKPQQIRDKQKSKSRPQQSQKGHFQPNNSTAIEKEVDLPDQPCYSCGGKNHWQKDCWFKNSKCEKCGRIGHIAKRCKNGTETRRVRAVATNSGNDMHIHTVSLQPTCKAIEGSSNKWWRIVTEINGMENPMNVDTAAQITVITTDSWQKLGKPKLGKTTIAVKNCNEKAFAIKGKFNCQVSYNGRTAKLIAYVSDEIHQDLLGMPWIEELEIIPKELMFPNSSQITNSVPMKHQKMPPVNFKNFGKFQQKHQKMKRQFNDKNGAKTITFQNGEPVFIWNLKGNKANWLPATIIERVGNSPTYRVDVPTLRCAVHRLVNQIRRRFPMEMETSQIGQANGNILAGNQPNRTPH

SEQ ID NO: 151423 - protein, 387 aa, Heterodera glycines
EQHKLSSLPLELLFHLFDSATVADLQNISLISHSHLFKMLGYLTSINFSKRFASLLNASFVSSGGTDNSKKHCDRIEKSVSEYARLIRICHIFRTREECICFTVNLFSKLNYVINRKGFECFGAIWGILITEVNGLGGGFRLSCPLVSQISANWSQKEFFTLMQTLINSFGLAERVDPVLRSEVDLIKFPMCSIVSFSKDTLWGEELLLRRLLRGLFFDHRCPSSSVSVPCQTPRRFSPHNASFRLSALLRLLAPDSLLTAHRLLLIVGAPIGVSVAHGQINDTENNEISAGKEFVDYQRIYTEPIGDLDSAHAILGELPSMVSLLLETSDAVESEELRWNDLEVFNCLEMLTMAGQLFDMDLLRIALEISRQVAEMFLSHLHFILV

SEQ ID NO: 151424 - protein, 87 aa, Heterodera glycines
VSYGICAALFLWQFFTRFRHNVLLSEHISAGFSSEGCVRLGFSFWLLISAVLAQFAPCVLLFWALKGRKKQTNEEQKSKEQDTVFLY

SEQ ID NO: 151425 - protein, 127 aa, Heterodera glycines
MAISRAYFMARQICQNEEFFLRHEIKIGLNPDISLTGNSIGAAAMLATVSLAKKRPVRMDTIVTGAVEHNGDIDGVGEIIPKVEGAVQHGLSRIVVPLLNGHEVADLAGIEIIPIVDCQEVVDEMMC

SEQ ID NO: 151426 - protein, 50 aa, Heterodera glycines
MSGSTSCLASDDVPTFCTGTMGAQPDGTETACRLAATARQALLDEGRIGG

SEQ ID NO: 151427 - protein, 98 aa, Heterodera glycines
MIYRRQLWKDIKKEKTREKFIETSKKLEYEIKKYLTNRENKFLSGLDPKQRCHVISSEVISPVIDFANYVKKLYTFWGPVVPIGTAVENFENLSDITL

SEQ ID NO: 151428 - protein, 119 aa, Heterodera glycines
FSQSVPEASFFEARPHLSNFVVPAKECSRASHGQKRLASHKPELKDMMRRYAEVTYADAHKKPNEGFVCFANRDDMRRAIDKFQAVLVRRVLVLAHLVPARLVLAPALLHLLAVTRVRP

SEQ ID NO: 151429 - protein, 76 aa, Heterodera glycines
MADVSQDDILVVEGAIDNDQVNSINWHTLMTCTIKTLKNLVERTYNKFGQIDVLLSDYTYYSTIKNALGCEKRKMV

SEQ ID NO: 151430 - protein, 68 aa, Heterodera glycines
SELDLKIPIVCRLQGTRVEDAKALIANSKMRILACDSLQEAAKMAVKLSSIVTLAKEAAVDVKFELSI

SEQ ID NO: 151431 - protein, 88 aa, Heterodera glycines
MNCSNLWRNRWHFGNGSGNALCTRLWLVGIELEPKRPNNSFKGKMKANLKKKFDERVKSDFQNGLFQNVWLKSEIAERKDLQKWWAKA

SEQ ID NO: 151432 - protein, 232 aa, Heterodera glycines
YFDHSVITFLNANKQIFDRIGTKLELCVTNAQQSLDAFSREVLPIFAPTIRHFIFNDVHDLVNLRSLISPTILTNFTRLSFIESICLCPAGVFADDFGGPNATSAGQILSKWLHTPSKDGQPKRMRCSDYLDGSKLAWVNNFKEAFRRATTSVSYNIQITVYKETTPIEQFKLMNERTKEKLTLSKESSENNWMLKRCQNIGKTNQKQQQKKDENLEHLNRVYIRLYENCIG

SEQ ID NO: 151433 - protein, 252 aa, Heterodera glycines
QKKAKEPLKAMPTQKAEEASTGSEKTGQSVVSVRPPNVPTTAPVASNPPISAEQNIASITLTPSDVKTPAPVYTTFLVTSKTPIKAGQNAASVRPPVPANTSSRTIFECRQIILVLASSKHVKAQGTVSKKPSKASSSHTSLKVPDDLVSAIKSHVPSFLHDLASQITGRMDQSSASAMSSDSESSTEESSSSEMTERTDRSAISVRHSSVKKSVPVPPRPPVKAGQNAVSVRPPNVKTTTPGRLNQQEIIY

SEQ ID NO: 151434 - protein, 131 aa, Heterodera glycines
MPPKKDHSVVQKPVKTDQSVAYRSTTASSLIIFLRERNRIISAVQKAGPSDLSAVFIQNSLQVSDSDGSRREKVNDPNYETLELIDHGIFMGENTNDTDLKAVGAQNPNYATLRNLDLNIFVRGPTPSKPK

SEQ ID NO: 151435 - protein, 147 aa, Heterodera glycines
MLLALTSVDTRNALLCAAVPSIGAFVGSTMAIKDQELVQFLKVQVQPFKLTANAVVLAGLSVATSVAFYNIDKISAYWTMPFTLWAIFCAGLTVKANCCAGTNSKLMTNEAASCASEKGTNSKLTNYEAASCASEKSENKNEGSCYV

SEQ ID NO: 151436 - protein, 31 aa, Heterodera glycines
MNKNDSNFGWTKKEFTAKFKLNETLYKGAIY

SEQ ID NO: 151437 - protein, 144 aa, Heterodera glycines
NHEDGRSERIELEALKVFEEVFCGTLEEFDGLNRELNVDELAKAFEELLCGTLKEFDGFNRELNVDELAKAFEEVLCGNGKVPDELNPAEVLEGFDLKKVFLDWNGLLDEPEAIDGCWSKNANLIGIEPTFCFNVLLLELSGNR

SEQ ID NO: 151438 - protein, 197 aa, Heterodera glycines
MYHQCPPFCASHLFDIICHLCHCAKDGKDKQKGEKIDVEMLKKLMDDNEYLRLSVEQQYSVYKSAKSGNIMSTSYKAHGRTTIETDIFVWWKEVGAQFPDLFLLARIIHSIPATSVSSERLFSKAGLIYGNSLRNRYFRFLISVKPRNLSLSGEMAQKILLIKANMDQLFLAPSTEPDAEGKELEIDYLEINDDDFC

SEQ ID NO: 151439 - protein, 25 aa, Heterodera glycines
MSAIICIKAHEIEKADFPIHLTNFY

SEQ ID NO: 151440 - protein, 438 aa, Heterodera glycines
MGANESVPIPGGGSEGYHVLRVQENSPGQMAGLEPFFDFIVAIGNTRLDKDNDSLKEILKQNINKPLELTVYNSKTQTVRETQIVPSQNWGGQGVLGVSIRFCSFEGANQNVWHIISVSPNSPAELAGLHANSDYVLGAESVLQQADDLIAFVQANIGKPLKLYVYNVDSDSVREVILTPNGSWGGEGCLGCDIGYGYLHRIPISVDRSKPCGDMQPLLPSHQMEMPKQSSSSLPPPQTGIPQMDQLISSQSYDSGNAAKFELHGLPPHQPTPRQVDEPIGPPSFGQLRETPISAPTPSVMSMVQPQLHSSSLDSVPLSVPPVTHHQHQEQQQPQIQPLHQTPPPPIHTSTYQPYLAYGAPPMHAFQPPQQQQQYQVGCESNVCFAFYVSGAKCATAHSIGTATISCAKSAVFLLPSFISAPTATETDVFKCLLSIST

SEQ ID NO: 151441 - protein, 127 aa, Heterodera glycines
MSSIEIEAADVVRLVQQYLKENNLIIVELAELRELGSARLILRQTDPMALLKQADPERYTRLENLLAKTYFDPREVYPEGGSKEKRRAAVAQSLSAEVHVVPPSRLLSLLAQALKWQQHQGLLPPVG

SEQ ID NO: 151442 - protein, 159 aa, Heterodera glycines
VQSQFWESWKEFEVKHGNEDTIREMLRVKRSVQATYNTNVNYMSAQMMATLGSQTEMAGELSAADSMAQLEARAAQIAQEEALIAAKKVLPATDGRISFVRGEGRTTTEARAENPEEIDIDQIVDDEGGEEEDDENAMDHGDGTAAKSADDGQRETAEA

SEQ ID NO: 151443 - protein, 41 aa, Heterodera glycines
MEYVLKLRGLTLNYDVINNQGFRYKNSKSNVMLKQERLNQL

SEQ ID NO: 151444 - protein, 68 aa, Heterodera glycines
MAEQSAFQSKLMLLRLKKVTHLPIDTDIKGNGEKEAEFPLTDFTSIMMYLILENIWDNSSIDVMAIED

SEQ ID NO: 151445 - protein, 63 aa, Heterodera glycines; identical to SEQ ID NO: 130392

SEQ ID NO: 151446 - protein, 216 aa, Heterodera glycines
MVLQQKINPTEELLGVNRSVQSNGDEGMEMVGMTEIRYEQKQQVAAGGLCCCCIPCGFFKESSHEEPPKIFKFFMTKKKTPQPPPAAEVVQPQNSVPSPPKALPVENYTLNATFTKEAARGYAKMTFKKSKKRAAPTKQPKLVRISIFFAFPLAKFPLLLGFVLQSAQRNFGVGKHQKPSVNGKPCRFVEKQTRNGFSLRKTLTTHLSSAIIFKIV

SEQ ID NO: 151447 - protein, 47 aa, Heterodera glycines
GIKNDDQLKRNKIRRRMEEQRERRANDEGENWAEGDDDKPPEEQQLY

SEQ ID NO: 151448 - protein, 115 aa, Heterodera glycines
IFGNADKILTGKLGRRNGQSDDEKEEEEEKQEAEGEEFVGEENEDEEEEEDRMEALLEELEGTTDEMEEEGEEEELFDSEEEEKRTTEEEEALGGKKGTILLSNNKTTMLPMAKN

SEQ ID NO: 151449 - protein, 229 aa, Heterodera glycines
MKILLLYFLLFSIFQLNQSESENKKLQQQKSFDEIFGEKWEEKEEEKRNELKKREIIGKFYKIKEKIKQKGRKYSRKEWNKIEEKIAKKLETNRKKIYEWIKELGLNQKIQKSYKRKTDEEKLEIVQKFIGMSNEYKQKERNYSPKEWQKIYAEICKKIGVSLSVIKKWKKQFGMSKFITEKEKLEKMKIYWKIKRENPKMSDKEIAKILKIDRTTISKWKKQFGEELF

SEQ ID NO: 151450 - protein, 84 aa, Heterodera glycines
KEWHQNYAEICKKIGVSKGTIIKWKKQFGMSKFITQKEKLEKMKIYWKIKRENPKMSDKEIAKILKIDRTTISKWKKQFGEELF

SEQ ID NO: 151451 - protein, 42 aa, Heterodera glycines
MAPRDDSSNNTNGQPVIQFDQQIRQDPGLNAVFDFVREQGAR

SEQ ID NO: 151452 - protein, 28 aa, Heterodera glycines
MAASSSLFLAVALACLVTSAYTYDSKYV

SEQ ID NO: 151453 - protein, 107 aa, Heterodera glycines
MGGDEQQQKQRLGEGQKMIETKKEEEIGQKEEEEKKEQSEEKKEEQREEKREEEGEKEENREKEEPKEEEEKEAQKEQWEERQQKRRFVKQRKCQNSVPLANWAFNI

SEQ ID NO: 151454 - protein, 121 aa, Heterodera glycines
MSAPGSLACAKMLYPETEQSQLVNVDELELPAGEESSALECISNGAIMAVELVLAIVANIIVFLALLALLNSVLSWLGHLVGQSDWTFELILGYLFFPLAFVMGITNPEETFRVAQLMGTK

SEQ ID NO: 151455 - protein, 167 aa, Heterodera glycines
MTSAGFLQILRLLLAVSLLVTCCHGQKERKPKTGTTKTSTTTTTTTTTTTTTLPKMTTPNNTAANGGGGSGNTLLFILLGVGVFVALAVAVVVAVVVWRRRQARTDSYAVDGGDAAKGAPAAAGANGAKKDAAKGGSSSSQTASVEKFSAVSSVPSSLKSTTAEDKK

SEQ ID NO: 151456 - protein, 213 aa, Heterodera glycines
MVRVERDREFGQNRDLGGPGIWAKPRPRRTGNLGKTETSEDREFGQNRDLGGPGIWAKPGPRRTGNLGKTETSEDREFGQNRDLGGPGIWAKPGPRRTGNLGKTGTSEDREFGQNRDLGGPGIWAKPGPRRTGNLGKTGTSEDREFGQNRDLGGPGIWAKPGPRRTGNLGKTGTSEDREFGQNRDLGGPGIWAKPGPRRTGNSRPGPAQLYLW

SEQ ID NO: 151457 - protein, 176 aa, Heterodera glycines
MAADTENEVLAACPQIVFAKLLYVDNCRFLFADHLDGVSALPEAQLRTKLAKIQWPTRTFWNIDRQRRLTENGSLEAAELAFLLQHNKRRRTTLIAPNDDHNEDDDDDNYAVATFRFLLDERHTLDQFLCQFSLMIDEMPQTEAEMLQISSTKFDIDEKWAQHLANALTERRFAMT

SEQ ID NO: 151458 - protein, 126 aa, Heterodera glycines
MSPVGVAAVPSLLYCSKLMAQRRPWTNRMPSAPISSRVPINGWPMGTKLCGFRYGLDVVLKYLFTLYVGAFKAMNGCPAADFGQSVHIEHRHGTRLRQVIFDQIQREIVAADQQRLDGRIWPENVP

SEQ ID NO: 151459 - protein, 33 aa, Heterodera glycines
AVGSLPPQAPQIVPSSCRRPQFGRLPDRKTAHL

SEQ ID NO: 151460 - protein, 97 aa, Heterodera glycines
MKKVIPYPTPTSGVQPFELKREGPTDGVRSIHMYFVAFFAFKALDGSVPKAFGHFRSGSVTLQGLVSAKIFFRILQLQTERYQMIYMSAILASGAYD

SEQ ID NO: 151461 - protein, 261 aa, Heterodera glycines
FFFLRPYMRKQSIQNKFTAKLGGLALFKDEDEDDISMAAGGASFISAYTTPGPKERATSAKKKANLGVMFGVYLPTIQHILGVTMFIRLFWVVGVAGIWVVGVAGIWHTMLLLLLCCACTLLTSISLSAVATNGVVESGGAYFMISRGVVESGGAYFMISRNLGAEFGSAIGILFYLANTVATSMYLVGGVEVFLLYIYPGMTVGGVEVFLLYIYPGMTIGGEAVHSDVCKYEMDLNRFKIYGKIFIFLCIKFILYFILFI

SEQ ID NO: 151462 - protein, 367 aa, Heterodera glycines
SDSMFGMMSHNYRIYGTILLLLECVIVALGVRFVQLLAPVSLLCVILSILACFAGGIEKAVVGDGQHVCMLEDHLLNSRILNLPPGEDILNICNYCKKGDHIADQFCEGNTTTEVCQTYTGGSLKCVNAFPGFNSALMHANMNPKYMQAGQAVEREPKADRSGQAVEREPKADRSREVFQDVSTSFFLLLAIYFPAVTGIMTGTNMSGIMTGTNMSGDLKDPQRSIPSGTITATLTTSFIYYALAILFGASIIGPVLRDKNGKSIDGSLVVASLSWPSPWVVIVGSFLSTFGAALQCLCSAPRLLQSIAKDNVIPMLAPFARVTKNNEPFLLLITTVIAELAILLGGIEFFRFFIIPFTFRITFFLN

SEQ ID NO: 151463 - protein, 42 aa, Heterodera glycines
TRTAPELFPRISESSFCKRRDEAVIVKKSNLSFLKIKMKRKF

SEQ ID NO: 151464 - protein, 79 aa, Heterodera glycines
MRHKRQKFANSILHMKYEFDYLSNNWPEIFEKNSKWDLPGTEKPGQEKTEPEKLGSEKPAPKSRDRLEAGTEKSGPEKL

SEQ ID NO: 151465 - protein, 401 aa, Heterodera glycines
AGQRRGKVAATRQSQFGKETDKTENERKKKMAINGSYVEHHLSYVEHHLTLDELRDVHPDSFIDVTSPEKSDGLSSEEAKKRLLDGGANVLAPPKKRLLDGGANVLAPPKRISNLQFNNYLSGAALCTIFTYFINLYHGTEELLNLYCAFILIVIVVVMSFMSFWQERKAIQVKKRRTELEIRNCSVIRDCEEKSLQPDNLVVGDVIIIRSGQQVPADIRILQSTGVKIESSAITGEPQPVDYTHEPAAAHISLFDARNVALRGCYCTEGEAVGLVIRAGKYTMLGNFTHLQSTVKLTETLLQKEIAKFVQFVSIVALSMGVIFFLIGCIVTKFENVLYHFVTGFLFENVLYHFVTGFLIIIVANVPQGLPAMLISQMAIIVANVPQGLPAMLISQMAIIA

SEQ ID NO: 151466 - protein, 399 aa, Heterodera glycines
MSGPIQKGIINALKALDNAKSATSLILHPDPDLSNWENAVNLEAQFDRVVKEIRTMEMQMDSLRDSSNAWIELLARLTGDDKDNGEKEYIKFDKNEKIAERYDAASTKLRDLRDLEATLSAAAKLHRGRADREAKADQLANPQQQPPMPPAMAAPMTMPTFTAPLYQFQPIQLDKFFGQKRKWPEFYESFKSAIGSQSISKAQKLNLLRNLLGGEARELIAGFRLEDANYETVLQLLKDTYGAPEEHIRSLHFELANLKPCRSLRETKDFLLQLERLTRELNNAGEDIEGPQVFLMLEKKLTPPFLRSILTKKGEDPANWTTTKFRDVLTEAVRKEVQIQEVMGEYGHHYVQPKAEVVSAAPVQAPRTPNQRSRRPNQPMALRDMTFIASSLDEGHRHQ

SEQ ID NO: 151467 - protein, 43 aa, Heterodera glycines; identical to SEQ ID NO: 131356

SEQ ID NO: 151468 - protein, 120 aa, Heterodera glycines
FDGADELCRPIDGTPFHEHCRHSAVVKHKGFVPRHLRSPWLNSPLFDDNELSSGENTCYACYKGTKASNGMAPGEEYCACTMPGCGNKYYDHVKHCAMVNFYENEPDKNPKEDPPNERRN

SEQ ID NO: 151469 - protein, 60 aa, Heterodera glycines
SHLSQCVHQRRDGIPGLDHPMGPFLREFMSSFPMFPISPSALPNCPVPTPARPPRTAALL

SEQ ID NO: 151470 - protein, 33 aa, Heterodera glycines
MRLFNCPNAIGEKVAKQLLRALSKSKHPLMGTV

SEQ ID NO: 151471 - protein, 1227 aa, Heterodera glycines
MDEILPLRPVDFLQPEVQINWDTNGEEFDPSDRNLSSHQKLVALFQATKESHEFFWEMWQKEYLLLLRERGKWDHKSPRLQDKTEPKEGMIVLIHEEFTPRNQWSLGKIIELNGRPGAIRSVQLELPIHGIKSKRYGTMPRKIIITRPVNKIFPLEVGLDNPIENEEKFEESSNETPQITNEKEISHLEAPMDEKETETLQLVDQPIDQNRHGMITRSKAKMGTVLNCLSILFAMFALLCCAENCYIHENVKKLTYELPKEILLNDFKCEGHFWMDSKHMFKKDILCPAVDECELIECYFCIEQLANPTCYPLISSMLAGGLCLSFMSISFVAFSILKVLFSGLYMVIWLIIQFIRPIIYLAGPNRPPKERRPRATASQNWTSRRVYRTMAFVVLMANSLQDLTGAETIAVMAKSEKCIKNATSMRCIVENSATLTLLPVGQTNTLLLKTEEGVLLGSINVVLKALALECQSFTKAWLRSYAINVLAGKRCPKMGSCEGKYCGEVRHNTSIPELKDANDYPGNSFCLDSTAFWGNKCLLGGSACLFYRWFARKKSKTVYEIMGCNSWEFIVYTIIRLETLGEKPKSTQVFLYPGRTLRWNNISLTPIGVTFPPAPVLNSDFVFDGSNMALTREPLTIDFNCKSRQEAIDFNCSLGVQACTDCIPDHSSGLVNCNCRSHNLEKLMESPERRLPLNIKNYQLRNTGRKVIALTGFSPVQLNLQIEGLQMALELHQSLCTILPLNISGCYRCSTGAQFRYVCSTNFGNSLAEINCDDGTHFSTKCDSNASIYQTILAFDKARIETKCQTKCLAGNTSFVLRGTLHYVQPEQIEDYSPNHSERVINSQSSWPNWNFDWKATLWSLIGLQSSLIFIMIICVGIVCLTIFMKLSPFYRLWKFISWSITRKGYGNVPIVLAILYLAGGGSFGCGVESRPILSAVKKFCESSLVVGNDSSLPSNGGIKGWRICHPNTLFKSSFHGMPIPIREGPYFSASRVVIPENAEILNDRLFGDENPHRDPWFEEDWEPVLPLVPDHVDRRLRDPRLEEEEEERANDAHLRRERRVHGRIEPLSSWIERYHEPRWYETALDRRAVEERLRGELREGATLFSEHVGPIRDIHFDGFTCYGPENLYLFRGRSVMDHYQRMGHEIDPFMPCLQEYVGFSPHEGGMLVDLYLVELVNIRNRVGVAWRAPAVVEEPHLPPPDQAQLPDGRLENRPPRVARRLQMNRR

SEQ ID NO: 151472 - protein, 211 aa, Heterodera glycines
CLLGGSACLFYRWFARKKSKTVYEIMGCNSWEFIVYTIIRLETLGEKPKSTQVFLYPGRTLRWNNISLTPIGVTFPPAPVLNSDFVFDGSNMALTREPLTIDFNCKSRQEAIDFNCSLGVQACTDCIPDHSSGLVNCNCRSHNLEKLMESPERRLPLNIKNYQLRNTGRKVIALTGFSPVQLNLQIEGLQMALELHQSLCTILPLNISGCY

SEQ ID NO: 151473 - protein, 29 aa, Heterodera glycines
MDLKCFIHLPCGLVLGCSINKKPKGTTIN

SEQ ID NO: 151474 - protein, 37 aa, Heterodera glycines
MSPFRFLMMLLVALVAAMAMGSGVAEQLRTCVKNDLE

SEQ ID NO: 151475 - protein, 27 aa, Heterodera glycines
MTYKTEQIQNFQQFLQKKEKQWTKRST

SEQ ID NO: 151476 - protein, 96 aa, Heterodera glycines
RDPAVINLKWVLQMISARLAATSAQRFMVDIVPELSFIFKSNAFKAGDHCQRLEEFDRKKAVPPVAHFLHPHLLLPQKPRKRKKRTTFHADLYENK

SEQ ID NO: 151477 - protein, 123 aa, Heterodera glycines
MRLGRVRPGARPFAKPMLRPALRFQVLRKTLEIFVETLSFFSLHRCVDSMKRLAYMYCKRIYLKVKPAQLIQIDDCEKAAKSCDCGWYSCIPHPGQSSTPCCAEHYNFTCCVKANRASERAFE

SEQ ID NO: 151478 - protein, 192 aa, Heterodera glycines
MVNLVDFDKSYGQFFVENFHLMVFYLICPTNGGPNSRDKRQGEPGGNTGGDGKKTDGKGGKNPKKAGKGKGGDGASFSLGDASVFLPDGKLGDTMCNYHLSKGKSMLLGPFENAPFIGTAFDFVVSAALPQMPHSGDENDKDKLAGPMCKADHGCDWGKCHPSAGKTASTCCADGFVFICCKDVGGDKDTCG

SEQ ID NO: 151479 - protein, 125 aa, Heterodera glycines
MAKINSLSTFSLLIALISALDSAVVRQQRAADAAASKPEPNNEKPGTVDSDKAKPDKSQGADTEEKDPEKPKESQEVEEDGPDPKKPKESQEVEEDGPDPEDPNKQESQEVEDTGNDPENPKILN

SEQ ID NO: 151480 - protein, 37 aa, Heterodera glycines
MTKDCIPGMTSEQGFTQLDFNYGNPSSIKLVKKALLK

SEQ ID NO: 151481 - protein, 15 aa, Heterodera glycines
MSDVCTRDGMKFRQF

SEQ ID NO: 151482 - protein, 47 aa, Heterodera glycines
MGFMIANVFIFVLTSSFYDHSVNAERDLKLVEMDVTFVISDPHDPRE

SEQ ID NO: 151483 - protein, 23 aa, Heterodera glycines
MQIVWITRVSAFLCQTFDSKIFR

SEQ ID NO: 151484 - protein, 99 aa, Heterodera glycines
MKMRHASAKQSIMTATQRVAGNKQADCDAENRICWNKSPPKPDNNCPFNTTYVFVPSEGYEKMQEKACKKQKKTFKQIPADDELCRQMPQLIHDAIPFP

SEQ ID NO: 151485 - protein, 43 aa, Heterodera glycines
MNSKTAENQKVNGRPNGKSKKINRPKRNAIGKENIEPNGDTNR

SEQ ID NO: 151486 - protein, 52 aa, Heterodera glycines
MATRHFLAHGGYIMRNWSTNARAVVQPLIIAFLSRFAAYQNSFKIDLAMMSV

SEQ ID NO: 151487 - protein, 123 aa, Heterodera glycines
MSTTDGVFTQFYKAMTVKNGGWRSSKCLKEGPPPHSLFEQGMPPQLYDTAYVPKRRRDKPYEKRVGTFVFPLDIIEPCRSLLPDAVHADGVTGRAVKKRKTEEWTEGGVAWKERGNESKSERK

SEQ ID NO: 151488 - protein, 250 aa, Heterodera glycines
MDIDGEPMADTGKKYNPSEENIGIFAGREDIDGIPMDGAEEAAAEEDIDGVPMEEGEAAMSKSEATKVNLESDDRFTVRSWNTVEIEAGTTADTNLAVGGEIGSGSDVKSKWESIDLHSRWERHEGVAREFVQQQQREDEDGENSPRRKRHRLSRLSPDDEHSKPNGATAADSVTSSAVSTDDEDRRRILREIEVKVMKLQDQLETEGEMPSSEINAELAKYRQRLMAKLDEKTTKTKGERKKATEQKEN

SEQ ID NO: 151489 - protein, 230 aa, Heterodera glycines
SNATAIFTNSGTKSEVESKRTSEFCATKSGHRPSFRQKWKKVEWTPKNIPPNVENQIIRNCDEKGHKKFSPKEQLGKNFEVRKGGGENSEKCGRIFLGKKSEVQLGTIEILEGGEELKRKRMNLDRKNQQEKVRLNVSSGGSQSNFGENGKNLNSFRRKCVFWPMRAEADQMSRETLPFDRGWVELTASCPDSTSTSADRQPMMRGLRCNGSELIPNGPHLSTAGCGMCS

SEQ ID NO: 151490 - protein, 32 aa, Heterodera glycines
PLDPGLEEPGFFLDLDFCPGNQGPGPTWNPGP

SEQ ID NO: 151491 - protein, 25 aa, Heterodera glycines
MNGVGQRNGATFAKAFALCELARPQ

SEQ ID NO: 151492 - protein, 105 aa, Heterodera glycines
MPWQMSPRFSVQLRSLWTGPSSPLLQPTPILCAVSDDRQQQQQQPQQRSLSSCSPTHFGNKQSPHLPPDEQPNFISRAEFDQYKEEQERKLAALQDELKELRDKM

SEQ ID NO: 151493 - protein, 18 aa, Heterodera glycines
MVSHRANDFLANLFVLSI

SEQ ID NO: 151494 - protein, 627 aa, Heterodera glycines
MSNLNPGNWWYYFERQGKSTAKCKADGCSYSKTLNASLSTTVLASHLKNHHPQLYKQREDFVQEEKQKTEKKGQSGINPLKRAFANAFCGSSQQITDDEEKEEPISSKSPILIGLNAKSQWSTDGDATIGANRALMEMLATQLLPFNLVDGVGFRQFVGKLQPKYKIPRRNHFAQYELPNCFKAMKKIVTDELLPVNKIALTADGWTSKDNRHSLISVTGHFLDQKFKPKFFVLSTKPIRGRHTAEAIVSFIREALNDFQIQEEKISALTRDTENTMKKCIKEGLRSIEEEERLKNLLENVKRFVRKVRKSRVLTEQLAELQQKEEVPPTVLIKNVEVRWNSSYKMIERFIRNRSAVNLLSIEHYQLPKFNADDWLLLSSISVLSPIYEATVLLQDRNSSCSTIIPLFKAISFGLREDKDNRFSNIKKTIANAIELRLKQAEEQKNLVLATILDPRFKTIYLDSSRLNQYKDWLISEVESYHAKTDEIDLQNDVRDCSGSSSGDIFSRFEKDAEFDQLINNATSPSPSALETRQKAEVEVNEYLRDQKIKSRADPSLYWEINSQKWPMIGAVVRKFLSPPATSSETERLFSTAGLISDDLRKSLLPENLAKLLFLHHNLLLTGFSIE

SEQ ID NO: 151495 - protein, 91 aa, Heterodera glycines
MEHDLTSYSATNRGQTRTVMELLELLDKFPGSIRIISLYAGQAAQIGIELKERGLESKIASMASDAMQAHDADLTIIIATVSRHLDRLAAI

SEQ ID NO: 151496 - protein, 232 aa, Heterodera glycines
MLREMEEEREEDEAQEIVLVEEGTARRRRRRRQAQTGHDFPHNQWDPARPVSFVFDAKIVKWEKFFTKESNPQMAGQFVKQSNENNDNFGVKYDYGSVRGKSEFKANLIDQIMHYSDTDSATSRVTMLAKEMNLYYKCTDKCKLSGAQCQNGGYRWEKCQINAEIPLSSPVPLDSHPRNCSKCLCPSGFGAFDCSGRGPPENGAPADCGETVQVKEKPSAKGKGVAGQHLGP

SEQ ID NO: 151497 - protein, 177 aa, Heterodera glycines
MQRIFGSSKPKAPPPNLADAITTIDARGESVEKKIEKLDGELVKLRVQLKKMRDGPAKNMVTQKAFRIMKQKRIFENQRDQLAAQSFNMEQSNFAIQGMKDNQVTVAAMKEGLKSMKQEYKKLDIDKIDTLQDEMEEMLEMNSEIQDALSRQYDTPDTVTDQGVAVDEFGLPKIPAQ

SEQ ID NO: 151498 - protein, 91 aa, Heterodera glycines
MFIYLGITKKILCSDRTWRRSMLYAIVRVKRFEPSQLAGSQLGQQMASKMGQQMATHIRQQLATKAGQQMAAEMGKKIGTNLGKNIVKKGT

SEQ ID NO: 151499 - protein, 206 aa, Heterodera glycines
MTKMYLTINTIETIVKLSRTHRKARHGTNTDEESDGTEEGENSGREKNLNNLRNKKRDEEEEEETEGEKEEDGDENDEEDDESDEEEEDDEEEEHRRKRRPPALSDKEEDNRSFDEFNCAPASAPNADKSEVMDNEFEEDKSGGEEEEEEVGRKVENKLIRSNFQFRAPKEKANVDNRPKTSPKRKSKKKTTEEGAYCNNCPTVCI

SEQ ID NO: 151500 - protein, 45 aa, Heterodera glycines
FRFAYLMKRYWMPSLYWMFLLNGYWEGPANLRKAFGLFSRRPSGK

SEQ ID NO: 151501 - protein, 311 aa, Heterodera glycines
MFNCQICISECVANASNSPRFSSFDQLEAHLAADHFSLLPYECEHCQFAKFPTEFAVMKHNELDHDSRNYSFRCRITPEVKEKRSKMREFLTREKHLNERAEKEQFASSPMEVEKKRKAKDGQTKNAQIKGNDGKEEEKPKRMCLRPRPFNSDGNTTAKNFESANETTVVSFGGEEEEDDEDEDMEGEGSSLTDELKEQQAIGDGQTENRTKIQANVQEILRATAAAVSQFGGPKKQIIPPTNKRRSANNVCPFARQFMCAFLPVQSYSLRPNRFKPYALLHNGIPILTDCENDVLQNAEDSPEMEPSPVN

SEQ ID NO: 151502 - protein, 143 aa, Heterodera glycines
IEGLPSGTESVLLSPSISSIYFPDGAKKTLEELKNFSTGEAVFTFPSTHIKCAGAPLKICFLAEEILRRKGVRSNCSVHYYTALGRIFGVPKYAASLERIVKERGVGLHPRHNLVKVNPEKHEAEFELLDEKGKGTGQRQIVE

SEQ ID NO: 151503 - protein, 436 aa, Heterodera glycines
MALLIMLISIVGTFGCQPSIRASGMDPNLPFREGPRVPCTTECAERGVTNVSGREFNKIEIRCDDGCWATMPKSTDVNYGLPAKKLMHGYPCHDKSWWGSNAPFNTTRRNANRKTGSKTRCYNSWTHASELQLSRGAAGNVANFFIGDEKAGQSPPIAQMNGTGLNRSKKNEGFPFPLALENPGVGPERQRISSSSDSRSRSLADRCQSPASRSSRRDGANSRRRRNQAGQRRKEEPSGAKPSTEGQARSSPLIPPAGEARIAGVSLPPAGASTGGDGSRNPFPQPESRGSVSVSRQPEHPPQETGVKTRFIESRAKSNSRPFGAAQRVGQAPFTTNLVEQLPPVRSCSKGSDKPFTKILSVVPLSKQQIAPPTIGLRATNRSTSDQRARIREANGKLVPLAGGNCSHQQSVYERPIGLRATNEHEFEKLTANWCR

SEQ ID NO: 151504 - protein, 137 aa, Heterodera glycines
MEDLRMRHKLQLHYLDTIVEELERHKIEWKIVRRRQYSDALAQWADLIISAGGDGTFLTASKRISDGRKPVRGFSLSYGQIASAGGRSDQTISRGEFKTELPMDASPAHPGDHFEIDGSPRRTVTFLLIHQPAGELT

SEQ ID NO: 151505 - protein, 141 aa, Heterodera glycines
MAQCEQMELPRKDSICDDQGDQTDDDEVSNMSKKSKFSSDDEEQLNERADAYINGETSHRLALNEVFIGESHAARVSYYDVQVDNGPLTKQKSSGMTICTGTGSTSWSAILQMAFSVRDPVFNATFPKTLIRGFAHKIFLK

SEQ ID NO: 151506 - protein, 51 aa, Heterodera glycines
LQIYWLKLHMRYISKFFDSVRRFDKDGFRLAISRSTFGNWSRIFSAITCNH

SEQ ID NO: 151507 - protein, 104 aa, Heterodera glycines
MALKCHNLFFKCHLWHFEGLLEVAYGLGYVLGPPLGSALFEFGGFGLPLYSVGLSFVVVLVPSIILFSNRRRHYLSIGMCLSIIMGWEGQKMQGYENLATKMPG

SEQ ID NO: 151508 - protein, 99 aa, Heterodera glycines
MARVPLPCQLTEAFHAEAEAKSERKAVILAAKEAAEGTKARSRGEKRAESRWSGRHCRGFGQRLASIAWGWAVGSVSDLFIFGLPTFFVLLGILIGTLA

SEQ ID NO: 151509 - protein, 238 aa, Heterodera glycines
PMRKWDPETKTKSHSFVQKIAALSSTSNCNPLFFQRSAAALELHHWLDECMEQYRLLEKERKKTEAELARHHLGKRISSANSLPIPRLPPAPSRVDRLIVDFFREHARVVTLLAKMEQLRGAPMCEEVHRVSGVCPRRFLHSVPPSDPSPIPRLNSHAPAESSQRTHGHSAAIARRKTANLTNALVCVCKAVLRSRSANWCSLAWTVEANGAEQQVQLQRIVASGFELAPPEIKLRPI

SEQ ID NO: 151510 - protein, 492 aa, Heterodera glycines
LKADFGAETKIAIQSKGANYTDGRMHLVRVIRKDGEVHLQVGTDGDHLSITLTDSEALLGDHLSITLTDSEALLDISESDHFVGGVPPDFPRARFTQDHDIHFDGFFGCIQSVQPNQVAELDLANPERAQRKGTDCTYREGRLSTTERVIGFKNNGGFLKSRGILLDTSSTFSFNLRSRRENAVLFYQSKELHRQKRHKRHGEGDGGSFLAIYLLDGRLSFHLGFESQHSSKRPLVVSSHRYNDGLLHSVFLSRLGKEVQVRIDDREVLVQVRIDDREVLATVLDDDRPIGGIGWAMLIGGFPARLKDPTSNSITSAFCPTSNSITSAFCFGSLSQILLRWLPVLLEAHRGAVLGSCPFEGGDLRTPWSSGGGGGTFATSPSSSLSDELSSDESPLSMDVPMDEAKEEQQMEENVNCWPKMASMRNGVHFGLGDYSHSRLNFESPFPTMTTITFEMRSKKRGIDGLLWTWITFEMRSKKRGIDGLLWTWANY

SEQ ID NO: 151511 - protein, 91 aa, Heterodera glycines
MANSALKPSRERVKREWERRRRTWPQWPGQMINGGSEEDEEEREEEERDGGEEREEEEREDRERDSFDGVEPSKRKSKWTRHLTRWMDSDS

SEQ ID NO: 151512 - protein, 198 aa, Heterodera glycines
VSGVVLFSFALWLQFDPAREFLLRLVHFSESTPFFEIAVYLMLGTSLFIFIAVGIGFSGIWKLERCLLSGFPDDTVMTEYLSKMAQHHYHRDKWVNSAIHTNAFPQNVILGDTSDGFHPILCKFCLSISKHIFMHSTNVAEETVRKTIRSHFGTKRTPKWECQQTAQDARAWHLQPIDSMCNQYKYGSRPFNDSVNWT

SEQ ID NO: 151513 - protein, 136 aa, Heterodera glycines
MTVTSNTEFRLIECVPILEEVAREFGCITPLPNLGSHRDYRVSGCMMIRTLTSLNRLYIFDAEDCIEVNGKYVSYFIAILGEGFLRLTIRLHGNLEHLGNPSAGYVPLKYLFVAGFSKRSLSMNLLSITNSSLSQE

SEQ ID NO: 151514 - protein, 92 aa, Heterodera glycines
TLKCFSTILAHPIPSTIAFIHPIMNAKIIRVPKIACDLSLAKNGVSKNRNYAQKASQTILTLPIPSTIAFIHPIMSAKIIRVPKIACDLSLE

SEQ ID NO: 151515 - protein, 47 aa, Heterodera glycines
MSGSEPVSNEILNNTFCADYGNTRIGNKQDRLESASHWQIGRLMARN

SEQ ID NO: 151516 - protein, 409 aa, Heterodera glycines
DRLQKPDSKKAISKGRNSIYKYIQKFNVNPFEIPNLIYENKCYHNSAEKCELFATLFANSFNNSETDPSNPCLECFISDINFNIIETQNLLKKLPNKNGTSPDNISYKILKICHSSLSTVITDLFRISLDTGSLPDIWKESIVFPLFKKGDKNNPENYRPISLTCSLCRVMERILSKDIYKLKNKKISEFQFGFVRNRSTTSQLITVVEDWYEAIINKNVDCIYIDFQKAFDSVPHELLLYKLEKIGIRGKLLMWIKDFLSNRTCVKIGDDLSSSKKVTSGVPQGSVLGPLLFLIYINDLPDALPSGVRIKLYADDVKLSRVDTEIMHKALHNLSEWANKWQIRISIKKTFVLYLGNKNPKEIYKIDGNIINVVDTIRDLGINIDNKLQFSNHVAQIIKNHIRMRSLFR

SEQ ID NO: 151517 - protein, 414 aa, Heterodera glycines
MDNHPRKRFTNFSIDHILSEPKKPRQSLLINEHGIVHFQAEGASKVVKDYVKKLEKNIEHMAKFHYVKVKSKFIITDLPSTPEAMWTWTFKHYIEEAFADSRERNIEPTHLGCMISSPMLEGGDIPTPVRQMTNNTLDTILNQFKKVAQSKQQKNVSLWGEPFTVTITTLDRNGLPSKRRVNGGARRPIKTAVHHRINDQCLIKIRNNDNQYCLFYALQATMVAKTCNWPRWKFFDYLMQQVNAPMDLVGYDADTFVPQVVDYWNNAQRQHRFAVFIFGSLGQYKPIYKYIDNTYDTPLLLYFNEDHFDGVQKQGGLFGKPYCLECERPYDKMSTHNKTCKARCMLCSRVGPLFPCPSSAGFIKKCKECNKKFTNNGCYQHHLLSGFCKRSKKCKDCGAVWDVVNNTQKGRKGH

SEQ ID NO: 151518 - protein, 59 aa, Heterodera glycines
KLMIYLYKLLLKLSVRVIDDDDSSIHPSFLSLSGKCYSFCRLNVSLTHCLSLIMPMARS

SEQ ID NO: 151519 - protein, 156 aa, Heterodera glycines
MVHGFQKRRNLLKHSCTRCEKTIGFNVIYVKCTRCKGDFCPDSRPMVPPLVIFCTYFLDHCKTYMPYRDLYQIEGSPAEVEAVTKQFLAPNKSYPKLDAFPPAVISACVNKFLMQIRDPLIPYSYGKEICALLDRCLAIDGPILEGFAGIVEDVPV

SEQ ID NO: 151520 - protein, 21 aa, Heterodera glycines
MTSQPIRVLVTGAGWTNWLFS

SEQ ID NO: 151521 - protein, 648 aa, Heterodera glycines
RIALLYRPPNTSASLTKKILNIICNYLEEFIIMGDFNLNAKDITWTEHLLLNRKRDFCEFFNKYGLFLMMNGPTRGSAWLDLIFSSSPDFVNNVLIDIFSSDHLTTNFSQNTNTFTVRNYNSTKLNLLNKLIFNFTLQITQKFTIEDKFNHFYHLFREYVELYLPKITVGQTRKPNYPLSLKLSIKEKARLYKLQKINRDKYKHLYAYKNSNKLFSKNENNFLNKGKNAIYKYINKFTKNFEQIHSINYENQTIFDDYLKAEIFANIFQESFSNSDVPQISSCPSQGPFITDVEFNANEISNILKSLPNRESTSPDEISFKILRNCHLTLSPVISELFRISMDTGKIPEIWKKSIVIPLSKKGDRNDPHNYRPISLTCCLCRVMEKIIAKKHLLPSSEFISEHQFGFVKHRSTNTQLITVLEDWYDSIYGKKNIDCIYVDFRKAFDSLPINILINKLHNIGIKGKLLSWFSEFLRDRSYRVKINNKSSNLHPIQSGVPQGSVLGPLLFLIYINDLPQVIPSGVSIKLFADDVKIYGDERSKLNIALENIGKWANAFGLNISQNKTFILFIGKNNSKQYKLFNNIIINEVESISDLGILIDNKLRFSNHYTKITKAGLFKDSQYGQNFKIPSNGENFFLFNCYFNSLYF

SEQ ID NO: 151522 - protein, 212 aa, Heterodera glycines
GNKENMENAEVSQCFSKFDNKFLFIIGHDNQYRKFKKTNERTDTIYLYCMNCENYNKQNSAGVIGSAIIREGQLDRTHQIMHHLQCKGVPLEQLTAEQIDRNQRRELIQCSADSKSIWREGSDRAREHDTAEDIEIDDPSGISFNYPNWQSVRRAYNRRKMNQIGDCSDPFNQIWTIHGLVRLYLYFYLGILKIETTSGAEWAPLLMALMKR

SEQ ID NO: 151523 - protein, 98 aa, Heterodera glycines
MRRRSPPPLSGHLTLTEVLKNGIRIRPRLSVLKRIANSVLSYPRANYRPWPAQDSRVSTPCRKFNAEHAVGQTLRLAGPKKGSGLLRSNSDWANCAPR

SEQ ID NO: 151524 - protein, 41 aa, Heterodera glycines
MGEYCKTKITVLNDFVARLKIPSTENRTKQQRKGIELLQAN

SEQ ID NO: 151525 - protein, 101 aa, Heterodera glycines
MRLGPAGRALLQRMSSITDPGQIRLDYGTSGWADCRQAQCGHGEGVQVRHGGSRIFGFFVESEIVTSDSCGICFPPGISERCNLTIRNRKAGNVRERNSEN

SEQ ID NO: 151526 - protein, 128 aa, Heterodera glycines
KDRKVCNWLIAFDSLCQLFVVAPFGVNLVGVIFQYSTIDYRICLATLMGATIASYASIMAMFLISVERLLIILYPIRMNSIKKTTVCQCSFASAILCTLFGLVMNLEVFNVWTIINISYDRRLTFEIN

SEQ ID NO: 151527 - protein, 192 aa, Heterodera glycines
MLRSVFLLLLVLLIGWLIASAARNQITDFISFITPLIVNLFIAEPVAHSVMCTNIKSVLIGIVTCVPILASASGAPILLLNSSDYRTAYKKAIMRRKGNSSTVGPLFRPRQIVKNDSLQNFVICSLRFLLYYFLNIYHFFQCQECLIWLTLTKVMGVFVQNFHLMIFHITLLFERGGRILLTLTLPLHHEDR

SEQ ID NO: 151528 - protein, 158 aa, Heterodera glycines
MTTNNAIIHDHPPTARTKTASAQCFPRKIGSFIQCLAQSADQIGGPLIAFPQNFEFGGDFNRTDGTEINGQFQRIKTGKIRKLNLNRQTNYLEWCPILGIEANGNEMFLRDELAAERQGLRRWHGFFAGTNQCRKGRRNGHRKCQICGAIGWPTEKDY

SEQ ID NO: 151529 - protein, 90 aa, Heterodera glycines
MFTATGPPKGFINADPFRSPFSDSFAACAGWKSLHLYQTKHGQSQPHANGTADGGDESPKGPHVTLLQLEVLEGAPDQLDRSDRWGGQKQ

SEQ ID NO: 151530 - protein, 132 aa, Heterodera glycines
MATPSRVRVANEAKDKKRKASVDPCRKRKAAQTVFAHRTLWPTPSAEPVPFRQPNPRRCGAATSRTFAACVQFLHSVARVWAAIGGAKVASPQSFSMSVLSPSILSPSFLNKGTGNIKVSLLSNSSIYSHLS

SEQ ID NO: 151531 - protein, 88 aa, Heterodera glycines
MRSSGVRARRRAAHPPLRPPPPSPRPPPPSPRPPPPSPRPPPPSPRPPPPPQKSHGHGNGPYWCLGLWCRYRRSRTGPDDVESQAPVA

SEQ ID NO: 151532 - protein, 143 aa, Heterodera glycines
MPCKSCTHCRKGKLQQQAKKVAQEEERQRRKMLRENRRSANECRQRALCRLRQDCRTLRQAIREGRFTVTYNGKSSYWNITSPSVNLAVDQNGQSTNSSSGFGCSSSSSGISELNSDGSWPIPDYYPGGFYVEHETDRNEYEE

SEQ ID NO: 151533 - protein, 187 aa, Heterodera glycines
MSLSPYQMKSAKRKNLKNDQSLPVFVQVDDISSSVDLGNDGINPEQHSNTNSMESNSKEMEMREHLEEIESQTTTQNKSVFVSRFRQELKEWHIYKQFCIYGTITFVRTFPTAFRVDFAHKRMAAIAIRAMNGQDYGKDGKVFICDWWSWKKAKKGKGKSRATPKGIVKLRIRLGEGEVFGSQTKPM

SEQ ID NO: 151534 - protein, 154 aa, Heterodera glycines
MNAARSVVSALIGRKFSEIDFDKTGMITSLKLQRALSNGTLRPFNIDACRLIIFQFDPMRHGFVGIERFESLWNYINDWKFEFVELSENMGFLTMRQLQSALTKYGCLYFDDFIYLCIMLQRITPPFRYLDRNANGRINIHFEEFVIMILSAQI

SEQ ID NO: 151535 - protein, 110 aa, Heterodera glycines
MSGLNRFQIAASPKKRFADEFPPSCKDLHDVKKFNAPGIFYVRAKVTDLQFALYKDCNDPEINQQATLFAFCAESYLDIKVEQFAAMVNNDLKSSRLCFNRKLAQTFPSN

SEQ ID NO: 151536 - protein, 135 aa, Heterodera glycines
MKRIEEPRSAAVTQGQHKLEAETNAQDGGGGEATIKRARRKSWDFKTMAHFDRGETDHQQHQKAPLFEQKQHYVHRVERFALQRHVTEFVLNGQHDEPEEALFLAFKHIIDRAIRNAENSPSHQQQKQTSGGAEF

SEQ ID NO: 151537 - protein, 263 aa, Heterodera glycines
MAELDKLGQSDGDEDVHGGGISKRALLLSEPIEVVVTCIAPPVGAAPRFHHYQHWGYDERHMIRVMNMDDNFCLFHALIATRAYTDHEFLKLSSRRVADVDADDGTLADVPAEISRRVITRADFCAGHEALNRLLSSRERMKAAVTELMRDAGIPTNEDAYGMEHIEQIQQLWDQTYAGLYRIVLFEDRSEKLLRPIWKGPMGRRLCVSLFVSEGHYYGIKRINCFFKLGRKYCLDCECAYNRDTKHTISCKSRCPQCAKGRL

SEQ ID NO: 151538 - protein, 71 aa, Heterodera glycines
NENANDLNYALNLFDYRIKRDYLRYNYAKVSADGSAEKPYKAMEAEEIEGKMEQLKVGLKSIVTNREGLTD

SEQ ID NO: 151539 - protein, 57 aa, Heterodera glycines
MATRLLGICNLGTRHLGTRHLGIPTFGDPTFGDPDIWGPDFWGSDIWGSRHLGTERQ

SEQ ID NO: 151540 - protein, 442 aa, Heterodera glycines
NEEISQNPSENETILSTIVEEFNDDNGTKCEESNGNDEEIENDELSVEHNSAEKISINISALNEFRNETFLHEKYEEYFENENDANETKFLLDAGIFVFELQKRLKMVDELRKLSYFDNLNLIKNIEKENAQFLLYCMQIEEFDQNEFFQKTYKILKIYSKNLEKDKNEEIPSEKQLKQIKRQMHQNNLSNLIVTDKQFGEKWKKYDEEWKNKKFIILFGVKTFELKRFEKIKMRWKKLKQQITLDTDLYEQFLNKNEQNNYLSANFSEISQQIHFHHSDSAYDSNESTGHARVGISGSLLLGTHTADSDVDLICIVPGQTMGVENFFGNKNAICEKNKCSDGTNDSLYCKLCENKSVAKLLKLMHSSIFLIKFHMDNVEIDITFVAIPGKSVLQAELNEQMLTDYINCLTNEKEEHRKMLRTISSQSKKVGINLNMKVFKV

SEQ ID NO: 151541 - protein, 249 aa, Heterodera glycines
HLGSRKKSKRSRVVSSISQASTIPTTTTTTTIVATAAADVTTASNFISSSGHSSLYNYTNNNNNNSIIKLNGAELNGHCGTGGGVSSSNHLQHHHHQETDNNHNSSNECALLRENAQRLSEIRQLQKERQTLELSLDKTKVELKSARSAENELRVQLKNVQQREQSCREEWKQFEREQKQRVDQLESKCKQLAKQNDYYKMNTQALERRVGELQLKKSEVERELTNERLRNSTRDEPPVGRQQQQHNNA

SEQ ID NO: 151542 - protein, 77 aa, Heterodera glycines
MTQEKLTLTKDEEIWLLKRCPIVGETAAVQWEKDENLDNLNGVIFHLYHDCIGPLSPQDQSDEKVFSTPGPSDQRKE

SEQ ID NO: 151543 - protein, 224 aa, Heterodera glycines
MAWFILSVGRMPLCQQPAAISNPGWPSFACIQPPNEGFTPPGGGSSLNHWYHDPITGECRELKYQGYGGNANNFATKDHCESYCKQTCSRGLPLYRDRTMGVKQEPVYCQGADNGCTSPNYVCTAMGTLQQCCPTFMHICSRNGAIPTEVYNTAGGLPTEYFDVGVPDVLCSAGEPLKDSSGERNMECSPTGSGTNSCPSTHSCESPPAHNIWWNLLSRTHMFA

SEQ ID NO: 151544 - protein, 61 aa, Heterodera glycines
MALSRKAARSMFVLQIDVLKITNKKNVSATLPNIRSAQCPVESKKRDKFYHKKKDFSNNFM

SEQ ID NO: 151545 - protein, 139 aa, Heterodera glycines
MDLEGFHFALRNAAVGGSLEVCRLLVEEWAADVNQQTIQEQYTPVICAASEGHLAIVNFLVEHGADLQHVDVDGHNALMWAVKNGKIEMARHLVAIGADINQRNMEDSKTINSRCDSTERANQWPKAADGFLRKTLIDH

SEQ ID NO: 151546 - protein, 80 aa, Heterodera glycines
MQSCLMDSTTRCIGILPIVCCLARSQKVVDDCVVLNPGRFDRGKGTGTFSVLDLDLSSAIGATSVSPFCEVSLFSTQQQQ

SEQ ID NO: 151547 - protein, 96 aa, Heterodera glycines
MVLEISVPSLRLTDFRNFYHKKEINKFSRTAVEVLQQRWRFSWALMATQHSLCASKVMRRKTNSSSSNSSIRIWPSAAAAPAAARICTSPGTSAVV

SEQ ID NO: 151548 - protein, 43 aa, Heterodera glycines
MIGLFSVLVCNAFVLLPFAIHLLVLLIHNCLFYKKIIIKLICY

SEQ ID NO: 151549 - protein, 63 aa, Heterodera glycines
MLRNALLISILALFGDCMDKGKRKLGGISINEPSEYGTKEKEAIATNLNIMDTTEHIAQMGKI

SEQ ID NO: 151550 - protein, 141 aa, Heterodera glycines
MLYIKFITIEKSFFSFSDLSALGLPSKYYPSWYTPVAKTTPSFAARLRVGQLSLFVAFLVPLAIEFDIFQKPGPVFFWTKIQETQVQEKPKVSKNGLGLNAGKPSLGRRPIDFPINNAFQLDTELDTRPTFSGLPTQPGKL

SEQ ID NO: 151551 - protein, 113 aa, Heterodera glycines
MWFSCISRRVKAAEKITFRQRIRLAILSPVQCHHLHPIPMGHRSLHFGVVQLAAVVHKRQISAPINWHFFAKMPFAVNEGTKCCCSIGQKQCLNYSAALSFIKMGSEMTEADN

SEQ ID NO: 151552 - protein, 62 aa, Heterodera glycines
MIWISNIYGRKITKFGHKTWTKIKNMAMKEPNMENKKIKRCKLILGIEILKIYLIFFYHSEM

SEQ ID NO: 151553 - protein, 127 aa, Heterodera glycines
MHLHKYWCHLTQLTGIASLALAAFLEFENAQLALRQEYYRIVLDQLSAVLAIGSAIADLYAGYNKVHGTLNLKVSIALSTLAAVWSFKSVDNNAFPFYKMDINQYRVAVHTSRKHFVDWFLTKKNIF

SEQ ID NO: 151554 - protein, 189 aa, Heterodera glycines
KGTTASSQLEKELSADHVSNEHFYGLFGNTCYANSVIQALFGNTCYANSVIQALYFCKQFREKILAYKQTHKKSGMQRDNLLTCLADLFSMQRDNLLTCLADLFSNISSQKRRVGTIAPKRFVTKLKRENELFDNFMQQDAHEFFLFDNFMQQDAHEFFNYLLNAISEVLMEEKKKEQLGGSHYALLQK

SEQ ID NO: 151555 - protein, 215 aa, Heterodera glycines
MLLSQETDSLTPFSGSKYPSLLVQATICSICSSNSAKYKCPKCLVRTCSVPCFTTHKESGKLSNADSALTSPTLVHFVKPIVDYNGSDDEEMEKDAGNDFDVLQAESSLKLGLSHHDDGIGAETNNSDGSSADSTGDEDEQQTPLEWVDFTVNGHPCFVVVLSRHTEFGELELPLICEEEQKHLQKRNSEREQTMNGQRGEGHWDDAEPYQNGWL

SEQ ID NO: 151556 - protein, 88 aa, Heterodera glycines
MEFFLILKQKHIKVQETYVSELLVKILVAADMFNRLQQLLQYSVIEKSKFLAYELIALSSRCPPLYQIGLDMLKRRNDWEQIVEASGI

SEQ ID NO: 151557 - protein, 276 aa, Heterodera glycines
FSLLFLFVYSTVYLPYSVATSPAFSDFLTVAYGDKIEESIARRDLGSLGSFGGGTKMPMFTRKRPIVMVHGCESTFAATFAAEYENIRQYFLMNNYTDAEVYASSYGHGPVNWTHDAMKCEHVQRFRFRWLMLAVANYTSSQIDVIGYSMGSPIARKAISGGVCVDTGEHLGVPLTPLVHTFVGVAGANATVCICAAFQMSPAMPCNSINGMACHSRFLRDINKRQHFEATHRVYTIYSRHDDVVGYLDCDGLLVSSIPLQDNHMRWKKFINDLPG

SEQ ID NO: 151558 - protein, 303 aa, Heterodera glycines
MTHTTNKDPIECKVDFIIENLPANPESMLRALFAHCMSTALDESQQNGITPDQLGSTISSDLLNPSIWIPIRRISDNTADSIMNRFLEVAQSKSREGSLWGSPFTVTITTLDVAQLPQRQQVRGSGKRTTNSVQHIIKESALLRINNSDDAYCLFYALETSRKYHSKEMSRQTFSKYINRQNGRRLEDVFGLMSSANIRTDLREYDAVVYVPIVVDYWNRKYATANQRFKVFIFGATGTYRPKFQYVPDNYNVEIPLYHHNGHFDGIRCGVGKAVFGRDYYCFSCECPYDNANDHSCSVKQSA

SEQ ID NO: 151559 - protein, 52 aa, Heterodera glycines
MKEVDFNEKSPLSEIGELWKLYRVAKEEVKIFYWYILKYLARNEANFKSHKF

SEQ ID NO: 151560 - protein, 60 aa, Heterodera glycines
MASLENFVELLTAVHSDVRQNIAEKFANPQQNCWEDTACSNELEIFGNESLRIHYKGDGS

SEQ ID NO: 151561 - protein, 52 aa, Heterodera glycines
MSISFNSTSNDDFTPAADEEEVKGEVLENKETFAERRIGKLEREKVSLEDRN

SEQ ID NO: 151562 - protein, 157 aa, Heterodera glycines
MPVPEFGLSALSAKQLFWHEIEEKVSARNSDHVLVHRWTGTTDADFWTELGCDMDTPVVLTLEAIEEDPNHIKRDGHLSLLSSLHFLEEYMGRMRSRTFVAEQNQCIICQKLTELVFQPCGHATYCKKCERKSAKDPRCPICRLHGFYFCIFVLANA

SEQ ID NO: 151563 - protein, 51 aa, Heterodera glycines
MADEMHKAFTDGVPFPVLKVLEYFSMGQQSFAWGRQFRNAGNFTGTMLWFD

SEQ ID NO: 151564 - protein, 230 aa, Heterodera glycines
ILELLFSATLCSLQSLRLYSLNTVLSASLDNSVGPPKCRFGGGRQSIDAENGQHRGGSQKRRFGHILSPITPCPSGKTSLTLSHCSLNNSSPAVSSRSTARISPGRHQRTFVSAPLSSSSTSDEGPVSNSADSNKQSVASSIFSISGTSFGSTAPPTMAPESDGTGRGEVTNRRSRSSLISSSRRTTAADQQQQRIDIGDDEEDDSDELISDDIKHFTMRSGAKGEDCWH

SEQ ID NO: 151565 - protein, 113 aa, Heterodera glycines
MSNIIFSHFPWEKLKFVFVLPSLMFLSVIYKNYSFSYDNSTLFSFAYLQNNSGELSSEECFGEKMVYTLKMNDSRIIRGKKFNCSLTWLLERYKLSDKYAIKEKIEVCFLIYF

SEQ ID NO: 151566 - protein, 97 aa, Heterodera glycines
MANEYKQKRKYSTKEWRQNYNEICNKIGVSRSLIEKWKKQFGIRCKRIMVKEKMEKMKIYWKIKSENPKMSDNEIAKILKIHQNSIFNWKKQFGEEI

SEQ ID NO: 151567 - protein, 23 aa, Heterodera glycines
MYVNTVESESVTRQLGHAKQKEE

SEQ ID NO: 151568 - protein, 868 aa, Heterodera glycines
MFIAPFTLILSGATGSGKTQWLMKLLRSYAELIDPPPAKVLYCYSEMNQSVIELMKRGIETHNGVPDQALIQSQPKPLLLVLDDLMLNVGNDFLDLLFTRGSHNWNVSVIFVTQSLYGRNIKTARANSHYLVLTRNPSGQLQVRTVGSQLFPKRLNYFMEAYNEATSQPFSYLVINMHPNAPENERLTSKIFPGENREVRTGVNNKNNMKHTKKMVLVPESEYLALINMLKGGAGRSDSLLNEKAALDAQIQSNLSDSKAGADVKIKRHSWLYKQRHQLKDMIENKPQKVIVENATGTAPANIAPYMGIQKPTVNKLDAVDSQDDDKKIKGPKKVRRKAMNAATSRIRMSAGGITSYGEETDDYTSAPETDLLPMSKKRQQKFLELKTSKEHYAKMMSMIAKDPDKFGVDKGTGEILTNFKRPILRSNYMDSLLYITGQRSEAPKGHRFFAQKLAADPRMMKFFETNQKGEGKGTNRKRDRTMKKKIVLVRANAIKTDGLSPDFMGKTLAAEKLLEQVYYDLRSPASYAGIQKVLAEAQRRNPSITYKDVHQFLHKQRTYTLFKPRKNRFRRLKTVPSGLHTDWQCDLCIMDALKEHNDGFRYILVCIDVLSRKILTAEVESKKSEHMIEAFEKIFKKAGVLPNKLYSDAGLEFQAKKMKDYWIQKQIIKHVMYSPHLHAGVVERANRTIKERLYKYFSEKNTKRWVDVLDRIVHNLNISANRTTGIRPVDVNFKNAAALRNRLYKHSEVDKNSANSSKLQLGDIVRISKEKGDFSKGYFPNFTDELFRISKVNPTDPPSYRIRDLDGEDIKGIFYEQELVKTVAETSHRAEVLKTRRRNGAKEHFVRWIGYSDKHNRWIRDEDLVRN

SEQ ID NO: 151569 - protein, 659 aa, Heterodera glycines
MALFSILLMLLLLLLHLSGGEWINVELSVDPPNFFDRTFRSLSKTSPIQHWFGYNRNTACHVERETNINRLYNSADMWNIALTDVDNFMSMGRQTIELLSSALPWACFGHDRHSFVIFDLRNDANEVAVVRGHQHKIARNLSAYGRILFDHISGRLYMVDKHERRIHELLITDFVRWWTLNNTDGGGGGGGHNGGGENSTATHSLRSNFVGFLPEQKTDFFIAADHVYLIWRRRVYKFRVGHYFNDPSSQLQFLTNSSDIRFNFLIFERDDDAKLEDSTDRRNSRAAAEASAGLTPSSQMMNSIERLLLALMYLFDVAVICIAVCVIRILRRTTSNSGPDNTSQARSNDVVHTTEMMALTSEEILSSPGEYYPNPLAEFVCVHIANEDHADQPVLVNGTLDLIEGERADVRGAERPAHLSSQFAAMSLRTTSEQQQPTAEAAAGTVFDPLDGGSGRGGRPSPSHQSPPEFMLARQRRRHRRRQRKLSNLVTALCDFNKCGPARLPMLLRKRRAENLDFLSRLCLQTVHLKGDRNVHFSAAALSNYGANRTFAYRGLLSITVEQHLFTRHRVRLRHPFLPCVVQAGGNNHCYFYPLELVRVCQSPSSGSHTDNNKNNISNNNNNKTMRRMPMQRNQRLSRDRLHQQPKRSSVCLRDVYDP

SEQ ID NO: 151570 - protein, 147 aa, Heterodera glycines
MHRSDNQESEDNKNGGRSNEMEKGGGKEGGGDAGVGRADEDAGDALKTSSPSVSSSSSSSSGGPDQPSTSSGSRKRRYGPPPGVVSASWLLGAMKARERQRCEWLEALEAKYSRMERELGAEDDDDDAVVDFARDSLETVVSKCDLF

SEQ ID NO: 151571 - protein, 117 aa, Heterodera glycines
MTNVRSGEVKYVQKIRGITFDVRNSQSLQFECFRNKVLSYGGVEGRRADRGGGDDDDDDDEDGDVAVQQSAAVFTYDKIQPTRESRIITRKQRKHYLPVCQKGIINEQLEVLPFGYR

SEQ ID NO: 151572 - protein, 273 aa, Heterodera glycines
MKLDERLLFSCCHRCASQFRTLNTRCRHECAHSDAQRAYTGNYTHIELAMALRYGYRVDRFWRAWHYEQWSDQIFKEYVRLLLKLKIEASGFPDGITTEAQRHQFIDAYATVYAVTLDVGPGKFSMRNELGTNKVITRPQEFYSLVLDHKVEISAIIPLSDTAIRVMYRHKKSFVEEHSSSNIVLSLWTTSRARLKLFEYMMQVQNTDGAELLYTVSYRRRTYAFVTDTDSVIVLHKRDRVPILTGEYLGQMSEEYAGFEIQTFICGGMRYAN

SEQ ID NO: 151573 - protein, 766 aa, Heterodera glycines
MQPSSSSSSSSKRGVTQAGTASSGGQRKQQRRKIGDADDDTAAAAAPVTATPGRWDFRSMAYFEQYIPPPPPSPPTSSFEAASLASNFGTQQQHRHRTKHVQFGAGPTTVAAPIDESDHERDDDDDDDDEQHQQQKMFRETANYVHKLDRFSMTRHISEFELNVEHEEPDEQLRNAFSQLIRRALRNAQQQLDGRSVQKIGIALHGKGLYDPIVLPLRPPEQNNADVLMGELDKLGQSGTDGGGDDDQGGGGADPDAGIMDKRTLLLSEPVQMTITCVAPPQGSGPRFHPYQHWGYNDRYRIRIRNTGEAERRFCMFYALVAGRAYHDRTLFIGLNNDNNMNNNMIIQMALLMPDFCRTHELFNRLVASDEAMRMAATRLMRDTGITADLPAYGMDHLQQVQAYWDERFPGLYRIVLFEDRPEELPRPIWKGPMGRHFDVPLFLSNSHYDALTKINCFFKLARKYCVESEVDGHEPVSEFVEWILYAWDKRFTTYVWAHNASRFDGHFVLKYLGETRRRPDVVMNGLKIFEIRLQGSRVHSMLIWRDSCLMMPIRLESLKNTFDLNCADKPFFPYAFNKRENYNVHLPNLPPLVDYCPGSMSKDKMEKFMAWYLLMCKVTSGYDVLPAIKYLDWRAKSEGLQIQHAGNGGEKRIRNHKLDGWIQSQNKCIEVLGWYECEINALLSDAANHQMRAFFGDIGNERGPIDPRSAYFGGRTGPLKLFAEPKEDEKISVYDIVSLYPWVNYDTEYPIGVPKIIYPSAVQML

SEQ ID NO: 151574 - protein, 108 aa, Heterodera glycines
MIGLKWHKCSAKCSKVPALFTGGAAGLVLSLICSLAGLVQSCANICCGCPSKFKPNEGCLSGLITGFGLVGYAALWLIEVPFTFNSPISDHKDLREKLQEALDDIIDY

SEQ ID NO: 151575 - protein, 149 aa, Heterodera glycines
MPPLPAMGLPNVVPKNVAKTPTNGIIAVPPIPATVPAANVMAFGMRNSIARKGTTAVPGMAQRRGALTKSAAAAACAHGVCGINVARAGGGAAARPANNGAAAKTWQMMHQRREQRQALSMRRAAAIPPSAAYLSAGSKLYQQQQQQQT

SEQ ID NO: 151576 - protein, 81 aa, Heterodera glycines
MELDFKKGLDPLTAPTASVKMLPTYIRAIAVGEEHGEFLALDLGGTNFRVLLITLEGDCRSTMQSKIYRVPDHIQKGTGTA

SEQ ID NO: 151577 - protein, 54 aa, Heterodera glycines
MAKLWLLSLAFGIGIAPFLFAVSLQKAKGTTRKWLAEHMDEVISEMDLAKAYGA

SEQ ID NO: 151578 - protein, 270 aa, Heterodera glycines
MAPLCFQVNEYYAQISELVPGLYICGVTGLTPANMKAFRIELIVNATREVPNLKSLGHIQRMKLWVEDTTDEDLFPHFDIVADQIHAVIQDRGAVLVHCVAGVSRSAAICLAYLLKYRTRSLRAAYHLMCSKRPMVRPNLSFWRQLIHYEQQVKGNVGSVRIVRDEAQPDKLLPDVSLGSGTRESGHLFPFKVYLKIVIPDQLSRPLSPTNATDASSPQSVPKSPFSDEPAPVSQLPLSRHRRNSSGGSARVKFVPVLEVLTEMAAESPA

SEQ ID NO: 151579 - protein, 384 aa, Heterodera glycines
MFPKWTFGRPMRQGAGMETEKQIANSKKENWKFTNWNGHESELRFLFKTDVAVDGKDIKFVLDSGAEIIVIDELSHEVIGSPRLRKCTESGCMFDGTQVKFVGKGVANFKFRDICIKSEYYVAKRGSLNLLSVQMMDAFGLLNELKAKINAPVNLCRVGEETRGFTKTPKSPQNSTVQSHIDHLKASFPEIFKNELGRCMKFKAHLTLKADAAPVYRKARPVPYNAQEAIDGELERWEKMGVIGKVEYTEWAAPILAVKKADGSARLCIDYSTGLNNALQDHQHPLPLPEDIFATLNGGKYFSQIDLRDAYLQIELDDESRKLCSISTHHGNYEVKRLPFGVKSAPAIFQSVMDQILAEFEFATAYLDDVIIVSKSVKESTLIT

SEQ ID NO: 151580 - protein, 140 aa, Heterodera glycines
MAQANIQQLLDAISQLVTAQQQQQNNQPNPNNNVPVLPDISVFEPTDEKGRISEWIERFSFAMDCSAPNATDAVKVKALMNKLSETAFSEYSKSCLPSKVTDFDFTQSIERLQKLFAKPQSVFIDRYECLMASKTEGEDF

SEQ ID NO: 151581 - protein, 469 aa, Heterodera glycines
EQYEAKTLSWTLACAGDEHKCCSDVVVADLDAVLDRSGIGLTKIENPLKALLAMFLLKSEAVASASAAKKLISQILDTDADWELATYCSAREDDVKNGTFPSESDVESVLRIWIGHCQIARKEVEKSAFGPISIELPQGLSLLPETEREGMRKSLESAPFLLEKLRATEIQKKTLVTAERVILGDSNAYQLKKLWPRSAFVGVQEGSTAEVIRQFDQVGLASKVKWLIVMVGKDSILAGDSVDSVIEKVKRLRQLCLRFAHVKIFWLLPPFIYNKKAESEEFCGRMRALFRKKSEIELVAVTEEGRSLLEIWRFGKSFNNEHVNHNGWMTEKGLKTLNAWLTSLVPNFPGDRELGIRTVKSKVVKIGAVKGGGPGDPSLIRGNAPERNVRGEGPGDPSPSRTIGISDNGPTGSARPMTNQNRGFEFGRVGTGYRSVPPPTFRGPSSRFHPYQQSRGRPAFHPTPMNRRN

SEQ ID NO: 151582 - protein, 64 aa, Heterodera glycines
MGTPPTEVKIKYPPDYFKTNKDSQGLRIPSLTMIFYIFKLTTSNPRSPDTLAFVRENHFALCDK

SEQ ID NO: 151583 - protein, 218 aa, Heterodera glycines
MPLIFKPTKTSNSRALVEPSRLLTDDEIWKQIRSASRHFVRPQAQNAVIVSPPSAPQIVEESEAAIDQGGSIQNLGQVSLSPAVNSVREVPKEYPALHPRYFSPNFRGRSPVRHRSTPIRAPPPRRRWSPPRRRLSPFRKSPRPAQRHGPPSHRSEIDTRHSSVTRFFPPPPMPLNRVGSSKAQMIPPFLTPEQPPSRIQNFEMTYNHCTMTQNFSKM

SEQ ID NO: 151584 - protein, 142 aa, Heterodera glycines
EFTDKKLVGTEMVGIQGSGRRNVIAPPSPSHFAGYMRGHGTFPHENALHSQLAGIVVQTNKLISVKPIKSRYHGDVGDVVVGRIVEVQQKRWKVDINSRQHGVLLLNSVNLPGGELRRKSIEDELLMREYLREGDLVSAEVQ

SEQ ID NO: 151585 - protein, 26 aa, Heterodera glycines
MLILEVKPANFYDFLFIVTNKGIKDF

SEQ ID NO: 151586 - protein, 210 aa, Heterodera glycines
LFIIITIHSIGTAFAMLMFKWSPVDVVFYDSLAHAVRGVVALLVYVAYIIFDCGKKLNDRIVCLFSLVALFLFHLLTYSWPFLSNQVQLMHHKTTGNCDLSKYAWCAGLTRVNPWLYYGAIVLLIGPAFPNINVAMNTLFSRIIGPRMQSTEQGLLEMHGAIGRLVGPLLISIFKLYSTNIPTLKVLNLKICINFPGSKKEKIFKFKKIP

SEQ ID NO: 151587 - protein, 76 aa, Heterodera glycines
MSLNRFCAICCSQMYRRHWSQIISKYLLAIILLFALAIAAPILWHSVCFRLSEVRTPLGQGQHKMDGPVFMEIPTQ

SEQ ID NO: 151588 - protein, 53 aa, Heterodera glycines
MVMISRVVNYMDKKTGCIYCFSCIFLVKIRQKWPKYGNKKAKMVKYGFIPENP

SEQ ID NO: 151589 - protein, 272 aa, Heterodera glycines
MTAFPSPVCDCRREHLISSAKCQLRSVQELERQADQFQQLTQGGDKATAEARALTMGIVCAPLLPSINFEQMLLAPFHVFQGLGNALIKELETGENAEIAQQFFRRIGARREAFRKRDMTGNSIRKILVHADQMEALFETEWAKTICQTMAHLGKIQIFTKAQPLSPGDLDGLETAVDQFKAFINQQPMVQNLLSKKTKAHLLLHHFVQFARQHQFLGLLDEQGDEALHSVWRRLEQLWKTMPDDEQMRQQLEHHFVSNWLLDTGRLDELKL

SEQ ID NO: 151590 - protein, 122 aa, Heterodera glycines
MENDKDGPNDYVLLEEVGAANKKLDLCETPSFLRYFQFKREFTRNLFWQSTAKCVQKRTSFFDESTSQKPTKQLCLENFREKEKWTNAHRKSQKIDSLKLRFICLSVEPIQLTEKKGFFETL

SEQ ID NO: 151591 - protein, 159 aa, Heterodera glycines
MDTGETTPPPLAIDERSERIEQLEKQFKDRDDTIKFLREQVRNREALISDLRRQLDEHMVPPMAPPTTSKTPPNRGRPKKRLDQLQRSARRDIVDQIVGVIDRDRSRSASRASLDRIYREIRHKFSHYTPKGQKLQEGMEAEDGLLLLAQLGTQMAYNG

SEQ ID NO: 151592 - protein, 167 aa, Heterodera glycines
MIFMEFHQSLCLDDDHQIKTFQNLLTEMQIIGIRHDEINQTIKYLEKKKNDIEEIFKQEKEMISGAYQFGKALISENYLMAKRTLLRKRQTKNARHTRENKREERKAQTQRARQGRWAKKTATQPNPNAEIALQDEAGPSTSAASTEEAMEPPPPTPGPVPTPEMDE

SEQ ID NO: 151593 - protein, 56 aa, Heterodera glycines
MWGGGRLRLIKSNSNLVVPKFASISSPTPHIETNGYKETGEGGKAQSNTESVKNIQ

SEQ ID NO: 151594 - protein, 40 aa, Heterodera glycines
MASNLMIKGFMYDIVTFPTSAGSIVRKCNGTREFLCIGWK

SEQ ID NO: 151595 - protein, 227 aa, Heterodera glycines
PMQRNSRVPLHFRTIEPADVGKVTISIVVYCEQFFIAFPFDECYRIPSTQFHANHNLFLANFYAKHLSVAYALDGAYRLLGKKAKFVRIYSKIWRIMEVLHYFTSRGWVFESQNALKMWERLSEEDKKLYCFDVRKVDWDKYLFDYLMGIKEAIKKTTLGILAQRLSAELCLPKCQPLVASCCSAAQFGGVQADGAALLLGGRRTEKWERRRESAAAAESGRKRQKQ

SEQ ID NO: 151596 - protein, 145 aa, Heterodera glycines
MEEAPEEKEEEKVVNEEKEEEEREEEEEEEGAAENGDENRRSEANELDSAFPAMISNLFGTHPLRTEIKKKRPSQRRGNAEEETFHSTNDCHGKFDAKDTRNFNSSLVEEVSRHPALFDFTRDEYKSTEARNRHWAEVAEEMQQS

SEQ ID NO: 151597 - protein, 111 aa, Heterodera glycines
MLFLSIFALIRLNEAQYTAPGAYYVYAPGYNFNPPPPGPGGPGTVGKRNAEAPANETTNGTTVTKRSALATEAHINGTEKTKRSAGTVQIGNGRGNATEQGERGRGMEKKG

SEQ ID NO: 151598 - protein, 138 aa, Heterodera glycines
MFGIVATFADYISVREDAVRLILSVLAGYPLAAVHRTFLFNKPAVIQHSYFASIGLLLYLFNCGSSAHRLLVRLSFICQISWKQTNSLSPHFGHAESTTYDITWTTPFCIMTLRYIGLVMDVYDGQQAVAQQVAKPRK

SEQ ID NO: 151599 - protein, 37 aa, Heterodera glycines
FTHRVNFEPPVQKLIDLLSQWSVSLPPKRESQVQSHL

SEQ ID NO: 151600 - protein, 290 aa, Heterodera glycines
QMFSFVKITHRFYSTEPLVKKLTVIGSGLMGAGIAQVSAQANVKVVLVDQSQSIVEKAKSGIENSIKRVAKKQFEDPGVKQNELVTRALSNISLKQNELVTRALSNISLSTNISQAVSGADLVIEAISENLDVKRKLFAEVESALPQNGKMNGKMATNTSSLTLADIAANLKRKDSFGGLHFFNPVPIMKLLEVVRFDGVVRFDGTGEETFNVLMDFGKTVGETTVVCKDTPGFIVNRLLVPFMLEAMRMVVCKDTPGFIVNRLLVPFMLEAMRMFDSGDATKEDIDVAT

SEQ ID NO: 151601 - protein, 112 aa, Heterodera glycines
APDVCWNAPFKEAIRKLYNDWMAHGEKATTSGGNLKAPPMEVYLEWIANAWDSLPKQMIADSFLTCGISKEEKGRHDDKIHKCATEIELSNPLTGSSTTACLCSEAKSKEGG

SEQ ID NO: 151602 - protein, 53 aa, Heterodera glycines
MLGWTFLNISKFKTFLHFLLVWTTRRGKSEALNVRFARWTNALTEVNKFDLIE

SEQ ID NO: 151603 - protein, 832 aa, Heterodera glycines
CFWRVRHRSEASNRLLKQPKIEKPTPSFPSVRSLPTKSPVRRRICNSIAGRSVGKSGRSRPLRHGFWVPLGDDSLIKALSAEETEEYLKGDRSERREKEAEEVRKLGQKQREKHGIGKCSRRTAQNGRRTSENAVGRETARIFYRVSKGRERTERQGQNPSKFSDELISDFESSLAGRARLGRTQEDLGKYRQRIDTNAEHQREYSEIIATMQNKLLEYRRHILLEYRRHIADLQRHECDDRRLVAVPVGRLAIPAGAGDMTTTDWSARYGRDANYNYDAILMRGRGTPGKTTTRAEREKGETGERVKNTVLLLQLKKGRSTVWESITADLDCFLLLSVDELRVQLESERTQSDRLKADLVHLQRQFEQEMQEKDNQFRNRETNLTQYLNEEQKKVTDLWNELQNRETNLTQYLNEEQKKVTDLWNELQRVRRQFADLRDQTERELSEQRHEFSRIMRNVRTMGDGSEGKADKSDQKKEKPNDRRRTIVNTDNVLIELIRRIKERGGAEAAGKLGPDLELLNKLRGETTATVEPELYRELIKKYEEATEYEEATERNIQLETDGDENARRVAEVEKELRKTQEKLAECQKAIRKVNEMSKAIRKVNEMSTHGTHEGTRSRSLSPAGNALVLSPAETVRNVRNALRNRDNEIQQLEQRLKGNGRQIEELGTKLSQNEETRRRVEKELNGARRENGEMLRQLEEALRQLEEAERSRKRTEEKLKSMQNEKAIAETAQNNLENEIRRLKQELEKAISELEKAISEGKRKAHEEADDYAISMETDYKNRIDELNKRIGTIQEEKQGLKIDELNKRIGTIQEEKQGLKNRIDTVKSK

SEQ ID NO: 151604 - protein, 147 aa, Heterodera glycines
MELRVGGRYRLGRKIGSGSFGDIYLGENIMTHEEVAIKLECVKTKHPQLHIEAKLYKMMSGGVGIPQVRWCGFEGEYNVMVMELLGPSLEDLFNFCSRKFTLKTVLLLADQMLARIQYIHSKDFIHRDIKPDFTLFGLVKKHSFTFS

SEQ ID NO: 151605 - protein, 277 aa, Heterodera glycines
MAPSCQCSSCTRPSSFSSAHPSPCHGSEIGFSTCDSSSAQFSTFDTNSNNHFGDGCSSTASCSEANSASASSVGGEPTSYREEEAVQGVEHEENSAGQQQQAQIEQQQYFPAFPIGPQGQFPALPIEPQGQFVPQEIPSAPQQQSFAVENANNGPAAPSFVCQSNEDDKGGRENNMINSIPQHMLFQKEVFQIAAFASAQGVCLPDGRPANSNNGTIPPMCGQGATSNGEMYEEKHQQLRDGDKCAGAEEKRTVPEAEEDYQLTEGTGRSETNADEQ

SEQ ID NO: 151606 - protein, 95 aa, Heterodera glycines
MAIVMVDEQQQHHHHHQQQPVSAAAIGPIETQQSAEVSTSSSTIQEISVTQIGQLIHSIVAICTDYYAGSRLVGVWAPLLVASVLCIAIGTTISM

SEQ ID NO: 151607 - protein, 77 aa, Heterodera glycines
MKKWDKKFGIKQNISKGRKHYTIVEKMEKMKQYFELKNQNPKLTDRKIAEILNITKRSLERYKAEFKRKSEGVLNTE

SEQ ID NO: 151608 - protein, 229 aa, Heterodera glycines
MKILLIFIFLRVLILENAIDQIEAGKINQEKSFDEIFGQKWDERTEENICQIDEIMQGQNVDQNIQAGPNDLQINQKFDESLEVKEEESDEMSTDCDELGGQLPMPTNNGQIYDQIRILNDKQKREIVEKFHKIKEKVKQMGKKYSKKEWKKIERKIAKKLGVSQEKIYKWKREFGLIKNRHSDEERRKMLKQFDQIYSKLKMKLNGKLEGKKKKCKKIIAKHLGINIS

SEQ ID NO: 151609 - protein, 190 aa, Heterodera glycines
MKILLIFIFLRVLILENAIDQIEAGKINQEKSFDEIFGQKWDERTEENICQIDEIMQGQNVDQNIQAGPNDLQINQNFDESLEVKEEESDEMSTDCDELGGQLPMPTNNGQIYDNFSKAIDKNKRETVEKFHKIKEKVKQMRKKFTRKEWTKIEIKIAKKLGTNREKIYKWKRELGMMTKKNHSIEEKRI

SEQ ID NO: 151610 - protein, 263 aa, Heterodera glycines
NVLLLFFGILRCQGRLENTDLPNESKHPTFLPAEAWTTKLIVIHYDRALKHCGPRTLLSKLREKYWIPKGRQTVQHILNSNKFGCLKCRRERLKPYAYPDAPDLPEERVTETQPFNHTGVDYFGSLKVKQGNTTVKVYVALFTCLVIRAIHLEVVGDYSAEAFESLPAIFCTARHSSLMMSDQGTNVTAGAKTIQENWTAQLFPNEISGQLAHQGVTWLFNTAHAPWRGGAWERLVGITKNALRRSIGNLLTFQMLYFLSISD

SEQ ID NO: 151611 - protein, 360 aa, Heterodera glycines
MKMLLKFLLLCALIFENAIDQIEAGKISQEKSFDEIFGQRWDDGAEENICQIYQIMHGETVDQNQYDQQFDHLEVKEEQSEEISRNCDELGGQLPMPTNNGQIYDNFSKAINKKKREIVEKFHKIKEKVKQMGKKYSKKEWQKIERKIATKLGANQMKIYKWKRELGMMTKKNYSVEEKRIMLKQFDQIYGKLKMKLNGKLEGKGRKCQKIIAKHLGTNISSIQRWKKEIKVGKMVKNQKTDDEKREIVEKYLKVKIKFMQNGKHSQKEWKAFNAKIKQMFGVSYWTIEKWAKKLGIKQNNLKERKRFTIVEKMEIMKQYYLMKKETPKFSDVKIAELLNIELMSLIKYKSEFKEKVEMF

SEQ ID NO: 151612 - protein, 102 aa, Heterodera glycines
LFINGNYKFKCPFASAQFSRFVQSLASRSVAKINSESNDRFSLFPLEVLSAKSQVVAGIQYQLRIKVGRSNCSKNVSERANSATQVQQFPSNNKYFYFLYLK

SEQ ID NO: 151613 - protein, 61 aa, Heterodera glycines
  unsure (1)..(61): unsure at all Xaa locations
VXNGEIITMSSFXADLSIDGRKIFLSRIDHFYCLPLLISLFSMSLSVGYIMFKNYNFKTYT

SEQ ID NO: 151614 - protein, 67 aa, Heterodera glycines
MIETVIYLAKTGQPFRGNKDYGVLSVPKTVGEINAEQGLFRASLQYRCLSGDEKLKLHLETGGQIKS

SEQ ID NO: 151615 - protein, 181 aa, Heterodera glycines
MVLVIEFCAQILGCSPKSLRDKLNHPEDRVKALKELVGKKVRTTYKDRNGMQKTFFVDGISDKGAALTPAYGRLRQPYNINIAAHFYALHRIKLHLPYVPCVVEKYSGCGEDRYYPMELLEIVDDDYNQQKRRGLANCLPKSRTTSFPVKRFGRVEEVEEIDDNDDWGGRYECSQPSYVYW

SEQ ID NO: 151616 - protein, 161 aa, Heterodera glycines
MQKVIRTLGCGLLYTDTDSLIFVHPIGMNRLETGPHLGQFTDEYPKHEIVEYCSGGAKQYGLKLRRNGQDEFVLKLRGITLNYDVMQNQSLCYDTFKEEVLRYAQTGEYEPINVMYPNFLRPDIRDGGHVTSGPLQKCYRPYVGKGIVGPNYDVLNFGHTL

SEQ ID NO: 151617 - protein, 171 aa, Heterodera glycines
MSDELQWMVDDDDEDEHQHTNGTINRTVTVANRLKLPYTNAVICQWDNDNTEPTDFVEAFLKEKTKRDGRKRRRSDAPVQDTITNTLSWGIAYLNHHVQIQAKMSDELQWMVDDDDEDEHQHTNGATNRTVTVANRLKLHYTNAVICIFENPTAILSRTIPGRECKAKASE

SEQ ID NO: 151618 - protein, 80 aa, Heterodera glycines
MSEQNHESDDVLPTWAMVDFHEMSRRERLRIQQQEELKRQNQKKQTLEQFRQQRVEQKLQWEKEETEKKTPKHGRRGPMR

SEQ ID NO: 151619 - protein, 138 aa, Heterodera glycines
MNETEKILDDPERLLDQIVGIVDEEDTIPLGAEAGTLNKEKRLKKNRRGGKKVQKLRAKSMEMDKISVTTYFYFCQQNFNLLCVSVYGSKTLESLNINMGPKFTVADVPLPIIETAGFSILRPVVSKNTNQTFTMFCK

SEQ ID NO: 151620 - protein, 269 aa, Heterodera glycines
FSREHLWGKTKAAFKYAYEQYLNDFDWFLKTDDDTFVIVENLRFLLMAHSPEEPIYYGCKFKPFVEQGYMSGGAGYVGYMSGGAGYVLSRMALKKFVEEGLPDAKKCRSDEWGHEDVEMGKCLDKIGVKAGDSRDAEDHHRFFPFVPETHLSPDHMDKSFWFWKYTYYPMEEGPNCCSDYAISFHYVKPNSMYSLEYLVYHLHLFGNEIELKVSKNYSLEYLVYHLHLFGNEIELKVSKNGIILRNAYKLAIQNIGADDVFKNNEKTID

SEQ ID NO: 151621 - protein, 82 aa, Heterodera glycines
MPNILEAQLPNDYFFYILRLFAVKLDEEAKERHGLKTRNLLNNEILVSRLVALGAELSQRQELLSCVPIMKVYYKFNWPLFL

SEQ ID NO: 151622 - protein, 83 aa, Heterodera glycines
MAILKGITLPNCPLLNFTENSFFMGQIKSFAVISSVEIAESQQQSSGSFMATSFGRRRHWIADLAHPAKSCAISKSLTGVMTT

SEQ ID NO: 151623 - protein, 81 aa, Heterodera glycines
MAGRAPDFSTVDFSTEDISTEGLFDSKGLFDRNILNLRRGLFDSGLFDSKICFNIPFTDTNTYESIDPRVRVGYSNNYGER

SEQ ID NO: 151624 - protein, 63 aa, Heterodera glycines
MLLIQAALFYLPKWTLDKLLTCLLAIAVAQFAVVNALTGRGHRWWGIEMGKSLRSGDEIQVEN

SEQ ID NO: 151625 - protein, 77 aa, Heterodera glycines
TNFTSSNSAASSVGSRCDDFVRNSVGSRYKEFNSDPYTCECFFGGTGANLSNKNVHLPVTHPRPETDDAGTTAAGRI

SEQ ID NO: 151626 - protein, 30 aa, Heterodera glycines
MGNVRCGKMNVVKHQSDAQHGHSVIDAQRD

SEQ ID NO: 151627 - protein, 52 aa, Heterodera glycines
MLRFIYSWSKFRTATPKPFSMLMYKTPQLEASFSPIPGLDTKRLNLKMLALF

SEQ ID NO: 151628 - protein, 55 aa, Heterodera glycines
MIFQQNNVTNLGLGQALRIASSIFPGTQASSRQTQVYKWTSNEIIFGIKARMEVQ

SEQ ID NO: 151629 - protein, 50 aa, Heterodera glycines
MSELNSEGIFWTDSNGRQMMKRRRNDSSFFEGTEPVAANYYPVNRQNLIT

SEQ ID NO: 151630 - protein, 32 aa, Heterodera glycines
MDQYTIGLDLLNASYGKTCRTKSAGNDLECFR

SEQ ID NO: 151631 - protein, 44 aa, Heterodera glycines
MIREQCQKRASIKCYLIWWLFWGYTFSLKFQSFFNGCTRIIFIT

SEQ ID NO: 151632 - protein, 53 aa, Heterodera glycines
MTSGFIVYKSLLKGNMTNISTIKGLCAKTFNEGDSDYFTVHANISDLKMQTYK

SEQ ID NO: 151633 - protein, 126 aa, Heterodera glycines
MELGYKIDKFYSEMSHENNGNKILEFVSGGSKQYSIKFENEIDGKIWYKTKMRGITFNKKNNFDHEDFKGMILNYKDEKRKYFNYDKFGPSRDSKILSQKMTKEYKPVQKKGIIDENFDIIPYGFW

SEQ ID NO: 151634 - protein, 243 aa, Heterodera glycines
MRKIFIEITKDSETPNGYDVFKGCVFHGLLYQNLCKYDIKDVKNVSNLFKLGSMECEVRRKLNPRDKENYDIEMKKYFDSIPDKGGVVKTKSNLTNIYDQSTPGMLLRVNYFTPYPVKTPKIIIPKSQDVLWQCPEDIPYDGNRNRIQKYKYFIGLLKVRAIPPKKLAIPLLPYHYDSILFFTNCSKCCQRAKSNFVFMKNVKKCNHSDSERGLHGVFTSIELKLECEISCRKQNNKPAFRVF

SEQ ID NO: 151635 - protein, 102 aa, Heterodera glycines
MLFVLLFLSLLAFIRAQFAATNPPAPEPAYVPPSNYQWGLNPWRRENWADASPHNQMYVDSSGRQGMRNVPMQVISGAMSDQADQWTTKGSTNHVVANNGIS

SEQ ID NO: 151636 - protein, 92 aa, Heterodera glycines
MRQELVDVWKKMRKKTTEIENGRERNIEEKVNGKKKGREGKGNCCKCKSWKGKQTEEKGTQTEKEMPKVAKGAIKGDKKRLKSGDDQNGQIA

SEQ ID NO: 151637 - protein, 61 aa, Heterodera glycines
MAIKRAFERLRTDGAAAEERLARLAAETAEVNATAGGITANLSERQWRKRKSGQMRTADRK

SEQ ID NO: 151638 - protein, 100 aa, Heterodera glycines
MYIKLNKLISETKLIYEQIKSDTNPVDKKKKIGEICKITQAFCTDVNDDNCLYSPNILKNVKEIETSIIMLKSNNTKVFKDCKDLQKLIEVIEKQNGSKD

SEQ ID NO: 151639 - protein, 200 aa, Heterodera glycines
KGSKELFGEIDAQTNPEAKKANLDEICQKTQEYCTYVQNSIKDNKNIFSVYEIFDQLKVIEESIPKLKSNDPKLFEDFAKLKEVIGENSNLGTNPKLTNVLENLEELKSKIKNLKDVRPATNDNPVALKKQILQEIFAKTKNFCNIFREILGEFDIKTDNIENGIKQIEQNITELKMHNYQVVEDLANLQQMIEDKIENA

SEQ ID NO: 151640 - protein, 33 aa, Heterodera glycines
MEATKAVYRHLFLWGNGNRLKTEAVHRKLILKN

SEQ ID NO: 151641 - protein, 78 aa, Heterodera glycines
MSTPYSLPKIPKKSLQMNGCICFNCLFLYLKVMRGVVCLPHICSRLKGMSIYHTGYKRTRRNQHHMIMEHTMMFLLPK

SEQ ID NO: 151642 - protein, 165 aa, Heterodera glycines
MENKESLLVHLFEMMPSFVRGKTPHFPIKKILLLSWKVLLATLGGTDFLRKEKARKRAEAGLSPVTDTVQVAMKMKPLLSCDGSVGTGALLGLNSASGGDGKAETDSGTHDEPNRREESNKTFPVDKKGEGGEAFGGMSEETKQIAEEVDEAIVGGRNQENEVRP

SEQ ID NO: 151643 - protein, 228 aa, Heterodera glycines
QRKKHFHFQLPPGDSTTVFALPEPIVRGSLPALRRNLYVPLTELQLESEDRYNRFPFSQKEFIEDCPAERLYVRILPEMTEYVIALLKVILASLPSSKAKIDAVTILSDVLTPETDTNEVLSNSISLDLASFSHTNVLEETVRVAIDINRHKELIIKSASSLLILLLKHLRLNHTLQFENLARYLVLANCLPLVLKFLDQNICRYFQAKHELAPFNYPQCALFFVRNG

SEQ ID NO: 151644 - protein, 134 aa, Heterodera glycines
MQARYLGRQWRKTNMDLISGIYLRVRHRLNDDWAFANEVMRTKSIDSQQEENELGLAIRRFNARRYPYIYRDGGGQTETYSESHVGVAREGEEQHQQHERVFSSVTDAVKLGFVDEWEPKEWEPTDNVWFSLAG

SEQ ID NO: 151645 - protein, 189 aa, Heterodera glycines
MDRALKEERNYILELCKQIKKAGCNVLLIQKSILRFDHHLCFSPTGGGAPEMEVSVRVRAAAQTTHGAEQYCWKAFADALEVVPYTLAENAGLSPIETVTEMRSQHAMGNKEHGVNVRMGAITDIREENVVQPLLVSSFAVKQAAECVRSILKIDDIVIPCCRLSTMATFYGLEFGIRTMLYDRGTSCV

SEQ ID NO: 151646 - protein, 61 aa, Heterodera glycines
MAMGEAKEWDERRIPRPQRRWLMRTTELKEGSGGDKYVKRVVSESELNALLKNAWLGKKRR

SEQ ID NO: 151647 - protein, 64 aa, Heterodera glycines
MNCLLPKLWFSHYYDMFESFQGAITDIREENVVQPLLVSSFAVKQAAECVRSILKIDDIVSLTQ

SEQ ID NO: 151648 - protein, 96 aa, Heterodera glycines
MNRRWICNDVWMDIFPSFDRPQLGLKLALLSPRFNALVDKHFNGKSELTIWRPIAIRRKDKGPEPKLSVWMDDKIVEFPLPDYPLTSKIRFNHLRI

SEQ ID NO: 151649 - protein, 81 aa, Heterodera glycines
MHRVDQCRLDVALFAHEQKVLHYVLFALPLQFSVQQIERRKGVEVNAMVSKKGTTESQAIDASATAVAEQMSDRSLGEGSK

SEQ ID NO: 151650 - protein, 81 aa, Heterodera glycines
MHRVDQCRFDVALFAQQQKVLHYVLFALPLQFSVQQIERRKGVEVNAMDSKKGTTESQVIDASATAVTEQMSDRSLGEGSK

SEQ ID NO: 151651 - protein, 95 aa, Heterodera glycines
MKGVTSNEKEMRKFSEEWAESVQQFKRLLKHLATVKPHLTRETLSKSIAKLEIEELEIAEWTKTIGEDKKKADIMFDNFMKKELGILRMLLHSAA

SEQ ID NO: 151652 - protein, 91 aa, Heterodera glycines
MNCMFKTAKWISCLKSMAVITDDDQMLRYIELSIRDADGKMAKLKGQSSREEQQKSIDALRKFKECYIKERTLFETASGNGGGVQISDRKC

SEQ ID NO: 151653 - protein, 95 aa, Heterodera glycines
MEMVPFELVNEWTKEKLTLAKANEFDKSWIMKRCKIGETTAVKQQQKKDENWDNNCNNVYFWLFSANNCIGPLSPPPAEEVEEEAGQCITKGPNE

SEQ ID NO: 151654 - protein, 85 aa, Heterodera glycines
MRQCMRKVLPVDASDESRRTLAETEEYKGGLLMNEWWEYKTYKDNFLKKFELLHLPEYLIITYDRFHKNQWFIEKNPTIVNFPIR

SEQ ID NO: 151655 - protein, 110 aa, Heterodera glycines
VVGKLIFAEQTKEIPFLSLAMDLPPAPLYLDERLQNIIPQVPLSTLLMKFNGQTEKEYKTYKDNFLKKFELLHLPEYLIITYDRFHKNQWFIEKNPTIVNFPISNVDLYE

SEQ ID NO: 151656 - protein, 310 aa, Heterodera glycines
MKSDRAKSNNGMKSDRAKSNNGMKSDRAKPNNGMKSDRTKPNNGMKSDRAKSNNGMKSDRAKPNNGMKSDRAKSNNGMKSDRAKSNYGVKSDRAKSNNGMKSDRAKPNNGMKSDRAKSNNGMKSDRTKPNNGMKSDRAKSNNGMKSDRAKSNYGMKSDRTKPNNGMKSDQAKPNNGTKSDRTKPNNGMKSDRTKPNNGMKSDRTKPNNGMKSDRAKSNNGMKSDRAKPNNGIKSDRTKPNNGMKSDRTKPNNGMKSDRAKSNNGMKSDRAKSNYGVKSDRAKSNNGTKSDRTKPNNGMKSDRAKSNNGTK

SEQ ID NO: 151657 - protein, 183 aa, Heterodera glycines
MTLGHYDAWTFRRLDIMTLGHYDAWTFRHLDIMTLVHYDAWTFKKANRCRSDKNGFLLGEVTKRQIMKSLLLKLFVGLCFIDFTSNIKSKFEDFLENQEAMKLIQNYQEKRIKTIKELHAELTKKGIKLAERSLRLYLCKIKSANSDTSKESPNIPEIKFEKQDREEYFWQTFTPNMDHSVKD

SEQ ID NO: 151658 - protein, 43 aa, Heterodera glycines
MAKNVLKHTNLRFAQNNRQKLRRLIYLNGCIGRVSKFYIEKIA

SEQ ID NO: 151659 - protein, 62 aa, Heterodera glycines
MVAQSEKRWHAEAIAFLFEGATKYGMGQHSQKGLCRHVANGVQLCEGDLMHLRNVDHFELWR

SEQ ID NO: 151660 - protein, 249 aa, Heterodera glycines
MEKARKSTPPRSMTLEALLEECRSIQSLKNSAAALSGPGQVHSVQVRPQRVSDGSKKSNRGKMVNQKGNVSVPNSKEYNFPFNSNRTDEDQQQKCKRCGQFHVNDCPYAADVNCYRCGKRGHIRPVCPERTQSNAVTVASTFCVTQNCHDWIWTQPLINGHPVKLVADSCSHLTIIQEPLWISLGSPKLRKQVANTGAPNIMGLDWIVPFEKATQSPIATTLDLSNAPTKVNTIDERPRHFKTVTLFSC

SEQ ID NO: 151661 - protein, 175 aa, Heterodera glycines
REKSRQMIKQLNEQRAARTLSIVVGVFILCWTPFFLFTPLIALCGNSFADYETVFSIFTWAGHLNSMLNPLIYSRFSRDFRKAFKQILTCERERPTKKAIKSPLSPLNIVLAQLTSMAQIPPTFRYLLEIPIKNRKHAKLIRNHWHLRKWHHKSILNKIIPLLFHIFLFLKQTDK

SEQ ID NO: 151662 - protein, 263 aa, Heterodera glycines
VSLAVADLIVGLVVMPLNSLFEMSRHVWLLGLTTCDIWHALDILASTSSIWNLCVISLDRYMAGVDPIGYRDRVSKRRIIYCICCVWLVSACISFPAIFWWRASSPHLYKDKRRCLFTDDAYYVVFSAMISFYIPLVLILFAYGRVYCIATTHSRSRVYCIATTHSRSMKSGEKRVSVYALSGPTDQIKSKKRGKKMEESDRCEFKYFLKSLNSPHNLQILLKHRDRNSGKSAKSGSPAPNQCSRNHSAGSETLRSLRTETDD

SEQ ID NO: 151663 - protein, 159 aa, Heterodera glycines
MVLAKTRNQQSAEPNNLLDHFLDDHNCERDKECDFGRKNVCGQAKFLEELRTVLSMILLFVPMPLFWAYQSHMLSIWSIQRVNVDPNLPMIGAFFSRDQIGLHLNIFVLVLIPILYKAYDDPILPSLRYLKRMASGIFLCALASAVSATVQFRLNVSVN

SEQ ID NO: 151664 - protein, 88 aa, Heterodera glycines
MYKKWSKYVQKTPNIKLVDNLRHRVDQHIGLELMTIAAGFCSGDRTTGVGGIPSPGYRPNPDPDQSRTFWKNDRDGFRVGIPTESRSR

SEQ ID NO: 151665 - protein, 107 aa, Heterodera glycines
PQNITKVIIDHRSINQSMANQSINQWSMVRRSPFSPAVKMRTDLITKKKRSDEHTKANSQSETKFSRQQKIFLGFESDDLLADGWTAQNGTFALYGSAKEATKIVPK

SEQ ID NO: 151666 - protein, 44 aa, Heterodera glycines
KMSKRGSVKHLAITSMMSTRMITQIAALKTDRHVWLMVPNVKPW

SEQ ID NO: 151667 - protein, 154 aa, Heterodera glycines
EAESNGGEILYTDTDSIFVLHDRDVEPITTGKYLGEMSEEYGGYEIEEYCCGGAKQYALKMRNKQTGDIEYVMKIRGITFDVDNRKTLHYDTFREMVLNYGKGEVDPAFFVYKNDFGPTRDSKVVTREKHKMYRPVCQKGIIDEELNVMPFGFC

SEQ ID NO: 151668 - protein, 19 aa, Heterodera glycines
GPGSRSRILKSSGPGPGRA

SEQ ID NO: 151669 - protein, 148 aa, Heterodera glycines
MSHPIWQIGLFKRTTEDSVECLECKTIQKFHGAHTSERISEILKALLESWNVKECHCFVTISAANLVKALDLMHIERISCAAHDLNLCVKDCFSKEKDEMAQIFEKCRKIVGTLKHSAKLMDDLKDVQGELGLPKAKLLQVANYQILI

SEQ ID NO: 151670 - protein, 42 aa, Heterodera glycines
MNNRRTTLYKNFFTALFFVTYIGASGFLKNCHPYAILKTAKI

SEQ ID NO: 151671 - protein, 246 aa, Heterodera glycines
MIYSSAICFGIFIFNHFSIPFSNAIPFEDDNMFNAFVRNGHKMQINEYSKQKYEGHFGIVYFTRKNWQCDKIVDAFEEYERAECQKYRKYLDILYEYLYREYVGIQTVKPKFVFKERIEIEGSIIYAVICLARISLFYFKLSWSNDFKYKLSEFFIYNSEPKLLNEKRLNFEVKLVNENEMPINEMILQLAIDRAYEYQTIESLDAIIRQKFKKMLEEMFKKAEEMAKKHKWQTFFAIFYPYFLMP

SEQ ID NO: 151672 - protein, 41 aa, Heterodera glycines
MALLSVVTRSFDARNSDTDSIQGQRIDRLPVPIIPSLTRCP

SEQ ID NO: 151673 - protein, 75 aa, Heterodera glycines
MCPCRAVLVDGGCDSTVGLRSDCARPGPAALQLFELYAEDGLPWALIALTAVRTFISTIGIICNLALVYVTIKTK

SEQ ID NO: 151674 - protein, 148 aa, Heterodera glycines
MGRKNISVAKGREKKDGLWMAGIVPGGLKEAGGPMPNKIFDQSEQLGRNNRQFYQIVVEIMEVKEEESEEKSSNCYELEQLDENNEQNYDHFPNKFDKMKREIMEKFNKIKEIINQMSNKYSDKRKRQKKKLCANRLKIYPNGKDNLE

SEQ ID NO: 151675 - protein, 130 aa, Heterodera glycines
MNQNETLFELYAEDGLPWALIALTAVRTFISTIGIICNLALVYVTIKTNSLNGPCNILIAFDAAACAWFEIGSWIGMFQILVGQQFVPIRLCCVYLLLPFITGIYASMSATLLIAFDRLLSICFPIWCLI

SEQ ID NO: 151676 - protein, 51 aa, Heterodera glycines
MLVIAHVDHGKSTLTDSQVSKVGIIAGAKSGETRFTDTRKDEQERCIAIKS

SEQ ID NO: 151677 - protein, 87 aa, Heterodera glycines
MKRLMVLAVAGKVAEVKAVGHSSGWEEDEKDWCRVARKLAMTSTRWAEIEGEEEKRAFVKREVRRLEGWAMRTARKELVAEWPDVLR

SEQ ID NO: 151678 - protein, 32 aa, Heterodera glycines
MFLSLGFEVVCFCIFFLRICYEESGSKIAFLR

SEQ ID NO: 151679 - protein, 174 aa, Heterodera glycines
MPRKRTLTGRRERMLRRETSSRLGKADSVAVPSTSTNIRAQCSQPRGAVEPAVGTSPMDLGTCVVSTPTTTGLQALSIIGGLDLSKIKTKTIYIKQLPGSSNKRTRHSSNVGTQNNATQHTVQQREDASDVESVAGILSQFSHNFSTKSHRYSASEVSADAFCCGCEHSTLYKR

SEQ ID NO: 151680 - protein, 35 aa, Heterodera glycines
MLGPVCRHAGILFIVIFQIIIRNGELSIENSKILK

SEQ ID NO: 151681 - protein, 346 aa, Heterodera glycines
MSDSQSSDDELMYSADENFEMKVSVQSSKNNDKISEAKKHSNCQKDPLEDPPNFENLLDNSPNCQKDPLEDQQNFGKDSLEDQQNLLKNPLEDEQHFGKNPLEEKSKKFKIPEDLLGDSQKPKTRNYVPENIPKVVARSILVFIVDNQVEIELRQIMRKKEMKAMVFRPRKWDKNTIGTEIEIGTITQCIVIWRETMDAELLAVLTKVEEICYELLCIWVVPKGVPIHVMKKRFPAIVRVPEEENIDNLLTKLEQIGMPIEKRGEQRWHETASTNAPRVNWNQLGDGHRVQAAGSHSYNSFVAPHFSSYLPTTTTKMFFPTPEMPKKVKILEKSNQKNLIPLWYWE

SEQ ID NO: 151682 - protein, 22 aa, Heterodera glycines
EHSYTKTGVNIESSAKTIEKDF

SEQ ID NO: 151683 - protein, 424 aa, Heterodera glycines
IFIPNNSYIATLFIRDAHLKTMHGGRELVNSKLRENFWIPKSRRKIYEILKRKNKEKCGICAKFTNNKSYPKNPPLPVFRVKGKSAFEHVGIDYFGPLSVKTLDGNKKCWGAIFTCLIVRAIHLELVSDVSAEKFLLAFRRFIKRRRVPKLIISDNGTNFVLASKALKQIALEENKQKIQNFSSNLGIDWQFNSPYASWRGGAYKQKIQNFSSNLGIDWQFNSPYASWRGGAYERMIGLVKTHLIRSLGKRLLSFEELMTYLIEVERIVNERPLSYITQDEGEPFSLKLDPTFDREDIGEPFSLKLDPTFDREDINEYFEKKTKREELFEIYKKAIFKSEIFWKEWSEKYLLSLREKHINKNKDGNKYPKIGQVVIVSQDNYPRSMWKLGKIFEILSDRTVKLKIGNRMAERPTKLLYPLEIED

SEQ ID NO: 151684 - protein, 33 aa, Heterodera glycines
FSVSVSNFYFRKMKMPARCDKNIFQNKQICLKI

SEQ ID NO: 151685 - protein, 249 aa, Heterodera glycines
MREMEDVLILSFKQLPIWFLWASSSSRPLGLFCIRVSLQQLCPLYISQIHNPSKSNSRHRLANSSSNNYAQGNFGPMHSSSSTSPLFGVRQMSYFGPGGASVQPNWNQQRQAQYINNPQLGQQNNIMSPPKQQQQFVVANCKPSQPCQISSFPADVVQQQQQTIGFPPPPSQSLQNSPPVATKQELNQHQYHQQMLVQQQQQQRYATSYTQQQFLSQPNPTAFPMGSNYGVVDHRQFMSQPCSIPSGTS

SEQ ID NO: 151686 - protein, 72 aa, Heterodera glycines
MCSIILFTFCCCSAEYLHKCCVDPEKQYKMVKRNTEDLVNELRKKDECAGKNRKCFCWAHTKIYSESAGGWC

SEQ ID NO: 151687 - protein, 81 aa, Heterodera glycines
MPTTFSICMDAESAAVLRPFLNLNSLANCQCGWAKCVNGWRVAAVRSVQLQQCCVTAKADFCFQLNAVEPFNKSEVPNKIY

SEQ ID NO: 151688 - protein, 330 aa, Heterodera glycines
MDKTLAEILEKLTQAIKQQSAPTSTTTPPAQNITLPDIHPFSTENVEEFEEWLERFQFALDCAAANMADEAKVKLLMTKLNPAAFGEYKRYCLPEEITKFNFTDTKSRLIKLFSHPPSLAINRYECLRVCRENGEKFEIFVNRLKAALRKFRFSELNEEEFKCLVLLTSLKSPSDAKLRQHILARLTAEGTKTTKTSKLFDKVVEDLNTQLKTEAEAKILEQPKPKINAIQHGKSSPNKHQNRGNGRPNQKFTGKSKAKIPPSNCYRCGELHWAQDCPKKENICSKCNRRGHIDRQCDKIRAFHQNKGRNFNTNTVMLSAAYINSVHSSN

SEQ ID NO: 151689 - protein, 541 aa, Heterodera glycines
IVAADASQHGIGGVISHKFANGSIKAMSHFSRSLTPAEQNYGQIEKEALALVEAVKRFHKMIFGRKFTLLTDHQPLKKIFGNKDGVPKHSHNRLVRWSLILTAYDFEIQYVKTDKFGQADALSRLISVQKSKSDDDEVIIASFEVESALDRNLINNVNQLPITFKNLAQETANDQALQQIRQFVKNIWPAPKNSIEGLDVIQFFRRRDEISIVKDCLMFGDRTVIPKSLQKQIQAAHQGHPGVKRMKSLARMHVYWPMMDAEIETFVQKCTSCAAVAKNPIKTTLQSWPKSDGPWKRIHIDYAGPFHGKMYLIVVDSFSKYPEIFEMNSTNASKMRSIAHYGIPETIVSDNGTQFQSHQFEGFVKSNGIDHIFTVPYMPQSNGQAERMVDTFKRAFAKIKGEGVDGNVLDTFLLTYRTTPSDTLDGKCPAELFLGRKPRIGLDLLRPPLSDQFNRKHGAKFRSFIGQLVFLDLLRPPLSDQFNRKHGAKFRSFIGQLVFTRRHNSAEWRHGKIIDKKGVIYTVELPNNSRRFHANQIRARQ

SEQ ID NO: 151690 - protein, 222 aa, Heterodera glycines
NGANRIALDTRAHAESAKEALDGKTIHGRQLRVRYSVHGATIKLKELSPAVSNEMLMLSFSAFGDVERAIHIVDEKGRSTGEGIVEFERKVSAQEAIAQIRERVFLMTTNSRPLQADFLDQKDDEDGLCEKTIQRTPYLYKERELGPRFAQMNSFEYIYGRRWKDLYEFERKRRAEVEAELREQRRRLDADMEAEYEDYKAQMLREELLHRQEELDRLEAQR

SEQ ID NO: 151691 - protein, 447 aa, Heterodera glycines
MCSYENGLAPDKRMDIFQFVASPNANPDNNTSINSEAASVDQNLPHLMHRMEELQPKLMSLNMNLANRNRDEIVNDGKEKEEPKKGDKAEDEANKEEEIVVLNPYLYLTNEAMEKMEKEHKEKDSAEANSDTTNANSLDKEKQPTAPIQLGNKRKLGDGVNKDNGEEDLMKLSTHNSEEPVDNGNVAYVSSFSSRSSTTTMSSVEDEEDSGTNAGDDGWMVVKKESFKKLCDFYEKRRRVECGGGTVAADPFAEQLEREFREATMADNNRTDERVDEKLTAESEPKKAGEFVKEVGQEPAAAVYVAQIVDLTTEKDGKSENSEKVTIPCVHSVVMRGVCAGCGQDFRQEKEPRGGTLMGCVDGEEVCTAGLPYPGYQKPKGQKHSRHCEWKHKNLVIQSLVEQLVGMGFDNCNGWLFRVAEKEGAELDRIFVAIDEDKMYRARISLQ

SEQ ID NO: 151692 - protein, 35 aa, Heterodera glycines
MSKMLVSSFLLLPLLLVLLPTMDNVSKNEEKEKIP

SEQ ID NO: 151693 - protein, 177 aa, Heterodera glycines
EFLLFLAKSCLAPSSVASSSTSTGGSSSSSPKKSNVQQQHQIPEEEEADVENGCGDNANAVVANDFNDEMPSSLFCIDEEDETLVATTTTATTSGINNNLSSMMSDGEIADDGDGDDNDDDDNEVVVVVVDDGGGGGLPLFKCDVFSREKFIDEITVMEQNYYRPILILINNKGGHT

SEQ ID NO: 151694 - protein, 349 aa, Heterodera glycines
HFLKDYVKGLELIPSFMNWCVEMGIRHSGLDILCSPHGLCLVLQNLLKREQLLPKHILQDKLLHILQDKLLQSMENVALAICVAHEVLRGSESQWAAYFTTLPSTFPTPLFYSEEQLTALKPSPVFEESLRMHRAIALKPSPVFEESLRMHRAIARQFVYFYLQIAINFVKIFGKTHFRAINVLPKMFAKSPFTTQNFTFDFYRWCVSIVSTRINMVPSQHKKGEDGQPRMIPALLPFIDMANHANSIPALLPFIDMANHANSAANPVKIIFPTPKIIFPTPNLQKIKIKLNKPIVNGEELFIHYGPRTNAKFLLHNGFVPQQPNPDDLFELKIGKPKCDPVLKASNLH

SEQ ID NO: 151695 - protein, 85 aa, Heterodera glycines
MRSPFCYGTSQPFGLYRYPRNIPANSASNFQPEALKYKATLKPKSYNHKSRNSALKKSQSAMEWTTNRPAPYFPRNDYAAFSTSQ

SEQ ID NO: 151696 - protein, 207 aa, Heterodera glycines
MLRSQSAASVSEIDLTSNSVFNASSLGLSLVKKEDSSAHDQSNSFSAPKNAEQLSKCLLDVETAKRLLASKLPLPELRPLMVGCYMRYHAIREILKDSECNFFIDKIIHVNRDGIRFKHCRDNSYRSIHKIKEPENAIDQRGFNLWINDMKKWNEPLPYMDLQLLILKSIRKAVSSLEEGESQSLMDSTDKTTVPEKPCNISRASLT

SEQ ID NO: 151697 - protein, 87 aa, Heterodera glycines
  unsure (1)..(87): unsure at all Xaa locations
AYHSXNGCNFLGNSIGYLXIRQLTYSIITKMTKFQDDCQRPLEQHVRFGCPRNTDYLVHEDERLTSLFILLNIGIWRSTYLCVKSSH

SEQ ID NO: 151698 - protein, 188 aa, Heterodera glycines
MQICVLLILFLINLIDQTETEKKKLEQKSCDGIFGEKWEEKEEEKRNELKKREIIAKFYKIKEKIKQKGRKYSTKEWNKINLKIAKKLGTNRLYIYKWIKEFGLQKQIQKSYKSKTDEEKLEFVQKFIEMKKEYKQKRKYSPKEWKKNYVEICKKIRVNYGMIKKWKKQFGIRSKITEEQKIEKMKNL

SEQ ID NO: 151699 - protein, 137 aa, Heterodera glycines
MLCGELGPVLDAKTETGNVEISTPLQALLSLFILCSGATVSSSAAKNLVQLILGTEPGMELVVYEGVRKDNVRAGIFPNHEDVERVWILWCEKCAVAKKLLQSSGFDQSEWKNSGHHLTDAELTAGTPFFRGCDVLN

SEQ ID NO: 151700 - protein, 147 aa, Heterodera glycines
MVIYPGSKSKTQHKKLHWNHFGPYEIVKTLDSSASVVPVDKKSAEPITVPIERLVRVPIGVPDISTLPHGKNPYRNILATILLASLKLSKLDTKGIFGQFEPLLQTQFGENSLKSSKKIVVNQLGTTDNLGERKMKQRQQKENDGLS

SEQ ID NO: 151701 - protein, 172 aa, Heterodera glycines
MSDEPKEAEKKMEKQIWMCGDNWLKVFELVPIGQLGLGIALVSRAFDFFVDEHFKTRKWTLDSILIRCKFAEDGQKEMQTFNSRDELVPIQKVPLPNKVVGFKCIRCRQLNMAHHLSDVDATNYYIQIHRPKCRGFSQPISPSFRRFWGKFVNYKHRRTNFGMGYAHLAYAQ

SEQ ID NO: 151702 - protein, 84 aa, Heterodera glycines
MAFFTAFGRGGGAPVVSPFELINNLTGERLTFKMLNRKHAMLKRYPIAQDEQKWANWENDMMVMGAKNVIWIEDEFDKSRKKAN

SEQ ID NO: 151703 - protein, 42 aa, Heterodera glycines
MAVKSLPMVTRSDRGVNLANQKLIFTKNGHQLEYYFLWNIFN

SEQ ID NO: 151704 - protein, 102 aa, Heterodera glycines
MAYSLTLLWTEARPFLGRLKQLKGIIPIHFVPNASYFALRLYELSCVRFVSNESSGTRGAICQKLHRLGFVGPQPEHIFTPAPVAVKYLRQHGLRPKLIVHK

SEQ ID NO: 151705 - protein, 69 aa, Heterodera glycines
MSRTNRRDFSHKGNPSHLKTQNLDILKKAREPRLEQDFLEIWVVENPESWMVSMLDLDLNFLAKNPGKL

SEQ ID NO: 151706 - protein, 86 aa, Heterodera glycines
MDHSLRSPQSHRTAFVFSSSLSSSDASVHFQNINNTVANAMSPILAGHPNCVVIAKIDLTMNNSPAGDYGALPSDLSEQMAGCLSE

SEQ ID NO: 151707 - protein, 173 aa, Heterodera glycines
MDFINDRVTNLHNCTYLVLDEADRMLDMGFEPQIRSIVGQIRPDRQTLMFSATWPVEVRSLAADFLSSPVGLNVGSLDLSANHNIKQNVEVIEDFAKKDRLFVLLNDILKQTEYKTLIFAETKRKVDELTREMRYKGIPALCIHGDKSQKEREWVLSGEQMNYGCKISFNHKF

SEQ ID NO: 151708 - protein, 121 aa, Heterodera glycines
MITWLKHCAGGGQPQNRVGLAPGHFPSVGRAADTVPTAREGKVAVEADGGIIGTEVGKLRQFGGCHEQTKCNLNKSPTKHEWLEEKADQNDQKITLISYEFAELIQSYRTIIPMNVFNYVN

SEQ ID NO: 151709 - protein, 196 aa, Heterodera glycines
SAFSSNHSCLVGLLFVALGLFVTTSELPQLSDLHSAVGFDCDFSLPCRWHSVGGTADRWKMARGEPDSILWLAATGTMLQPTEPFALLEVREEPFALLEVREGRLADILCSELIGCQEVPSLLSFTYWSVSASDLEICLLGSDFRRLCTGMLQATAQPGKVALKVPPIRRSFHVRNLIKINFNLIWQTFKNRSQSF

SEQ ID NO: 151710 - protein, 51 aa, Heterodera glycines
MTVEVNSDAKSGGGVTCGGGRTVPVPKSVVGTTKGAMRVGEAVGNEVNGGG

SEQ ID NO: 151711 - protein, 302 aa, Heterodera glycines
PLTPPPFTSFPTASPTRIAPFVVPTTDFGTGTVPFELLIVGSKTRPFFDRRLGRITEQTDDLLCDFTHTFPCLWGAESGRWAIVHKGAIPSLDQELASEEESPQYPSIVVIQGTAMLSSDPLRCQSGSGKLLFLLFRYWTNGRVLVQVCAIGWAVDSPKIQCVEEVAQHNRMDPNSLAVFELSDAIREPFTLNVVLNVVPIWEKNSHNNYLMIDEIAYIGECNLTASVSAGFSTTVFSTQPPKNETKKSTATHRPTLPTPRPSTVGPTAQSTIDPVDLIMTSTKPEEQKKGGKEKSCRKRRN

SEQ ID NO: 151712 - protein, 144 aa, Heterodera glycines
MDKKREELRRMVGRRYRDVLEASNTVKRLSEIANELASLLANIGQNVVHGQQKDKPSETPSFAGEDGTKLVAPKLLRPNASRCFLLLQNLLSMDFLMENLRQPDSTLLGLIKQMKDTVQSAEQIFAQGALISAIQCVTTKGWSP

SEQ ID NO: 151713 - protein, 37 aa, Heterodera glycines
HVRSLRNWHAVNSKLIDNGFVAPSNIVLHEKLQIEHI

SEQ ID NO: 151714 - protein, 209 aa, Heterodera glycines
MPPHNPNACYAINNPPIPRATTSLSNSTNPSNINNQNNISNGNGMAGGVQQQQQQQQKNPKLYKTELCRSWMEHGRCNYGESFHGQYLEKTQSNNALQQQQLQQQENCAHFFQFNNASQQNHQHNHQQQLPIGFFASPQQCSPENQNAQQSPLSSASYEMFGGISPKNQQQMTTELFDHGEMSSPQPNNTHNQLHHHHQQQHFNQHHQQ

SEQ ID NO: 151715 - protein, 24 aa, Heterodera glycines
MVLIEVLLLVVVVELIRVLLMGVI

SEQ ID NO: 151716 - protein, 79 aa, Heterodera glycines
SIGPPRKSAVVPIRQGTASSATTVWPQRSRMAFGQANARDLQQRQKWHKGRERCQQSQQKRQQRVGPAKYARQSVLKRW

SEQ ID NO: 151717 - protein, 54 aa, Heterodera glycines
MTLAFDDDTLTKSKGESKKLASPQLIGQITNLSDAESDAQNRRSSDGDTVKGQW

SEQ ID NO: 151718 - protein, 136 aa, Heterodera glycines
MPLKNQENAIRKNSCQWYNLHNMKIFACVTSFFAREACNAYCSIARRWHGMALALAHWVAGVLALACPTPTVITPLSGAQFDNYSCLFNALSLLSETETGCTRIRVLRTLWRYKPYIFQLIWVLRVIEPVVRTPYR

SEQ ID NO: 151719 - protein, 148 aa, Heterodera glycines
MVHSNYIDFFSQIAKGIAKFGIKVAPKERETVATFEQAYYGQFMNLDQADDLIALIRTFLEFACVKEVINERLNELDVPDNTEYLLENAQRILTEHYSPTHDDIIHARAATKGIYEIIFAFREFKIRLIDEGGQKTERRKWIHCFGNE

SEQ ID NO: 151720 - protein, 28 aa, Heterodera glycines
TVYAQIIAQSLLIPQSPIIPQSTRCFEK

SEQ ID NO: 151721 - protein, 21 aa, Heterodera glycines
MWVDRKRRDANGSIALADLRC

SEQ ID NO: 151722 - protein, 158 aa, Heterodera glycines
MDPFLIYFYFFIIIIRGCCCNPFHCVIVLLQPSDGGGQPNQSNVGLHRNVQDNVPQQIPPFFVLHHVSEQERHLRQKDSSNSNGTIFAQFGDKMKANPNLSGDELYSAALEFVKQMFSSVRRQDKRQIYTHVTNATDFVFNATCDIILAKNIKSAGMN

SEQ ID NO: 151723 - protein, 62 aa, Heterodera glycines
MGQTSPGLDIEKDGYLGCRKKICFGNPLVRKLVRVGSMNAEQVYRSVIFVKKLLPTKKKSEV

SEQ ID NO: 151724 - protein, 60 aa, Heterodera glycines
MMENAQCRMDFRPKQSALECQVPNRQSKKTHQNREGWHHRHRVDFDLASLALNETSTTVP

SEQ ID NO: 151725 - protein, 51 aa, Heterodera glycines
LSKTNTEKHLAAIKVATIDGTIITTIRAKVVTFTEEARNYTAFHDGIVPTQ

SEQ ID NO: 151726 - protein, 22 aa, Heterodera glycines
MSLFRRLAIFIVLLAFLGVFCG

SEQ ID NO: 151727 - protein, 26 aa, Heterodera glycines
MSGSRFVEIVKSGVWFVGVVQIDRFF

SEQ ID NO: 151728 - protein, 60 aa, Heterodera glycines
MPKMIFLAAPEAAAEWRRRTTTSSKRTNPTRSSRNECLNHFRKMLLTMMRRAVIVKVKRG

SEQ ID NO: 151729 - protein, 368 aa, Heterodera glycines
DVHEYQRLLEEHDKLGAEVRRVGERNERWKREMDDRLSEWLDPLGELVANISNNFTNFFAQLGCAGEVRLDTPPENKYNVAEYGLSILVKFRNGVGLRVLDPHTQSGGERSVATMLYLLALQNLCPVPFRCMDEINQGMDPDNERAVFNMMVRLLGNSGTARGGGENIAKTQYFLLTPKLLNGLEFNERVTVHIVHNGPEIEHGDQSKKEGITDLIRVEKKAQIMRRMVPKYADEGAAAETATVPMPSPSAVVVIEPTLKKEKQREKEKRSGETDNGKKQRKDEKEEDEQQNMGEEEHTAQQRHQESANIGEEAEEEAANVGKRHRRRRFRRCLPLDGAGGLCAAVALDISALRQRAHSEGHIQQQQQ

SEQ ID NO: 151730 - protein, 75 aa, Heterodera glycines
LISSQKSCQLKTAKKAEFSKFFISIFFYSSKFSVIFSRLIEPVKSFRMISRLFDSVNNFKSYIDSKLAQTELARS

SEQ ID NO: 151731 - protein, 207 aa, Heterodera glycines
MATRKWPRDLPQRENSHAKTATRKRPRENGHAKMATRKWPRENGHAKTATRKWPRENGHAKMATRKRPRENGHAKMATRKWPRENGNAKIAMRKRPRENGHAKMATRKWQRENGHAKTATRKRPRENGHAKTATRKRPRENGNAKMATRKWQRENGHAKTATRKRPRENGHAKMATRKWPRENGHAKTSWPEIKVPFFFLLLLWLIV

SEQ ID NO: 151732 - protein, 118 aa, Heterodera glycines
MIPGQQNVGTPFQYTNPNCQNGGQQFQAIYFVLFYLIGAGIACQQQSNDHTCHAHELVKSFAWYPTKCRAPSFKQFPITTTTKLPESSAHEFVKSFAWHPSKCRDSFFHQFPTTTTTK

SEQ ID NO: 151733 - protein, 912 aa, Heterodera glycines
MHWISDCPKAPICSNCNRRGHHQSKCRLPAPSSKSNSHRNHATMSIFNIGDDISDWIMVDCQLNGNKASLMADSGSRLAVIQQALWEQLGSPKLKKGISKAKSYSGHFFEISGYFICSVTYQGVTLQLECHVAPEGAMNLFGLPWIRAFEAALQRPIVTTLTTDQFKFDTDSNSISISEDPDKLATILKQKFPKVFSPSLGLCNKMCAHLHLKSGVQPVFCRPRPVPHAAKSAVDAELDRLVACGAIKQVDYSKWAAPIVAVRKKNGDVRVCIDFATGLNDCLELNRHPLPRIDDIFAALEGSTVFSQIDFRDAYLQIALDEESKELVGINTHRGLFQYQRLPFGVKSAPSIFQKLMDELTAGLNGVFGYLDDFIVATPTLEEHHSLLKKFFSRLQDWGLRVHLNKCKFLCSQIKFLGHIVSAEGIRPDPARSAAIDFMPPPHDLQTLRSFLGALNYYGRFIKPMRELRTPLDELLKKDVPWQWGHEQQQAFVKAKELMQSDLLLTHYDPSKPIIVAADASKNGIGATISHSFPDGSEKVVEHASRSLSSAEQNYSQIEKEALALIFAVQKFHRMIYGRRFTLLTDHKPLVAIFGSKNGIPIYTASRLQRWALILSNYDFQIKYISTNSFGQVDFLSRLVAQQRETVQSEDRVIANIEELPLSISDHDHPTSRDEPDESAVEFVFMATIDQLPVTTKEVAEQTQLDETLREVSEFCRNGWPKKTPQNLASYFTHRYKLSEVNGCLLFGERVIIPAELRQRILSALHFTHPGIVRMKALAQRHVYWPRMDLDIDRCVQNCDECALAAKAPPKAPLRSWPSTNKVYERLHMDFAGPCSDGRLYLIVVDAFSKWPEIFSVQSTTADNVIVQLEWLFSRYGSSPIMAHLFTQMNFPIFAGPGELSKVRSALSPAEQ

SEQ ID NO: 151734 - protein, 528 aa, Heterodera glycines
MAVDFAQILKQLVDQQTQAFQNLLQNAQPNPNVSNHSTIYSTINSQLGEFSFNPEMDSTFQNWLDRYGPFIQIDGKDLPDQMQVRLLLGKLGSEEYNRYAESVLPSKPTDFTLAQTIDKLKAMFGETKSIFTRRFECFQLTKSISQSPLDFASQVNAMCERSQMDLTKDEIKALIFLTGLSDTDRELRERCLRLLEEAKKKTPPEAISFEKLTEECRAFLSLRNTSNALAHSTHGSSTTKAEVSQSSSKTTTTTSNNQRSSQFQRKPQQPPSPCRYCNQMHWISDCPKAPICSNCNRRGHHQSKCRLPSPSSKYKSHRNHATMSVFNIGDDISDWIMVDCQLNGNKASLMADSGSRLAVIQQALWEQLGSPKLKKGISKAKSYSGHFFEISGYFICSVTFQGVTLQLECHVAPEGAMNLFGLPWIRAFEAALQRPIVTTLTTDQFKFDTDSNSISISEDPDKLATILKQKFPKVFSPSLGLCNKMCAHLHLKSGVQPVFCRPRPVPHAAKSAVDAELDRLVACGAIKQ

SEQ ID NO: 151735 - protein, 99 aa, Heterodera glycines
MASLRSHLKNHHQLKLKELEEKDKAAESLKNKETNPRQPTLKRIFATSSPVIKKIARAESANSSQLTIEKTFSQWTPDGEMTKKIDKAINDLGQKIFHK

SEQ ID NO: 151736 - protein, 148 aa, Heterodera glycines
MASPRKKQKHSSTDETSTEIGEYEQQIMGSVVTSFGKRRKVHVPKKMNKRILRKIWICFDVWMDMFPFFDRPQLGLKLALISPRFNVLIDKYFNGKRELTIWKWIGIDKMGTVPKLSVFTKYPTNSVPFPLPDRPLHSKIRFHFLLIE

SEQ ID NO: 151737 - protein, 124 aa, Heterodera glycines
MFMEWEIRPYPELVALLGRTEHVPATSTVTLTSAELRDLVTSALDANMRAAVNQTVRNTVAEESHNQQQLINRISELENQVRQLQILGPQPVTTSNGTSGIRGKHFFLFSVCGIAKPTIILIIV

SEQ ID NO: 151738 - protein, 89 aa, Heterodera glycines
MKEIEKAIEQRQCKQKSRRSDKPTRQMTTKQEQNRPDQTTAQGVHQQRQVNIKLNLWPKIFGKQSLLGFLEILFRNSNKFFDFWHIENT

SEQ ID NO: 151739 - protein, 81 aa, Heterodera glycines
MVKGWAKAQKSCEWNQSQSIIINRARTGPGSRRDFAGTPGPCFFGQTTGTGSPGKTGVPVPGSRPGPFSKSRSRPFQNSGL

SEQ ID NO: 151740 - protein, 82 aa, Heterodera glycines
MRCPLGPAFSSAAISEHEQQPMGSFVTEFGKRRSLRVAMKKNHRILKKIWICSDVWMDILPHFGLPKYPLPNKIRFNYLRIE

SEQ ID NO: 151741 - protein, 639 aa, Heterodera glycines
MKSGAGSLFGQQNTLGQQQGSLFSKPAGGFFSTTTSGATFPTATTTSSLFGGQTQTGGLFGAAKPAGTSMFGATSQPSGGLFGQQQTASAFGATTTPGTGLFGQNKPSAFGQVSQPSIFGGQQQTTGSIFGGTAPSSVGGFGAATTTTTSLFGGQPQQSAFSFGQQPQQTAATTGLFGAKPAQQFGAFGATQPTSSFAAKFAPPIGEDQMQLKGTPHKVNTKQMCITSMKEYEHKSLEELRVEDYIAGRAKNTGAASAASTSLFGHQNVMGQPQQQQQGGLFGKPAGGLFSPGGYLLICQDPRLGLPGTLRVPLKKQALGEMVIENQFLTQLFLPIVQAFIVNFAARAATTSGATFPTATTTSSLFGGQTQTGGLFGAAKPAGTSMFGATSQPSGGLFGQQQTASAFGATTTPGTGLFGQNKPSAFGQVSQPSIFGGQQQTTGSIFGGTAPSSVGGFGAATTTTTSLFGGQPQQSAFSFGQQPQQTAATTGLFGAKPAQQFGAFGTPATQSTSLFGAPLSKIGTGSIFGSPQQQQQPPVGGLFGQQTGTNLLQKPAQPSLFGTTSPQTGSGMFGTGFSQPSAFGAASAGSPPILLGSNVNISAIQQAIISAQLSSLPYGDSPLLKSPAISPSKSADDIA

SEQ ID NO: 151742 - protein, 348 aa, Heterodera glycines
VLDTGEMHPTHNRTNKFVQVFQDIVDSYGIASYREINPAPFTLVTFPFLFGVMFGDIGHGLVLFLAGLSLILWERRIEQSRIKDEFKMDKSLQVITCNEYLFEFDFDIFPLSLTQLIALSSDANSPRQMVLGLDPDVAFLRQEGSYWMGFFHSSVNLWTVAIPSFFFLSSIFVYLCVLIFVKWIFFSVKPDVIFGYYYPGSHCAPSLLIGLINMFMQKQRPYGFVDSNNNSTEYPNCHLSLWYPQQALVESVLVGVALFCVPIMLCGKPLVRKIRHHHRTTDGMVAANRKDSTRKLQKSKNILVRVKMDSEVAELIATTTSNNDLDKGTRNGQPSGEGGRAYRAEDEL

SEQ ID NO: 151743 - protein, 125 aa, Heterodera glycines
DAAYSCVVELGQYSLVQFKDLNHHLTTFQRTYVREVRRCAEIERCLRYLETEVVEGGVSDHIPPLDTTRTDITLLREMYDLESHLYDIERDIRQFLANEAQLKRNFNDLKQFKSVYEKVEAFFRV

SEQ ID NO: 151744 - protein, 76 aa, Heterodera glycines
MSLFFKKVGPQLGVPVRHHHHLCLQRVVGIPGQAAEQREHWRPGGPADGGTVQQRHRRGGGDGDDDDGRGHLMSDD

SEQ ID NO: 151745 - protein, 77 aa, Heterodera glycines
  unsure (1)..(77): unsure at all Xaa locations
YKNYSITFLAVKKMNYAKICFIFLQLFPILFHSSEGRVELWQVSQGNPDYYTRGAILNEDAVXNENYNGGGQHYATF

SEQ ID NO: 151746 - protein, 225 aa, Heterodera glycines
MEKHCLPSASCSKFLVCDLIGENGKRRGKEEEEQKKMREREKKEEKEEMEDREREEKKERGEKEKGGEKGGKEEREGVVKEEEEEGGEGKRRKKTERERERGGDAGGKKREEKIREGKRRKESEKGENDWEKKGEEEEREEMEKEEDKEKEGKERRERETGEKDGQKKVEEGEGENDGKEKEGKTEAKREAEKQKEERSQRECRRKRTMPQFADERAAELLVIAF

SEQ ID NO: 151747 - protein, 91 aa, Heterodera glycines
MIIKGTKVIGKVIRVIRRGTKVIRKSTKIVKWPLPVIRRGTKVIIRGTTVIRRGTMVIRRGTKVIIRGTTVIRRGATVIRSGTTVIRRGKQ

SEQ ID NO: 151748 - protein, 31 aa, Heterodera glycines; identical to SEQ ID NO: 126976

SEQ ID NO: 151749 - protein, 148 aa, Heterodera glycines
MERQKSDTELSGVREDLKQKRHTLKEIEEAKTNLEDALAKITRELNLSNEQLVRKENLVEELENQLEEMRIVGTGKHQYIISTDQTVVGGINGSGAVSSHKIDDATLRQLFLSYFTAEKSKQPEIAIVMSRILGYSAEELSQIISDII

SEQ ID NO: 151750 - protein, 90 aa, Heterodera glycines
MASLKKANERPKKKLSWTNVTVFLRIFRAKKDFLWKGNEIQWTGEPLAERMGILRTRKQDKVKSLKKKAIGQFAKEYKNKLNIFDIIPWH

SEQ ID NO: 151751 - protein, 121 aa, Heterodera glycines
MHKIITLFVVLFLYSSKFNGHPKGEITEEEAEVSAEETEAAPEVKNGHCKFEGMLLLGQNADKNVDLLSILESAENNEKAKDTERTDKVKIIRPSEIHRFIESLEGQTVAKNGIQFNVMSG

SEQ ID NO: 151752 - protein, 377 aa, Heterodera glycines
FIFAQLRISHDFLEETRTVMRHKFLNEWGDERDMLIYPPANGHYSAYSSDQIIKHFAHIVKAYYSIQNDSFAAFSYDTSAHIVDEHQSLRLHTVFANIPPDTSAHIVDEHQSLRLHTVFANIPPLRLCIDRIADVKIQNKIYIFDTSVENECFVLDFTQTEVDDVFRDPFTVRRLLVQRNITFRAEDALIVSKAFINFNVRTIHYSTLQNDRKPECYLIRLTIRFDNSRHTGQVKVDLIATISYINLCNGRIQQGENGLGTVMIALLDLFVLSMCLGSLFLCVRSLVKGHLLKNTTREYFTTREYFDRAFGIRLSIQDKWEFFNMWYGIVVVVRRAVTKHTMMKPNINGIPRDKRPPKFFFANLFSNEPPVNFLLTF

SEQ ID NO: 151753 - protein, 105 aa, Heterodera glycines
MTLIRDKHMPTKARRKHAAEQSITKPTKKHCPPKCFVNGAKPKEKSARSEQSQLNDSQKGETDGTTGEQNEQQRGDQVEGQGQHVQQIDMANSIFRMLSNNTKNG

SEQ ID NO: 151754 - protein, 272 aa, Heterodera glycines
ATNSTPPAVSMGQDELFRRQEELSKREQVERGGEEQNRRQQTQPQANGLGFGAQNRDHNWPPLPSIVPLKPCFYQDIDVEIPQQFQETVRWETVRWAYHVYLLYVLALAFNLVASLLFVLFAGGPIGLPFLAVIQLALFTPCAFLLWFRPVYKAFRDDSSFNFLVFFLVLFLHTIFCFIQDDSSFNFLVFFLVLFLHTIFCFIQALGLSEYACGWSDTLSIIRGWSDTLSIIRTTHFFVGLVMLCSAACFLAFVGMCLSLIKVIFRQICPPN

SEQ ID NO: 151755 - protein, 33 aa, Heterodera glycines
KATSNVELDAIIKTIGRGKIPTKVENWILSPEL

SEQ ID NO: 151756 - protein, 129 aa, Heterodera glycines
MVLCPLSLNRQLGCTCTVLSESHSVQILCNGTQPDKVWAVLGGFAPNIDKLAIRRCTTNKKSSILKNMLPLKVRSLEISNCAIAQIQPNAFDSLADSLEELSLESNALTSLPNLHKLKRVKSLNFNNNS

SEQ ID NO: 151757 - protein, 242 aa, Heterodera glycines
IVKNNIVVLSNIAQLKDDRNVIGTQRLVELCQQMPQLKAFVHASSAYANCNLAFVHASSAYANCNLAKTEERIYEQKVEVSKLVGTMEWMSDEMVEAIEDKLLEDRPNTYTFAKAMAENQLSKSAKDLPVIIARPSIIGAIWQEPLPGWIDNLNGATGIFASVGKGLLTDMCGDMKSVADIIPVDIVANMLIVAAACRSQMGCTFIATNLLSNNRLFEIEWHNALFVSSFRFYSSHKASIPS

SEQ ID NO: 151758 - protein, 297 aa, Heterodera glycines
MNPLITLIIHPFSLLITGATGFLGKVLLENLLFTQPKIDKIFLLIRPLNNQTIKERLDNLLESPLFNRIRCVDETRLNSPLFNRIRCVDETRLNKLVPISGDLKMEGIGINEQDRTALINQVTFVFHCAATVKFDEALKVAIQMNVNVIGTQRLVELCQQMPQLKAFVHAAFVHASSAYANCNLAKTEERIYEQKVEVSKLVGTMEWMSDEMVVAIEDKLLEDRPNDRPNTYTFAKAMAENQLSKSAKDLPVIIARPSIIGAIWQEPLPGWIDNLNGATGIFARVGKGSVTFVCCFC

SEQ ID NO: 151759 - protein, 111 aa, Heterodera glycines
MSSKPETLVERMKHLLSSGDDADVLFLHVPAHRAILNSASDVFEAMFRFDTTKNATDYESAAGEAKGPVEVTDIDAHVFKVMLNFIYADDLSELNGDNAMAVLYTGQKISF

SEQ ID NO: 151760 - protein, 103 aa, Heterodera glycines
MVREIRKRDERKTNFGQCQAEDNTTILCRTFGAILKALRYSIPNNEFAADDFQLVTFDNFIQQILFHFQKGIRLDQRFRILVNVIQAATREILKKKKKNKRSI

SEQ ID NO: 151761 - protein, 98 aa, Heterodera glycines
DFSCRCLDYIDQNAESLIQSDAFLEMEQNLLYEIIERDQLKIISGELIIWNAALRWADAQCLQNGTECSAENRRVVLGLALSKIRFPLISLSDFSDHV

SEQ ID NO: 151762 - protein, 16 aa, Heterodera glycines
MTLSKKFLPRPYVSAS

SEQ ID NO: 151763 - protein, 68 aa, Heterodera glycines
MYKFLNEIHFQALRWADAQCLQNGTECSAENRRVVLGLALSKIRFPLISLSDFSDHVVYHTYTVPKAK

SEQ ID NO: 151764 - protein, 284 aa, Heterodera glycines
MYKYNFFFAVPSGVLTSEESVGICQFHLPGLLSPVAFPSHARISAWNNTPRGNAGTLAMEITKFSQFARRDEGKCRLSKGKVHIKALPWKICAKINTTKNENGTTEKCLGFFLQCTAPREDPKWSCKCSATFRIISQKRGTEHLIGKRNDHIFNNKMNTLGFSNFITFSELMEKDKGFYDKDGDKVTLAIDVIVKEEKADKLDYSNPNKTNGKIVMEIGKLTEFSREICLSERSSEIKQIKGLSWKILALIINQNNKSSEKCLAFYLLCAGSKSGHKIWIYPII

SEQ ID NO: 151765 - protein, 143 aa, Heterodera glycines
MDPNRGLYDQNEDKVTLAIDVIVEEQITERFIISEPNKSNGTIEMEIDKLSEFAREVSQSERSSETIQIMGLSWKIVTEINTKNDRNGKYENWSRKCMATFRIVSQMIDLGDFSRKFDEKRIFSAGNKNRGFTNFITFAVSDN

SEQ ID NO: 151766 - protein, 47 aa, Heterodera glycines
HNALLQLKRGYGSYEYDRITALHSNINMMPSAHSGPTFPLWHREYNK

SEQ ID NO: 151767 - protein, 22 aa, Heterodera glycines
MIVTDSAQILSPVVCASEVASS

SEQ ID NO: 151768 - protein, 152 aa, Heterodera glycines
MKVVALVSGGKDSCFNMMRCAEEGHEVVCVANLHPPNEIAELDSYMYQSVGSEGIKFYADALGLPLFQRKISGRPKCVESNTYVQDEEDEVEDLYHLLKTVKEWDPEIRGVSAGAINSTYQKLRVEHVCERLGLVPLCFLWELDQLQLLDAM

SEQ ID NO: 151769 - protein, 32 aa, Heterodera glycines; identical to SEQ ID NO: 127531

SEQ ID NO: 151770 - protein, 98 aa, Heterodera glycines
MAQVFWGQPKWERANCSPSSIAIEFFSNNKKKRSYEEWTNICGFWYSNRETPFTDHGVQQLELVQFPQEAQRDESKPFAHMFNTQFLISAVYRARGNA

SEQ ID NO: 151771 - protein, 82 aa, Heterodera glycines
MRNTKKCERQNAKRRPIPDPYYYQIEQNFWKIGVVGPLEGKGVRTSPPFGTVPDLYMGPGTGRSLKEAKPKHTYVNLLLNQT

SEQ ID NO: 151772 - protein, 28 aa, Heterodera glycines
VETLIPIVNNSCTVSISNGEEAMSKDCY

SEQ ID NO: 151773 - protein, 142 aa, Heterodera glycines
SIDPSDDGFSFKDRHGFSLMLAKLAELLAEDTGESCNLSRKTIFELLGSSSEWNLGLIGPLLPKYSFFYDKAGFSELLRSLFPSLIRRDHQPCADSAISSFVEALFGTDSFSETISRAFDQFIPHLLDSRLSARNFFCTFCK

SEQ ID NO: 151774 - protein, 66 aa, Heterodera glycines
MTNSTHFVVKISKIKGVEISHFAPKSEMRKAKCETPKNAKGEMRKVKRRPIPDPYPTHLTREHSEL

SEQ ID NO: 151775 - protein, 42 aa, Heterodera glycines
MASVQKDRREHHSSLNCNCDLKIDIQEEESKIQKILIKKSRF

SEQ ID NO: 151776 - protein, 110 aa, Heterodera glycines
MSISTSSTNADFTPSIGEGVNEMGKEVNDDSISLDEDWQFDRKNETVADRQQLLMVGNERSFNEAFTYIFRQNYLFLKEFHESYAKNKMKMEFKITKLVLEKPTFADRHL

SEQ ID NO: 151777 - protein, 77 aa, Heterodera glycines
MFKLLILSFFILFAFFGFADGNNSFCTDNFESNCLEFAKMVAKRADGFDECLLAAGATNCAGRLACCEKYGQQSCIC

SEQ ID NO: 151778 - protein, 21 aa, Heterodera glycines
MTLFFIYSLKKTSKVSINSVY

SEQ ID NO: 151779 - protein, 53 aa, Heterodera glycines
VLGQEVSYGSDELADVLSLQSYDGHYSYYDANNDWENDYDEDIDYDLYDSDYY

SEQ ID NO: 151780 - protein, 86 aa, Heterodera glycines
HFSASTADRVEKFAIGFSCLFGHFDYGLGTSDAKAMNWHNLLHSLLISCPQIKTIDVKIFFEFRPGEHEGLCTILLKWSPQFVETC

SEQ ID NO: 151781 - protein, 104 aa, Heterodera glycines
YFSKSSIAWQLLFEYFYDFQNDCFSTSYTNEKLQQLFNNTMFVLEQEEYQKEGIEWQFIDFGHDLQPTIELIEKPTGILALLDEQCIFPKEADKSLVEKLILHH

SEQ ID NO: 151782 - protein, 338 aa, Heterodera glycines
MVKRTSITDPALHAEWASKRLIWVPHETEGFVKVEDMADLTWLNEPSVLDNLKQRYYSDLIYTYSGLFCVVVNPYKKLPIYSETLIEAYKGKKRHERPPHSHSSADHINMVGELEQQLLQANPILEAFGNSKTVKNDNSSRFGKFIRINFDMSGYISGANIEFYLLEKSRTCRQATDERSFHIFYQFLRGTSPEEKTNFLLEDVSRYAFLNNNYISLPNVDDSAEFHNTVRSMKIMGFHDEEINSVLRMVSAVLLFGNIEFKQEKNTDQATLPDDTVSQKICHLLGLPVAEFSKAFLRPKLKVCESAWADLAHFMDMRMNWDVGNIVPGFLEVWCMEL

SEQ ID NO: 151783 - protein, 41 aa, Heterodera glycines
MEDSVNPSANLNSVTFDLPLSPPAEEEKEEDKADQSNGNVV

SEQ ID NO: 151784 - protein, 86 aa, Heterodera glycines
MNGLADESVPFGDHLKSGFGLVEHNAMQPNLFWNFHYLFPMFSPSTCVLFDHITTTEKKIFTINGDKVFLGFNSVSLSISEVEELT

SEQ ID NO: 151785 - protein, 27 aa, Heterodera glycines
MGGQTALEFSLQNEHKMVLFGLLLKKL

SEQ ID NO: 151786 - protein, 21 aa, Heterodera glycines
KNSNFNLYQVKIIQNYLVFYN

SEQ ID NO: 151787 - protein, 67 aa, Heterodera glycines
SPYNLVSERAVERYDLEGLVNRNNIYRPIPMPNNDLMSGKTFIYGKITNKIMFYPQRQGIPKDHSLA

SEQ ID NO: 151788 - protein, 83 aa, Heterodera glycines
MRRCSTQKTARRLTFILKTVTGQSDSGQSDSGQSDSGQSDSGQSDSEDNRTEVDNRTVDNPTVDNPTVRTIGQKWTIGQSNIK

SEQ ID NO: 151789 - protein, 92 aa, Heterodera glycines
MDLNNGFYDREEDKVKLTIDLTTVDEPKVDKFNLDQSNSKGTLFMEIEKVSEFAREIFESERKSETVHIKGMPWKIWAEIKKKDESTDKNEK

SEQ ID NO: 151790 - protein, 72 aa, Heterodera glycines
MLGPALFKIRFPLLSNEEFTRKIVPFGVLSKDEVIAVYQFKFLPNYHGISDGFFPMQFPTNGRISDRKKAHF

SEQ ID NO: 151791 - protein, 82 aa, Heterodera glycines
MALAETVANMATGVRNARKQFNEHVAEKCPQKDSLGPLYAQICGSHKNSAVLREWEGARRRRRLQQKAILDRMLRKRGGHKS

SEQ ID NO: 151792 - protein, 257 aa, Heterodera glycines
MSHAFRVPPRRPQNEGQGDKNDDDDEDQSEMEIFNRQITDICQMLLAHHHNEVEKVGRLCAQMGEAILQVLAIQQQIPNPDEVEQQHGEDNGRDNRNNCSFDEDESDGESDDPTVEHPLPAARRVLRRLKLPTILDISAATEADVQEYGTKLSDTIKQITKLRVQNGGALTSELELRSKQKQAQNLLQQIGNLMPQLVVEEEEVAEILNLAEQSADRFSIGFLNKEQKKQFEEAIRQAKKAFEILLNINWTVWGTIL

SEQ ID NO: 151793 - protein, 145 aa, Heterodera glycines
MDEIGGRKTNEFLRKISQFRDVMNKMNGTTKDIIHKDQIGSANSGRTDEFYEKPNGYAKIRESRLIGLKGPNLAMFHFQAVQMRVQNLSDCKNELIFFMPMDLIVVLDGEEKGFRIVRICFVIPPDNLGVTYFEVKIIKLQRENG

SEQ ID NO: 151794 - protein, 25 aa, Heterodera glycines
TCTCGVVVKLSTFHNFSPGFNSPLG

SEQ ID NO: 151795 - protein, 202 aa, Heterodera glycines
NSSAPYNYSYIFKYIIIGDMGVGKSCLLHSCLLHQFTEKKFMAMADCPHTIGVEFGTRIIEVNGQKVKLQIWDTAGQERFRAVTRSYYRGDTAGQERFRAVTRSYYRGAAGALMVYDITRRSTYIHLSSWLVYDITRRSTYIHLSSWLSDAKTLTNPNTVIFVIFLIGNKSDMDAQRDVTYEEAKAFAEENGLTFLECSAKT

SEQ ID NO: 151796 - protein, 25 aa, Heterodera glycines
MGEGRARPLLFCLLSQAVLAHNTLY

SEQ ID NO: 151797 - protein, 327 aa, Heterodera glycines
AKALECGYTVDRFYRAWHYEEEANDLFKGYVRLFLKLKEEASGFPKGVETGEQKDMWREEYKEKYGIEIELAKVKKNPGLRYISKLMLNSLWGKFSMRNCLNKNAVIDRASEFYKIACDHKIELCDIVEYSDEAIRLIYRDKEDFVMEHKSSNIVISLWTTSMARLKLLEFMREAESNGGEILYTDTDSIFVLHDRDVEPITTGKYLGEMSEEYGGYEIEEYCCGGAKQYALKMRSKQTGETEYVMKIRGITFDVDNRKTLHYDTFREMVLNYGKGEVDPAFFVYKNDFGPTRDSKVVTREKHKMYRPVCQKGIIDEELNVMPFGFC

SEQ ID NO: 151798 - protein, 156 aa, Heterodera glycines
LLNGLSERYNNFHWFIYQFLCIIGVIANICFVVVLLRPTPTMRKNPFNLFLIVIAICDMSLMASYFIYKQVEMCHPWYFTFFWIVYTYGYAVLSVFVHSASLWLTVNMAVLRYLVLKSGSSSSRVPRGSYKAACGAVAAAVLLAAVGSAPSMLRYE

SEQ ID NO: 151799 - protein, 134 aa, Heterodera glycines
MSKPNKCCFTVVVGVVVVLGVVVVVVLVEVVVVVVVGVVVLVGVVVVSSELSVISSVAEMSVVSFVAKMSVVSFVAKMSVVSFIAEMSVFSSVAEMSVFSSVGVGASGVGIGVVVVVVVVVVVVDLKESRLKKN

SEQ ID NO: 151800 - protein, 126 aa, Heterodera glycines
TGLSWPGTELTSTTTTTTTTTTTTPIPTPEAPTPTDENTDISATDENTDISAINETTDILATNETTDILATNETTDISATDEMTDSSEETTTTPTSTTTPTTTTTTTSTSTTTTTTPSTTTTPTTT

SEQ ID NO: 151801 - protein, 43 aa, Heterodera glycines
MCPAITFRSCRNMPSFHQTSRDLCRPFTITEAPHIPVVLVRSD

SEQ ID NO: 151802 - protein, 154 aa, Heterodera glycines
MEEAFAKARSEEKQCGICMEQIVEKGLRFGILQNCTHCFCLDCIRKWRRQTDEEIKTKTVRSCPECRVHSDYVIPSKVWIDLKSDKDKLVSVFKGNKCFYKHQLPDGSIVEGKSPTQLRKNRRNDAIMFSLYDFLPSDSDWEDDFFNDNSDLYD

SEQ ID NO: 151803 - protein, 172 aa, Heterodera glycines
IFCGIGTQNFWGSLEINPADPAKLNSEIHGHDHENREFHGFWIMVTVTIHDAQVFFNHGTPLLMLERGQKNPAVADGASRIQFAAVVDRVKMNKIPFLFIALFVVQIIAAYEPSCKCPENEEPGQKSCNGCEPSCDNPKPEICTARFCDCSCDCVKGLFRDKTKKCVPKCPY

SEQ ID NO: 151804 - protein, 229 aa, Heterodera glycines
MSSSPSVSVLAIVAIVCLMCQCCFSAPHPCCPGSQKVVSLMSNYVGPCCPGSQKVVSLMSNYVGTFANSISKSSLCSDAQNVADALKGQLIGCSNGGDRTLLAEIEASLATHSADECECALSLGFVRAMFAIAASASSHASNNSEWQALSTQFGQKVTEIDSKCAEFGISIGKVPINGPKGVHVQNVPNSESVISMPGLAGSHKGVHVQNVPNSESVISMPGLAGSHTQ

SEQ ID NO: 151805 - protein, 88 aa, Heterodera glycines
MTRNVQSLVLALAKCPSTVARLIDHILSFISIFCFFSSTPAFVIAIGGAFVECRKAFHVAFGGNTVALGQAFHILRVASGAATEKQFE

SEQ ID NO: 151806 - protein, 47 aa, Heterodera glycines
MPICCTGCNAQNVKCLSKCHGVATECHMKCLSAFDECSADCDYKWWG

SEQ ID NO: 151807 - protein, 215 aa, Heterodera glycines
MYTILRFPFWPYDGAQHILLDNSYLHYFKTTSEEYTEGLALKIAIYTHFYMLKWKTEQNKEILEQRRISGSENSLYTEINNHLKTISIGSALKSLNIATVCLLLREKYTLLSTLNGAEFKRQNPPCPSCETQEKAQQTVKDHFEEMAEWMLSDLLKSFHSRKRLIKYLKCEIAAKNNQYEIEKAWKKLVNLFGFARALLLCRTFRQEFGILCKRN

SEQ ID NO: 151808 - protein, 79 aa, Heterodera glycines
MKGGSRRVPFPTPGTYHHLQQQILSASSCYTVQHQQQQQSSSASLFTLADATLLQNSAIVNEALKTLGTFQQQEIAAKR

SEQ ID NO: 151809 - protein, 65 aa, Heterodera glycines
TEYRQVFKKEFRSLFGRLRKNNVVQTIGMAQMCNVNPSNINNNKVNRSSQMTIIRNVNTIIQIRH

SEQ ID NO: 151810 - protein, 50 aa, Heterodera glycines
MPNVSRQNRDSKNQSAEVGPTTSSYIQCLMDKWSIKKAFRKLKGEGFTGY

SEQ ID NO: 151811 - protein, 307 aa, Heterodera glycines
MSSINTSSDNALYLAYRSVGPSVDLIVPAVALYLVALIGIVMNGTALVVTAKSRQMPLAFFILIIIIEFNFNFNLNFPFFSSLRGSANFLMALICLCELVHQIGHTFLLVVVISGTNFVSLHTADLIIAPSVFALNCGLMAMFCAAVDRLFAVLMPFKHFSICAKYKLPYLFGHLLICIIYGTFIQYHVLASAFENAGMPTNGLLADAFQDDIYQFFIGGVYSISFGCICCYVTIFLIVRLKKSVTQQTNTRLLRSLVIILSINIGGYLGTLIMSQLIGTIGQVYFCSTYLYNQSQTENIIRLHHIK

SEQ ID NO: 151812 - protein, 33 aa, Heterodera glycines
VLDYDAEASSKKAKNRLDLTKKYGKAALRQSSR

SEQ ID NO: 151813 - protein, 71 aa, Heterodera glycines
MSFVCFNKFTECICQCRVGVPVNVVPILAHCKSRRLQFALDYDVEASSKKAKNRSDLTKKYGKAALRQNSR

SEQ ID NO: 151814 - protein, 64 aa, Heterodera glycines
MGAVAVVYSRSGPLPEWTEEEWEARKRIERSTAIDPVGPDTGTLQNLDNLDPDPAFVDPAIPDP

SEQ ID NO: 151815 - protein, 282 aa, Heterodera glycines
MALCNKKCQIQCHLPSFCLIVVLLVVLIDEKLLILAQILGGQQPPPPPPPPPQQPAPQGQAVGPGGPGMLFTGTGTNMYYGVNLVPFGPENGDLEVSPGFLTSGQTIDLHLFFPFYGGLYNYTTISVNGYLGFATVLDQGPTINVGPDSTDWPRVQDPAMIAPYLCKQQACPSTAGSYVRCDANSDYFLDEMMRWLQEGVAGASAFRADAALVVTWYNTGSAVSGRSDLDGGQLATYQAIWLTDQPGRLSYVIINYDKLGFDAADFRANSRSGRCRVRNVRE

SEQ ID NO: 151816 - protein, 86 aa, Heterodera glycines
MGIVARRLLKNRAIQKQLDRRQKNMKTLRRQQAAAGRSPIVVHSAGIGLPRTEPVHQRQEICTVPAHEVIYDVPFDGKREEDEDSF

SEQ ID NO: 151817 - protein, 68 aa, Heterodera glycines
MPDERVLHLECFESGDYDMMELYGPDRAKEMLIELRDYAEAHGMPCQYVKMLLYKLDKGLIKWKGTKP

SEQ ID NO: 151818 - protein, 453 aa, Heterodera glycines
MAINISDKKSLFNQILGQTDLTVTSSGITISGPRLSTPRFIPFDEAGRCRCCKGTESEIDTVITKEGITLWCTRIEKAQFIPFDVVYDLPGHCFFRLKNKSRVFNIPYGDIPSSDTHTTKRPRTNDYHQHELKRKAKVALDLVEAGLMADAMQDGARWKKAKTAINVLGNLLLAESLDTTSATPLKNDVADIKKEEEATVAEEHKEDDDDQQKEDLGDIDKTLDDFFNSIKASTANIDKDICFKLPFGLIISGPSSSGKTQFLLKFIAESDQLITPKPVSMLYCFGEMNAAVPVLQKAGVDVYAGVPSEELIKRLPKPLLLVLDDLMLSVDERYLSDLFTKKAHHHQFAVVFVTQNLFERKIKVARLSAQYLVLMRAPNSLLSIRNIGVQLFPRQLDFFLDAYRKATARPYGYLLIDMHAASDPSLRLRTNIFKDEQEEDEGTVVFIPKNGAA

SEQ ID NO: 151819 - protein, 187 aa, Heterodera glycines
MRRELADRPAKVELTKGISVLLRRGAEDEEGEVVDTPSRPPPPPPPPPGGRPRLPPSPPGRAPSPPGSPPPRPQRPPRPTRASRRDDRLEQWEKRRHDIQRRRPVVRDLLAEAAAAPLPESYTDDEYMLESGLALPTPSQYYGDLPVVPYQHQIEQMDTAAAQHRIAIRRKLKKDEAYDDSDRKKYR

SEQ ID NO: 151820 - protein, 765 aa, Heterodera glycines
MITRSPPLTRQRALNLGIELDNGGKQILERVNPNSNQNPSLSLELGNGHREMVDDGGGLGQSRLLNEQQLRNRLLTVTMLDNNNPVVHVPNENVQNQRIAMNAPLVNSGIFGSNNGNVGDYSEELGGTRILQNRPNSNSGAINLNNAEMIPTYPPALASTPVENFGNLARNSENENFAFIEHNEVRAQYTQPRSTENIRPIFVRQTAIHSHLSAMRLPPIQQPVVAIDFPEQFVQRNTQTNMPQPPFYGNQRQNENLHQNLQRVAGNEVQQRGVHINPGNFPERVNAPNADAFHMRREMHDLVLTQAIKSLDNFSYSMTLNSLPELKGNTGSDAVRAFFRHFDVATEEWPEAKRLSALRSKCSGRAERAFNVAVSNNPFRYENVKRSMVQQLEETDARQMSAFDELMSGISRRNNERIDDLADRVSSLVRKAYPGLLEHLYDDYSIRHFIRALQNPELALTLKLARRPSMIFDEFVALAARAEATQKASKISLQKQRNIPNFQDHNQSVHYNPRPMQQTFRNENFPRISQSQNRQNCYNCGRFGHFARQCNYPRQVRTENANIGTPATGANKTSVEVPKDTSQPQYNKPLPFSRNYLRQNFLVEQQENPPPTSQNFLIGGISMSNDELEKLFERDKSVEAGNSRAKLLNVSVGKIMVIKVFVCDLSATAMLDGGAQVSLVSFAFFSKIMTEKNIDKILLCPTRESTQVVDINGKTVEYVGVVSLPIVRKNTKVWIRFHVTNASFGYEFLFGTNALARLVLSFMTA

SEQ ID NO: 151821 - protein, 229 aa, Heterodera glycines
MELSKYLRQEFEFAQIFGISLHLQEIKKHFVGQNGQLMANDIEASLDSFISKNGFGLIENEQKLKIEEAISELEQIIRKWVAKVAKLNRTPDAWMPLIEFKFEISPNTFVAFDIGLTTFAPQEEIFKTEERINYEQSDALSAKMANEIGQLANRRREFITKGGGYEELKEMNNEEEKLRVKLRSLAGDWRCLIKSDSDAKLFDYGKNPPGGIAWGYLLVGFLYSLSLKK

SEQ ID NO: 151822 - protein, 218 aa, Heterodera glycines
MRIDTFVGEVENVSEIFDLAEKCKEKFANFEENVKNQNENFNEKNEENYSDEKERKNGNKLGKDEEEADKTKVFDVDEALKYVNSEENNEGKDKKKKKGKKKPKPNKMPSEIGTKSEEENQNEDKMPMNGMEEKKLKKVKVSADRIPSESNLSEKDGQFVEKESYAKLMPKTHKNDGTNFEITQKENEKDNGSEGETMREKEKEKKEKITQKKKETKK

SEQ ID NO: 151823 - protein, 75 aa, Heterodera glycines
MPEEARIIGESGIKKDMGQKGAASIAQSVRAFHGGCPVGHAGGAVTVRAVDDVGTASSAHAHSAIDDPLIDSRMD

SEQ ID NO: 151824 - protein, 720 aa, Heterodera glycines
MPPEIVRRQPEGYGQCADWWSFGVIAFELLTGCSPFTVDGNQNSTEDIARRILTKKVPYPKWMDRTARDFIGQLLNRDPKLRLGARGAAEVKKHHFFDGTDWEAVERQFTAQAPLFSPADKPPPECHTFFSGYSFVSPSVIFASDNVIGQECLESSVRLLSAQSSPFFANYRLDITAQGLLGKGSFSICRKCERIADGRQFAVKIVSQRFAHQARREELHWQILLPILCQVRVLEALQPHSHIVPLVDAMSDAFHHYIVLELLDGGELLQRLRRMEKFTELQAAEIMAQLVAAVKHMHDRDIVHRDLKPENILFERDGPDDAKPRLRLVDFGFARILPRPAAIGSTMGSQSLITPLCGTLHYAAPEVLDIEDELPQYNEQCDLWSLGVVLFTMLSGKVPFHAKSQAESAAEIIARIRAADFSFSDPVWSMVSQSAKDLITGLLTVDPTRRLSLAQLGAHPWLQSVSTTTDDGTVPDGGAGGGGGTELPTPTILPSSADATFNATLSAFLHANRDGFQLMDVQTAPLLVKRRGMKRQRGPDTTATTASGSGGTAAGANDGGGIGAERMEQCAANNTNNNSMTTATTLCTVSECPELTMNMNSSGGDQHHQQQKFKRRPTTLNLFGTIGEVEQQQQQHEHQQPQGTPNSAAFTEYRDTKPPYLKYSRDDFTRAECGGSGATVEQQQHIGGGTPGMANDQSSGCSSLSGASTIRLSNDSNESQ

SEQ ID NO: 151825 - protein, 185 aa, Heterodera glycines
MIKFKNNGELKVAQIYPLSINQLIDQEITVEQIATKIRGKSNDLWEGQVAKWAKKWVGTKDKISEKKKAKGNNGKSAYFSKFYDSLRMDRLVLLANNIREASINKKFTDSTDVIEILVTTTNQEKDKTGISETFCHKLAQENEVSGNYKHILIPLCMNRRNEVFREDEEVINQTDEKAILLRNYD

SEQ ID NO: 151826 - protein, 219 aa, Heterodera glycines
VIERLNEIVKDPHNFAELTENDLLVNALVTFSFPKLRHIFKKYEEKYGEKIEEQVDNAYIKEFKHLSKNRIMNLLKLDLHVEQHFWQTLNAILTDIQGRPYFFAQLLKEKLDKLRGNEKWASADALKDVTRILLTRAPIDLADIDQEFQGLSGSLTIRISISAYIEQIIGFEKEKKQKKGNVFRSFSIRSKSHEDIGTAVSSESNTAAAEGKPSQKIEL

SEQ ID NO: 151827 - protein, 285 aa, Heterodera glycines
MPVFFLYFSRTYIGLTQRQLLDGVNAFGDNPLNFSPIGNHSALGTTISTINSEHSYAATPIQFGIGTINSYVANHSWEDEIVRAPHFPIPLWNMHSQATSALARTNNGLEATHLHFMKGLCHHPALSDFICGVNKSIDRQVDAARSARHFIHKRHKRYILQDAVIMRILADASYNSNGEISDLMSALGLQVEGYAGKLRDFKNYDDSIVHVPLLDNSWVFTLLDNSWLGQNVAWTIRGLDNSWLGQFVAWTIRGLDNSWLGQFVAWTIRGLDNSWLGQFVAWTIC

SEQ ID NO: 151828 - protein, 93 aa, Heterodera glycines
MIQNNITNDNNNNNNNNAPNNGNNGIFNHIHHQQPTTDEAKQLRATNIGLAECLKGGVIMDVMNAEQAKIAQEAGAVAVMALERIPALIRQEY

SEQ ID NO: 151829 - protein, 156 aa, Heterodera glycines
GPGLPKIPGPAQLLIHFVSNMKVNNAEIRNAEIRNLTKMNEEELMSWARLNSAPIELVFQTAREGSLPVPNFAAGGVATPADAALLMQLGAEAVFVGSGIFMSDNPAKRAAAIVQAVTHFDKPNVLAKVSRGLGIAMKGMDVLVPEKRSHWNNKKE

SEQ ID NO: 151830 - protein, 88 aa, Heterodera glycines
FPRVPNITSVGEKAFLFQDANCGDNPEYKDDLFINHLSFFILLLFSAFVILKIVLSPRCPAVPAEVASKCWSWQDNRKHIGLSNDIKN

SEQ ID NO: 151831 - protein, 129 aa, Heterodera glycines
MQFVVETLRGICPGQTANGRFDERRRQRLAVQLPKIDIKCTKTIGYVNGRWLEQRGCAPFNPLNSQICTKVETNAALSELSGQNIDIHVSSEQCFCNQNRCNGTFTPKTLTALSVLWPLMLAFFLVKNY

SEQ ID NO: 151832 - protein, 102 aa, Heterodera glycines
MSSGEDRQMEQEDLQQSTVGTGTKRKLAAQASFDDDLDLDGFSELDKLEPAVAAAAGSGANAEQTNNGGTMLQNGTELLLTQSTTSATMHNNSPRPGGSFAT

SEQ ID NO: 151833 - protein, 1142 aa, Heterodera glycines
KKNKQSALYQAANDSRNAIFYSLSAFEIICKKCGALHFKEESATKNANVYSCCKDGKISLLSDHLEEYPMELKQLYFIDHPYHKNFITNIRRINSAFSFASLSCLRFSFKTPGPPCFKIQGQVYHKFNESAMPNNNELPTNGQLYFIDTNDAAELRKINISCDQNLMEYIENFMREQNKFAKSFLLMKEVYEEQNEISKKEGKEIPELRLLFSLKQNFDKRRYNLPQTNEVCAIMFCDSNDEIPPARIVVYPKINKKLKNLYPLDKCVEPMTYPLLYPLDKEGYHIGLKDKRQKITLCDYFKYFLYFREKFFPHFYAKKLFQQWLVDSAAKIEWDRLEYIKTHQTELCSSNYSNVEDFLKLKAEKSGAEIQRKIILPSTFSGGPRNMHEHFMDAMAIVNETGKPDLFVTFTCTQNDPDILKCLKPGQTPSDRPDIIARVFQLKKDYLLHLILSEQIFGNVVGYCWVIEYQKRGLPHLHLLVTLDRNSKWRTTTEIDKFIAASIPNKSEDADLYEIVSSCMMHGPCSEKTLCWDHAKNKCMKKFPKPFLEETKINEDGYPYYKRSNDSRFVFKKGVKLSNQFVVPYNYVKVLLIKTVNGKKYDSFAKACLARGLCEMTTWFKCMESKYFFKISERLRVLFANFDSLWTKIPGKIMGFFGLYGCRHKIKKSKFDDFPLSNWLTANKSNPNKPRTFLIRFNNATNKNAKTNLSRNDNFNPIEETKIADKLKMMLNEEQMNIIKELTDVFESNKQKCIFIDGPGGTGKSIYFKTIYHYARGKNKNVCNMAFSGIAATILKKGRTLRNRFKLPLNINKNSTLLKLIVKKRNEIKETDIFIWDEAPMSRFILDIIDRKLKEIMQNNLSFGGKTFILSGDFRQCLPIKEFAIRSEIIDLLIKNSPLWKEFTTLKLTQNMRANTNEKQFAKDLIEIGNGTMGKNGYFNVPEHCICQENLVCEIYGENLKNHNYDELSNAILSPYNTVVDKYNVEILDLLPGEQHSYLSIDETDLSKNNPVPEILNSLKCSSIPDHEIKLKKGAMIMLLRNLNVKEGLCNGTRLQVIDLGKHVINCIIKSGDRIGEQTFIPRITLIEEKKFPFLLRRHQFPILAFAFTIDKSQSQHFSKIGSFMMIPFSHGQTYVALSRRN

SEQ ID NO: 151834 - protein, 268 aa, Heterodera glycines
MQLVRLVGCNRTLLADAIRCLRRIPPADFTEQLWNMQLNFLEFPLVIVSRDANFFSAEDAFEALRKRHYAQDVNLMIGILCIWAKFSVAYGNIYNIPKFFDVPHQPMLSLDNFNECVKTAFSRLPDIVRDAASLDNSPARVYVYYFDQASSANPWPKWTGVMHGYEIEYVFGVPIYNESAGYTKREQILSQKMIKLWTSFASTGIPSLDHREGFSDRLHWPQYHSQNNPLMEKLTSALSASFAKTRLFPQSIVAIFFTLISVQKILIY

SEQ ID NO: 151835 - protein, 32 aa, Heterodera glycines
RQKLSEVYKKIFEKEMIAMLHREFTGDFWELM

SEQ ID NO: 151836 - protein, 185 aa, Heterodera glycines
VQPAAESSSGSSSSGSYDTQETQPSGSDSSSGACSGASCGEAAQPGASSSSSCSGASCGQAAQPAASSSSSCSGGACGQQTSSSSSSTSSCSTCGLTSYNNNWSSKSSYTTSSGSAAAPAPVPAAAPAAGGYSGGSSAGGHSSSSSCYVCGRHGLTSYPQTSYTTRTYGGGSGCGSGGCRSLGCP

SEQ ID NO: 151837 - protein, 404 aa, Heterodera glycines
MLAGGLSLSLLCFIFTMCSMVGYAMAGLRILFWIFSVLFARLFKPRKETWVLSEEEENLLYPHRRIRRPRPATRNWASGRVSQMTILVMASLPFVHGGIETVAIMAKSESCLNNGTTKMCQVKGSVTLALLPAGQPNVLSMKTDDGLILGTLQVILKGLSLECQVYTKAWKRSYEIASVASKRCPSAGSCVGDFCTKVRPSTAIRELRETETFPGNSFCIDSTAFWGNQCLLAASSCLFYKWFAKPRSSAIYEVIGCNSWEFGIHIQFRLDSTTGRSTTVETVLLPGRVLKWHNISISTIGVSQAPTPLLNADFLIEGRNVALVRERITDSLHCTDLKAAQAFNCTLGIDACTGCLPDHTDGTVSCHCRVANLEGLMEDLQRRLPLSFRHYELRNIGRRIFAIT

SEQ ID NO: 151838 - protein, 308 aa, Heterodera glycines
MANGWPMKEKPISGKRTERLESKSVQRREWRHSLNGRGRGVDLMMISMREGGQNEQCRKAVQWPRQTNESRDRLVGQKKAERGKRKLLKKEKGKRREEGKGRRREEEKGKRREEGKGKRREEGKGKRREEGKGKRREEGKGKRREEGKGKRREEGKGKRREEGKGKRREEGKGKRREEGKGRRREEGKGKRREEGKGKRREEGKGKRREEGKGRRREEGKGKRREEGKGKRREEGKGKRREEGKGKRREEGKGKRREEGKGKRREEGKGKRREEGKGKRREEGKGKRREEGKGKRREEGKGKRREEGK

SEQ ID NO: 151839 - protein, 407 aa, Heterodera glycines
MIRNAQCSATSRPVRRRQDSERGKSCTNPFEQGKATDHLLHSLLAEQIGTLFDDTDMIIVDESGQASYVQLLSMLTNFPNLNKLLVAGDRWQLSVNLKDVPEAVQNGYGLDTAILNLDAAAGVDRTTLTVNFRSHPFITECISAGVYAAHNEILTTGRTIKQMDQLTSKTPISLPVPQCPIIFVHQIDRMQEDPTSFSATNPMQTRTVMKCLTFLRPCFNGLIRVVCFYAGQAKEIGTEVSALNMPNVMVTTVDGCQGHEAEFVFVVTTKSGLSSNDNSGAFWNDERRVNVALSRSKFGMMVVGDLKLLWSAGGIWRRFLRRALDKAIAVTPEYIHAMMDPHPQFVDGVIATPNGSVKAFDFYDDWQGSDGPFLPRSIRPPRMLFAGTSRQQQSARQPGSAHPNMPA

SEQ ID NO: 151840 - protein, 471 aa, Heterodera glycines
MILETSVDPMATLGAKMLELEGASFVTNNPEKSGEGSEKSAGTNDLMETEEGEKNEGMPFVAEILNVVNEMSGTEMPEKAQKAGFGFILDDEMHQALDNIDESNDTAGFGTSHLRCAIVQVQSSMAVAMLKRFTKNCPWFFGISNGTPTGSDRRLRLGDEVDIVNFAWKSGYEVLRHFDQDGTSPPWLNAGNINIQATAIKANIANPTNIVPKIGIVLNVKRRGMRKTNVIQSLTVVAPGMKVAQSLPGWALGEKDWFRTGQAVLVETVELMRPNLWKVNQIYALPLNCPFGQVNDRKAYHPFVAVGIDQSPILHKFPFRRGDLDATIAQGEQAIAAAVTACLDKLEEDILRFTITAEPQVEYGAEADTAIITIRHRLDNKQEMVDMSKMWTEDQPIHVRVAAKGAKPCATGFIMNVERQESETGLSIVAKLFLAYQEAKNYDFNLFTEMAKNTTTGLGTIMSILMARQGE

SEQ ID NO: 151841 - protein, 317 aa, Heterodera glycines
KQSLIFTKSFGRQNSLKQIMRNVSLLFTNSNQFFEMPRPISNKIIFFEMPRPISNKIINIGGIVEMKVKELEPGIKAIVDGIKAIVDNSRDGTVIVSFGTFADINSMKREMTMAFLEAFAHFPNYEFIWKVELSDKDAKVFAKYKNVHPVKWMDQKSLLSDPKMRAFVSHCGLNSVSEAVQFGVPILAIPLLGDQLYNAIMARVKGIAVQLDVGQLNGDGAEQLLLQVLNDPSYSLQVLNDPSYSQNVKLLKQKFASTPFGAKEKLIRWVEFAAEFPDLNELNLPWEEELGTLAYYSVDIIFLIVAMLAIFAWILFK

SEQ ID NO: 151842 - protein, 129 aa, Heterodera glycines
NITDPLDAIERFYFGITDPSGNRSEYKQEFISRCKGYSSHRSPHGVLIKMKRNLLLNCRLPLGNETESYADVLGLFHKIEKHLHNMSISSEEYEFLKNSLLAKSTWVQDKLKSSSSNNLMFKTLLFFIE

SEQ ID NO: 151843 - protein, 318 aa, Heterodera glycines
SGHFNALQPAEVIAKIGIGASCLALCALLWSTHSILWEIEQIQAEIDAKVKSDNSQLKKKTKECQPKVESHSRDGETETSLNAPFTECARMNCPVGPTGLPGQPGDDGIPGTVGRLGVPGVDGTDIQENPLPDMPCIVCPAGYPGLRGTQGERGLPGAYPGLRGTQGERGLPGAAGPRGKGGPPGKSGKDGGFGKRGPLGKRGQLGVPGKAGAAGENVVGGIGVKGAPGQPGAGIGVKGAPGQPGAKGPPGFAGLAGRPSKMAGQPGRQGLRGPTGMPGEPGPYGVPGPQAPGPYGVPGPQAPPGEIGQAANFCPMRC

SEQ ID NO: 151844 - protein, 25 aa, Heterodera glycines
MSIYFSLSHKTNFAIIIQRLYYNNV

SEQ ID NO: 151845 - protein, 42 aa, Heterodera glycines
MPKKQLVLPEWRNDTKILLIKANMDQLFLAPSTEPDAEEKEL

SEQ ID NO: 151846 - protein, 306 aa, Heterodera glycines
MSDIWKYFDKSSNDKALCNVCGKKIVRNDGSTMGMWKHLEARHKQQFTELKSWNLLEKQEQKKQRRIDNYVVPKKNELEEAEESIVRIMIRQNNSFLFVEDPDLRNLTKKAFPNLEFGGRDHFRRKVIPRMADQIRHAIRTGIGDGHFAITSDGWSKPTHSPQLQSLTIHWIDDNFCRNDAVLGAFPMDEFFHSGEVIAEGIANCLTENGFHWIKLRDVCMMTLCCCHFLNLVIQDAIKNQCLSEIIWKAKEPILSQFRRDGIRPTECWHLSKSRRKFCWQCNFEETKKCPELCLHPKNLDGPRWK

SEQ ID NO: 151847 - protein, 271 aa, Heterodera glycines
MPKKKESEKEIKRRQAIRWSSRLDESGYLGKTGSGYFRVQKSRVRVQVFKPGTGGRESGRGTESGRGTEEKVEEEQKVEEEQKVEEEEKEEEEQKVEVEQKVEEEQKVEEEQKAEEKVEDKVEEEQKVEDKVEEEQKVEEKVEEEQKEEGKRKRKRTRNRKRTRKRKKKKKRKERGRGTERGRETEKSGRGTESGRESGRGTESGRESGRGTESEEKVEEEVEDEQKVEEKVEEEQKVEEKLEEEQKVEEKVEEEQKVEEKLEEEQKVEEK

SEQ ID NO: 151848 - protein, 145 aa, Heterodera glycines
HSLNLLCTFGSKCILQNKFETARNFLELGVKRVTLLPETEPTILLSFYCCYAEALFHTGDIERALDYAKRAQKLSQGSDIDAAVRAYVRDFSRQIERDTLRASVRSNNERTASSSSSSSSSSTSLSAEGAEGTEKGISNWLWPFK

SEQ ID NO: 151849 - protein, 83 aa, Heterodera glycines
MSLITSISLAVLVFVVATVRESEAGCWPPALNGFSSGYLNLKSSEKIQLKKSVYFLAVATAASVARAEIFFLFLTIEYDLKID

SEQ ID NO: 151850 - protein, 206 aa, Heterodera glycines
MKLLPLFFLIVILIIKIDQFGAEKKKLKQKSFDEIFGEKWEEKEEERRNELKKREIIAKFYKIKEKIKQKGRKYPRKEWNKIERKIAKKMGTYRKNIYEWIKELGLQKQIKKSYKSKTDEEKLEIVQKFIEMANELKEKRKYSTKEWKQNYAEICKKIGVSQRIIEKWKKQFAIRSIKLFVIFSSILFHSFLEYFLPFYLFFSFIL

SEQ ID NO: 151851 - protein, 47 aa, Heterodera glycines
MVPILRNDPSLTTKLRIGRRLSAPPDPLPSPVLQNSLEKCAAKNLFF

SEQ ID NO: 151852 - protein, 136 aa, Heterodera glycines
MFGAGELSTHKLVGLPLTWISNMFFQQEFKEWLRIRSGLRSKALISCFITFSVSAGQAFRICRFGRNSIMPYNGSHNSLFVYALLPTPEVAWHVCWACNQIDENLGNYWPSKYGQMKFKPTVQMSARQTFLDETNS

SEQ ID NO: 151853 - protein, 86 aa, Heterodera glycines
MANRWHRQQRHRTDERGQYDSRHFDGVRPTKCALRHRRPNGPTAATANGRSVRVGCPSAVAAPTPNAPFWRVGQRMNGEKTNKLEQ

SEQ ID NO: 151854 - protein, 421 aa, Heterodera glycines
MMLFTCKIKLCMLKEDECNTLTVTDQRMPLAVALCLLTNHSQIKPPSCNGKRAKSAANGNFNVDNAGAEVGTGTAAIGGRNGGGTTGKEEEQQTMRGKGKKQNGGRGSRTEVSGEVAEGTAQTDDSGPTTERPTERTTGATTASSTAPTATTTSTERTTATAQTTETTTEPTQSTNTTTGTTSSTTATSTTASSTTMTTKTVTEEQLLSSVERAASGESSEGIQPKASSLSSAAEAAAQPSSSSASSPITAQTTETSPITDGTTIHYKKSREEMTEDFPRPQLLLQNDHAKTAEGDKKRMERMERAEEGSWTISASEEGEEKGKGKKKVPGGEEEEFGGVTKPVQVFKKGKLEGTAPTEEGKAKPQMAAAGRTQRDTPAAGGRAGGSRRRMAEVDFDIQSPELMILDDYGLEIASISPSGV

SEQ ID NO: 151855 - protein, 646 aa, Heterodera glycines
MFIPRSPPLTRQRARNIQQQQQNEHQNTQRPHNTANTENVLENSVVDGEILRTNGNMDSAQIRNALLELAQPNRQNEGQENGAENNGNEEQRGGLRMRFRNVGTNDGRENWLVGDENRNDGHRNLNQNLLPRTSTPISGPIFPELLIQNVHQSVHQNLPNRQNMGDKNQQHGIPKTAMPQPQVVQQPIAFFPPVQQAVPGPFLNYPAINPFYQLAPLPMQLPNQQMIGFMSTNAQNPPQMQNAYNPQFQQPYLPQGNHQFGMINQAHIPQVVQPISQPQQQQINAAQNLARQNFENRPIENVIERGREPGMDQVAYALIMSQIPALKGNEGAEKFREFFKRFDSNTGEWTNAKRISSLESKVFGRAERAFRSACSTVPFRYELIKREMLRQLEETDAREWNAFDQLMSGIRRKNGEDLDDLADRVITLVRRAYPGLTDHLVDDYAIKHLIRTFESSELALSLEMGRRPGMTFDQFVGMAARAEATQKATRRIASNNAYGKTNFGATLTRQGPEPKTNFQHSTGNRPKCFYCEKEGHIARNCFRRQAEEGNQNHNSQQNHNVTGSNKTPLSLYPSQSPAYKPEPNNANPQRPQNTQSRNFLRQNYLQRKVPRCPWDFRMKFGGWIEHPQVLKKSDFIFCGMNSSAEL

SEQ ID NO: 151856 - protein, 273 aa, Heterodera glycines
SRDIKRNGQQQNRGHPGEADERDELRSFPTLVEALQRVDEHAGFNVEIKYMRMKDGSHECENYFERNQYMDQLLVDVFRHAGKRRIVFSSFDPDICTLLSVKQNKYPVLFLSVKQNKYPVLFLCVGQTDRYVPFLDERYVPFLDERSKVTRVGTNFAACSNLLGINLHGINLHSEELLSDPSSLKRAVAMKLITFVWGEDLDKLEHVAYFRRQNVDAIIYDRIGELETRQNVFVVEREVKSALFKSPRTSPSLSRASPSPAFCLSHTFLPHFV

SEQ ID NO: 151857 - protein, 120 aa, Heterodera glycines
NLLSDADPFFREQSENGEPFRNDGEDYFVFRTTSVAIEFLAFRIELFMLQQRNWASTESKIGLTPSRFALAYCPSAAIGSGAIIVCCPLRHALLNAGHNWLPFPAIGRCENAEADGPNKS

SEQ ID NO: 151858 - protein, 146 aa, Heterodera glycines
MNPISELFRIANGQGNDGNDFKKLQAEHAIDQLNDRLHNITEKLKSLLPEMQFDQIIPFSDAKFFEICSEGIVENGIIKHIRESLEEIVRNQENSQQSKNKALNAIIIIQAIKSDLDIFANLAIENLNILREEEQSDDKIKMNLSN

SEQ ID NO: 151859 - protein, 227 aa, Heterodera glycines
MEIINYFLFFTIFLFYPSQSSASKKLRLCVICEHSREVKIVLELFYELNGGIFKIYSDVQIGENFEIKINEKDEREIDNYILQFHVSVNPINNEFLPDENDENPADDQPYEDQFVQMDDIRSLHRTVKVELFRPNFSRLYVVNLGSADPPGRLNWNRRVFVEAENDAGNYHAFVYAFVQKNRRGFELEDERILLGFAPLEKLENANGQQMPKAKNKCQINNINNLIF

SEQ ID NO: 151860 - protein, 21 aa, Heterodera glycines
MFYYAYLINNGCRKKIDAHFK

SEQ ID NO: 151861 - protein, 59 aa, Heterodera glycines
MEVDKHEKSEAVPTEAKNESELIKSTKLEDEEEFEEFPVYNKGEGIDTVEAQAAINVWE

SEQ ID NO: 151862 - protein, 446 aa, Heterodera glycines
RAKSREFLTLSIPFFRSESKLWTANFFLGTCVLYASRVALPICAVAMAQEYGWNKTDSGGTMLSCFFWGYAFTQLIAGSCADLLGGERILPVSTLVWSLLTLCTPQLFDIAYWTNSPLLVLLFVRVSTGVGQGFHLPSMASMISRHLTASEKGRVFGILLAGSTLGSVVAGGVGSVMLEWFGWRSLFHFVGILSILILSILWCLMFNFLSKDALSGEENGQSADDSIAGDHRDKWRVSAAGNESAAVPWGKLFRHPSFWAASSAQYCGANAYFTMFSWLPSYFSDNFPHAKPYIYNVVPSMAIVVTSLLSPLVASRMMAKGRSVTFARRCMECCSLLGMALCFLSVSLSDSFSASLALFTLAMAVRGFHHGGVAVNPTDFAPNHTGSVFGVFNAFAAITGFIGVYVAGWILQMTNNHWGVVFICTAVQCVVGAVAYGFKGTGKRII

SEQ ID NO: 151863 - protein, 56 aa, Heterodera glycines
DFLLLSVEEFSPKLGVHIRTSRNAIFKGNILVVFEFGGELQAFLGYLNEIFSSIFH

SEQ ID NO: 151864 - protein, 305 aa, Heterodera glycines
MEEILSEWDCTEMQAFNELWAGVKRQPDESLDQFAERLHGVVECAYPGLPPNFVDEFAVKHLIRAMENPEISVGLEIARRPGMSFYSFVALAVRAEAVQKATKSAGFGKEHRPNFQQKSTVPPQKIFPPKTNRIVCYNCNKTGHISRHCRLPFARKQSNCARKPPQQNFATKSADFRKNSEAEKKLIDLQLSNQPPAQPTNVEAGPKRKASNRQRNSSSSCSVKATKMEEKSAEIPKWFLNAIFAALVVFAGVFSKEKSKCGQIWKSKGSMSRTDEVKGGKHSENWGQFFRRRPGRNWRMSQPPI

SEQ ID NO: 151865 - protein, 106 aa, Heterodera glycines
MCYEKVFHSKKGVPKVSSFQQSMLLPSPSVFHASSRPLSSRWSALLPTIGHRSIKNWSSFPILRPVNRSRVHEFTSSNWPPFAASCSKECNQMMKLTAMVALIRNS

SEQ ID NO: 151866 - protein, 168 aa, Heterodera glycines
SLAFGFHYTLRHNFFFYHETFCLGVPFSDPSSPSVSSFTSNVAANDGSSSSSNNNNHLLHHHQQQLNHHGSAAAAATAHTTSLNNDADTSKWVINGYTTVYGTYIGPMRSSMVGTTTMAQSAANNNIGHFFAVNESVVQCVNCTFAGDIAGAVFDFFFGHIGLNWIQQ

SEQ ID NO: 151867 - protein, 64 aa, Heterodera glycines
MANEFKQKGKYSSKEWQQNYAEIEQVFKNKLYCRDHHCRKLTAPMERRVVDPTLDNTELAALNS

SEQ ID NO: 151868 - protein, 83 aa, Heterodera glycines
MSREMKWKWKREKKSKKKMEWKSKRKRKRRKRKEKEKGKGKEKEKGKGKGKREKEKGKETGKEKGKRKGKREEKRENEKGKGK

SEQ ID NO: 151869 - protein, 37 aa, Heterodera glycines
MHPLEDCEDLDNEIDEALSEFEANNPERNLLHTICFY

SEQ ID NO: 151870 - protein, 343 aa, Heterodera glycines
MKQTAPITKTGLAKRSLRSGYAFSHCSGFGELIAKGTMFKNIEHLRIPSLSIRPILPPPPAVPNSSRLHQSQHHSHQYRHHKHHQPTSTRRSTIESLVIEQPPSADDEKDDGMTPMITQIVVVKEEDEEGDEVIRATEQQQRVGSSNYQQGTTPTELIRGSDQYGKQTELVDSTDQHWSSERVQASDHYGKSTADDRPLSERDNESRRMVTAYSARPIDMARPNSELKHNLVVNAELEDEEDQRSEMPTPNTSHSFVVNAELDDDVPSLPSNWLRKADTMPKLFDANELAMTSVEQTAAAEHGKTFVSKTRRKSSSSSATSRNSQEMGTVKMDSQRNRQTVFT

SEQ ID NO: 151871 - protein, 126 aa, Heterodera glycines
MRSLVQIQTDEWSQLLRRLEQEEFEQHKEQIQEENALLKRLLAECGRHEEQLSKRHSEQSHQLEMEAAKVRFWHKFLFLATHVQAGGNVNHGIMGPVLYDQLKDGKEILDFPSKRTKKIKNFPLHK

SEQ ID NO: 151872 - protein, 21 aa, Heterodera glycines
KVGTGTKFFDRDREKTRDQSG

SEQ ID NO: 151873 - protein, 215 aa, Heterodera glycines
MGRDKAQASENARISAKTTEPVLITIRKRQDSNPSMTCNLPILFPTFSKFSALYYAAVLLYPILDSHPDSILETLGKFYARISTLNFMLFSSPRLQQCVVERLVDQSHKMSLKKRNHLNSTSLGEKQASNDGDNKDNNCQQNQQQHNSLALRISDPAHTVTTVELTGDQKRMRSLVQIQTDEWSQLLRRLEQEEFEQHKEQIQEENALLKRLLAE

SEQ ID NO: 151874 - protein, 36 aa, Heterodera glycines
IKINQRLKIHRRLKYSVNVAQNRKSPTQNSLLLANP

SEQ ID NO: 151875 - protein, 50 aa, Heterodera glycines
MEEKDEEMSQKFGQPQIKWAHSTREWMKIAEKIGTSLTSIYRWKAQLGLT

SEQ ID NO: 151876 - protein, 51 aa, Heterodera glycines
MRKDSLADHKFVRGYLFFGAISQAAKLKITFTNHRKLLVSKNIKIFNLNPY

SEQ ID NO: 151877 - protein, 91 aa, Heterodera glycines
MILQLAIDTAKESPNESVDEIIKQNFDRNLYEMFKKAAKMTQEKNGSSSSLDAFDDKHLIIIGSKFDDSNIWIYKKNCPKFGQGIGRNPSD

SEQ ID NO: 151878 - protein, 104 aa, Heterodera glycines
MLIAFMKGQQKNLQISKYAIQKYEAYLGILYFLKKNWQCKNILENFDEFEWKKCQKYRKYLVILYEYLLREYAGIPAVKAKYVNKMWSIEIEGFYVLYSLTKIS

SEQ ID NO: 151879 - protein, 52 aa, Heterodera glycines
TCSGPKAWKICFLVIVKQLFELLALILSFLFSLNPKKFNKTYFDLLCFAQNL

SEQ ID NO: 151880 - protein, 309 aa, Heterodera glycines
MFYSVSTILLFITAIIHLYLIHISCAIPSFDDNILIAFMKGHHWKCDKIAEKFEEYERTECQKYRKFLDILYEYLFREYIGIHTVKPKFVFKDQIEINGPIIYVVHCLAKISQFYFKLSWNKNYEYKLKSLFKWLDNIFEPKLLNEHRLNYDETKLPINEIILQLAIEKANEWQINKSLDGIIVQKFSNKFEENLEEMFKKAEERAKNNKWKANLINDDKHLILVDPKYEDKWTWTDDALFSEFVKGLATNFEKFFKMAKEYSNYLNRMKEKGGRNLKKNAKNIENICIFYMNIYSDYMLKGLITGLFL

SEQ ID NO: 151881 - protein, 66 aa, Heterodera glycines
RQMALIRLSDSAFKHRYVPAERQTYSEQQPYERTSANGDETISTEKKWDTKAMNWPKMLLDEEGKR

SEQ ID NO: 151882 - protein, 77 aa, Heterodera glycines
INSEQAMRLPLEFGTGSPAPSTLKLNKKIHLQHGRTKSFGHHIFQFRRHSQIEGYAGKLKDLKILMIQLSMSRNEFY

SEQ ID NO: 151883 - protein, 65 aa, Heterodera glycines
MDIPTYTLNKYSYKMSKYFRYFWHSIRHILQISPQFCHIANSFSLNAQFQGFVRIFPIEFMIFIF

SEQ ID NO: 151884 - protein, 73 aa, Heterodera glycines
MDPKTLQLAIDTAKKVQHGEPMKYSRKAFDNFVFRIPKFRHLEFMKGQATNFKKFHKLFNENELMIFAKQKNI

SEQ ID NO: 151885 - protein, 98 aa, Heterodera glycines
MRLPLEFGTGSPAPSTLTWPTTTLDNSWVFTLLDNSWLGQFVAWTKRGLDNSWLGQFVAWTIRGLDNLWVSGKDKAKLNIKIGQSLGGKPLNNLQMKK

SEQ ID NO: 151886 - protein, 259 aa, Heterodera glycines
MSTTLKPSDYKIFPKSQKCVPSNGTESTASGATEDSFSAEDRKTDWRSIYLAALVCFFGQVQFSIFLNSQFAFMKTLDPTVSEGFFGIIVGCFSLMQMIFSPLMGIWADRIGQLRVPLLVCNAMMLIGNMLYFVIEWFPVEWMKHVMLLSRLVAGIGPAFQWFFTYIGYPGWRLNRWISINMFTATALFAICTNVLIHFLLQFFFRESSVGILDSPKSKANSSEVESAIQKLPPYDRWALAICCAMRFTQYLIFTNLET

SEQ ID NO: 151887 - protein, 32 aa, Heterodera glycines
MGHGIASDVIDAIWPVDPPTLRMALSRDETDK

SEQ ID NO: 151888 - protein, 75 aa, Heterodera glycines
MAIRQIFQFGHQLCMNVTAFKNEFFGNDQSHKFCVHTRRGDFVKRGWDSKKEPTEKGIDLGFEYLKVIQMMNYPF

SEQ ID NO: 151889 - protein, 17 aa, Heterodera glycines
MYKKLFTGAAKNFLKRL

SEQ ID NO: 151890 - protein, 34 aa, Heterodera glycines
MPPLFRRHPRRSGWCAFTDKNSEGIPNSLGMSGK

SEQ ID NO: 151891 - protein, 75 aa, Heterodera glycines
ADPSLYWEVNSQKWPMIGAVVRKFLSPPATSSESERLFSTAGLISDDLRKSLQAENLAKLLFLHHNLLLTGFSIE

SEQ ID NO: 151892 - protein, 94 aa, Heterodera glycines
MGFTSFVRATYYKNKGDLCPLFSDGEQPSKKRKQYRDADRRILTLVERYAQEMGVQNPLVPIHYDHQYFANPGPNFNYVIEFLQGISHNYEMNP

SEQ ID NO: 151893 - protein, 230 aa, Heterodera glycines
MPTATTKTTVVPRAMLVDDMPTVAVAFSRLWLISSLNELNGLLICTRFVQQFIFRLADLEDVQMQPEHRQAEIDQQKCETNKRLGVALRDDLAALLDKYKKYAAGEFRPVFFVVLDTYTEKGSDLPGQQPIATERRHPPKSAPARVRNCANRRRSYNRSGCDGLAVANVSQRHRRLYACERRQPTRARERQRQQQRQTADPFGQTETETGTAQSQSHSADHGNGDKPDGG

SEQ ID NO: 151894 - protein, 76 aa, Heterodera glycines
MASSVSSSSSLAHHHRSHFGILPLIVSPLFLCLSIFGTDAIPIDGVDDAAFQPFQQRQPFALFAVAQEADENGGIG

SEQ ID NO: 151895 - protein, 85 aa, Heterodera glycines
MSFLLRFILQLGLALFHRCTFGIGTWSGPFLFVDCLKVRSICRRRGIVRQMAKEMIRIAAKSNDPLIGWIAKEDATTDAFFQSVF

SEQ ID NO: 151896 - protein, 80 aa, Heterodera glycines
FSLPFPIYHRWNASDCHPKIVINESTNAIQRNTTGTEEFLGGDGLLIPRSCRAGPIQMSYASAGRIGIIYAEYRILAGNG

SEQ ID NO: 151897 - protein, 129 aa, Heterodera glycines
MRDCGICGINPAGSRPAKNFEFQSRKKRVYCASVRGALLCCANDILEENIARNWIEAEEKNVDIIISARIATTVETELFALTYETDGAKLLPSCDCTDPHLLFDGKRSLSHYCKLPCKADSTCKIFSLY

SEQ ID NO: 151898 - protein, 67 aa, Heterodera glycines
MPSVSLSMIDFSHVFFIQKTETKMDENYMFGLLHIIKLPNSQPTESRTYFALRFCTTNFAKSSISKE

SEQ ID NO: 151899 - protein, 52 aa, Heterodera glycines
RSRTKRRRPKRRRTNFSTVTFFFLNRIKRFLVLFESVRKDTISLQIFKNFYL

SEQ ID NO: 151900 - protein, 44 aa, Heterodera glycines
MDKDIVPKEGNRFKKHFDPLTTKEAKSSVTFRSTEITGDYFVLP

SEQ ID NO: 151901 - protein, 83 aa, Heterodera glycines
MGFWAMGSHPVASHEYLDFSLFRLVPPHLVDPGTIVVKTVRQPNVLEEHNYHKRPIMYIINQLIIKSINHLTQGIKPNALFLT

SEQ ID NO: 151902 - protein, 128 aa, Heterodera glycines
MALSQLKGKEKKLLDEKTKLEKLSEIARPSHRLMPILLHRQPEIDVKKEAEETVLDGGESEKDVKRETVENEESEKEAAEKQPKEETEKGRETQAEAETSATQHTVREKENDDKGKRVDERRQSIDQK

SEQ ID NO: 151903 - protein, 70 aa, Heterodera glycines
MAEAIVPKFGMLTKEEMARMKMLQQQMERKPELAAAVKRARLEQEHKTLKTDEEGSTTLNLTVPGQENTK

SEQ ID NO: 151904 - protein, 153 aa, Heterodera glycines
MYLRSAEDLIIWMGKLNDGSTKPQFYHAGKVQIGDELLDSYVSRITHQFVDGAVTKNESAVVVVEVLLANLTIGNMPSDAIRSVVHYTKSGRTNAEFIVNRVQQLNAWQTLAGKLRGCVRRTTADSAWGYFVRMGNGETKNTAKATENCPNWV

SEQ ID NO: 151905 - protein, 68 aa, Heterodera glycines; identical to SEQ ID NO: 135126

SEQ ID NO: 151906 - protein, 41 aa, Heterodera glycines
SVFENLKKHRSLEKINSKILSRKIQVFSCFAWTWTWIFFHI

SEQ ID NO: 151907 - protein, 22 aa, Heterodera glycines
LVIYCCVFLISCHLRLIYSFSK

SEQ ID NO: 151908 - protein, 124 aa, Heterodera glycines
KRQVYVVEEPRDTFVVPLNSQHANEKENATFECEVNDKDIDVKWFHDGAEIGMDGRHFKMLLVLQERAGCRRRLLIINVLIEDHGEYKCTAKDDETMAQLIVHPKFVKKAERKPVTCWLDDELY

SEQ ID NO: 151909 - protein, 38 aa, Heterodera glycines; identical to SEQ ID NO: 130624

SEQ ID NO: 151910 - protein, 38 aa, Heterodera glycines; identical to SEQ ID NO: 129423

SEQ ID NO: 151911 - protein, 215 aa, Heterodera glycines
MNIYLGNSGTSEAYWATHFPVGDFVAEVTENAIVLESEQSVFYFEKEKGDEREGIVGVPDEAYKMSNDVFILIHTPSPQKARGKRETKQKSEPQRKERPAKQEVFLKIRPGQNSKFENLDPASRPKSNWTGTTWAPKRNTTELIILSTPVPQSTSTVGSTIKVTMTISTNITSTVPTTIRPKIEVKKPIFKKIQIKNEQKLSQYTRQLGKRWKNW

SEQ ID NO: 151912 - protein, 153 aa, Heterodera glycines
MNVTEIPALMTPIPPTTQKIVEKVELPKEKGENKSDSIKAEKKNEKLLIPSTAITVVKKIKDEKVRDVSEKTVKNKKSEEEYSQEVEAEVIESLANDGNEMEEFENSFQDESDEEVSVELFDENEIFDMDRRKRTTVTTPDARWIKKVEKSKV

SEQ ID NO: 151913 - protein, 115 aa, Heterodera glycines
MMLDQNIIRESESEFASPIVMVPKADKKSWRFAVDYRALNKMTKKRVFHLPNIQELLDLMGAKKYYTCMDMMQGFMQIPMAKEDIEKTAFISHLGIYEFITMPFGLTAAPDTFQR

SEQ ID NO: 151914 - protein, 69 aa, Heterodera glycines
MFKPSQIVGLVWTGALHSLALRVKVVPSEVNERKARKEPSITRELDTKLFKVMALCVCPPRRRKRGGSK

SEQ ID NO: 151915 - protein, 88 aa, Heterodera glycines
PNGHLKKSIFFVFGAVPPNRCAQIYGETESFRNSFPIACTLILRWIFAPHNCLSTPNGHLKKSIYFCFRGSPPEPMRPDLWGDRILRE

SEQ ID NO: 151916 - protein, 155 aa, Heterodera glycines
SIIIYLCLNFFLLWHLFTHLPITFCHLLFMCQIGIIMVPFFVPFCRNFLALFCPLISQFISCQFLHCFAQIFNPLFCQFCTFLCQISLFIYFLPIFGIILPQFLTLSFANFYTFLCQISLFISCQIFAHFCAKFPYLFLANFLHLFSPFSHLKNI

SEQ ID NO: 151917 - protein, 1119 aa, Heterodera glycines
MPGFRQLNRNTMQKYTSIKCKGYGTSNIPIRPITKSDVTDYQFPILLYHNNNHFDGIKTLSKFFNKRYYCLSCESVYERKSQHSMNCSSLCHGCREVGVDYPCEPQQGYFKKCEHCNNNFYNKVCYERHLHKDLCTKFQRCEDCGVIYNVKYHGKTGHQCGEKFCRLCKQFHVKEDDEDNPCSSCFIQPLKPHKLKPYRIIAYDFEATQDKKVGNKFEHEVNFVSATIICTDCINGNWKDSLKGSSCKICGPHRTITFAPFDFSNTIVDQKVTTRHPLRDFVQWLLFDHNKKFPTVAFAHFGGRYDMTMVIKEVISQGIHNPDIIKQGNRLYELKINQNEHGPQTILRDSYNLMPIKLSGLIKSFGLKIQDKQHFPHMFNKASNYDNVLSHLPPREEYCPDQMKIPDQQKFDNWYNSNYNQPFNLKEKLPEYCCNDVQILTHALVELRREFKQLTKRDGKHGGIDILWQAMTIASACVKNFALNHLKPNSLAIVPEKGYTPQQNQSALAIKYLDWYSHINNVNIQTAHSRYGEYVFKREGQVYQVDGYIKGTNGKRDKIIEVNGCLWHGCGECFEDLDEETRMPNGKTLREIREREVRKHEIIRRYVDLEVVWEHEINEQLKKDATMRGYFDNWKDRSPIKIRDAFHGGRTGPMKLLHTAKPGQKISYKDFTSLYPWTNFSTSYPLGHPKIINFRLNEQTVNWRAPSDNPYKGLLKVLLLPPNRNINVTVMPVKFDERLLFPLCEKCAKHITNEHPNGLKDDNYSCPHFNPNDRAFVSTCTHLELNAALEVGYTVRKLFHVLQYDQWSDNIFKSYVSEMMALKIHATGFPSWCSNEEEKKEYIEENRQRFGILLDNEKMKAEPGKRYIAKLCLNSLWGRFSMRNLLSKAIINNDESLIRQYTDDKKIELVDLEMMDDDNDVFMLTYRPKEEFVDENKYSNVVISLFTTSAARLYLYDALKKVADTPDCEILYYDTDSVIYVHPEDNDPLPTGKGHLGELTDENPDHNILEFISAGCKNYGMKLQRKDTGEIEHDLKIRGFTLDAQTIQKIHYDTVKDQILRYGSEDPPDPIIVTYPHFIRPNLIQGKVYTQSLTKHYQPVFTKGIINDSFQVLEFGYRK

SEQ ID NO: 151918 - protein, 329 aa, Heterodera glycines
EIQKCADPLTEFRSCVHQSVEEAIQNAQNTIGGANKVGVIISSELLDQGDIIMPITPITSNVVDAIFNQFCKVEQSKSKHVNLYGAPFVVTVTVLNTEGLPRRRTTKGSAPPIHSSQSHIFKINNNDNYCLFYALELMRYYSLYIRGVISRKQFRWLKDNQTTVLRQKVLLLLRDAGIPTTEPEYDAEIYIHQVQGLWSTKYPGEYKIFIFNDYQTRPITKSDVNEYQFSIILYHHDKHFDGIKTLSKFFNKNYYCLSCESVYERKSQHSMNCSSLCHGCREVGVDYPCEPQQGYFKKCDQCNNNFYNKVCYELHLQQDLCTNFSDART

SEQ ID NO: 151919 - protein, 21 aa, Heterodera glycines
MKEYFELEKCNNFLTIIILTI

SEQ ID NO: 151920 - protein, 66 aa, Heterodera glycines
MGNKLEIEQNVSKKRKFYTIADKLEKMKHYYQMKKQNPKLTDSQIAQVLNVSRASMYRIKAELEKF

SEQ ID NO: 151921 - protein, 45 aa, Heterodera glycines
FEDICKLLIINTQSYRTTPTMLNLIDNEQSYGSKSLPTTFRPTTF

SEQ ID NO: 151922 - protein, 252 aa, Heterodera glycines
MDAQAQDRCHRIGQTRNVTIYRLISEKTIEENILTKSMQKRRLGEMAIDQGEFTPDFFKNTGNLRDLFSNETAVAKIIAPVVDEPKNIKDVEAAMNRVEDTQDAIAAQLAKEEDTAEVAEFDETLNGASTSYDLRDIDSPSEQYLELISGLKPVERYAVNFMADEYKPMLDKEVEEAEVGSILQSFGMRSYFTGKNKSEANGVHGKATECGRRTVVRHNRRKWQRRRGKEATERGGTARHRLQRLHGPRRCR

SEQ ID NO: 151923 - protein, 207 aa, Heterodera glycines
MTTKGCTTNSLWRSERKCYHLHPKIQKELQKLDYLTVIDDGSHDDFFLLEVAKCNGGFVISNDKFRDHRVRTEVPDGLRQIIDNRSVPFSFHYVPIDKIGKTTLADPAKLGYLELEFTLKPPNISAMFSLSPSDPSYGMVFSQRILRSEKRALEMLERLDVMSEYLLQLMCENLGVKRSLKHLKMPEMERMPIEFERFWRFYDLHQK

SEQ ID NO: 151924 - protein, 76 aa, Heterodera glycines
MRRAILKSRHFRLPSNEQLEMHLEASLSTFGSRLYICPDEQQKTVARLSMEKTGPNGVETDPLRAFGYCELLMGPK

SEQ ID NO: 151925 - protein, 268 aa, Heterodera glycines
MNSLKRFQLPEQGTRQQEELDSVEPKNISDVVNFNSAGVFYVLGKACPFRSKGLICRRKLSDDNMCEACGQKAIAPIHTVFVRLLLQDVEQADIAQRVTMFSSVAEEFLGMKAAELLAKEKEPESLAKHLDDLIAVKIIAKVNIKVVFFAIYYIFDKPQHRRTVRLTLDLIGLSICSRSALEKMTVMCQKKKMMMMMLRHKLQNGLDVIAILFFLREFTMRQDCTLTIFRNEHREICSWLYPSGGSSTLLITIQLTLLEKLGPYAFVT

SEQ ID NO: 151926 - protein, 214 aa, Heterodera glycines
MLSSGSDPNVHLVLLRDLFFACSTQISSSFQPVSHSFAIVETHFGTQKNNEETVQNIAENEENISEEVAEGGEHSLKNEEKVPNKSGQNKEKAANTTQRTPPSLGVLQLFLIERLKCFCLSLESLNDQLELGLRSVSSCFTPFNFFTSVRLEKLIPNVFTIILTLHRPLNASQLTVTALLDIAEQLVLFYPQPKFLLEFFRLSMSDALMTVNEL

SEQ ID NO: 151927 - protein, 160 aa, Heterodera glycines
MSGRNTFRTKCIANKANCALQPALSFVQTFGADILSCMVNPWHLIHLQLLGPRDFEKVAIGLYVRCKVKELCSVERIERVSWDASPPYEIYGRQMQVLLHFYGPSQTPPSPISAVQFPSTEIDRQVVEQQRKCRTFVPPSGNHIKRKSEELQNALYKIHY

SEQ ID NO: 151928 - protein, 126 aa, Heterodera glycines
TDLNCIINIKYFSFLAHILAFFRAMFVIAASASSHASNNSEWQALSAQFGQQISEIDSKCAEFGIGIAKVPYDGPKGDHSQRNVPGTDSVISMPGLTGSHGDHSQRNVPGTDSVISMPGLTGSHKQ

SEQ ID NO: 151929 - protein, 58 aa, Heterodera glycines
MAKWDEPLSMFGEFEKRREKVYEERREKMEVWSEQKRKRKADEENEEEEWENKGNGDN

SEQ ID NO: 151930 - protein, 73 aa, Heterodera glycines
MNGGIGPQGKWSNLSVMLIFCLQSIAPPILRLVFSKVLRHQFMAHLRLKWPANNGTPPPVGAGIALKQPKRIG

SEQ ID NO: 151931 - protein, 208 aa, Heterodera glycines
MEIQYAHLAGYCVVCWLLHEPVDRDHTVCLCGFPLQFRMLRRQFTCWLIGMAVWAVALAQSLATNSASCTKKVILSKHIRFVAVWYTVGTYGMSCDWSAYAKSGTRTYYVTLNLLTIVAYLLIYISTAVIIFTKKAVRLRFFKAILKPKSSSNDGQMANGQQQKNNGQFVSTVGKGANEPKRLSVAVDVVGLHPKNARVALQQRSLRC

SEQ ID NO: 151932 - protein, 176 aa, Heterodera glycines
GEVVRLVLEDLTRRGLLFSGDHSQIAEPGCFPTKLVSDIEGLNDDEENPFNDDEENPFHKIEELLQDIGIWNSTPADCANVAYVCSLVSARAAHFCACGIAALLKRMGRPTVTVGVDGSVYRFHPTFKFLLDHKIDELVEGKYEFVLVLSEDGSGRGAAVAAAVASRMNRIMCEHH

SEQ ID NO: 151933 - protein, 104 aa, Heterodera glycines; identical to SEQ ID NO: 139542

SEQ ID NO: 151934 - protein, 207 aa, Heterodera glycines
EREEAWKEYESERLPRQLLPLPMPSPLTMDGTAAVPGTSQQPPFGTATDMAHFSNALQLRQLQLLQLQKQQQAAQVAKNLSFLVQQQQTVRSGEIGYFTQVMGQLTVAYNNDPIYKLCFQVPGMQAKTAYRIFQIKQFLSYFINLIPAEDLGEMNSANAFANYFNGILQITLATTIEIAKPHQRCQAGILFIQQTFPEVMQHLNHSQ

SEQ ID NO: 151935 - protein, 154 aa, Heterodera glycines
KLILLMEIIKKCEAIGDKLLVFSQFLNSIALIRRMLLVFSQFLNSIALIRRMLAFYADNGKWFVDGHDALMRQGERWSWILGHDYILGHDYDVIEGSVSSKDRDRIQREFNDIQREFNDPLNLRKRLLLISTRAGSLGIKRLLLISTRAGSLGI

SEQ ID NO: 151936 - protein, 254 aa, Heterodera glycines
MSRREQLERNMNLKKPRMALTDDSIVADEIADAREAEMRAAATADSDASAFSDEENTEPVKFERGTTQKGALYLWQRGQVQICQKKCIWFSCCQKTCQATVRLDDEQHLTGRLGSKEHNHCVVFTQQSADAGRAQIKQAIEVNPQLRPSQMRAQVRAGTADETFDQLGTNDALDRMVQSSLLDVLRRNRRWSLDGTFRSAPTQWTQVFIVGAYVDKRMVVCAQALLPGKNSRFYREALSAIRNAVASAPAKIYA

SEQ ID NO: 151937 - protein, 617 aa, Heterodera glycines
MKRSASASSKKQLIDKKYLINVIDDIFCFFYALELMRYYSLHKRGIITEKRWRWINNNQTTVLRQKVLQLLRDAGIPTTEPNYDPKIYIHQVQGLWSVKYPGEYKIFIFNDYQTRPIIKSDVVDYQFPILLYHKNNHFDGIKTISKFFNKHYYCLSCEAPYDSKSTHTMKCTSLCLGCREVGVDYPCETQQGYYKKCEYCVNIFYNYNCYERHLQKDLCTKFQRCEDCGVIYNINVHGREGRNAHQCGEKFCKLCKQFHVKDDDEMNPCSSCFIQPLKQHKIKPYRIIAYDFEATQDKKVENKFEHEVNFAAATIICTDCINNSSWNYSLKGKNCAICGPHRTITFSPFDYTKTTIDKKIVTQKPLREFVHWLFVEHNKKFPTVAFAHFGGRYDITLYIKEIIKQGMRNPQIIKQGNRIYELKLKENDCGPLTILRDSYNHMPIKLSGLIKSFGLKIQDKQYFPHMFNKSANYFNVLPHLPPREDYCPDQMKKADLQKFDNWYNYNRSQPFDLKEKLPEYCCNDVQILTHALVELRREFKQLTQRDGKHGGIDILWQAMTIASACVKIFALNHLKPNSLAIVPEKGYTPQQNQSALAVKYLDWYSHINNVNIQTAHS

SEQ ID NO: 151938 - protein, 205 aa, Heterodera glycines
MDEENEVYLISYKEKEEFVEENKYSNVVISLFTTSAARLHLYGILKKVADTPKCEVLYFDTDSIIYVHPEDNDPLPTGKGHLGELTDEKPDHDILEFISAGCKNYGMKVRRKETGEIEYDLKIRGFTLDEKTTQRIHYDSVKNQIIKYVSGSPASPISVNYPHSIRPNLIQGKVFTQSLTKLYQPSFTKGIVNNSYHVHDYGYRK

SEQ ID NO: 151939 - protein, 94 aa, Heterodera glycines
TEFEKHSTVLSGNESNIPEKIAKAEPQHHDIEKPVSSLKFGGGATLFPAEYADDVDLYLRQLERRTPLDFDFLSVHKTIDGRMRQILVDWLVHV

SEQ ID NO: 151940 - protein, 86 aa, Heterodera glycines
MHLWIYIYGFRHWARYGNAIFVTLVYTKFGGPDTWGWGRDSTLGDHTVGDPTLWDRTVGDPTLRDPTIGDLYIWGTVHLRVYHLMT

SEQ ID NO: 151941 - protein, 385 aa, Heterodera glycines
MEINFVIIFILFLIVLIDGIDEDLFNDLWKNLKPSTSKNIKKPIFGEINAIKEEIVVKNENDEQGNANQIETEDIKPKLLQKIKKEKTLEEQTNNLKIKIKMPKIELDKLSEESFGNEFNEEADQNVSSADHNDSVDEAYYNIMESETRNEMEILNKFNLIKTELRKESVYKNLTNVQFECEIAKKLGTNRNKISKLKKKLGQKREKRTEESEETKMELIRKFDQMRKEKICGLKYDEKKRSVIEREIAKELGTNRNKIYKLKKKLGQKREKRTEESEETKMELIRKFDQMRKEKICGLKYDEKKRSVIEREIANELGINRHKIYQWKRKFGKSKIYSDAEKLEYVKRSEEMTERKPMICEKKIAETLGIPYTNLKRWMKKFCSK

SEQ ID NO: 151942 - protein, 80 aa, Heterodera glycines
  unsure (1)..(80): unsure at all Xaa locations
FXDSHNNAVALIGVVHLITAALNFLGLYLNSHSVIVREFSLIPVPRLARAIIFTIIGFCIFDTMYQSNGPFTPFIYPFYK

SEQ ID NO: 151943 - protein, 36 aa, Heterodera glycines
MHLPDLWTIFIENTRRMEKLHIAIKSFIIKAWIYIY

SEQ ID NO: 151944 - protein, 44 aa, Heterodera glycines
MGEYRIVLKNLLENLFAFCKANRACEELSNDTNNVGFGLQRKKL

SEQ ID NO: 151945 - protein, 30 aa, Heterodera glycines
AEPVDFIKHNLTIQSYYLAGDAPKALTPLV

SEQ ID NO: 151946 - protein, 90 aa, Heterodera glycines
MSADSTTSRGTSVVPGGGHRCVHCTTWTAGACTHCDVKRCCKSDAAKTIDNRRQRRVVSMIRVLPMNSSLMNGPVRSQSTVCSLLSRGTF

SEQ ID NO: 151947 - protein, 67 aa, Heterodera glycines
MADVLAKQIFIQNIQTFMEIATLICILNFVIGIGTLPLLPHAVQKAKPKNEPRMSMTITSIAQDNFI

SEQ ID NO: 151948 - protein, 35 aa, Heterodera glycines
MKSMSAYCIILFSALVLAKRRKPKSRRWVCGICCT

SEQ ID NO: 151949 - protein, 91 aa, Heterodera glycines
ETNDQTKTIDSIVRKKERISLCSFAVPSPIFPSSPFIHFSSQFLPQNALLRWPLFLFRFAHPSFPPPRLGRSLCPRRFPLLLSVHLCPFPF

SEQ ID NO: 151950 - protein, 108 aa, Heterodera glycines
MGVGIGPAEIGERCQLCQRRKRADLPLSQSLLALKTQADRLLFGSVFLRRPKGLAENAVVPETPSEVADLEGTTRQIAETIERIDDLEEKLKELLEHKDNVMGDEVDR

SEQ ID NO: 151951 - protein, 35 aa, Heterodera glycines
MGVGEGTDGGESCGDATEASERRKILHWKMKQADD

SEQ ID NO: 151952 - protein, 286 aa, Heterodera glycines
CILPNQPNFKGEGRVSINDIDANYLRRQTALKETTAQTIPALMDAWNDLLRARQGCLIVYVPKECLSQIRDQIVVSLHIDIIVCSPKQGIKFVFTRNQENDDGLPSGAHLFTYRSNPQSSTKEWLPCSEEPLQFFLTGVFVERFFGATESNYQLNKLLKDSCDYEARFGAIALRPNANHSQFFFDPNCPETCSPFYLDALFRKGHLVIRMLEKRLPKEQFVKGHFAHTIQIDAAVSRHDIQCHSKGRKLKKKRIMLGTGEEVDVDLNSMDFDSPVLWIRFNLKNSI

SEQ ID NO: 151953 - protein, 88 aa, Heterodera glycines
  unsure (1)..(88): unsure at all Xaa locations
LSSLKLIFYDTIPNSDDDSLKTLCYQLLVPTSAANIGFAIGDFQIHVQPEMPEVTLXVPELIPLLKHTMKSLNRIFVFFEELLSCRFP

SEQ ID NO: 151954 - protein, 128 aa, Heterodera glycines
MPSFLPMLFLLLSVQLLSFLPCSFSASLSVAPAYTTKDTCLSESSASDSISAQLNKPITGGQFTFYGIGGQGACGLDIATPTKSAAGSGTLFNSDAAWVESCLPDARYLLNDLVCINRCVKIEYKGNT

SEQ ID NO: 151955 - protein, 186 aa, Heterodera glycines
MAALNAAVGGKEVASATPIIEFLEVASATEQIELIETETIPQNLESFEVASAIQKGVIMETALAVEKVIETDKTRGISAGLEEEFERGMELGEDFTATQFSNVSWSEPRAIASPVPMSSNEEHCAEGGVLKYLVCQTDVKSVVGRKKSGQGPFFMGIPDILVSAERRLQMGDTVVVKNINHLNLVV

SEQ ID NO: 151956 - protein, 77 aa, Heterodera glycines
FVALVVRTRQDQRSSGCHKGGGDKIGHWFISTWFCNRLKTIQRWGFQISHRHICANASPPNHLCPAINRNQSRLNYA

SEQ ID NO: 151957 - protein, 164 aa, Heterodera glycines
MLNKIKIAPYKNICSEQIRNGENEEVENFMNTISDLVVGENITIDSVFANRKALPNELAQIIEAERDAFEISNVFAVYTHQNGEKWKNAILYDGYDESKDSWVLSQDTYALESVANFSISVSAELTLTALLGGPVPESFKKILMANDKFAQGNTFSDTFLKFCM

SEQ ID NO: 151958 - protein, 29 aa, Heterodera glycines
MGIKTNIQGGWIKKFIICVFLENGHCGMV

SEQ ID NO: 151959 - protein, 116 aa, Heterodera glycines
MGKNEKGWVIEKISYDLYCEALSDQLIIPPRDLVQNNADVVLESFYHIQQSFDEIDLLNEEISLIITTYAAPKGSAQSINHLFGLKESGRLLVKNSDNYCLFLQYNVEQIVPNNRD

SEQ ID NO: 151960 - protein, 60 aa, Heterodera glycines
FIRALLRISLKISGRQFYILAIFYFICDRKFLHTSHFLFYCDQAYLSSYFWDFFQNVVIE

SEQ ID NO: 151961 - protein, 734 aa, Heterodera glycines
PCPYGQNQTIVVPRHSILDKQSRLQLHVFCDASEHTFAAAVYIRSETADNSQANLIFAKNRLRPRTANQLTIPRLELLAILVGIRAMRFAEKELRRPIEERHLWSDSQIALSWVKSEEPKAQFEQRRLVEIRQGPTTTFHFVRTDQNPADIATRGCTPAELCTRQMWWKGPEWLTNPETEWPDERSQRQPTPLLPIPRLKNRRPRPSWPNKVRCPLLDPARFSTMLTLLAFSSSNSSGVVDQNGSKSAPRQSHGVALRRAIRSEQPGLSSSDKDGLDGLLCLKTRLLHANGPPTLASPVLLDRHSSLTRLIVQEIHADLRHAGVDWTLTEFLGRYWMPQARRTIRGILRGCPSCRRITAPPFARPTMPPLPSMRVKPANPFEFVGLDFAGPTSSRLSDGSLAKTYLVIVTCFVTRAVYLEATTDLSAPSFINVLRRFISRRGRPKRILSDNAPTFVQTSKALDILTGPPPETDAVTFAARRGIQWDFIPAYSPWMGACYERLIGLVKSCIKRTIGRRILDYDDLSAFLAEIEASVNSRPITWVSDQPDSSKPLTPKDLIQPGLPNDLESSTLISTTTIASPVPRVSQHFGKLTGAADHFWLKWSHEYLLAIRERAGWTHKGPRLRTPTAPHIGQLVIVEEDLRPGNVRSVQLRINGQTVTNVRSVQLRINGQTVTRPISRLCPLETENQIPEPAPDATVSIPTDQSGKDPKTAESPQEMPPVPPPSHQLHSFLV

SEQ ID NO: 151962 - protein, 172 aa, Heterodera glycines
ETEWPDELTFATPADSPSADPPFEKSETKTLMAKQSPLPPPLIDPARFSTMLTLLGTTILVLQFIGRRRPKWLKIGTSSIPRGGPPTGDSFRAARTFLIRQDQRSSLDGYDKHPTVFNEDGLLCLKTRLLHANGPPTLASPVLLDRHSSLTRLIVQEIHADLRHAGVDWTLT

SEQ ID NO: 151963 - protein, 1878 aa, Heterodera glycines
MSELIRQRLTAEVRTLSDLVKRLRQRVGRLTEFTRMAPEEIPLAEETKLAKGVRTDRQLLQRSIDRVNGMLRECFDHIQLLGDPFLKQAEEDLLAALPTFDDEQADPNVEEWPVITLLSKAQLILDGLQVYIEARFDTTDAISSRSSSRVSDHGADDENRIHRQRQSTDPPTQAQPANAHQPSNSARADQNLFNQRTPAFPLNLTFPRASNRPTHRSEPHHGHFRQSTNDDDALRVSRIEIPRFSGSAEEWITFWAAFDFAVHSRQYPAFQKHLLLLQYLEKGSPPRRMIEGYPPSDANYSTVVSILRDRYGDVGNRRDQLNAQLLHLKPARNNLKELRQLQQEIERICTQLCSLEPEGELSPIANSSLVTNLIKSKLPPPVLLDLIRMERESYTSWTARNWREGFATIVTDKEQVDLCVRTFQDMDIQPRERPPERAPSRPGGRSFRPPAPERRYLENTRAFPALAQPVSANGISCSLCEQEGHRPSACQRYTTVIQRRRRLEEQGRCLRCLRQDHVTRDCSRQDRCSKCQANDHHFLLCPSIDPPGRTNHRQENQERNGNASRNVSRATGANAEPVRPRATPTTTALLVCDEGESIPEAVCAAAFDPLPVDSGSFPVPKSTRVAHLMTQTLKASCQGGPPDGIPAFVFHDPGSQSGYISRAMTEKLRPPRLSEHLLRIHTFGDSRPKTVRSAKFAIQLQRLDGGWETLELNVIDEITTKIKALQWDTTDGPLPPNAVLKVVEKAPDILIGIREFWQFFIGRSTLHSGLHLIQTIFGPMVGGEAEFPETPRHTPTIAMLTSHPSNVESFPSSRAVNDFWSLEAIGITDDPNQNDDQVAMQQFGNTVRQLPSGRYSVRLTWREPRPPLPSNWAIAYRRLLSTTKRLQCSPELLDRYSAELTRQMDADIIELTGRDNDEHFLPHHAVINPKKLRIVIDASARAKGTPSLNDCLHRGPVLLPDLCGILLRFRSATIPVLADVQGAFHAIEVEPEDRRFCKMLWLKNPARPVSGDNLLIYRYKRLVFGATCSPFILAAVLLQHFDKHEHPFAQALAANMYVDNLLIECETEEEAIDKSSIAKQILKDADMNLREFLSHSPNVMKQIPEDDRLDKTPAKVLGLTWDTLSDRITFSLPKDTDATATRRSVLSIIASTFDPLGLVGPCLLPAKRLFQRLWGEGTAWDAPLPDTEAQTWSQTLSLWQDQTIFVPRHSILGNQSRLQLHVFCDASEHTFAAAVYIRSEAADSSEANLIFAKNRLRPRTANQRFTIPRLELLAILVGIRAMRFAEKELRRPIDERHLWSDSQIALSWVKSDEPKAQFEQRRLVEIRQGPPTTFHFIRTDQNPADVATRGCTPAELRTRYMWWKGPEWLTSPETEWPDELTFATPADSPSADPPFEKSETKTLMAKQSPLPPPLIDPARFSTILTLLGTTILVLQFIGRRRPKWLKIGTSSIPRSGPPTGDSFRAARTFLIRQDQRSSLDGYDKHPTVFNEDGLLCLKTRLLHANGPPTLASPVLLDRHSSLTRLIVQEIHADLRHAGVDWTLTEFLGRYWMPQARRTIRGILRGCPSCRRITAPPFARPTMPPLPSMRVKPANPFEFVGLDFAGPTSSRLSDGSLTKTYLVIVTCFVTRAVYLEATTDLSAPSFINVLRRFISRRGRPKRILSDNAPTFVQTSKALDILTGPPSETDAVTFAARRGIQWDFIPAYSPWMGACYERLIGLVKSCIKRTIGRRILDYDDLSAFLAEIEASVNSRPITWVSDQPDSSKPLTPKDLIQPGLPNDLEIVDSDLDYDDCLSGPARLAALWKAYREAADHFWLKWSHEYLLAIRERAGWTHKGPRLRTPTAPRIGQVVIVEEDLRPRNLWPMGIVVALNGSPPN

SEQ ID NO: 151964 - protein, 172 aa, Heterodera glycines
ETEWPDELTFATPADSPSADPPFEKSETKTLMAKQSPLPPPLIDPARFSTILTLLGTTILVLQFIGRRRPKWLKIGTSSIPRSGPPTGDSFRAARTFLIRQDQRSSLDGYDKHPTVFNEDGLLCLKTRLLHANGPPTLASPVLLDRHSSLTRLIVQEIHADLRHAGVDWTLT

SEQ ID NO: 151965 - protein, 127 aa, Heterodera glycines
MFSGATEFIANQAFTSALWNIAESGVQRAEYLVHNYLLSPTAAFSKSFPPQRTAWTHKNSRLHLKRFIMSHSTKTAPFLWSDTTTGTASTICAHWNDWRKFRTREVLLIFTSPSSIYLFIFGFVFSA

SEQ ID NO: 151966 - protein, 139 aa, Heterodera glycines
ICIFYDSPAYKLLKTKILITFFLAHIMYSKYGDFHTIDWPRDLARDRMRHKYIKGYRYREDFPFGSASAVWDAGSGWICVLLVGLAAGAIAGVIDIGARWMSDLKDGICADRFWLDREHCCWSANDSAYKDNECSSWTH

SEQ ID NO: 151967 - protein, 372 aa, Heterodera glycines
MSKIGKLIRKSRNLEAIPEWYLDTKHFKVDVCPNFENGKVVDTYRDTDGIELVKMYEGFLEDSKLFLSIHAKGVSKESLFGEETVEIKNENLKIVKKAALWLIDNFVDEFLAYLDNFFEFGGNQKEKDRILNEIWQKWVETNAKMQTFKEQGQLFCHIYVFSMFFLSTIWQRLGEKERKKMAKVMAEKRWDQITIFALRWYGKSSLEFGRSSAAFATCDYSQWDELLHHRNAQLVHSLTLFRLIKRFKGFAHFLCQMIKKDTVETKDRLLLLFRSVAEFDWLEKQFPMILRIEELNFRCRLHFYEQMFKFKSSSDLHRYSEFRMAFSVLFKQLSVRLTAKSAKLAHPMLTEVMFVVHEDIFREMALALAFCR

SEQ ID NO: 151968 - protein, 376 aa, Heterodera glycines
MKRNLLREKEMKGMDGKEVEEEEKVEEKSKREDEEEGKKEKEEGERKNGWLREKEERRKENMREKEEKDGGKGKDEREENGEEGTEEKVEAMRRKAEDGENGKKHSDIPVAKCQFFGMNGKIQKANERVKKEKNDQRKGGRPINAKSAKKSETHQTKEGKASNEEEKEAKSIDLLIEDITTDEFLLEKHRKNMNANNDHNLDNELLANLSVYAHEIKQQMETYKQLSNYGTEFRNWAKNVANEWQNKMREKVPKERNERIELMNELCRILHRMANFGEKFYDQNWDNCTEQMQIMCSEVKGQLHKRHLSRQITENDQLEKEWAELTKEGQIKAIDTLWGEKNGNRKAKGNRRKEFVAFLEQWRKMRDQMELGEGFS

SEQ ID NO: 151969 - protein, 313 aa, Heterodera glycines
MPFSPVQTAALQAQHAALHANSTNRPNYGALAVTSTTTARQFQQQPQHHHHQQAVLMPAMAAAAAAAQQQQHHQQFQQQQSSNACHQQMQQQQQTQYQQQSQQQHNANLGLSLGDLNGCFRSNQPQQHQQQSHLLHHNDFVPSSHDMMIGAGTIGTKLYSSAAASPPPSFGPIGGTAGAVAPPTTTSTATTALSALGTSVSSNNLHAMLGALELDNGGTPPQQQQGHFSSAISTDFKLGGGSSSLLLLRSTSNGYGAGAGSAVIQQQNAANTNTTSAFSPWRMPSSAVDAMSQNDFLDILSSTSPSPYCQLPV

SEQ ID NO: 151970 - protein, 90 aa, Heterodera glycines
LRNVLHNFRPNRYSVLDTQMLSSADGWQDIEGMPNGSEALISEKLTVPKTIVTKEQQKRPIGGQRANDYGSVREMSGGRSDGRTETAQIG

SEQ ID NO: 151971 - protein, 367 aa, Heterodera glycines
MGATVALVRFSCLYDPIGVGTSIILAILQSFVSNYLKRRGMLDLLAAEEASKMGTESLAAEEASKMGTESLYVRTVQALNGQGKAYRTFSEAMRKPHRMAITRGLWTSLSLWTSLSFALTSSFVSFNFGFTYCLGMLLIRAGHTTPFVLFQVVEALNMASFMIMAAAAYFPEYLRARFSAGLMFAMIRLKPRINSLSDKGIRFSAGLMFAMIRLKPRINSLSDKGIKTPIEGRLELKSVQFAYPNGQKQLKTPIEGRLELKSVQFAYPNGQKQLALDGLSLSASVGKRIAVVGPSGCGKSTVVQLLERHYDPIGGSICVGSICVDGVDIRQLSIKHLRHCMALIGALFTLFSLTFNSLTLTVSVVSS

SEQ ID NO: 151972 - protein, 61 aa, Heterodera glycines
GKKLVKIVENVGPAVPIGAAGKFFWKFECYLLRNLPIKLFNFRLGGNSRKIPLFAGKFLKI

SEQ ID NO: 151973 - protein, 137 aa, Heterodera glycines
MCPSLWFGPCPSPWPFRSPSARQIARSHLKDQLLLELSIQTSSFPTASRSDEEEDEEDDDEEEEDEEAVDAGESVAGRTHWHRNDKRGLAAQVAQECHKQHQRRPTFGLMMNGGAMPFATAPMNPLQVHTAEGGTEG

SEQ ID NO: 151974 - protein, 353 aa, Heterodera glycines
MLLMPFQLPSTALTDAERRVKGWQRKRTLRLMRRCNTLPSTVMQRQTTTTAPHGTTQKATKRTTMARGESDATQEQQTKSDTTKCQQQRHESPKRQKSPIGDIQNASGVSVERVLLENDGGREQFCKDVVATADTKGLNEWDGEERSPSPTLVHLCSSFGDELGECFPFIDQNEQQQQLPEDHNNNSNKNAKGATEKTCHRNGDGQGNFGMRRTHSERHPADTKTQQRIRRLSADGSACASCAGWVVIVGNEDENGAKNNGTDNDRLNGAEYNNYRNDNDNGTTAAGSPTFGTNIEQRKKKSTARQVTKDAKYGSKCAAFSTGATLALRNGGGCSATPPLLLQQRQLQQKRHK

SEQ ID NO: 151975 - protein, 53 aa, Heterodera glycines
MNEVNGEGQHRGLIIIYHQCEEYHHMDTISLIISQEWMTFLFTFLPITFNIVM

SEQ ID NO: 151976 - protein, 125 aa, Heterodera glycines
MGDASIQRLTDILQQLLTAQQQNAPPAQNASQLPTLPDVECFDASQHSGCEIEDWLKRFKFALDCAAPNLQDELKVKLLMTKLFGPTFSEYCKSVLPREVTDFNFVETAEKLKALFSRPQSVWID

SEQ ID NO: 151977 - protein, 22 aa, Heterodera glycines
TNQLIPSNTFGQFHQFWVASIV

SEQ ID NO: 151978 - protein, 206 aa, Heterodera glycines
DGDSNDLNCNRNCNRRVTRLQYLCYSLAIREREFNPILYGGKLFQQYCVDEYVKIEGDRMSWIKNNQKRILADAYKNIDNMLKKSTRKRFATGKEVFLPPSVTNSPRYVEKHFQDAMAVVRRFGKPDIFLTMTCNPQWEEISENLFHEQTSIDRPDLVVRVFNLKVKAIMNQITKVKIFGEVIAWMYPVENQGRGLPHIHLLLTLA

SEQ ID NO: 151979 - protein, 214 aa, Heterodera glycines
MPKDYVHELYKTTINQTNSNLELHPLIFHAWQLDNESEATRFPHINEFINSEQFKDKLEQHITARTEALGALKGGIEGFTMRWLKGLIDEAITWWIRVACVYSTFLMLRDIVLPCTLAYLLNPIRVTLLSLVGVRPHPTFRPTVSKPLGIEEGMPLREMPRTPKPPARRAEHRSMSPIKLDMIARTARYQQPRTQSHLDLTEDSPFGRPRRKEF

SEQ ID NO: 151980 - protein, 327 aa, Heterodera glycines
MTSNKQRQLVHKDVKLRHQFKQKHSSMQLTARFRKQIHMSSTIEEVQQRMNHNRPQPRRSQQRGLRPTQAPKICQSGMAQYKQGRGIRLHPASSAMALTGPRRRLSEQPLQREQGHESINFPGPIAGLFKGEQISTATNCFAQPATLFVKRHNLQMFSPVHQVQNCQYATEFCQLPDNSTLIWKSTCNGNECQTCDYEKAEVINGKFTAAYGESMAIWISEDHQKALTFAKNAPELIACDGTRIVMSEQNFGIAKEQYDDIVSTTTRWKRHPTRTARITALGIPSGNKRGVKSAKHEGSQPDSPGQTLTTATKRPSSLDRRNDNGGQ

SEQ ID NO: 151981 - protein, 280 aa, Heterodera glycines
MAIHQECPFAKSEMTNHEAQLWSTNDELEVNFPGPIAGLFKGEQISTATNCFAQPATLFVKRHNLQMFSPVHQVQNCQYATEFCQLPDNSTLIWKSTCNGNECQTCDYEKAEVINGKFIAAYGESMATWISEDHQKALTFAKNAPELIACDGTRIVMSEQNFGIAKEQYDDIVTTTTRWKRGIRPEQLASQLSASQVANRRIHHALAKKPDRRSNHVVDSSRLRLFNLPHAARHCSPMHSGVFAQSHPSDSSQPRWSTPASDIPIHRFQTTRDRRGNAAA

SEQ ID NO: 151982 - protein, 923 aa, Heterodera glycines
MSGPIQKGIINALKALDNAKSATSLLLHPDPDLSNWENAVNLEAQFDRVVKEIRSMEMQMDSLRDLSNAWIELLARLTGDDKDNGEKEYIKFDKNEKIAERYDAASTKLRDLRDLEATLSAAAKLHRGRADREAKADQLANPQQQPPMPPAMAAPMTMPTFTAPLYQFQPIQLDKFFGQKRKWPEFYESFKSAIGSQSISKAQKLNLLRNILGGEARELIAGFRLEDANYETVLQLLKDTYGAPEEHIRSLHFELANLKPCRSLRETKDFLLQLERLTRELNNAGEDIEGPQVFLMLEKKLTPPFLRSILTKKGEDPANWTTTKFRDVLTEAVRKEVQIQEVMGEYGHHYVQPKAEVVSAAPVQAPRTPNQRSRRPNQPMALRDMTFIASSLDEGHRHQGYVSQQHTQQAKKHCQQMRNQVQSVKKGPPYPCIFCNSNHWHDECQNVDTLNQRISIVREKKLCFKCMKPNHRASNCARPSKCYHCKRRHPTALCRDQYKAENGINTPSTSCSEEKPNANDCKRSTVIEQQQMCNAIQSKETRALLMTTKATIFNPSRPSLSMMGTIFIDPGSHRSFISSSAAEQLDLNVLSTEECYLSSFGEREPKRYISDRVAIGILCPDQDRFIFNLNALKFLLNDLPVLQLNALDNDELRQKKLSLPNESRQPDILLGMDVWHQLNVQPIEQLPSGFTICQSKIGNIISGTGRIKLKQPSNISFVLMVNNDESPQSSKAAQRQKNIQQKEKDELRRHQRNKLLSSIATLRSRRKRESAPISSKSIVIDLSSDSDASGIEIIQNPVRDRQAKSPNEHSTAPIPMAVQWLTPTRKSSSVAKRPAFSFSKQPKGKAANPAQTSQTNELNRKMKALSPTASGSGANHHCVATLARSSDSTTVIDKGSQQNCPNMSSATISKTPCQQHSSEKTLN

SEQ ID NO: 151983 - protein, 21 aa, Heterodera glycines
MAPQSNDRFLTNSDSPKCVST

SEQ ID NO: 151984 - protein, 549 aa, Heterodera glycines
MFLSGKDDESSITAIDRKLWQGKVTVKISDLEKVQNDMGKLEDGVNRAFRHLNRSLNQKVTWVNDVVANTNANFETLKVQFETLTERVDILERDNDGATSGGTFSLNNQNRASLAPFVMPMGNAQPNQLMPNQVPIQQLSSEDEDDGPTLFGLNMLMSGPAVGSGLEMFREESVFAFDDWAERFKDYLSVSGKAYTEREKVTRLKLALKDTPLALFKELLPAQTDTLDTALSELRRKLDSPQRREITKRTLSLCKQREDETVAQFLRRLTPLVDATNSSLTGNSRKEKICEEFLDRLKPNISFLIRLVGLSRAKDLDLVRAQAEELEALLLMSKGDETVRLSDVVNALNNQSSQSRWFTEANLNNDFAGQWASGNNVRGFSSFSGSDEQTQQQGGGEGQNRSRNWGESHQEQFSQRNWSSNPRCDYCDRVGHVAYNCYQRRANFSQGRWSNQQPQQSQGQWQNRQSSVNMMDVPSSSNASAEFFKNLAQALLDLKIQERRNYKDEEPRSGAMNALTHIKPETEVKKCQVGEELSKKIPSLWAGNKSKPS

SEQ ID NO: 151985 - protein, 152 aa, Heterodera glycines
MTKPKQNEKDGKSVKKGQREKAGQKTTKTMTKPKQNEKDGKSVKKGQREKAGQKTTKTMTKPKQNEKDGKSVKKGQREKAGGHGEKAGGDGDKAGGDGAKAGGHGEKAGEQSEKAGEQSEKTGGQGEKKADQKEEWAHQTRSPIGYSPKSSN

SEQ ID NO: 151986 - protein, 148 aa, Heterodera glycines
MVDKCHPLWRFKEPVNGEECHNRQPSAEECQNNGVETAHNHLSPTRNRTIISLNGNDDSLTSSNTNNETGQDQNGEAQRQGAPAFSIVLDQQQVKDEINTLRRSKFSTLRTTKIIAQEVQDYQAENNLYEQMCGYKRLRQQHHKELKQ

SEQ ID NO: 151987 - protein, 17 aa, Heterodera glycines
MEKACKIWRDYIDFSAL

SEQ ID NO: 151988 - protein, 73 aa, Heterodera glycines
MAERERRAPPHLNVASNFLVRFVETFEAWNYRQSGHLIVEFGSLASVEFFVEMMAADRIPYLHKPVGFQDLIT

SEQ ID NO: 151989 - protein, 66 aa, Heterodera glycines
MLEFSCFLVLLHYSDFVLSNDTNQIGCPLRRQNLDYIAYLLTAVYHESHRVEPWEASMVDQTNSLP

SEQ ID NO: 151990 - protein, 31 aa, Heterodera glycines
MSQLYRTIPTEFDVKENTVATVPKGRKRKRR

SEQ ID NO: 151991 - protein, 203 aa, Heterodera glycines
MAYRIYISLRCYRRAVLIEILATRINRQITALKQAYEQLDRRHQHNQLEEDIKAKTKGPFQNLLVSLLSCSREESAPASIVLAHDLRETFEFYRQAAHHEIEEGIKQEFSGHNETGFLALIKYVRNASVFFADLLFNSMKGLGTRDSDLIRLVISRFNNNICHPIKHAFHTLHKKSLEEAIKGDTSGAYRDALLALVKGNTEQ

SEQ ID NO: 151992 - protein, 117 aa, Heterodera glycines
MHLINLIALFFMLFGPSVQQYTKTPTNEDKEAAVNCHNKFRSQLALGNADNKLGGNKMPKAGNMRKFEWDENLAKLADEWANKCTLSHSWNGWAGENLAMNGGTFSNSSIQIDNCGY

SEQ ID NO: 151993 - protein, 461 aa, Heterodera glycines
MGRIGVGAAGIQRRGKNSWLRTTAQGPTFERMGEFMEYLVTCKKSATWSTNFKVQNLSDRGEYVFRVAAKNAAGWSKPSPQSDRIKLRQRYGPPGMPIQVHAQSIGRDGTPKIIFLIFYKNSGPNCVTLTWQPPAEDGGCKLEGYLVQKREWGHEQWEMATPDMCPLTEFLVPGLREFQAYEFRVIALNSHGRSPPSLHTLPINIEETAGACPTIVINKEVSVQKPSVVPLKSQRANEKEKDATQIRTPKTAQPSSAHGIGPSLDSSAGQPLSSTARRRQPRRSTRKDAIELTPLDIQCCSKNLTLPRPKNTERTASGGGRRRVGSTAADRPAQAAAAAYAGDEEAPNEEVADSEGEQQLLDMTTVEVRCADEPLLANAPFNVPGRPYPPDSLYTTYNSIMLHWAPPLRDGGTPITEYELEKREHGTKLWEKADTNADPKANTKKQWEKDAFANVPDTRFK

SEQ ID NO: 151994 - protein, 55 aa, Heterodera glycines
MIRDRYRIIFIPTIKWICWIDSNMRGFFFSKIVFILLSRIFTFIQYFVFLYISSQ

SEQ ID NO: 151995 - protein, 196 aa, Heterodera glycines
MNSAALALTDSDLNPGRGFLKFITIIFGLMLCYEILQQCYHAGGLSLLERQLIANMVRTRTPQAIKSAIDAFNALDEKFYVANEEGNSCPICKEIVPGTMAKPLSCNHIFHNECILACNALNQEMATQSAFGVSSNGQENGATNGNGVAQSTAAVGNPPEVVIDMPSDGQNGGNTVGTGTDGTETNRHNNGTANVG

SEQ ID NO: 151996 - protein, 66 aa, Heterodera glycines
MNIFLVLFLGTSRQCKNGVKMGRFATVQKWALRETCKFNRKRPGLIICKASTFALFCVESVTQIQV

SEQ ID NO: 151997 - protein, 66 aa, Heterodera glycines
MEIWCKVEEGGLVLLGKSIFTLCVYLTGAGAEGVYIAIITGRGSGDCAMSITRTNNSAGFEVYYIF

SEQ ID NO: 151998 - protein, 121 aa, Heterodera glycines
MNSSEETTENVGMGGNKDERQTTSKDETDESSSENQRNEQRQRQMDCEKEDSRFECNICLDMAKDAVSLPATMPFHYVFINRSIFALGRFDVRPFVLLAMPFPMDGHASLSPAVPRVQIGD

SEQ ID NO: 151999 - protein, 54 aa, Heterodera glycines
SNGPYTAGMCRARQNPIPIKSPIPIMAKNPINCDSDYDSDSAHPWYTAQQCSSV

SEQ ID NO: 152000 - protein, 278 aa, Heterodera glycines
MVMRRLQQQQQQQQPQEVREIVVEQLLDPLYKDTRSAAAFTSVEPLLREAQRVHPTRGIRRAEERLYRYFTHRGTQCWTGVIQQLVSALNASPHRALSGLRPRDVNFANAEQIRRQQLQRLANNVRKNSRQVRGRNPRPPRFHAGDRVRIEKHKHVFKKGYLPRFTDEVFTVTEVRDSRTPTTYKLRDDTGELLTGWFYAQDLCLVLPPPAPPQRPTQQGAEASAAAAAAAAVVGPVYDIERVLKRRRQGRNGVEHCLVKWKGYSAAHNSWIPATSII

SEQ ID NO: 152001 - protein, 381 aa, Heterodera glycines
MSSSSSFYIVLPSNTQVEGNRTNSFRVRLPRKLQFGSQWSVGLAVLLYPHSWPSLGTTEEQFVRVEWQTGEQVRIPVPASTVRNPSELLTSLHRALGEGSEKLATELRQIQLTYHQLISEAESSAKTQLEAAIRDRKKQQQQQQQKQQQENATEKKQLEKRESAKPKPNEKGKDDDDDKEEEEWKRAAYNSLYRQSLDKLVVDRMSEAERVQLQRHLPVGLELWVQSYRKARLSCRFNFDVEQQRFRLELDQSRIRQVELSDQLAYILGFHKRHLSAPLNVARYQPDMKGGVSSFYVYAPGLIEPVIIGNVCAPVLRMVCIRGAQPDDMIEEAYTTVQYHQLITKEIAEIFIEIRTPTGALMPFQYGTCTLTLHFRKSHYF

SEQ ID NO: 152002 - protein, 338 aa, Heterodera glycines
MKHTTRMLLVPEELYRSLLARSSAPVADASSARGGLPQHTTPIEHTAKRMARAAHSGGITQSTDGVSPASKQQHLLNDDERLIHYQQEFKRFKKLLEDEQERPAPVRLTQLPTDEASKGLLRDALSEAARTIQQQQPQPKQPALHQQQQQSSQSDSSTMRQPPRRRQRPAKRTHRTTSASTDGAEASRFPSSSSAVSLLTRTDNGGGGGGAETTEREDSPNDDRPQNVAAVDPARKGQREEADVQLHPSTSTAPAAAAVLRDTEQRKRQAIDYALRNAGTLGIGDGQQVYRLMQGAYRPIKNSDLDALLTFHFAEPKPEKAPPGYKTFIGNARQDPRM

SEQ ID NO: 152003 - protein, 110 aa, Heterodera glycines
MDTSSHESDRKAGDGADNADAPAACQQQQQPSLTADEPLLVRQPKEAPAHQLMKKEEEEEKPRQESAPLPQPTHNDDVSKSVSQSVAVHHNAQNKKLSKQNKKSVARLLR

SEQ ID NO: 152004 - protein, 110 aa, Heterodera glycines
MVKEFEKVRDHPDPSAMLFTCMDSSKAINTLYDLYHGRPFDAESPMDHWLRRNGHQSVQKLTQLLMAGPGTELEFASENGLMAFCAHIDRTDQLSAVDKLSQINTLQVGN

SEQ ID NO: 152005 - protein, 175 aa, Heterodera glycines
MPSLSGSNWWWAPGQKAAEEAEAFSAAAAGQPTNEQMQQADNEQTVHFVATTVEAMLSQIPGISRDILASINLSQLIYCQNFAAMKLADKGQIGRYVLEKKLLNLRIFADFFLTLSNICKTKQNQNNALANREITWIKLANSNGFLEICFEQFYKQIAQAIIEQGDTENEVIGVI

SEQ ID NO: 152006 - protein, 134 aa, Heterodera glycines
MNKIFANDSKAVFEDDMHIGEAFDEVFKQIYEQENEMPFDRCREIWKEVEHSEKTLVHETNHLLKNQGVDFTISGLLSFTIGLQNSIETEMKMLKDAEASLDALKKRELELVRHYKDKQSKILSSLDHGMQILI

SEQ ID NO: 152007 - protein, 204 aa, Heterodera glycines
NQNNGFLFQKNNLLFINISRITKLPILNYKGKTFLEGHTGTNQLGGVFVNGRPLPDPLPDQIRQRIVDLAEDGMRPCDISRNLLVSNGCVSKILARFYQYGTIKPRAIGGSKPRVATREVCEKIKSKPRVATREVCEKIKVYKDAQPSIFAWEIRDRLKQDKVCTDETLPSVSSINRVLRSIQTRKVSSINRVLRSIQTRKEST

SEQ ID NO: 152008 - protein, 85 aa, Heterodera glycines
MYILKLTTIILLFCLIYYFNDTQQPPVETTTEMPQTAAGEAQLGELKIVPELADSTPTKNNATNSSDSNDESNGMDGNVFCLYLL

SEQ ID NO: 152009 - protein, 220 aa, Heterodera glycines
MLDHIKSIILSEMLYQRRVDQFKCRHDLKYRLQSNLDLVKQIFMKILYNDSTQDGKEKFTMSKMLVDGGLNSLKLLLSFAARLSAAVGGVLSNFLYKIATHTVVSLKYCEIPKKRIFGYRIELKVDTNGNTILVRLGWKEYTVGQQLISKTNFKFLQQLAKTELSPQDVVNVCQKIDNSVGIGAAMEGTESAATKLFSAVAAHFEASNNEIHQKNPSGKG

SEQ ID NO: 152010 - protein, 176 aa, Heterodera glycines
MDKMPMQVLDAIVPFIDFYDHLNGIDSRKSIFLFLSNGGANSIAQRTLEYYNRGKPREEITFREMEEIIQISAYNEGDGGLKSSRLINKHLIDYFVPFLPLERRHVTMCFKDYLRSLNVNYTPEQLERLTDSISFFPREAPIYASAGCKQVVQRTDFILEELIRESRMINNFSDEL

SEQ ID NO: 152011 - protein, 45 aa, Heterodera glycines
NIKYSWYQKWLWVFIKQKFDFAFMSSSRPSSNPTRRSHVVRWCRE

SEQ ID NO: 152012 - protein, 97 aa, Heterodera glycines
MTEEGANTTFTAALISDGRAENQLEQKKPSQLHSLPFSMDFNGPALVSKFFQTEDGANGLKAALFRGHLLLGKTVRAPEGFAFYAVKESEHSQSEEG

SEQ ID NO: 152013 - protein, 24 aa, Heterodera glycines
MVRFITAPNLLASQQSLPILPDRT

SEQ ID NO: 152014 - protein, 110 aa, Heterodera glycines
MSWIVFSCPNCNGLNCMRPVNYSKPLICVHPSIKNLTDYLQKEPTATPNCTSTTLSFLLIIITVMLTIILLDHVNRQEQVALPAISVAVVTDVPKIEQHDGDDDQELDLR

SEQ ID NO: 152015 - protein, 185 aa, Heterodera glycines
MMPNKGKRSIAKLCLNNLWGRFSLRNFGLSQTLITNDPVVLTEYLENRSLEVTAIDELDEQHILISYEKKKEWIEEHACSNIDTDSIILTHPDDNCPLKTGPHLGQFTDEYPNHEILEFCSGGAKQYGLKLRRKDAPADADLEYVLKVRGFTLNYDVIKNQGLRYETFKEQVLRYAETGERQQST

SEQ ID NO: 152016 - protein, 188 aa, Heterodera glycines
MDSNKSFYNKAEDKLALAIDVITVDEPKMEKFISDPNKSNGTLSMEIEKVSEFAREIFESQRKSETVHIKGFPWKIWAKIKTKNESTDNEKWLAIFLLCDAPKEAENWSCKCSATLRIVSQKSGVKDLRREFTNEDTFNNKTNNWGFSNFISIAELMDPSKGFYDQSEDKVTLAIDFTVKEAKTEDET

SEQ ID NO: 152017 - protein, 305 aa, Heterodera glycines
MPSSMDRMKHLLSTGEHSDVHFLVLPAHQLILKSASDVFEAMFRFDAKKERPENVSGNCPDVVEIPDIEAEAFKVMLSFIYADDLSDLNGDNAMAVLYAAKKYNIPDLVDRSLQIPIPELRNVFFAYAQALLFDLEALRWADEKCRQNGIECSSGNRRSVLGPALFKIRFPNIHEEDFAKCVVQSGVLTEKEVLGVYQFNSHPFLCLRGVPGLYSLKFPSHGRIFNWNKAKGNRRGTLALEIEKMSEFAGESVGRSRFSDAVYINGFPWKIKAKITKGIDEKKYLGFYLWCDAKEGPILITILKI

SEQ ID NO: 152018 - protein, 89 aa, Heterodera glycines
MTMTVRDFFNRFLNIRRLGPKCKTQKISTFFHSNWHCGGTATVEEIAKTSFSVRHPSWPFDLFAQPTPIVRPLKWRRFTALLALGLSAI

SEQ ID NO: 152019 - protein, 182 aa, Heterodera glycines
MATNLSTNRSENSPQRARIDFDDSGANDSFGSGGRSVGGRKKRTSAQNIVEKKRQSRAEEPKQITAEIDQNDGPNVEEKKNKKNDEKEEKRRETKDEEVSEKSSDREEEEQEEGGGEVELFSEDDRIDEVGEDQDVAEGGTKATLKGTGNDNGTVMRDQSDDDEEEEEGEIVEEGAEDANEW

SEQ ID NO: 152020 - protein, 223 aa, Heterodera glycines
TTRKAKRSGDTRHPLPLDMTFGDLLLTVFCHPNEFLIRKHEFLRFCHPNEFLIRKHEFLRHVGLCSIIHFCNWIGLAVSGLSFCNWIGLAVSGLSLTLLNVDKLIYFRWPLSYERAMSKVDKLIYFRWPLSYERAMSKRRAICLCGGVWIVSLGFLDFLEVIIIFTFEGLFLMYGPRKLFLRPFACLFCIIQIQTSCIRIEFRFRSTQSPRATTDDGVSSSAP

SEQ ID NO: 152021 - protein, 34 aa, Heterodera glycines
KRARSSRLRPRSGLNSPTNLETGAKRPSEVSKLP

SEQ ID NO: 152022 - protein, 40 aa, Heterodera glycines; identical to SEQ ID NO: 149798

SEQ ID NO: 152023 - protein, 151 aa, Heterodera glycines
MQVQSAKNIRGIAPVEMLLKAFELELGVVPDKAFQHELRFVAEYQKGQSKLQELARVPRNDESKEKQTRHELHWALVLIFLAENAEFLDKKSQTFLYDNSQLLLYSSRQMMLNGETSEFVITMEKFVIWSPLREINGEREKRRDRERQKER

SEQ ID NO: 152024 - protein, 56 aa, Heterodera glycines
MIHLHNANLHQLKMDCGLPSVGEGEGQTKFGILTAFLKKLFCLYFNCFKVFSKGQF

SEQ ID NO: 152025 - protein, 70 aa, Heterodera glycines
NYSFTSDERAMQNNFVANLHQNGISFLADYAALWLLGLDMLQMYNKHEQQIKLFISRSCSCTMEAWVIIN

SEQ ID NO: 152026 - protein, 228 aa, Heterodera glycines
VQGQMLLLGDPQVNENDDKIKFTQEEAPEIRFDWWALPKGSAPLDCARLFAKDKKYIGKMVRRRICREEDPTENDLDMSCTAIQSRNRFWHGAKDDQQGEQNEKEHANYPMAQIRTVYKARNGEIGINIGCEYSNGLKPIRPLDYVVVELEFAATFSPLNWYCFVVDAASPALFKRRVRALAKCFPNVIMGDERPMKSDGEGMMEAVLDCFERLDTPKRKWEYVTLLQ

SEQ ID NO: 152027 - protein, 133 aa, Heterodera glycines
MDATKWHTFVNQVAATGPITKAAICGQDGNIWAKSDNFNLDPMEANVAVSAFRNPGVLANRGLACEGVTYPITQPPSTTNNTCLSGEIDGQHGVTIARTNRAFLVGVTEGTDTDVGRVETVSLAQQLATQYGW

SEQ ID NO: 152028 - protein, 148 aa, Heterodera glycines
MYCAVSYFYIIKVGPSFDNETSVEEANIQYMVVTDAGKLSLTVYARDPMLFFQSKALAGNSFGIRRNQFTRATTANGPRRKKCLHEGKQSSKSITKLKLKSRVLKNYEQNKKAQMATAANATESPAQTFAEMVKNPSMALQKLMQNYQ

SEQ ID NO: 152029 - protein, 337 aa, Heterodera glycines
MPTSSSPTNLLPLLYGSYERLKKHACDIDKRLLYSLRRLDNFTRLNFLVEVEWKGKTKMQEGKEEDAYILYSRAMAIYLMISESIDNEFKRSRGGYLFYDVSQRICADFDKVAASLQQRFMEGQGDEPEFCDPVGLRWAEIVENPISKNLDCNKVSNSSDDQDKIRSLSPANATELVATEKFLTKIKADKENHILHIKDKTDRGIGMMKHAVTNNLATVRQSGTSEFISKLFDSSISSKQNQDLVTQSLHLNEEARNFLELDKLKKSEKKIGSSETDNKNGLMRIWRLEKFSVKNGRILLSVESAKWLKTWIFIKIPDKILLDKHIKIFRGHKCPHF

SEQ ID NO: 152030 - protein, 123 aa, Heterodera glycines
MRTTILYHCRYLSFHCLGLNDLMGAHVEWKREMEMEMMQRSQNAKLAAVRNLHDFLLNGPKEPRSTKDQKRVGRIQKALLANFVSPFSRIVSAKCRKSDQKWAERHTEAKGGEGAAENDERRI

SEQ ID NO: 152031 - protein, 117 aa, Heterodera glycines
FKYSTNIDYSLGSLGHEEISCNYIDLSYIRVNSPELVSEFDGKISIFVDAVDRTVSDGYFLTGSASISAACAAPSQREGRIYGIDRWETLFPVQIKLEFYQRRKRQWLIPEDTAPWE

SEQ ID NO: 152032 - protein, 649 aa, Heterodera glycines
MPVPSIEELTELCKIWEIDLAVGCKVNPAAKAKPCAHGYVLSIEKRSLCVGYEIDAKVIFSYQEAKDQDAQEEFDQMRCGELDGCVELIPQTSVRALQERMFTLRSNDCSKVAKDEAKVGRIMSILLGRPVKPESPKANNPLMTFGALSKLKEGQIDTALCMLDEVPRLVFQQAGPGTGKTFSAASIVATVLATDPTARVLALAPPNVAVVKLVLEMQDALAAGNHVEPMLALFSGTGKLRYAKEVERISPHLLATAVEAQDFQELLQKDQERVKVERYLDACERNPRLAQEMAVAKIVQEHKNRRLCFATLSFCEQLPALFGETTHLIIDEAGQAPYVQILNLVSQLPCLTKVLITGDRRQLRVHLPSLPIAIREDFGMDMVIQNLDVARGTDVTTLSVCFRSHSALVRCTEAGFYKPHGELLTPGRDDSERALMTDQTAFKLPKKGVPLILVHQSTPAQRDEVSTSSANPGQTDTAMRALWRLARAFPGTLIRCICFYAAQALEIERLVAQQEIPDILVTTADATQGHESSLAVVVTTCSVFDGGADSQPFWADAARVDVAISRASHGMIIIGDLLLLNRTETWRRYLDQATTETTVVGPEYFDFEQFKNPDNYYDKDGQLISANGGAVRSEHFYSKYGKNVWYNNS

SEQ ID NO: 152033 - protein, 264 aa, Heterodera glycines
MSEPIDYLSTDFHYNGKAIFSAKQLGVFSYDSKKGHLEMGCANLKYVYEGFMNRKLNIDLTQGIHKQIEKWRSESLDKVFDWLLNSYDEGSSLEEVKCLEFQNNFLVLMQALNGCEFVSRRGPMSRIAISPYIWQSLNDKSQKLACVKYNDVIFIREFTRPDGEDDKSNWNTFVQKASFAGRKFEQLITMDEPEGGEPDTTAPVDPNPELDGIFKANLIVEGRSLNIFYGCEFDALRASDGKFIELKTQLKFVGFGKYFSFKAL

SEQ ID NO: 152034 - protein, 55 aa, Heterodera glycines
MAIVHSPPSLRKRFCEIMKSDLYSQIDRKFEESSTSNEGSDNELVADDNASLNSM

SEQ ID NO: 152035 - protein, 43 aa, Heterodera glycines
MSNFSLLSTETLDSRRCRRTAADEDAETELAKDSLSEGKATSS

SEQ ID NO: 152036 - protein, 141 aa, Heterodera glycines
MTKKRCAIVGAAVSGLPSARWALAYDFEPVIFWALAYDFEPVIFERLDKIGGLWRYKPEQFNLASVMKSTVIDTSKEMNAYSDFPPPEHFANYMHNTQMLAYLELYTEHHGLYQYIRFHNTVLAIRRADDYSRKMGVDLAC

SEQ ID NO: 152037 - protein, 428 aa, Heterodera glycines
KIVKFEDQIKFEGDIIHSHDFKNSKEYEDKVNVVVGAGNDKVNVVVGAGNSAMDLNVELGRVGKKCYLSTRRGAWIGKRVGEGGIPEDCLFNTRDCLFNTRFKVWLNRILPQAFTNWLFIRQCQKRFDHAKYGIMPSHGFFSQHLTVSDDLPCRIITQHLTVSDDLPCRIITGSVQVKPDIREFTSHGIVWADGTVTDDIDKIVMATGYLFNFDLVENGQLIPVKDNTVWLYKNMLAPQLADWNTLAIVGLAQALGAIHPVAEMQARLFFAALCGGAIHPVAEMQARLFFAALCGDAKLPTREGMEHDIDRAQAELAKAFVKSTRHTIEVNYILFMDELAEVNYILFMDELAELIGCQPNPVDFAFSKPRLAHALLFGPNVSYMYRLRGPKAWDGAEEAILDIPRRMAILDIPRRMDMCLSGRKVKEA

SEQ ID NO: 152038 - protein, 20 aa, Heterodera glycines
MQNSKKNKKQINTNFLKNAT

SEQ ID NO: 152039 - protein, 106 aa, Heterodera glycines
MLFQNDSKHFVDRPLKKEAKKIVEEFTSTFGGNELDVSKMNEQQVDQLAKFVRENFGRANGVLIAYTPEDWVESPPKLERIKDAEFKKWAKQLNELWKELSRKMPD

SEQ ID NO: 152040 - protein, 290 aa, Heterodera glycines
KAVNFWGVQNDSKHFVDRPLKKEAKKIVEEFTSTFGGNELDVSKMNEQQVDQLAKFVRENFGRANGVLIAYTPEDWVEYTPEDWVENPPKLERIKDAETATLISKTTHSLICVPHPFVVPGGRFREFYYWDAYWIVKGLIASGMTKMVKNMCMNFAEMVNRFGASGMTKMVKNMCMNFAEMVNRFGFVPNGGRIYYDKRSQPSFFTFMVYDYFLATNDTKFLHVLPVFMVYDYFLATNDTKFLHVLPVLEKELGHWSKNRSVEVEVELGHWSKNRSVEVEVGGKKQTFYQ

SEQ ID NO: 152041 - protein, 186 aa, Heterodera glycines
MVKNMCLNFAEMVNRFGFVPNGGRIYYDKRSQPSFFTLSDKQTIPRPESFCQDVQLVTNISNTQRKADIWKNVASTAESGWDFSCDNAKASTYAAEHNEFRSDFQRLFYKEEHGVWYDFNIKSGKLHEEYYGSVTVPLFTQCYDTDDVGTAERINVNSTQQWDFPNIWPSLAHMLIESLRRSGNKK

SEQ ID NO: 152042 - protein, 67 aa, Heterodera glycines
MGSCQMCGGGGFPGGYGSMGAYGTGLLGGSYGGSLYGSGGYGGGLYGGGLYGGGGYGGGLYGGGFFG

SEQ ID NO: 152043 - protein, 101 aa, Heterodera glycines
MADRSALTSLFWHFFLAAFLLASQNLNGIKGQAILPQNQCPFGATPDGACNYLNFCVDPRETCIQGVCCQPLPINPTYTNNPTYPIYPNNPTYPIYPTNPI

SEQ ID NO: 152044 - protein, 109 aa, Heterodera glycines
MRYLLRIRNYNFLTKIGKSSVVQSQESPPSLLTDSKPFKKVLNSAVQYYEECIGLVEVHKARDEVNRCENNLFLAQQARREKQGEIKSLQNRLKDIHSELDRTQRGEDR

SEQ ID NO: 152045 - protein, 178 aa, Heterodera glycines
MVVTNKESPGSKPTHMQKAKQHRESKTLRRHKINKLLSSAATLRPRRKRESVPNSTTPIVIEIIQDPVADQQISLSNKHSTAPLSKELRRPTATKQSSSNSTRPVSFRKRTQGKAAPYAGISRTLEHSSQTKALSPTTKEKRANQQHAMALEGSTDPTTNTYDWQSAKFSKHLLANNQ

SEQ ID NO: 152046 - protein, 44 aa, Heterodera glycines
MPYRSPVGCQCIRHTKACTTDTDASQRRPTHLTIDEIFLVNCII

SEQ ID NO: 152047 - protein, 98 aa, Heterodera glycines
MGGGKREQIIKTKSENQCSHLPQNAKIIFKSFKFHFDQMGKMNEKGKKVKDKRHSEETALFDQMTISELNEYEVGQLIANSAPPVRSIEGICQKRDNI

SEQ ID NO: 152048 - protein, 386 aa, Heterodera glycines
MCELDILHDSLYQFCPELHLKRLNSLTLACHALLDCKTLTLTELGRNLPTKARTKHNIKRIDRLLGNRHLHKERLAVYRWHASFICSGNTMPIVLVDWSDIREQKRLMVLRASVALHGRSVTLYEKAFPLSEQCSKKAHDQFLADLASILPSNTTPLIVSDAGFKVPWYKSVEKLGWYWLSRVRGKVQYADLGAENWKPISNLHDMSSSHSKTLGYKRLTKSNPISCQILLYKSRSKGRKNQRSTRTHCHHPSPKIYSASAKEPWVLATNLPVEIRTPKQLVNIYSKRMQIEETFRDLKSPAYGLGLRHSRTSSSERFDIMLLIALMLQLTCWLAGVHAQKQGWDKHFQANTVRNRNVLSTVRLGMEVLRHSGYTITREDLLVAAT

SEQ ID NO: 152049 - protein, 89 aa, Heterodera glycines
MRPSTSNLDSKSIIDSYLNSTEDCQFLLRALEKQAFENVVFALRAQGPLTQYTELLLDHLKTALSIDDDEFNIKIRIASNNPHICRIAQ

SEQ ID NO: 152050 - protein, 104 aa, Heterodera glycines
MEFVIRRNVMGKSVEKKDKKGLVHKLKRRFALFAKMDLQETECWELHERLAKLKVDERLAKTKVAKKKKKPKPNNFKQFDADFGKAMMTKGPVFVEDFIKAILL

SEQ ID NO: 152051 - protein, 209 aa, Heterodera glycines
MKQRICHLTATHKTTKRPGKPKVRTAIQRTETPDEGHGKVQGESGRTQPKDKPKEGKRIGGQAETVGQNSEKSRKFMKRKNERKIQQEKGTENYEQCKEQVRRRAMELCSPRPTHLWAQTLADFGQMPSDLALQQRSSNSDRTVEGEAEEASGIKGCFRCGSKTKVERLGNSAEEGQLEENELKGVQRKVTELISALRNAHNAKAQNEQ

SEQ ID NO: 152052 - protein, 46 aa, Heterodera glycines
LFRVLPPLLRFLSLLLVLLNALLPLLLGLSDQMRMSIPFSDLGESL

SEQ ID NO: 152053 - protein, 118 aa, Heterodera glycines
MTEEEESLAQEEESLKKEIEEEEENLPDFSDDFVDKDNLEELPEKREDEAIGKEGAQSEWDGREGQTQANSAEPSHYRNPGELAQLRAKLLSPTKRRQSAIPGEIQMVTKKSQKGRRH

SEQ ID NO: 152054 - protein, 39 aa, Heterodera glycines
MEKEIWHKMRLKMRHSNEDKANYDIKKANPSSHRETENF

SEQ ID NO: 152055 - protein, 199 aa, Heterodera glycines
PQNSGPQMSGSPNVGIPKCGSPKVGSPNAGSPKSGPQTSDPQMSGPQMSGSLSVGPQMSGPQMSGSLSVGSPKVGSPNVGPQMSDPQMSGPQMSGSLSVGPQMSGPQMSGPQMSGSLSVGPQMSGPQMSGPQMSGSLSVGSPNVGSPNVGPVSGPQKSGPQMSGSPNVGPQMSDPQMSGHQMSGSLSVGSPNVGSPKVG

SEQ ID NO: 152056 - protein, 514 aa, Heterodera glycines
MTFVYESKLRKDNIVYDKEVGLQHEIEQTFQSPPVKRSYNSSPRSSPTDSNQCCCSCMEIIGGLLYNCSRCNSSFHSICHFPALPINKGSYSSDWICHRCEMEVQYNRRHVPRIKWNLDANLLDSKRVTDRIALWKRYTELPKSETPFRSVISCFYTKVREDNTKQHLKLKSMTTKKQQKTINKPFKIESLIKRAYAVAEQNFSGDCSNSREETPIDVGSPDDARLSIAVEALMKMHNQTEDHDMMDDFLHPFTVSESKFDFAIGFSDVFVPKMEEDNNQLPLLSFNPTLLDRTQPIFASLKILSGADKSMGESDFLIPIHSSFVTLGPLKSFYALQNAHQATGVDFLRQGLSFLFSIHLNGFKAKLCFEIVSANLFDCDSFPSSKCMQKNASRFDDFVSECTCQRMDAEDGDESVVLRLLESNYEIVPSRKRTKQTNMADLDQNNARNESEGRSESTNEIRAPITEAEIRAKEMVMPDDVLGLNCITESMITKQNQKWHSLSDFLCRPEDNVY

SEQ ID NO: 152057 - protein, 413 aa, Heterodera glycines
LLSPQHTAETADVAALQRITSEMMDRQTISQLINFTKTKLITKSKFHLAILYFCLYHCYVFALLSMMILYFCLYHCYVFALLSMMMWALLYHSMWALLYHSVFGLLFLLLTCFLWALVNSRKWTFKLSPILLAYVEFLLLVQYVFLLLVQYVFSMNLHKNELGLPESVEIIGFKLEQSRTDAFMALLLKIILSLPLFILLRLHLREDYYNSLNGRERFRQVNYGTFAVNDSQSGLLHFGEFANNRCQRGRRHFLFHRISTFFIVFILLLIVSSYFYLNLLFFSLIASFRLFRKVVFAFFTVLIIYASVVLVSIYLYQFKGVPEFWQKWTHINETVWEDIGLIDYKANEFGLLFTNLTKLISLLVVTMLQLKFFHSPWSRLVSDSAEASHLECVETVDTVRAGLKRNRIKFMAP

SEQ ID NO: 152058 - protein, 128 aa, Heterodera glycines
MIGYDVLAFVFIVFQLRILHSWFFQRCMIEFRCEVIQANRGAILINQLIEKEMREQTEQQNKKLHEIKDRTAAIRKRYEEQQRRSTGISFFSPQTYGQAKRSGDYYMFDYEPDKDELVVPIESFVSRR

SEQ ID NO: 152059 - protein, 35 aa, Heterodera glycines
SLSNLSLLLSNWVISHYSQMGGFVGVPLIVYVLSV

SEQ ID NO: 152060 - protein, 106 aa, Heterodera glycines
MDQNQSDQMVNEFGNHRLSQIKAAIDDNQQRLDQNDGDHHYRDAIALKIPSSVRWRNQSVPECPKQRRLCRLRQKMNSQKQQLTCTTRPGRTSADRGRGCNGIWEK

SEQ ID NO: 152061 - protein, 367 aa, Heterodera glycines
QQTQEDEETDVPSMRKLPRQEIGTERQEKLAGDETEKKSLEEKSEEESRAKSWGIVLFFETFPFVSQFPFPKGQTILSLFLFALKLFRSLIGWVSAFLNRRSREHRYVEYVLNKEKEKLKQMMCNELFNGQITTSALRDRWEAHNMHLVSSEADIKRLEDEALNRWEQRNIFARFITAIGNCIAAHTDIICYCFVIIVHGYTAGLLTLPLPALVFLWGTLASPRPSKLFWIVMIIYTEFEIVAKFAFQFGFWPWNGDTVGNNKVYKTEYVFGVQRIQGFAGKDVALLIALFFHRYMLRKFGLWRDASSDRLINEMPKKRMDNGSSSSSSAEKSPQKSTQSTVVPSSSGENFESVAKAQQEQVIWIFW

SEQ ID NO: 152062 - protein, 181 aa, Heterodera glycines
MATGGKMGFGEIVPKLSQVTEWDTMANQIRVEIEAPLVDDPEPPSEFAGICTDVEVGPHGHWLVLLHKGYRQCFNSGDNLQLEVKNEWKGTEWHCQLEIPLAYLPGNVTKFNAYALHGSDEQRHFEALHAVTDGTLTEPDFHNLMFFGKLDTKRIIPDGYNRTVFNDLKYGDLWEEATSDK

SEQ ID NO: 152063 - protein, 43 aa, Heterodera glycines
MQTPNELTAGSGVTNFIKCSVCDAKWPYKSGHFPWGFAIRCTK

SEQ ID NO: 152064 - protein, 34 aa, Heterodera glycines; identical to SEQ ID NO: 145298

SEQ ID NO: 152065 - protein, 99 aa, Heterodera glycines
MFFSFKNHFLHHQLEQNAKFGIGCSGITIQNPPVKSKQQKIEEIYGTQNNNIMPIVTLLSVLYVCSVVVQTACAMPMQMLVMYTPINSYEGGFKLFLEI

SEQ ID NO: 152066 - protein, 57 aa, Heterodera glycines
MVHSFLRYSILFVISCFVYGHDDENDNHIIGDVYLGDEFWYQLSPITDLPTIDGVEF

SEQ ID NO: 152067 - protein, 284 aa, Heterodera glycines
MNLHTIFSVLLCALVLSCAVGKPPAKKGQQSKKADVIAKAAAGEPAEVKNDGKAKKSATVVPVAAGPVGASNDAKGTTAGGNKATGDTGTTKPSAGGSATTDDDDDDESPSPSAAAGGATTTDGKAKPSGDGTATTLSGGGGKASSAAKAGSGGTTVPAKGEETTAVKVDENSKGTDETEKPEGSTDATITGDTFTKVNKIADEITECEFYFVHLENVKANEKEKLWTRTKQEAEIDTEEMAEDSVDYRIVTPAISKDQPDMGTLYEQDTDDLPSDPDRRARRN

SEQ ID NO: 152068 - protein, 89 aa, Heterodera glycines
MERKQKRLEEVTEGFNIVLFGLPLQKDEGELSSSDSEEPTSSEEEEEAANSADGAAAPKKSGARLVASRERRRTRRVDEQKQISFFGQN

SEQ ID NO: 152069 - protein, 41 aa, Heterodera glycines
MSLNGTYLFNLSLYCSNSMHEVRAVQKRPSQILNLYLVKKT

SEQ ID NO: 152070 - protein, 58 aa, Heterodera glycines
MRSKLLWPMLTLRRRRATTVAPKVANSLWPSSEPPTAFALSKTAPISSTRRRQGLKLL

SEQ ID NO: 152071 - protein, 162 aa, Heterodera glycines
MDKFEILKWIDQLDKPMADLIRKLHKSVNELSASINEDSLDQNAKIQNLISLIKEIAIETQRQRRRKKRSVGSTVGVLIVGGFFCILAIWAIGKYCKDCSPENQQGEDIENGRRVAAREIQPESPEGHMPPRRDRSCERKGKARQGRHRSRSNSQTRLSKLL

SEQ ID NO: 152072 - protein, 48 aa, Heterodera glycines; identical to SEQ ID NO: 135361

SEQ ID NO: 152073 - protein, 71 aa, Heterodera glycines; identical to SEQ ID NO: 124984

SEQ ID NO: 152074 - protein, 123 aa, Heterodera glycines
MHEGLANVCLIGSSMTVVKSKIDMQIARKRKGLTSQHDKSLVAFMNAICAAFVRHVNIELIKCVVVASPGFLRDQFIEFFWQYIEREGLKQQFAPHRGCQCANFLEYARDRRATHPIGGFYWH

SEQ ID NO: 152075 - protein, 102 aa, Heterodera glycines
MARPFIGFAFDAFKRRLGAHDFPFLRGFIHGFNYYDAQRVKEIGAERAAAEWVVRCEGKVKFDHSPHIFSDYNALQRFTSELDPKRESDRVHLVAVDATDSC

SEQ ID NO: 152076 - protein, 55 aa, Heterodera glycines
MPAVDCLNGYRSYINDRNAELIMGDPLNPNMETDFDFAGNLALFDKACNYYAVIA

SEQ ID NO: 152077 - protein, 353 aa, Heterodera glycines
DRHKVRGGGANDCEGAADQNIWAVLVAGSNGWWNYRHQADVCHAWHVLADVCHAWHVLVDHGVSPDRIITMIYDDIAHNKRNPYPGKLFNNPTMKDVYEGNPYPGKLFNNPTMKDVYEGVRVRIDYRGDEVTPANFKAILLGNEEAVEGKRVLKSTSNDKVFVFFSDHGAFGLVAFPLFQQLTVKELTQTLQKMHALFQQLTVKELTQTLQKMHAKRMYGQMTFYLEACESGSMFDQKIAQQINVFAVTASNAFESSWGCYCDTPIVGLEYTCLGDLFSVNWMEDSDRQVKQRREERKRGGRERERQRVMHNFCFGSCFIQIYNLTSSAYNLILTPDGKASGRSLIIKNNKGP

SEQ ID NO: 152078 - protein, 356 aa, Heterodera glycines
LKTFVREHFGKADDFLESPQPIDWKENPPKLQPQPIDWKENPPKLQNIADPELKTFANQLHDLWKELGKKMPESVKAKENKSTLIYVPNPFVVPAKENKSTLIYVPNPFVVPGGRFREFYYWDAYLIVRGLLASGMTESVKHMCDNYAEMVKKFGFVPNGGRIYYNKRSQPPFLTFMVNDYFAETGDTEYLKSILPVLEKELQFWRTKRSVKVNAKGKERTFYQYRAESNVPRPESFCQDVDLVRVPRPESFCQDVDLVRDIPEAEKKRIWNELASAAESGWDFSSRWIEKDESTNNETLQWKLRWIEKDESTNNETLQWKLTRLMITKIVPVDLNALICGNLEMLSNYTIGECPQ

SEQ ID NO: 152079 - protein, 64 aa, Heterodera glycines
MSVRKCPSANVRPQMSCNCKRVQKCRAKMKSRKTVLNVLARNNGHSRKEGMLNTVIQKAEKNKS

SEQ ID NO: 152080 - protein, 531 aa, Heterodera glycines
MSANRLLRWSLMLLAYDFEIEYVNTTEFGQADALSRLIAKSTSPEEDRVIASMEFEKEAENFFSNTLETVSFSSKDIISAGNEDETIKKVKKFVRDGWPNDKAIASETEEIKLFFRRKDDLSITKECLMYGERVVIPPKFRAKVLRMLHKGHPGIKRMKQLARNQVYWPKLDAEIEDFVRNCEPCQLAAKSPIKTELHSWPKASKPWQRIHMDYAGPFYGKEYLLIVDAFSKYPEVFEMPTKSTAATVQKLRYLFSRHGLPETIVSDNGTQFSSKEFADFTQSNGINHCFSAPYNPMSNGQAERFVDSFKRTFRKLKGEGALSAEIIETFLTAYRTTPNDTLQECKSPAEAFLGRKVRTTLDLLRPPQFQPMERDELMERRFNKRFGAKPREFGPGDKVFARHRISQNWRPGKVVKKTGVIYDIKFADGTTNRYHANQIRPRQIEDKTTEQLNIFNDVFGLPPQVRAEPEDVQPQDEAVRSEADEDEIGRAVEEQNDGRIEQEEQPNEERPITPRVYPRRNRRPPDRYSPH

SEQ ID NO: 152081 - protein, 172 aa, Heterodera glycines
KKGIRQMSANRLLRWSLMLLAYDFEIEYVNTTEFGQADALSRLIAKSTSPEEDRVIASMEFEKEAENFFSNTLETVSFSSKDIISAGNEDETIKKVKKFVRDGWPNDKAIASETEEIKLFFRRKDDLSITKECLMYGERVVIPPKFRAKVLRMLHKGHPGIKRMKQLARNQV

SEQ ID NO: 152082 - protein, 614 aa, Heterodera glycines
HPKREKPNYERPKSQQSTKTEQQKCWRCGQTNHHHAACPQKGYKCRKCSQNGHIELRCEAVQEWRKKNAKSWLKKNVGNVHIVTVNIGTTAKPTTKSTLLRVKVSFQGKVIEFVLDSGAEVNVINEMTYKLIGSPKIKACKEQAVLYDGSTRSFIGKGTGTFEFNGVNVEQEFYVAGKDSLNLLSIQTMDAFGLLDELKEKISSKMVNMCKGGKKDNAPIRPKGTEVNEYLTKLKKAFPDVFKEELGFCTKAKANLVLKPDAQPIFRKARPVPHNSREVVEKELERLESLGIITKVEHTDWAAPILIVKKADGTARMCIDYSTGLNNALLDHQHPLPLPNDIFATLNGGKVFSQVDLKDAYLQIELTAEAKKLCTVATHRGYYKFNRLPFGVKTAPGIFQSVMDKLLAGLEFATAYLDDIIIVSKSKEEHFQNLEKVFERIQSWGFRVKMDKCSFFQEQIKYLGQIIDKDGRRPDQGKIAAITNMPAPKDVPSLRTFLGMVNHYQQFVKNMRFIRQPMDELLKKDKDWDWGKECQGAFIKIKEILSSDLLLTHYDPKLEIIVAADASEHGIGAVISHRFPNGAIKAIEHASSSLTPAERNYSQIEKEGLALIYA

SEQ ID NO: 152083 - protein, 97 aa, Heterodera glycines
WDWGKECQGAFIKIKEILSSDLLLTHYDPKLEIIVAADASEHGIGAVISHRFPNGAIKAIEHASSSLTPAERNYSQIEKEGLALIYAVRKFHEMIYG

SEQ ID NO: 152084 - protein, 150 aa, Heterodera glycines
MNKIDVQPKRDPTGSQKNRRAPQRRRHTDVLNGIIEGRVLKTEMMPSSVATDCKFNDYYCNRLCSRLTVNCLVTFLLITVIGFNYDKLHLTFTYNSFSEHVAALRGKLNGKALHNARSECMPSATNFAILLPALNGTTKFMPVEKPGAAQ

SEQ ID NO: 152085 - protein, 116 aa, Heterodera glycines
MDDENDGDDVEVEVEQDDTAERLCHDAMEQPTTSHGPQRHIVASNVGNAQQRHQLARQQQLSNTEEAEQREFDDLVRSYQEHMILMHRAMTPIEAFWCAQYGEVGKFITLAQIGMP

SEQ ID NO: 152086 - protein, 95 aa, Heterodera glycines
  unsure (1)..(95): unsure at all Xaa locations
LIRQVSCYTLLSGFRLPWPPSCCLYQPTPFMGSNERALWHLNSTFGSSHIASSAYQKWPTWSSNIQRLGSXVKQPWLHTHLEFENRLRTFRPQVL

SEQ ID NO: 152087 - protein, 135 aa, Heterodera glycines
MNYSIFVSVIFAGLIIVGLDGTDENGKMEKNNGKKIIKFLEDFQENDAKDENDLQIDFNSEHSREVTQMNNRNFITFLRGSSSKASDTPKPPSSASVLLPKVRKFLEGGTPTMPYYQMPFLQQKVDQVFFSSNSG

SEQ ID NO: 152088 - protein, 309 aa, Heterodera glycines
GTGTRQTGTGTFTFEKTGTGTFTFEKTGTFTFEKTGTGTFTFEKTGTGTFTFEKTGTGTFTFEKTGTFTFEKTGTGTFTFEKTGTGTFTFEKTGTGTFTFEKTGTFTFEKTGTGTFTFEKTGTGTFTFEKTGTGTFTFEKTGTGTFTFEKTGTFTFEKTGTGTFTFEKTGTGTFTFEKTGTGTFTFEKTGTGTFTFEKTGTGTFTFEKTGTGTFTFEKTGTGTFTFEKTGTFTFEKTGTGTFTFEKTGTGTFTFEKTGTGTFTFEKTGTGTFTFEKTGTFTFKTGTGTFTFEKTGTGQKTGTGTFTFEK

SEQ ID NO: 152089 - protein, 270 aa, Heterodera glycines
TGTGTCTLKTGTGTFTFEKTGTFTFEKTGTGTFTFEKTGTGTFTFEKTGTGTFTFEKTGTGTFTFEKTGTFTFEKTGTGTFTFEKTGTGTFTFEKTGTGTFTFEKTGTGTFTFEKTGTGTFTFEKTGTGTFTFEKTGTGTFTFEKTGTFTFEKTGTGTFTFEKTGTGTFTFEKTGTGTFTFEKTGTGTFTFEKTGTFTFEKTGTGTFTFEKTGTGTFTFEKTGTGTFTFEKTGTGTNKTSNTGTGTSTALHQPIKIGGDENTLSKKGKAQ

SEQ ID NO: 152090 - protein, 214 aa, Heterodera glycines
MQKEMLSQMEAAIRESLMDKSALEQMRRREQFLMEQALNKSAHSFSRLKLSNEEAEKLPGTSAQKLENAEKSVKFDEKANFIISPSPITSGTRPTATSLAQLKIVPNSVEKRRKSAADLLNENANYIKMEEKPSINEENPKPPKLVEKRISLGQIHVPQQRKEMKNETEAAKQINDSRPQTAKAARELMEQNSEVDEVRRRIAAKIKAEVINGK

SEQ ID NO: 152091 - protein, 79 aa, Heterodera glycines
DKTSSAETSSNEFFDHNFFSFSIKLNILGIIRKHSKNAISLQIFKNFYLCTKKSEQKSSNYWVFEFLLAITFLKLNQNF

SEQ ID NO: 152092 - protein, 107 aa, Heterodera glycines
MKLFTLYCILFFVSDTFAGCFTGSKTSEDSDSEREDDAVPKAAQETVKRKPTLNTELLRLGREGIMIDAWGRLPGGDRLAKSLKWLPTDSTDLLADFPAPGKEELSE

SEQ ID NO: 152093 - protein, 74 aa, Heterodera glycines
MHLFPILSPIFSLLFAGIVPVPIGGSGGSIFAICKKSDVDRKNPMPKVKAFDTPATTPSPPTDRTSTDRKTQGS

SEQ ID NO: 152094 - protein, 47 aa, Heterodera glycines; identical to SEQ ID NO: 127360

SEQ ID NO: 152095 - protein, 44 aa, Heterodera glycines; identical to SEQ ID NO: 139610

SEQ ID NO: 152096 - protein, 50 aa, Heterodera glycines
NFFIWTSLFVTRNHYFGDFVTKIVKNHYFGVLSLFRHFLENSLTKMHKTK

SEQ ID NO: 152097 - protein, 91 aa, Heterodera glycines
MLLAFVYPALIDLFTFVPHYRAEGHRQKACFRLLLNLFLASVGLFGMVAGLYASVSNLISHGSNECNAMTTTGTPTIMWNLYNGTTLSSSI

SEQ ID NO: 152098 - protein, 184 aa, Heterodera glycines
MAKLRTLCFYVLILFLFGFTVFDVQKILCLSESHEIVAEVKEIQTLLPGAEEAEEKCMEYGGEEQFGTELECHGQCRLGLIRKICKCTARTLESLADSETLQNFPLCDYAKCNLKLNGKKQLKRFISFMLLRLHKMMHKESAVEGEETERQNEPREMPSPSRAGGDTEISMSPMDGGGGQRKKR

SEQ ID NO: 152099 - protein, 64 aa, Heterodera glycines
YYSYVYVQTIKYNIFTNETEGRSLNTARQSCPIIKVPHNSWRPSRRRRIAFIRSMTYQIADARV

SEQ ID NO: 152100 - protein, 360 aa, Heterodera glycines
MLDLLNSLCETKSAIATNCGDCSSEWTRAIEAWNSFCPHLDEAQNERVLGSVERWLKGEEEVVPDENSLMEMNLEHLVEKMEPYGDAQLDGGDVALLHKIGLELAKAKEEKRLAGRVMTAPGIWDQLSNICILIGGFVGRAQTATEKQQITALTMCWENALCGQLEEIYVSAVMNALERWRAGATNGTDAGVIIGGSRKALQTMNRVASEEGQHNERQKTAISKTEMALIAELGAYFAEVIEAQRKAGAQWKEMRKTEPIVGMDKMLKKQCKRSVGRTKQTKERIYCLSWTEFRRKIPPENRKMFISWSKICKTMNLKETKKENNEQIRDKMEENILMKREEEKKEKKSTKKRKDEKPNN

SEQ ID NO: 152101 - protein, 93 aa, Heterodera glycines
MLAAADQRQDADKTDNTPQGGAPLMSQVRTFAYFKLSLAYGDDREMLFVLAWRWQKYSLCFGQAPVPAGSAWDGRKAARRWERGEETAKFKSE

SEQ ID NO: 152102 - protein, 46 aa, Heterodera glycines
MPGGSFPPLPPTTSATAKPTKQVVRCSFIRSLAAPIQSPVDDISFL

SEQ ID NO: 152103 - protein, 162 aa, Heterodera glycines
MMEDDVRHQQQQQMPRFAGKLIGDGGECRDGSAEGAAHSIHLKREEEDAAGAEQQRQREEAEDAADLGADALKARRAARQRKREPVVVGWRTLEKAMRTTAEDSDMSPLEQFLLGSTLLSRLCSFFEMAFAEAQRQQRGKFKLPIKDYGVGTDGVMSATFPR

SEQ ID NO: 152104 - protein, 125 aa, Heterodera glycines
MDDGRDLYHWKASIKGPPESPYEGGTFHLDIVFRRDYPFTPPTVKFDTIVYHPNVGERGDICLDILKQMWAPSLTISKVLLSISSLLCDPNPNSALRQDIATMYRDNREEYNRIAREWTKNHAMR

SEQ ID NO: 152105 - protein, 213 aa, Heterodera glycines
KNSPAKRTARELFPFLVDLAGSERLKGMERLKGMPNGGERQREGIRINQSLSTLGRVIKALYDRQNGNGTSSQQIPYIPYRDSVLTSLLKNAFGGNSKTIMIATISPADLHYEETLSTLRFADRMKAIRTVPVVNESATERLIRAIRTVPVVNESATERLIRTIRSENDRLLRALERGELEEVAEKVDKKRDNTKFKKRSESMARSNQNYLLE

SEQ ID NO: 152106 - protein, 136 aa, Heterodera glycines
MVGLSTNVQEMSAMSLGELEQSLNAYREETPHLWNLNEDPALSDETTKSVRYFLALFLILQFIFQCPGSGQNAQIQLKGMSQQKGEEKGSEGGEGEDQLRNGTKRNCETKFEKSVRNGRQKVERFMSRYYRMQVGH

SEQ ID NO: 152107 - protein, 330 aa, Heterodera glycines
SAAPARERNADEVLGEFDANRITAQRAKLELRIDLSRAYKSLLTMTTTGETAMLDNDNRNNKNRQRGDGGAEGTAPRGTMRKLIGIANRWEHLKETNNKRTDEEEGRTDKESVSNNELKKLLTMNRRMSAIRTVVLIDEEEDNDGEQRGNGEEYHNEAERRKNQIRNRIEHEWVSPYDNYVLTARQKTVTDFGDAVGICGSRMVSMVFGSTNARGTDVNGNIVNGGTIRATTIVEKLSKKRTTNEWRTNDGNTVEETVEEEGETQKTKRKRYSHLDEREEEAEEEKPTVKTEEEGMAEDDEIIVMDAEERTFFADPANLTRKARKRQRKK

SEQ ID NO: 152108 - protein, 132 aa, Heterodera glycines
MPGQFRKGNVCVMRGNEVVYVAPDHKTLDAIATQFKKKLNAGFKEINNPKEDGPTLAAWAHYMFVKAHFFDGNGRSARCIMNICFLKMNLEPLVLDSTTRNDYNEALTCDDHFKFASFIDKIWKSKSWFRLK

SEQ ID NO: 152109 - protein, 278 aa, Heterodera glycines
MPGRDVALIGDHKFATESAIKENPDYFRERNEALYIKAIEQSEKILEELFLRALNRSLLSRNVYGELITHERFSSWDVEYRMDLYFTNVQPFLDFPVVEQEIERERQMHIENRVTFIGGITMPKGVVPKLNGDTKQIFKSGNSANENGGVVLLSFGSVVEMNDGEAHAVALKNIVVEVFKQYPQMNMIIKWGKRAPIGTSEQYKKLADNVYAKSWLEQSAILDIRSKTLKNDFADAFNEMLTNYTEYKQKMDELSTKMNAVEPEKEFIEKFRQLRKSI

SEQ ID NO: 152110 - protein, 106 aa, Heterodera glycines
MVAKEGITETHYVLHRHLAELLAADKENVEQVLLLVHELDCAEPTEVPPKFDGRLLVWHRMTFDWADAKNCTDAVLQHRQREREHRHIWEGAIFLPNPNKPSVSKL

SEQ ID NO: 152111 - protein, 209 aa, Heterodera glycines
MYKIFKMVEAKVLGKVDKLAKQSENAKNENAKNGNAKLAGVRMIMMAPALAFSVPETVTAEQICDAILNGPLYGLSDASALNSQTSLKIFYETDSFATQIEDEALLHFVKGRRDLNKILTHVNWILPKGASSLRYTVGKHIAEFETMLSLLYLMRKRWHCANAKKRVAKIGIECTKLRQYVDIMYEYLFRVRYAKPAVMPMFQMRGPRL

SEQ ID NO: 152112 - protein, 29 aa, Heterodera glycines
MTFHENVVQMAINANDPAEQYRPSAARLE

SEQ ID NO: 152113 - protein, 293 aa, Heterodera glycines
MSSAKRSIGDAGGSNDKAGTSRSPAIGNKQQPHHQQHNHRIRNNTSNSRSPTKKRREEEEGTRAKVATKNGTAGSGSKSPRRHSQHHGGLGAALEEMRERKWATIAGPSSSSGAKAQKLSTASAKSVGEKAVHRQQHHHNDKPAKKRETKGGAQRRLTFASNHKANDDDAEDDDDTAAGPSGAADAGTSYASAQMRVLPLSKVRTIMEASPNANEMKISGEAMFAMSKAAEAFISMLAKGAYQQMLTGSHTRINYNELAMFVHDTDELNFIQDILPQKHKFSEVDKLMTTNRR

SEQ ID NO: 152114 - protein, 62 aa, Heterodera glycines
MCSELDTDADSGDQSDGRNRVQLDARKAHEAGQLHGHAGHNAGDLCCLGINETHLERFGEFE

SEQ ID NO: 152115 - protein, 56 aa, Heterodera glycines
MSSSSTIFVLLLIIAICLSLTIAMPAVDNQIESVPLRQKRYGYGGGGFGGGMGFDG

SEQ ID NO: 152116 - protein, 219 aa, Heterodera glycines
MPPHFCIFIILFNLIQITHNVPPAGLRGGLRGVFNDVYWTFQNLEFFNFPHHEARHVVLDQLYLEYFMEKNEQNGNEKRLKIATFTLFYMIRWKIEQKKQFLLSIQSVDEDGEYTGRTLYEKKKAAIRGIICDYIKEETSITTLCLMVIRKNYLLEVLDEKSPNFNKSHIESPAKSDECFDESVAERIIDENNEGIVEWMLSDMLHFFDKRQRLNKYLE

SEQ ID NO: 152117 - protein, 154 aa, Heterodera glycines
MDKMLLLFLFLIIVIGLIAADKCNNFPRLNFLSLQQQRKTRESRCCSMPTSRVMFGSETGPYDKGDVLCSIYHQKQNGLMSRCSGVLFNPSLVLTCAHFWEKAEKDGDGSMAYAGIEDGQSVEEGVSKKVQFYNNKNYYPLIIMAKTPKNLIFS

SEQ ID NO: 152118 - protein, 157 aa, Heterodera glycines
MRNQSLVLSWRSDQKTYSFPEFSSKSFCWFIRALRARYSNFVGLTEIRRGTTVIRRGTTVIRRGTTVIRRGTKVIKRGTTVIKRGTKVIRRGTTVIRRGTKVIRRSTKAIRKGTTVIKRGTKVIRRGTTVIRRGAKVIKRGTTVIKRGTKVIRKVQQ

SEQ ID NO: 152119 - protein, 213 aa, Heterodera glycines
MNSIFVICIDIYDGVAPSPLILSEKSCFSSKLINTGLFAVTILIQGMAQQVLPDNCKQGSAKCRQIFKNAIDKAYNAARQIYQQRNIGGTFFAAKHLEIVFEPADWPISGGSCSAAAAIALLSKAEKELARVDTVVSGGVLPNGPISHVSGLELKITGARNYNMRRILLPTANFGDVAELPPNVTNGIEIVFRANIFQIMEDMHLSMTHLLAV

SEQ ID NO: 152120 - protein, 105 aa, Heterodera glycines
MRNRNMEPALREEPYIYEEGKRKIPRMKFWFDLIKNRNKFGVVLCTNHGLTGIAAYSSETISTAMAPAVFVSARTTAGDWVLEEKSKGRETDDEETVRDEAIFFF

SEQ ID NO: 152121 - protein, 88 aa, Heterodera glycines
MSNLIRMVLGPQVAILRQRVNTARTHVDREEDEEVNNAALMEAKVLLLKVLQRVEAELAKWENVISGLQGQEKQTEQERLETFINERE

SEQ ID NO: 152122 - protein, 227 aa, Heterodera glycines
HFTRPMTFYASRDTRSPYSRFTNSHLVMCHCLGLLGNCWLLSALAVISQRPDILEKLFITKEYNHRGVYEVRLCIHGIWRRIIVDDFFPCHRLCIHGIWRRIIVDDFFPCHRSTKRQIFAVGRRGQLWVSLIENALAKYNGNYAILKSGLISEGINKFSGLGGYYMPFFRIFKSDSDFDIVWAKLLSARQLFFLMSCKSDSDFDIVWAKLLSARQLFFLMSCSCGAG

SEQ ID NO: 152123 - protein, 149 aa, Heterodera glycines
ETEGRTSGKSAKVSERNTNLIINYLPQNMTQEEVRALFGSMGEVESCKLIRDKSSGLIRDKSSGQSLGYAFVNYERPEDARKALTSMNGLRLQNKVLKVSLARPSKDDIKGANLYVSGLPKSLTQFELESVFRPFGTIITSRILSDNVT

SEQ ID NO: 152124 - protein, 62 aa, Heterodera glycines
RSVLPFSYVRFASDQSNAQRGDEGKAAAVAHFGRVGHRDGAVHGICGSHLNHCFSQANSTKS

SEQ ID NO: 152125 - protein, 136 aa, Heterodera glycines
MNDSCTIHGKKFDCSFAWLLERYKLSDKFAITEKIVVDELNSICNFERHVFDFSQMVDGSVRRLETYAWKVFLLAHVLLEYDTVVWVDTTIIFDNFNLTAILTSMNEGRIGPVQMPLGMYEFLPMFSNFEAKNGIN

SEQ ID NO: 152126 - protein, 90 aa, Heterodera glycines
MAIEHSFVGGPLFAPFHCFARPFSTTRAFGTITGIGTIATIGRFSTKCRANANKICAKFHGTKQKQRRRPMPAEKLMKAIRDREREKDHF

SEQ ID NO: 152127 - protein, 31 aa, Heterodera glycines
MTNDQRAYKNDGIFKGMAQVRGWIGENRVNT

SEQ ID NO: 152128 - protein, 117 aa, Heterodera glycines
MPFSQIFPIFSQVSIVEDNGHYEQRYLWTLVKKKEDNINNNQIDALGQKLDTLIEKIDQDKNVQQKSVDTLVEQTKTLNDKLDTLVNAISTLVEQLEKKSVKVSLWPGNDYFIQFIQ

SEQ ID NO: 152129 - protein, 101 aa, Heterodera glycines
MLASASLLVSCWPLLFGLCFRRPSKFPKDKWPNWPLSQSERKSRKRWRIGRFVTPTLRKSAKFERDGRQRDNSLGWPAAAKALTRTVVASNYDADHCHNGT

SEQ ID NO: 152130 - protein, 61 aa, Heterodera glycines
YIITNSFIRNNKLIYKIQSLGMKRFVGISSAVFLCHFFLSYDCCIISGKKTCRIMPMTCGY

SEQ ID NO: 152131 - protein, 66 aa, Heterodera glycines
CFKSQIIPHPFLFSFTRISSTSTPIQVVAFLNDLFSGFDAIIAKHDAYKVETVGASKHYSSHKALA

SEQ ID NO: 152132 - protein, 669 aa, Heterodera glycines
FYASQRTFMRPMAFFLCIPFGYFLYVREKERMLYDMTWRIPREQIKLLGEGGKHQRRSDPSLGKSMESASALNGRELGRLSTKQAVARLSTKQAVANGVKCACKRYLQTRNISFNKHDLTRLKELKMMENENLNKFYGISFNQQNELIALWVLCQRGSLEDVLFSGEIKIGRNFQVTFAKDVGQGLYFLHNSPIRMHGFLCLQNCLVDSNWNIKLTNFVTEEIIGDKLKHNELKYVDRDEMDQQEVNKKMEIWKLKLIQQAPEIVREYLSSKHLPPGTPAADIYSMAMAMVLYQIMFKLEPFYERNLPPNKIVSKIAMSNDNDQIIRPSFPNQQQNQAYNLQLLSALEACWLEIPEMRPNIKNQAYNLQLLSALEACWLEIPEMRPNIKRIKMIVFANLRSTGSGSLVDQMMKMMEEYTSNLEQLVKERTQMLEDTQQQADRLLKSMLPAAIADDLKAGRSVPPQLYSAGRSVPPQLYSNATVLFSDIRGFTRISSTSTPIQVVAFLNDLFSGFDAIIAKHDAYKVETIGDAYMIVSGLPRENGNAHVHHISEIGLKMRTFVANFKLAHRPDEVMMVRIGFHSGPVAAGVVGLQAPRYCLFGETVNFASRMESHGLPNKIQESHGLPNKIQISEHSFNLLISEHSFNLLSCFYHQFVMIERGKVEIKVS

SEQ ID NO: 152133 - protein, 23 aa, Heterodera glycines
MIKYGQIKRFESKNQKQKRTDQR

SEQ ID NO: 152134 - protein, 73 aa, Heterodera glycines
MPEFSVVWVSFRSMHKLACRQFFGDKGRQTEVSNGRAERTESTDCGREALFAGKGPQRHSMNRNLLIESEAVQ

SEQ ID NO: 152135 - protein, 294 aa, Heterodera glycines
MNFSAFNFAALCLLFCLCFHPSKNILNATTNSSPSSPKNIGIFTKLGKQNSNVVALKISGRFNSKLAKNKAVKVLARIDFPKDGKSRFNYENQLQIMLGNQKRLLNERIVLKQTIYKSNQKQKLIIPYEICALKSAKLEVENSRNLNKIDNESLKSNYTQILSGSQLIRIIANAMSREIDQFNNAMLLDKGDESVRRVGSSAFAGADEKEQLRFVGLVLWHLVFRDCPIIDPTADEFVFIAKVEPSIDATDPNVAMAFCAELDSELARKSQPKEQKEEKKVAEKMQEKIEKEFD

SEQ ID NO: 152136 - protein, 44 aa, Heterodera glycines
MKSTAIPINQRNSLSNWSLSDLAPVERHHENCQQKFCKTVAKSH

SEQ ID NO: 152137 - protein, 44 aa, Heterodera glycines
MSQCFTEFKGDLIKLKVFFFAFFFSFAYLKILANEETAVQADKQ

SEQ ID NO: 152138 - protein, 249 aa, Heterodera glycines
MNCFSSAVSRIQHARAHIYHSISDIGVHVDDNGFNRLFPQLLHYERATEPPQADITLTFIRPGATPSHSQIPSVVSQPPSRDSPPHSDSTPNPPSHSQQNNPTALNSLLSGFMSFAHQLLGGVPDQNHPRHPTISPPDDIVYLRVTRATMIFGMTPKLRVLAFFLRRILSLLPPTECKMFLRLLSIRHLMTFCWMECLTTNVAMRMLTWDLLKGLVLALLLRIPTHKRIINLQMSNGKRREEQKPTSCN

SEQ ID NO: 152139 - protein, 70 aa, Heterodera glycines
MLLYSFALLIFTQFFGVFAQFFGVHSQKKTESLTICYPSLLATQKLENEHFMDEASINSKLFNIDVDYNV

SEQ ID NO: 152140 - protein, 67 aa, Heterodera glycines
MIVANRASNELSNDTTMLDLVGKEKSYSPKTCVRMKTVRLSQDFFGALYFSHKNVICLGNIKYKAKL

SEQ ID NO: 152141 - protein, 146 aa, Heterodera glycines
MPASTNSMDAVTAAYYGLVQFCDDPNHRSLTLTLTAIALFVIYAIGILSQLVVLPANWRLSEQRSAFLLLLHINVFDLIWLFEYVWLSLEYLIGTRLIVKFSLDAFLFRFVNFCIDTFYIELAFNRCIAFLFPRLYNTICCEKSVR

SEQ ID NO: 152142 - protein, 56 aa, Heterodera glycines
MAKDPCQCLPTPPTFGRDAFVVTPSAQKFKWVTKWQWFRHNRLRWNSQIVISSMTT

SEQ ID NO: 152143 - protein, 54 aa, Heterodera glycines
EENPLEIEAQNCLLDLRQELAFVDSLDPSLGQCLTNSRRLLISESMKLEEWHNP

SEQ ID NO: 152144 - protein, 57 aa, Heterodera glycines
VHFIIFLPLLSYFYHDLVRVLDKILARDFVVIFLVTDFHGIRYFPGTKTHWISISLV

SEQ ID NO: 152145 - protein, 193 aa, Heterodera glycines
QSIEFLKITFFSLLPEADGVNVTIELHVQGISKISEITADFEGISKISEITADFELDVMYSLDVMYSEIWLDPRLSFKHLNVCTTNITLKEIWLDPRLSFKHLNVCTTNITLKSDFRARVWTPDTCIINSKGSSIHKSPSENTFVILYEHGLVWSNFKGQNYKIWTFVILYEHGLVWSNFKGQNYKIWCVNTL

SEQ ID NO: 152146 - protein, 83 aa, Heterodera glycines
MAFMARLRRHQAVHVRRPCRRRVQQQQFNRNIMESDIIPSIPNTLLAPMMALCRLRHQVQAVQQKQKQQHGQAVHAKQMRQLR

SEQ ID NO: 152147 - protein, 91 aa, Heterodera glycines
MQMVPFELVNEWTKEKLTLAKENENELEDNCWIMKRCKIGEAAAVQLQKDENCNNVFFYLNANNCIGPLSPPPPAKEEGRRGIKHHKGAVF

SEQ ID NO: 152148 - protein, 102 aa, Heterodera glycines
ELNVPTANAAIWSSASRKVGPPFVGKRPMSAICPNIATEQTQFVLDFCYQGVCGSREQQCRFIWGPTAKNSIAECYAYNEYGSFSGNCGYDQAKDQYHRCKK

SEQ ID NO: 152149 - protein, 119 aa, Heterodera glycines
MATKPAKKGNNGTRGGIVPSLAEQRSLVAHPGYDTGGSTSSDEQQPTRTTVADQRAQQQQEQQTVIVAQQPYRNPLTMAVQQKQPKMPTKPPTIKVKEEKGGAEAKINVKAMAAKFEKK

SEQ ID NO: 152150 - protein, 26 aa, Heterodera glycines
MAKEMTNDENKEEEEELWEKKFNLNR

SEQ ID NO: 152151 - protein, 124 aa, Heterodera glycines
MLCRRPHKICIIIAIIFLVFVPYCAAFCPPGCECRDDQFLVACNSSALTSIPILLNPMLKTLVITNSNGLKLDSFSIALYQQLESLELSNNQITRIPSNFLSRLTKLRSKIQLTANSFLLIADN

SEQ ID NO: 152152 - protein, 105 aa, Heterodera glycines
MRPIRSRNSNDFLNVIEKRKPKIDTWDLAYRWHSKQTNEAPGEGKFFYVETIKLAQQLPNFVPNLMTPIAAVPKRRPSPYMKSNLSLNPNRAAFQVKKTAWPLAK

SEQ ID NO: 152153 - protein, 166 aa, Heterodera glycines
MIEILATRTNQQIADLRNVYDTELAISDPQYRLLEAYIKEKTSGPFQHLLVSLLNESRDETHASDEEMAKKEAQQLFELRRKGLAAKSPWVSKNAAEFNRVFAKGSFSQLRKLFDYYKQIVVQHQKQKRHYKEEYDKSGKYDIEAAITNEFSGIDKDGYLFLVFCT

SEQ ID NO: 152154 - protein, 71 aa, Heterodera glycines
ELETGNFKFAGPVAGLEFKIFYRTGSGRINPANPAFKICRILRRIADFRKFQKILYYKKVFQSIKKYSIYF

SEQ ID NO: 152155 - protein, 425 aa, Heterodera glycines
VDKFLEDIADMLRIQKLPSVDFFSSREHFMWRKFMHIIGPTGSYIKWMWSMFTPIVLTMLLIASILDYERVTFNGIILPIEYELIAWIVMIGPLLIVPGTAIYNIWDARRKNKPLKSVFNGSFRKRELDDEESKQPKHTQQQEGGLYDYIDPLSRGASTKSGVNRISRRSGVMQWQNDQQQQQQKHSASAIIDDDQKYQQVRERLRRWTEEEGSSSIGIQRSLTDRPEIEDDSAEENLEDETHDNRMPGRIREWHQQQLHGIAVSSSSSPTPPPLDYHCYQQQQKLTDTSISDNQRKCESPFLFGPPPMQAILSAGSIHSGHPTDAVDDCRNESAATSDIIKTKITRQHGDDGIIGQNDKNKNLGIQKFHQSSSAIELDEFGKSCLGSVSVFNVPFRQQQQQQQHHDQQFSLSSPIRTQPNWRSS

SEQ ID NO: 152156 - protein, 121 aa, Heterodera glycines
MALSPLSQESAGRSFYLFYISKLIFFFKSCPIGITRVNLLHFLCCLGLLLPVVCFAWHFRAGRHGTVGQKRTCLINLFQLEFSIGAESHNVFFGVFKGLGSIGWAVSFTATLPYFLVDKIN

SEQ ID NO: 152157 - protein, 169 aa, Heterodera glycines
MPGNAVLAFTTPSTPVANQTLIKVAMLVAQNDTDYGLPRKNAALRDSGGAIPMALEQLWADEILPKSINFSAPNAWPFGFQFQLANDGLGTEHGVDKAVGEQSTVSINFKARIFNTQTSDLSTIVNGLRKRARIILLCFDDVTQLRTFALSLFDGGLKTKVRGMPNYAN

SEQ ID NO: 152158 - protein, 248 aa, Heterodera glycines
MNRRWICGDVWMDILPSFDRPELGLKMALLSDRFDVLVDKHFDGKSEFTIWKAIEIRKDEEPKAKLSVWTDDKCVAFPLPDRPLPIKIRFKDLQIHYIDHSVLTFLRSNKPIWDRSGTNLELYIEYCDQRIWDVLDRQIWPIFAKSIRHFGFHDGDDLDKLRRRISPTILTDVDQLNSIDSGALFPDGIADDGPNATAGQALTKWLHTPSKDGQPKQLYRNNYFGPPKLEWVNNFKEAIVAASGRRSG

SEQ ID NO: 152159 - protein, 120 aa, Heterodera glycines
MPRCCEGPTHRGQMLSCHGDGQFVLASVPLQFDAEMQTDGQTVQNVPRPNLRRGHQRTAPPHQKLADLRAYALRAEVPVSGGQICGQQISNHKTAGGGVLAEHIWGQVQIVENAKLGMPE

SEQ ID NO: 152160 - protein, 16 aa, Heterodera glycines
MLQMLFGRNWQLFRTC

SEQ ID NO: 152161 - protein, 64 aa, Heterodera glycines
MNGVNQQNGVVPPEKQSLYKPTNEQRTEWEAMDEKQTLHELGFTMKNARADGKTADLCGKVVPL

SEQ ID NO: 152162 - protein, 108 aa, Heterodera glycines
  unsure (1)..(108): unsure at all Xaa locations
IXSLERVSFLADSLFRLFTKFYECIKWHFRQSPNKSEIEKFGAAILKFGRFVCGTLREGDNAGSFCLPSSTTIGTELLLPSTLRKIKQKTKGRKEQKTITGRIKVSTE

SEQ ID NO: 152163 - protein, 96 aa, Heterodera glycines
MSMWPISWAAILEIKNVIKKGGTKTNLRKRVSFMTIRRKHVLCSPNSSSVAVHMPIEKFKAFKIISFRLPDNPTVDNPTVRTIRQKWTIRQWTIRQ

SEQ ID NO: 152164 - protein, 36 aa, Heterodera glycines
MKRDWTIRQWTIRQLDNPTVRTIRQKWTIRQWTIRQ

SEQ ID NO: 152165 - protein, 55 aa, Heterodera glycines
MFFYALDDDQRPNDSNQQQQMISRWFEIDEQTGQISAISAPPIGIDQQRKTVKFG

SEQ ID NO: 152166 - protein, 111 aa, Heterodera glycines
MSQALEMVKLIMCGYCLDSYFTKVGDGHIEFVWLLLKDSSGKNESAGAVILKSSLSESVEYQKIIFKKETELQKTQNALTDNLIKGYKIHKTFTNRVGNGKIDYVWVMVKD

SEQ ID NO: 152167 - protein, 269 aa, Heterodera glycines
MIGKVPDERRIAASTFLNLDKTEGLSSLFIAKTSEKWQKLCQMKVFEEEIGTLKKELGNGINKLAMQKKEDKTTTSKTNENKDILSKKIMAKIKESPKKVTTKIKEKRKEDKMEQNIELMDKMNVIEGQMGEFCAKFAEFEQICDPTKLFLKGLAKQIEAVKNDLVPELEVLINEKKLENAGVKSTKLLFELADFQLKIETKLRKYEEIGREISQNLVHLKHGRAKKKALTDAIQQNANSAKKHMENIGKMLKKIKNSNSKKMGDSASN

SEQ ID NO: 152168 - protein, 60 aa, Heterodera glycines
MERTAGGLSLAFDCQLVDLMPAMFREEEQKIDDSEDILPLSSSSSLNIQNSLDDLMKLKK

SEQ ID NO: 152169 - protein, 223 aa, Heterodera glycines
MGRLSFDKEGSIAKALSLIKLYEEEGIEKERILIKLSSTWEGIEAAKVLESQHGIHCNMTLLFNFYQAVACAQAKVTLISPFVGRILDWFVKNSDKKEFDRITDPGVQSVKRIFNYYKKFGHKTQVMAASFRNTEEIKGLVGCDLMTISPALLGELAKDSEAVGPMMTVENAKKCELEQIEVDEKIFRWQMNEDAMADEKLADGIRRFAVDAIKLEELIRSNL

SEQ ID NO: 152170 - protein, 126 aa, Heterodera glycines
MERDKRKYMSSRFSITEQGEFSWHLPKGRFDHHGTAEDMLRCVQLNLRRLVDRIPDALMHRGWVLDGEKGNFLRRLAAVRTIDSLRDLLMLYEAAIRRPVFLPIWWQSLSATRFVNTLFLNKKIGT

SEQ ID NO: 152171 - protein, 31 aa, Heterodera glycines
MKNGPNATFTPFKSGHSFVVIINSVPKGKGQ

SEQ ID NO: 152172 - protein, 146 aa, Heterodera glycines
MSPQYTKWMEFNASLAHPSDPVVFLVIFSFFLSLLFFIIMFKDIESDSASCGRIIIDLMVAAVPQTTENFKQLCAGALTLPVNGAQIEYGYRGTNFDRIVKDKYIKGGKIEEVLGCKSLYGDYFADENFSVAHDAPGIVSMVMKWK

SEQ ID NO: 152173 - protein, 89 aa, Heterodera glycines
MTSSMTTQNAKVKLRTPILFEYFYYYFVIHTLNPSLDNNFFRKSHSRLRGLGEDLPSEIFALKFFLRKNKEGSVNLFFLTRRNSPKKEI

SEQ ID NO: 152174 - protein, 31 aa, Heterodera glycines; identical to SEQ ID NO: 152171

SEQ ID NO: 152175 - protein, 34 aa, Heterodera glycines
FLGCKSLYGDYFADENFSVAHDAPGIVSMVMKWK

SEQ ID NO: 152176 - protein, 78 aa, Heterodera glycines
MSPQYTKWMEFNASLAHPSDPVVFLVIFSFFLSLLFFIIMFKDIESDSVSCGRIIIDLMVAAVPQTTENFKQLCAGAL

SEQ ID NO: 152177 - protein, 87 aa, Heterodera glycines
MTIKGTGCVNSMNFVFFLFIFMTQVFIFWAILLNVPSRLRRIGGLRPRRRPPVFDDVDTRPLRPLHLLVREDSTGTRNRLSTIQEVK

SEQ ID NO: 152178 - protein, 162 aa, Heterodera glycines
MSTLPPRHQSHSEASDFFSPIAAATMAMDVEQKKPNPKPRQQQTDASNFFGPISAATMGMGAEQLKPTIKQQQNQQQNGVASEFASAISAATMGMGNEQRQHQPPPQKEKEQTDQEILDEFLESVSAATTLLDVPQKKPKKKGKKEVEDEEAAAIASITRKQ

SEQ ID NO: 152179 - protein, 137 aa, Heterodera glycines
MAMDVEQKKPNPKPRQQQTDASNFFGPISAATMGMGAEQLKPTIKQQQNQQQKGVASEFASANSAATMGMGNEQRQHQPPTQKEKEQTEQEILDEFLESVSAATTLLDVPEKKPKKKGKKEVEDEEAAAIASITRKQ

SEQ ID NO: 152180 - protein, 976 aa, Heterodera glycines
MASKFVLVPDEIYRGLTNSDSENINLDFVQRALERTKRKGENVTAKNVHYNQELSRYLHLRDEDQNKPSKVEITKGLNALIKRGNESDEEEQVFNLESDRSQQPASQISRPRRHHHHHNNDDEEMPLQPAFPALQAENRGQKRKANDFYSSWEEGAKRQLRHEDETVPSSSKIGNRQRRRQPPLSLRREQRQIPAEIQQEEPFQPAPEPSIPIHPQINRKRKAHNALNDVREIKKRLIGLEELRPPSLQQEASLRFQQKRTNKPRVNQPQHSSSSALVTRRNPQRNLLAEAAFAPLPDNDDGDDFELSQPPATAAQAQPLPPRPSLPSKTKKRKSNKAEEDTERKRIKISSRKRDLLAEAAAAPLPVNDDGDDDFELSQQPGTSAQAHPPGPPLPSKTKKRKSNKDEEDTEGKRTRIGSRKRLSSPTVTKNEPKRQKSSGNEGLSEEQRRQFADDQRLFTIPNSQLTNEQKRRRLQFVFNRNPVKYGVRGDTILNNAGNPITDSSVTQALEYIIERRAGRVPQFRQPPGTKIIQNRINRDLILRTWTAPPVPPRGAKRKLPQTDQDAELNQKSQKIRGLGQARGRAQEGLMLPFPTRGVKRKTTVPPEAAMEIPSKTQHRLYNDPNSPAAFAGVNRLWLEAKKELGYKISKKDVKHYLEGHRTYTLMRPRRINFPRSRTTAAGFMTDCQVDLADFQALSRHNSGNRYLMVLIDVLSKQIFVTPLRTKKADDMIEGFKQLFSQMPMKPYRIFSDKGTEFKNQQLKKLFDEEEVEKYESNHSEKKAALAERAIRQIKNRVYRYFAQLKTLNWFDVIYKIVNGINKSPSRVHGMRPIDVNFKNSQKVWEKMFGEEQHRSLFGKHRKRPKFVPDQNVRMSIAKGQFEKGYIPNYGDEILEIDAVKRHMKPMRYKLRDAKGEKFKGFFYPEELTPVRKETDTTYRIERVFRKRKRTDGTMEVLVKFIGYPEREWIHETQLV

SEQ ID NO: 152181 - protein, 195 aa, Heterodera glycines
MSNSTPSSPPSKRSRRFFIDELLREPYNELSNPRKSPKDYVKKLDSEIERVPKFQWLKNKSTFIIEDVPADPEGLLIGIFQHCMDEAMSESVLGGIKPTHLGCIVSSQLLTSDIWIPIRQITPDTINTILNRFNDVAQSKKQDGVTLWGQPFNVTVITVNRKGLPEKRQLKGGAPRKLAPVNHQIHEQCLIKVFK

SEQ ID NO: 152182 - protein, 517 aa, Heterodera glycines
MDFITERVPNVEIFWQCEIEAMLVRDKQMKTKFSEYTGDGGPIDIRSCFMGGRTGALKLYHEAAKHEQISYYDFTSLYPYINYVTDYPIGHPTLHVPCEDVDWRRPEDNPYPLAILKVFVIPPRRIDVPVLPVKVDDRLCFPLCMKCCKKFPNGAVKAAYSCTHNDRERGWISTCTSLELNAALEEGYRVTELLRVLEYSKSDNELFRPYMSEFVVQKLHASGFDQNIRGNLEAEEQFIAECCEQFGMKIDRNKMIPNKGKRALAKLAVNNLWGRFSLRNYGLSQTLITDDPSELGNYLDNKKIDVTGLDMLTPDRILISYQQKKDWVKEHPCSNVVVSLFTTSAARLHLLKAMQKVVRTPGCVLLYTDTDSLIYAHPIGKNPLSTGPHLGQFTDEFPDHDILEFVSGGSKQYGLKLRRKGTEKIEHMLKLRGITLNYDVTENQGLRFDTFKEKVLQFARTGNVEPIKAVYPNFLRPTVNAGSVISAPLQKIYKPYVSKGIVCSRDFRVIDFGYVAQ

SEQ ID NO: 152183 - protein, 177 aa, Heterodera glycines
MLLTEKIAQILNCRVSELRDRLNHPSDFKHVVKALKGCHVQTTYKDRNGFTKSFLFGGITPQGASTTMAYGRLGRPFNVNVTAHFYVRHRIKLRHPFLHCVIERFPEGQEDRFYPLELCKINAGQIEPGWLGRIFTETGSDNNNNINTDENASTETSLISSGRQECSQSDGYSLCQN

SEQ ID NO: 152184 - protein, 120 aa, Heterodera glycines
MPTPPHDNKIYKKSEYLKVDDADEVDTDPSPEEVEKWTPEQVIEWDQRSYEKMPAEEEIWQEFLDKGEANVLREFFGGEGALKVEKSLREYAKKKEQRDEILMRKRKEYEEKMENNKGEN

SEQ ID NO: 152185 - protein, 338 aa, Heterodera glycines
MSDSTNDAIRELQRALREQQRTIFVLRSQMVDHRAVILQTVARTEALEGYAANSRGGRFRSRYSPMVALEMTTIGRRLEERQQRRHAQAHASTNSSSPGRGQGSNEPSVGAIAVNSGLTETFPPTPLSSRGQNSAPLRQNTAGAGPSTGIADGGAESGGQWFGPTIENHMNRSRLRLVREEMAHRTMQQQVEHQHQQLLERAERVRQANVEQQMEEADVLQEQLQQQDEENDENRDPEMEQRRLVQVARQAEYERLVRLQLREARRFHNGVASSVVVPPPLFWEEECVICTNARANFYNRQCGHVCLCAECAVTAVIQKLTVCMMCRAPVNGIYPYVR

SEQ ID NO: 152186 - protein, 141 aa, Heterodera glycines
MSILDFLYSMPRRLFCAYFAIFGLLEALNGLRNIKVDNYLIELEKVSEEYQKQWKRFENKNLNEKEQKEIVKRMGEENAKLWELMKEIGLDWASMCEAGKEFFSQILKKSKCALNDGSMRGGEAESEEEAGQADQPISSPK

SEQ ID NO: 152187 - protein, 91 aa, Heterodera glycines
MLALQQARVVPTPRQWSLWTAKFNFKYNSKRAPDFSDRGLFDSKGHFDRNIINFRRGLFDSKKKFSKILFCEDTVHCGPGRTSDELRNGGD

SEQ ID NO: 152188 - protein, 88 aa, Heterodera glycines
MHHFQFWSNLFPILVLITSIVVLSANEVVEDGTTEEQDMAKALALSKTYYWRNMVLKWDCKKEKMISPEQIGYKQSHEKCWRFANIGK

SEQ ID NO: 152189 - protein, 79 aa, Heterodera glycines
MKAAAVPKAAAAENAQKGPLSAEVVAEENNLDTEAVDDDLGVEASDIDELAEDELLEDDAMDSKADAFLDMGEEAEMDS

SEQ ID NO: 152190 - protein, 154 aa, Heterodera glycines
MKNARKTNHKVCNWLIAFDSLCQLFVVAPFGVNAIGVIFQYSSIDYRFCLATLMAATVASYASIMAMYLISVERLLIIMYPINCVYCNSGLYADVLNTVPSYVILLMCTLNYAAIFCLILWRHQTNKGSTQTTQQSAAKCCQLSDFNFIFYFHI

SEQ ID NO: 152191 - protein, 45 aa, Heterodera glycines
MTPILTLHQIHAFHTKTRERNPQKGENAKKQDETDFPSPPRKTTK

SEQ ID NO: 152192 - protein, 175 aa, Heterodera glycines
EEPPTGNSSTATTDPVAMMLARRCAPSPMRTPPTSTSSGAAATAITIGTPQCPGTTITTAEEENDDQQQQQATTTSSASSTPSAAQQQQQQQTSLNKKHPEMDNAKRRLLLDPFIHQSLYTPKRSIFGTQAGAYSQVADSNELLLAEQSATVAVEGLVRTSFVEWCAKTWTGVRF

SEQ ID NO: 152193 - protein, 73 aa, Heterodera glycines
MAEETSKTSENIAEDNGIKALDSLFAAVAHASKCLAFAAGTPNFCLATPAFLAVMVWCCFLMPVMVKWGEGII

SEQ ID NO: 152194 - protein, 140 aa, Heterodera glycines
MLVDKVEQISKLIDDASHYTNEMLYSIFAGWIGANAAVKRDGLILICVFLVLANADINDERKRAMTYAINHHFINCIGMALAGVGAHYPTLTSRLMEKLKDFTLDDLFKVLALQDKEFEEWLRELKLLYTPLVFVTVATK

SEQ ID NO: 152195 - protein, 339 aa, Heterodera glycines
FQLIFAGEYTKAMNKDWHGDHFCCWQCDSQLTGQRYILRDDHPYCIKCYEEIFANVCDECQKHIGIDSKDLSYKDKHWHEDCFLCSMCKVSLVDKPFGSKNERIFCSNCYDQAFATRCDGCGEIFKAGMKKMMKKMEYKGKQWHDKCFCCAHCKTPIGTRSFIPKNEEVYCAPCYEEKFATRCCKCKKVISTGGVTYKNEPWHRECFCCTNCNTSLAGQRFTSKEEKPYCADCYGELFAKRCSACVKPITGIGGAKFISFEDRHWHNDCIGGAKFISFEDRHWHNDCFVCSQCTASLVGKGFITDGADILCAECAKARYGGEQLNIHLRRHFYFAPPPS

SEQ ID NO: 152196 - protein, 205 aa, Heterodera glycines
MFLHFSVNAAEANELLEDDDDRAATSSSAPSLPKATATTTSLVKPYTTSDPFGSRRPPISSTIKSLLAKFEPSAAKPTDPSFASAKPNGLGTKASIKPDPSFVGDASAVPFSSSAVSPTISGATTTGTDSSATAVGVEQQPVHADDGDGRLGDEEVDEVAEEVRLELEQDALVVFTDICCWDLHMRFFLDKEGKFTSRKCCNRSE

SEQ ID NO: 152197 - protein, 158 aa, Heterodera glycines
MAIGRGGDAGSHSGIGAEQQQQQQRVQRGDEQVEQVVQQQKTPVVVVDSRVSPVQRKPSRTVFNESNEIVDNEQQQPYPWQQRRQNANSSSSCSDVRDSVSLSAGDNEADDDFGEDDVDHTVEVCGAMLWMGPSGYYWHFMLCANHWVRNGTSTVGQL

SEQ ID NO: 152198 - protein, 388 aa, Heterodera glycines
ITAEIDQNDGPLVEEKKNKKNDEKEEKRRETKDEEVSEKSSDREEEEQEEGGGEDELFSEDERIDEVGEDQDVAEGGTKATLKGTGNDNGTLMRDQSDDDEEEEEGEIVEEGAEDANECYEEDIEDPKVVQQKRGKLPKSAVDDKFFNLAEMNAFLDSEDKKEEDKMRQRSVRNLGQIENAEELEQLISAHEQSNLQPREWALSGEAKAEERPKDALLEQYVDADYRMAAPPTIDAEKMAQLEGIITKRIKDGEVGPQAAVGPEVNLLAPEEVKRRVKSAPKGTDERTETDRKRQRRQKKKKQRILASIGAMNGEGTDGGETAERVKTKKKVRRVKMDFAEQINKLVQNEGEQQLKKKKKRKIVEENGEEKKSKKMKKKKSKVGGEKE

SEQ ID NO: 152199 - protein, 366 aa, Heterodera glycines
MDAVTQQQQQLPELLKHVPVLVCAEVICERCIAYGVDIEREPLRRAPQCQCGVPWRGANRRRWCSRIGEEQFDDDTCGPATAQQQQQQMPPDGLNPRRLRFFCDGEPGTGRGAMAQFVDFLLHTGPKGTRTVMLAHNGGPAGRAAEEGGPARAARLHAGAARDSPAPADLQRLAELLPRSARHPATHLWAARGAGQAVFPYHHIREQNLDVELPAGTLPPPAAYDPDRMRAAQRDDFMAWYERELHRPGRQPFVLRRELLRYCWNDVRILRAACLRFRELVGECADGMEPFLAATTIASLSMAVFRQHHLRPHTMVHTPEGGFLRGRRASAESRRFFALLAAMRPDLGPLRTARWSVGEMVMDNSS

SEQ ID NO: 152200 - protein, 167 aa, Heterodera glycines
MATDIKTILLRLSSIETLLSNNNNNTLATQMAEQFNAIAERLNEIERKINSNNNDNSSAEEKERKRSLVLIGLPEAVAEKPSERAKEDAETVAEVLDALDVEVCPQMVYRMGRRIDEKRNGQSCLASDDVPTFCIGTMGAQPDGTEAACWLAATSRQALSDERRIGG

SEQ ID NO: 152201 - protein, 238 aa, Heterodera glycines
MNRRWICGDVWMDILPSFDRPQLGLKMALISDRFDFLVDKHFDGKTELTIWRRIKIVKDEGPKAKLYIDHSVLAFLRSNKQIWDRSGTKLEVFVPLYMTDVKLIWDVFTREIWPLFARNIRHLSFHNADALDNWRRRTSPTFLTDLDELVSIDSVGLFPDGIADDGPNATAGQALAKWLHTPSKNGQPKRLHRNNLLGPLNLEWLNNFKETFRRATTSVSYNIQFYLRVEPMPTAGQK

SEQ ID NO: 152202 - protein, 196 aa, Heterodera glycines
MDELNIFAENYDKKLMIDKQQSLKELLAILMKIYADYSNASKREISKNAIRLTHSGNVTLRFGQILYETIENLENLPEDRVKYDENEQLLTIPLLFVNHLLERLNEFIERNLKENSKISDDFDFVLTLQTVAEESTELEAEKRQKPISAGVNVNLFQLLFSLAIRLCLLIDEKEKLAEKYLPKFVFALKMCTTNTG

SEQ ID NO: 152203 - protein, 61 aa, Heterodera glycines
MDKAENKEIVKKLSELMELIKLKRVEKVKGLKEKFVELLEKDEVLYPSKKTSVPKNFHFAY

SEQ ID NO: 152204 - protein, 300 aa, Heterodera glycines
MISLTELSLTDQSNQERLKNAHVKPNEIDEKGTKNHKGKKKAVKIYSKEEKLQLLKKFQKRKKEFKMDDQINAFNRMEVAIAQELGVSIRMINEWKREFGLTIRRIEEAVARELGIGRTTLKKWKKQLGLTAKKSYSKEEKFEVILQFHKRNIEFKKDEILNSYNKIVQAIARELGVSRKNIYKWKKELGLSNEQWLELIRGRMNEFEKDENPNEFNNAEDGIEEEMDNCHVKKESKIYSIKEKLELLEQFQKEKNASKKNDELNTLRKIDAAIAKKLGISRTAIYRWKKKFGLSGLSSD

SEQ ID NO: 152205 - protein, 114 aa, Heterodera glycines
EKIEEVIARELGICRRTIRRWKKEFGLTTFQHQNGQKNKADSLNAEFNDQNGQSSFIKRQKHVNFEENSPPNSSPISQSISSDSPLNNELHEKLVSLRTNCFFLDSRFRIDFDF

SEQ ID NO: 152206 - protein, 392 aa, Heterodera glycines
SERSIIIYQKTKTRQLRKFTAKFVTDFAINFFDSPLNNELQEKLSSLKTNCFFLDSRLFRKFTMKYVRESGLLHPLLFSEPPEKLGMRFIKFFSFNYISELVGGERRIEVFDVHTQEGKNMRLKEFVKYFRQSPSMRKNLLNSLSLEISDTKLSEQVIAPGFVRRIDWIDNVWVIAPGFVRRIDWIDNVWPKELLARQKNLLKESLGTKQRFSYPKVQKYCLMSVANCFTDFHYCLMSVANCFTDFHIDFGGSSVWYHVLKGEKIIFWLIEPTEENLKLYEEWFLGGNGDSKFLGKLTKCSRVRLRQGETLIIPSGWIHSVYTPVDALVFGGNFLHSYAIPTQIRISTLEDNIKRGKKYRFPHFKQIFWCFIAQIVRKCTHRLYQKKLFQTL

SEQ ID NO: 152207 - protein, 67 aa, Heterodera glycines
MANNGPRLNLDGEEICYNEFLGNAIDGSYTFNPIQSVYDNKDKAKFTPTKNYNIGTHKNINRLSFIN

SEQ ID NO: 152208 - protein, 1264 aa, Heterodera glycines
MLAGGLSLSLLCFIFTMCSMVGYAMAGLRILFWIFSVLFARLFKPRKETWVLSEEEENLLYPHRRIRRPRPATRNWASGRVSQMTMLVMASLPFVHGGIETVAIMAKSESCLNNGTTKMCQVKGSVTLALLPVGQPNVLSMKTDDGLILGTLQVILKGLSLECQAYTKAWKRSYEIASVASKRCPSAGSCVGDFCTKVPPSTAIRELRETETFPGNSFCIDSTAFWGNQCLLAASSCLFYKWFAKPRSSAINEVIGCNSWEFGIHIQLRLDSTTGRSATVETVLLPGRVLKWHNISISTIGVSQAPAPLLNADFLIEGRSVAIVREKITDSFHCTDLKAAQAFNCTLGIDACTGCLPDHTDGTVSCHCRVANLEGLMEDPQRRLPLSFRHYELRNHGRRIFAITGYSPVQMNIQMDSLQMSLEMHQSLCTITPKHISGCYKCATGAQLSYSCHTDIGQTLADIQCEDGSHFTSKCGPNITDHTVVLPFQHAEISTTCQVMCLAGRTKFSLVGQLHYIPLRQQSEFGARVSESLEEASNSGWADFSFDWKSTFQALFGLKTGLIFFIVLMIGIVIIIFVVHFSPVYKLWRTFAWLLMNQAPRPNNATTFSVAAILFLAAGGSFGWEPRKGDSFPVSCGELRIPDPEFSFREAEVNTVPLHQKIDYRNRSPKTDIKEGNLMTISFLRHHQAPNNTQRLSKTMPIPFRERPPFFSAPTISRPTNEVVINDRLVIDIIGQYEAENGQRANNAPQPGADNAPPPWAEDQRGPWWFDQDWGPQLPMVPENSGQNRQMDDQRDDWGAHAPPQREPSPREHTERLNSWVERHHGQQWYETASIRRDAEEHLRRELRTGATLFAAHLGPFANVYFDGFSRFGPANTRMFPGRTVQEHFRRRGFQVDPNLPCLQEYGGFSNSQQGIHVDYFPIDMVNVRFQIGADQREAEPPRLPRIRAYLALEEAPNDQEGPNRGPPSRRFFEAIGLRRGNPNVGEMAENNGRQAPLQRGERAMDYGRPNSPDGSFENRPRRAVPNRPMRRWQNGLFIVAVALCLCNLAEGKEFPSTRTCHQPLEAANMARENQWGFSRMLFPWPLSHDQKANLIEELRPFNGSKTYLRAWICHVPPSLAFSKMPKPIKMASSSSSSSSSCSSYGSDTSEEPPPPPPPRKKAVELFNIAAATPERDAKSGRNFSVRDFIDAEAKEESSSKRMPTCSACQLSGHRRGAKACPLYVPPQKERTAAASRPGTSNTRRDSPEEGEITADKAGRDRPP

SEQ ID NO: 152209 - protein, 190 aa, Heterodera glycines
MKEHPLWRMAHIAILCQRVDIFTDDGLAYLERFDYSVTDLVQVACSPEGLFPLMLAVQTNQDSIVRFLLKHGADLTARDPVGNNALHYAALVSTQMLETLLEQEAGKALINSRNNAGETPSMVALRAVNPLCMKTLFNHGGDLLNKSTDKNPLIELIQSSKGNTPEPLGVGYILHENFASIYLLFFELFC

SEQ ID NO: 152210 - protein, 108 aa, Heterodera glycines
MSTLNLHFAYFLLIVVFLLVDYSLATRKKNKNKGGVTFTKSVHEKRKTIKQIKRRRKDDAHCRRTTNAIVSRRSGRKRHKFTGNGAGRETAKNCRQIGDESERNAEEH

SEQ ID NO: 152211 - protein, 152 aa, Heterodera glycines
MENEEERPSQKEPIEAYFAKFKQFMAHLQDNPTKGQSDKLLAILREIEGRKETVKFAKEMAEMDEIREHIDELEQGFREKNAELANKKTTEREKDSSLKANIAEGADKIGEGVKRPIQQIFTEKVLKHDQMANLHEIMQMALLEGKPISEEQ

SEQ ID NO: 152212 - protein, 46 aa, Heterodera glycines
MACFQRGMVVSERTAIKDVSVPSTKKAPRCLTCQIGRDGVLSTWYG

SEQ ID NO: 152213 - protein, 272 aa, Heterodera glycines
MALWAECTRRRGGKADTRHLCAGKFIGIYINATDKWLSVHNQKGNQDWTNSLRFNLTVSVSPNGALVQQSFPLPIINRKQRSHFFEIAFDKKCEGASRPSIVRFSKGNRLVTDEVDIGPQVVHVYTITNHGPFYARNVSLKINWPLQLMSGDPLSPRQIASGSWALYTLEEPLIRHNGQIRRCAAPPQLHGQKSINPLGVYNDETLKLDYQMTSRRQRPKRAPNQRTVGTNAEGGTFSATAPLTSIFDNGRIRRKEIEESSGAKVRIADIVS

SEQ ID NO: 152214 - protein, 20 aa, Heterodera glycines
SPMDSLSPVFKIIIYLWKSH

SEQ ID NO: 152215 - protein, 372 aa, Heterodera glycines
MVGMGQKDSYVGDEAQSKRGILTLKYPIEHGIVTNWDDMEKIWHHTFYNELRVAPEEHPVLLTEAPLNPKANREKVSQSPSVDQWSNRTARPPVQMTQIMFETFNTPAMYVAIQAVLSLYASGRTTGIVLDSGDGVTHTVPIYEGYALPHAILRLDLAGRDLTDYLMKILTERGYSFTTTAEREIVRDIKEKLCYVALDFEQVGLWPMPCQNYQSVRLQEMATAASSSSLEKSYELPDGQVITVGNERFRCPEALFQPSFLGMESAGIHETSYNSIMKCDIDIRKDLYANTVLSGGSTMYPGIADRMQKEITALAPSTMKIKIIAPPERKYSVDQQIRVRRVGPVHCAPQVLLIERRPAGSRKKEENVADKI

SEQ ID NO: 152216 - protein, 72 aa, Heterodera glycines
FTRWGPIKVDASFLVVAKALKAVVTISAGHENIDTVECARRGIRMGFGGAILTEATAETAMALLLTVSRRLV

SEQ ID NO: 152217 - protein, 218 aa, Heterodera glycines
QEPRVSCDRVEREFWRNVIDRVEREFWRNVIDIDKGVQVKYGADLISSKVGSGFPRREDASVRGVAADAQDRQQYANHPWNLHNLPKVRESVLCHMTTDISGMIIPWVYIGMLFSTFCWHVEDHWSYSINYNHWGERKIWYGVPGEEAELFAKVVKESAPELFMENKDLLHQMITSAPELFMENKDLLHQMITHMYDLLFLIPFLHYFFDRNPQFLID

SEQ ID NO: 152218 - protein, 56 aa, Heterodera glycines
IAPPFRARDEAELLLLPFFHCFGFTQLNMALLNGSTGVVLSKFEQNSFCRVVEQYR

SEQ ID NO: 152219 - protein, 132 aa, Heterodera glycines
MRFKCKGGLLLLTFLVGFAGGDLAHNPIYKPDKNDAVVFHGQIWEENEVKEYQMEAEVLDEQQPIKEPKIIWATDKLGDRHFRMTFKFAGGTGKRQIDKLKLELFTSRTVTSFREKNGRVEKVKKKKGDTEK

SEQ ID NO: 152220 - protein, 182 aa, Heterodera glycines
RVSDQYLAVVGDQTVIRWWLIIGDIVLVDKYGFITVVDRLKELIKVNGLQVAPSELEDLLLSHPVAPSELEDLLLSHPKLQDCAVIGVPDKVSGELPRAFVVPKNGAMNELEIQQFVKERMAYYKQLKGGVEFVAEVPKSPKERMAYYKQLKGGVEFVAEVPKSPAGKILRRILREKMTKGN

SEQ ID NO: 152221 - protein, 61 aa, Heterodera glycines
MYRDPIGKRNAKKNNAAVSSSSSAPIERKRKRVVAAAAPAIPTTDTGRRNCAAALCPSVPL

SEQ ID NO: 152222 - protein, 52 aa, Heterodera glycines
MGIKYGHKCQNMDKYGNMDINRKIWKNMENMSIEIRRTNRACEELSNDIQIV

SEQ ID NO: 152223 - protein, 155 aa, Heterodera glycines
MFCGSVSKGVFCFGNFSFGYQNRKSKIKQNLIITERLRMSTSGGSSNEFPFGTSQAFGQETKMFLSGKEDESSISAIDRKLWQGKTTIKISDLEKAQNDMGKLEDGVNRAFRYMNRSLNQKVNNAYTTQQIQTLCRPRNLTMALFDRFGLQLALA

SEQ ID NO: 152224 - protein, 236 aa, Heterodera glycines
MVGNGNELVETEDDENSVNFMNLFENLELTDSEKLPSLMEIEKIFTDTTPTPADLPPIESSVMGFVFISHPILWALVQPDILGEQNELLDRKNLSLESDQFVFQSTPSYVTTITLDPNNNWPHFTQISLNWNKQSLLGTRLKTIDLKQMTYPPKLGPSVSQIVPSSCCGIIREVIQNKITSEIMAIDVFLYGEESNQRFFPHQIDSSVNLMELEGTRVQTTGFRAKTSENEWTNFG

SEQ ID NO: 152225 - protein, 143 aa, Heterodera glycines
MQKPTPSNRPNSSVSKTLACGLEKIVNLSGNEPLSVPVLADRSDPLGLKSVQPDTVPMESAEGTKEVEIMEVDEMSGEKGKKGEMGKEKVKSGGMEEEEESEGSESELLGEGGFDNLQLNPSLRAGNKAVEKEDKGKPYLVAQ

SEQ ID NO: 152226 - protein, 28 aa, Heterodera glycines
MSPIWPNLSSKMAQALIKLLGFLHFLKY

SEQ ID NO: 152227 - protein, 63 aa, Heterodera glycines
MRFLLIIPAQLFQVRFISELKKLQEPSLMNSVLENFTVLQIVTDKQSNDTLMVIAFMFGIREE

SEQ ID NO: 152228 - protein, 96 aa, Heterodera glycines
MPTFASREALQPTKTTRNCDHRGLAVVHMLWYENNWYCNFTGGSWNRGHPPPVFSFLMALIESFKFVKIGQFGKKFDPKKLAHNQTETTRFATCLA

SEQ ID NO: 152229 - protein, 20 aa, Heterodera glycines
MFYSTFFLVHVKILRYKLCD

SEQ ID NO: 152230 - protein, 251 aa, Heterodera glycines
MKSNYIKGFYTWIIILYKLIKPSFFADFNGKFHAVRRFKYYDGIELEYFAECFENFFIAQTNEDGEFDVNLRGNIGETIFFQIFPLYNNKAPIRSDSFPSTFLQSIHRKPDWRLCVHFEQHFYFLIHKEKKTKIGTMLDNWQRSANANPSDEEAFFLKACLQEIASRIVDTFTKGIKLTNNEISIQRKYWSAFQQMKGHGILAGKLAQIDGMPKLMKDLCRFTVADYEANSADGFEFNDKLFALAFFCAEL

SEQ ID NO: 152231 - protein, 45 aa, Heterodera glycines
MINIAQLTNADDVTLLKGRYRVRLIDSELVPLCYEHYIAWQSDRH

SEQ ID NO: 152232 - protein, 384 aa, Heterodera glycines
MEPRSRSVRPYLIQSNEVDKFLRKQRLPSPYRRPLAYTLEKFPKNDSDDNKNPRTNTHFSPPLSTRINGSNGTANSVNCYSDSNSVQPSLSNKFLENRRRTSGRSPSVPPRNYSSSYSGKIDGYDTKSTYGQRLKEGFFDYQQQNGGRVIPVQINADEARKNKTSALKILRSFFKKHLGFSNPTHKRDYSVEPIDSKRFSSTLNVNGGLPSSSSSSDPYERRRSNSIISSAFPRRQSFSYRNGGTTDYAPIPATNNMPSSQFNHDRRKNGVTSTDCESDEPPQFAELMQRFSDISTSDIRPRLPSASMYQFPTKIGSTSTKFSTSTLPPTPSPFSRPMHNSLKPLQPRPTTSDAQHSFREKSAANDGELMLKQHSRSSQVPCLK

SEQ ID NO: 152233 - protein, 36 aa, Heterodera glycines; identical to SEQ ID NO: 147448

SEQ ID NO: 152234 - protein, 37 aa, Heterodera glycines
MTIFLTIFAGSQPVRIGPRAGRGGRDVKCGVLLIREI

SEQ ID NO: 152235 - protein, 176 aa, Heterodera glycines
CTSLITVVPLLITVVPLLISVVPLLITFVPLLITVVPLHHICTSSISVAPLLITVVPLLSLLYLFITFVPLLFTVAPLLITFLSLFHCCTSSIHCCTSSNHCCVFPFREDPSNSDDAIVDANEQVEANNEEMKKNRKGKAIIEMIMSPKFSKIVGRKGKPIEPPQTKDVDEQRVKK

SEQ ID NO: 152236 - protein, 177 aa, Heterodera glycines
MIRLCLAQCGLITIVAFLISWTLCRTPQIGGWTNLCVSTMNSVFGTNEKHPWYFDTQPAFAGKPPIAPLMCQEPNNKLDYPPYRTWNAYKWDSKNTKRTLNEKTLCMIGKSGRRNWTMYDTSSGHYGGHWLGDNQSRWPDLRLSIIGVMEFNMFGIPQVGADVCGFIGDSNEVRKIG

SEQ ID NO: 152237 - protein, 246 aa, Heterodera glycines
MEAEDDDSDDNDAENNYMLGYDEEGEKPRSVTTYAFAHAGSRYDHVLIYGEMLRMGVRPELVRHGNQLLEMKARKRGAITTTIFRDSYKLIPIKLASFVKTFGLEIEGVDNKKYFPHKFNKAANYGVVLDTLPPLEDYYPGGHFPEERKKLKQWYEENRNTPFDLREVIADYCKADVQILAHGMVKMRQLFAAATSQELTDSITIPSACMKFFVVLSHVGKERVAIIPHLGYEKRGKQSAIARKYL

SEQ ID NO: 152238 - protein, 262 aa, Heterodera glycines
MNFKFSFAGFSTTIPHIELEAALRSGYRVTHVYRAYVWPLYCEWSNGLFHSYLNKFLRIKFEASGFPADCAADEIDEEDRERRKEQYINNPWKGCTVRLDANNIKPNPGMRYLSKLCLNSLWGRFALRNRITKTEIIDCHADLAKLLNDVKTDISSIDQLTEKFWMVCYKAKDEHVVEHDTSNVAIALWTTAAAHVHLLNSLQLVYRQENLVQRYDTRILYMDTDSIFHDFKTALGDPLKGGNQLGELADEYPSHTIVEFIC

SEQ ID NO: 152239 - protein, 16 aa, Heterodera glycines
MALAFSALYASITKKE

SEQ ID NO: 152240 - protein, 288 aa, Heterodera glycines
MPTVREILESLQKRVKKPRIATNEDSVLNVERTDAEQQIEGTSTRNNLGVASSDDEENCFRFIKNRKDGSWFRCEQRNCPATAKLDDNDLMTGILGAKGHHHGCAPSRYDAETKRNQMKRLIKEEPKTKPCQIRAQIRTDIDDEVFELLGTNEALDQMANSASDNVPRSYIQKWDEWLTLPVCYSELSRDAILHFTVWEVGNTIEPVLVAQCAKPLFSKHAIFRNGLIDLTLDFVANAATTDKQQRRPAVQLQAAHSKSPSKGMATENARPAEQSVEADDSTPLHQHN

SEQ ID NO: 152241 - protein, 152 aa, Heterodera glycines
MPKEEASAAPFRNAFQPLLMGKVRMCQEGAKEEEEEEEENGHEVPTSEESSQSEDDGILAKDGEQKVEMKEEEEEQDFGESELKMEQEHKQTKAEGKREGDERDKGNTTPREGAFEQPYQWKLVIKTKVPPGHTVLSKREGNGDGGIRKAKE

SEQ ID NO: 152242 - protein, 453 aa, Heterodera glycines
MAPGGKTYARLKNAKGNTAAPSSSSVSVRNPTRRAPSTRKAVAQQPQHHKLEKRKAATPQLDDNCPGDHRHPSQTLLEQQNNALYRLLFDGSNENYFTHLERARHLVHTCAVCEKKYEFVLVRFPDTGVETPWHPVLPTHRNIRDGWTLLDLAMLEPDTIYAFDAAWQQCVAPDDAIGGNENDDGGDDENGRGNNSGGRNKKKGGGGGQKDGGGSKDGANGGGREEEEQNDNNGKRGEREREEERREEEEEEEQNGNNEERGEKKRREEGRGKEGGEQDRREDEEDEGRGEEETRERGDEEETEEAREKLKRGEEKGGGEKGGGKAKEGRSEGGGKAKEGRGGGVGEKKQPPPGSKMLCQIILTLFYGYRRRRRRPRVRFPTNKPRTFPFNNKAVMDGLPNNKRNKDKPLYALASIPEEEETKKNGREKTALVKDDKYGDNYFEDCYYQSTWV

SEQ ID NO: 152243 - protein, 105 aa, Heterodera glycines
MSPCRRFKSRPQKKNSEYKWLHIVKRQKHRQQRHQQNHFNEMCVAFQRCAFLKEEIDKQMTNLIFTITKIEERSNGLPDPQAAHLYGIVKEQLERTVRQIEKDCL

SEQ ID NO: 152244 - protein, 97 aa, Heterodera glycines
MAEQFVQPETAEEQQVKAKKPHVDERFLWKITRGQFVLAIRLCSEDWNNLFHNKDKARRLEDGRVAIGLEMCEECARINCCVSDMIADQKKKPKTTK

SEQ ID NO: 152245 - protein, 164 aa, Heterodera glycines
MVLVIEFCAQILGCSPKSLRDKLNHPEDRVKALKELVGKKVRTTYQDRNGMQKTFFVDGISDHGAALTPAYGRLRQPYNINIAAHFYARHRIKLHLPYVPCVVEKYSGCGEDRYYPMELLEIVDEDYTIKERWLGNCLPKSRTTSFLSTAVVELTKTKKLTLVV

SEQ ID NO: 152246 - protein, 532 aa, Heterodera glycines
MLMPNGKTAGEVRERDEKRLEFIESQVSRVDVYWECQIERMLHRDPYMRESFGDYVDDGPLNIREAFMGGRTGPLKLYHKAGEGEKISYYDFTSLYPYVIFSTTYPIEHPKVLILNEDVEWTTARDNPYKLSLLKVWVIPPRKCDVPVLPVKVNKRLCFPLCMQCCLDYPKGGVDFDYHCEHDDQQRGWVTTCTSIELDAALEEGYRVTKVFRVLKYRHGDDKLFRPYIAEFMSQKIEASGFDASIKGNTELEQQFITECAEKFGISIDKDNMKVNKGKRSLAKLCLNNLWGRFSLRNFGLAQTLITDDPSVLTEYVENSSIDIISIDELDEKHQLISYVQKKEWVEEHECSNIVISLWTTSKARLLLLKAMQKVMRTPGCRLLYTDTDSLIFVHPIGMNPLETGPHLGQFTDEYPKHEIVEYCSGGAKQYGLKLRRNGQDEFVLKLRGITLNYDVMQNQSLCYDTFKEEVLRYAQTGEYEPINVMYPNFLRPDIRGGGHVTSGPLQKCYRPYVGKGIVGSNYNVLNFGHTL

SEQ ID NO: 152247 - protein, 82 aa, Heterodera glycines
MPFVMGPSESGAKSKISQFNMATPVDQNVIRLNDLNAFETLKSNNLHFYVTMNKAKGMDIFHGQSQLGNVKSVMFGVKHSKK

SEQ ID NO: 152248 - protein, 118 aa, Heterodera glycines
MGYSFTPNGENNGAAEGVVSGFNRALATVVCETVAKEEAEEAEAEPGGQCRWKAGDELDGTTETRRWWEKPLGQGCFCSVCACFCGKGDVGVEFNSDVVSCLEIDEQKAVLLVTKVGN

SEQ ID NO: 152249 - protein, 89 aa, Heterodera glycines
MSQPYAKRGGIKRIILIQKQQRRQLMVKNRSILTSQVQQQMCAEIDLERELHVVYTNLATHMDTLCDHNWCCRFECARCDVKKKRCHML

SEQ ID NO: 152250 - protein, 76 aa, Heterodera glycines
MRIIRNFFFITKAIRKWLAINYNDGRGVCSGERCRTETECQFVIEKVPLPMPIFDDAATAFSTRRVTLTMPLTLFN

SEQ ID NO: 152251 - protein, 186 aa, Heterodera glycines
MGQKPVICHWCETFDFVRYGYRIKGKYFTIFCHIIEWREAQNFMVRNNPLNRPLKSDQIPEKGISNGQRMVKHLQRNHYSKAELKTQSDRLLVPDFCNCPNGSDRCGPSTNCINRSLLQECPKGCGEDFNLGCANRRISEGNNCIKIEIKFFPGKGYGAIAKEKVPSLCEPFLQPQLCDPANPKRF

SEQ ID NO: 152252 - protein, 117 aa, Heterodera glycines
MRNLRVPILLMLLSTVIIFILQFLLHENMPTKITINPVAGNFMQRRILFFDSDVDSPKLLLGMNTQFIPSLKLAGCLIAKNSNVFLEALFCYLTNMNKINTTNIDYELFNLFVFNYL

SEQ ID NO: 152253 - protein, 55 aa, Heterodera glycines
MPNLLVYIFFNNFKILFNLFLTPFIYIFKIDLAEHHCIDLMPLVDDNIAMAVGQI

SEQ ID NO: 152254 - protein, 122 aa, Heterodera glycines
MQTMRQRTDGRRARDRRSTLLLEMPRFGRKKHLKEYLGGVNSMCFYRWEFQFVVLVTGPSRKEWTKFYEFDMKPTCKKCYDRFPTELKKRISDNLKEREAETLRRRSASPAQPQKSKSPGLK

SEQ ID NO: 152255 - protein, 48 aa, Heterodera glycines
MADEAEVDEELIDVLRETDLVKFQPMMVFDKQLTRIEHFRDVTDFELM

SEQ ID NO: 152256 - protein, 124 aa, Heterodera glycines
MEANCVREEVGMAFEWEGIEDEEFGGRDANCVREEVGMAFEWEGIEDEEFGGRDANCVREEVGMAFEWEGIEDEEFGGRDANCVREEVGMKFKGGGIEDEEFGRREEEGRCWVFIKFEDEPENG

SEQ ID NO: 152257 - protein, 411 aa, Heterodera glycines
SGFTLGHLLSVVYTRAFKDGHVDICRARKIKIFMDNSKKGYYIDDEDASAFQPFSGSSSNLINTQHLPSSSLLPNSSSSIPPPLNFIPTSSLTQLASLPPNSSSSIPSHSNAIPTSSLTQLASLPPNSSSSIPSHSNAIPTSSLTQLASLPPNSSSSIPSHSNAIPTSSLTQLASIPPNSSPSIHPQLNPNAGPSITQLASIPPNSSPSIPPQLNPNPGPSIAQFSSIPPNSSPSFPPHLNPIPTSSPTQLSSVLPNSSTQAALLPSDFMEPTSIFIIDYQLYKKYRFLLAENPLFSDISDASAYLQIDERDYGNEQSASAQVLRSILDLRPTSSTASSQTSSTTSRNFRDHMRKLYTELGETNRDERDRAMKALEFKNKQIETRSEDGQRRRSKGSTSEDDKKKSVFCNI

SEQ ID NO: 152258 - protein, 133 aa, Heterodera glycines
MAQNAAQNDDQVVFALTEEEMVEWDERERRWQEEVRLRCEERRREAEERRQERGDWHSDMLRRQHVWEQQKEERERDRERWEQRMEDEGRKCEERSAAIRKKEKEEKDKNDVTDHYSFKWEEWREKEKLFFGK

SEQ ID NO: 152259 - protein, 124 aa, Heterodera glycines
MEGCSVIESLCHEDLKFGFTKYKTKFYFKNPFLINAEENFKLILASIIEEIYKNEQGKFKSILKLSFGFESFYCPLRCPSENTAEALFQHVILKEELYSLFYPLDDVITLEVTIIPDVDNRPRN

SEQ ID NO: 152260 - protein, 151 aa, Heterodera glycines
MNSEKSEKANTILVEAAKKETERAWRDAAALAEEVGDFAKSSRETLNQAIKSREKAPYANGVRELYLKMSDSIWEIFKIEDQINLESVKAESAWREFERCKTFDQATKFEEQAQNSLMEARRLHFESRRVQSQMLNYENRLKTIVWEHVGI

SEQ ID NO: 152261 - protein, 16 aa, Heterodera glycines
MVFYFFRLVESVHDYV

SEQ ID NO: 152262 - protein, 318 aa, Heterodera glycines
MFLSGKDDESSISAIDRKLWQGKTTIKISDLEKAQNDMGKLEDGVNRAFRCLNRSLNQKVNWVKDVVANTNANFETLKVQFETLTERVDMLEQDSDGTNSGGTVSITNLNRASRAPFVTPMGNAQPNQVVPNQVPIHQLSSEDEDDGPTLFGLNMLSSGPTVGSGLEMFCEESVFAFDDWAERFKDYLSVSGKAYTEREKVTRLKLALRDTPRALFKELLPAQTDTLDSALSELRQKLDSPQRREIAKRTLSLCKQREDETVAQFLRRLTPLVDATNSSLTGDIRKEKICEEFLDRLKPNISFLIRLVGLSRAKDLDL

SEQ ID NO: 152263 - protein, 90 aa, Heterodera glycines
MSKFAPTASGGVAGGAQQQFMTAPQCRCKDLDECSKEIEKLVAKCKTEPKCEAHLKKIGNSQKIRQCLADEQKDMEKLEQCVEKAVGPIG

SEQ ID NO: 152264 - protein, 44 aa, Heterodera glycines
MPPNERQEKAFGDCEQKLGLTAQKRLKKSCECLKASGIKIVCPK

SEQ ID NO: 152265 - protein, 26 aa, Heterodera glycines
MATVHFAYKPNKNTVSVSNSAYRKLK

SEQ ID NO: 152266 - protein, 152 aa, Heterodera glycines
MSFQNTPKEVRRARNTRHFFKATPDKGKCLEKIESHVNERAKFGIREHVTSFYFKCPPNEDAENNFRIIIDKLIHEAKEKEPAQGWKTERISLNLYCAALSDPVMIPVRPLQQVTSDVVLNEFMHRQQSFGDVNLMDERISVIVTTFAYPLK

SEQ ID NO: 152267 - protein, 232 aa, Heterodera glycines
MKIFFESVPDKGPINPRDAYAGGRPMPFCLYAKATEAVEISMFDIISLYPYVNYVSRDFNVNWTVPDDIPYDGLLKVKVVPPKELLYPLLPVHIDNMLLFPNCGICARKAKNEFVTTKDVKKCNHRPEQRAFLGTFTSIELRKALELGYRIVGLYRAYHFEQFDNQLFKGYVRMFLKIKVEASGWPGEVKSEEEKSAFTDMYKAKYDICLDHDKIVFNPGLRMIAKLVRNVY

SEQ ID NO: 152268 - protein, 341 aa, Heterodera glycines
MSRFCPLVETKELGRLSVMKGKFCLFYALELSRNYQLIDNGISRKAFRYFMETEKKQSEMTFKLMEKAGINAEEKTFGLQHLEMIQIFWDKEFPDMFRIVAFDMRTGIKPIFKGEGIRKNEVCVIKEGDHWDGIKSVTQFFCVRNYCVSCEVTCERPERHRLECKERCKKCCRMGFGFPCADVCEEIHCEGCNRNFYNTDCFESHKKTACREYKKCEKCDETYQTRSKHTCGEKFCRICKIYHPKRGCFIQKLKIRSTRKYRIVAYDLETTLYNGVHAPNLVCAALTCSECVGEKRKCEICEEPSMLTWSAADVEDPIGGFIDWIMGFKQFETVAFAHYAG

SEQ ID NO: 152269 - protein, 143 aa, Heterodera glycines
MAEGGGASADCPHVIEVTDVEAEAFKVMLSFIYAEDLSELNGQNAMAVLYAANKYNVSLMVKALLDVPINELPNVFLAFVEARLLNEHDFSRRCLDYIDQNAETLFESEEFLQIGQNLLCKIFGRDQLKIDDELTIWKAVLIN

SEQ ID NO: 152270 - protein, 37 aa, Heterodera glycines
MKEKLPKKERKLSNLFTTHLSVHFLSHPSFTLNLFIF

SEQ ID NO: 152271 - protein, 76 aa, Heterodera glycines
TNIITHQFATEADGGEQFGQRQQTNAFVQSGAIGRTQSVSEAAIENAEAENQQLTLSRMQSVNGSFEKIGDEPNEF

SEQ ID NO: 152272 - protein, 215 aa, Heterodera glycines
MIRRGTNLMKRYKCDFKRYKSDKRGTKVIRRGTKVIRRGTTEIRRGTILMKRYKSDKRGVTVIRRGTTEIRRGTTEIRRGTTEIRRGTNLMKSYKCDLKRYKSDLKRYKSDNRGTKVMRRGTKVIRRGTKVIRRGTMVIRRGTKVIIRGTTVIRRGTMVIRRGTKVIIRGTTVIRRGTMVIRRGTKVIIRGTTVIRRGATVIRSGTTVIRREILE

SEQ ID NO: 152273 - protein, 205 aa, Heterodera glycines
MDPKFAPTNSMPIFPVNLPTPLGPICCCCSTPEAKLLRKRRDLACQSAESVPAAGDDEPSVSEWIFCDLCRKWFHLKVRRLSHRYAFDDESEREMPEQIGTEQWIRHFRERYNQFPEAHQPSLIQVFDHGAEMLANFDFEKGWHLPIKVCHPHGLGLRMPDDPYFDVLDVCRLLSDAVTVDTIDVYAQRSYTMSLGRFYGLWRKR

SEQ ID NO: 152274 - protein, 210 aa, Heterodera glycines
MLDAEKLEHAVKMKERGTTFLNQGKHNLALAKYQSVISLLEYAKPTKSDEESGKELREQFEQTFIAALLNSALVSLRMGESVEAIKHCDKVLEKQPTNVKALYRKAQALQNRKDYAEAIEQYKHVHQLDPSNRAAAQQILECGQQLAAQREAERKKYRGMFERMAKGTDSKSGGGGDGGASAATPSASDNNAEGVKKTILLFFKKLNQFS

SEQ ID NO: 152275 - protein, 30 aa, Heterodera glycines
MAKMKLIFNIEFPFFVHFLAHDKSLCLLNA

SEQ ID NO: 152276 - protein, 181 aa, Heterodera glycines
MPLKVPHSPQLPSLVINNPSGAEAKKGMPIAVMNTLLSKNVELEKKEQQRPATKLNNTQPMSQHDQPKTVRVAKKSTMNNGTTLMANALQISKNSTDYLIDEVQREEETVSAFLKRLTPLVEVVYANLGKKQLRERLVEELLDRLKPNISFLVRVAGLAKEKDLDQVKAQAEELETLLATQ

SEQ ID NO: 152277 - protein, 217 aa, Heterodera glycines
MAIQFWAASTINVLFEWALEKGCQTISNASVIQIKEFAQEINEIKQIVEQICAKKGINEQGIRILGQKVLDQLKVSEKKQTKVPLENFGTQLMQLAKGLPDELPVKSAVIKQLEPINGSLATPNDAFKFLNGMVSSTLNNSDSAKKQVNSQKNLIVLKNSSARRRRRFDRRKLPIVVVIEVLLVFAIMLQKPILVFIACSIFFSFLPFLLQIRDDIE

SEQ ID NO: 152278 - protein, 55 aa, Heterodera glycines
MVCLRSGMIRPPRCNMKGLCDLVSICHHFSDHPLTESRAFAETRRRDLPHSKAIL

SEQ ID NO: 152279 - protein, 243 aa, Heterodera glycines
MSNFLMSNISAVSIFPEPHFNFVTFWVGDLLEWWGCHFELVIYDDLLIAFIKNEQEIQMISEYTLKKQAAYLGIVYFMRKNWQCDKIGAKSEQYERTECQKYRNYLDILYEYLYREYAAIPTAKPNFVIKKKQIGIDGPLIYVLNCLVRISQFYFNEPISLKYEYELNKLFELEFEPKLLNEERFNYHNQPLITINKLILKLATETANGRPTNENVEGIIRQNFEKYLKKLFGKAEENALEGV

SEQ ID NO: 152280 - protein, 59 aa, Heterodera glycines
MMPKKLKWCKNLRNTKPKTQMCESIGEFHFLNNFFKQLNGPPTYPKRHPPSVSAQNLTS

SEQ ID NO: 152281 - protein, 134 aa, Heterodera glycines
MAKLMDHFMAGLRSLWHIIKNKHLLPKDGKHQKRLTRRKKRMYADDYNPNYERPTANFFGATSSKFIVCFGSLILFSFFGGFGIFFALKLAQHLQNEHNDMTWVDGGLISILIFCVLVLMLSGLAFYRSCISAN

SEQ ID NO: 152282 - protein, 212 aa, Heterodera glycines
MAIFDPSPLIAILAFSLYTPLALATLLLNLFAIVVLAHGHRYFSQRFFFIVGRHLLAADLMSTAAQLSIAVPVSAMSTESAKTYLESTFAQFMLTLEALAHLDTFHFVTLQACSFLGCFQQEQMAFRLNAFGSIIGLVVWMLIAGQLLLFGFVPCAKRFDPVTLHFFDSCNWPNPNARGSGFALLNIWLTVLLCSAFSIYAIALSHVRRRIQ

SEQ ID NO: 152283 - protein, 129 aa, Heterodera glycines
MPSQTLMPSALGSVPSTSPSGSLSPKSRELKERKQIKELARLREMIMQGFLIMQSLLLRFVGFFVLPWLAFAAGANGIDQRALLCVLANTLILLSLISHSLIYWWWNSKIRELCKEVVETLHKKLLKSR

SEQ ID NO: 152284 - protein, 30 aa, Heterodera glycines
MIKRGTKVIRRVTKMIKRGGTKVIRREFLE

SEQ ID NO: 152285 - protein, 1204 aa, Heterodera glycines
MSRSRFRPFPKLQTTLLLLTPCAFTSCARAQVVSITASAEKCQRSDFGSVCHLESSTTVTLLPSGLPVRLLLRHPDERVLGTLEISMRSLTLHCLPKSEQWLRSYHIETVSVKRCPSRGNCTREFCDDVNNGRKTEVHELSEWTKHPGFNRCSASCSFWWCGCLNAGASCIFYRPHAIANSPIVYEQISCPTWEYRLRTSLKLSVNANFTKEPSVSLTPGITFRWKDLSITPIASSVPPAPIMATKFLSDGNNMAISDEIQSDLQCPSRANAKRLNCTLRWGSCPMCLPDHDSAKINCQCRDVKLEPALADPEKRLPIQLKNLLLRNERRDIFAEITYAPIQLSIQFEGLRIATEEDLTKCHAMSKGLFGCYSCHTGAHLHLQCHTDFGSALGYVRCSDGTEFTALCHKTPEVLNVSLSFNRAEVDINCTIECSGGRNPFVINGHLRYVPKHFQAPNEGSSFASKAKPSNSCLIWCPDWNFDFSDVFWYFFGLQNALRTVGIITLALFIVYILLRCNPALRSWRAISRVVLLFLALWPTTDSSAAGGLSHLLSIQNSAPKLQFEGHSSVSRRVTETLDIFDAQIGTIHLAKNQKSPMDFAIKAVSVPVHSPFLQIPESAFHIQTQAQFPPFPMATLLSFLANTMNIEVERFGLAVTTSLSRWNEARTIVEGLHERGYELKTRHLHPRERNVRLHGSELSRSGANRLGAYNGSARGPTVSELYRSRHGITLRHPSAPCLMEPGGNGHHDFFPIEMIRVVAPDQVSTPRGLSTRPLPRPRPSHFALWDRIDHPPRSRELVINVMPHGDSTSRGAAEEYRIGVGRELTISGPLVLRIYAGALLLALFSVALVDGQSSIAGLCPAHSFALCSSRLHKFSCLGPSLFGPSAFDFVQITNKFASLAYSPLPGSEHFAESYAEAADSPISPLCSAILPFLLSGLVRIWPLFKPWIARTGHHSFPSDYPILNTFCAMPAKPNLLSQELAELERRKMELEQMIASAKKEVPEGKSRRPKKCQSSDEPAPQDEPEEKGPKAAALSDAPTTQPSHPPLGIVPPPPPSPVGSDMADLLHGHVNKWAMEREEAVHFLQKKKRDVAVPVHDALKKFNGGIKRLRTALDDVQESVGSIAAGVNELASSTSDGLVIAVTLLQAEVDRQAVELRSLRRALHPPPDVETLSVASSDEGTIVAEPSSAASVAKATKKEEKKKK

SEQ ID NO: 152286 - protein, 860 aa, Heterodera glycines
MSSARCRMALGPALFRLRQHVTTAENLLDEPVINAKTTENLEQERGHITRILSRMEVELDAWGAIMNGLQGPAREAEEALFTAFVRDDRHLTEWLEDAREMLAHIAAELADEPNQQIAAGGQQPAVAVNPPVPAVPFVNNAVFPGGANAQQPAAVANAANQPPPMPINAGGVHGQQPFAVANPANLALPVPINAAPVPLATARLPQLSLPIFSGEPMEWPAFWQSFESAVDRAALEPVDKLNYLHGCLRGKAARAVTAYRGGENYAHAVAALRRLFGDPRKIAEALQSELINLRPVDDSVGSLQHFLETLERVCRQLLNLNMPDDSPFMYQIIRSKLPSTVLSELIKMERAAGIPWSTPQLRAGLAEVLGVREEVERCLREANADRQTRFRHEARPNRPQRPERHENARVFPLLKTRKRCLLQQNRCLNCLRKGHQLRECRSKQVCRVCKERHHSAICPSAKGTSSARSKQQKPSPRNKQSFGNERNSRPLVSSAVANEADSIPEPKTVNTIMAIVSPSVPHLVMLMALRAPVFSESAPNKRRDALFFFDPGAQVTMVKTPLIRQLSLPKLQDDQLEVNPFHTRQPIKMKAPQHVLCVQREDGGYETLVAHRTDWIVPSVRRATFLQGMLVPVDEEPDILVGMADFWKFFNGVQRVSPQLFKVQTSIGSTVCGRDEIPSRPTADHPLSVMPVTVHVPANEDEMPNTAVSGIQRNESISDLDSLRQFWDLQNIGIRDDPLENDDETAQQIFDQTTTRLANGRYSVGWPWKNFPPDLPSNFAITRSKTKALASVLFILMCLFLIGASQTNASSTTKPKRRNGHPIRCRGCELTCTKTGVDILIPNGIAKFLLCCADGTHKGE

SEQ ID NO: 152287 - protein, 85 aa, Heterodera glycines
  unsure (1)..(85): unsure at all Xaa locations
TGXGELNFRRRKKYGRHNHQATDAHIGFTFFENDIEKAKRKSFISRPEASFSKNKKKFIIQRGGNLPTLKVSFGSPMVTWVPLLC

SEQ ID NO: 152288 - protein, 191 aa, Heterodera glycines
STSPDGLPYILNKQCADCRFLAPIISELFRIILDYGEIPNLWHTSFIILIYKKGDKSNPNNYRPISLTCTLCRVFERLLAWNIVKHLEKTITDEQFGFLKTRSTTTLLLVSLDYFKSIENGQNIDIIFIDFEKAFDSVPINLLIVKLQNIGISGKILKFLQNFLYRSYQVKIGENFSKSFKTYSGVPQGSL

SEQ ID NO: 152289 - protein, 22 aa, Heterodera glycines
NGRYSVGWPWKNFPPDLPSNFA

SEQ ID NO: 152290 - protein, 27 aa, Heterodera glycines
TQTQGGIELETPFLLTNSQTTKTKKPT

SEQ ID NO: 152291 - protein, 160 aa, Heterodera glycines
MDFQNIFLHCQTTNEAALCLYRAHGFEVVQQIHGHYQCRAIDGESADAFLLERRFTNENDEERKSVATALHTEERLRALQDRCWALCWHHNGKLLASCGEDCTVKVWHCVDTAAMVPMCSKSDATTDIEGNGDGIWGSTGNTTSTKLALLCTMRGDQTRS

SEQ ID NO: 152292 - protein, 84 aa, Heterodera glycines
KLNNLFKKQHKSNFIHNTLIKCHNVFLVHLAHPGRLIFQVFDKFFISAQLSPRRSRKHENGQRIGADANHRIVDAKIEHRHNQE

SEQ ID NO: 152293 - protein, 143 aa, Heterodera glycines
MHLLFAFFVSALQFHSNANPNVAISNPAVEAVRSSDQLATLVQAAVDVAHEFGLIKRLSDDDSRKRCASDRTAQGQLFRAWGMQKLYFLVSCDFDFLVKATEGMVKSNNLYGRMIEMMKEIHREGQRQPYTLFLTRSVIEIFY

SEQ ID NO: 152294 - protein, 37 aa, Heterodera glycines
MRMSWIVGWSFCIPLFPKNTVCNKLGYAKILKQLLLA

SEQ ID NO: 152295 - protein, 332 aa, Heterodera glycines
KAPAADDQMARLLDRLNECVGQLKKEANGGEEKGIDTKSGEGQTAADDGTTAMEMRGDEEEQQQKQPDEDAEEKAPKRTPPQQQKEQHDEDGPSLADCVRELGQLVDTFADFATPPPTNCWLPFRENFIHRRHRPAILTLASVYAIYRVLKSADELETVSSSVDGDRREREALADVFVFFKLPKVLSKMLSRGVPRASVTAALGHLCASASLLDELDAKKSDNMFRFFMDALRRADIVGQTDHEALVLRRDADRGQNDELLQQLRSTIVGISSSATTAAEAAQSGEGALGADQPEVPIDMLCSIYSASGELSQFSGWLAALNAQTQMGGTNE

SEQ ID NO: 152296 - protein, 210 aa, Heterodera glycines
PFDKFTQRTQAIEGLLGEISPKEDEKGKYVSAEQFTQLQNDQKKLLERVNELEKQGPTIAMINEQFEQLQNDQKKLLERINKVANSQQQEKYVSVEQFEQFQSDQKKAIFERISELEKQMKERMQKQADEETGPLAKKALLVDEQFVQLQNDQKAILERINEIENKRYAAADYVIGVKNDLNKEAKELKEKQKQFARETIANFERLSKKY

SEQ ID NO: 152297 - protein, 539 aa, Heterodera glycines
MSCNPCCCLKLKDAAISIGIWSTIYSIMQLAIFGWQMAAIKYEKDRAANTLLPNYNTYGRYDIPTYYESYWQSPEERYYTGLFVIQILCLIAAFFLLFASIMMIYGVHTWSRFLLVPWSRFLLVPWMVTMCASILTSFAYCLIWWAGLIWWAGDVRDYWLLLTIVEMFGVLLNVYCFLVYCFLVIVMFHRRMLVELEYYARKEHGLGKTFSRNGQNRPEAQQDGTYVPTPRRGKPMAPPHHPLAGAQLAGDFDATTNQRPNEMADEIHTARQLEQRHQKRGKREGGGVAWQNVNSNICFKESVSLFTKVLSFSALDSPIILSHLHQIRSLSAMEQALPAECHRDQSHRRCHCCHASKHCHWHGHSAESTKGRSHRQVRILHLANIRQRNCRPLDEEQAEKDTEEKKEQRKSTKHHGRTERANCKRGGGGQRKRGRRISGQLSSELGHTVRSEREYGNVGSLERRWQDRHPTSNSQLSRRGGDSSSNKASARGGKGGGEEKPFLEFGGIAIPGIAIPQHIVIPPAQMGAKERNMDSRVIN

SEQ ID NO: 152298 - protein, 122 aa, Heterodera glycines
MSISILTLYEPFHQFFQFFKPFDDWDKEFQFGFVRNRSTTSKLISVVEDWYEAIIEGKNVDCIYIDFQKAFDSVPHNLLLYKLEKIGIRGKLLKWIKEFLSNRFSDHILQITRNAYSRMRSL

SEQ ID NO: 152299 - protein, 328 aa, Heterodera glycines
MPEAMDGRALVEQIAEECGIKDKLSPDIHRHPRTPPESGAKRDRILKVPFLDKLSRDKFLYNFRNALKKFPNFPQFIKVRRDMTQSELKILYSLRQQAYQANIAAEHIAQKYDPSIFIINETWLNPRNTIENELSINGRYRVILANRNEKKGGGSAILTKTNIPYQTLFSGTKFQSEILHIKLLFKKPIQIINIYRPPNCTVQNTKKLLKFISDQSNSENIIYCGDFNIPNILWDDNKVLQRNEPVSNLLIEFIDQKQLKQHVKQPTREKAILDLVITSESEIINDLTVLENFSTSDHKMVGFKIKGKFSRNNHRVYRRDLKILIFRN

SEQ ID NO: 152300 - protein, 41 aa, Heterodera glycines
MAGGGGWSVPVCIKIRIGSPDRDPRITDSRIEKSVDQNPYA

SEQ ID NO: 152301 - protein, 281 aa, Heterodera glycines
MGYPIRSLCIRILIHGFFDPRISDSWITIRGSDPDLYAYGEYSLFIIMQIFVKTLTGKTITLEVEASDTIENVKAKIQDKEGIPPDQQRLIFAGKQLEDGRTLADYNIQKESTLHLVLRLRGGMQIFVKTLTGKTITLEVEASDTIENVKAKIQDKEGIPPDQQRLIFAGKQLEDGRTLADYNIQKESTLHLVLRLRGGMQIFVKTLTGKTITLEVEASDTIENVKAKIQDKEGIPPDQQRLIFAGKQLEDGRTLADYNIQKESTLHLVLRLRGGKNCIDE

SEQ ID NO: 152302 - protein, 35 aa, Heterodera glycines
MTAFSVTTSAMTTANWRRMEIPTISTNLRLLLCTN

SEQ ID NO: 152303 - protein, 212 aa, Heterodera glycines
MEPTQHILIKNFHRQRLSTSSDPLLKRNFCKSLGLESCLGFLVLGIESRGQVSESVSSLGVKSRNRSRVSGSSLGLESRLEKSLGFFGSRYRVSGSSLGIGLESRGQVSVSTREKSRVFWFSVSSLGVKSRNRSRVSGSSLGLESRLEKSLEFFGSRYRVSGQVSESVSSLGVKFRSRVSGNFWSRASLLSAPLALLPMPRQDIVPFFDHSD

SEQ ID NO: 152304 - protein, 20 aa, Heterodera glycines
MWKNYDFINNNCKNWTRDMI

SEQ ID NO: 152305 - protein, 220 aa, Heterodera glycines
MYTDRGLEFVAKPLKEFYAEKGIQKFETSSKKKAAVAERAIRTLKTRLYKYFSANNTSVWVDVLPKFLSAINNSVCRATGLRPNEISDANAREVWKRVYGEGLAQLDKSPKIRAGETVRIPEPKHIFEKGYIPNYSDHVYTVDEARSTNPQHYLLKDYYGTKLKRKFYLPELTKVQVDENTMYRIEKKYKERVRDGKREMLVKFIGFPEKYWVTNEEINE

SEQ ID NO: 152306 - protein, 88 aa, Heterodera glycines
PHIFRLRFCATDPFSSQSLPNLCQLFRHFALNFQFVRVLSLLLVREHLGINPNKISVVWRNDHFVCAPFEQLRTFLDEEQTVRVNDQT

SEQ ID NO: 152307 - protein, 557 aa, Heterodera glycines
TDSKTSVKWKAQEKTARNTVLFNGRLRSQLIGRATRLQYLEDSPAMKAFFDNCPDSGPIDFHDAFFGGRTGPEYLGASVINPETGDWKSRTIKVKDFNSLYPSRNMFTNYPVGHPTVVQFDKDVEWRRQEDVVGDDGIRLEGIIKCFVVPPRHCHYDIPVLPYRLNNRTLFPLCRTCSEMYPRGLIDPEYNCDHFEDSERGFSTTVTHIELEAALRSWYKVTHVYRAYIWPLACDWSNGLFHSYLLKFLKMKFEASGYPASCTEAGISEEESARRKQEHIDKAKEKAQVPLEADRIKHNPGLRYLSKLKIYKKLKKINRNRLTKTEIVECHAELAKLLNDSKIEVSSIDQLTEKFWMVCYKAKDEHVVEHSTSNVAIALWTTSAARIHLLESLKKLYGPAPGVERYDTRILYMPAGPKAYGLWLRNNATGEDEYKLKVRGITLDSDACERITFEKMKDMVQNKLGQPDNNVRFNYPTKNFRITKKGEIFTVPLVKQFNPTVNKGVVRDHGLKVVPFGYSDEEWCKWNCPGACTCLFNPDLNVNMFTEEELNDPDIMP

SEQ ID NO: 152308 - protein, 280 aa, Heterodera glycines
MEPGAKKRRKRKNIDNTNGEAMECEEEEDAVDEDAENNWMLGYEEAGEKPESVTTYAYAHAGSRYDHVLIYGEMLRMGARPELIRQGNHLLEMKARKTGVYTPTAENYGTVLDTLQPIENYYPGGLFPAERTKFEQWYEENRETGFELSEVIADYCKTDVQILAHGMVKMRQMFLSETRHDITDSVTIPSGCMKYWVQLAHHDKERVAIIPHLGYEKRGKQSSIARKYLKWRAEEELRENGRVLRHVESPGGEFKFGNYSLDGMMERPDEDKNLAIEVNG

SEQ ID NO: 152309 - protein, 160 aa, Heterodera glycines
  unsure (1)..(160): unsure at all Xaa locations
FFLLWHLFFCHLLFMCQIGIIITMAPFFVPFCRNLLALFCPLISQFISCQFLALFCPNFXLYFANFAHFCAKFPYLFLANFWHSFATIFNPFFCQFLHIFVPNFPIYFLPNFCTFLCQISLFISGQFLAFVFPIFSFXIFKILAFCFFSKLNYGILFFQI

SEQ ID NO: 152310 - protein, 269 aa, Heterodera glycines
MSQFSDTSQPPMLYGPYSPVGDDGTELMDKAPPLEDIIKHMPNTVVPSEENECKARREPSITRELDAELFNGDGFACLSAAQAEAGRFKAFRFIGQFLMSISFGAVFPEDILRNLFTMCLAYAIEGAESMKITADHFIFLLTSKHLDYEVAVHFKKIDNTATERILTRFEMVDQSNKAKERPSLLEEPFVIDITAIESKCAKPKMAGKGRNDLNIDYRIADGATYELLNNDNLCLFRSFEMLRMKFVLAQQRFSEYKRDERKQLEGVYA

SEQ ID NO: 152311 - protein, 93 aa, Heterodera glycines
MPFFHATCNQCKNHPNSETYLENQELRLYIGIVDFFTPFSGTRKQKYIGGLKNYINVETKDAKDLMAYVKTGRIWETFGPIPPPMYADRMLAF

SEQ ID NO: 152312 - protein, 300 aa, Heterodera glycines
MVGKLNFYAAGILYKEKDEKVQPIDKGPDEKLAIEKMPDEKVPDEKLAIEKVPDEKVPIGKWHKFEGQEIELMPREIDMTDENDNICIEFLALADADEMKDDAHFKMDDKERIQAKLGKYICKNMKENEKNKQKNPKKLNYDFDWTTVDDVQFYAEEAMGEMRVKFGITYKKLADSFLSDDLTDLGVKGKSSNGFYRTKDEIFLLKQIPKDDEAKIIEKTLENYFEHMMKMGDKSFINKIFMVFRVQIKNTPTLFLLMENVFKNAKDLPLLNFDVKGVFSRQPKLVEVDPKQRLNDVVLK

SEQ ID NO: 152313 - protein, 98 aa, Heterodera glycines
MTAAAKLSRFFRRLVHVRQMDFEFAAWQMLYLLVNPQKVYRNFMYRKTLPTLKNTQFFLYPITFLFIFFVAATSAGWNVSITAMDFYHFRVTNADLRG

SEQ ID NO: 152314 - protein, 153 aa, Heterodera glycines
MSGSGSYINLPRSGLTLGIQLGYDYPNRGKLRKSKSPALLGAEAFSDREQRTLEKFHERFERERKIAREERKRRSNERRLESETEEESDEEMVLDKENTDSEEMEKTDIRKGGESDEKGRNNNGKEKVERNDKRKSHSGDREEKKAQKGRKEY

SEQ ID NO: 152315 - protein, 87 aa, Heterodera glycines
MEHFHCTAKPAQAPNFRRTSKVFPTISRFIEVLRMDQRARDADYVNIVNGEEPPMKKKKFGRRKSEFLNVIENFDAQNIIVSQGNFK

SEQ ID NO: 152316 - protein, 168 aa, Heterodera glycines
SALKLLYRARHLLLLAHGEQHPYMGQIDANIGIILYALQEFDTSANIGIILYALQEFDTSLKFLNNALTLYQKYGVPVKTALLHHVIARAHSCRGDFRTALNFEKETFNIYSRVFGKEHEKTLVSNECLRHLTKQAVNFQKHMNDASQGLNISKLWSSSCPTMSFSAV

SEQ ID NO: 152317 - protein, 91 aa, Heterodera glycines
MDNECAQLKFEKAEKEKHIKYLEVEGAKKDEQLDKKDDQIKNMQNDATKKGWHGIPTSEFRLPTFLGSEFRLPTSENFWGLGIPTSDFRNF

SEQ ID NO: 152318 - protein, 38 aa, Heterodera glycines
MRVTWPRFAIEIAHIFLVAPVTALALCPNILCRFFATS

SEQ ID NO: 152319 - protein, 285 aa, Heterodera glycines
MDSFSTFRGAKGGDLSVLSSLVSLLLVAHSVGQKMDIFNRLASLSRRQLLFAFLHGESLGYIGSSRWVWDMGRGHFPAVAKNFSEESKNVRQIGVDELSFFMELQQIGASPKLYAHTDAQIYKQNKSLIDTVLHNAKGSGEHFHFVDPSSVPFGAAPPSSYHSIMKASDKVPGLILSSFGSADYEYPYLNSFLDDQIRTHPKQLDEFLRKIIDASNIALRAALSYLFANNNATEVDQFKIDENYAKELGECFFVANWSCPLFRTLTNATNDRQIDAYLNDTGITL

SEQ ID NO: 152320 - protein, 264 aa, Heterodera glycines
FAYDGVEDQIFIRLNNTDVQCVRMLNGTHSIGCQSSRNGNVGVLTEIVHAKDVQNAIGILPLGLSNIIAVIQLTNINDALIGILRSHAQVVGILLIHRGKDKPKEFSEDGSCPNRQFTFYSNEKTIESCHGWNQKNAIHSDGLKFIDFNKPLRLVTSNEEIDLIFDKVLPAQFAFTNLLLQCIEPFNKKLMAEGLRCVGRMTQFMSAAGNTKICLERTADFGESSLCEVLEDMNVFLMLPPLSKQNHSADQFVLAARVSSLFHT

SEQ ID NO: 152321 - protein, 54 aa, Heterodera glycines
IVQFVPPPFSKFFYVFKSHKNTFYGVFGIADHESGAHLDQFLIPDPNSNKKSEI

SEQ ID NO: 152322 - protein, 248 aa, Heterodera glycines
MRVTVCLTARNNGQKLKPYVLVNRKRPVPQIVKQFAGKLVINFAGPIWMNDDTTEDYLHKIIGAKLFVGERLLVWDAFGSHKSERTTKVVKELGVETVFVPGGCTKFIQAPDVSWNKPLKERIRHFYNTWMSNDAEKEFTPAGNPKAPALHMVLDWIHRSWQEISKAVIIKSFEVCGLTTPLDGTGDEKIACFKPEGAIGPIGTKFLREFRENETVKDGRNDHEEAGLSDDDGDVELDGVGDDDEFFI

SEQ ID NO: 152323 - protein, 168 aa, Heterodera glycines
MAHKRKRQNKDAPCSSTNSDLVNQCSFPLDQLPLNALVIVASQLPFKDFKRVGTISKQFNRSISNGRELFTEVRRLNVQKCVIELRDMEFLAQLMPKVWYIRCSGQTLVIPEDIDQSKMALSVEQMRQLHAKLDNFDYVASKCTKKHLWFINKLTELFAELEIIQLDN

SEQ ID NO: 152324 - protein, 351 aa, Heterodera glycines
MTSAFSGSWSSGNEHWLTSISGHSIPKHINNSFLNIITASVLRPCRHQQIKSTAAQPAAEVRTNRRHQTKLGTAQSKPSSSSSSDEEEKKVAQEEPTVDKQKQSEAKQAEQHQQPQQEEKGQQDAPPRRRMDNTDQIWLDTLAWLNRGEVGTNIALVNARFAKLVDKQLQQRHWWLEELHICEQKPKGTGAEAMSLNSDGSYYSLPLATVPLPENVVGFNSTFNIWYFDAEVIVFLHRMRRLFTTDISLQFAIRMTEYRAWKAMARHIWPLLKNGLIILVNLKRKQLSMMRKHVSPTVLLDCPNLVQITSSVLPERPTDDDTFSADLSGRDLYMWLHTPRPDDRLLVYKLT

SEQ ID NO: 152325 - protein, 173 aa, Heterodera glycines
MGIKKELIAFFAKEKVEFETRIECLESGALLPAPEEFVTIGRSNAVEDVVPDSILDGDTARSEGGESTKKRRNRGGGQRKRERRRNAEEAQSRAGDDSAAPQLNEQQQQLNANGEEEGEETIANPMPKTRALDEQSNASSTLSSKQRRTEEWQAKQWYKNARGKGSGGKEKEN

SEQ ID NO: 152326 - protein, 230 aa, Heterodera glycines
MEGWEVVFKQQQEEHFESSAAAIKRLKDACPLLTHTHSSSVHTTAKKPTLRQGRSSSTISLGRLPRNARPADEIELLQKYDVQQLIRCFCCGVQRPLGRGGHTQLSCPYRHPDSYPLCENASARDPDKCWNCASIAHKTNQCPEPRRKPSRRNKVALPREQLLDKNLCSSCNTTGHFAKNCPKKRQRHGQQNQKNTKMPSTSNCFSYQHDSSGSSVNDESDDVIYLSSDD

SEQ ID NO: 152327 - protein, 154 aa, Heterodera glycines
MEDSGWYRANYRSINRWSLLLAQLIHVISIAEQLHWGHGLGCSFAMESCGKWIWEKLESNQSTAPFCANIKHDGSRSLATTRCTDQRDSLALCNLVPYKKPLPVDYRNFAHLHGVRHEGTKYYGGSVELADFCPYNQVDVSPEGGGGGGTVRSG

SEQ ID NO: 152328 - protein, 122 aa, Heterodera glycines
MNETDKEEGKAQRGGGREGKTERKERAKGREKEEKGKEEEEDEESGGVVVCPLTTHRSVIVTCDICVGRAKMIKGKVTECGQVGGADEQRIGKWARKQDNVRGQQTQRGNNAMPEAKKVIRK

SEQ ID NO: 152329 - protein, 77 aa, Heterodera glycines
MFVRCFILPFISLAFFVSFCTAMRRNPSDYDQSRVPPNLRIISWLLGVWRSEHDGKAMFPTIPKFTYGEEISIALSD

SEQ ID NO: 152330 - protein, 18 aa, Heterodera glycines
MCQKAEIKQRVNMFSVYN

SEQ ID NO: 152331 - protein, 282 aa, Heterodera glycines
MEDPWSPSLCAPPNSLLMDDGGAADAKSTKTSLAPHPVPPIITVTTTDDRANAEGSEEEEEVETADEHHRRPSSSSSEEEEDGDYPDTVQPVPTVSAATIAQLQEQQEMEQQKMAAQVLQQIQAFGEAADDEFDVQWAKPKTKISVDDNQMHQPTEQRDNFFLEDQANVYSPPEAEEEAASAKSIGIARRCSGTDQSAAQSGEVQQQRDGGGACEEASGSSSRSTTIVYRNQQQQQMTNPFLSDENGTLHNDGDEEEEEDEQSGEGHEGGIVVRQVVNATIE

SEQ ID NO: 152332 - protein, 436 aa, Heterodera glycines
MFFSSAQKPATATSTAFAGFGNKFGKFASETLKGAKQAKEMAVTAMAQAGQTLETAMTTTIPASSQQDDQQPQTVQLQPETVPQRPHSSLGLSAAGPAGGDQQIAPGTGGGSASLNKSASLYDVALPPGFDHLSEEEQLCIISVMQCAELDAQMDAERAQAVQAAPPLPQTVPSALRHKATDDVTTITAFGIMSQPLAKFEPSQAEQTAVPPSSSAAFADQQHQGNAGAETAIELAVEVRADEAEGNNGLGTAAFIDTSAAAAVQLDLARYGHPLGLFQTETEQSAAEKGQDQTVEDQKRHNIEEDDEPWMQPPTQKFTAPLDQWDDMPMNTVTPRKQLWTTVFTEDTDQQQQHQQHQQPNVLQADGAVAAPNAEETEEDELLEQISMETVRGCWERSNGDDRIANQFGRARINTDQIDKRKEGQQMMMEEDELTR

SEQ ID NO: 152333 - protein, 102 aa, Heterodera glycines
MAVSSVWPACAIAVTAISLACLAPFSVSEANLPNLLPKPANAVDVAVAGFWALEKNILPIFKDGADCSADDDAMATPKVEDGLGGSGGGGGRGTAGRANQKI

SEQ ID NO: 152334 - protein, 469 aa, Heterodera glycines
MERGRESGEKPLRGTEEKEKKSERTSIAENDMGTEAESDEGKLSDNDAAPLAVTLAQPMERQDEENGDDILAYSFNASGSAVVRPNCASPQIMPTPCEYSERGICLAGDGGFDGQIVPPAWQMEKEDDDERMGSITDAREREDDERGGKCIADAKEKADDEKVGSTGDAREKEGDEIVGSFANARERLRDENVRSIGETTEWEDDERVRSFANVDVMASSGQPVHASLSVIASRGLELSPSSPAKTTTSTASAAVVAPPLADANPFSLPQFPCPAASIVHQQQQKGEEENQKTKQNAAAAAAVAFPFPFIVPPADASSSSSISSHCSAAAVPIVSQEQKQHQQQRQNAETEHGTESADGQQHGGSTKEQKSLSVAQEIGDAFWTEEGQPQQNNLSTNTTTSKTTTTTTAIGTNYHHQQQRHHQFVGGQKDGKRVPKPFVGDEEGEDEQQKQKHTVQEAVPIAKAAAAGG

SEQ ID NO: 152335 - protein, 102 aa, Heterodera glycines
MCSRSSVLSPASALSGNSSVTAAAPSSGDPPLDVLRNSSMMSPPPPAAVSPAAAPPMDKRLVVVLLLPLVAVVVVVLIENVVARGAKKGVNLADQGRALLDD

SEQ ID NO: 152336 - protein, 126 aa, Heterodera glycines
ALYFDDKYCELLKDGPQHSHEQQPQQMCSSPDSDGWDGAEMSCWQATAEHHHANKEEEELLLYEVHHEMGEQQQQEEQPAEAAARAGFKQELISGLNVFAGLMRRSSTATTTAVSMRNVILDILGN

SEQ ID NO: 152337 - protein, 789 aa, Heterodera glycines
MARIEAVQRRAQEEEMARIEAAQRRAQEEEMAQIEAVQRWTKEGEPKMPELTDEEMAQIQSVQRRAQEEEMARIEAVQRRAQEEEMARIEAAQRRAQEEEMAQIEAVQRWTKEGEPKMPELTDEEMAQIQSVQRRAEEDEMARIAAAQRRVQEEEMAQIEAAQRRAQEEEMARIEAVQRWAKEGEPKMPELTDEEMAQIQSVQRRAQEEEMARIEAVQRWAKEGEPKMPELTDEEMAQIQSVQRRAEEDEMARIAAAQRRPQEEEMARIEAVQRWAKEGEPKMPELTDEEMAQIQSVQRRAQEEEMARIEAVQRRAQEEERKVLKLTDDAIKKFNRTDDDEHEMISSSTSPADSNPSPLDSSTDLHSIKEFHGDHFVRQDFRHLSTNAFPPDSRHDPHEIVHEVQSVQQQQQQPPVDAACPSPAPSSSPSTSGADSIRSSAEHSQLYEPSTPLLLSDNDMEPLDAAQHRQNLPQKVEPDLSAETTMSQSEKTLAQSRVPLYNECPSEFDVPLSQEGNDSMPPEQLPTQPLVLPFAEFPNVPMETDYENNLVGMSHKRRQSGGGDASCTVMLLSGRHQQRWLSLGTVSGMMADSFDGGDNILTPLPSLPFLQTAKLYGDNAKNIVADVAEPAVVEHQQQFKRNSSSTKATNSRSRSSSCTSSNVNIMFTDECLRRSFCDDQADDSEKQHEAEGEQYRRHGAVDTVNIGTDNRNSIVLQRTNRMAFGEKSMTENGGSVEKDDETDTEANKQWAEQQQTDWANDVDFMYKLNFFAQRLSEQIAEEAARDITN

SEQ ID NO: 152338 - protein, 63 aa, Heterodera glycines
MPFFVSFSYTKIFFCDFRTSLLPMNVKNHIKQILRQKGKSLDEKETELEEYVQSLQEDKPKEA

SEQ ID NO: 152339 - protein, 30 aa, Heterodera glycines; identical to SEQ ID NO: 141344

SEQ ID NO: 152340 - protein, 364 aa, Heterodera glycines
IGSLEMPRSEWLFSSVATFQQSYGQVHPYLAAVLCIVGTLMNAITVLVLTRPSMRSPVNVLLSAVAVCDIVVMSSYLVFVVHFLLTAASRCEPSDFSYGWALFMIFHAHASVIFHAASIWMTVSLAQIRVLTIRRATAASSPLVTERFTVLLAVLMLCAMTLVNLPNFLTFEVVASARSIKTQSFDNRRSIAGSINKTIFTDNGSALLQLAFWSNGMIFKVIPCLLLTLSIWALLRIIADVAHKRRNLAQVMRKKVVPKVMRKKVVPKDHTTPMLAAVLLIFLAAVLLIFLLAELPQGLFLVLNGIFSAESFHKRVYLPLGDLMDLLSLLNSAVGFFIYVGMSRKFRTVFLQLLFSVLRQTILS

SEQ ID NO: 152341 - protein, 93 aa, Heterodera glycines
PIQVLFTIGLYQIIEVNEPQQYILLNSWIVEVWIPDTTLYNSLVMDDEQSRRILNVKLNTLQKEKSALVEMLYPTLYQFSCMLDLRFFPYDIQ

SEQ ID NO: 152342 - protein, 28 aa, Heterodera glycines
MVPGQIQKGRKYGQWKCFGARKVPGNGQ

SEQ ID NO: 152343 - protein, 263 aa, Heterodera glycines
VRVVSLAFGNLFVITAILIERDLRCRPQYYLVFSLAVADLMVGLIVGLIVTPLGALSTLRQSWELGVTLCDFWISVDVLVCTSLVCTSSILHLVAIALDRYWSVTNISYSNNRTPRRIFSMLMVIWVLSLLISLAPQFGLKDENFVTRVREQQVCLISQDIAYQVFSVFSTSTAFYIPLFAIMLIYYKIMRAAKKRFRRERDRRTVNRTVVETVPPKASKMPVFPTRCFFPSAVSVSDSQPNGSTSNNNNYSNSHSNNMLGAN

SEQ ID NO: 152344 - protein, 276 aa, Heterodera glycines
MTISDNLFDDIWKRSGILNLPRKSENVPKIKVEPFDEHSSAAAADAKANTKFGKIKKENFEIFEKNAKIKQEEFGGSESRQFGAIKIKTENASNTEVKEENENYRNLSEIYEKWNKNEHEKTVISRTDQQNPSLSSNSIRHRALIMVTVITRMMIAVIMVMMMPVLRESEKEEFVRKYNQIQREKPEMKDEETVQMLNIPRRTIFRWRKQLAEKIKLSENDEMREIVSEFERRKEQLAQQWGRVPERRTQNKIAKELGVSARAIAFWKKEFGERKA

SEQ ID NO: 152345 - protein, 74 aa, Heterodera glycines; identical to SEQ ID NO: 141220

SEQ ID NO: 152346 - protein, 52 aa, Heterodera glycines; identical to SEQ ID NO: 141219

SEQ ID NO: 152347 - protein, 421 aa, Heterodera glycines
MPTLWKRPHAQGLHLSKGCQMSNVMVVARDWIMVPIQINGHKIELAADSCSHLTIIQRPMWLSLGGPKLIKSGKIVGSFSGHKLCLLGQFKCSVEFKGVHKCLDCYVADTNAPNLMGLDWIAPFEQATEQPIATTLSSEHFQPKTLAIAIPDEPQGLAEQLKNAFPQVFAPGIGRCSKMKAILHLKPDASPIFCRARQVPHDVQDAVDKELDRLLEMDAIRPVDFSRWAAPVLYVRKKNGARLPFGVKSAPSIFQKTMDQLTAGIPGVFTYLDDVIIASRNANEHVSTLLKLFSRIHSYGFRIQIEKCHFFKKEIKFLGHVVSTEGIHPDPERSAAIRDMPPPHDLPTLRSFLGALNYYGRFVREMRKLRSPLALLHKKDTPWFWGEEQQSAIEKAKQVLQSDFGLTQYDPKKPVIVAADA

SEQ ID NO: 152348 - protein, 202 aa, Heterodera glycines
MQQRQMDSQQKQFLDLLNAFTNRTAPVANNSDLFSQINGQIPEFRYDPEQDSTFALWFDRFGPFIEKDGMALGEDMRVRLVLETITCLKNLIGETKLIFVRRFECFQLSCAPSQNVLDFGALVNSKCERADMNITKEEIKCLIFISGLGDAHKDLRHECLRQMEKNDRNKDRNANVVQTRTCSRTALIERMSNVMVVAISAI

SEQ ID NO: 152349 - protein, 16 aa, Heterodera glycines
MVVIILPLLFCFYGEC

SEQ ID NO: 152350 - protein, 50 aa, Heterodera glycines
MPTDLYEVIGCPKEATFAKEVLSDEKKRKHYDRWLLSGQGMALADLDGNQ

SEQ ID NO: 152351 - protein, 79 aa, Heterodera glycines
  unsure (1)..(79): unsure at all Xaa locations
VKRSTNEFRNEHIKRSKSTTAKHFLITDKEFSDHRPFPLTSAVTQQLQKLVTFFRIAQVIGKCERXSPFGISLTFVGSV

SEQ ID NO: 152352 - protein, 143 aa, Heterodera glycines
MECRAAAKFVNGEPSDDVFFSRIVFTARPCPDYDSVPVRNGHTIKSLIERGANVNFADEDGLSPLMGACVFGNVGIAHCLVELGATIEQKDDEGLTALGHAVIAGQLESVKMLTGKNANCLVFAEDNRSPLVIACQEGRMEIR

SEQ ID NO: 152353 - protein, 98 aa, Heterodera glycines
MNTSSDKNAEKGPAGEKPVRERHLRHSNVEEAEVEAMDVEAEAEEEEDDDDIHYSPFSNDAKLLPALHKPAFQVKQFTLKTFFELHLEVMGRRDTRAS

SEQ ID NO: 152354 - protein, 29 aa, Heterodera glycines
KERRGTNKMDPKMNDEEVAREGPVVLKRE

SEQ ID NO: 152355 - protein, 131 aa, Heterodera glycines
MGPGSRRIFWAHIPAFKNGSGPGPQQKQDLSPGFNPKKMPSDFKSAVGRRQLSVQCNSNRFFSREASDLESLEARLQRSRKSFEESLNKLDEMTKMLERDNLRIQYCIYFLVFSIVAYCCYDFISETSSRK

SEQ ID NO: 152356 - protein, 174 aa, Heterodera glycines
MNTLANRCSFSNLSFFSRSFHFLATAKDLQKFNPMKMPSDFKSAVGRRQLSVQSNSISREASNLKSFDELFTEADLQRVRKAYEEKLKKFEELKKTAADLEALDQKFLELQRNRKLGEEEIKRFEELKKIAADLEALDQKLVLWKYASGSLVFKFLNKILFSMVICGADQRVLP

SEQ ID NO: 152357 - protein, 46 aa, Heterodera glycines
MHRIRTQDPFLFTFSLPLTREHSELIERGRIGQFLCKISHFMRRRK

SEQ ID NO: 152358 - protein, 319 aa, Heterodera glycines
MDKFSHINNCKMLKFRGEVIQFMVENQLMDEDDSLYTKRNLLSMANCAKIGKFLEENEPNKSNKNNAVPPEVAEYLNEVKEAHYKVFFSLLFSDSICDFSQYFDSKRMENEKNFAFSMRMLRLENLESNEKIAKIKTNIEQAFFDTELMRQIELKFPFYMAIDIINDHSLAETYANILSRDETTRHNAEHLLAIRICSARIWQIFQQIHLALKQQHNGKKAKLKDAKTNEILAQIQSNWRRFWKTRHATYKYMPNDLYAHWVAVQDQWQDLTFLACQLVQQLATDKDNVAKYFQHIKQLLPERNLFYQLAEEHAKNITR

SEQ ID NO: 152359 - protein, 160 aa, Heterodera glycines
LLAAPRSELGLPETRLAIIPGCGGTQRLPRVVGVAKAKELILTGRKVRGDEAAQIGLVSEPWQQNHLTDDPYAKALEIARDLFPQGPLANRVAKLAVELFPQGPLANRVAKLAVEQGFDLELRSGLVVEQQCYAQLMPTKDRLEALEAFAQKRPPKFKGE

SEQ ID NO: 152360 - protein, 171 aa, Heterodera glycines
MVADGVLSELVLCESRPTVADAAASAENAGPPAGTTGDNETSPQPHHQQQCHRPQRVYDALRQRSAEVADFLMPTDNEAEELGEGGLFYACGDVKNMSRELWACLSDILQREKGERYLADLNRDGIEPMVLVETNPEYPFVKKPQGFSPVEAIQLLKKLREKERLIEDVWS

SEQ ID NO: 152361 - protein, 86 aa, Heterodera glycines
MSSKKNSYFKKKFHSFFLDPFGVFYLRRTMKHLNAQHVLQFFFVFTLQISLNTGIESAADEPLITYTDDDGNKLQMKLPGNYLVKA

SEQ ID NO: 152362 - protein, 103 aa, Heterodera glycines
MWYHKRIGASNPNAEPAVQLPVAGPRNTVEEPICGAARQGSQHTRMLLPPGGFNAVPFAGAQDTVGDRERTRWRLLSWSVINRNDDQAQRAKNSTHYEMAFVN

SEQ ID NO: 152363 - protein, 82 aa, Heterodera glycines
MTKQRMEAEKKKRKEMRDLKQKIKKKKKSLTDQLKQLKREIADGDYSFLEHLKIVAYRECPNPVQYCSESPVYCPTYNYHDL

SEQ ID NO: 152364 - protein, 30 aa, Heterodera glycines
DECKELFAQEEENRKRLDIMMVVNPHWSRV

SEQ ID NO: 152365 - protein, 25 aa, Heterodera glycines
TCTCGVVVKLSIFHNFSPGFNSPLG

SEQ ID NO: 152366 - protein, 62 aa, Heterodera glycines
MFSVINLVKTSNNDNNKATATSNNGNGSGNAAQQPQHSQPLHGGVDYLLGIGQSVQRALMNF

SEQ ID NO: 152367 - protein, 473 aa, Heterodera glycines
MYFKSANSSSPNTPSAPLPPRPALDQQQQQAALMAAIAMAQDTVKKTLPVALSGLEATSAVIGEFLSGFDPSTGQAANRVGQTVLTEMLSPEFAASVLQLPTPVVVPPTNHGQTNGEPKQQTDEKKTADKHSPNANPDNNTSINSEAASVDQNLPHLMHRMEELQTKLMSLNMNLANRNRDEIVNDGKEKEEPKKGDKAEDEANKEEEIVVLNPYLYLTNEAMEKTEKEHKEKDSAEANSDTTNANSLDKEKQPTAPIQLGNKRKLGDGVNKDNGEEDLMKLSTHNSEEPVDNGNVSYVSSFSSRSSTTTMSSVEDEEDSGTNTGDDGWMVVKKESFKKLCDFYEKRRRVECGGGTVAADPFAEQLEREFREATMADNNRTDERVDEKLTAESEPKKADEFVKEVGQEPAAEVYVAQIVDLTTEKDGKSEKSEKVVHNSSVKEGKGTFFKTTPCVHSVVMRGVCAGCGQDFRQ

SEQ ID NO: 152368 - protein, 34 aa, Heterodera glycines
LNRRLIHNERAKGRSFFRRLFRLRFNATVRFAIG

SEQ ID NO: 152369 - protein, 69 aa, Heterodera glycines
MPSLFAQCRFLPLMRKCQLPFPFVNFVPLFFIFSNSLTILNILAVNFFYKISFYIYGMFLRDSPNSLAI

SEQ ID NO: 152370 - protein, 52 aa, Heterodera glycines
MSIREQNNTSKEAIDQQDYPSSSIEHHQSNDLETKVKMEKVRIVNVFLERRK

SEQ ID NO: 152371 - protein, 200 aa, Heterodera glycines
MYKLTYYFCLIFSFDQFFDHFSAEAKKTKNWQFKWTMLYMKSVLKVIWTLTVPNVPLSRTFALPPNPTHYHSAMRPLARKRIIAHYMLQRRSRHHCEGICAAELSFRRRILIEKSVDESVVHYEFSLARINRILLLPPSSTWKRNMRAVITTMPKTTTCSATMKRERSRGPSRHTPTHQGWAKLKNKKRKAKFAKLKNAK

SEQ ID NO: 152372 - protein, 139 aa, Heterodera glycines
MITSMAFLPVHHLRAGLNVLQTQLPQQLIGVFDWFMDNYTGRPWFNGGLTVPRFAQEEWSVHQRTLDGGDRTNNYAEAFHRKLQQAFDCTHPSVFHFINTIRCEQKSIDADISRCVAEKNQNITHVAQKQLARLKRPPD

SEQ ID NO: 152373 - protein, 37 aa, Heterodera glycines
MSKVRNIENDHEQSDDYNNCSAIEISAKLGLASLNVK

SEQ ID NO: 152374 - protein, 21 aa, Heterodera glycines
MFFTGIDRLYVVIFDEMYAIC

SEQ ID NO: 152375 - protein, 140 aa, Heterodera glycines
MLEGSGNPTLVPVIERLEKLEKLEKLVERLIAGENRYGNRFADPQHISSSPSAHTSNNGPQLQWGQPPPFAGNGAVSRMITDAIINSEQLKEKANRAVIEKLPEAIDERALVEQIADECGVKDKLSSDIHRHPRTRTDGG

SEQ ID NO: 152376 - protein, 63 aa, Heterodera glycines
KVPKEAAENESDEIGILRTRTYDLHITYDKYYQVVPRFWLIGYDENGTPLTVEQMKEDFSQVE

SEQ ID NO: 152377 - protein, 127 aa, Heterodera glycines
MNVNDLVNQFKSAALSVGEYLTPVLRESKFRETGVLTPEEFIAAGDHFVHLCPTWLWSKASDSSRARDYLPIDKQFLISKKVPCHHRCSEMNYNDSLEKIIKEEGDEWVDTHHFDTQTNLAPKELDD

SEQ ID NO: 152378 - protein, 77 aa, Heterodera glycines
MRSVKTGKRQFEPRRNRSGWVLVLHQVKHFSVFNYLNRCSDVGLPINRSGILVFAVTQWSLRNNCTKFSKKAAFGNA

SEQ ID NO: 152379 - protein, 136 aa, Heterodera glycines
MLVAAGNEYGVVRGCMSDFYHGQTTSTNTDKCYFGEYPHNVTIYDPTNGAKTYSQLYVGVRYCSTVNGACNNKFMPKKEAAEGSGAFAETFCRQTQQMPTTACLSCWRYDSAGDCNSNWKETCQGQWCTKTTGYVN

SEQ ID NO: 152380 - protein, 37 aa, Heterodera glycines
MSQQKLACNLKDCATWSQWKVNDQNYSKNCHNFLKIQ

SEQ ID NO: 152381 - protein, 99 aa, Heterodera glycines
LHGPHVRHRAEVLAFSSVLACAPRAVGAMAGRAARVSRAIGSVTCPAPLAGDAVKWSEWVIPVDTVFRQLRSWQPSALPSMHNNTLNTHTAHRVLYMLT

SEQ ID NO: 152382 - protein, 166 aa, Heterodera glycines
FHFNPLKIPFQSQVDGQWSDWSPFECHQCFCSDISGAIGVTLSERNCSNPAPQNGGAECSGPAHRAAVCSRKCPQERQSVNQYISAKCTEHQRVRQDPELTGTGSQLTRFPQRACKVFCDVKNEGGAPRNYRFYGDDLPDGAPCGWNRYCLNGECTLTDRLINVLI

SEQ ID NO: 152383 - protein, 28 aa, Heterodera glycines
MAFLTKMFMFITVLEDSVESKVMQETNF

SEQ ID NO: 152384 - protein, 98 aa, Heterodera glycines
FFGGHSAASRFQDGRFAPIFNFVESIRPLRGLRTGASRPFFNFVGNIRPLRGLRTGALRPFLILLRTFGRFAASGRALRARFLILWGTFGRFAASGRA

SEQ ID NO: 152385 - protein, 47 aa, Heterodera glycines
MVTQNDHLMANLSDQLTNLQKELDTLKKDMTANNDAFFNCAMALIIF

SEQ ID NO: 152386 - protein, 57 aa, Heterodera glycines
IKHSDKALRFYAKKCSLSVPRGMQKRPRNFVRRLLAFVRRLFHGIFRSGSNCVDLKA

SEQ ID NO: 152387 - protein, 155 aa, Heterodera glycines
GWMAASGFVVDDAHQVTYVDFAGSGMVHVCGGTISLIAAVLMGPRIGRFPERTVSVPVGGPRRKQKEPKKFMQIKLAQFASLGGFILMFGFLAFNGGSTSEISSPGIGQTVAKAMVNTILCGAFAALSYLFVHFIRKGKWTVLLTINACLTGILP

SEQ ID NO: 152388 - protein, 68 aa, Heterodera glycines
MYGSQAFTLRQNPQHYEHPEHWERAREPNIYKRVREWENDYCTNRDYCNHSFTTPKRTVWDQWKDTDK

SEQ ID NO: 152389 - protein, 89 aa, Heterodera glycines
MYYKARVFGDEASAVAILRSQDPKAIKRFGAHIRLFDTAKWRKVSILEMLIGNWKKYEQNPMLRQFLFETGDAWLVEASPDDIYWGCGV

SEQ ID NO: 152390 - protein, 79 aa, Heterodera glycines
MARTWRQKCVGPAADPDPGHVQGARPVQARVGRGAVEVARIVWHQQWRRRRDAETDDLNGRSAKKFSIDYAVLKLYLWQ

SEQ ID NO: 152391 - protein, 59 aa, Heterodera glycines
MVARENISEFFNQRLPQMPDEVRHYLTDLLKENEDDMGTEQDLTEMVGDHIQVGQLNEC

SEQ ID NO: 152392 - protein, 38 aa, Heterodera glycines
MSRGKKMQHEETSKEENQRNKIHKTKSAQNKLYFTNRD

SEQ ID NO: 152393 - protein, 51 aa, Heterodera glycines
ACNPPKSVGRGNLALKRWWWDGRSCKQFTYKGQGGNTNNFPSKKHCVQVCK

SEQ ID NO: 152394 - protein, 55 aa, Heterodera glycines
MTPPTIESFLTIKNSPSAALSADHWEKIGQKSQFSQSMITSNALLAIAPYFVIGY

SEQ ID NO: 152395 - protein, 26 aa, Heterodera glycines
IQSRKRNEAIIQLPAFRIRLSCALCG

SEQ ID NO: 152396 - protein, 70 aa, Heterodera glycines
MCCGDALFLCVWGFANQMTNGRRNGQMENERDKRSTDNTQNQCFYKNEKTKRMLLVDLATKFAHDGEFEL

SEQ ID NO: 152397 - protein, 90 aa, Heterodera glycines
MKNDSRENAEEGQQSVGRGENCRQQQNKAMDGTDQISFTNKFLRNEWAKGKETKTPGVISYKSFNSQKFRPLMATFRGAPPWPCRSQMCT

SEQ ID NO: 152398 - protein, 140 aa, Heterodera glycines
MTLTACICHTIHYAKRLYETQFVHRFSNGTMPFQNLFKNCTYYWGFSAFIAYFVNHPLYTSPSFTQVMIGLVGFTISELGNLSIHLLLRDLRPPGSRERKIPYPNSNPLTLMYNFVSCPNYTYEVYSWVFFCVMTQSLPG

SEQ ID NO: 152399 - protein, 51 aa, Heterodera glycines
MAARDLQCVQCQQFMHNWGREGNWRGQLINLLGNYGVENGRNADGVLLRHF

SEQ ID NO: 152400 - protein, 98 aa, Heterodera glycines
KLLQEISQTPSGRRKREKCHFWSGAISCGGKNANKKWHKHSLILTPLIEGLRVVENGETIGQQQEQELGTEKKPPVWVGTFLIWHNLWRNDKKQIKIK

SEQ ID NO: 152401 - protein, 129 aa, Heterodera glycines
MLHEASLMHSVKHEHLLPVAGICHGIFGQQKGGPSRLGRSKCAGPQRNARGGDRLRLGCHAATARRFGGGGRTRGGQMAGAGKSKAPNLQSEDGCVVLWRYVLGNFDVWRVALQGFAAEKGEIGFRVGL

SEQ ID NO: 152402 - protein, 140 aa, Heterodera glycines
MTHSNISKNNFSDGASSCRGDDDEVHYLMPKRSKSADPRTSRSSDDGTTQPQQHPTTVGYNTVVGGGKETVGARVSELYTPVVEAEHLPNYINGMPKNVIEYANGTLVPQPMPNGYQNTPNSMAPTMTKINAKCQSESVM

SEQ ID NO: 152403 - protein, 63 aa, Heterodera glycines
MPSPLFLPGAFPGVTLRPTGINLVEERTEDHAVDAGPVYAPTVSSARIDVHTEQAEEEEDDEF

SEQ ID NO: 152404 - protein, 290 aa, Heterodera glycines
MADAMQDGARWKKAKTAINVLGNLLLAESLDNNNNNKVTNSPAAEEDNVQEEEHKEEEKNEDLGDIDKTLDEFFNNVCFKLPFGLIISGPSSSGKTEFLLKFIAESDQLITPKPISMLYCFGEMNAAVPALQKAGVDVYAGVPSEELVKRLPKPLLLILDDLMLSIDEKYLSDLFTKKSHHQQFAVVFVTQNLFERKIKVARLSAQYLVLMRAPNSLLSIRNIGVQLFPRKLDFFLDAYRKATARPYGYLLIDMHAASDPSLRLRTNIFKDEQEDEDEGTVVFIPKNGAA

SEQ ID NO: 152405 - protein, 393 aa, Heterodera glycines
MQETDKESEHRTIAFTCGNLSKPSRFAFPTDHPPEKEIATPCGYRTPNEQSEKGLTSMSDTGDINLDAVRHDLNRTRGERTNPSAKNVNYNQQLRRYLKMRRELTNMPTKVEMSKGISILLRRGGEDEDGEVVDTPPRPPAPPPPPPPPSGKCPPRGPNPPAPPPPPPPGRRPPRPPSPRSPPGSPPPRPQRPPRPCRAAAPSRRGGLIEQWRKRRYDIQQRRPVVRDLLAEAAAAPLPESDDEYDYMLESGFALPAPSQYYGDLPVLPDNADEIEEMDTVQRRIATRRRLKKDLADDDDDDEVDLQRKRNRIYHPSPPRLPSPPRKSEPRPPLTAKREHQKQTKAELKSSTSKKTGHPTPTPRPKREPEFALDPAHPHQGKLGTTRLPQHLK

SEQ ID NO: 152406 - protein, 425 aa, Heterodera glycines
SNKEPKPLPYSEKRANGVNPTTTTTTPPPPAAIVEEMPLIPPQERDQTPPPPTSPQPPPTPSTAKPAPPPPPPPSTNSTPISIKTPAVQPPKPTVSTPPPQTTITKAPPPPPPTKSAPIVNPSITTTTKTIPTPPVTKPTTPTPPVAKPTTSTHSVTKPTTPTPPVTKPTTSTTQSPKPPTAAPKPIKPASPAPQPPKPSTPASLTTTTKPPVPSPSVKPTISAPPAQQPKSPTPSTKPIVPKTDAPPKPPPPVSLSAKLIPSAPTPPLDSTPPKPPPPPTKPPPPPTSAAQIDPSRLIHTLDPPRYFKTPPANQNPLNYVPNSVIVLFNNDVERFKVVFNEEIISHLSFSPQLGYVIGFETPACGVKSSKYGHDFEVASQALLSTQKDTENMIIGNTLSSLLRVVSISGATPGDYTEKIYDSPI

SEQ ID NO: 152407 - protein, 228 aa, Heterodera glycines
MCNNDNNKRRLPSELVWEIVAAIPIMYLFGGVVKKPGVTRPPSGIPVVNRGFEIFRANRHCFFVKLIEIALDFELACAKRNLPGGELFIQFSFKDDQLLDPQYFTDFVHYLCFGRSGTIATTRIITYAASAQIGELFGILLDYALSSVNPLTMKKRTAGGYLSRQHFPPILKLTATEMASRGVGLLVRTDGMEMYRLMNPHHSNDVGQLIVIERSRHPGSFYFNFSVE

SEQ ID NO: 152408 - protein, 753 aa, Heterodera glycines
MATMEVLRLSTKPTWTTGELQHDAIQLMNQIGAPLNLNAYDADTYVPRVINYWNNNNNNNQQHRFSVFIFGATGHYKPIYKYVDNTYNTPLLLYFNNSHFDGVQKQGGLFGKPYCLECERPYSRAPQHNKSCRARCLLCSRTGPLFPCQAHAGFFMHCDGCNKNFNNNDCFRHHLQSGFCKRSKKCKDCGVVWDVNDNNRNGRKGHVCGERYCNLCKNFHNPERGCFIQPLEPREMEPYRIVAFDLETMQHQPVSPREPEKREHQPNFIAAKVFCPECIDNSRWRNGTAGCKVCGPHRTVAFCQRRFVNTTVDKQVVADNPLEAFVGWLINALPKKFDTYAFSHFGGRFDMVLVFRELFKIGFNPEMIRQGNKMFEMKVKKQKNRNPNIVFHDSFNLMPCALAQLVPSYGLEVEDKPFFPHLANRPENYGRHIYPTVDDYLANGMMPEKRRQFDLWYEQHQHEPFQLDEALASYCTNDVEILSAALIAFRREFFEVSKRNDYVDGVDDRENHDGIDALRQCMTIAGACMKHFRLNHLPAEHLAIVPEKGYDNAQNQSRLALQFLHWYAEENNVQIQTAYSPQGEKRIANYTVDGWIEEERRVIEVNGCVWHGCKRCFPSDNMMLPNGKSAGEQRRRDANRLEFLRTQVARVDIFWECDIQQMVERSKAIRKSFADYVDAGPLIIRDAFTGGRTGPLKLFQKAGEGQKISYYDFTSLYPFINFTTRYPVGHPKVHVLNEDVNWTNPADNPSLWH

SEQ ID NO: 152409 - protein, 203 aa, Heterodera glycines
MAVNKGKRSIAKLCLNNLWGRFSLRNFGLSQTLITDDPVFFREHLDNRSIDVTAIDELDEEHILLSYENKKEWVEEHDCSNIVISLWTTSAARLLLLKAMQKVVRTPGCGLLYTDTDSLVFLHPEDICPLKTGPHLGQFTDEYPQHEIVEYCSGGAKQYGLKLRRLNAPADAEFEYVLKVRGMTLNYDVINNQGLRYDSSSRC

SEQ ID NO: 152410 - protein, 104 aa, Heterodera glycines
MEANSGSLTASLQAAEAEIGALKEMVKLQNEKMKDMRHRFVNFRSRLDQLEAWAADNKQTKFVRPDTRKRVLLNDSPEKEMPATSNAAASGNFFLVINLTLFTL

SEQ ID NO: 152411 - protein, 96 aa, Heterodera glycines
MLLPSFNRAGFVGLLLLCQLALAPFATAFPLATDAQRMATEESAVLTEEKLLNAEKTELDPHFEQLLAKADKTEEQSKKLLSAMEAYLQPNPGQCQ

SEQ ID NO: 152412 - protein, 78 aa, Heterodera glycines
MKKLLLCVFLLLQFLLATDAISVQSEVGQPFFDQQSEFGTVPLSEMEKRRRRRFSKLKAAALGAAAGLGAAVIAKHAG

SEQ ID NO: 152413 - protein, 33 aa, Heterodera glycines
MRRSIQRKTDKAELVNYEGKQLPFAKAPPPNGI

SEQ ID NO: 152414 - protein, 233 aa, Heterodera glycines
MALSQRLLVRLRRLCGPAVLCACANLRFVNVDDENFAMKSPADDAAGASPGQALLKWLYTPREDGQPKEFSTATTPVSFIVRFRKSSWDAYDDAALKPFELSNELTGERLTLRHVIDQQRNDLGLPAPPPPRPSNNKKMITYSSVVSRRSKFDIWLLERTPSERDEKQWTHWANEGPFDTCYWEEDNVVYVNFDERRQLGWVRIRKRKGTNAAIMEAFDNSLLTFPGREWSDE

SEQ ID NO: 152415 - protein, 57 aa, Heterodera glycines
MALGELRKYVNHLELFADDRQKIFFKIDIDISSVPESTPEARPALRGWFVLPLILWL

SEQ ID NO: 152416 - protein, 203 aa, Heterodera glycines
DKYEKDIAKLGLEYSSKFNMGMAVDRTLWKAVQNCSKLFCSYDDYNWDWTLLQLSVKCCSKLFCSYDDYNWDWTLLQLSVKCMASKMRVIYTKAPRVLHIGDCGVHTHRCKAERAANDALKLFERVNSSFFPASMRVLEIGKRMLKPAKPNGGWGDPRDIRLCELNTHPTESNTATGRVAFCKSCNYKKDFPPRSTGIPISFC

SEQ ID NO: 152417 - protein, 93 aa, Heterodera glycines
MAVLIIYITMHGKAQSKDPAPPNPDGPMLLLNGKQSAANEKGKASSGESNPNPGQNPSGERDWAKSQWNDANWLADVVNRNGWENTGTPTGGR

SEQ ID NO: 152418 - protein, 107 aa, Heterodera glycines
MSHHTQIQQYFCPPSAPAVTYYNYGNITNIDLSPQQAVPQGFQQQVQLTAPAYTVAQYWHDVPSQNGGYQMPQNNGHHAAAYSSGDHPKMGKHKGIGKRFHPQKHQQ

SEQ ID NO: 152419 - protein, 89 aa, Heterodera glycines
MMSHSSIQIPSAVPADVSVVVEQCQQKKEMEEEKFFVFKEWLHWLHSVAADERLKLVARQRITIRHFIWFTQMREEFWERRAAIVDHLL

SEQ ID NO: 152420 - protein, 58 aa, Heterodera glycines
MPTNQEAEFYVQAVKLFRQIEREHMANFKMSTYDYERLKRILFDNWTSFFTNFCGVAK

SEQ ID NO: 152421 - protein, 50 aa, Heterodera glycines
EFLKNFKNFFEFLNFPVGPGSRSRRKIEVLVPASQARQVPVPVLPKIPGP

SEQ ID NO: 152422 - protein, 18 aa, Heterodera glycines
MRGLPIFAAANKARFVLM

SEQ ID NO: 152423 - protein, 52 aa, Heterodera glycines
MVRTPPEKQLRHRQLTNFRLGPNSEQTLLHACLCASTFALRPKSLEYMLRIR

SEQ ID NO: 152424 - protein, 101 aa, Heterodera glycines
MSRGTTVIRRGTTVIKRGTTVNRRGTTAIRRGATVIRRGATVIRRYTTMMRRGTTEIRRGTNLMKRYKCDLKRYKSDKRGTKVIRRGTKVIIRGTKVIEEV

SEQ ID NO: 152425 - protein, 148 aa, Heterodera glycines
  unsure (1)..(148): unsure at all Xaa locations
RGGNREREEEESKXKRAMEENDTERGTERGRKSRRIYRLMKEEERERERKXRVRERQRGRERERERERGKRERESKRNMIEREESEFSNLLASSSSYLKNIILISFSTGQRLNWLKRNCRNRNASFQFKMALVFGFLKKIFVFLCYCR

SEQ ID NO: 152426 - protein, 243 aa, Heterodera glycines
MAPFGWVKIKVLFSHTIAPPPPHTPQEERVADCRTKLGALKERIAMARDKANRVRLGAHFEQRGGVGAFLELPLSAADELSVYNDIRFFFRTRETNGQLLFLGADNAHLSGEYIGVELENERPKLTVSLGARSVDAAQLQTPVNDMQWRELVVKRVGRAVTLALSKPSTDERAEEKSFTVGGPPPKSVLNLFDDSRRLFVGGTPRDFRMPATLKQNQFTGDMDKLRINGELVGFWNSERTQVW

SEQ ID NO: 152427 - protein, 79 aa, Heterodera glycines
MGKDRDQLMVELVGGRISLSFDLGSGLGKLLSNGQRYNDGKWHLVQMDRQERSAKLKIDDTDKVSKFSWNWKDNCVFYD

SEQ ID NO: 152428 - protein, 542 aa, Heterodera glycines
MNKTEWNSEWKLQKIFREKHNYLKTIKEIDEILDTIKDINLEVKRRLKALKPNSPSESDLENESIDEEQENDDEEAGEEEDEDEKEYDSDQEDESQEMHSSDQTHRNRIPFVHQRSRIKLPAQTLTHFSGKFSQWPSFWDDFKSSVHNDPNMENIQKLKYLRGLLHDEPYRIVSPYPLINKNYPIIIKLLKSRYGNPELIRENLHSELRNLKRPSESTIELRKFILLIDRIILQLKSEGEDINHPQIKQSIETKLPYNLRLKLREKFKIYSTKQLMDFLNAHTQAREDMERMEDLNRQIRNFPSNRPNSNRIQRQPYQNFSQNKPKFNQRNQYQTPITPFPYTSALTTKSKPLHPAQIKPIPTQTKTQYKIFCRFCERENHTSKECKIYSTPEKRNERVRELKLCLNCLNKGHMVNECKSTYLCYNCKHKHNTLLCTRKQTQYKTKEQKTRVNMAQNYENHEETQTFMTMEGDKNLPNSDEEELLMTTEVNCINPDKYKVKREIILFDNGSQKSYITEECAQTLQLNTIEEKLLAISTFQPK

SEQ ID NO: 152429 - protein, 149 aa, Heterodera glycines
MVNKETVDVLGVKIPISHARPQILIGIDYYWHFMLPNSQIQLLPSGFYSINTKLGKILSGKGTIEDTNCNSVTEKRKKDETNQILQKFWELENIGIIDSPHMTDEDAAMIHFDKNVTFKNNRYHVRWPYKRENPNLPTNFGLCMGRLRN

SEQ ID NO: 152430 - protein, 220 aa, Heterodera glycines
MNPGPLSDQDRPIEFRFGFSCGDGVQRREGMCVREPDGQRLEEKDCEPRERIVEKQCQMAACPHWKLGTWSPCSVSCGQDGFQTRLVQCVDSEGRKVSDQKCMGIKKQQQTEKPQSYKVCSPGPCPYWRAAKWGHCSVSCGNGVRMRHVECVLKGQIVDDSLCMKAMRPKTSFRCVLLACTVWHGVPQAAATGQIGERRVDLKIKLKAQEGEVDGMFDHP

SEQ ID NO: 152431 - protein, 198 aa, Heterodera glycines
QGAAGIDITQTAHNGLKEDDNYLALRTTTGEYLLNGQFQVSVFRQQIPILDTVLEYSGSDLPIERINGSGPLRSDIYLHVLSVNINKPNIRYHFMTPIASSTKSEAAGSNSFYWQAENNWTECSNSFYWQAENNWTECSMKCQGTQNQHVRCVEAFSNNFVMDAHCAAVVRPNTQKRMCNVDCFYKYLQRLNTDSSGK

SEQ ID NO: 152432 - protein, 252 aa, Heterodera glycines
FCDSNGICHLFSPPYHAQSNGAAEKFVDFFKRQLKKCSGDKNWLKQSLLSYRSIPIAVLNNRSPAELFLGRPLRTKLSLMKPERPSPFFRGPYQQRMAQQFDKKHGAKRVEFNIGDKVQFVNYRDGKTLWLFGEVVTKKGLIFGIRSPQIANRIVTRHANAMRLTQALGTDQTWPNFDEEPKKNRSPVRAPQIQQNVTPTPPAERNHDQFEQNEEQERNQQQTPVLRRSERVPKRVRFLSPSMTGQRHNIRQ

SEQ ID NO: 152433 - protein, 469 aa, Heterodera glycines
MKDWDSFSQFKNFTNTFLVENSFYALITVHSSRLQRWALILLNYDFSLEFVRTDNTGQADALSRCLVFNGRSVIPPSLRHRVLKALHLAHPGIVRMKNLARTLVYWPSIDSDIEEIVRKCRQCQEAAKQPQKQPLQPWPTTTQVFQRVHIDLAGPCSDGNTYLVIVDSFSRWPEVFMLRHTSSQHVIEQLQWLFDRFGIPKTLVSDNGPQFSSSHFKDFCDSNGICHLFSPPYHAQSNGAAEKFVDFFKRQLKKCTGDKNWLKQSLLSYRSIPIAVLNNRSPAELFLGRPLRTKLSLMKPERPSPFFRGPYQQRMAQQFDKKHGAKRVEFNIGDKVQFVNYRDGKTLWLFGEVVTKKGLIFGIRSPQIANRIVTRHANAMRLTQALGTDQTWPNFDEEPKKNKSPVRAPQIQRNVTPTPPAERNHDQFEQNEEEQNQQQTPVLRRSERVPKRVRFLSPSMTGQRHNIRQ

SEQ ID NO: 152434 - protein, 87 aa, Heterodera glycines
LEKIDFFVFGAVPPNRCAQIYGETESFGNSFPIACTLILRWIFTPHNCLSTPNGHLKKSIFLFSGQSPRADAPRFMGRPNPSGIASL

SEQ ID NO: 152435 - protein, 944 aa, Heterodera glycines
MSITSEQLKAILADQQNQFVKLLQNMQLNTGQGQHNQAQSSDMDLFCKLSGQISEFLYSPDDNHTFEEWYERFGPFVEQEGKHMPDQSKARLIVSKLGPDEYRRYTEVIQPKTPDQVGLNETLAKLRQIFPEIKSIFIKRFECFQLKCGQNQDVLAFGSTVNAMAERSKLDLTKDQIKSLIFVTGLGDHNMELRHRCIKLLDNNATFDQLLSECKEVIALRQSSAALSSKQDFNSNAIQIRPHKIQDFPKKRKPSHTRTPSRTRSWSSQPNNNSNTPHGGTRQSRTFPSSPCTRCGGQHWNSDCRYPISVKCHICGKTGHISTICRARKPKSNNFGKNTNVVECLHITPTERQCSWSTPRVEHEPYIEQEVKFGTKSVKMVADTGSKLTILTKVTWHKLGKPKLFKTNLCGRSYTGDIFQFIGKGQAYVALSGGCQLFLDFYVTDKGSLDLLGVGWIRAFEREYNRPVATTLPFDHTTNNIQHINNCELTSEQLKDKLQAQFPSVFANGLGLCTKVQAQLKLKGSSTPVFCGARPVPLGVQNDVDTELDRLIELGVLKKVDYSRWAAPIVAVRKANGKVRICFDFSTGLNAALEPHHHPLPRPEKLFAKLNGAKIFSQIDFKDAYLQISVDEQSRQLLGVNTHKGLYQCQRLAFGIKSAPGIFQWTMDQLAAGIPGVVGYMDDFIIASSTANEHFSTIFKFFKRIQEFGFRIQMDKCKFLVKEIKFLGQIVSSDGIRPDQNRTRALQEMPAPTDITTLRSFLGAINYYGKYIKNIHQIRAPLDELLKQGVEWQWNEKHREAFEQAKSILLSDLALTHYDPNLPIIVTADASNKGIGATISHRFPDGKEKVFQHAARTLSKTEQNYSQIEKEGLGLIFAIQKFHQYIFGRKFILRTDHRPLLGIFGSKNGIPIFSASRLQRWALILLNYDFSLEVRRTDNTGQAD

SEQ ID NO: 152436 - protein, 80 aa, Heterodera glycines
LFEYPKRTLEKIDFFVFGAVPPNRCAQIYGETESFGNSFPIACTLILRWIFAPHKCLSTPNGHLKKSIFLFHKYFFQKVL

SEQ ID NO: 152437 - protein, 779 aa, Heterodera glycines
MCKWGFCAVGCCYLVWAYGEYSTQIPDLERQGVVPHAGAPSDEMLKKLPKPCLIVYDDLMGDIEAKKLADLYTKKSHHNNFSVIFLTQNLFDKSMRVPRSNAQYIFLMRAPNDMLSIRNLASQMFPREQGFLMDAYRQACSLPYGYLLTTRRESFLPPKMVKREQKIGERVVHNYDYLKKLGKTTSEKKRRHLLNSAGCEELLTLVEICLNVLNGSFCLSRKQKQRLAPFAKDIRQLARVRTRETKNDDDDIAERTNLGFVKRQVTAAVQKRKGNVSERNAMYNQQLRRYLKMRKEHKERPVRVQLSNGAQLLNKTVETGVQVRPGPDEPKDKSVMVTDEDEEEEIEVPKFLTPTSQTQGSSRSPRTNKKAAKQQKLIEKKDRLLAIIMSDPQRFGATDRGKIINPKTGREFIDSDLAWSIERLVDPRPENAPSPSGTKELKRKLAQNPLASSLLNRLFGSDVQADLADFQALSRKNSGYRYLLLAVDVLSRRMFGAPVKSKRPVDMKRAFEELFEQMPRVPDTLYTDRGLEFVAKPLKEFYAEKGIQKFETSSKKKAAVAERAIRTLKTRLYKYFSANNTSVWVDVVPKFLSAINNSVCRATGLRPNEISDTNAREVWKRVYGEGLAQLDKTPKIRAGETVRIPEPKHIFEKGLFASFLVVANAFSNVKAKTHSRRISSMASSSSKLPALWNPLNVAFEKLRKRENSKENGINSKVKTPKGNGQLRTIVFSKAGEELADSTGPTTKLLKADTERKLSAVDGTITNKAASSHAIRPVQN

SEQ ID NO: 152438 - protein, 131 aa, Heterodera glycines
MFVGCCAILWLYWDRFRKPRGHHKKKIFISGDGWLCVFDLLEPSQLGLGIALVSHRFDFYVDEHFKTRRWALKAMEIKAKFEADGTKEMEIVNCDGNPLPIPQKALPKKVVGKIFVVRQKVRFRVMVYGIS

SEQ ID NO: 152439 - protein, 49 aa, Heterodera glycines
FSVSSPATVGFVCSICLSLLNWALELHLSATVLTFTSTNTSRRGVGRSK

SEQ ID NO: 152440 - protein, 76 aa, Heterodera glycines
FLLELMSLKIPLDKSCHFCLQIKYYVDFFRCKELMGEDYKPCKFFQNVYKDICPSFWTEKWDELREEGRFPAKFDR

SEQ ID NO: 152441 - protein, 225 aa, Heterodera glycines
FTFSQKPEKRPKKDDRNENNDTFEHNTQSNSFVGAAISALQLSAKDVDTTFQGIVEQTVFRGSADGNPFAIRECTGSVLVLLGHAATITIDKCSNCVIICGPCRGSIFMRNCANCLLLAACHQFRLQNSRDIEAHLHCSTNPTIEDSDLIVAPLLMRYDGFKEDMESARLDNAPNLWDKVQNFTAETGQFQRMNFDPFANGAISSEVVSDELLEKLSTFMEEPEA

SEQ ID NO: 152442 - protein, 62 aa, Heterodera glycines
LLVTLADLYDDYEQCKSSGHFGAEDGSPSLVCDSEGRLTPQALAQLNGILTDMGRDAGCQCA

SEQ ID NO: 152443 - protein, 461 aa, Heterodera glycines
MQNNLICKTYWLSLLTDHKPLLAIFGSKKGVRQCSANRLLRWSLILLAYDFSIEYISTNDFGQADVLSRLIAKGKSDEDRVIASLRSDSEIDDILIGSIEALPIKFKEIVAAAEADKTIQKVKKFLTNGWPRNVGDESAEIKLFHLIKEQLCITRNCLMYADRVVIPEKLRQKTLHSFHKGHPGIKRMKQLARNYAYWPNMDADIQQMVENCQPCQMEAKAPVKSNLQPWPKPSLPWQRVHIDYAGPFFGKEYLIIVDAFSKYPERRIIQCPTARLNVSWTRSKEHFEIERGGSPKQRRPPPAQPIERDVEMARRFNKRFGTKLREFSIGNKVFARHRISQNWQQGKISKRTGVIYDVTFADGKSGRYHANQLRPRKTSDSDEQLSVMLEVFDIPRPVAVEEQREIPVEMPLEDPQIWEVKLTMDSNDGTLSEIAVRRSAFHRNLGTALKGGGVRGTAAEV

SEQ ID NO: 152444 - protein, 209 aa, Heterodera glycines
MIFRGGDWPRGIDCATICGQMFGPWGIKSAEAAADVWLCFADLFRAIYLFFLNLFCVNVPNFWPNSAFCSLSILFAHLFLLATQKCVLSVKIYGLLAIQRRADDIYFIIIDNTTELIIFHFHLSFQTLQIASMDEHIAAAGAKSFVPPAPAGTTHQKTSVQHELDRVEREKFWNEVSWNGPILRCQSAKWPAFGLAMCPIKAGPEQGWT

SEQ ID NO: 152445 - protein, 208 aa, Heterodera glycines
NMIVLDESGQAPLLAVCSVLSPLQEALKLFITGDRYRLAVSMKDIPEQLRVGFGFDTVLLNTDSSPGVDKTTLEVNYRSHPEIVNCVEYAAYTPHGERLRSGPGIFRMLTSFAKMPIAESPIVLIHQDSPMEAEETSFSATNSGQTRTVIDLLRSWRGFPGSVRIISLYSGQAAQIGCELRANGLERMAASATADSMQGHEADLVIVT

SEQ ID NO: 152446 - protein, 264 aa, Heterodera glycines
VGATIGFVFIFNLNLPVITPTHTLIVFSYSMLLHGTEGIRWVKVTKIFASWFVSPILSGCASWFVSPILSGCVSILIFLFIDHSVLRRDRPLHCGLLLLPFLYFVCVSVNMFAITYQGSHYIGLIGLDKWPLWAVVALSVVSGLVTMVVTRFFVVSRLKRYILEGKTERDEPSTKVKMAENGGGGGAEVAQNKFGTTKSNSLDIAMFPAGSSSIRPASSVLSFFRSSKPEDPYASKLFTFLQVLTACFSGFAHGGNDVRLKSEL

SEQ ID NO: 152447 - protein, 169 aa, Heterodera glycines
MVVADLAVFQLDLFWTIILGFLIAFVLAFAIGANDTANSFGTSVGSRVLTLQQAYLLASIFETMGAALLGYQVTDTMRKGVIDLNIYEGREKELMLGQIAVLVMPFRFECLHFFIPSSSIRPVVVLGCSLPLSLKCPSPPRLLLGSSPPFCPAVFPFSFFSSLTIPSSE

SEQ ID NO: 152448 - protein, 50 aa, Heterodera glycines
MAEWQNTAERWEIIFVKKARLFGATNVLYLPRVVSFIGLMPNQHQKNYGN

SEQ ID NO: 152449 - protein, 139 aa, Heterodera glycines
MAYQAAQARQNFSPSVEEAVNKQIRNELNASYAYLAMANYFNRVDVALSGATEFFGKQSVEERAHALKLIDYVNARGGHVKLMPLPFTNFLEEFYLREQVDEIQRLARMANQLLRMGTSGLSEHLFDQELRKGTVLSDE

SEQ ID NO: 152450 - protein, 72 aa, Heterodera glycines
MPMLAQSQKKFFRPSPIPSIGLKPTGRSCDSARPRGKCRGKLRDTTLDWEDALPTAEFQRAWEYAKLAMASG

SEQ ID NO: 152451 - protein, 62 aa, Heterodera glycines
DDKPLKGSDRLKISSQKDEKDPQGMVLLLDIHEPQKEDQAKYKCVVKNAEGRNEQSLNLQFE

SEQ ID NO: 152452 - protein, 362 aa, Heterodera glycines
MSGGKSGKERTLLNFSLAATNTNGEQRNQEIKTKRNKQKLEHEGALYVLHQISDDGLRKYWRCEFFGPNNKCKGRLHTDINGNVLKIIGSHTCDMSAAQVECQRRVTQLKRRAVETCEAPATIRAQVLQNTATPVLAAFATKAATKKVIKRVRHDEDVPPAAPLSLEALELPPEYRMYNRTETEEENFLLADTGVFQIQGQAGPQRILIFARASTSEWAGIMKNVHVQLHLKADVQWALTVPRFASDEWSVHQRTLDGGDRTNNYAEAYHRKLQRAFDCTHPTVFRFINTIRCEQKSIDAEISRCIAGELPPQKAPKYCAADARILRLLQSYSAINNNQAHQNDHNYHALINNPYNIINFLL

SEQ ID NO: 152453 - protein, 405 aa, Heterodera glycines
MLGYADAESASDNKRLRMKLMETLNQCINAGHEMTKAIAIAQFNDDSPEARKITRRWRIGEAADLVGVSSQAIRDAEKAGRLPHPDMEIRGRVEQRVGYTIEQINHMRDVFGTRLRRAEDVFPPVIGVAAHKGGVYKTSVSVHLAQDLALKGLRVLLVEGNDPQGTASMYHGWVPDLHIHAEDTLLPFYLGEKDDVTYAIKPTCWPGLDIIPSCLALHRIETELMGKFDEGKLPTDPHLMLRLAIETVAHDYDVIVIDSAPNLGIGTINVVCAADVLIVPTPAELFDYTSALQFFDMLRDLLKNVDLKGFEPDVRILLTKYSNSNGSQSPWMEEQIRDAWGSMVLKNVVRETDEVGKGQIRMRTVFEQAIDQRSSTGAWRNALSIWEPVCNEIFDRLIKPRWEIR

SEQ ID NO: 152454 - protein, 95 aa, Heterodera glycines; identical to SEQ ID NO: 124528

SEQ ID NO: 152455 - protein, 117 aa, Heterodera glycines
RFGCRKITDDLVTRIENLTGKKAHAMLRRRLFFAHRDLTDLTSILDRFEQKKPFYLYTGRGPSSGSLHLGHLIPFFFCKSLQDSFDIPLIIQITDDEKFITDDEKFLWKDMDLERSK

SEQ ID NO: 152456 - protein, 59 aa, Heterodera glycines
MSEEQKEYEMMKLVDCMDKMMVFEEIKQNDHFIFLSTICSKTVFLTKSAKSHMPTSLAW

SEQ ID NO: 152457 - protein, 108 aa, Heterodera glycines
WPVTNTPNIRSDQHRYPFCIVWTPIPLISWLFPFIGHIGIATSKGIIRDFAGSNYVSEDNMAFGWPTLYHQLNPEKVNGGSEAWDNSVAEASDVSIFYYSNVEIAFLG

SEQ ID NO: 152458 - protein, 237 aa, Heterodera glycines
MTSRKFFVGGNWKMNGTFTSIAELVNLLNQSGGNSDVDIVVAPPVTKVAKGAFTGEISPEMIKDVGATYVILGHSERRHVFGEEDALIAEKAAHALSTGLSVIYCIGEKLEEREAEKTKEVVNFKQLEALLSVKNLVWPKIVIAYEPVWAIGTGKTATPEQAQEVHGWIRKFLSEKVSQEIAEKTRIIYGAFKCFFCLGSVTAENCKDLAAKQDIDGFLVGGASLKPDFVNIINAKS

SEQ ID NO: 152459 - protein, 48 aa, Heterodera glycines
  unsure (1)..(48): unsure at all Xaa locations
WHYLVIFNFIICEWAATNTPXIFDLTSTGILFAFVGRHPPHQLVISLY

SEQ ID NO: 152460 - protein, 30 aa, Heterodera glycines
MAQLFGFFVWAHALFHLFLVFMKSQEGMHF

SEQ ID NO: 152461 - protein, 39 aa, Heterodera glycines
MNGAAKIFCPYNHFWATVSRCISSAVWHRDQSLSEKRYS

SEQ ID NO: 152462 - protein, 108 aa, Heterodera glycines
MTAFGEQMKKMNKRTLKKIWICSEVLMDILPFFDRPQLGLKLALLSPRFNALVDTHFDDKTTELTIWKLIKINGPKPQLSVLIDGKFVGFPLPDRPLPNKIRFNQLRI

SEQ ID NO: 152463 - protein, 48 aa, Heterodera glycines
LQMSILPSISKRSEFFYNKLIESKKHDCIIFKNLSMHLLNVPKPDQIF

SEQ ID NO: 152464 - protein, 18 aa, Heterodera glycines
MTNSNLGNDKFQPSTHFR

SEQ ID NO: 152465 - protein, 60 aa, Heterodera glycines
KGSEFFYNKLIESKKHDCIIFKKFIYAFVECSQTRSNFLNLYMKTFIAGNDKFQPSTHFR

SEQ ID NO: 152466 - protein, 95 aa, Heterodera glycines
MGTKGNGKGKAQGTAQGRRRARHGKGAGHGKGARARHGEGAGHGTGKAHGHGTGKAQGTAQGRRRARHGEGMETSEGTNERSEITENPAPFIRLF

SEQ ID NO: 152467 - protein, 66 aa, Heterodera glycines
  unsure (1)..(66): unsure at all Xaa locations
IEGRMXHLKLKLISVIRTDYLVNRKQINHKIRTKNDFILECRLKMHNKLIYSNLFEITVQQIISCF

SEQ ID NO: 152468 - protein, 137 aa, Heterodera glycines
MLAKSRGIAANQKKQILIKKLTANFSGTHQQHNTNTNGQNDDGDGTDNEQSFGDGTYGQSDDGDGTDNEQNFGGGGGGTNGQSDDGDGTDDEQSFGGGGGDNNVEGEQEGGQQQQQSTEFTRRQKIKKIFRKLKKSF

SEQ ID NO: 152469 - protein, 156 aa, Heterodera glycines
MESFKKDFLEAKMKALVEEKVAEAKELAEFAIADAERKMEQSLNNAIHAERERGQQQLRSVVEEQHMRCRHLALQSYRAATMTKPTSVRTSDVSPKWEPHCMFCLIDEPMFGSEWCAHVNVCAECSIVWSGDDQCKCLTCQTTCNKFVYFGPNPSP

SEQ ID NO: 152470 - protein, 202 aa, Heterodera glycines
MSSSSSPEKILAQPSCPKKAKVDERALWKIFKGKYMLAIYLCDDDWRNLFENKEKVRRMDNDHGMAMESFKKDFLEAKMKALVEEKVAEAKELAEFAIADAERKMEQSLNNAIHAERERGQQQLRSVVEEQHMRCRHLALQSYRAATMTKPTSVRTSDVSPKWEPHCMFCLIDEPMFGSEWCAHVNVCAECSIVWSGDDQCK

SEQ ID NO: 152471 - protein, 186 aa, Heterodera glycines
MPSLNKLSFYESEMVLVNVFCAQLLDCPVKSLRDRLNHPEDCVNAMNGLMGKKVRTTYKDRNGMHKTFFVSGITERGAAFVPAYGNLRAPYNVNVAAYFYARHPIKLHFPYVPCVIERFSGRGEDRFYPMELLEIVDEENKGRLFGRMFMEIGEDDDDDNDEDVSTSFDSTLRFDMGRDECSQLWR

SEQ ID NO: 152472 - protein, 79 aa, Heterodera glycines
MFCRWAAVPIVPSADQSKNETPLGAELFVSSTILEYRYMRLAEGRETDQSVRTSCALIESDVDGSEEEEEEGVKQQGQK

SEQ ID NO: 152473 - protein, 195 aa, Heterodera glycines
PPPPPPPPAYEPPEAPCNEPQQPPSYGAPAPPPPPPPPPPPPPPQPPAYEKPEPPSYGAPPPPPPPAYEPAPPSEAPEPPSYQPLPQPPPPHKPPPPPPPPPPPPPPPPPPPPPPPSYEQPEPPSYGAAPPPPPPPPPPPPPPPPAYEPAPPSEAPEPPSYQPLPQPPPPHKPPAKRINRYQIRPHHCIVCQNKK

SEQ ID NO: 152474 - protein, 223 aa, Heterodera glycines
KMKLISLAPLVICSLFFVGIPVVLSDGKGAPPPPPPPPSSYGGPPPSYGAAPPPPPPPPPPPPPPPPPPPPPPPSSYGGPPPTYGAPPPPPPPPPPPGYGGPTTGYGAPPPPGPGPYPPSPPQKCKGEGLSAPKYCASNVYYACSGGVSTKLNCPKGLVFDQANQVCNYPSDCGKKQPPQPQPPSKGYGKYGRGKRDASGAPPAPEPAPPPPPPPPPPPPPPP

SEQ ID NO: 152475 - protein, 170 aa, Heterodera glycines
MNIRPSLSPAELDARRQLQKECAEKRKDGETFYSHNCVVLGDFNFPNKDLVWKEGQPYSMSKFGEIFCHFFSKLPFLIATNGLTRENSWLDLVLPANDQIVKQCTIEGLKIFSLFVKLIEHVKSFRMIPTMLDLDDKEKSYSGKACWGPTVRAELTGSGQETFSHLPKNS

SEQ ID NO: 152476 - protein, 19 aa, Heterodera glycines
MYLDPALYFSWIQPVKTCL

SEQ ID NO: 152477 - protein, 62 aa, Heterodera glycines
QGWAEVSLFAFRLSHYSHFLAFRISLFAFRFLARNATFTPLRIGLNSHKIFKNFTYKLANFQ

SEQ ID NO: 152478 - protein, 173 aa, Heterodera glycines
PGQHNNQPEDLTGSVRLHLGTCTYDDGLYFEGGTFVFEGLCSPSGDRLDVERMALPTMTTLESAESVDGAPGLATRTQEMARRTRGDPNDRIVLMSDVHLDNEREAKNVHFATNPCKLVFKDRHIVIFRDDVVEKFCDTIWAQRHFSPLPLFINPIQPHFDPLFQLFPSPDAL

SEQ ID NO: 152479 - protein, 139 aa, Heterodera glycines
TGFPVCILTPCSNSHPFEERRLVTRTEEDAVKIGRSVVRLQPSSNNAIFDCKVLSRNHAVLWANGAGHFMIKDTRSSNGTFINNERLSASGEENEPRELFSGDILQVFIITPDISVESKKNRGNFSWRLSLNCSVYIQK

SEQ ID NO: 152480 - protein, 111 aa, Heterodera glycines
MGTKPPVTSNCHNDGNTEIGKAARRGRVGAATASEEGAKFVRATGRWAEEKGKEQLLAGGEEAAEQEEQQQDEEEEEKEEEQWEEEEEEGRKLATEWEERPVEKQQREGEG

SEQ ID NO: 152481 - protein, 353 aa, Heterodera glycines
ISTSNRKIRLISTSNRKNFSKACLARGLTKDDDEWKHCLNEASQFRFPAALRSLFTSILLYGDPKQPEILWEQFKNNLSEDFLIKKQPNIETSLTTSLTEENENINYEEEKKIAENLYKSMNADQKIIYKKIKQIASGKLNPKLIYIDGPGGTGKSFTLNALYIYSYKKHMTNMAFSGIAATLLKNGRTIHNRFKFPLNLNAHIISGVVQGTKAAEEIIKSDFFVIDEAPMTPRFALDAIEKKLRELTNCKQLFGGKTIILAGDFRQTLPVKKFAVRSEIIDLTIKKSIFWSKFEQMKLTINNRAKDQFSLNRYLKMVMELLASLFNYHNWIIGNDSILDEIYDDGFERNFNN

SEQ ID NO: 152482 - protein, 193 aa, Heterodera glycines
MRYAVYRLIGSNERLRADTERMERTNALLFQIYARLSAGPPNLEQQNLPVAGANQPNLPVAGANQPNLPVAGANQPNLPVAGANQPNLPVAGANQPNLPVAGANQPNLPVAGANQPNLPVAGGNQPNLPVAGANQPNLPVAGANQPNLPVAGGNQPQPAVHPIWRILVQDAGLVAANQYMHLLYGVCLYILYY

SEQ ID NO: 152483 - protein, 182 aa, Heterodera glycines
PPIKYVFLTPLPNTMEIYRTKQGVLTCKLNSARAPLVWQRDGKPIDVDDPRYQIEKDAAGRFTLTIRVVEQIDQGMWTAFVNKDVTSKCQVYVEEPRDTFVVPLKSQRANEKENATFECDVNDKDIDVEWFHDGAKIKMDGRHFKEERAGRRRRLLITNVLIEDHGEYKCTTKDDKTMAQLI

SEQ ID NO: 152484 - protein, 185 aa, Heterodera glycines
MPGSKYECQSRSGVHTMKISKIEMNEGDKYEIDVAGLRGACRITVLEAERKPVIKWKPQKFECEAGKEKRIKVPFEVKGTRRGDPKPILLRNGKPVDLNKMKDLVEASLKNSGQNRYFVIINGDVAEIVFKNPQKSEAGKWSLQLENTGGVSAAAPFELVVKGKPKTPKGPLDTLDVKSDSCSTN

SEQ ID NO: 152485 - protein, 115 aa, Heterodera glycines
PPAFTAGGIQDQRLRVGETIKYEVAISGEPLPAVTWEVNGKPLKACGRVKMTTEKGKTVLKIEDAQRGDSGKFTIKLKNKSGECASTANVTVVGRPEPPKGPLEVSNISADGAVL

SEQ ID NO: 152486 - protein, 235 aa, Heterodera glycines
MDNMFRVVHQQFPNKASFHELRALYPDLQRRFQPETIDKQRFTNEQGELVEKFKNDRLLNSYELLLCHKCFSYDCIMHNAATSNGYGNSKKLRTKRQSSSGVSRHSGGKENCSKLRRSCSANCYLLSNSSGAAQPAMAAMPRANSIASRPQQQQPSIAIGGTAPADSAKWTPHEEAIFNVLRSTGEEEFCRIAIMLNLSLGETARKRTCQEVYEYACRAGPQSTNGESSSPVKNA

SEQ ID NO: 152487 - protein, 109 aa, Heterodera glycines
MPSKKCTKCAIAINDLNIKESQEISSSVDSVPKLLPFFYGTLLALFMTQLGAILFNHSHLGGLSMFDTIFLLIARADIAQVHKWMFVVSFLLRFLLQSSGVHFQGQLIG

SEQ ID NO: 152488 - protein, 24 aa, Heterodera glycines
IGRTVKHNDMHIPTAKYGSRRVIN

SEQ ID NO: 152489 - protein, 124 aa, Heterodera glycines
MDIASSSSSALVDNKALLMERSWTACRPPDQRLLLNGILAIVDKAMCAVDRTKTVFWGAVDRQKAEARLGDEAKRTEDDEEGDGVDWRLAERTGEGDSRRRRASGRFGGDGVDERMTGQTGAGE

SEQ ID NO: 152490 - protein, 44 aa, Heterodera glycines
KKKKDGRHNHQATTLTLALHSLKMILKRQKGKASYLGQKLHLAK

SEQ ID NO: 152491 - protein, 244 aa, Heterodera glycines
MDVQRLNRLLKVVDRAWTLPKFGSSEPIGSNFQVNEWKGHFGIPYEANALSTRRHVPAFTRREKSEGLAERKSEGDTTQIQQERRQRMFRETAEDGAEMGEETITKRVPFWQRLMVRKRMEDKGRREKEGDEERAEKEREEEIRWMEKRYGGRRETEVKSTEEKRQTEKEEEIRWADKQYGGRGETEVERTRESADWDGQRWEGTTGKVNATTFEFVGKHSLLTQFDSVNARNARSLTNEATIA

SEQ ID NO: 152492 - protein, 191 aa, Heterodera glycines
VASGKLKKDKDGNWEFEYDTSDEENSSDPENATIQQSASGERPTVSRASSEGKGEEQMPPLQTLNLVLRVRNQQRELNDIKFDYSVLRVRNQQRELNDIKFDYSPNADSVDGIAHELIAHELVTAELIDGHDLVVVAANLQKLIDLAQKKAERRTITFALNSGVASNSGVASNEIPDERSLTGFAQLSLLD

SEQ ID NO: 152493 - protein, 99 aa, Heterodera glycines
MSSKIPFISADCWLEVFALLPPSQLGLGIALISRRFYRRVDKHFKARKWILDTELRIQEKELWFGRKQMEIVNANWKRLPIPQNLLPNKVIGFKHITFM

SEQ ID NO: 152494 - protein, 222 aa, Heterodera glycines
MEEYFGQASFRKRMLAQGHRLRESLACEGNKNRILAETAFGFGRNEGNCEFGGPSVHSNFGEKRIERSGFEGRTEQEKNLVERLKAELVRVKAERDEANAKIEILREKLSDSEKLCVFLKADHKKVLAQAEKVRTESKAIEIELNEAKENLEMAEEENGHFSILSVQQNLMVQEQGRKIMDLIEEVEELKAKKNAKKKEKLSKSPEHQITEPKKLISKSPPK

SEQ ID NO: 152495 - protein, 24 aa, Heterodera glycines
MPRKRVPQLDEPDLHAMQMRGTNA

SEQ ID NO: 152496 - protein, 199 aa, Heterodera glycines
ERVARLPILLQLLLLLAVVEAVQEIRRVVVPRATGVERHRATGTEGRVVVRHAPGTRRAEARTEAGRVVRLPPGKRLAEARAEERRVVRRPRGNRRADVSRTEAERVLRLPPAKRRADGRTQGRGVRHPPAGMRRADVRTEAGRVVRHPSGKRRVDIVGGLCRANRSRRSGPSRPSGVDVDARGGQGVATDAQKIRIRP

SEQ ID NO: 152497 - protein, 95 aa, Heterodera glycines
PFCCNSPVPRTPAADCCFCVCHFFALCSFAAEPRRLRPDDVRTNGTDRHQQGEGEPEMCADATVRNAAAKLERQQRIPCLLFKWRILIDGPPETP

SEQ ID NO: 152498 - protein, 94 aa, Heterodera glycines
ILFRNDPAQYREEVRRRVERASASTPRARSSSTPPPVAQPPGEQQQGTPPQPPDGQGMQPPGEQQQGTPQPPATPPQGQEAPQQQQQQTGEWYL

SEQ ID NO: 152499 - protein, 197 aa, Heterodera glycines
TSKRILDGETKLALINEFHKRKRECQKREKKLKKNYNKYKVKIEGEIARDLGTNRKMIYKWKKALGQKWKRRFRDSEKLELVRKFDEIKRKNRMLNSDRVAETLAVTKESIRKWRTEFGIEAKCKIFKSILNQFNLILPDLNLGNCNYTEEEKMKLICKFDKIKGKNPRLNSGRIAEELGTTQKSIRKWRAKLGTKS

SEQ ID NO: 152500 - protein, 79 aa, Heterodera glycines
MHKFNELLEKEELCFHYSNPPLFTLYYFSILKTEITKNIKYNLTINEKTFFKFTTFTMKSLVNEANEFNEDCPSFLSQP

SEQ ID NO: 152501 - protein, 49 aa, Heterodera glycines
MDADSVLQPVFIFAFAAVELLINLSGSILGVNCAENEQKERKDCAKLGN

SEQ ID NO: 152502 - protein, 76 aa, Heterodera glycines
MVSIVDNPIDHKNIGGMSENLLYALADGSRAASDRTVPGHAGRAPALGAETFVVVVSVVVTVVARVSFFPPATNYP

SEQ ID NO: 152503 - protein, 159 aa, Heterodera glycines
MSGPISRQHNFSSVSNGCSKKRKDRPAHKGSALLSAEENSQLFEVLGRDRISLVAGIAQLLDAPAESPNVWRKTNVGIVYLVKDYRERNYQLCMYDIFKKELQWSQILYKDFAVNSYSNCPRLLVFECDTCIKALNFTDFNEAEEFKVAMEKRRESNQK

SEQ ID NO: 152504 - protein, 36 aa, Heterodera glycines
LVFECDTCIKALNFTDFNEAEEFKVAMEKRRESNQK

SEQ ID NO: 152505 - protein, 118 aa, Heterodera glycines
MTCSTEESNVAWWSISQKSDLLSFADGLMTHYTSIEHSKEIDRDGSLQLDGGEITLLECDCDSVRVGFVHEPPQNILALKVGDVDENKPDQFDLIILYTSTEARQTNKRSDEFLTEHF

SEQ ID NO: 152506 - protein, 59 aa, Heterodera glycines
MGPKRTQAESDFWEGMCKLAAIQSKAEEASDGGKKKAKSKAISSELQQKWPKLDKKMPK

SEQ ID NO: 152507 - protein, 176 aa, Heterodera glycines
LVADVLSAAMLSAPLVAPHHELLPHQFLEKQWLGSWKKLPKSSHDCRRICRRVEELWLFYWLVIVLVFLNTLVLTSEHHGQEQWLDHFQTGANLFFVVLFTMEMLLKMYSLGLLQYMNSQFNRFDCFIVISSIIEFVLVYFEFMKPLGISVLRSARLLRIFKVTKDWTALRKKTVE

SEQ ID NO: 152508 - protein, 101 aa, Heterodera glycines
MPSLVWWSHRRRPSPRPTRRAYRLRLDHATAPAATPAVHPLQQSPLRQQRGRSLRLAVAVLAVLVTVAGARLAMFVRVFVVAQLLDVLRLRDPVQAFLWNN

SEQ ID NO: 152509 - protein, 34 aa, Heterodera glycines
MLIDSQINKHIMSDQKQLFYSAKLFPAIRVDFLK

SEQ ID NO: 152510 - protein, 250 aa, Heterodera glycines
MNRRCIDHSVITFLRSNQQIFDGRGTNLSLWLRPDANDYQPIWDAFVREIWPIFVPNIRRLGIPKGDQLDNLLRRTSPTILTDLNQLNSIHLDYLFTNIGDQNGPNATPTVCQALFEWLCTPISDGKPKQLTCCGYPAGTTEWLNNFKEAFLGSTNSSASYIIRIELYEPTEIGPFELTNNGIGEKLTLEKEGQLGNQLIIKRCQIGETIQWEDENSNNLNNVHFWMDNAKCIGPMSPPKPGQNKKRKKN

SEQ ID NO: 152511 - protein, 26 aa, Heterodera glycines
VLSMSIWNANRSRISDLDGQELQADE

SEQ ID NO: 152512 - protein, 164 aa, Heterodera glycines
MSKQIAMECAFNLLLKKTTTLPLDARHQTVPTVAVADDDDPDYASVPGLGLGAVLPTMAPPTANALKAAENGDEEATTLGKHSYVRCLSGLNKGSYGQVMSMDEENASIFVELAWPPANVGKTVRVSQWAVEVVRRKEYRECVKGGSGGGGTAENGRRLERVRV

SEQ ID NO: 152513 - protein, 151 aa, Heterodera glycines
CFCAHFFPTKSATICRPIGVGISATVAMAFLWPNNTLALYAFWKTVEFAFFRLADAGTLPVLPWADALLFSVLSSYLLGLAVLEPHALRQNYYKFLCSVTGNRLQLLNRPMFDKFLGTSSSAVLYSDYRPEFLPYLRTINPAQYLPQMQIV

SEQ ID NO: 152514 - protein, 108 aa, Heterodera glycines
MAAKKRFNPSVRNAKTFQKKKLKVGRTLRHENGTDTRVSVKKIGILEQLREGDEGTPAKEVETRHPQKGIDELVAQLGHYNENICRDAIHAKIDRNSQSVEAADRNGL

SEQ ID NO: 152515 - protein, 138 aa, Heterodera glycines
MSFLDKLSNGAIVWLLELNNPSCRTSGAEHTLACANFYRDVIAFVPGGCVCAILVVLFFMDIRRLGQRSAQQQQQIGAGRGGEEEEAGDSGEAAENSRSSGRVRIGPEFDLSRPAPPVHTLTQIGEEEPPNPNIIHLP

SEQ ID NO: 152516 - protein, 123 aa, Heterodera glycines
  unsure (1)..(123): unsure at all Xaa locations
SLNSCFFRGPVLLPDLAGMLLLFRCVVSSPFILAATLRHXLQQFDSPLSREISESIYVDNVLLECETVQEALEKYKFSKDILQQGCFNLREFISNSKEVMKQIPQEDQLDKPKAKVLGLPWDT

SEQ ID NO: 152517 - protein, 1023 aa, Heterodera glycines
MSTVDTSKGRANKVPKCKKPHAYLMTRRLLAKSSRDSRNIIKVAVLFDPGSQTTYGADPLIDKLRPHKLTSEEMEVHGFGGKREPLRFHSPIYSVLLQRADGKWEEIVLNRTEKISTHFSMVEWSADESVTNHHEVCEAMCFTKEEPMILLSARHFWQFFQGKREVSPGLFVINTTFGPLVNGESTIGPPNSSQKALSMMAIHSTNVEQMPTINEVEHFFNLESLGIQDDPAQDDDQTAMELFNKSIRQETDGSYSVKWPWKESNPDLSSNFKMAHSRLSSVLTKLRHSPEILEKYDATIRDQLQQGTIEKAQRAPGQLEHFRPHHGVLAKKLRVVYDASAHTRGTPSLNSCFFRGPVLLPDLAGMLLLFRCPTFPLLADIQAAFLQISLEPEDREVTKEISESIYVDNVLLECETVQEALEKYKFSKDILQQGCFNLREFISNSKEVMKQIPQEDQLDKPKAKVLGLPWDTEKDEIVFKFPTTDPLRPVTRRLVLSHLASLFDPLGRRLKEIRECLGCTFHFVRTGDNPADLATRGATTSELRNHHLWWKGPTWLTQESHLWPNEFCFKVTESDQQNSENVGPSGAFLAYTHSKQPNEQVLIDPSRFSSWKRLMRTTMFVLRFLALMFKRGEETIASLEKHRKEIRQISKSGEFKAEDFALAERVLIRLDQMDDAEEFQHFKTVFEDDGILRLNTRLEMSEKPYSFSHPILLAKHSALAKLIILDRHQKRHHLGVDTTLTEFLSEFWMPSARLNVKRALRDCLLCRRMNAQQFALPTMPPLPGERVRRHAPFQSIGIDFLGPTTISLAGEKIKAWILIIICLATRAVYLEATLDLTSESFINVLRRFISRRGKPDIIWSDNATTFKLAQKTLELLSAPGPDQEVQNFLTHNRIQPITAVSDAVDGPVPLRPINLLQPEIHSNWETTTDPIDSEEMFSSTHERLASRIQALREAKDIFWAKWHSEYLTLLRERAQWDHKGPRLQNFGEPKKGMVVLISQDLVPRNQWPMGRIVETHGRPGAIR

SEQ ID NO: 152518 - protein, 25 aa, Heterodera glycines
MAFDDQFYEKTINKLAETKAFYLML

SEQ ID NO: 152519 - protein, 114 aa, Heterodera glycines
VAALKSRCETHLINCVEIPLIDRFLLIERFGLDNLKVTALKSRCETHLINCDEIPLIDRFLLIDRYGLDNLKNSFLHLDVNKLRAFFAVNHELFFPVISKEFLYALSVRAMAGL

SEQ ID NO: 152520 - protein, 199 aa, Heterodera glycines
DFYALESVAPVGSGLKSDLKAKVRYLLQSSSESEQQASLFNFKHIRPGNWGLFYMHNDATTDAAHRRLDKSALNVTYSDINIEMHDQGGIYAIIVSGTMEKVKMSLRYSHFKFSFCFYYEYRVNTDESSTNADNDDDDEDEFEEAEELRKIDEKRGPLEAKFEDKAADDEKRNEQNIIKTKVKTTNGNRKNGEINVIIM

SEQ ID NO: 152521 - protein, 33 aa, Heterodera glycines
MSPKWKNVTKMMIISPMATVKNQQAWSRVFIEA

SEQ ID NO: 152522 - protein, 70 aa, Heterodera glycines
MISKDAKNMDIKSQNMAIKYGPKIAKYGHKMAKMSKYGHKFFKIECKISSNLLVEIAYEIHFQIFFDSKI

SEQ ID NO: 152523 - protein, 47 aa, Heterodera glycines
LHRIAEKIRDQFPNVDRLIAKTKAVFVKAPYRVKKNLEMYLICNFNQ

SEQ ID NO: 152524 - protein, 68 aa, Heterodera glycines
MLNKKCVTFALFLLLSAAVLFVSGAKKSAIFIKTKSVNMISEIQGVKNKKLYRKACIVEFNLLNGYFF

SEQ ID NO: 152525 - protein, 25 aa, Heterodera glycines
MPFSPTLLREILISLIISQFSSITD

SEQ ID NO: 152526 - protein, 136 aa, Heterodera glycines
MVDDIPDQVSWTNLDPEHVVSQVTATFDLGTMRNFFMRSGIGKGYLERLCIDPLDPACPPTAPNHYGGTVLCDAIRHFEQRIVGVGQMTNRTIEDILAPYKSVDGTNNAGNKQKKQNTSPFDILQAFCEYCLRVYV

SEQ ID NO: 152527 - protein, 38 aa, Heterodera glycines
MSEKRNGTSIWAEISQNLPFSGQKWKKIATDLTCKNLY

SEQ ID NO: 152528 - protein, 201 aa, Heterodera glycines
MTNINIGMTMAQHQNPLRTKVPPKTIRAEALQSVILVASPTEVFRRFKVISAWARAFTDSLYNHAFNRRDIEQSARVVHPLASTSISDMLAEFCDFNYAIILAGYLLMLLYALYSQCRFDGCCSLGVESAVGLALAGVFTVTMASIAGLGLATWLGINFNAATTQIVPFLALGILGINFNAATTQIVPFLALGIGIINFFL

SEQ ID NO: 152529 - protein, 126 aa, Heterodera glycines
MFLLLHNYPQVVGNVARNELGFLMRETGMSILTTSFNNIFAFWAGTILPIPALRSFCGQRRKAGRRDLEFLCYYCLCVDDDDDDNVDAETAHKIRRSDVTGKKIGKLMGHHPDVSQSIRIQIEVVR

SEQ ID NO: 152530 - protein, 225 aa, Heterodera glycines
MLTHQFLSTGLHALFPSLNGTLPTANGADRAGLALLERDPLLCRASGGFRLFVRKFTDQQLLKCLRTPALNTLGQWAPPNLRYIHLLRSAWKKLTQFERFDWQELFEQYAKDGHDSTLGIVVDQNKQLLEASANKEDEQRLCQFQWLSTVDSEHLPCPLCSFGNQRRYAIGQLLVTKNGGMDMKHEICNTEICRHSFPKNGIYLLIKSFCFFVFLCQGFDSTHNN

SEQ ID NO: 152531 - protein, 60 aa, Heterodera glycines
MVYGQMSYIPNFCILPKQWGGVEFGWTFRALQHALVVDGPIPMLHGTVPFQFHRRVPTGA

SEQ ID NO: 152532 - protein, 47 aa, Heterodera glycines
IAEKIRDQFPNVDRLIAKTKAVFVKAPYRVKKFGNISHMQFQPINLK

SEQ ID NO: 152533 - protein, 28 aa, Heterodera glycines
LFNFFCFLRLVSSTIIDQFGRMCVKRKK

SEQ ID NO: 152534 - protein, 1065 aa, Heterodera glycines
LPMLPNLNAISPHHAVVQTLINSTPVRCLMDTCASLTVAPRSVADELNCRTFSSDLEAMSASGHVIRLKEYAQADSQILVDASIESSPNPKNSFCIDRPDISLIKKGLSVINSVSPAGQKQIKVAVVNPTMEPKWIWKGTHLAFVNELLCDRNGLLRENSTKEILTLISERKEMEIDPTFVVDFSRAMVKDKDLEKLKALIEEFSDVFSKFRYDLGLFTAAEHHITTTTEEPIASAPRRMPYKYKEELKKHINQLLEAGVMVESDTPWVTPIVIVQKKDGGIRPCLDFRKLNEVTVPDKYPLPRLDSIMERVGNCQFYSSLDLASGYFQIKLSEETSRKCGIITEDKVYQMITMPFGLKNATAAFSRAMAIVLSGLEDTSLAYVDDVLIFTKSPNFSEHLTAVRKVLERFRLYNLKLSPKKCIFASNEMNFLGFVLTAEGFKPSLSRIEILKEMPVPLNVKEVKIVLGQAGFYRRHIENFAMVVEPLLKLTRQGNKFEWGREQHNAFDKIKELLTQAPSLIFPDYDKAFHIFTDASSTGQGGVLMQKNDVTGTFSAISYCSRTLSAAERKWPAVQIEMSAIIYALREFRPFIFMSDIELHTDHKPLAFLLKKSETNQQLARWLIELQNYQVKIVHVAGKANTLADALSRAAEDKPLSEIYNVDELEDIIEFPVCLALAAHSRVVADPFLHTLTIRHEDGNTYEVNLLKEQAADPEAAAYISFVRDGEFPADLDEKEKELFADKGLPPRIYVPISLRGLIFESFHSSLLGGGHLNYRKTIAKEFCSMLYIDKKYACPHWSQGNASIERTFRTFHNILAKYISKTQPDFDEFLDAANFCYNTSVHASTGETPFFLMFGRDPIFCVDQIIDPKVRDPIAISDRNEFKQKLVVAIRHAWHAAADEYAKAQRKMKEQYDRKARPQQITIGDRVLIRNYDGRVGTSKKFQLPWRGIFRVIKIEGIYVTLISCTSPNSIPKRLHLNQIKKCFEILGPPCTTPMQPIEEQKCLENTPSVEEVSSERSEIRNEMDPESRKDENLDQIQARGPEKRPEIEAEAEKINKKTDMEPR

SEQ ID NO: 152535 - protein, 83 aa, Heterodera glycines
MPRLFCRLAMNPTESQSKGTSQRHPPANSKSYWTTQRQIQEKCGNRLALTLRGMQRQKLEPEEIAEKLRTNLEYISCKFLWGN

SEQ ID NO: 152536 - protein, 46 aa, Heterodera glycines; identical to SEQ ID NO: 129896

SEQ ID NO: 152537 - protein, 233 aa, Heterodera glycines
LATKYFFPIVNTNFLDFQVTFTGHSLGGALASLAAMRTVLEGMRRSDQIKLYTFSDQIKLYTFGQPRVGNVEFAFKHDELIPESFRVVFRMDIVAHMPPCAKNQHYEGVDENDSKPCDPSASNGIAYHHGTEIWYPYGMDPGDPYFECVGSPRDEDFHCSDSMSFEMSKYSIYISDHRHYFGHKVPAWGKLGCPEPTDEANSAEGEPTDEANSAEGGGIFQKLSQKFRSIGRI

SEQ ID NO: 152538 - protein, 159 aa, Heterodera glycines
MFQFFIFSTLFCLVQLFGRAIKYLIMWLICFKEERFCHSMADNSVYKCVHCNDPKQEKICVNLRTLFETVSVSAKSETRLTLTTESDKTETLPPCIEFVQTETNAQLNHRSTIKAKTEANKVDGADGEHVQIAVIKETSKVDNNSAAANNDKQLPVAVV

SEQ ID NO: 152539 - protein, 275 aa, Heterodera glycines
MPTVREILKSLQKRRTDAEQQIEGTSTRNNLDVASSDDEENCEPVQFKRGETILGALCLWYQGFRFIKNRKDGSWFRCEQRNCPATAKLEDNDLMTGILGAKGHHHGCAPSRYDAETKRNQMKRLIKEEPKTKPCQIRTDIDDEVFELLGSNEALDQMANRTKNKFVGGVNRADPLNIQIPPGLLIKNDESVLIYDSREVRTGQSDVVLIFSHSKASLPILMSFFKQNIQVSFINSKCFLFLQIRSVLSLALIPPVYVRHAFSIIVNAAPLGVQG

SEQ ID NO: 152540 - protein, 756 aa, Heterodera glycines
MSCSRPESIQQNEYVIETEQFSSQFSHMGMISNKKDTGKISRNQMTEEQRQIIMAKNAIAAKTYRKKVKNVDFLLLQASEQNTYNVELYELSEFKVKCKHCPAIHFSEEESKTSGANEFFDCCNYGKLCILEELIQEYPIELRILFQPELDKNNYTKIGEMHQDFLKNIRMLNSSFCCASLGCMKFKFPDKNIPIFKIQGGIYHSYNTFAQPDNNELPMNGQLYFIDTDQAMDYRINALNKKVVGDDKIIALIAYIESYLRQNYVYSQAYEMMKDVYENVLKEAKNDAIPELTMVFDVRKDVDLRRYNIPRSNEVCAIIWRDANDDIPAANVVVHTKGNKKLETIFPLSPLVEPMCYPIFYPNNYQGWNHTLKNSENKKISLCYFTKYKLFFRENGKFLPHHYSGKLFQQWIVDQAARVEWDRLNYIKQHQKEICKETYNAIDKFLFAKATEDGVHVKKKIILPSSFTGGPRNMYESFRSDIVARVFYLKITQFLKEIIDGQIFGRVSGFCYSIEFQKRGLPHLHMLLTLDGLNKWKETDDIDKFISAEIPDKCHDEILYELVTTLMTHGPCGQDFPNAVCWCQKKNKCNKKFPKNYREKTEINENGYPLYKRPNNGKTFLKKDWKTGKSMSMTNRDIVPYNRYLLKRFQAHINVEKVADIKAVKYIYKYIFKGYDAATVRCVTSGNENVKELVYDEAGSFLDARYLSPVEACWKIFKFPLQGKSHSVQRLPVHLENEQIIFFDENDEEETIIEKS

SEQ ID NO: 152541 - protein, 180 aa, Heterodera glycines
MSRLLDNAKSGAVFVSFGSFTNAQLMPSKMKMAFLNAMEQFSEVEFIWKFELTEEDTKVFAKYRNVHTMKWTDQKAILSGKFQILRNPSFRRNAQILKRKFQLTPFEPKDKLVRWVEFAAQFGELNELNLPWDDQLGLLAFYSVDVPLFAVSFVFFAWIAFKMTTLLVKCLLSKRKEKNT

SEQ ID NO: 152542 - protein, 61 aa, Heterodera glycines
MLIITSHPMDFFSLLILKLAFLSLFGAFAEVPKKRLKSVGVFADFDMESHAIHGHNCGHFG

SEQ ID NO: 152543 - protein, 66 aa, Heterodera glycines
MLLFSSLLLVLLSALLSLLCCVQLCRRSKSSTHCTDVHELMAIAAEAGGPVVSDGRGGHCGGNRIS

SEQ ID NO: 152544 - protein, 32 aa, Heterodera glycines
ILSVKSAFGILMSKSGTVNDILCFSCWIHGKK

SEQ ID NO: 152545 - protein, 48 aa, Heterodera glycines
MTFYASLVGYTGRNNKILSVKSAFGIFMSKSVTVNDILCFSCWIHGKK

SEQ ID NO: 152546 - protein, 277 aa, Heterodera glycines
MEEFVGIYQFNSHPNLSGVPGLYPLKFPSHARISDWNKPNVNRGTLAMEIKKLSEFAREKEGTSRFSDAVPIKGFQWKIWAQIRTKKDSTEKWLGFILKCDASKEDENWNCICSATFRIVSQMRGTEDLIGKCNDHFFNIKIGICGFHGFITFEVSGKFGMPFKWFLLIKQLMDPSRGLYDKNEDKVTLTIDIAVEDQKSKKFDSDPNKPNGKIVMEIGKLSEFAREIFLSERSSEPVIIKGLPWKILTLINMKKDSTEKSLGFFLRCTAPREGWDN

SEQ ID NO: 152547 - protein, 121 aa, Heterodera glycines
MQRFLWAVWASLNTAEGTTEKCLVFCLLCGAQTKDENGSCKVTATLRIVSKKGEAEDFTGKLNDQIFDNKLVIFSIGHITLTQLMDQNRGFYDKDEDKVTVTVEITVEEEKKGTKRKLPDE

SEQ ID NO: 152548 - protein, 97 aa, Heterodera glycines
MRRRAQKREVISIRTTALGRERWHKRKLRRGKCDKGSFGLAKHFWNLAKIGRDLNIPCNLIKIAHLTEECPTPKCPPNRTLPIGTLRKYTLCINYTL

SEQ ID NO: 152549 - protein, 56 aa, Heterodera glycines
MQNFFLYRYVKFGVDLTSRKKVKQDEVNVVLYIIKNEEIVRKIFFIDKNLTNKTLI

SEQ ID NO: 152550 - protein, 20 aa, Heterodera glycines
MDGKPNLETEFYLKNNWIFS

SEQ ID NO: 152551 - protein, 86 aa, Heterodera glycines
MGKISLKLFLVNFFAVIYVAVEAMYYCTHFVYESRQNLCPPTDPPLTYYASVHLCCKEDSEFGMALIYRTFATEPPTTFPQGCREN

SEQ ID NO: 152552 - protein, 27 aa, Heterodera glycines
MALVETHEKHVVFFVVVKKNVFKISNI

SEQ ID NO: 152553 - protein, 127 aa, Heterodera glycines
MHSLLLLVNVTVYMIILLHFMPNENGLANAIPATLNGGDALLLRKKREDEDGAGEGEEGGGDDAEGAQEDAEGGEDEEKADEDGAEDEAKENEDGDDKEDKDEDGKDGEEGEECQIGDNWTGEHSTD

SEQ ID NO: 152554 - protein, 105 aa, Heterodera glycines
IVIVKPKLNLFMFFVNLAAILIFLQFYLDLTEAGIECQPNGVCRDVSGSTPASTVCSKKCYSCTYKNCCNKVYTSQYAKCSIKGWRKKGYIGNVPVEIGATKKQT

SEQ ID NO: 152555 - protein, 156 aa, Heterodera glycines
MDKPRQRLAEANTTATDDAAHCSANCDERHDDHPLLLSFGEDEEEGTATSAAADNGRDNMNNHNGGEQVGGTAANGVGGNECGDSLGVSAGGSGGGGADDANFFLCSPLIYSEPALPSAFANGGAGAGGPTIGASWAYSEIALPQVLQFSLVWVMI

SEQ ID NO: 152556 - protein, 179 aa, Heterodera glycines
MDSASDAIRQLQRAMREQQQMIFLLRSQIIDQRAVLLQNMTRIESTEGYLANSRGNQRFSPRYSPMAGVELSLLGRRLEERERRQQSRLEQLTPLSSRSGSNGTLQNRTNVSNVAGPSTASDGDDERENGPVLSAVIEGHMNRSRMRLIRDEMVHRAVQQQLEHQHHLLLQQAQQQQQR

SEQ ID NO: 152557 - protein, 448 aa, Heterodera glycines
IRLPSIPCQILFVFSAFMARLRCQFSPQSYPDPRIDPLSCRLLLPSQVIDPLSCRLLLPSQVCDPSEILTPDERRILNEKIVRLQQITANIKNTSPACADTTKLQQITANIKNTSPACADTTKSTNLFIMVALVDRLSNASDHSANIEKFTNQLRSKYQHFQDISLCDPLVLIVDISLCDPLVLIVNAHGDRQVFTVAGRDAKLSREVLQAAFQRNVGHFRGGNYALGLEGMAEYTVSAYGAAHIVQVPSSGRAEVSVGTTKTAKRLINCPSKHEERDEKQRKFNGPSTVSYGMGQFVAHGVRQQQRPTTEKKFHIESIPEEDRLWTRILAKAMAQCGGEEQEMVKYAQTVVEDAMDISLKLISDPHYNRIEEDAMDISLKLISDPHYNRIEEDSQSMENGLNAREKAWQSIKGHLEQIYAKYGGQIQMNAAEQCPGPKRGEKTLKIL

SEQ ID NO: 152558 - protein, 98 aa, Heterodera glycines
MATGLLLKRRQLLQRLQVLFCAAAAAANSQQNSYSTKKDGQVIGPQLDALLSQQQTNEVNSAEPSNQQKQNATGNEEGGGTRKRNREEAGLEQDGSEN

SEQ ID NO: 152559 - protein, 162 aa, Heterodera glycines
MALAQNAQITTEENCEKLHGKNGVGETATEEETMDECAFVTEPLIEAGQDLATSVQCTRDGSPLSSRSMDAVLLIKKALEEEDEAKDGKDDSGTEEEQIWGKGSQIDTDENGGKGGRSDIEQSQKRAKMGSESNGQIKEEDKSEKSASEGTLAEEKANANGR

SEQ ID NO: 152560 - protein, 146 aa, Heterodera glycines
VVLFDQWHSSSELAEQQVDSLRNAVAKLETCDADAVARLSASVARFETGNFAKLKESGQRIIRPLSLERKRKIEVKVAAIERELGFNKSSIQHHSKNSLQIIDKEVLGVREWIEERDKDADLVGTLLKHGEKKHIDEIDALMARSK

SEQ ID NO: 152561 - protein, 454 aa, Heterodera glycines
TRPIPPEELRMRKLWWEGPNWLSQIPENWPDEQGHFTSSESVAPEPIVCAAVIPPPIVLFDRFGSWEKLIRTASFVVKFLSKLGKKRQLFTKIEGEGIFEYVNQKFIKNWLFKIIQRGMNPPTQYLDKNGVIRLNSRLSNIDDKDAHPIVIPTNSPVLSLLIRHSHIMLKHAGVDATLTDFLKFWCKKARRTVRKVITECNTCKKDRAVKFGLPPMPPLPKSRTHPSLAFENVGIDFLGPTLYKAVNSGPNKAWILLITCLACRAVHLELVNSLSADHFLLAFRRFVARRGLPKGILSDNGSQFVLSKNVLQMHRILHKWTLIPAFSPWSGGVYERLNALIKNCFRRILGRRILNWEEIVTFLTEVEASLNSRPITFVSDEIDGPIPLRPIDFLSPKVNLSFEEPEISDQAEKLAARWWATAKSIRQFWKKWSQEYLLMLGQRNQTNHKGATDH

SEQ ID NO: 152562 - protein, 102 aa, Heterodera glycines
MSNFIFVAFLTAAFFSSGLALPAPYDAESVVSSELNVPLLSADANVQAAITIENVEIQIPSIPAPIEQQTAAHITHPTETGNEPSIGAQHIPFSIMNREFRN

SEQ ID NO: 152563 - protein, 194 aa, Heterodera glycines
MDADQLKQILDAVLAKSEKRIQQMMNAQQNVGPSESLSHANLASSIDGRISKFHYDSESGNTFEQWFKRFGILIEEDGKDLPELAKVRLLLGKLSDEEYNKYRDSISPTQPDTVNWKESIDKLKGLFSETRSLFVRRYECFRIRQQPNQDVSTLIAHINASCENANMSLTKEQLKCMILVIALSDDQHDMRQKC

SEQ ID NO: 152564 - protein, 174 aa, Heterodera glycines
MFLWRPSQNNQRYAFTPLLDNSEDENEDEVEEDELFTKSGGQRPAIFDAVQKRGAGEAKNEGEKATAEGANGAVGDDRLAEKVKKNLWRKFLSRNLEKTSEKVRNPKKFRSAAKLNYGLKIRGGWGFAKASQIHSSRQEDLKWIETNIPTSLAEALIDDEEEKEQRELEMSKML

SEQ ID NO: 152565 - protein, 111 aa, Heterodera glycines
MFRVALFPLTCTLTQHVGCQGLIIDKMGYLRSKPWHFCGCSNTTKTAIKMVVLTNLATYEKENNFREYNYKSWCDTIRSIDWTHKSRLDAQTVLEPKKYLIIEIIEGYRQK

SEQ ID NO: 152566 - protein, 42 aa, Heterodera glycines
YEVSTPPTPIWCATNAMGAAQIAATMAPAFSCARNTVPTRGS

SEQ ID NO: 152567 - protein, 20 aa, Heterodera glycines
MCFFVKKGQKFYTNVQKWKF

SEQ ID NO: 152568 - protein, 150 aa, Heterodera glycines
GKLLAQKGRQNAAAAEIETIPARSCCCSTSAAAGGAKIQNSAEPKLPPPAAKLFELAHFEQEIRQIATKWNLNFSEKRGSYLFLPPKDTKAFKDGVLLSLTDRGDHIRMDEFHSARSQVDKIQRWPKERGHATVMRLASDQCAKMFANSS

SEQ ID NO: 152569 - protein, 204 aa, Heterodera glycines
MLMLNGRASFVSAFIFQQLVIFVVVGADPFFVVSTDDSSEQDDMAKALALSNRFFWRNMMAKWGCQYGIKIQPNQIRAKSVDELKRICESWKIKALAADAYVKSWECMVKKQQQQHVRNGGASSSTSSAPATISTAIIHDQMREEDVEFFRFDCLCVKPRFQVQLGELQLSSAMELVKAAYRILFGWSEAEGPIVGVRESPIKK

SEQ ID NO: 152570 - protein, 68 aa, Heterodera glycines
MDLRTVAQIRKLKIIGILTSLKMSTIENRNHEPRNDRNRLSKIGNPNQHSVYSLLVYSLMNRDPIFRL

SEQ ID NO: 152571 - protein, 195 aa, Heterodera glycines
MGKYDTMGLKQLDKKLTECMNELKKYENVNKKALDQFMWVLFFIFSLRVNSQNVQFRRASTQKEELTKRVEELQNNEKVSFTGTQEVREISALSGGQKTLVALALIFAIQKCDPAPFYLFDEIDAALDQEHRRAVAEMIHELSEIAQFITTTFRAELLEHAEKFYGVRFRDKMSYIDDISQQQAQDFVQDDQTHS

SEQ ID NO: 152572 - protein, 125 aa, Heterodera glycines
MKGHKETLISEYSNQKYEAHLGIMHYMRKNWQCDKIADEFEEYERTECQNFRNYWDILYEYLSREYVGIPTMMPKFVFKMQIEIEGPITYALNCLARIWHFYFTLWSKIYEYKFNKLFNHWFEPK

SEQ ID NO: 152573 - protein, 88 aa, Heterodera glycines
MKPKIVLPNELLFEAICFVPFHKKWSTIRVCVVFDHFLLKRMAQFLISYKNTDYFVPLIVSNLRQIFERLLVLRHLRMLAMCHYSTVL

SEQ ID NO: 152574 - protein, 19 aa, Heterodera glycines
SDTRHLCTCDEWFWWWCCG

SEQ ID NO: 152575 - protein, 55 aa, Heterodera glycines
LPPPPALTGLLTVNKPKVLEKLLEGQVLGPESAVIENDLSTASSGPGPKHVQLST

SEQ ID NO: 152576 - protein, 213 aa, Heterodera glycines
MIIINFSVILFVLISPILPSAFISICVRPNTLSYVGRLMCKSNNIMHEINKKTAEKEDAVTGRYSCISLWVDFRKCDQNETNAMIKITKTDTNETKIFEVQKTDLSFSDLPIVLPFGDQPSTDKTFNFKSKIPWINEGDTLGIKIGCDVGLEDYEHYAIGSAIYPEKINGQLASIHITVKLYGDMIKVVHLCGMFGDINNKIEIAIIQNGKWR

SEQ ID NO: 152577 - protein, 209 aa, Heterodera glycines
VVTLMNRSTGEAQKAASDILARFKESADSWTKVDTILEFSDLLETKYFGLQILEHLIQTRWKALPRDQCEGIKGYIVNMILDISADPEKSERMKLLLQKLNLVLVQIVKHEWPRLWPTFISDIVGSSRNGQSLCMNNMAILRLLSEEVFDFGTGLTSSRAIQLKQQFCGQFEEVYRLCYEILENSDNAQLVYATLYTLHGFLDWIPVGY

SEQ ID NO: 152578 - protein, 73 aa, Heterodera glycines
MPFLQSKILREHYRTDPDPSPVVKQRALPPKCHLTVEFEKKDELLGPKEKKWKEKDERSKEKEAKRRERLGTI

SEQ ID NO: 152579 - protein, 279 aa, Heterodera glycines
MNLWMLILMFGPIHSVRIRKHWVKGQLNDEVNRKDFEHNVTDHSCANANHSADQIANFVLSDQSKNCGKDRNVFDQSQQSDEPNDRDEKANHSVDSLESDQCLSNKSKSERKCKFADHQKLRITNQYNHFISAYLRKGNHSKNEWGNFLKKLANVLGVKGRTIIKWKKQLGIDVEKKHTDEERMAKLEIYYKIKRQNPKMALMDVAEELGISMGTLINWKSEFKDIGQSVNQSEESIKQQRKSSKKGQASISPTKSFSSNDAFWAWKKSAKKRTVRIVL

SEQ ID NO: 152580 - protein, 163 aa, Heterodera glycines
MAPLFIFLFVLLAVEKSIGPLSPNCKLPKTESQRKVSVNSAQQIVSDERKVSSSELEKVPGAFLEFSLPVEKHQNSLGQYLAELSNYYHSARLHVPPSTIARVLLRMKNEMNFHCIKTSATELPYPQPWKTFVSKKNRTIPTEWAETFASLSLTSAKFVVKVN

SEQ ID NO: 152581 - protein, 33 aa, Heterodera glycines
MTTNTTDSNWNSSFVLMKMDDNDQSERDCVEIK

SEQ ID NO: 152582 - protein, 53 aa, Heterodera glycines
GVSLCFSTLTLSAISIDRFRLIVTPLRQSIQKRCACRIVALNTAISLIISYDN

SEQ ID NO: 152583 - protein, 149 aa, Heterodera glycines
GTTLKLRGLLTKQTSQNQDVSFVFTNESRIGFVEKKKPEKLALKLSDFTRRLCECNLRLSVSRKQAPINLSKKQDGTMVIDQENKAQLIFPNSVKLKIGQEIALKMTNVEVNEVGVVTLIVYDENTIEVHEEKTINSHLNNLEYPTIGK

SEQ ID NO: 152584 - protein, 167 aa, Heterodera glycines
MSTREEIQAVCVQSLKQLKIGVGEEELQNGKDFYKFFFTNYPTLRVYFFTNYPTLRVYFKGAEKYEAEDVQKSERFEKQGQRILVAMHLIANVYSNEMLFNAYVRETVNRHRQFKMEPSLWKFWTVWTGFLETKVDLTEQAKSAWMSLGEDFAKEALAHLKRLGIPH

SEQ ID NO: 152585 - protein, 97 aa, Heterodera glycines
MATNLTVTGTVIVDLISTGLINAGFKQFTFVCKLITALLITRLLLLARFRPAVLRVPELSRALRTFLCFHLAGAIVTMPYNAYVPIAYYTSLENEDV

SEQ ID NO: 152586 - protein, 17 aa, Heterodera glycines
VPVPVKKVGPGPDFSGP

SEQ ID NO: 152587 - protein, 26 aa, Heterodera glycines
MLRASGTEPAFDNNKISRETSRKNAY

SEQ ID NO: 152588 - protein, 57 aa, Heterodera glycines
MDSSSNTQSPAVALTDTNTAGAIAVEMVSDEYAAMPRCFNGSAGPSTVQKIWKNPSK

SEQ ID NO: 152589 - protein, 108 aa, Heterodera glycines
MALLALYPFLHCAAFDSGETSAEMAEEMNRMSAGKAEFVSFEEVIALERPAAGDNGFGTSASVPPSLASTIHSGFIVLCFRLLDGQTDSNSQLENTWLSWTGANEIYK

SEQ ID NO: 152590 - protein, 140 aa, Heterodera glycines
MDGKVKNKREASKRQNKGEASKRHPTDDPNKPKDPFFGQTLKRHSFRVPNKTTHIPFIFFKLIFDSLFLSNFKLIKVTFTKYFLERDIPIGIYGIVCINLPVFAQYQRGVHPTLSGPFSVDSRPIAKRTPNCFRLVLCFE

SEQ ID NO: 152591 - protein, 116 aa, Heterodera glycines
FYPDNGSDPFELCVYISEAGDNIYHSVPTSIDEIVKQVPSFPSLLIGLSFPWLLDYSKQRTKRKQFGVRFAIGRLSTENGPESLKECEYLRHEDEILEKLNHNLSYLVRERNNSEA

SEQ ID NO: 152592 - protein, 161 aa, Heterodera glycines
MKGTISYPLVLLCLVFLALFAFSCNTTNDGKDKQKDKEKSKTNDERRMLVEQLMQIEAYLQFPAQQQWTVFNLARKYGIMDKEALINLVEEQWKNYKLEWDVERNNLIQQQLIQSFGPPKPAEEGMPISSALQQWQSQTGQQNSLNQLTPTTGKFVNFGVI

SEQ ID NO: 152593 - protein, 186 aa, Heterodera glycines
MDPGTGFCVIYEKHKLPNCVCPVLRRRFDFVTFRRICILAGCDYLQGGLQGVGLKTAEEVFTKASSHATLPSVLVRLQLYTNKRLKENLLDNEKKYHYAGEPKKSLVKRSADNESISTHCHDERKRTNKGEIDTIFTKRRRFSEIQIGSAAPRNGAYTNWTARDWMRIYGQLTQKEGEEEENSSSR

SEQ ID NO: 152594 - protein, 52 aa, Heterodera glycines
MGQNGGQNDNGEAMPHNQQNTVEQFEALLRRVDKQYVWAKMANLTGIYELII

SEQ ID NO: 152595 - protein, 113 aa, Heterodera glycines
MPREENKDIEEERRAKTAYDLMRIRLKRLEKNIDKPVPIPTRREEPKPRPPPEFVRNVVGSSAAAGSAEFHIFRNNKRRELERLEYIEKMAVKDEKDKEFEERRKARRDEEEK

SEQ ID NO: 152596 - protein, 399 aa, Heterodera glycines
MPAPNDIPSLRSFLGMVNHYQQYVKNMRFIRKPLDDLLKKEIDWSWSEGCENAFRKIKEILASDLLLTHYDPKMEIIVAADASELGIGAVIYHKFQDGNIKAIAHASKSLAPAEKNYSQIEKEGLALIFAVQKFHKMIYGRHFTLQTDHKPLVSIFGSKKGIRQCSANRLLRWSLILLAYDFTIEYINTKDFGQADALSRLIAKGNEPEDEKIIAMINAETDFETNFDNTISKLPLKFSDLIAASERDENIFQVQKFVKNGWPNEKAMDKENQIVRDLCRRKEELSTEKGCLMYGERVVIPKVFQSKILKLLHKGHPGMKRMKQLARQYVFWPKIDQDIEDFVHECVPCQAAAKAPIKTNLQSWPKTTGPWQRVHMDFAGPFFGKHFLIVVDSFSKYPE

SEQ ID NO: 152597 - protein, 108 aa, Heterodera glycines
MMFNQTIKEVDNLDILNTEKDVFDSADQNDADDGQFPPVEECDDDDPDLFAVRAVPDIDDPPSPPDSDEISAGIRTAPIRQAGERRIKQLTIKYNNNKKKEKLLAFIY

SEQ ID NO: 152598 - protein, 209 aa, Heterodera glycines
MASKVIDEETNEEKYVLKQVEQITALWAATALLRVLRHSTGECCPLPASTRHCRWCRRIKLAKCLRRHCTKHGKSMRKRGQTVQKHLEDSDNKKKKRMNIILEAFGNTEAVILFLHNPYRDYLLIEAREVQHDLEKIADGKVQCFFLTLKQAKERLTFPDDSDSAILDNKYVVAVALSRYTAYATSDEIVTARALRRSNAIVKKKNIFI

SEQ ID NO: 152599 - protein, 98 aa, Heterodera glycines
MLFLSSEGPLPPCDVLFTLHKGTLFALLDGTVSPLCAYLEGRVQIEGPVADAALLKHLAYAIGGVSATQPPQAAEEGMMGMEHAQEGEKGGGGQILDI

SEQ ID NO: 152600 - protein, 65 aa, Heterodera glycines
MLPITLPNRSTCRRLGAAVPSRNVINSCSLNARRPFAPNLSRHCANDSQLNSTDWSSQSEDRSAL

SEQ ID NO: 152601 - protein, 72 aa, Heterodera glycines
FLSKKFFFGFFGAVPLNRCAQIYGETESFGNSFPIACTLILRWIFAPHNCLSTPNGHLKNRFFCFRCSPPEP

SEQ ID NO: 152602 - protein, 2445 aa, Heterodera glycines
MKADEQLKSVVNEAKSIFKAAGMIIREFYGTDIEGLKQLPAEDLAKELEETKVLGIAWKPKHNRIAFKLPIFEGTITKRTILSHIAKVYDPLGLMSPALLSAKLFLQEVQNANSKWDETLSSHLVKTWLKIVETWSHSGTPINVEFPRFIPSTTKDEFHCFCDASNYGLGIAIYQKADTTYAKSECNLIFAKSLVKPLKLVAHDSTIPKLELQALTLGVKAVNFIQQQLNFDDKQVILWTDSQCSVERLKDGRKSDRFVTNRLNKIRAANFQVRHVRTDSNPADLASRGIDPRSIQASLLWRFGPIWLSKSDQWPESNVIYQPGEEIKAYEEVPIVEISCAVQEKQKFKPTIQFERFSNWNRLRATAAYANRFILRLLRAKRRNKQLPQNIQINGPLKAHELQLAEEWILTETQSTYPPTEDQIRDLRLFKVGRLWRCGGRLDNAESLSFDNKHPIFLPPDGWITKLIIRHYDQQHKHCGPRILLSQIREKFWIPRGRKTIQQVLNSPRHGCLKCRKERAKPYSYPEAPDLPAQRVNQARPFNSTGIDYFGPLKVKRGAEVVKIYVALFTCLVIRAIHLEIAEDYSAEAFIRTFRRFVSRRGTPTLIMTDQGSNFVAGSKIIKEHWTDTLLPEHVQTRLAHQGITWKFNTAHAPWKGGTWERLVGITKNSLRRTIGRNLLGFDEMQTLICEIEAIVNNRPLTFESDQEPYQSLRPINFLIPYEQIVINFPLLDENFNDPDFEPRTSNRNQLVTMLRKTSTLLDRFWHTWKTDYLFSLRETDRSNATNRFLHPKEGDVVIVGDDDQPRSLWSLARVIQLHKGRDNQIRSALLSINGQHRSRAINQLYCLEIPDSSETEAPAHTEVIAPIMASESIEVISLASSDDQMSDDYHIPKKKNVIKRKQRFITGHNVGLREVEQRPTDNDPVEGLLYSKRPDNKTKFFKDGNLKMLLESITLFKRIEGKKMAEKLLELYGKVPMIEWDKRLAKYEAKLRKMDEARDKKDKERENQRREKRKLDEEEEPEKRKKISVETDPLEETDPKKERQLQDENRIRWSAQRKAAVDELRQRIKLRKKQWSREEIEKEMKESEKEDQTQLRELAKNGSKEATQLLETAPSLRQQSNVQVTATIQRKAEDYPQNGEKVLKFCQRMYQDNLMSAWRRNRVQKELTQLLEDGRFKLRHVNGQQAILHRITEGKKDLCGEFLIGRICSWHYLDEIEFEDTKEPPPAQRDSTPEITVVETKNDQDRQQDEPQFVTIRAGRTPPPLFIPQRSKSPSPQFIVHRAAHTPPPAHRDSTQTQLVEEYHLAKSKPNTFVDFNIFTECDETHLTCAKNATYGQIADKHNREKIEEFVNCRARTLFEAIMLHWLNCNINRPNNEVWAMHELHTQQFDTLEESAKFFHQQQIVMRKRDIGKDKHFKEAIEIWRNSCDLFNENFQHVNKQLKFSPTHSPEMQKTDYAKWIERINQRTNEISSKERSRMQFPDFIYFNVRTILIGDNTAEALQSHFPKSRWYTHFADQPLRLTLGPQVKHAIFAYQSTDEDMIRQITPLLYQHKNTDIETTLILRKDNNNDWLYNKKEFIGLTKRLEAGFFVFNARIGEAKELADRMKETMEESMQLNTEPTTSNLAGNKKPYRKGFTVGQRMLNSLMLFSLFMLIALQGASAQPIRQKRFGGVGVWHGSHAISQLWGNNATRERFSTFSPSVQRYISRVFALNATATLPTVPTSSTAHTTPISTTPPPFTTTKPPAITIKPPISTTTRQWKTTKLRTTQTLPPTSTETPITRTNRPKIQPPLFFAQRQSQWKGDPINAKGMDIFWCTDRGSTICELKGPENSPFCRPPPVLTAKWTALTITLYTKIHRPETVQSGWNCAVRRISEVYYTNLIGDKFVDVNKTFLPVSKTMCRQMALHQICPMAKTEMTQTSKNTWTTNDELSVNFPGPIEGLFKGSQTSETTNCFVQPATLFVKRHNLQLLSPVHHVEHCDYSSGFCQLPDNTTIMWKPDCPAEGCYTCDFEKAEQIRGEFTKTRGQTSAIWISEDRQKALTFTDSTAIMACDGKSIVLSEQNFGIRKEQYDALMDNDHSRTKRFVEPEQLASQLSAAQIATNMALSQLYMKECQRNFRVANPTLQARKLLNRENLQARWIGETTIEVFPCVNITLTDISYRATKSCYKFIPVTVHLPNATMDAFLDPEMRILSLVTHIASCTHFRYHHLQLKKNPSIWLRIDVNFGIAKRLPQSAVHELYESIQNQTNNDFELNPLIFHQWQLSNDTDNAIFPHIDEFADLTDFKSKLEQHQTARAEALGAIPGGLEGWTIRKVKEWLNELINWWMRLACAYATFLLLRDVILPCIFAYLINPVRVTFMSLVGFRPRRQPLPQRRCFDEVVPMRQLPRAPKRPSIRLRADRPSSPIALDFDSRSATYRSRASSLTIDTPFGKSQPFKLADDD

SEQ ID NO: 152603 - protein, 1238 aa, Heterodera glycines
MASPIQQKLGAALKVISHVRTAAALTIATDPTASNFENALNFEAQLEKVQKEAKTLEIFLDDIRESLSSWTDLLRKLPATERETGETEFNAYNKKEKITDKVDDASSKLRDLRDLNGTLSIHAKLFRNKYDMEERATQAAQAQAAPATQGRTIPPSRPSSFFQIQPVQLERFSGSKRQWPEFYESFKSATGSHSLSKAEKFNILRNLLTGEARELVAGFRLEDANYDVVLQLLKDTYGAHDEHIRSLHFELANLRTCKTLRDTKEFLLQLERLTRELLNAGADIEGPPTYLMLEKKLTPPFLRTILNKKGEDPDHWNTSKFRNILNEAVRKETQIQEVMTEYGHHQQQRPTKPFIAGPRFRDRAPFNQFRERSFIASAVDENQRRFSNKQLAPKIAHNGPKPTQFAQRTQHNPAKPNQFNRPSQPQTSGNSQSNANPPRPCVFCNGNHWNSDCRKFSTIQQRVEIVKSKGLCFKCLFAHRTFDCPKPRKCFKCGQLHPTALCRNINAQNQIAAATIMPHLSIPSPQPIENAAIQTQPMCNAVNATDTRALLMTTTATIFNPAQPHLSMIASIFIDPGSHRSFVSNHTAQRLDLPIVNTEECLLTSFGERMPKKYISDMVKLGFLCINGERLIFNLNALQFLVNEMPMIQLSELDRDQLKQRKLTPPHEMKQPDILLGIDVWHELQVQFIERLPSGFTLCRSKMGKILSGTGRMEMGQASNVTFVLAVQDNQMAQASTTQSIEIEDNIFTSEDDLKRDDQLNSFFGLHLIGMDDSSTPIDRDEVMVNFKKNLTFINNRYQIALPWNDKVGTLPTNYHQAKARLIGLINKLRSLNLINEYQAILDDQLQKSVIELVEMPDQSIGPVHYLPHRAVIRADKATTKLRIVMDASAKPKSNPSAPSLNECLYTGPLLLKDLTGILLRFRRMERVLLADIEKAFLQLGVREQDRDTTRFLWLSNPKEAELNPLKREDILVFRYSRVSFGLTVSPFLLNATIREHLSLFDNDLAKRIDENLYVDNILIEMKADEQLKSVVNEAKSIFKAAGMIIREFYGTDIEGLKQLPAEDLAKELEETKVLGIAWKPKHNRIAFKLPIFEGTITKRTILSHIAKVYDPLGLMSPALLSAKLFLQEVQNANSKWDEPLSSHLVKTWLKIVETWSHSGTPINVEFPRFIPSTTKDEFHCFCDASNYGLGIAIYQKADTTYAKSECNLIFAKSLVKPLKLVAHDSTIPKLELQALTL

SEQ ID NO: 152604 - protein, 168 aa, Heterodera glycines
NDLAKRIDENLYVDNILIEMKADEQLKSVVNEAKSIFKAAGMIIREFYGTDIEGLKQLPAEDLAKELEETKVLGIAWKPKHNRIAFKLPIFEGTITKRTILSHIAKVYDPLGLMSPALLSAKLFLQEVQNANSKWDETLSSHLVKTWLKIVETWSHSGTPINVEFPRF

SEQ ID NO: 152605 - protein, 31 aa, Heterodera glycines
FEHASPKFVCGVGVGEWSIGKMCPNSKANKN

SEQ ID NO: 152606 - protein, 64 aa, Heterodera glycines; identical to SEQ ID NO: 129150

SEQ ID NO: 152607 - protein, 217 aa, Heterodera glycines
NHWNSDCRKFSTIQQRVEIVKSKGLCFKCLFAHRTFDCPKPRKCFKCGQLHPTALCRNINAQNQIAAATIMPHLSIPSPQPIENAAIQTQPMCNAVNATDTRALLMTTTATIFNPAQPHLSMIASIFIDPGSHRSFVSNHTAQRLDLPIVNTEECLLTSFGERMPKKYISDMVKLGFLCINGERLIFNLNALQFLVNEMPMIQLSELDRDQLKQRKL

SEQ ID NO: 152608 - protein, 212 aa, Heterodera glycines
KEAELNPLKREDILVFRYSRVSFGLTVSPFLLNATIREHLSLFDNDLAKRIDENLYVDNILIEMKADEQLKSVVNEAKSIFKAAGMIIREFYGTDIEGLKQLPAEDLAKELEETKVLGIAWKPKHNRIAFKLPIFEGTITKRTILSHIAKVYDPLGLMSPALLSAKLFLQEVQNANSKWDEPLSSHLVKTWLKIVETWSHSGTPINVEFPRF

SEQ ID NO: 152609 - protein, 68 aa, Heterodera glycines
MAAASGCTAAASAAGSSGRGNDCADNDGDDAEEKPVKSWLIFFPFIATIFKFCGEGKNGEVGEGHLGD

SEQ ID NO: 152610 - protein, 54 aa, Heterodera glycines
MPEKAAPIEPPPPSPQLACAAHATVPEASFAAAFDAVAAVASQIVGIKSISEKT

SEQ ID NO: 152611 - protein, 62 aa, Heterodera glycines
MEVAKSKQFGVLPPPTPPMALPTEPGVCTAPPVAPDDATLLTGVVKKQKNTPPAERGDLALI

SEQ ID NO: 152612 - protein, 119 aa, Heterodera glycines
MSRSPPADSSPSSRSTPTSGGGTMPLPSFTPAAVINDHHYPATANSTTAFGNHTAGTGGSVVQTSSIASSPEQPGATTAATTPTTVNAVPSIVFKDLRAFQLNSLELRDVETVKAAFSL

SEQ ID NO: 152613 - protein, 27 aa, Heterodera glycines
MEEELRKSAANNMAGPCKNIAELMLLL

SEQ ID NO: 152614 - protein, 83 aa, Heterodera glycines
MKNEEEKKKHELKHNSAETKTKQKTKMEKNRKEIEKMGAKLNNLQRHAIQLKILEFLLTSDELFRINHRFDERVTKRNTLQHS

SEQ ID NO: 152615 - protein, 196 aa, Heterodera glycines
MYPRGLIDPEYKCKHFEDSERGFSTTVTHIELEAALRSGYKVMHVCRAYIWRLVCDWSNGLFHSYLLKFLKMKFEASGYPAKCTEAGISEEESARRKQEHIDKAKEKAQVHLEADRIKHNPGLRYLSKLCLNSLWGRFALRNRLTKTEIVECHAELAKLLNDSKIEVSSIDKLTEKFWMVCYKAKDEHWWNTARAT

SEQ ID NO: 152616 - protein, 507 aa, Heterodera glycines
MPFHQQTQHTAKCKWKCHNCLRVGSAFRGNCVQGNDNFFETCLGCNKDQDKKKGHVCGQKFCKICLGFHDPRDCYIPYRPKVKKEKRFVFFDFECTTDFKPDPQLMRFKHQVNFCFAHVTCTRCIEKGVWDQELEKACALCGRFRTYAWSPFEFWHTDVECRKVVEDPLAAFTKWLLNFETEVLGMEPGAKKRRKRKNIDNTDGEAMEADEEEDAVDEDAENNWMLGYEEAGEKPESVTTYAYAHAGSRYDHVLIYGEMLRMGVRPELIRQGNHLLEMKARKTGVYTPTVFRDSYKLIPIKLANFVKTFGLEIEGVENKKYFPHKFNKAENYGTVLDTLPPIENYYPGGLFPAERAKFEQWYDENRETGFELSEVIADYCKTDVQILAHGMVKMRQLFLSETRHDITDSVTIPSGCMKYWVQLAHHYKESVAIIPHLGYEKRGKQSTIARKYLKVPKNDYKFTFCHFSVACRRRVAREWPSPAPCRKALEGSSKSATTALDGDDGAP

SEQ ID NO: 152617 - protein, 97 aa, Heterodera glycines
RSGSERKAKRTTSEQTPPQTQPSPAEEVEPKAQQRIAAAGAKALLVGRKLDDKIRSSSNSMDKKSENGAMEQTLEFRPQHNSSEIPPVVFQMESLET

SEQ ID NO: 152618 - protein, 115 aa, Heterodera glycines
SSHPLTFISLPISNENYCNKFTNCTKHYFGNVPIILVGNKKDLRNDQQTIRDLSRNKQEPVKSEQGKAIAEQIGAYAYLECSAKTKEGGIREVFEKATQAALQQKKKKKKGCNVL

SEQ ID NO: 152619 - protein, 30 aa, Heterodera glycines
MAKNGGKGEEKQPNDKLIAQKHILELISIN

SEQ ID NO: 152620 - protein, 72 aa, Heterodera glycines
MRLSQVGTKPKTEFGLEIRSVFHIVPCHKVGRRIVFGEIGLTLIIMDEIIIKLLIMKNGKNAETMAKRMAKN

SEQ ID NO: 152621 - protein, 104 aa, Heterodera glycines
MRKKYATKKVIRADIMPKMIGEPLKFMHFDQRRRPNRLKRLQKSPLPMESKSVPPPAPRAPTSHWRRCRTNALSTAEGNVEKLRESMANVSSKSVAQNGRQKAF

SEQ ID NO: 152622 - protein, 120 aa, Heterodera glycines
MCRPSFPSMFAFLLLVAAAIALIILPSASCAPLDNAQGVVPDAAPGIGSASAVGIAPRHRRQWLSAARVSMPLNTAFFFVPSYETATVSALVMTRDSVSALRVVVASEFVVKVDKKLIAI

SEQ ID NO: 152623 - protein, 84 aa, Heterodera glycines
  unsure (1)..(84): unsure at all Xaa locations
QSFECLFHILFFINLCYFPITFSSGSLFDPLRQQHFDAVFFFGRRPLSIKFTSEWNLFSHWRCFSRTCHPVNVPQTFWGLVXLP

SEQ ID NO: 152624 - protein, 75 aa, Heterodera glycines
MPTALAEPMPGAASGTTPWALSRGAQEAEGKMIRAMAAATSSRKANIEGNEGRHILLIGRRDILLWIFDAKILIK

SEQ ID NO: 152625 - protein, 58 aa, Heterodera glycines
RLAISDQIAPFATMGIALVHAFVRLATGTVLVTTRGNGTVIVNQNWTVRDGKGKKLEE

SEQ ID NO: 152626 - protein, 132 aa, Heterodera glycines
MEKNPLPEGCTARPLDQRTMTTWTVTIRGRAGTPYENGNFQLSMSFPRDYPFKAPQVTFTTRIFHPNIDTRGKKSLICFSVFTVVISIIVLLNDPNPDNSPLNAEAANLYRNDRAEFNRRAREMTLAYARMR

SEQ ID NO: 152627 - protein, 57 aa, Heterodera glycines
GSMVPFSLRLLHAEASSFSPLPYSSMVRVHKLIENTVKAIEIARRNFAATDSELGIW

SEQ ID NO: 152628 - protein, 483 aa, Heterodera glycines
MDEILQGIEGVAVYLDDILITAPTQAEHLCRITQVLERLKANGLRVKRDKCEFMRESIEYLGHRVDKNGVHASEEKLEAIRKMPPPQNLKELQSFLGMVNYYGKFVPAMATVSEPLNQLRRMEEKWHWGSEQQKAFQRIKEILSSTEVLVHYDPSQPLYLATDASDYGVGAVLFHKSQQNGKEGVIAYASRTLNAAERNYSQIEKEGRGIIFGVEKFKQFLYGRKFVLQTDHEPLKKIFGPKSEIPVVAARRLHRWSLILMNFDFDIEYCPTKEFGNADGLSRLPCPEIAKIDLDSAEVRAVQLENIDSLPVTAKSIASETAKDQILKKVKELIERGWPKKVESDQLKPFEPNKNSLELVNGCIMLGNRTVIPRKFHGKMLELLHATHSGIVRMKALARQKIWWPGIDKDIEMERKRCKNCQSDAPEERKVPLHPWETPDRVWQRLHMDFCGPFMGHMWLIIVDAKSKWPEVIKMKNITANAT

SEQ ID NO: 152629 - protein, 123 aa, Heterodera glycines
MDEAINELAYNYIKGQEQDKDLLGFPIFWSYFKNFCIFLCFCSRDEYLCSNWKLFGLTFPQTDTCCFGLHHGDYCIHWLSFYGYPTFEDLTFEDPTFEDPTFEDPTFEDLTFEDPTFADIPDI

SEQ ID NO: 152630 - protein, 103 aa, Heterodera glycines
MGEQKFHFLKMLFAFGALLSAEIEQQSSIRERSFPRIFLKAYECVADKKFVGNEKNFLPFAIVSKMEGQTEQLNIEKVLLVIQNEEDLTDRSLQIGCKFLKCL

SEQ ID NO: 152631 - protein, 176 aa, Heterodera glycines
MPECLMIQFPCTNRLTSDAIVPTSAADANADHGIAGTFDAISLTENRQKFMENYCLNIGKMFFVQKGVRNFLNILSLYFRSISAAALFPYHFLQFYDPSPIFYLGISSTTFLSQRAGDQTDELIAHFVKMPSEEASGEGTFQFVSPLPNAPEAFKFGGSIGTTTNGAVFRWIRNDQ

SEQ ID NO: 152632 - protein, 319 aa, Heterodera glycines
MAPLFILLFVLLAVEESVGPLSPNCTLPKKSESQRKVSVISAQQIVSDEQNVSSSEVDKVPGDFLEFSLPIEKHQNSLGQYLAELSNYYHSAQLHVPPSTIARVLLRMQNEMNFHRLKTSATQLPYPLTLENFRSEKEADSNGMGGDIRITFIDQCQICSQNELTMSKLITMSPQQISVPKISILFLKIISKEMRLNSDQSDIAWFLGSVIHLLAFQTYPLEEWHIRDKILANQCQLGGTFKMPQTSESFCMFLLQNSVNKMLFSAEKLQIRTDFPRGFEKQYAILGQIMRNALHVDSEKRTFDGNGQLLKLAANLISH

SEQ ID NO: 152633 - protein, 110 aa, Heterodera glycines
MRSRGFISLVGLDYSTNAIELAKKQASSCNDHQSMPIEFGGTFDAISLTENRQKFMENYCLNIGKMFFVQKGVRNFLNILSLYFRSISAAALFPYHFLQFYDVNSFFINI

SEQ ID NO: 152634 - protein, 78 aa, Heterodera glycines
MINFAIFLIYPFIRLNLFAQVLACTSELRPRKCRCTAVWDAMRAVMHTMTMANSWAAVHCWMARADGLDVIKANYGHN

SEQ ID NO: 152635 - protein, 126 aa, Heterodera glycines
MDKRNDVENIKIIHFSEGKRIGKNFYIWQCSCCGQHFPYVACRICHEVKKKLSEDECKILAKKKDLPVRSYQMRPNAKEQEKFMDSPDWISDIQTPVSSLECRYWSNGPDPEWHFRVGNPPMIWVF

SEQ ID NO: 152636 - protein, 164 aa, Heterodera glycines
MSLFRNRNLIFLMAPPAEKKKKHSSAYHRQISSPAIGEHEQQSMGSLITSLGKRRSVRVTNKMNKRILKKIWICTDVWMDILPFFGRPELGLKLALLSPRFNVLVNKHFDGKSELAILRRIEIRKGGGLKPKLSVFISYDKSMRFPLPDRPLPNKIRFNRLLIS

SEQ ID NO: 152637 - protein, 302 aa, Heterodera glycines
MGKRKLLPKIHGKKGVKEREKKREERKAQTAKAIQARLAKKTASQSNPNAEMPQQDEAGPSTSAASAEEAMEPPPSTPGPVPTPEMDEEILEFGFSLPSTSVTPIGDLVPFSTTPTAPMDTGETTPPPLAIDERSERIEQLEKQLKDRDDTIKFLREQVRNREALISDLRRQLDEHMAPPMAPPTTSKTPPNRGRPKKRLEELQRSARRDIVDAIVGVIDRDRSRSASRASLDRIHRDIRHKFAHYTPKKGQERKEWMEAEDGLLLLAQLGTQMAYKRMKATLRLINRRFDTFPPLIKVSWR

SEQ ID NO: 152638 - protein, 108 aa, Heterodera glycines
MAFPSANRREGGGPFPQLHGPVLGGQHQCAGNDKSAAAAVRQGADAMDKTTVRMQQVATAYSELNECLKDFVNRVYPQCDYVVTSPRLIEALLGLELSDTSTVGTFRR

SEQ ID NO: 152639 - protein, 27 aa, Heterodera glycines
MHRTTVDVKAALNEKDTPIMDLNSIEE

SEQ ID NO: 152640 - protein, 104 aa, Heterodera glycines
MALVRFEEAKSNRGKILLSRLGFEYAYESDSRIEQGWEYWKCPKRPPYCPGRDCVQMAWHVDANGSRYKMGRMSADHNHAAVFGQLNVSQKSKPSIFGIDKTGK

SEQ ID NO: 152641 - protein, 52 aa, Heterodera glycines
AGLAILSGIVGIGGTIKTGEKAWAFGAALMLANIPYTFLCIFPVNKRLLATN

SEQ ID NO: 152642 - protein, 96 aa, Heterodera glycines
MALREGGSCSSAAAMGFLALGRDRLVQDSKCFTGTVKSDGRIVKIDELKTKVEAAIAAGKAMIVLPAGNVSDFLALEPEIRDGITRRSVNEVRDLL

SEQ ID NO: 152643 - protein, 190 aa, Heterodera glycines
MPLKIDNAKRMQQIVPKVKSSENVTGYLENKNEEKQQRISFKNYFNEINAYFNYYVPKHIIGLIALKLINAIQWHLELNNGQLTHVLTPDHLVAIRVGDQFSKSELLGNVHLEIDAEIQRVEDPRQRALPSADQTKIIWLKDFSYMSPQQIKHNIITSGESDIIWSFGITLYEMISGETPIWHTNKQYFY

SEQ ID NO: 152644 - protein, 61 aa, Heterodera glycines
MGLHVRRSKMSLPKIAEIDQMKEACDRLLMRREEFHIKDQRVADKMMCIRPEACLTIIVIK

SEQ ID NO: 152645 - protein, 170 aa, Heterodera glycines
MDQLEIYCGQDTEILMNAVLSMRRIFLEITKDADTPQGYDVIKEASTLAGVAMRIFRAKFLKEKHLAIIPEGGFEKTDTQSSIAIKYFEWFMYKNGVKGRHAGNGGEIKIGEQNFLKTQSRMNKLKHVAKKYGLNVEEIWECDLKSMLNRKNDTNYNSEMKNFFDELYDK

SEQ ID NO: 152646 - protein, 85 aa, Heterodera glycines
MDLSFNSEKTPPKRAKRSPIQRLKAGETMIDIKLVLIMADSVRIVGEKSKVWTIIGSDGDDYINGGTSNPVVAAKTDSKNSFEVC

SEQ ID NO: 152647 - protein, 25 aa, Heterodera glycines
MARRGPLLPIYKRRNVRRQIQINQS

SEQ ID NO: 152648 - protein, 80 aa, Heterodera glycines
MTDLLLQINNNNTNDKGSVSGLIVVFFLFILITQSPAVPHGDECAARRSRRVGLEKSPTLPHGDECAMRRSQRVGLEKTE

SEQ ID NO: 152649 - protein, 63 aa, Heterodera glycines
MDSESEEKQFLKQIKEFVTTKNKKDSSNNAKADQMSDCSKNAVKLELKEWKRGFLLGKPSENA

SEQ ID NO: 152650 - protein, 491 aa, Heterodera glycines
LVGALFGSLLRRLSFQSQSQSALAAGVSGEALQNIRTVKVFAMEEAETELYRLYRKEVQTACSLGERLGVGIGLFQALSNFFLNGIVLGVLYGGGQLIVLGVLYGGGQLVADQQLSAGDLMSFMATAQIIQRSVSQFSLIFGNGIKAWTAWTSCARILQFLRIDPNCHNHLNGNEQIPRHSLIGDIHLHNICFSYPTRPEKAVLNGIDLHFAGGQTTAICGPSGAGKSTIKSTIAALVERLYEPQNGKVTLDGRDIRVTLDGRDIRSLDPLWLRQKAIGVISQEPILFSTSIRENIRYGRPNATEEEIRSAAELANAAEFIENFANGYDTLEIRSAAELANAAEFIENFANGYDTLVGERGATLSGGQKQRIAIARALIKDIAIARALIKDPPILILDEATSALDAESESAVQLAVQLALGRVMRDRTVIIIAHRLSTIRNADQIYVLKNGQMVEVGTHDQLVRNRRGVYHSLVGEQRQKSPGEDEPTKAG

SEQ ID NO: 152651 - protein, 153 aa, Heterodera glycines
MQSMFLGGDGELVVNPNFASLNIVGTCTDIEKSFFRLTAAPDPSQIRPQDVLKVALENVKEKYKQNNGYRYASDQLKSIRQDLMIQNIRNNFTVSVYETNARVALENRDREEFNQCQNQLKQLYKQVSSGCPNRWEFTSYRLLYYIYMRETLG

SEQ ID NO: 152652 - protein, 277 aa, Heterodera glycines
MRTIVYFKLLQIVLSLAFVWQLLSLHQFCGTFVCPKAFLHDISVGHCKRFTLIGKDSKTGEFGAVLDERKWHNQLFMSSTNGLPIKEQQQQFMDELAAKLPCPGRHCIPITTPSFFFWTEKNRNLLDTVVDSFSGQLLLALCSLLTIGIGFARMLRPAAEYECFDYCMALYSVFCWCCSAWASSCLLLYWTPYWSCMNFRADDTNVPLVTFVFDIVMVCSFVFEMFFNNSLVKKRPENASVAAANRKLRNDVATECANVAIHRQQQQKNGSAIIMQT

SEQ ID NO: 152653 - protein, 36 aa, Heterodera glycines
MRCTQTKNDQADEAIQKRSKVPKERKKGSKKTLKYA

SEQ ID NO: 152654 - protein, 475 aa, Heterodera glycines
MDSGHNNQRHYNFRHRVTVNYMEQESAQTIPIPDIIMELHKVTLSNQYANTMREIPTLNGTEGSDKVQDFFLTVEMCVGEWRHEKKLEMLKTKLKGKALRALNMALSKFGNTAPFETIKTEIMSTLRETDYKEASAFQELTQTGKRKEGESVMKFGERIQRLVNCAHVGLSEAQRDEISKKIFVLNINDTNMAKFLECQSKPSQTYDELLMVANRLSLVEEKTEERSVQIRNSQNPFHLPNANQISYQNEQSRYFGQRNFQNSYQPQPKYFGRTGRPPSHSYGNNFGGRNFPVNQNFNRYPNNQQNRNFGSERAQSNKPRQEVNFQGQGSQNSIIPASNANAVPLNAQKQNFRPGYGSNAIIVTENTEDNSPVISVGHFGQKEPTDYEKFFNALSTHSSEFPPKNPALVKTSKCLDITLSVVDKKAKGLMDLGAETDIWKKELISQIGVSVPILALPNYLFPSHHLLVEKLHLLE

SEQ ID NO: 152655 - protein, 238 aa, Heterodera glycines
MCNYQWSKAKGEMLGPLENAPFIGPAFDFVVSVGLPQIPHSDNPDDKDKVAGSMCKIDYGCDWGKCHPSAGKTASTCCADGFVFICCKDPPPVKPAQLIQIDDCEKAAKSCDCGWYSCIPHPGQPSTPCCAEHYNFTCCVKLNNGHSESTLKIGIGQGHLIIDSDSSTGMSTVSQCANYCNRTFVGLLKIKPPQIIQMDECEKAAKNCSCGWYNCIPKPGQSSTPCCAEHYQFSCCTD

SEQ ID NO: 152656 - protein, 69 aa, Heterodera glycines
MAKLALYLPKFKDLGWQWLRFRMEATPQLDERGQRATEEEKAFCTHTLASFRDLLLNNVNDKSGAKDRK

SEQ ID NO: 152657 - protein, 21 aa, Heterodera glycines
MAIKLEGFQGVKHTKGYVVEL

SEQ ID NO: 152658 - protein, 301 aa, Heterodera glycines
MLNNTVIEVINRVCKEMAIYQHKDLLFGGKTVIFSGDFKQSLPVVPHEGLTAQVTSCFQTSPLFGQFTNMILTINQRLGQGQQDYLEMCRQIGLGKTGEFFWIPPQFLVKSREELIDFVYPNFQQLLGNDKELLNRLILAPHIDTCDEINAIMMANVPGQEREYLSTDKPLDERPLDIDEIESEVAALNRRTDSGMPPHSLQLKVGSVVVLLINKSDREGLINGTRIVIEELGDDRLVGRVINSNAVGSQVRLFLERTRNVYEDKTPGGVKYERLQFPIKPAFAMTILKGQANNQHGWNRS

SEQ ID NO: 152659 - protein, 185 aa, Heterodera glycines
MANNLVILIMMFNHHINTDLSAEDKSAAVKHHATYTELLKRYLESIYGPEEARQIYETVPKAFVMLNIVTEKAKELFRARVPTEDEKMLKHIKLAAEIFPTAADEKKEKEEKQQQNQQQMKLEEGKDGGDADQREVAAEDGAIGTVKGPRSSEKDQKAMPPATATVVSLKQEQHEDEEMDQQQTL

SEQ ID NO: 152660 - protein, 110 aa, Heterodera glycines
MLRRMVKVVKKLPAFNELSQSGRFALMKDAIIDMLTVRGAVSVDVENECWKRPLISNCEIRLNFNILDQMLNGSMQTRRVTGFYKQLHQTLMKDQVSQQSMILISSNQTI

SEQ ID NO: 152661 - protein, 59 aa, Heterodera glycines
MRANGECGVYVVEYARAILDALSRNWNAEFDFSHINSDNISSIRRHWMKIIRERTALEK

SEQ ID NO: 152662 - protein, 99 aa, Heterodera glycines
FALSNDTQKIGFGRMNEQSSRSHAIFTVTVECAETVKAADGRQLLTGKLHLAVAGSERQSKINATGDRLKEASKINLSLSTLGNVISALADASPHIPYR

SEQ ID NO: 152663 - protein, 82 aa, Heterodera glycines
MRAEAERKHTIGAAEAVKGGKLKIDAILEEYAKAVEKFKLEMAPKLEAMSLKEARSCGDHVVLIITDPKLSPAEKVARVNDA

SEQ ID NO: 152664 - protein, 214 aa, Heterodera glycines
MTDEHFRGSRQYYQREYANCMTICREVGKPDLLITLTMDPECDELEEMLPTDPDGHRQQWYDRPDVICRLFVDKFKELRHDLTVKEVMGPVRGWFYSLEHQKRGLPHVHFALILDWDRIRSGGTINTPEDYIEQYISAEIPDNPSGRSSEVLLKRELYKTLRMKHIHTCSARRCLVDGKCLKRFPSLSQNDEPLKNAFFYSALESCGTVVDMAV

SEQ ID NO: 152665 - protein, 229 aa, Heterodera glycines
MCWVIDIALSLQLLVAHVKAFAPCTSNLDPYLRKTIREQRGGEPIIDLSVSQEDDDVAQQQDPFGPLKETIGPEAEFVFQDPMVWASVPLGDWTLVKLLIESLRKWKPFSTQSLCSPPDTNSNSVADPVVVVQPQQQKHLVQHHDNGEFGQQNEQRMALLRRIEEEGNGQTMMNNGETEEEKRRKSTKSGEKEEKERRETEEEMNSVASVAGSSEQRSLLRSSTSPPKD

SEQ ID NO: 152666 - protein, 163 aa, Heterodera glycines
MGNKESQFGTRYAVDGRDSQTLDPSLIRSFTEIRDSDTDFALDKFQIVRILSNLRQYRLLSGLYEKAIRLNGNDKFAWLQFSLSLSADRHFLRVSKILQQFISMEEEEETNQKGGADEDAIVAYMHLARIQLEHFGDCNLGTFVELSIKQHWRKCVYGGSPKK

SEQ ID NO: 152667 - protein, 107 aa, Heterodera glycines
MPSKFEQIAQTILRKLLRQFMEEQNWFLAEISICQEMPNIVRIVDLLVPLSIPPTPPIPDNLVRVKSVDVDDDEEDGDELEEEEQEGGDKSEGSDMDIDELSEGMEM

SEQ ID NO: 152668 - protein, 355 aa, Heterodera glycines
QITDPTPLNERAEIMVVQELADETDVFMEFGHLSQATRRKIEEFRRRRKEAEEYNEQSPIKPPKARRASKLNAKDKKAEEKQKEGAEKEEANKAEKENNEKQQQKEKPAKRKTSLKRQETTEKREKEQQRPAEKRSGAEEEKHGEKEQKSAVPKPQEQKSAVPKPQTVTMAAAVAAGSTTVPTSAATAAPTPATTIIGPAMDPQRYWRLETDSLNALMNQVLEQMERGPVSINLIARIKAHPFYDERPEVKELLESIIAAQPDEVQKQTSKLIQQQSKVKERSINQLVINTLITANELMSIKMPEERRKEERRWHSVEAKSLQLGHWDNYREFERQQRFFKIHKLPMKVNVGFST

SEQ ID NO: 152669 - protein, 60 aa, Heterodera glycines
MTERDMPEPNSPLPRKRVGFKEPHTGLVKNDFFGYWYLQYWAPRRALAQPTTVALVTIQC

SEQ ID NO: 152670 - protein, 259 aa, Heterodera glycines
MVEGGITLVKYLLFFANFVLWTLGLAFLIATLGLAFLIAGVVLQLKYTGLLDILGDERLATPVLLLAIGCLCTLLGFVGYCGAIRENYCLTVSFAVLLALLLLAETAIAILVYALHEPLNEALISQLTQGMERYNRGMERYNRSKGVSVAWNQVQRQLHCCGVNNATRQLHCCGVNNATDWKIYAPDSCCVHFHDGCAKMAQPLLYGVGCVQAVQHWIVTNATVVGCASALLGALQIIGICFACCLSKSILKDFHDFYY

SEQ ID NO: 152671 - protein, 60 aa, Heterodera glycines; identical to SEQ ID NO: 124695

SEQ ID NO: 152672 - protein, 56 aa, Heterodera glycines
MYGCMKNDKPCQKNVNVMKKANRGHVGLSNNSKLINFVGSEKVLIRIFYDQNIRNP

SEQ ID NO: 152673 - protein, 856 aa, Heterodera glycines
MFFFGLFFLLFVSPFSEDLWTETARMSDLQQWRLLCSRYQVAQAYMWRLLCSRYQVAQAYMEDVNARVTVFAPVNDVFLYNPDLRAMDQKEVLSHIVTQVVEISSGRKWEKQTLIRSTINSGYIYVTQFENGPANFSYFASYFANAGAICNHVTNQWGIITGEQYLYKTCTPMGHRPYPGTALSFVRDDENAFFVDRHYDNRDLTELRDILDRVPDIALVIYGSSAWNGLTELRDILDRVPDIALVIYGSSAWNGFHTYFLPNNKAFAKVIDRNVIDRNRVDREVLLAHVSGMNRVLFTYPWLYDVLFTYPWLYDGGVHFYPSIRFSSNIIEDNYFSSNIIEDNYKLKLCLRNITDHRTGKWDLYAVSTVYERYGQFRRGAVWAKLLVPNIPVQNGVVHVVDNVLGIVTNTIDQMLMDNYRCTTLMRYMNTMLMDNYRCTTLMRYMNTIGQIVRNYFSATGGLVTFFAPWNEIGQIVRNYFSATGGLVTFFAPWNEAFERIPEPIERRLLRDRIWLEQILKLHIVPAKELTILKLHIVPAKELTTEEITNETVVATVDNMRHLYFVRGEWPKNNVTYYVIGGGVRTAIQMEDVTAVNGIVEDVTAVNGIVHYIDRVLGVPYQSLWEISLWEILRNESRAQRSFEMLGNLQLKYSLKYSLDPWQVLTPEQNFTFFVPIDEAWDKVAPSLKNRMMDGNHWQAVAPSLKNRMMDGNHWQALQYVYKRHVLQGQALMYTDLRERTRHVLQGQALMYTDLRERTYVMMNDEKVIIRRRGRYFELYWPRGNRVARVLEGGELAGINGFMHLVDGVLIVLIYEPDLRAAACASITDNNHTLLLCIVSLWTHRWRRRKLTTAKR

SEQ ID NO: 152674 - protein, 35 aa, Heterodera glycines
ISPLHLKLFRPYFANFLPLFRSLNWNFSPLKIPTL

SEQ ID NO: 152675 - protein, 251 aa, Heterodera glycines
MIYVIERLNEIVKDPHNFAELTENDLLVNALVTFSFPKLRHIFKKYEEKYGEKIEEQVDNAYIKEFKHLSKNRIKNLLKLDLHVEQHFWQTLNAILTDIQYGRPYFFAQLLKEKLDKLRGNEKWASADALKDVTRILLTRAPIDLADIDQEFQGLSGSLTIRISISAYIEQILGFEKEKKQKKGNVFRSFSIRSKSHEDIGTAVSSESNTAAAKGKPSQKIETLKAFKEIVDWATEQRRLSLARNGNSGVL

SEQ ID NO: 152676 - protein, 55 aa, Heterodera glycines
MAGTGIGTWKMNRDGIPGPGLPFFRDSRSRCSVQGIISRLRVYVFRVLVLTNEHV

SEQ ID NO: 152677 - protein, 150 aa, Heterodera glycines
PKSFWNFAVAFLGGYSAFRLANSLWYYSQSYSTDHHQFYDSLPCALSYKVPFYCALLFELFGSFFLRFLLHRFPLSSRHFFAPPTIAAFLSFALTFIGVPGLNPVVTSSRLQGCPGLDLQWFIMTYWCCPVVGWLLASKLDKTPTKQKKK

SEQ ID NO: 152678 - protein, 253 aa, Heterodera glycines
STEEERIANVHFDLEVVNSDFIRPMRMNFRRRGRDLYCCFHCLLSQLAALIFHTERKQLLFVKQFRPPVFVNVVRSLPENKNKSLVFVNVVRSLPENKNKSLAEVRWENYPIENGCTVELCAGLMDEPGKTPLEHMKKEILEECGYRVDESNIRPIRRYVTGISLSGAIQHLFYVELDESMWEPKAGGGNEHEGEFIQNVFMDIGEAEALLEKENLWIKVSPSWIKVSPSSFLFAISWWVLVSHPSVLSLFLS

SEQ ID NO: 152679 - protein, 128 aa, Heterodera glycines
MNYPTDFSWLPVNNCVCPVKDNLCYHFPGYKKPVICAHKLVQNITAFLSTPPHIPNESAPASLSSGSVLMLLTVLQIFIILLTRLVLAPLVHWRFQTAPQGALLIVCRAEWCQLVNERMMCEEKADKI

SEQ ID NO: 152680 - protein, 464 aa, Heterodera glycines
SEPMGENQKKTSQTPAVEKQQQPPPQQQQQDQQSSPVQEKPVTAPAPRPPAPPPPPPPPPSPPPPIPPSPPSPPDQQSSSSDDSHPPRPPRPPRPPPPPSPTLPPVYKRPDHPPPPPRSIPKVELKRDPQPTKLKKSASPPPPPLPPHRAKREPKIELAPPPPPRNVSKREPKIELAPPPPPPRHFAKKEPKFEVDPRPSTSKQAGYFPPPKIKTEPKHELQPTKRPVPYRIPKKEPKIEEKPLQQQQQQPPPPPAVVVEEMPYIPPPPQSPPRFDETEKEDKKVKETTPPSAAKQPIPPAPTLAPPSHPPTEAPKAPKQAAPKSATVPPQKPSVTPATTKTSPAPAPIPPIKQAPSAPKPSPSKTAAVPKPTPTPTPASKSTIPTPASSTKAQNIPKIPPPLAAKPKEPNVAKKSTVPTTVSTTSISKLTSQIESSPTTPKPPPPPIKPIPTSIPAPSPPPKN

SEQ ID NO: 152681 - protein, 133 aa, Heterodera glycines
MSSPSKFSPTKSSPVKKENNVGKAEFVVPSLKAPTRKQPSKNVGMNGGEEQQPSMKKRKVEDRDLWKLAKGKYMLGFYLCVDDWNKLYNNKQRVLRKDDGRFAVNFELCEECALANVRATDILAPPKAKKRIE

SEQ ID NO: 152682 - protein, 132 aa, Heterodera glycines
MISYMINEAGFLIVNREIVAADIDDFEFTPRPEFRGEFRVFNEPNECALLTRFFDHLLRALCGDACRRRAAARLAADERPPGLWPGRAGRVQTPQLRAHGRVPLGATGQLFADGLPVVEGCNAGEVAIRAGG

SEQ ID NO: 152683 - protein, 146 aa, Heterodera glycines
MATYLFIAAAAFGAGIYCWKAYLGPMLDQPKSDDEEKPKPEGGEEATTAGDKEEKKAGSKGDKHKKKDKKGEGAAAAAPAADKKEEKRKDKHRSKEAGKSDDSKAGKKDKHGKKDKKGKKKDTADASTVDEALGEQSTAETSQAEE

SEQ ID NO: 152684 - protein, 452 aa, Heterodera glycines
MPAETANSNSNVNSSETANNNAISTHMLREKNSDEAMEVDQQIVTDTADILQSVLEFAFGVSIDDNNGIAQEFSSSPELLLQLQDSVRTILPSLNSDDSLAFGQNEFQPDFDRFFAFPEAYLEVAVEFLTLLVSKSKMSRIFLKNLSDFPKQVLHLLLNLESIKNPFIGSKVVDLLFMLCPLVNHDASVFYRQIVSDSLAVEGLFPSLVKFYSAVETTGPIFFFLLLYAPKTLGSHTEFFDKFNIRRNIQVIFKCMWSDLSHRDRMVQYAGEFSPNFVRFINMVLNDTTFLLDESLDKLKMIQDIESVMSNETEWDKLSQEEQQLKTDQLRDSKGQVKMWIQLGTDTMELFVTLTSDAPQIFRNEALGERVAAMLNHNLVQLCGPKCAQLKVHDAINRFEWDPRTLTQQIVKVYINLGSEMFAKQIAQDEVTYFRLIYLPGRNPPKKEKMNF

SEQ ID NO: 152685 - protein, 78 aa, Heterodera glycines
MALFLYVSLFLSSLDFALRLLFLYLSGSVLVCQINYGLLLLSYRTNFPNGPEQSFLHYPSFVYLPYSVYRKTPVLWTS

SEQ ID NO: 152686 - protein, 106 aa, Heterodera glycines
MLELKTIVKAYKNDEKKKDAVRRIYTVIVNYGEHLSSVPPGARQFEELNANIEDENFVETVLFECQALVSRYSDCGFADEDDADLNSLLHFGSHVFNCIYNVKSRF

SEQ ID NO: 152687 - protein, 75 aa, Heterodera glycines
QGLKCPAQAKNFFYFREKIEIFPKKIPVDRARKTMFWKWSPFLWEKSLKNPKIQKPENRFLGLARKIFKIFEILK

SEQ ID NO: 152688 - protein, 50 aa, Heterodera glycines
MSEAGYPDRVRLKFYFNEKNLKASQPGLHAIGFAVTEIQPESKNRNCSRF

SEQ ID NO: 152689 - protein, 99 aa, Heterodera glycines
MLIAPPPVKILYCYSEMNDSVIGLMKQGIETHNGVPTQTLVQSMPKPLLLILDDLMLSVNNDFLDLLFTRGFHNWDPKQKPKETLGRIRGLLSCNCTLA

SEQ ID NO: 152690 - protein, 232 aa, Heterodera glycines
MKRRRSDPLHSLGRTRELSPLPLDEFCRRPREFERKKANSKTPMLGRKIMSGQLLNGAAERRARTKDKGAHLFRQTDESHLADALCGSETPLRVHVYDPYCPVHGSRRRMPRHGERVPKRLVDMHSFLASVDTTDEDVDEKLNPYLGSQAILAKQFRKERRAILRETEGPKLKAMKWRIRTDLYYSLIPTSIIAGMAASCIWASKCVYITESAIKYAKLNVESTGVVIPGHF

SEQ ID NO: 152691 - protein, 39 aa, Heterodera glycines
MRAFWRLALVQKRLSDYFNAICEFNGKNHNKPSAKDKHL

SEQ ID NO: 152692 - protein, 132 aa, Heterodera glycines
MKKFTEDLYEKLKTAESREVKALNASLCALQQNEGEAMEEKAHEKRLKEELVEKTKQYMEVGEKRKWKGLLAIGDECSEKEAAGSERRTRTERHTEETRRGARGTRRDNGQDGESQAEKEGKAPTDRSIANC

SEQ ID NO: 152693 - protein, 178 aa, Heterodera glycines
MMQAEAQQLFPPALAFTASNEQIEKIEPTNRGVLDFSLAARGQPLPRRYTVPCQFPKFWAVVIVQCAVSKDQCSEFVREQFGFYSKHRVRFVLFVAPGKDASHAGDVHHTFKLQEIEHGIVTQHVSPKIVDKATGPRGAIMVLDNIMLKMNLKLGGANYDICTAQAFKQANGIRHDIV

SEQ ID NO: 152694 - protein, 303 aa, Heterodera glycines
QQNTFLTPKFSILLPTYNEAENLYNEAENLPICLWLIIKYLKGLSYEVIIYLKGLSYEVIIIDDNSPDGTQEVAKSLQKEFGAGRIEVAKSLQKEFGAGRIKLLTREGKLGLGSAYVFGLKQAQLKQAQGEFVILMDADLSHHPRHIPEMVTLQEKHGYDIVTGTRYAMGGGVSGWDFRRKMISRGANFLAQFLLQPGVSDLTGSFRLYRKFLLQPGVSDLTGSFRLYRKSVLSKLVVESVSKGYVFQMEMMMEMMFRAKKGGFSIGEVPIEFVDRFYGESKLGGQEIVQYLHGLIYLFVAVS

SEQ ID NO: 152695 - protein, 96 aa, Heterodera glycines
MQLSKICPLWSAAKNCKFAKETNSRCFNPFRIYVHLWREGLLTTNQHGKTVPTHYANENRLLQKNQRIFVGFIGKGSFRTFKRGPIAKYCTQIECI

SEQ ID NO: 152696 - protein, 184 aa, Heterodera glycines
KFEIKKVNFRVFLLGGQRSERKKWIHCFDNVHAILNVHAILFVVAISEFDQKLYEDDRTNRMIESMRLFRSVCNSRWFYETAIILFLNKTDLFMEKIKKTSIGCLFKSYCGSDSYDDQIQYIESDSYDDQIQYIEEKFKSLNTNPNKVIYIHETCATDTNQIQLILENVIDLLIQKILHVYGLY

SEQ ID NO: 152697 - protein, 88 aa, Heterodera glycines
ENAPRVHPTEGGPEVLQGERRHGQTAPEKLCQGFVNGRLQLLPLGVFLRSALISAEYRKRRWTTHLRCQAQIRTMFVEMYHCYYILWE

SEQ ID NO: 152698 - protein, 46 aa, Heterodera glycines
MVIMFSINENKELNDRNFNNKIMKVHNYILIQKPNNKKARAIKHDY

SEQ ID NO: 152699 - protein, 379 aa, Heterodera glycines
MLQTKTEQLPVTADEIAEATPKDEILKKILAFTQSNWPKKSSDPDIAPYFPKRENILEIEGCLLFQNRVVIPQSLRNRMLKSLHMAHPGIVRMKALARQHVYWPGMDSEIERIVRQCEECQKAQKAPIKAPLAPWTPTDKVFQRVHIDFAGPCQDGHVYFILVDSFSKWPEVYQMNSMTAAATVFTIRSIIHRLGIPDEIVSDNGTQFRSSEFASLCKEFGIKHTFTPPFHPQCNGQVERFVDTFKRAMMKCKGDKNSLEKVLLSYRSTPNSAIDGYSPDQLFLGRKLRTKLALVHPKGQIDQSEKFEKGKFKQHQKDYSAKMAQQFDRNHGTKAIEFLPTDPVLLLNYRLGKSHWLPGTIVERLNNSPTYRVYVPTLG

SEQ ID NO: 152700 - protein, 182 aa, Heterodera glycines
MPSDFKSAVVRRQLSVQSNSISREASNLKSFDELCTEADLQRVRKAYEEKLKKFEELKKTAADLEALDQKFLELQRNRKFGEAEIKRFEELKKIAADLEALDQKLVLWKYASGSLVFKFLNKILFSMADLQRSRKADEQEQKMKRRDRIFFIYVCCCFIIVWSIIAYYLYCIATSIFRAQTP

SEQ ID NO: 152701 - protein, 185 aa, Heterodera glycines
MLFSRVLLGLAVGCASATVPVFLAELAPSEKRGQMVTRNELMCVTGQLIAFLSNAILGNVWADNLHIWRWMLVLAIVPAFVLLFGTWAFVPESPRWLMASNLHNEAFEVLKSIRTNEEQAKAELEERGASSNCHLRFLLTLEDGPANAFLLALAPHCANKSLGSMQLCSTGRKFCRRVACPTKLR

SEQ ID NO: 152702 - protein, 577 aa, Heterodera glycines
FLLTSLFQNGFVSLTILMFLLIIIASFYTNDRPNIVLLITDDQDIELGSMAFMPKTLRLLQQRGTEFRNAFVSTPICCPSRSTILTGLYAHNHKVMTNNGNCAGEEWRQLFEKDFEKDTFAVYLERTGFLTGFFGKYLNNYDGSWVPPGWTKWAALVRNSRYYNYSLNKNGHNEWHGNRYENDYLTNLVANLSLQFIDESVLLNPRYENDYLTNLVANLSLQFIDESVLLNPHGQPFLVVLSFPAPHGPEDPAPQFADLFEGVETHRTDSWNYAPNPDKTDSWNYAPNPDKQWLLKRTGKMEPIHVAFTDQKHRRRLQTLQSVDDAVNRLVQHLRFLVQHLRFLNRLHNTFILYTSDHGYHLGQFGLVKGKSMPYEFDIRVPLLMRGPGIPRGKMFRSVVSNIDIAPRSVVSNIDIAPTILDIAGLNAKLDGRSMLELDEINGINRRKKMAWRETVLIERGKMPKLKRIGERLKQKMPKLKRIGERLKQQKEGLSRKKLIQRECDKSKRGSSRSSGKSWQCAKDAHGKWHIIRCPLSQCAKDAHGKWHIIRCPLSEEEECECEEERKRGKREKDARD

SEQ ID NO: 152703 - protein, 154 aa, Heterodera glycines
MAISFLEQISSEQMLASKSRGARISKVLGYARKMAISFLEQISSEQMLASKSRGARISKVLGYARKMAISFLEQISSEQMLASKSRGARISKVLGYARKMAISFLEQISSEQMLASKSRGARISKVLGYARKMAISFLEQISSEQMLASKSRGA

SEQ ID NO: 152704 - protein, 45 aa, Heterodera glycines
MKSRTRSIPNILENRSGRIPRSGSRSCPVSSVHLDDLTNMYNYHS

SEQ ID NO: 152705 - protein, 100 aa, Heterodera glycines
MHRWDTTKKEPKSIFKTDETLGLRQLPTLLEYSLTQGRHVEGRRVDLDEQFLSVECTLETGQDRDPDLGIRPERFSKMFGIDRVRDFIGIPPDHLPIPRD

SEQ ID NO: 152706 - protein, 118 aa, Heterodera glycines
MCTIGDPAHLPETNSMSNILALLTYCAEFTCYALIWLVNHFRNGHHGQSFAAKNIEKHFANMFAEQNMDQMLLCHCIISVLLRFMLELCFHILHIHSDSNDVISFNLFISDHIPLLTL

SEQ ID NO: 152707 - protein, 416 aa, Heterodera glycines
DGSAIAVLRSPDRFLGGDALWELRDGVPPTPFASPIELGFTVFKQLCLSPDQRALYCLASGPRRASSLIRLDLSTDCPTVAVIREVAVIREARAHSELSQLPLSVPTLITFTADGHSLEGYFYAPHSHTHCAPEGKLPPVVLFVHGGPTACTKNDLNMKIQYFTSRGFAAFQYFTSRGFAAFDINYRGSAGFGREFRDSLLGQWGVADRDDLIGGAKFLISSGLVDPFLISSGLVDPSRVFIMGSSAGGFTVLSVLAHSDVFAAGVSLYGVSDLGQLAMASHKFERDNTMRLIAQLPDASHKFERDNTMRLIAQLPDGIQTYRDRSPIHNCNRINKPVAFLHGTEDKVVPKEQSEVMHEMLRAKGTPTLLKLFPGEGHGFKKADTIAQSLQIAHFLLPDNGLLSTQFVFFVFLISI

SEQ ID NO: 152708 - protein, 444 aa, Heterodera glycines
RKGAWKSKTKWYYNALDGTCNRFHYGGCDGNANRFDTEKQCKNICWNYKDPCVLPKVSGPCEGHSRRFFFDLHTNQCLLFEYGGCLGNSNNFHTMEDCQARCPGTFVVATTTNPWPIRLTRANPSTPTPAAAAAVELDHRDGILAIDNNNDRLISSNSDQQTPHQLDAADQQSDQQQTADIVGDNRSDQQSEWNQNGDQKPSDQSEANDDQQEEVEIEEGEEEEELIVVPREHLLYGQLPGKLSNDLLYYRNQSVNCEKWATYKIPPPPCVEELCLLPEQRGTCFGEQLRYRYDASVGDCVGFFFTGCDANVNNFDSYEACARACGAWKADAVCERSPDAGRDRSNVPKWYYDAALGKCGLFFWSGCGGNGNRFQSKSECENLCRREMLAKKSECENLCRREMLAKTHQKSDMCMLPMDAGPCADLVTMWYFDAVQQQCRRQVH

SEQ ID NO: 152709 - protein, 167 aa, Heterodera glycines
MRDYSKTNTTNYGLISATTARHCPDNREPYRNPETGELRSCGTAAALHGDLDSVQHGICPSSFVCKRDVQRRKPATKGEEAPRVCCSPIAFCPDARLPQVDPRTRHAKRCLSADVKASPTAGAVKRHHHYYGDSYNDYGNCTPPYTCQPSTVSGIFVCCKVPPMTGI

SEQ ID NO: 152710 - protein, 57 aa, Heterodera glycines
MLKLNLNEKIKNSNMKAASFQNRRSLCTSSQNGHFAGVRAAGGPYTRVGSTRRLSTK

SEQ ID NO: 152711 - protein, 174 aa, Heterodera glycines
PFSHFFRCFFTLTLDQVPIWGLFINSVLLGFFMTGYLPLGFEFAAELFFMTGYLPLGFEFAAELTFPIAEGTTSGLLNGSAQAFGIGMTFGMGLVMHSLSILWCNVMHSLSILWCNLIMSAFLLIGFFLTAIIKSDLRIIKSDLRRQRAHNQQEMISHKPNELITTEIPINSHS

SEQ ID NO: 152712 - protein, 82 aa, Heterodera glycines
MMRCIEDMQEQDEQTLRKSIEEKAFELAELRNDEKMKVESKRAQLMGKRSQFDRNEVVCKKWKDIEQNNFNVDAISMADIVN

SEQ ID NO: 152713 - protein, 163 aa, Heterodera glycines
MQIMGYPEIHSLQRIQSNWVPLIRLKVINFHHEIDIVFASIPGEKQIHFNDDDNYDNDGDQWQQNILSKIEEMIEKLGNQIGAVDQETKMQKDDDKNDQSVLINTKEQMLRSLRSLAAHYIYNNALGFFNGTSLAILAAKIMLLYPDATVPFLLERFFLTYAT

SEQ ID NO: 152714 - protein, 112 aa, Heterodera glycines
MSSSFGVFKLTDDDAMKFLVIESHIGTKKMDYQMEHYQRFVAFFEKKERGVDMHASIKRRKDYINPALYEALRNAYGIDEKGTYFAVPCTTRTHFAADDFYNALDEVNTDGV

SEQ ID NO: 152715 - protein, 31 aa, Heterodera glycines
MLAHTDVRCSEVSRDEWTLNYDELIGNQNTY

SEQ ID NO: 152716 - protein, 18 aa, Heterodera glycines
MGISFKVPEAPPGPNQNG

SEQ ID NO: 152717 - protein, 144 aa, Heterodera glycines
MLGPALFKIRFPLIPKEDFTKGVVSTDVLTIKEVISIYQYYSNPKLSDVQALFPLKFPTQQRYKKGETISMEIEKVSEFGLEPVESRLSDAVDIWGFSWKIWAQIKTKVGNNEKWLGFYLYNDGPEKGDKKDTFVNLSVEKIKK

SEQ ID NO: 152718 - protein, 58 aa, Heterodera glycines
SWIFRVAITISIWDRLEFEHSLKLKFSKFQLLGLKLSKMHRNKLKIANTIISDHVDKS

SEQ ID NO: 152719 - protein, 37 aa, Heterodera glycines
MPSARTLRRQFFGVHRQQGDDLNLANSLAVIFVKYQK

SEQ ID NO: 152720 - protein, 50 aa, Heterodera glycines
SCKSSGIFRIISQKKGTENLIGRSGDRIFNKNISRGFHNFISFAVSGDSN

SEQ ID NO: 152721 - protein, 17 aa, Heterodera glycines
HKHLFDLFYHIHNLIKI

SEQ ID NO: 152722 - protein, 270 aa, Heterodera glycines
MVALLYHFHPDQQMPRMLYDSLQFPTHRRATYDDPNKPQGTLIMEIKKFSEFLKENDNVTRLSDAVVYITALPWRLIVYKTKHSLMFEAKYDTAQMTLNYKCPYSTTFRIASQKEGKTDFVKKKMGKIGSDAYNRCTFSYISLSKLMCPDNGWYNKEEDTVKVTVEELLDPSKGFYNKDEDKVKLAIYFIVDEPKTEKFVSNPNKSNGTLSMEIEKLSEFAREIEESERKSEETVYIKGMPWKIWANIKTKNESTEKWLGFFLLCDASEK

SEQ ID NO: 152723 - protein, 95 aa, Heterodera glycines
MDKDIVPKEGNRFKKHFDPLTTKEAHEYLDFSLFRLVPPHLVDPGTIVVKTVRQPNVLEEHNYHKRPIMYIINQLIIKSINHLTQGIKPNALFLT

SEQ ID NO: 152724 - protein, 70 aa, Heterodera glycines
MVSTRSKTDKFKKMGNSSTEAKRKRKEWRQEHARKAGSTPKSPRQTTKAPSTTGEGTSTETMPSTLNAEP

SEQ ID NO: 152725 - protein, 44 aa, Heterodera glycines
MKFIHQLIYVVRPIYAVFHQKLLFLPFWSPFFNKYGKMGVRQCR

SEQ ID NO: 152726 - protein, 41 aa, Heterodera glycines; identical to SEQ ID NO: 129572

SEQ ID NO: 152727 - protein, 69 aa, Heterodera glycines
MNNNCQLILVLFFSKIFLGIFCAKGGDSPVEKDENVAPNDDKKSSLASPSTAAAEQIDVDEKKELLKKE

SEQ ID NO: 152728 - protein, 74 aa, Heterodera glycines
TPRRGWFSHPRHFFGEFTPRSPTFLSPRVRKVVWALSLEVFPFLLSHFLPHSASFWHQKYSKLNYYYYYNKLFL

SEQ ID NO: 152729 - protein, 51 aa, Heterodera glycines; identical to SEQ ID NO: 124998

SEQ ID NO: 152730 - protein, 253 aa, Heterodera glycines
MPIAFAAEPSRPQLVKESIGEDHFNITFVPGAFNEASGAPVGNAFLVRYREADDETAPWQEKHPVDKSTLQLTVDGLTQGTKYDVKVVAVQRDEAGSTLSSTESRVHHITTAGVSPRRATLYWVLAVLLILLLLLFCVCVACCLVYQRGRKYPVAEKERLHGREPMLPKERQFEEFGKGEETNRSLSGHVWGGGGESESDSLTEFGTDNDRGYNEDGSFVHMYGPGSKNAGLATTSQPTVESSSAGAQQQQQR

SEQ ID NO: 152731 - protein, 109 aa, Heterodera glycines
MSANISEKDEALSDLNCLFVQMKNKKFSFSLMSKVAQKFGDGGVAAKVLLPYEVYKDLLCWKMPISTKKLTGLLSFSSLTMETWPISLTIASNANAVNCLFSFYWREKR

SEQ ID NO: 152732 - protein, 526 aa, Heterodera glycines
FIYIHSFISLFPFKCQFRRCSIRSVCRNCTLLMEKDAPELGEHIIEKGCAEVDISAEILKAEKPCLGKGKILKAEKPCLGKGKSVGGRCQCEQGFSGEQCQYRDDCTEDGDCGHGGRCVAGDCTEDGDCGHGGRCVAGAIHHGQRSCFCPFGFIGTNCERSITPKDTHCFAHGGPRSITPKDTHCFAHGGPRSSEVFIYGIFNPNCYSSRELNEDGDRIYWRLVGNQLELVGNQLELLLDFRTNSWLSLGWRPLNIPPSCRLFPQMHGTAGRSARGGRSADERIWLVVTWPTNGHSLESALSLPLHPMDCTDVIMASVLEGTDLLHIADMYSRDRSSPLRDAWLDGEDSLSAAYGSTDDGRTVVMFRRMVPEIEPTDHPLGPGELFLIWAKIEPTDHPLGPGELFLIWAKGQPKKPGKSKGKRKSMKKEKQRKRESIKKEKGIKKLNVHQVTKTTIATTSSVPTTESDQTTKVSSPEATTNSKSTLTTQSQTTDKEQNLTKTEAKNEQIQTEEKEEIMQNEKETTA

SEQ ID NO: 152733 - protein, 124 aa, Heterodera glycines
GVNQIFCEMALSLPLHPMDCTDVIMASVLEGTDLLHIADMYSRDRSSPLRDAWLDGEDSLSAAYGSTDDGRTVVMFRRMVPEIEPTIEPTDHPLGPGELFLIWAKGQPKKPKSGRGKRRRREQL

SEQ ID NO: 152734 - protein, 369 aa, Heterodera glycines
MSDNRKEAEEKMAKAIFISNDCWLCVFDLITPSQLGFGIAMISHRFDIYVDEHFKTRKRTLALIRIRSKIGENGTKEMEIVNSRWKPLPIPQIQMPRKVIGFEWINISFIDRNVITFLHHFRQLFAVCPIFVAMDSSKSYIFDMLVTHIWSLLGKNIHGLRSPAPYFHRLRKFAPSFLDDCPSLRFFNLFHDGFFAEFPCDDSAAASDGQALAKWLFTPRPDGVPKTFKCTLHLVLEKWASKIEPLKKTFASASSPVNFIVSIWIRPTSVDTSVVPFVLTNELTREQLALKRTYNSSYRFLLVRHPIARDESKWTKWEEEAIEWKCFDQWNKIDIRVHRDEQIGDGLFDANPGPSDQLQQLMNDLLRND

SEQ ID NO: 152735 - protein, 209 aa, Heterodera glycines
MSCWFKHGYLTNDNLNMLINGINLCLFAFYIAAFAFYQPKRKYLCVQLTSLVIALFTLFSYVNNKPAEAQPDSMGSIAAAAQVASLAGNVYDLVSFVFSFGCLSLFGISFKKRAIFDLKTTEYIPASIQFGLFALTIQWSIFALIVGNSYMLVSFEALLVFLLQKWAFKVANLAGLAVNLATLATFVAYPPKTWKVPIFGVGGEEKKQK

SEQ ID NO: 152736 - protein, 222 aa, Heterodera glycines
MNCSGDGQLRVVAISVSNCLVVNGVEVVGAIDETVLNDDAPSEAAINLLAVTTTHQHIFGGRNGALFVEIRRIAEQQLEHALAPVDVAGGKWELFVKDGELRMYSRELEVENGIAVDPLKALHVIDGVSAHEFIDLFFRPELKKEWDDTLELGKVVETLSPHTAVIHQIHRRVWPAAQRESLFWSQRLNVLSECSSVTDHVPGELLGAWMVCNQSVERDDVP

SEQ ID NO: 152737 - protein, 146 aa, Heterodera glycines
MAPPVVKKKKLSSVVENQQQQPLGSIVTPFGRRQSVRLAKKMNNRTLKKIWICNDVLMDILPFFDRVQLGLKLAMISPRFDGLVDTHFDSGKTELALRREYIIRKNTDEAQKPIFVVAEHESVQFPMPDRPLPNRNRFSKAYDCVI

SEQ ID NO: 152738 - protein, 24 aa, Heterodera glycines
RTLSTAVRQRSSKIYSMPQILWAG

SEQ ID NO: 152739 - protein, 87 aa, Heterodera glycines
MEPFELTNEATQEMLTLEKLRNTNLQCLKRQQCSIGAKTDDGDSTASKRWNFYASNTVIFDLRPPNCIGPLSPPTATKAGKSSEKGV

SEQ ID NO: 152740 - protein, 116 aa, Heterodera glycines
MGTAAIKTVELDDSLNGLPVQYREVQDHESSLFLSYFKDGIKQIQLRKDRRNPPTSYQSQLLNLTNSLTKMQVKCIKESLNLGDVFILDMGLNLYVWTPPMSGRLERIKGMNVGNR

SEQ ID NO: 152741 - protein, 52 aa, Heterodera glycines
MTKLFGNLGKNGKKWSKQRQHFHTGTVASFGNQFFTTTVGNCTKALQGTDVY

SEQ ID NO: 152742 - protein, 126 aa, Heterodera glycines
GNYSVKKFLKACNFFDKRPSSKLSPLADKIWSGQSVSGQSVSGQSVSGQSVSEGQSVSGHSVSGQSVSGQSVSGQSVSGQSVSGQSVSGQSVSGQSVSGQSFSGQSVSGQLFCEGQSVSNGQSVSG

SEQ ID NO: 152743 - protein, 175 aa, Heterodera glycines
HPSLVKLSRISLFHWVVRWKSFPIFCLSKIHGLRSLYVSILDGSREGFYLYPNGRNKNMDLSYVSQFPPESGKVVSSEQYQIYCEMGTTFELCKICDERNKNCKLEPCGHLLCKLCLISWQVKNGRKNCPFCRCEIKGTESIVIESYDPCPSSSTLLTNGHTKQRSRADDEDLFD

SEQ ID NO: 152744 - protein, 88 aa, Heterodera glycines
MSAKVKTEASSPKQMNEKAEENELTERLELDFVEESVGDDWDGNAIMECDDTLATADEAEEEGPLKPSPDSPRSLSAPRSPEDEVETI

SEQ ID NO: 152745 - protein, 73 aa, Heterodera glycines
EMNAILNKNSASVVGATLYTTLFPCAECAKMIIQSRISRVVYLSDKNTVQMEASRRLFNITGIKFRSVLPYPS

SEQ ID NO: 152746 - protein, 66 aa, Heterodera glycines
MAVNNEQMMFERKPTNADIPYNNDTIGTDGEGNENQLGIVNVVGVDKRRRMTQVVWKIGHDIFTIV

SEQ ID NO: 152747 - protein, 69 aa, Heterodera glycines
MLKIRNCICKKGPGNPIQLGSHSPASTDGSFNEGGYVLMMCEKITRESGTETWKKAPWKHQWDPKIPGP

SEQ ID NO: 152748 - protein, 50 aa, Heterodera glycines
IPIKFFKILPINWLIFSEKLFINDQNFQFFSPAAPIGTAAPPKLLFFLRK

SEQ ID NO: 152749 - protein, 87 aa, Heterodera glycines
MIKISNFFPRRRLSAPPRPQNSYFFLENGPKSQNLLVADPTRLLGTLPYMDEVLRNLNKDAADVAVAADDLAKREEEDSEQYTGKIL

SEQ ID NO: 152750 - protein, 167 aa, Heterodera glycines
MDNPMNKDNEHNERRSSVGSVRRHFANASVKERREDKLRKKESTVTNESNSFDSDSDSGDNKSGNAKRIIDSTQRGEYKPQLPSALSMYSFLGDEEEENAEESNVFSKSSANQLKVAIGQKTLPTVARPSLLQSNVSLGWKMQLMRFPGAVQSYRQKRTVVPNGGEF

SEQ ID NO: 152751 - protein, 517 aa, Heterodera glycines
LMSRKGDSTTLFWTPMELSVASPGTKRKSGAKGQSKGRNDDERAKRAISTQKFTRTFATVPEFLSPNVRPIIRLRAQSMKRKMVSLHRKMVSLHRSDSAVVFVRLLNGHSVEVNCRTDTLIGSVFHTVAEHLNITEHLFFGHLNITEHLFFGLALQRQFGENIFLEEHQRLEKWAPPGWKGGAGLGGVEQFALLLRFRYYPKKREFVKTANTAHQLYLQTANTAHQLYLQLRQDILSGTLRFSPKERAMEMAALALCAEANSIPKGDEEYFRMEDYMPTVKQTRTYEILMSYLIAERHIAERHRRFAASFGYLEAEEQFIARCQAEPLYGAHFYRVHKIKPKRGYAQAEPLYGAHFYRVHKIKPKRGYATPSRPFLSDTRIVAVLPSGIGIWERNGAQRLLNSTHEWHTIRTLQFDRKRFLLGTIEENIAVDHVFYTDHHSKASYLVRFAASYLVRFAASQHRFMLKMRQWQGTLNRMHLVEWQKDVGVEQRRRSEGRRAKRGNWKTKRKKPFLMGG

SEQ ID NO: 152752 - protein, 46 aa, Heterodera glycines
LNPVNVTTIPLNGAKNGAATEVPTFSKSISDLTKCYENCIRRCFLF

SEQ ID NO: 152753 - protein, 189 aa, Heterodera glycines
MTVNALYVLVAGKSRTGKMFQATENYQPEKCLKMDHGPAMVQSTLTFANRFEKQELRHAEEETAVAVDEGRQLPARPLELTLELDRGIASAKADILAFLNTDYCNDEFVEAMSNYYGRIGHLVGFNPPSNRNEAEEMIIEEDARLLLEQSLDENGLLVDQYFEEMGLNEVQDENSPDVNSEDGEVDIMN

SEQ ID NO: 152754 - protein, 83 aa, Heterodera glycines
EITVSGFPGADRVDIGRLVELHGGVFTGQMNRSSCTHLIAATNSGEKFRISFIGESFCAFTRRRQTAKGFPKFFSDNEKMKDI

SEQ ID NO: 152755 - protein, 377 aa, Heterodera glycines
APSFSISCFLDMTMFSLIKLESRVVDRIDAPILNVSPPNSQISFRDITFAYIPGKPILRSLSFDVPSGKKVAFAYIPGKPILRSLSFDVPSGKKVALVGGSGSGKSTIVRLLYRLCDPQSGQIRINGQDIAAVKLDSLRRAIAIVPQDSVLFHDTILYNIHYGDSAAPVKKVFEVAKTADLHNAILGMPAGYDTIVGERGLKLSGGEKQRVAIARAILKDAPIIVYDEATSSLDAITEENIMRSLKKAFSGRTSLFIAHRLATIVDADIIYVLDRGMVVESGTHSQLVGVGGKYADLWHSQVGGKYADLWHSQHRIGARQKKREEEEVMLDMELSEGKCCGGMHRIGARQKKREEEEVMLDMELSEGKCCGGMTCNR

SEQ ID NO: 152756 - protein, 159 aa, Heterodera glycines
MNLSRHIPSQAFFPDVSWSNPNQAFFPDASYPLRVSSQAFFPDAHYQLFSSVKIVFNINSLPIISPFGISVANFSIGDEKAGANPPRRARVLAFNKGMDGQRIGRELDTDEEDRHGDSVFSVPNTNPWAGPSKTKKYRKKSRKATRRSGGLPIHQFLNR

SEQ ID NO: 152757 - protein, 224 aa, Heterodera glycines
GDDEKQSNLLIPLALRQSPSGRLTFYAIYEYIMNKFPFYRTNRKAWQNSIRHNLTNRKAWQNSIRHNLSLNKCFKKDPRPYDDPGKGNYWMLDPDFKDEIFIGATTGKLQRRRRPNGIGHNYHHQQYGMLRAERRPAQSPARPSAAAVNAMPAAEQQYGMLRAERRPAQSPARPSAAAVNAMPAAESVRSSDFVPIAAMPEIGNSTLLLHLFIGCKMHLYTKKH

SEQ ID NO: 152758 - protein, 81 aa, Heterodera glycines
MAEGNARVGKRQCGKAEKCAEEYAGEQKHEFIAAKKGIIFAIFWLKFHKFGKIWVTDDGSLKTPYTGTTRIRSPTVTNQEI

SEQ ID NO: 152759 - protein, 57 aa, Heterodera glycines
MHYEALLDSFWLKFKDVGNVLEQNVPLAQIILWAWDDNGAQVIKEVITDQNAVSQNS

SEQ ID NO: 152760 - protein, 64 aa, Heterodera glycines
QPWCDQPDDFETYLQLIGDSHSPAKFRVFGSLRNFPAFRNAFNCPLNSKYAPEKHCNVWVSPVT

SEQ ID NO: 152761 - protein, 212 aa, Heterodera glycines
PMIISDYIVLIMRFCQITTGSNGTPKVRPTWMDAHSQRAFDRMAKCVVDEYSQLCPFPPDGIVQPACIDGDKTQAENIADNGGLHAAFRAYRSALEVDGPSKALPGGGLHAAFRAYRSALEVDGPSKALPGKLVGRFNHDQLFFLSFAQPWCDQPDDFETYLQLIGDSHSPAKFRVFGSLRNFPAFRNAFNCPLNSKYAPEKHCNVWVSPVT

SEQ ID NO: 152762 - protein, 25 aa, Heterodera glycines
MLPSSFTTISRKVRSRCALSISGKV

SEQ ID NO: 152763 - protein, 75 aa, Heterodera glycines
MDKVTPNFKEEKRTNAIVVPPKDAIVKRNNKTAVIAHLHVFYQKWALFVVKHRTLIMAICSILSTLGAVKIFKTP

SEQ ID NO: 152764 - protein, 119 aa, Heterodera glycines
LVHHQQQQQLATSGLFQRQQQQNFYAERTSNSSSVVTTALLAQHPLVVNMDTNNVAVAGDDNDVAIVEQQQQQQCRNGGVAADEGENAAATKMTATTPVVVEAVAAAHEGQQQPTEPNK

SEQ ID NO: 152765 - protein, 107 aa, Heterodera glycines
MRRSNFVKTQLETLPHIFARAKNDEALEAMNNAQMINPSMSETWLPHCSICSRVGFTCGAFLAFGRSGGIFLRAEEFGKRSEGGQNNGQKQRADSDVSQSEEAKHFH

SEQ ID NO: 152766 - protein, 164 aa, Heterodera glycines
MSFQELEAQWILVENEFDAKKLSEKLKNNGGNVAEGMPLSSSDCEESFRNALLLKCLIRAGEIGTSYELQAIAFAETDIEDTLISAQIFIAKGQRQLANTQLVNAAKEGEWTDTPNDWRVFYWLSENLLAIGMLEKAKICVEHARKTNTKSELCAKLLDEILEN

SEQ ID NO: 152767 - protein, 48 aa, Heterodera glycines
MPAALSRAASANVRLSIVLHIFATTAPAAMLLRWRRIWQIIKSMPCPF

SEQ ID NO: 152768 - protein, 94 aa, Heterodera glycines
MFRRMLTKTYTKQQKQQMAKMVKEMLEKKQMKKERGTGKHQIHGQKLSDDEHQLRALPNDDSSKMPIVLIGHLDPEQTNALTKAVIPIGLEKLA

SEQ ID NO: 152769 - protein, 389 aa, Heterodera glycines
MDAPKVPAEEPFNEEGLIAEKVRLLNEIEDLKHRLEETEKRKAEAEKKRSKNNEQRPVDEIVLDMDEEDEEEEEEEEEAPQESKRARLDPLATKEIVQKTINEKWEASGLIMIDPRPVDSKEAPKGVESRDWEDSRRLLTREERDRGWSDFVSTIRKEDRLSVIGKVGLGFNGRRMAGNCIRSAEKSILQSEIIQPEGMRKQIPVRNELEAKETEEELERRKRFAAKTPATQGQFANCVWEETAQNTKEEKMKKIENSICQKINQIQQQMTEAFGGLKELAKEMDELTKIAKKEEMEKAEEFHPNSNRFANTNTSTWRQHDEFRYRNRGTVGRWVNNSRGRGRQRPYHHNWRGNEGWPEMIIHNQNHQQVAHLPLTKDQFKNDSNKYRP

SEQ ID NO: 152770 - protein, 32 aa, Heterodera glycines
MPYVNERGEMQDGASFSIVRSFWSLVYFLAFL

SEQ ID NO: 152771 - protein, 25 aa, Heterodera glycines
MTVVVTGEEETKSVKKHKEKDEMTK

SEQ ID NO: 152772 - protein, 51 aa, Heterodera glycines
LQIYWLKLHMKYISKFFDSVRRFDKDGFRFAISRSTFGNWSRIFSAITCNH

SEQ ID NO: 152773 - protein, 42 aa, Heterodera glycines
MQEIAWMSWKDSSKKCQRYVKYLRVCKSQLKGPEFQQMKTSY

SEQ ID NO: 152774 - protein, 137 aa, Heterodera glycines
MPLKSYVCDPEEVLSADERQKLAEMLDSFQEQTKNVTKVMLIDGGQNGCKKKGVTGAVALSKKPLYFEINVMQQAVLSANLVVAHSSSMFAHFMLSICSILASVALTLGILWIFRARIFFMRYDIPLVQFNARTMAD

SEQ ID NO: 152775 - protein, 2329 aa, Heterodera glycines
MPVMRSPPLTRQRALNLGIQLRNEGIGVAQEQQRVQQQHSDVGNAPLSENENRQSHVSSVSSVLGPDTIHRRLLQIPNPRNDMDAQQNRNDLDEDALLDDHGDSIFGNENPHEQNLGGENVRNAVSVMRSIDQGRVRVDIVDDFGFHPGMTSTPNVVANYQRGEPSFMLNQPPAVHQRNLMLEEQHFRFVAQPNAGERAEPRDQLYFRQAQQPTNVGPQQNAEYHHQYIHQRNFPQFETREPHQQNQRNFVENNQQMRFYGNAAPKFCHDPINVPQTNCQGPVQSPLSNLEYVLILDRLPELKGNEGADKVRYFFKKFVSATEGWPDNKRISSLESKISGRAERAFNAALANQPYRFDAIRRAMQAHLEETDCREMGAFDELMNGVKRKPNESMDALADRVQNVVQRAYPGLTQNLIDEYATKHLIRALSNPELSLSLEMARRPGMCFDEFVALAARAESIQKATKNVSTERQNIDERNRPTQRNFSQFGQQFQTQQKSKFLQSFQPRENIVCYNCNEPGHFSRDCRRRKQNFDYRANQSHAVPATGANSFQIRPNGPENRALPQTSTKESDQRRSQNFLKQNCIIMQEEAPPEVFCRGVQLSSEIEEFFENEFKGKNEEQNEVKSLGRVGKILVIKVETFGAKTEAMIDGGAQISLIGATFLYKLIRENGLDLQKANFARTKDRIADVNGKELQCFGTLTMPILRKGCIEVPIHFYVTSAPFGFDILFGTNSLTALGFSLYDAPNKELIKFEEATKNENAVRIIFNTILQPRTSKFVQMEVGKQWNGQDVLICPVPNKTEIKLEQSVGKVENGKVVCQISNLSSMTEQIESKTIVGNVETLESTWEADNSLLPSKIFRIDHCQNGNKIGEAEQALKIGQIPPEGKDDLMDLLHNFEQIFAFSEEELSQTNLASHHIDTGNSVPVRSRMRPVPYAYREKVSEMIQNYLGRGIIRPSSSPWASPIVIVPKKDGTLRFCVDYRGLNSVTVKDAYPLPNIDNTLLALGGKKFFSTLDFLSGYWQIKMSPDSIEKTAFATEFGLHEFVVLPFGLCNAVATFQRFMTQLFEGLINDFVFIYIDDILIASETWKKHQQHLKAVFERIQDAGLKLKISKCHFAASELPFLGHVLTTEGIKMDVNKVRPVMELPIPTSKKALQSLLGFLAYYRKFIFGFGAIAAPLYSLLKKDTSFAIGKLEKEAINALKDKILDNAVLHFPNFEAAKNEPSRQFIMMTDASKIGIAAILCQPDDNGNVRPIYFASRKCNTYESKYCPTELEALAVRFGAKRFSQFITMLPTRVFTDHRALIHMFKSKTETGNSRVDKWLMQLNSRFILQVEYQPGKKNVIADILSRSPALKCPEPPAKSEISRIAQIKICQIQSSVEEANNRMEWIEKTKQSELNFVYEFLSKRIVPQEPKNKQRLTAFLPNFTILDGLLYKCEADGKLRLFVPFTFREALIRERHSGICAGHMSGKKIYLQLAHQFFWPNMYADCVKIALKCRICAHSRKPRANEPPMKIVQTSEPFELVCIDILSIGPANSSHKYILVAVDHFSKYLVAVPIPNKSADTIANEFVKNFILILGTPKKLHSDRGKEFVNETLNEITKVLKIEKSLTSGYDPQANGITERANQTILGMLKRSTASNWTWDERLPFVVFAYNITPSETTKFSPYHLIFGKTPNFPSEISLPVNPNYTIDVDTYIQLFRENIVQLSEIAQKNSEIARKNMKNQYDQQPKVTANKFRIGERAMVIYPGVNTRSAHRKLLWNHFGPFKILDLTDSTASVIPIDKPNFEPIKVPIERLVKVPEGVPNISTLPRGKNPFKNQLNALISVVCLISREMENEPCGKSAAMEKIKDRETENETTNLGNSQKLEHLGRHLIGQLRTIANSVGGKVMETENSCGPLLWDTQCGGLGIEHRNCVQMTAADLDPVLERAGLGLKVIRKWKKIQNGDECGDFKVIGTPMKALLSNFLLKSNAVSSVAGGRKLTQLIVSAPVGFELITYSGAREDQVKSGNFPTEKDIESAFTAWVERCAVTRDKLLKTGYTPIEVPMPNVVAELPESEKLGWNEVLKKASFVLEKVRATTIHRKPLFVEKPRVIVGDSSAKQLLKMWPKSQFIGTEEGTITEVIRAFDGAILSSKVKAVIVMIGRDSIRGEETIENVLERVGRLEQLLKRFSHAPVFWLPPPFIKEKMIEYEELIIRMKEHFGTAQGNVKFVTTTPAGRSVLELWRYGSGFNTDHVSNDGKMTEKGLLVLRAWVMSQIKGMPKEDEKEESEPKKKSEEGPNGGTSRIGRGRGQFNQSGSRGARHVHQHHPYRRQFAQSFPSRSRFGADRR

SEQ ID NO: 152776 - protein, 270 aa, Heterodera glycines
MPIWQALSMLAFRPFITIRRSAPHLKEASKVRLLLGKLGEEEYSKYRDTISPTQPDQVNWNDTISHLKQLFAETRSLFVRRFECFKIRQQQGQDISSLIAQINASCENADLSLTKEQLKCIILVIALNDEHHDLRQKALKMLEDSQKNGTNISLKKIEEELRAIQVVKESALSLVNPPIATNAIRTRPRQWADPAQRQSGGSNQKQTPNANSSGKPTRGQPTHPCGSCGKSDHWRSDCTFKDATCLKCNKKGHISTICRQKKAKAPPNSH

SEQ ID NO: 152777 - protein, 188 aa, Heterodera glycines
EYSKYRDTISPTQPDQVNWNDTISHLKQLFAETRSLFVRRFECFKIRQQQGQDISSLIAQINASCENADLSLTKEQLKCIILVIALNDEHHDLRQKALKMLEDSQKNGTNISLKKIEEELRAIQVVKESALSLVNPPIATNAIRTRCQFKRKANAWSTDASMRIMWQIRPLALRLHIQGRHLPQVQQK

SEQ ID NO: 152778 - protein, 232 aa, Heterodera glycines
MLCPSNALVGGGPSLFGENGTDEYSLNVHGYMTQNHSFIMSAAYSHPIGYYQLIDSNNAPTNQEQIRDEFQTSAIHRAAQQDANGKGRMSLLSSTTKYKVSIGDIQRHINPPECLNASLIGGILRKSANDFNAVLQHDFPAKDIGFFLNAQFLRYVGQSPMDSELVARRRTILNCSRIFIKEITSLLAADRSPICDRRPELMLDPSIQKQLTHFSMAIFMDFIVGSIGHLLG

SEQ ID NO: 152779 - protein, 338 aa, Heterodera glycines
MSVRQKSVRKCRSANVGPQMSVRKCRSANVGPQMSVRKCRSAKVGPQMSVRKSRSANVGPQKSVRKCRSANVGPQKSVRKCRSAKVGPQMSVRKSRSANVGPQMSVRKSRSANVGPQKSVRKCRSAKVGPQMSVRKSRSANVGPQKSVRKCRSANVGPQMSVRKCRSANVGPQMSVRKCRSANVGPQMSVRKSRSANVGPQMSVRKSRSANVGPQMSVRKCRSANVGPQMSVRKCRSAKVGPQMSVRKWLDESGYLGKTGSGYFRVQKSRVRVQVFKPGTGGRESGRGTESGRESGRGTESGRESGRGTVSGRGTESGRESGRGPESGRGRKEEENEK

SEQ ID NO: 152780 - protein, 82 aa, Heterodera glycines; identical to SEQ ID NO: 137111

SEQ ID NO: 152781 - protein, 35 aa, Heterodera glycines
MVSIWAFIYEIDQKIKKDEQTDFHYVILILFFDLL

SEQ ID NO: 152782 - protein, 164 aa, Heterodera glycines
MNYLLATILIQQFIILVCGANEKEIITLHEFMCKELTENDEANLYRNTKDWQHIKTIIHNEQIMDKFETLIEWQIRYSSIERWFNYCENLKTYINSKNVNGEALLMSISLKPKFTLPNRNGILPIAKAMANIVEAYKNIFMGNCEKIFRNCYKKIIKQEEILQK

SEQ ID NO: 152783 - protein, 388 aa, Heterodera glycines
LPKIVKALLDQIVAEGEELTFEVQVAGEVDQIRWLKNGQPLDKDGRVKMIKVDEQTYRMTIPSAALSDAGEFEVQAINDTGKAVSSAHAEVDQAPRIVQGLVPADIAEGDEQVFRVETSAPIRTVKWFKNGREIEAPPGARIRLKDVSPKKYELLIDDAQLDDGANYKVVLSNRAGECESSADLGVCKPSVFKLRSGLQDVTIDEGQPLELMAELDGEPAAVKWFSNGEEIKPDKRIKIATASNEAGQAETKCQVKVLTREPEPMAPKFVIPLRSIEGTPGERAEFTVKVRGVPTPELQWILNDAPIDFAREPRFKLEDMRDGNWAMTIHRKALISYLGYVPYTHTVHPLHPQFYRISQRPTLALCAVWLSIRSDAMSASPTSTQRGL

SEQ ID NO: 152784 - protein, 137 aa, Heterodera glycines
MLWKEKMFNVNLDTTVKKLEKLFVKPQSIFIDRFECLIARKGKGEDFRSFVNRHKRLITDFKFSDLKEQQFYVLMLLTALKSHGDAMLRQRILSKLTADGDNITYDAVVEDCMKFMTTIAENKVIESSSSGSQRRKP

SEQ ID NO: 152785 - protein, 53 aa, Heterodera glycines
MRGMKFLLAFLIIFDAGKYFEVIIEESEPNETISSQVKAMSELKMDDPEKSFT

SEQ ID NO: 152786 - protein, 31 aa, Heterodera glycines
MLSNLGLDTQFQMEKFSPHIPFLETFCHLLL

SEQ ID NO: 152787 - protein, 247 aa, Heterodera glycines
MSHTDLPPKAKAQRGLPQNGFQFDALKWAQVHQLIPPPTVLYPNPQILRTAVVVPINQQSCSSSSVNGVQLMPTNGEMIVTPCQQQQPQHQSQPEHQNHQQQQHQNQQQQPQHQIQQQHHQMHQNQRQRAIEGESRFTPRRFGPNRSHPYGGRTTASHRFIREQRETQLPINWPWNPLPRIQIPVEIRRVLLRRLAQEREHAFGLAGVMRQWNPPMALLLLSMEAFYSTLLAFVVNEGEPGPSLPQL

SEQ ID NO: 152788 - protein, 80 aa, Heterodera glycines
MTFSSSVVLLLPVQLLLVVIGAVFIILSQCCGGGSKKKKPKAGAAVPTPQTSAVGGPPGAAEAPSSVSCARLGFCGWPAR

SEQ ID NO: 152789 - protein, 180 aa, Heterodera glycines
MVLVSEFCAQFLSCPTKSLRDRLNHPEDRVRVLQQLIGKKVQTTYKDRNGMRKCFFVGGMTERGAAFEPAYGRLRKPFNINVAAHFYARHRVKLHYPYVPCIIEGFIHGEDRYYPMELLEIVDDKKGGRLFGRLFTEIEEQEEEDTKSECSHSSNTSIYNVTVKDAHGMKALTKLPPLGV

SEQ ID NO: 152790 - protein, 233 aa, Heterodera glycines
MDTFEEFVIVNEKSFTDILLTFGYNRGGISEIKFSDVTQFAALEFQLDYAKSLEIKHIGKTAREILPLAQIIRWQWDEKGSQQITDTQILTTEGSVRFHCLDYLGSIVVRILKKKDDSHTAENPFQSLNSPDDDFMVEIGDRKVALSASRLRCFSPVIDRMLSVEMREKQQRSVTLNELSIDMDQFLDFLLYISPNALSQPILPNRKIENKNKLQSANILLYDSNNLIYEIIV

SEQ ID NO: 152791 - protein, 55 aa, Heterodera glycines
DFVRLSVSLLLPGDRSDAQRGDEGEAATIGHFERIALTWTNSWILFCIFLQRRFR

SEQ ID NO: 152792 - protein, 381 aa, Heterodera glycines
MASKIETKKQQVKLPHEGHLYIFDKMSVNGAIKFWVCEFKDSVNKCKGRLWTDLNNHFIRLSTPHTCPANASNVEAQQVKTTIKLRAITTLEPPSVIRSEALQNVPSPAAILVTKRAANDLIKRARHEINAPPAVPTNLNFEINQAYRTYTSTEGVEELFLLGDSGVYFENGKTPQRILLFGRDSFGRFADRMNECFGDETFSLAPAQFSQIYTILAKSRYCSDPVFALNVRMLTSVAFVPLCDIRNAVTALDMEFGNLVAFRPLIDWLLDNYVGRPRPNGTWSQPLFRPDQWNVYQRTLDGNARTNNNAKAEHHRLQGAFNCRHPSLWHFTDVLRREQKIADHKYNSAIAGLSPEKKRGKYLAADRRILNMVRNYIPLNA

SEQ ID NO: 152793 - protein, 147 aa, Heterodera glycines
MCAFLLKRRPRTYVITIPTGGTLIQVYVQPKEKPTHQPIVQIQFDVKNLPRRKPVSADDEEDRSDDEMDDDEEDDMYSPKQQKEACKQPKRLEDGTLKNALDKDDMNNVPDALKINKGGGDVQQIRGTTKLKKYNVPDALKSNKGRR

SEQ ID NO: 152794 - protein, 24 aa, Heterodera glycines
FDNVLNAISNLDGNFENKQIISQI

SEQ ID NO: 152795 - protein, 58 aa, Heterodera glycines
MPNPFLFVLFTCPLSVIWATRKSATRNTFEKKQGWSEDRKLTRSRSPDPNCCVALHPW

SEQ ID NO: 152796 - protein, 171 aa, Heterodera glycines; identical to SEQ ID NO: 148614

SEQ ID NO: 152797 - protein, 36 aa, Heterodera glycines; identical to SEQ ID NO: 132129

SEQ ID NO: 152798 - protein, 367 aa, Heterodera glycines
MTKYQGNLKNVNVQNAKNRKDLDILYEYLYREYAGIPTVKPKFVFKNEIEIEGPIIYAEMFKKAEEKAKKDAPSWKANKINDDKHEIILDTKFDDQKTLIEDALFSEFVKGLATNWNKFFEMAKEYSNYLSRRKKQRNFYGYYDEQRMISYGLDEIDKMKEHLTQKYEAHLGIMYLMRETWQCEKIVDQLTKYKRKEYLDILFEYLFRLYVEAKNPKVSKQLPPLVKPIFIMGVTSQGYSYRLIEIIETLNTNSKLFWEKDEYATLKFELVNEEELNFENKEEKNLFHKNIQKGKQILKGPTDIEERIREEFEQKMKKMYENAKENAKEEKAKMEKAIEKAANIDEKGALKDEYNEKFGTFISSPFL

SEQ ID NO: 152799 - protein, 281 aa, Heterodera glycines
AKYKAFRLENKVAVITAATNGIGLAIAERLIGLAIAERLGHEGARLVVSSRDEDNVKRAIDRLVSSGLKRSDLAGHVSNSEDRSRLLKLTIQRFGSVHILVNNAGINPIFGDLLDVDESAWDKLFDVNVKAGFMIAKLFAPEIEQSGGGSIVFNSSIGAYRSPQGIAAYGITKTALLGLTRALAESLAPKGIRVNAIAPGIIKTKMSKALWEGIERSSAEAIGTLLWEGIERSSAEAIGTLMGRLGMPEECAALVAFLCSSDASYITGETVPVAGGAYSRL

SEQ ID NO: 152800 - protein, 152 aa, Heterodera glycines
TSFLTAQVAKEKPPLTVVGDVGGKIAILVDDIIDDAQSFVAAAEVLKARGAYKIYVVATHVLKARGAYKIYVVATHGLMSLDAPSLLESSPIDEIIVTNTIIVTNTVPHEMQKLRCHKIKTVDISLLLSEAIRRIYNNESMGPLFRDLTIDD

SEQ ID NO: 152801 - protein, 160 aa, Heterodera glycines
MAKISLFLAKNDQSVHEGGADHATAPTPQCRPVHRCGGWPGAPDDRHGVGDGPPALFGHEQATSAQRSRQTLHVPRSSRRTGPHPLEGHHPLRHRCQELPLRGRHENEGPEDSLPPDCATGVRHAAHLGLEAQQPLLNGRGVRLAEATHRRRRKKDEESA

SEQ ID NO: 152802 - protein, 50 aa, Heterodera glycines
MDILTPAKKRKDKWTKVKCLLTKMGILTAVKKRKDKWTKTDKWTKVCEQL

SEQ ID NO: 152803 - protein, 168 aa, Heterodera glycines
MEWAEMPAEWLLPSMLHVLSNRELSSVANGSEIEMDSKLREEAEKGAKQLAFVEHVPELCDYLPSLGRQQVATPPKKAIQDEHSVGIWHKPSHRRIANDGESGRRIAEEKFNEDEHRTVQLRKVRSGGRLNRPSIPFPGSEGKNGEIKRSERPKGRTTYSVRISVTYS

SEQ ID NO: 152804 - protein, 205 aa, Heterodera glycines
MADDDLEDKYVALKAKVQDLEDRLANRVPNYLPPGVKFRNMMRANISADKKTNWRTLTSEIAELTKKLDGPMWARKMLNKTKMGINGSVTEFANKIRELVEQASPDPNYTDEARESESVHYFLNGLPTKLKRKLFVMEKPDSLIEAIAQAKKVIQVNEEIEKDEKGDEMKQQIAELTEQVNAISFQSKVNNERNGHENGREFVNP

SEQ ID NO: 152805 - protein, 339 aa, Heterodera glycines
MGHTMKRLTENLWTTERPSKVEYAWIGERCETTVNDFIEKGQGGILDFYLVTSFGYNFNPYNGWEEGQKWTFIWEIPEPSEAYWATHFPVGDFVAEVTENAIVLESEQSVFYFEKEKGDEREGIVGVPDEAYKMSNDVFILIHTPSPQKAREKRETKQKSEPQRKERPAKQEVFLKIRPDQNSKFENLDPASRPKSNWTRTTLGPKRNTTELIILSTPVPQSTSTVGSTTKSVYKAVGKKVKQLVATTTKAPFTTTKKSKIENTLKKATPKPKIVGLKSTTLKVLSTVRPSTKKVVKIPARMTPIPPTTQKIVEKLELPKEKGEKKSDSIKAEKKMKSY

SEQ ID NO: 152806 - protein, 76 aa, Heterodera glycines
MEEFENSFEDESDEEVSVELFDENEIFDMERRKRTTVTTPDARWIKKVEKSKLQLAKAVLQINPNEGVKKYLIETI

SEQ ID NO: 152807 - protein, 74 aa, Heterodera glycines
MTEQHFGINCVDLELPMDISQFTVNVSATLFDLSCEEFLKKPDLDELPDYYLQVSKRWQLDACEMVPTVMRCKK

SEQ ID NO: 152808 - protein, 60 aa, Heterodera glycines
MTINFWHWHKMQMELFFLRHSEYERLFNCTGLDIDSIPLERRQNVPESIAVCVLCTIYYV

SEQ ID NO: 152809 - protein, 61 aa, Heterodera glycines
MGRSRLSDQMLIGLREVSAKLRSDIKQNGPCNIDLSKLISVLNGSSISMLLFGHPLEEANN

SEQ ID NO: 152810 - protein, 132 aa, Heterodera glycines
MDPASPAAQSLSGSNSQQPPLKTHGVMRAGTIGSAAGTAFTQPQQQQQQHVQQLFQQQQPPSAFSAPNTPNQQQQNISQQQLTPAAAQLGTANSPCPLGIEEVCKLPRLSLNGVRFKRRRCKKVGGEEPAEE

SEQ ID NO: 152811 - protein, 222 aa, Heterodera glycines
MPTEFFFQVLSYLSSSCSTCPVLATAFKRWLVRLFSNVYDMYKLNDIVFSSLGIGVFHSGIEVYDTEYAYAYGGHPFPFSGIFENTPRDAEELGENFNFRESIPLGETDFSAEDVNKESIPLGETDFSAEDVNKMIQNLGQEYRGDSYHLITKNCNHFSAILSKVLTGQELPPWINRLANISGSLPFVERWIPQEWLTPIAEWLTPIALQQSLDSRERGFTS

SEQ ID NO: 152812 - protein, 112 aa, Heterodera glycines
MVDDFVKKTISVPPRNYPKNRSPSSDSSFPVSHPSTRSNSRNSRKTSPPTRKRRLKHNISQGKRTQRQTKEAHLSKQTMECAKAIGLDSDYLRKIEEQKKLREEIARKKNQH

SEQ ID NO: 152813 - protein, 91 aa, Heterodera glycines
MKTCWRFFLIINEIVINSDQISNLMLLRWCQLREQAAPRVPPLCHNSLKAPNAICCRVIWTNTCGANLMEKTIAAYENIFEQIAQFYVVNA

SEQ ID NO: 152814 - protein, 102 aa, Heterodera glycines
MISNYLINHIFFGRTSKGPTKRRRRLQTGSEHKQKCHIQLGFNFPKSFAGEQMGRAGQIAHRRNPRAQSLPHGRTSPRVGAVFAADPKLVLCAANGNAHLDI

SEQ ID NO: 152815 - protein, 375 aa, Heterodera glycines
MSHFGVSLLPIGIGLIIMLILLIPSSTDGMKITLRVEMGERWIVKQMKDNPFFTFEVEGTDSVATLKKKIKDKIKEYTGRSFSLALQTLRLNKFGLALEDTKTMQEYGIKDDQTIIVCTLGEFQIDVKYGKKRHSVNVKDTDTVATLKGRIENIKEFGNIPHEKQILIGDGVIVFKNSETMDECRIKKGDTVTVSWEKFEISVKYDEKEPINVEVKFGEKEWSVEVKATDYLSQLKEKIKDLTGISIERQKLHLNRRMLFGHTMMFNDIVKGDTIFLEDVFEISVKYQFSIPYSVFDFCKVEVNAGDTVKIVKEKIKAMIEENWERCGKLVEMELRKNDRFGEVLDNYNETIEKAGIKKEGDTIYVKCAFPPKSA

SEQ ID NO: 152816 - protein, 68 aa, Heterodera glycines
MRSVRCSIVSFGAEVFAFKRLCATTEALPWTNSIWSFCLTNMSNRRPSNAVRVSRTQSSAWAFPNSAA

SEQ ID NO: 152817 - protein, 292 aa, Heterodera glycines
DRPQHRTSTLGEMAAAAAVGNASASAILVNIARALFVRALLMAHSLLCIWAAAETQGDNSVWAFALLAVCLVGEGFYAVVVRAGDDPKWFSPAVLLYLFATVPVPPLWLVHASMCPTAATCPPSVPRPPPLRRSTCPPSVPRPPPLRRSVCSPTRARTRKQLLGHSLFLALLLTRWLLPRAELSREELTQILLAYAAVVTDILEFVGLLNACAVCADPTLQTAVLGAWTLSLAQFALVLTASRARKMRIALATKIIQRMARKIRKQRMARKIRKRRGYCTFATVLLLGQFLA

SEQ ID NO: 152818 - protein, 30 aa, Heterodera glycines
ARGNIKGIFVFSDPENPKNPKLNSFCFYKF

SEQ ID NO: 152819 - protein, 260 aa, Heterodera glycines
NFTQPNEFEDQIGHQLTCQSIATDLAHLQIAIPSTSNVFAAIEQHELSVVEAAEDVTLERISSLKSRLAKVDLDTAQTGPSSTQKVDLWALLKKKRTILARDESSEEEARASLREMALIDDELGDELKGNAEFEKLSRQWTSKKAELDRLMILNDQLKRICGRLDEGQGEEANAEELETELDALARSLATTALAHSDNGTSAAAFPLHRQFIRRVETIKKRIHRRMAEEQRQQRHALMHKIEALKMSPEGDLPVALEVAE

SEQ ID NO: 152820 - protein, 93 aa, Heterodera glycines
MCAFKALFEKCMEKAQSEKQIEGKETKKTVEIQNKMNLNPFKSVKQLELNALKTQILGAVPELFEAQTNARISVPDIDLQRMLDQILGDSIGP

SEQ ID NO: 152821 - protein, 316 aa, Heterodera glycines
MGEHPNDMSIEQILDKESEEKARRIAEKQIIQTLQKADNGTIQKLRLSDDLPNLLEREEAELKAELACMELNGTEKSSTTTDEPKPNSHSPYDDVVENHRFDIHFESNGPSVQPTTSSAAGATNRPPTDGKIRQIASFPHLKQSPFLSNGREEQLEFYDNVNSFCPFESNGRSPNNLNYNVKNGRQTDDRPTPPPVPEKPAFLRRTVSNTMVMNSSNDANNSSKIIGSIRTYIPDSEVEKRQSQIFDQLREQRERLEREAEEEARREQTQWEEQQRRAREAEESIRRIAQKARSSNGFVRRSWANGHKRNRLFGSM

SEQ ID NO: 152822 - protein, 151 aa, Heterodera glycines
MTARRLASAVWRPSPDSVLNPSHPLNSTYWPGRSLTNTIIAYFDKNYTQPKFYKSFRLSGPQKQAVKDGKLKSVIKIVPKKNVATTSLSRTEQHGLKGKERSLLDAAKWGRRVLKGLNVVGVVSDCGKVILVCKEKGLSEAAGTTVGIVVE

SEQ ID NO: 152823 - protein, 21 aa, Heterodera glycines
MSHPNAFRHSKCIEAYDQTES

SEQ ID NO: 152824 - protein, 119 aa, Heterodera glycines
MIIFWMSMLVTVTSKFFGPNCLIINYKSDGSVNPPPFFYFEMKTINVKKYVEMQQYCISCEHLFSSEFLSVVALIWPLGGLFSQRMDFVWVGYFFIIKLFFNKSLSDLFYYEISVMKKE

SEQ ID NO: 152825 - protein, 304 aa, Heterodera glycines
FTHRRRRTAAASDRGGRAQQSEDGGGERVTDEGRAAGGGRGQQPTTEAARRRRRRSHKQRPTGERPPTVDNNKKTAQRTGRLLVSQPSIDHHRPATGRNSGAGDSDDRKEAAEASGGGRGAPQLMRCWWWLCCWGCWLAIPSTIVIIITTTFTSTTTAADGDYSLVDHEQEQKQQQHHHQEEEGSNAFKSLFLLAVDKDHQQDKEFLLNDDDDNNQHHRVEEQLPLLFIVGSTVGTALHRLLLSIARTTPMGWPDWLQPHIDAFVLWVNGLLEYWHLGYLETNKNGLTSFCTDQRPRGVGLFGH

SEQ ID NO: 152826 - protein, 173 aa, Heterodera glycines
MVTHLGKPLNFEIGDAAMTDGRPPVSAEQIKRAVRDAVDVLIQRHQRLPGSIWRAMFQRIGAKRTTPSGLDDGALLPADAEAARKEWRRRHRRRTDREDNELQQNAEDDDDKDGTIDQSRRGHFGTAVMVRDESSIVVDALSPSDKELAEVPLLLPSSSSSSSARHADRRFGD

SEQ ID NO: 152827 - protein, 195 aa, Heterodera glycines
ESTEEAVLRELREEAGIRGKVLFCIGEFVDDQRFHHTTLFFLTVREVFTEWGENCENGRQRRWMGMDEARKSIKHNQRDMLERSIKIIEQTLGEQLEPSVSKCLSAVPVVSLRAAEDGIGIQQQQQKQLSPPSTAKSTAQVLVTYHHAFVVLNNFSSSTAAVSQSVSTDRSHRSSAICDSQKETAMEQNGTTIGG

SEQ ID NO: 152828 - protein, 48 aa, Heterodera glycines
LLKNLICQVPFRRCYGTLIQPTPFICERMQHDPKLKEKVERVQKEYEV

SEQ ID NO: 152829 - protein, 57 aa, Heterodera glycines
LGKPFKASTTAKKFEGIVAMSASFPLRFGVLLDMLRVFEPLLPRFSKLRGLCKTRLP

SEQ ID NO: 152830 - protein, 213 aa, Heterodera glycines
MIFTIAPSVALVAFLFFPNFFLYVCFANTHFLANHQSGAIDSVSDSPFQIRQPHSLPDLLGQLEWIRELTAIRTFIRDKQVRTIFASIHSTTETLKMDFLSRMFPNDELGNSQQSLSEEPNCAHLTGTTEERKANEVSTTKEFRSFVSEYQLARLSEEQLHHLGLFLAQKLTANDEKSRELALYYAHFYWRIRGDPLKSQQCLRLYLKRRPNC

SEQ ID NO: 152831 - protein, 212 aa, Heterodera glycines
PIILPSLIFDQQQHSAQNRSIHRRFTTSTTSFTTYPAQPPSYSIEPVGQAMPSLSYPIGPPQPPVPPSYPTVPQAPFAGTTSPTAFVHAGRAARHVVVERPCCLSLIINCPNNNCNCPPSSCFPYTHSGGCSATEPCPIPPYLAGTGGYPIGMPPKFPAIFPPMPNYPGIPMPNYYPTMPRNPGIIYPPVGATNYPIIPPLPYAVSPLPNYP

SEQ ID NO: 152832 - protein, 34 aa, Heterodera glycines
MPLDSLCQQKALAALLVPLLLRKKLNGYFYRSTN

SEQ ID NO: 152833 - protein, 93 aa, Heterodera glycines
MLIKKGSNTKLIRSLLHGDLISPFWLGTREHKILYNIQKTACLYDLYRLRHRNKSRRISAGLNRRPTIPKACGSTFADRHYRFWAIKVYSGEN

SEQ ID NO: 152834 - protein, 17 aa, Heterodera glycines
HKHLFDLFYHIHNLIKI

SEQ ID NO: 152835 - protein, 262 aa, Heterodera glycines
NENTQLNKEKCEENATASEDPLHIFDLLSITDTRIPELSARAGQPSPYLILQEYLKRCSTYGNTTIQLTTRRLRHQRHEFALSVGGNNSERVRVVSTNKREGKQKAAQAMLKKLHPNNSTWGSLLRLYGYEAQMKLKEARKCKDSVTKLQGISDEKWQEGKATGEFQPNTIILKKLQSEMLKLSEGIISQQKDTKIMPNCQQTIERLLEKEESGEPTAKLRRSDFHSELPILTEEQLRQLSSKLAIKYPNDEELVHIPSLKS

SEQ ID NO: 152836 - protein, 64 aa, Heterodera glycines
TVEGDANILCKLSAPSVKVKTEVDLHNSQLNADQLYEYAKNCFKFKNICVLRFRKWSEARNFYK

SEQ ID NO: 152837 - protein, 154 aa, Heterodera glycines
MAKFRLIVRWEGAERRRGQRANVCRIREFGSTAEANGRVSQQCQCQGGDNGRMGTVGQSMLIVNNGQLEGPIEGEVIGRVRLSASSNSQSYSGCANEGIFVVGTGKWTDYEVRIYNARFRESLALGKQHIEQGQHIGHRLDCAGEEVVQSVFME

SEQ ID NO: 152838 - protein, 118 aa, Heterodera glycines
EVDLYTVQVSDLAFETTFSLRVIRNDYVQALVTFFTVEFTKCHKRVGFSTAPDCKYTHWKQTVFYLYESLTVKKNEEIHGVFSVVPNVRNPRDLDFRIQISFHGDLCDLDEDNTYIMH

SEQ ID NO: 152839 - protein, 172 aa, Heterodera glycines
EIHKLRKEREAQAKERRTQRRRERIEQSTVWEQLTRTFTAGSGDDDSDEDNAAEGAAERWKMEPISLFQRVTTALSTKAVNMAAMLYLGIDLLLCIVFLAVQMVGAHWVQLSDIFRDCRLPIFLRVGFPIQSRDSYFQNFVGLGMPSLLFTYVPFSEQQMSCNRTDGDGPPK

SEQ ID NO: 152840 - protein, 77 aa, Heterodera glycines
MPSEVNAAALVLFAMKLFFGLDGEEDKQQSRDGTNEATQCADDDSPSPVFSFDHWLLQLQLRMHCWQGTTVQKVLDN

SEQ ID NO: 152841 - protein, 320 aa, Heterodera glycines
MDRDRIEKQKGNDRTELTGVHLVRHGNGNGKSDNAEQFSVVRTNGTCFTLKLNRPLEADLSSPGFLLRRLEVIDIDRGIGGICRFSLEKTQNEKGAAEKGEMFALDSQQCQWPRCWANLRLKRPMAEGEVAKVRVKARDGAGMTRRANEATVELEVIGAGANGAEGGGGEKRGRGRGGKEGRKKEHETEEAKVVEDKINKKEGRKEQNGNGRNGGEGRERGGREGGGTEEEGGRERERGRKGEGGTEEEGGREREIGREGERGRKGGEAEEEGGRERERGGGEGGERGGEVKEEGSGKRKIERKEEKLKEGTSLDEYRMP

SEQ ID NO: 152842 - protein, 108 aa, Heterodera glycines
MLGQPSLEKANGRGRSGQSASEGEGRGGDDEEGERSDGGIGSDRGGGKWSGGRGRRKEGTRKRGKRGAEEGTRNRRGETKRKRKKRGRRKRKRRKRRRRDRRRGRKRK

SEQ ID NO: 152843 - protein, 98 aa, Heterodera glycines
VNGRVAGTLSPLETGQLGSEGSRVGIPTESRSRSIPNILEKRSGRIPGRDPDRIPINPEDFFSGSRGIIGICSNPIFFTFCAKFCSNVYLIFIIDQFD

SEQ ID NO: 152844 - protein, 209 aa, Heterodera glycines
MERTFVCIKPESVRRCLVGKIIERFEAHGFRLIAIKMIVSTRKQAADHYIGCSDQPFFPKVISYMTSGPVVAMIWEGVGVVKGIRKILGATPDKVPPPGTLRAEFRNNSDVGKYHDTVCHGSDSAEDAVREFAIWFDKKASVESRDQTGSGSRGISSGSRGIKFGIPTSGSVPSDFLNSSGLIGIGISSGSRIGIPPDLPWDPAGLKSR

SEQ ID NO: 152845 - protein, 155 aa, Heterodera glycines
MFRTFALLLAVVKVYGGRAKSLVNLSESVLNGINVNRLMQMGKRQFNWMETVKTLLKQNGLLSPDEFREALPLGAFLYDFDGMALRVVALEITNGIGKINGTKICKIKSSTSSTSSIDCSLDGIDMASLPDFKRPCEERWPELAPIYCYGKILEV

SEQ ID NO: 152846 - protein, 176 aa, Heterodera glycines
RWIKEDTEDKKDPWKLLNLRTTQIVPVDLNALIYNSEKSASYNKTHSEFRKNFVAVFKSDGGTFNDYELDTKKVRKRTYYGSTVVPLFTGCLGDDKDAEKAAKRMFKGLMEIDKKHGIFNNYPFGVPTRMQKFAFDKAQQWLSANYKLYKSCQNFMWMKMAAQTGTPGAKGDFHAQ

SEQ ID NO: 152847 - protein, 61 aa, Heterodera glycines
MKDVCPNSSPAFDGATNVPLLANTLNPATADGTGASSTMGCSMCQSPLPGFLRTAYLLVKY

SEQ ID NO: 152848 - protein, 115 aa, Heterodera glycines
MSAIIDHCSVPCVYGLLPNKEGATYLEGWHAIWNAHLKGNQRLSGFVRKMIEEDEMWSQRIIDYQIAPADGIRGPHAARKGKYVRQDNNLNALLQDIGNRDPLEYLRACAYHLHF

SEQ ID NO: 152849 - protein, 118 aa, Heterodera glycines
MLLWHFIFSIIFFVYKIESAKIRPNFDEIFGDGLDKKESEQTVKIEQKEQNENLEFIHFLQPNGDEMGNDQIDQMDNSDDQKILKCDQSYKKNETDQQKSEIVQNLMQLKKSWGNGKI

SEQ ID NO: 152850 - protein, 235 aa, Heterodera glycines
MNLWHLLFIIFFFIFAIKSGKIQPNFEEIFGQRWDKNESEEIVIIKIEQNDQKEQNETTGIDQIGGENGTDPNDQQKRQIILKFEAIKEKLKEKGKYKWKDQNKIERKIAKLLGIGRHKIYKWKKELNIIKKMGKSFYEEKKREFTERFDEFKELYGQGKQKEFAKELGISEATFLKWKKELMPNDHKKENKLKKLKHYFEIKEANPKVTDEIIAKKLGIGSATLTRWKREFATS

SEQ ID NO: 152851 - protein, 230 aa, Heterodera glycines
ETFSRMGEADQFPLILGRDCSGEVVEKGRAVKDLDVGDQVIAVVPVIAVVPPHCQGCHSEFALSFTNAVAPKPASLSHTESAALPYVACTAWAALVTTGRIDPNKAQHLRVLIHTGRIDPNKAQHLRVLIHGGAGGVGTMAIQMLRCWGVEKVVATCSAKKMQLVEELGAKAVDYRMQLVEELGAKAVDYRAKDAKQQLVAEGPFELILDCASTELAEWSDELLGIWRAV

SEQ ID NO: 152852 - protein, 130 aa, Heterodera glycines
NSMVMQQIEQIKYLLPYIRFWRALKAFDAEDKAKFLQFVTGTSKVPLQGFAHLEGMNGVQKFTIQKDTRSNSRLPSAHTCIQKDTRSNSRLPSAHTCFNQLDLPEYPDYETLHKMLLLASRECSEGFAFA

SEQ ID NO: 152853 - protein, 78 aa, Heterodera glycines
MRAWAVNAFNAPLVLSNVPMPTIQNDNQVIIRVKVADFYLELELIANSQAASVNPIDVRMSEGYGNEVLSKIKCLTEF

SEQ ID NO: 152854 - protein, 209 aa, Heterodera glycines
MLRKNGKTREEEEKDENSIGEGGETEEKERKRKNSKQEGMEKEEEKDENSIGEGAETEEKERKRKNSKQEGGEKEEEKRMKLKRGRNSSKSTLFNFADPLRIGRGRFRVSSCLGLKLVGFVQNIHVSNPNPHSDKFLNFLIFLFLAANIFYSNLSVWSDNKLRSHFMVSGNTSEKIDNVFGIHIGIGIIGIILGEVNVIDVVIECAVMF

SEQ ID NO: 152855 - protein, 90 aa, Heterodera glycines
MTFNFGKGGSFNAQSGGGVLVGGDKFGTNSTFGVDKKGLVADTDMHLLDNKTLHGGLGKEKNFIDDLADLIRQRKEEKQRQKEQRIAERI

SEQ ID NO: 152856 - protein, 136 aa, Heterodera glycines
MPSKEVIPGTDRLLRANNANVRPQLQGVDNAKDCLTPSTTGNNQPTREQPKLMDIDERIGMDDEDNDDGDRFGEAAEVLGGGDNANRVGGERVVGNRLRKRRSVSCEPTANSPAKMAPHQPADDQSAGCLLQVTEQ

SEQ ID NO: 152857 - protein, 150 aa, Heterodera glycines
MIVVVDVVVAVVCAFLLLAHCLPELLKADYFAFGAMETTAKLKYWVLQNEAQMEPYCERSAAAQQKLGYSTKDSEEMAAIPMASRANLKMAAIPMAFRAYLKMAAIPMAFRANLMIVHRIGRDLTLAECLVGGAAFARCIKRRVNELGRL

SEQ ID NO: 152858 - protein, 50 aa, Heterodera glycines
MKRPMDDEAGEGPSAIEIQNVQMARSENDSRTAPKLFIRTGKHKKVATPS

SEQ ID NO: 152859 - protein, 169 aa, Heterodera glycines
MLRSLLFAAVFASLLINCYEARTIRLANSFLCAKSGFTVEEGLTQHEANNIQVKGEEISNTQTEPVPILLVTANVEFDVVFHTNSKECKEQFKIKEDSKGCKKKGTLVGHNDFPKTPHCGESCTGYEVVCTVVKLASVEEQETGGIVGLKRSEFARMFGGAKCEWEAVI

SEQ ID NO: 152860 - protein, 161 aa, Heterodera glycines
METLQRQRKLDIYDKTQMKGEGGEQKWEEEEEEEEEEEESEYETDEEEEEEEGGNCTGEKESGKEMEELEESGKKEKADEGDKGNGEMEENGDEETEEEEKEEEEEGEEKAAEKKQQVQRENKVSFLELEEEENSSRGEEAEEELRMFTLFEKIGELVLRD

SEQ ID NO: 152861 - protein, 111 aa, Heterodera glycines
MSSFPKAVNIKIEHNNSFSDHDYCYKESAVEEMDEENRSFFVDVENDDEYDDEYNARGRKRRWGKRTDKLRPDKVEYRVYWKGYPIEKSTWEPEDNLRLCQESIDRYEQRE

SEQ ID NO: 152862 - protein, 191 aa, Heterodera glycines
MFLCHLIIIIFFPYKIETAQNQPTFDEIFGNGWDTQYDSEEKLLDKNESKNEQNYQKENFEFNHYADHVIEENETDPFDQMNNWDKRNIMKSYQKNESNYKQKREIIQKFDAIKNKLKQKGKYKKKYQCKIEMKIGKHLGVSRYLIFKWKKEFLNDQQKTDFSDQQKRETVQKFDAIKNKLKEKGKYEWKN

SEQ ID NO: 152863 - protein, 354 aa, Heterodera glycines
MRTQTIFSIAIVLMICEVNSFPAFSSLFSSAFGGSKKVENIGTTNDESHSRQKRQAETVVSDADTITLTISGENLTVTQETLADGTVVLRITGQNTNVETSNADDSAIETATEESATAAEDAANDESATEAANEESATAAEDAANDESATEAATEESATAAEDAANDESATEAATEESATAAEDAANDESATEAATEESATAAEDAANDESATEAATEESATAAEDAANDESATEAAIEVSSTSVAASPTTKATAPLKPPAKKPGNKSSSSSSCSSSESDEKKQGPKRRPTPPHKANKKKGNQKHKKGRNHQKKGHGHHKKGHGRPHRHQHKFARPDFGWFHAFPQYFRGLRFW

SEQ ID NO: 152864 - protein, 189 aa, Heterodera glycines
MEKVIVQKLGWRENDRRENDPDPICEAKDPTQAENPTQAENPTKAENPTQAENPTKAENPALENPTQAENPALENPTQAENPALENPTQAENPALENPTQAENPTQAENPALENPTQAENPALENPTQAENPALENPTQAENPALENPTQAENPAQAENPALENPTQAENPTQAENPALENPTQAEKFE

SEQ ID NO: 152865 - protein, 43 aa, Heterodera glycines
MPRKLDLVGNEKTYSSKTRLARKRPVQKIIDSAFLELSETRVL

SEQ ID NO: 152866 - protein, 27 aa, Heterodera glycines
MCYYAISFYFINVIVHFFIAISSATSP

SEQ ID NO: 152867 - protein, 189 aa, Heterodera glycines
MNQKLLNEERLNYFDNKRLINVNYYDKNRSINEIILNLAIDAGNERQKNESDFEEIICRQCFDKNMEEMLRKAEERAKEEEDKLLEDNPEEFEDEEIEEEEGERKFDVHKIVTNSKFDDAINWTDEAIFTEFVKGKATKLEKFFFLMKAFPKIIDYLNTSAFSFFKFGYCLAGPLIWQFSQNLVDCLIF

SEQ ID NO: 152868 - protein, 206 aa, Heterodera glycines
MEAELGLVHLMKVNWDCNNVRKEQESECLKYRKYLHYLNNYLFRKYVEAKNPEMAAQLTTVKPVFLYGEKIMSLFIIVKELNFVTKCFWEKCENKLENVDLKNEKMELLNEKEIKEEKNGGNTPKRKVKKQKTKKIIVPTKIEKLQKEFEQKMEKMCENVKEKAKEEKAKLEKAMVKNENYKKEEAENMEKEYEHKFGTFNSSPFL

SEQ ID NO: 152869 - protein, 132 aa, Heterodera glycines
MAIMLSFHPQIDKLNALTIQQSAKLSPILPPPSADEFHAVAVALTESANRLPTLLHNSTEENARGINEFTTNFARFHTTVSKMTAQANDTTGQEMAERLGDAKESALIMLESLRTAQTDPNNASLAQVFHWK

SEQ ID NO: 152870 - protein, 382 aa, Heterodera glycines
KSSNHPTESSQTKAISRGPLCATPSQQFGTDQSSDHSVRRLFSSSQLLVEGMEQEAQLSPAEQRNKLLNAARSVAQATSSMIDATRECQSRPGEVGPQVALRNAAEHLVQVTNQATGERQIQQTIQQLEKVSKETAASITQTVAAANSVSAYTARPHILAQQPLDSLVRECADVSRYVPPLIKRIKQHQGASEAGAQFRAKVGLIHDSQAVVGPATRLVDESRSSVSHVRDKHSAGLLLQNCQQLSINVAELRTVLNNVQQLDFGSQLDHSEELIRSLDAQLQQLSQRIRLGQPLLPPSSPPMDSPQQTTRTFRQQCRLLNSTIAQMVSATHSSESRQMGTAMLEMAQALSDFADSVEDVAATEANANGSGELAEGDERVDK

SEQ ID NO: 152871 - protein, 26 aa, Heterodera glycines
MGANIVTADEFGNTALTIALATGRTN

SEQ ID NO: 152872 - protein, 30 aa, Heterodera glycines; identical to SEQ ID NO: 126607

SEQ ID NO: 152873 - protein, 68 aa, Heterodera glycines
MAFDFLPLLLLLLFYFQIDQTHSDGIIKCRGISIDQMQSFNYQSDQWTKPKEVKFSERPHFSVIFVKI

SEQ ID NO: 152874 - protein, 244 aa, Heterodera glycines
MTTSKASPRMILPVIKESRAPPAGSTKFGQTISECWKFVQDNKSNTIVENFQIDETEEQIDWDPDANSAFLDIGATVELVGAESDIDDGNRSSTFTATSTSSKRAKNTAKQQRKRANKRTKPKPSLEIGTPAGFLRDFRSRTRFFLVNGIVTAAGFLWDPRSGLPSQKSFNSCSRLRKIFYRALIKIINPPFKLAVQIDEGNPDSRIAPDEHGRYLISKVHAVYVHQNNRKAYFLSFHGMFFIY

SEQ ID NO: 152875 - protein, 89 aa, Heterodera glycines
MKSGSVGEFEIEYEKAEITDAEGGGEGTRVMKDEYKPKGIKYSRKEWHQNYDEIGKKIGVGYVTIEKWKKQFGMGERINEKEKMEKMKM

SEQ ID NO: 152876 - protein, 266 aa, Heterodera glycines
MKQDELLANFLSSPLPPLPPRKNSSTNTRKSTSINDQLNDPSWIYDIKINYGQSSRNKTYQNRTKLTKHETNFHKQFGQNIFNSKDGSTESEKRSNQQTKKNPISIYGREGQEVSGNQSDQNTKKTSSDKQRNEKNKGISFAKNVVKYLSGHSSDTQKDQKPKNRKNEAGSTGKNTNQSNDVPSINNQRDQISQKATNDLYGQPSETPSYQKKANRMNGAGPSEKKSDQNDKSELNEGTPSENQIDKTKTNRLLKAKEILPFQQKE

SEQ ID NO: 152877 - protein, 126 aa, Heterodera glycines
MSFFDNPIVLNGGKALFAFLMLFSNGLLVFVSFKANFGIVLISPSGIPLWLCFLLVSVPLFAVCCQYILFPVIALDRLIGALFPFKQMGKRYKRRFMLFALIASISFAIFMLAASINKSIIHFSEK

SEQ ID NO: 152878 - protein, 75 aa, Heterodera glycines
MSQPQEVQPMEAFDEVNTQQWHDLDNLKCRADEHCGADKAAAADPVPIQLRGQSDRTRAVPPGRGGVVEESKKRC

SEQ ID NO: 152879 - protein, 30 aa, Heterodera glycines; identical to SEQ ID NO: 141040

SEQ ID NO: 152880 - protein, 52 aa, Heterodera glycines
AQADFALKLLREVSTDDRSCIVSPFSAAVTLSMVYAGAKEKTGEEMGQLLAN

SEQ ID NO: 152881 - protein, 170 aa, Heterodera glycines
MTSLIADLGGLSGLWIGISVVSILEVVQLIWFCMQYIHKKKSVSTKEGTDKFQLFLLNYFVILRTPELLAMVRSARQRSSAGHTDKSPSGSSSSPPRARTESVGAYSLKSLHSVRSDLRPGIRITQERRPSHSTGSSTPYLAPEVELPCTCLYGARGQIVFMKPLCPFHG

SEQ ID NO: 152882 - protein, 103 aa, Heterodera glycines
MLFLLLLFSSAPFALLFLPLDIFFTQIVPAKGGNGGGKGGCYGYCEKFNALEDDLEKMKQIKANAECFVDDMGKVIKGFEKNLDILRTSVTKLEEENESLTGD

SEQ ID NO: 152883 - protein, 122 aa, Heterodera glycines
MKVYHPLVSPTLKSIEEEHHSLEHSEAHQQDTYLNKRIQDSRAELSFFVGANLVQRLATYETAGQVMTELLNSVVNMHQFIEKQVPVEMRGYGTRTGTPHFKKRMKEMDERFNEVKRLADRI

SEQ ID NO: 152884 - protein, 459 aa, Heterodera glycines
MVWSNGLDRVMPYKNMTFGYDPNVPAEVILLPVHFPGHWALIVHDVQFGTHFADSLPTPYGRLDPQLTDKIKKIICDILPSTVLTGILNAENLTVQHDGNSCGYFVCLYAESWLMNNRTFVLPSLFINYEKKRILWHINELYGSDNVPYHPREGVPTPCPIVYRHTDEAQSTSKAAESMEVDDKNDIMIIEPHMSVNAVNAVLTQAQVAGENQADTLGLVSESCAPQEPIAQADDAIFVRPKTPPRRSARIGRRQSASISRSPSPAPKRRTSANTLSQVTPFTKRCHLIHKGWCCAAAAAKHYPEYSDSGKLGDKKCSHCGALLFPHENSSLCCRQGRVVLPKLNPHPKELEELIVCDKQPREGKEFVRNMSRYNNLLQFASVSAGNKPSPAGGPMAVILNGEFHRRISSMQAGTTQIPGFGQLYILDPVEAMEQRRKNPTFTGEKITNDEEFVQGHQL

SEQ ID NO: 152885 - protein, 40 aa, Heterodera glycines
MPAAQQVIVPPLAQQQLLQCPPMPPCPVAIPVPMRLPRVF

SEQ ID NO: 152886 - protein, 49 aa, Heterodera glycines
MSETDFVFKIIAIPISPWKIVLLFRTKNLLLKRVAPSEKCTLVVVAVIE

SEQ ID NO: 152887 - protein, 93 aa, Heterodera glycines
MDLSAGDEQLKRNFSCKICFEPFSKDRRYPISLNCGHTFCARCVRQLSSFGTSIACGLCRRGTYSDFRQLGKNVTLLGFVLFYWKNSNLVAIG

SEQ ID NO: 152888 - protein, 67 aa, Heterodera glycines
MHAFCARAIYHRACQSKAKQQRCCFERIKGIGLTIEHCERHFLDNVLDFVLRTGPSMFVYSERQTPA

SEQ ID NO: 152889 - protein, 92 aa, Heterodera glycines
MKAAKKVGLKKKETKLASGQKKGRIAKGGGTSTTGAKKGDEEAATELLHSATLSEPIILASGEKQENLWRFAPKMTNFAILESSFQKIIMVQ

SEQ ID NO: 152890 - protein, 51 aa, Heterodera glycines
MAATSKLQKSGRKRLRYDSEESSDDDGIGGAAPEMEENEEQGDAIQLGNNI

SEQ ID NO: 152891 - protein, 76 aa, Heterodera glycines
MLRPLPSPRNFLFGTVVVDNGQREEEETETPPSAILVVVCRDEETSDDDEADDDGFVATDRAATTSFIVAPIVDEA

SEQ ID NO: 152892 - protein, 297 aa, Heterodera glycines
MDDDHQKSLFRLPVPSLEHSCDRYLCSVGAVFGEHSDEFVDSKELVADFLDGTKGGGPALQAELKRYAQHNKHTSYISEPWFDMYLRSRIPCPINFNPFMMFAPDPEPIYNDQLIRATNLVISCGRFKKALDAELLKPEVFHMNPLKSDTEKFENICRKHFVVSRHGHFYTVKLFDQNGMLLEPKQIFASLSHICKSPPSSSASKTNFAPADECVGSLTTLKIIRVDLHNGGQWTCIPTEHLEGNWVLLDVFFDILLAQHSAPNRPHSLHIADSATNGDDNDAEHGTVLIVSQNGIF

SEQ ID NO: 152893 - protein, 24 aa, Heterodera glycines
ENYPCRFAQRRPMDVHPNGTFGGQ

SEQ ID NO: 152894 - protein, 80 aa, Heterodera glycines
MQIIGIIPRVKINELVKQKEQLAMDDLRMVDQPELYNFDPIFQQIKEQKMEILKAFDFSFDTVGQFRRSLSIREHLQRPH

SEQ ID NO: 152895 - protein, 15 aa, Heterodera glycines
TFDHLYFDQIVNMVK

SEQ ID NO: 152896 - protein, 67 aa, Heterodera glycines
MAILFEPTPTEYNRRQCPTISRPKRVKLALNRVIKALHMAMAEPAGPKWSRNHSVPVRNVQRDNARR

SEQ ID NO: 152897 - protein, 119 aa, Heterodera glycines
MEGEMEAKIHVYSTQPIDGDGFMAFARDFLNESKELLKIIENLSNPIQENVRKNLKNLASVAQQKSKQLRQSIAQQLEQLVANAANELANLQSQTGKFGDNTASEYLRIFRFTCFGKTL

SEQ ID NO: 152898 - protein, 24 aa, Heterodera glycines
MRFLVEKSKQKGKILVLFLCKRII

SEQ ID NO: 152899 - protein, 105 aa, Heterodera glycines
LNFLFFSKVWAEGGPSAIEIYWTPEQEARPVKHYFVQRMDKGRWINVSKSIPFTGQSKYCHNFLPLSLVHTIEYSFRVITVFVDGQEEASETFTGRLTMNAVSFN

SEQ ID NO: 152900 - protein, 176 aa, Heterodera glycines
MVTKEGVTLWCTRINKPQFVPFDVVYDLPGHCFFRVKNKARVFNVPYGDLPSGTCAKSKPTDHQQQQQQDLKRKAKVALDLVEAGLMADAMQDGTRWKKAKTAINVLGNLLLAESLDSTNSNSTDAPTQANEAADIKEEEENVQGEEENKEDIGDIDKTLDDFFNSLNASTSNVPI

SEQ ID NO: 152901 - protein, 272 aa, Heterodera glycines
MWESGFALPAPSQYYGDLPVLPDNADEIEEMDTAQRRIASRRKLKKDEAEDDDDDDALHHKKYRIYQRSPPRLPSPPRAKPKPPPRQPTTKREQQKPKKLELKPPKIEPKFEPDSRPSTSKVAPRSKKEPEFQLDPRPSTSRQAGHLPPPAPKIVTKHEPTKRPVPYRIPKREPKIVEETPQRQQQPLPAAVVEEMPPVPPPRRGTKRRHPVNGENDGEVRIRKRVRQARRVRVQYSPEPGPSTSAQSDEQQQHRELFAIPSNQLESGPPYH

SEQ ID NO: 152902 - protein, 387 aa, Heterodera glycines
MDGSSKENSTEHNHQDGTENQEGISPEKVELINSTLDKLYNDPSSPAAFAGVTALWKEARKKLKNLRKKDVQHYLEGHRTYTLMRPRRVRFPRAKTVAAGFMTDVQVDLADFQALSRHNRGHRYLLVAVDVLSKRLFVVPLKNKRAEEMLEAFRQLIDQMPMVPHRIFSDKGTEFKNRLLKEFFDEQEIEKHEPVHSSVKASVAERAIRNVKQRLYRYFAEKETLNWVDAVQKIVNGINSAPTRVHEMRPIDVDFSNAQKVWKRLYGHPALQKRTPRFRKDEFVRMSREKGQFEKRYLPNYGDEILEIDDVLKAVRPIRYKLRDEHGEKFKGSFYEQELARVRKDADTSYRIEKVYRKRKRADGSTEMLVKFIGYPNREWINESQLV

SEQ ID NO: 152903 - protein, 42 aa, Heterodera glycines
KMRLLLILPNLLPMLALMIAMGIIGSVVFGMDPNIKEPLLGY

SEQ ID NO: 152904 - protein, 102 aa, Heterodera glycines
MRLLLILPNLLPMLALMIAMGIIGSVVFGMDPNIKEPLLEKVQNADQDQQLKIDHINQPKMEVIVDDGTTEDADMAKALKLRETLVLAQNDDKMGMQRERRK

SEQ ID NO: 152905 - protein, 142 aa, Heterodera glycines
CNPMIIVIAFLIIWSPQGFLPTRHVSVGECGCGGCPPPPSGGGSSNSASSCDSPRPPPPPPCCGCRSSCGCGGGGCENGGGGCGGGGGGGYGANGGGGCGGSIKLTIGCEGPKAPPPPPPCCGCGCGCGCGGCPPPPSGGGS

SEQ ID NO: 152906 - protein, 118 aa, Heterodera glycines
MLFPIALWNLTHRLEIGLSRSNNSLEAWHNIWGALLEPNPLFSKFVKRMLKEFERWQHIVADFHNAPANGIRGKGLKRKSIYLQQDNNLRQLFAEFQQRAGQDPLQYLRAISYHLAQI

SEQ ID NO: 152907 - protein, 117 aa, Heterodera glycines
MEEQTETKKGKATKEEPIDRSDPAVERKKHDEHRIRWATQRKAAVDELRQRIKLRKKQWSAADIEKEMKETEKDDEEHNSECPTSIQQMEKKFWPTAIEDTAQISWHPGDATESKRN

SEQ ID NO: 152908 - protein, 79 aa, Heterodera glycines
RPEISNLRILLQDWNSKFFTGQDPVGLILQILHLKSAGSCAGLRILGNFKKFCINKKVFQSIKKYSNIFLNQKMMKMKN

SEQ ID NO: 152909 - protein, 227 aa, Heterodera glycines
MSSNNALTEMMRREKKKLLGNVDVQDPLAFVIPATLREKRGEDIVLYDSRNVRQGEKDVVLIFGNSGHFAPMWHVHLDGTFKCAPAMWEQCFVIGASVHQRMCISMWCLLPGKQRRYYEEALKHRLTGTINSYVANHSWEDEIVRAPHFPIPLWNMHSQATSALAQRPLSPHHPALSDFICGVNESIDRQVDAARSARHFIHKRHKRYILPDAVIMRILADASYNSN

SEQ ID NO: 152910 - protein, 262 aa, Heterodera glycines
MKHTKKMLLVPESEYLALINLLKGGAGGTDSLQAEKAAIDASIQKNLNDNKTGADVKMKRHSWLYKQRHQLKDMIENKPQKVIVENATGTAPQNIAPIQTHNGASFGEETDTSAPETDLRLSKKRQQKFLELKTSPEHYDKLQEMIERNPEKYGVDKSSGEILTNFKKPVIRSNYIDSLMYLTGQRADVPKGHRFFVQKGGSDPEMAKFFHSQRGEGDSNRSKRKKFVLVKAKAIKTVGLSRMEQPNNTKRKFFKPLLWAKL

SEQ ID NO: 152911 - protein, 79 aa, Heterodera glycines
MGYAVPLFGFYYRLINLSKSQMRKRLKITIDKNTLLSKCTRCECPMVRGTDGTDRISFQYGRPNSLTAHVLFKFVGPQI

SEQ ID NO: 152912 - protein, 28 aa, Heterodera glycines
MALYCRPFFVEVHSFNSKKSGVKCSVQR

SEQ ID NO: 152913 - protein, 154 aa, Heterodera glycines
WIPFLSANSCAQQIVDAVLKEKVIAFMPWCILPLNMQRVARDFINFRYEEPDYPMADDAQPKTTTTAVDHQIQNGATANTKLAVGEMPISNGQTVEERVAEKQAENGGANSFRRKPSPLLRLQKRQMREHFEFAGFIWWLIIVPAMALTFVIQF

SEQ ID NO: 152914 - protein, 48 aa, Heterodera glycines
MPKINKFVERQEEEQNLLRAGRNIEEVTAPKMYARHLGDLGGTMFRFG

SEQ ID NO: 152915 - protein, 262 aa, Heterodera glycines
MGDAAIQRLTDILQQLLAAQQQNAPPAQNASQLPTLPDVKCFDASQHRGCEIEDWLKRFKFALDCAAPNFQDELKVKLLMTKLCGPTFSEYCKSVLPREVTDFDFVETSEKLKALFSRPQSVWIDRYECLRSVKDDDEDFGTFINRQKKLLRDFNFKKLNEEQFNCMVLLISLKSPKDATLRSRILAKLAADGDTVKYDTVVDDLKIYMSTIAEAKALEQPHVSKHLLAAKLKGQKKRKNSYHSSNASSVSTGTRSSNRSQR

SEQ ID NO: 152916 - protein, 148 aa, Heterodera glycines
MDRLGLSDSIRNGLKDKFRIETAKANGEIQNKKKFFRKNRRGKKQNFFAVGANVIASLGDEPWRAGRVISQKRGLYNVQFSDGTTGEFPAKSVQPYMPDEDENLNFLDGFGLKRSSSGGTVRKHQIGSDGRRDQLEDDLRASDCEQEA

SEQ ID NO: 152917 - protein, 113 aa, Heterodera glycines
MKNKWQWDKEKMKCLRNEGDVFAFDNFLIICYPSIMATGVLDNDHSVDTVDLSNEMFNIDNIDNNPIAEECQNRAKKLGNSMAKLTWHGISIKLNRQSAGISTAILDTSFCEK

SEQ ID NO: 152918 - protein, 124 aa, Heterodera glycines
MPIHISDVNQVITIRLLTDKMKNDNSTNNTIALKLWHTNQGKEDIEMLSIHFFLANNSVEVVIGTETHFCDYEFSNEIFEMNLQIWIKQYGYKILFKNKRLGKREYYPAKWWEGLKFKDHNKLT

SEQ ID NO: 152919 - protein, 235 aa, Heterodera glycines
MPPDAFDDGSIRTAPTPRVQQMEELEREIAGSIVPELIVPQVIKNESEQKLVKGTTNSKAKNEIRIEPIGTKGRTNAKAKPTEIPAEEAEEGREDEQRQQQAEEEPEQHEPASSSAVPPSPPQRQRPTTPEAKRTARPSTEMATTEEQRETPKGKIDKERPTTQGTTPAEVSRTFILITNSTNKANSPSPSIKRTKATTTAPKVKPNNPDGDEPMLMEFDNGNSNILAESAVNGN

SEQ ID NO: 152920 - protein, 63 aa, Heterodera glycines
SSVQLHFPFSLPSLSFPFTHCSRSRHSPPECCCCRCQIPLALARPRRGYSASLSVPLSLPSSV

SEQ ID NO: 152921 - protein, 61 aa, Heterodera glycines
MDGFEEKNRREEMVKKEDKKKKKQLLVPFILFNIMASINDLDYVRDYDYVYDLDFDEVEKC

SEQ ID NO: 152922 - protein, 160 aa, Heterodera glycines
MLLFASSGQRSAPLLAKFDALFLQSLRLILDASPTIGCHVNGLFLRWQIDTANGKRKWRKELDAEAEEGAKWEEEKPWDVLDLPIIGKLEIWINDQTSRKLLQKCLISAVNNLIKTVEIPFNATKQFAFRVRVYGDEYFDNKYTASLKMCSIKTFKALNL

SEQ ID NO: 152923 - protein, 146 aa, Heterodera glycines
MNKRNEWNGMEWNGMEWNGMEWNGMEWNGMEWNGMEWNGMEWNGMEWNGMEWNGMEWNGMEWNGMEWNGMEWNGMEWNGMEWNGMEWNGMEWNGMEWNGMEWNGMEWNGMEWNGMEWNGMEWNGMEWNGMEWNGMEWNGMEWNGME

SEQ ID NO: 152924 - protein, 169 aa, Heterodera glycines
WSAVFLLLVDCATILFWFFLDNAKKRRRPHKKEIFICGDCWLLVFDFLPPSQLGLEIALVSRRFDCIVDEHFKTRKWTLGEMRISHKIGENGTKQMQIVNSDGKPLPIPQNPLPNKVIGFRGITNDYIDLNVIAFLRRFRRILATCAISLYISTENVRILECALLNIWP

SEQ ID NO: 152925 - protein, 51 aa, Heterodera glycines
MSVCPLCDSPVPFGLAMLAPCHHVGHANCITNFVRHNGFCWVSNCAMPVLE

SEQ ID NO: 152926 - protein, 143 aa, Heterodera glycines
MPMISAYCLLPNADDCILIFHRRSARPSAPTLRLFVFVLLQFVVRPLVIHSMLFPPFVLLLAPIPLAFSIWPIVLAEPVFALDHLSLQNRATDEKHSSASTSPSLLSSVALTKCQSDYLSALIHRCMIRGVPTAMEGRICFAD

SEQ ID NO: 152927 - protein, 203 aa, Heterodera glycines
MNRKITACGFLYVAPINLDFSQPSHEKKRWQRRWFTLYDDGELSYGLDSNSDTVPQLKMDMNKCIRVCEADAITNHAHSILIAFKNDRMDGLGDGLLKKVNWPSEIESVAKTDEHRQHPVVCYVKADSTDEIRWWQNLLQFYAKQNAIHLTPTRHLQPDEYFIEDDFPPDAQQKECTIQGFFVKYSQKHGYPQCLTALVSNGF

SEQ ID NO: 152928 - protein, 391 aa, Heterodera glycines
MKNSHFVNCFWLVLMVYIAKTNGQNAEATTEVNSEQNGTANFDNGNGNLKENDNGTSTQKPSLRRKPLMEEAEGGVADEEIERLEEEEKQMEKDKAELQEEKEEEGGEEEKQRKDEEDEEEKQQENDEESEAQGADDAEQSMKAKLFKEKELAEEMELSLADSEEEAKRAKKQGKKHHGKGGGGHRHKHRNGRDGPTAFILPSFFLQRLFSRGAFGPSGAPFDGSSFPMILPIIINNNIRGGPPEEEHQLMSSRANHHNGPMFQAAHHFTAPFPPDFFAQRQSPLGTPIGGQRPSHQNANANFPPTSFGSLRAQQSQGVPQMHNQQNNAFGPSASDPFPPFLHSMQQQQQPIFPFGSSSFDGGRGPSSTETQQENQFQQKGQTKFSEASDS

SEQ ID NO: 152929 - protein, 260 aa, Heterodera glycines
INSPNSANIHNEFGICGWILTILSYVLIILTLPISACMSIKVVQEYERAVIFRLGRLLPGGAKGPGGRLLPGGAKGPGIFFIVPCIDSYRKIFFIVPCIDSYRKVDLVDLRVLSFEVPPQEILSKDSRVLSFEVPPQEILSKDSVTVAVDAVVVTVAVDAVVYFRISNATISVTNVEDASRSTKLLAQYFRISNATISVTNVEDASRSTKLLAQTTLRNILGTKTLAEMLSDREAISLQMQVRSNNNNNNSSVIVIVKNI

SEQ ID NO: 152930 - protein, 113 aa, Heterodera glycines
MAMKKRLTRIKSEWKVSGADVVTVEKRLGCDLEEKLKEMCEPSESVEDSVLLVLDGEMYYDVEFDDDKWARVLLRRGDLIAVPKGTYYRTTLTPQNFVKLQRFNKQQNPKPIA

SEQ ID NO: 152931 - protein, 395 aa, Heterodera glycines
MDTLWAPPQQPTLEMHSMCHNTSNNNNNGTVFADYYGNCDSHSYGSSYRNQPQQQQHELTVLSPANDSYETMALSPPMKLARPGPIGRLVDTQCLGAPQLKETRRQIRKAQPMAFGTIAMEMGGEAMAQQTQRQMSLMNNSGNICEQSPSECQLVVLRQEVMLRPENGMVVVITFARCLFSIQKTNGKSLPVEVSHSFVRLDCVGIMKICAYGAAANSKNNSSSKSKSSANSNSVPNCSRNAATAANGRHRRRTKGRTTNEEKAKGGGDEETMPMREEQQKRTEQRRCQNDVHIVAQAQLPEGRVLRTQTEAIRCVQQLGCPDVLKMSLLEASSSGGQQLFIIGRNFNPKNLRVLFREYNNDGLLGWSAEAKLDQRLVHQAFHPFKYNLVLNFAK

SEQ ID NO: 152932 - protein, 168 aa, Heterodera glycines
SASGVTSMVSSCNSRRELVPQSPLIKVKADGSPQSNQLPTAEQKLAEHRAQLDRKLDVVSCHRMAVEMVSDQQQKSREYLKEKLHFENHNLATMRIKLDIDQLLDSLERKCHSPQSDEEKGAAKEGKSELTIAEVQKDFFPFIYAKAEQLLVDRRMANSFTRKLSDKK

SEQ ID NO: 152933 - protein, 183 aa, Heterodera glycines
MRKQRCKLVETFRADLDADDITAKALAERELDPRKLFEQEMHKHDAQRELIEQNLRAQDNILRALTDANADFADFRRQILDANEKRALHALTLVTAYQVFTDIVQKSGQAADFYTQLHKLLAALERGIVNIEAANAEFAREEQRKRQAEEERHRRETEAREARRRQEEAAREAARAVNEFRFG

SEQ ID NO: 152934 - protein, 229 aa, Heterodera glycines
DRLDLLSRLNQKAVEGQPRIEAVEAAGKQLDEATAQTDAHQRLQKYEDQLERGELDNRAKTLAELGELLGTERHGPHEQLGRHFGTVTDRFWRVEAMARAQSDNLRDAVEAFEQWQHADEALAERMAALSDAIAQLSAADVDGAEQLGAELNSVERREWAKLDELANQIVQMPNVEQTDHLTRKMRSNESQLARIRRDLAAKLESGEKTSGLLRKFRENAQKIETDLAE

SEQ ID NO: 152935 - protein, 208 aa, Heterodera glycines
MTHVFFDPESVDWSSFITPQHGRGQKQYFVGSKYQRGFGFLGNVARFLTPIARNIASSAGHEGLAAGQRVLSDIAQGRDLGDAVREHSRQGLTNLTDKLQQYNQFCDLNKTFLYLSTSIERKEKSNWIPITKDSEADQHVGVESYDSGIYYAFRAYMMNELGFSEDVKKGLCEASCYYVDDVDQDDYTNSGFKNRASRFADSAKCETM

SEQ ID NO: 152936 - protein, 127 aa, Heterodera glycines
RRKHMMNSHEIEIFLSKHPTTRKYFIGVFASDKMPKLKDRHFPYCFVANTDRAGTIGEHWVACFVNSPTEIEYFDSLGDYPNEDLSSYLNLFERILINDRIVQHQFSDACGQFCIYFLTQRCSGILY

SEQ ID NO: 152937 - protein, 90 aa, Heterodera glycines
MLNRRSAMCALTLGENIFVCGGYDGNHALDSVESFDIRKNQWFVRPPMLTKRCAAATAVLKGQIYEQFELYGNLLPVAKQMGKGSANANP

SEQ ID NO: 152938 - protein, 237 aa, Heterodera glycines
KQNMTSMLDISIAFEDQEDSDVNLVDCSRELAISAHGNFNELRLSGKMCDIKIETEGIKFKAHKVILAATVPYFMKMFGSEMVEAHSDSVQMNTIDAEIMGLILDFIYTGRIKFTSRNMERLLKAADYLQLSVLSNRCSEILKAHITEENVFSIRKFAVLYNAQQAVLDTESFIQRFFESVSKSEEFLQLDFQTLVQTLDWDNLHVGSEECVFEALARWLDFDPMNRHTFAPRSHVH

SEQ ID NO: 152939 - protein, 328 aa, Heterodera glycines
MKQQLDSTDAKSTCAFDELMAGVRRRNGESIDDLADRVSSLVRRAYPGLGEHSYDDYSIRHLIRSLKNPDLALTKLDMIFDEFVAMAARAEITQKSAKAAEQKNTNFRQNFDQRRQINFRPPNQPEHFSRRTNENERQNTSFGVVKCYNCGQQGHISRNCHLPRRDQSNFAPQQYNSSARGANRTPIANDYRNPPQSFPNRTQQSRNFLRQNFLVEQPDDSPAVSNSNVLSKRLKPDRQIARVIDINGKEVKCYGVVTLPVKRQERTVQVRLHVAQTSFGYDLLFGTNSLSELGFKIFDELSKTMVDFKQNVNTQNSVHVIFKTTLMR

SEQ ID NO: 152940 - protein, 432 aa, Heterodera glycines
MESESVKKTPFVPEFGLHEFTVLPFCLCNAVATFNDLMNKLFVGMINDFLFIYIDDILDAILYFPDFAAAIEDPKRRFVILTDASKHGVSAVLCQNDEMKRLRPILFCLASMQQIRERLLPDRARSFGHSLWHRKFTQFITGIPTRVITDHKALVPMFGTKKRRATQELIPGKSNVVADLLSRYGINSDSENDQQLEENPKETILVGKIVEGEKSQKDGSFLELGGRSDWVEEVKNSEMKTVYEFLEKKTCPHSQREFQSLIDKIHHFTIVDRLLYFCDPKTSSQLLFVPEKFRKELIASRHEGKCAGHLSGKKIHRQLSEHYFWPNMLGDCVRFCLSCRICAHARKSRANEPPLQTVNTVEPMELVCLDILSIGPSESGNRYLLVMIDHFSKYLVAVPIPDKNSETVARAFVKNFVLVLGCPGRLHSDKGG

SEQ ID NO: 152941 - protein, 129 aa, Heterodera glycines
MNRIRSIEAIKSVKIQPKNNEWLLMEEIGKQLEQSLGNLMNVKLFNALFDQTWPNLAFFCTKVAQNIETEYGTFFPSWAFACDVMVRFKLEQEKTIKNNKNKTPKRGKGQIQKENKKEVIQWTEEGGQR

SEQ ID NO: 152942 - protein, 107 aa, Heterodera glycines
MDATQLQQVLDAVFARFAGNAAPANTASSSLAHATLASSLDNRITKFHYDSECGNTFDRWFNRFGVLIEEDGKELPEQTKVRLLLGKLGDDEYNKYRDSISPSQPDQ

SEQ ID NO: 152943 - protein, 68 aa, Heterodera glycines
MKEKAIPSILKCSRLPPPPKPPGLRGGGLTQTSKKKYLSDDTLSSDSDVHASTGTRRILSSEDEKEEE

SEQ ID NO: 152944 - protein, 232 aa, Heterodera glycines
MARTKRKPKFARYGKVDGRRRFGRYKRKYNKLLGPALQGVQNLLVTAYHECAHAYLIKYGQNNIDILDRVTIRAQGGNLGETFWHYVEGFYTDEELVAQIVQFMAGRAVELLMFENAQGHEEDVESARNVAIQVTEMAPTDEAITNLLQQATDAPTQVLMNNARRLKRITDQGVRSLVAKAYDNFQLCLSNLRLVFSDSFDNCMKAREDQWSDEHLLKPTGMCIDMLRATHH

SEQ ID NO: 152945 - protein, 174 aa, Heterodera glycines
FDLSFAAKNNDGKILGVLLNAPFKLENIHESYRDIGRMPNKKEFGEEIRNGPFPSQNANRIHAILTFVNSHIALLPPEEDIKLVELQAMAVGPGHARTGLGSGMLRALIQTASAKGYSHLFTCATAIASQTGLKKFGFDEIKTVPFNSFLEDGVPIFSGVHDNGVGAKLVALHI

SEQ ID NO: 152946 - protein, 71 aa, Heterodera glycines
LWRNMILKIAMAVVFLVIVQFVPPPFSKFFYVFKSHKNTFYGVFGVADHESGAHLDQFLIPDPNSNKKSKI

SEQ ID NO: 152947 - protein, 108 aa, Heterodera glycines
MNFFIFFNNFILIIITILLISVNVHGNNDKNGDNSTQYKANDNIKSYIDDLGDEFWNTLPTITDLPKLDGVEFVGNHIKYTDESKNDSNETLYSDRTILTFIKLYHEN

SEQ ID NO: 152948 - protein, 29 aa, Heterodera glycines
MGKIHYCKRPDNSTKSCKARGSDLRVHFK

SEQ ID NO: 152949 - protein, 61 aa, Heterodera glycines
MAGVGQAVTLSNLCQSQFEYIQIQRQTDDPSRDYETNQLFETPFRMVLEVEKGFSEVRGWH

SEQ ID NO: 152950 - protein, 244 aa, Heterodera glycines
YKDPFKAFERHFTLSNQPIVNYRSDFQGKFHFLVGISAKEQQVIGSIQLYNNESKKSQLFEGHTACFTQFKAENNSKPISLFCYAPSKSGLLYLFTKLGYVHLFDIETGTKVCNTRISDKAVLLSTELKEADEVLCIDGSGKVISVGLDKSAIIPFILKHHKNTELALKFASRYNLDTDGVTSDSNNNDQPVAIQAHHQCQSVQQVLQRNSSSSISNGANSGISNGTAPMPLFESTPRNVLVFE

SEQ ID NO: 152951 - protein, 27 aa, Heterodera glycines
PINEKFFIVSLTSFEPFSDREEYNDTF

SEQ ID NO: 152952 - protein, 244 aa, Heterodera glycines; identical to SEQ ID NO: 150998

SEQ ID NO: 152953 - protein, 211 aa, Heterodera glycines
MNQPDVQHARPALVNAILNRHTETAIFLVKFPPTFRRQQFDFPTFFFIQLEKGADPHQTMIGQLNGLNMNVTLLWAAVVFVNLELCRALISHGANIEMGTDSGHSPLLCACFNGNLEIATFLVENGANVNLADTDGMTPLIATTFLLRLTSPTILSDLNINSSNSGTLCLDVFAEENDFVGPNATTASTGQALANGCTHREKMANQSDCFV

SEQ ID NO: 152954 - protein, 40 aa, Heterodera glycines
MSQYFVNEKLKRSVDQMVHNFRYFYYYFQFNISIDRSYRW

SEQ ID NO: 152955 - protein, 89 aa, Heterodera glycines
MALKRTKSDQLYHFDTQKMEYINLISTISILIFSFSLFGPNFYTPSDATEEEQLAMKCRQRCGIRNLNFVVNDDDDATARVKIINLITN

SEQ ID NO: 152956 - protein, 155 aa, Heterodera glycines
MEKAPQNDTIDVVVHEVGTEHSSKDKNNINKSPLKKNAHHSIEGSRKMANKTVFLAKAVSYVSALLMKNGETDVSEKEMDRVHQRLLDMRCSSYSGYDTHNLWRAWINVRNTHPNTYQEAMEGKFHILKNAPNYGGPPNRAWDILRRKEEAKTRL

SEQ ID NO: 152957 - protein, 72 aa, Heterodera glycines
MAMAQQLWGLRGVKRFRDAVNASSRSQGIIIWNRLPCSARQFITVPPKYCLPMLGTMLFFGIYRALVWWKCN

SEQ ID NO: 152958 - protein, 69 aa, Heterodera glycines
MVRAEVTPTPHRSLYCTFTCPINDNHQFIRSIFLHILPTFLVSELRKKEHANTEQAVGARASEGLRAPG

SEQ ID NO: 152959 - protein, 38 aa, Heterodera glycines
  unsure (1)..(38): unsure at all Xaa locations
KGGRDPFVLQNFXKIKNHDNLLSGVLKVANHESDMYFY

SEQ ID NO: 152960 - protein, 159 aa, Heterodera glycines
MRRANSTPKKRRNPSKNRANSADHPPALSRNLSARKQYFDDTVDFLNNQSSSKGRKSDVNGTLWEEFEAGRVTQLPLKEYHSSIPDYFERERAKTARKKTVEKSFTDSALKKNRSQKRKSLKNHLEQERTNDYREMAPNWQSAGYRDSYGSDSYYRTSY

SEQ ID NO: 152961 - protein, 182 aa, Heterodera glycines
MPHFVPQRSAVRSTTIHVPSSSTSSTGERKITGDGGNGTASARLELIQQLQFRRQHSSPAVVEEDYERSVQFEDCVSMRSVSAWSAFDDIDTELEPKHEFQVKTNKLNDHHNRHHDNQNVSKTVHQLMGNLFKTVSALPEWHSYPKEEKGTSGGRSWEYLLGFHGGIFVPQFLPTLTTTTPK

SEQ ID NO: 152962 - protein, 53 aa, Heterodera glycines
TNGFGTALKHLQNGICTIEGPKFVDALHAHAENDPRGDHHGTPTTLATSTNYC

SEQ ID NO: 152963 - protein, 149 aa, Heterodera glycines
MATVFCRDRFAVPREHLSTYIRDSWKPAVERLNGPVVFVSGRDGTELAEENGQHGDILQLDFEDSYRNLTLKMMGIYRFFTENTPVQQIVVINDDTIVNATALDQLLRAQVGSSFVISRAAAAEVLRHVCAFPGFAIHLDDILMGLLTN

SEQ ID NO: 152964 - protein, 78 aa, Heterodera glycines
MFPMFIEWIAFKNMTSKPNVERCCTLGEMVGGGWASIVGQCCLICIVISVSFYLIVWARLKLDISRSGQSESKHFKII

SEQ ID NO: 152965 - protein, 134 aa, Heterodera glycines
MSRLDLEEKNRALSHELREFGQRHHALQVRSDFEQQAAAREITVLRKAVGDVHDIQDQNDSLLHQNDSLLQTNEKLNKEIVMLKKWLRVFFWLLAVLLPFLWLVPGHLVCLKHRTRARNKRKQFLQSLLSHLIF

SEQ ID NO: 152966 - protein, 238 aa, Heterodera glycines
MAELKSRLENATDCTSIDALFHNLSVSAASAGEAQPPHVGTRPCCFIVDAVEQASPEMVVDRAGQCHQFERQFLPCTGSIPLFMGVRIGRDQLDELFLSHGSDIRLCLNTLQFNTLKTHTSDRIQANRTTTGTTTTTNANFAFVSGVSIDQKVSSSHAVPSPLNTAVTVSLFDTLSAIFTLDFHADKFVTKSGTACAVVCVPSCFHRFRHVVQPWHRPSVARSLAYAPGTVWPNVLRR

SEQ ID NO: 152967 - protein, 690 aa, Heterodera glycines
MTSGSIGALGESGWAMAQNHNDDEMVAVRVVNKNVFNGKTSGSVRFEDVDKVLGEIVRLEEGINRVLRHVNRKANRALSNISLLSGEVNTGFRTLTTQIETCAERVDTVAQVNHADRQRRDSSLDSNRSDDIPAQDNQAENEDGLDDGHNINDQTLQWDETPFQRVNMLTDGPPIPLEVYRDDCVITYDRWAKRFREHMEAYGRKLDEKEKLARLVIYLDGIPKRLIEKMEDAKKTTIGMALTNLRAELDSPQSKSLSRQALLACRQSDGESVKDFLNRFREVEIMMSAQSSGMPFLQNERVIHAVEQESMQNPSTPSGRFQTLTPTRQDRFSSNNYEPNRRRNQTPGPQQRFRQKFDNRNQQSQYRNQRPPNDRRWNNRPVCNYCKKVGHVANACRTRLADFQNNQRPQSFNQRAKSDRWSTTPFASGANAVHQDQTLSLLHEIARTMNKLTVNTDQPGRRDDVNTIATSTEQCHVKKVHIKDKSDISKSEPLQVSSWEKATLGPKIHPFIFIVAIFCTCGPVFSNTAMIPQGPMLCQTETQPTLWKLPEIPECPIPKVTVGHVPISQIRELYIPNAIEHNTKAWACRKIIKRARKFTSLSGVPITEALSSVMLDVSVDECKQMIEHRSCIFGILTEIDGLWGTSNPIDLTPRFWFIGSFSWYEVNSKNCFAFETVISSHFFNNQSICI

SEQ ID NO: 152968 - protein, 865 aa, Heterodera glycines
AKASYLTWNEVVSEVNTLHPYMATVRAFVNNKPVCSLMDTGASVTLAPISLAQDLNCLYPTNERVISASGHLIDVRAKALMHIEVANCKIYTEVKLVNDDGAAKRNYKLIIGCDAMKKMPPVTFDIANAKLHILNGSTDIGAERDWLFSDVKVVCNVSTDLLPGHCKVIEGKLLSFCDLNQVLVHDLDSCIDFSKSSATGDNLTKLRKLCDEFSDIFSKSQYDLGSCLVGEHDIVTKTEEPVASKPRRTPFRFREEVKSHLDKWIKAGVMVKSDTPWVSNLVLVQKKDGGLRPCIDFRKLNEVTIPDHYPLPRLEMILEKIGKCHWYSSLDLSSGYLQIRLTDRASRKCFVINEHGYTPSLGKVEIIKELPAPTSVKEVRRIIGMASFFRKHILGFSTLVEPLTRLTRKEVPFVWEAEQQDVFNKIKSILCDKPVLRFPDYQKPFHIFTDASNVGQGGALMQKDNDKAPFHAVAYCSRTLSTAERKWPTVQIELGSIIFALRQFRPFIYMGNVELHTDHKPLAYLLQKADAHPNLARWLIELQNYNIKIVHVAGKQNSLADALSRAAHENLSEEEVKNLSELKDVAEFPACLVLHLSHAWSSMSYLKFGGCTELITDNATAFTSEFFREFCAMLYISKRYAIPHWSQNASTERTFRTFHNILSKYISKDQPDFDEHLEAATFCYNTAVHQSTGETPFFLMYGRDPIFCVDQILDPRTADPVAFTDLTEFKYRLIISLRMAWAATAEEIRESQMRAKAQYDKQNRVLDIQVGDRVLLKNYISKVGTSKKFHLPWRGIFRVVNIDGVKVTITSCNAPQANPRVVHINQLKKSFETTIPMRLLKDKSCCKEVPSSKTMTLSSWYESKS

SEQ ID NO: 152969 - protein, 320 aa, Heterodera glycines
MENHLIPGIPFLLDGQIAIKFFTLRYFTSNHHPAPFEMDFDDWGVRHMHSSEQGYFALRAVEFGDRQQFEHVLNLASARDVKNRGKRVRGYSYGHWQTVKREHMLRVVLEKFRQNEPLCEALLRTGFVRLVEASTDRYWAAGLLITDEAIRSSNNWTGRNELGWVLMHVRDQLRPLPQQVHLIHKHYVVCQAAAPDYVVALAAEPHVQPYAVRINNETVNAARQLQIGDTLVIGSVEWREGFEQLGAEGMNDRPCWVHQARFNWQATASAVYTVLRSHPQQPRPVMEDYTTNAADHRLSTTFQSQFASTSGGYLIRWKYY

SEQ ID NO: 152970 - protein, 187 aa, Heterodera glycines
MWNDAHYQQAEQMWGKSPLGPVDKYRVRKKHPLPPANPEKHCFNDNTRKILMENYLTDAYPSPAKEQQLAQETGLTEMQGDGIISELINAWQFVNESKQVGNWFVNRQQRDKKKQQKVPDHPERIGEEIKAQKRIMADAKKIFDAASARLEQLEQQQQAQNRSSTKMPPADELEKEYEFVELKEMDE

SEQ ID NO: 152971 - protein, 199 aa, Heterodera glycines
MGNVELHTDHKPLAYLLQKADAHPNLARWLIELQNYNIKIVHVAGKQNSLADALSRAAHENLSEEEVKNLSELKDVAEFPACLVLSSESRLVLDESINALTLRSDDASAFIEFLKSGEIPDGLSDLEKEKFAATASKMLIDSELLVHQESELRPRIFVPVSLRALVFDSFHSSPLGGGHMNLTKTLKNAEIFLARCMQI

SEQ ID NO: 152972 - protein, 612 aa, Heterodera glycines
MMGIFHCAEVISPNFSAMLQGVHGQAHMCKAFYSLRSAFRCGQQTMRERCAKETETAKKMDEHLTEMQWTLESLGREEGCPAEEPSNLEELLSRRVLPAGRPPVGAAPLLTLRGPTAPQARPLPTADALTPKDNQCDEQQQQLFNECVQPLTAFQPVSIDWPIPRGLAWHFPPPPPQHPLAVIKQPKLIDQACQAFRNFSECRLRAQCFPLWARGMSAMFDFACGPRGSALYSEECVVAFSHGAPKDACPSARTLLSCAVPELSERCGEKAVQFVHEYVAVFAKAVDPNCALMGGRREEERDNGGQRDKGEMREKVEMRENAGQSDKEEQNIEVGMESGRKGPIAALNCSDEQKQLVRHCAAPLEALHAQLGELFEGGLQNVLKNLNGLAPLFAQGCMLGAEFRQCLSLLSSSSAADNESNRCVVSSCLVAAGAGICDQPDATQAIDTHLGCVFKQVSRKDEAAKHCLSVQVSDPEFGKCLRTTLVPIKQFSLASLRQALPQFVDCVHEIVQRTCGPIPLNVLHVLASKDNICPVNGPKATEQSVGGGKRAEENGNGKSLVKGRENGISGTPCANDMHSGDEVGSWRNLMIEYIAILQYFQVPLIGHNWPMI

SEQ ID NO: 152973 - protein, 124 aa, Heterodera glycines
MDSYEVERTTTSPVELRHHFHIPSALTANGGDKSEEIEEIDRQPFPPYPDASAQPISSATNNQHHDCVPSTSTDIASTAFFAEIPLHQEMRKSDNEATLNEVEIEANEQHKKANKVVLYITALI

SEQ ID NO: 152974 - protein, 144 aa, Heterodera glycines
PSMESLRERGIYKPEPVFGSTLADICTREKAFVPKFICEVTRLIEQKGLESDGLYRVNGNLSAVQRIRCQIDQDSYDSLYHEEDIHVLTGALKLFLRELSEPTFPVSMHKDFMSAMRETGIKRLRIIDDLLIRLPHINRETLRV

SEQ ID NO: 152975 - protein, 227 aa, Heterodera glycines
MQIHNLAIIFGPSLFCSEERPNHQRKASQDKGKSGRRKSSDKRSQNEDQVQTEPTQNLAYRMIVYGQIVEFILNETDSLAYEFGERACEFVLHVQPATRRPSACSVQHNRPFAIAFLMPSQPTAKNVEAFQQAAAELLMPIIACNKRYVHSILRQAMLMLSERDQQNVQSYYSTSGNAQQIVIVSNKLKSVVQKTNAWFERVSDQLCESDGSADECFCECAGPEEFR

SEQ ID NO: 152976 - protein, 140 aa, Heterodera glycines
MSDNNTHCQLFGISREANATSQWINGEKCEHCTVVDLGNQKMRAHEYSGRLLAQLHGKRNFPSDSAVAAFVVSVITDLNQLLVLAHYVTPEAVFKHLSLSISDQLILLNGLAEFNVTKYSQMNKKKFDRQKCIPYKKMKF

SEQ ID NO: 152977 - protein, 243 aa, Heterodera glycines
FNLFLQNFGYIAYILSVVALLQHVNDLISLDECAVADLGCGTGMLLLGSTLLGAKFAVGVDCCQNALSVAKNNFAVGVDCCQNALSVAKNNIDKFEFEGSTTTNLVLADVTKFVPFIGKFDVVLTNPPFGTKNNQGTDVAFVLAGLRMLRPGGKTDVAFVLAGLRMLRPGGKLFSLHKSTTRNFLTKMAKNWDTVNGMECVAELKWNLEPTYKFHKKTNVDINVILCSFEKRYKIKREKQSKE

SEQ ID NO: 152978 - protein, 51 aa, Heterodera glycines
MKGPSLRIYYDFVNNLDGAHHTDRLSLNLYLFSFSVVSPANFYSGWIIACQ

SEQ ID NO: 152979 - protein, 47 aa, Heterodera glycines
LKMVLTRKKSENLKNMSNSGVEARQKRKEWRREHAKKAGSTPKNDEN

SEQ ID NO: 152980 - protein, 106 aa, Heterodera glycines
AVSEVLRRLPDFWRFATWGPDIVVPTFGDPDILGPDFWGSRHLESRLLGIPRFGDRTTFGELTLREHNIREPDFWGSRHLESRLLGIPRFGVPTFGYTEIWGPNDI

SEQ ID NO: 152981 - protein, 58 aa, Heterodera glycines
MYSTGSQTLPGLGFLKIQYPVPDPDAIPGLKSWTRLFRTPSIPGPGFCPNTRTRVTLL

SEQ ID NO: 152982 - protein, 150 aa, Heterodera glycines
YVDHSVIAFLRSNHQIFDKRGTDLYLWIPSSHSTNGQPIWDVFAREIWPIFSANIYQLGLSRGDNFDHLLRRISPTILTDLNKLNSIKSFGRLPAAFGDDFDVPNATISSGQALSKWLHSPRKDGQPKRLRFRRNLNAQADLDWVNNFKE

SEQ ID NO: 152983 - protein, 63 aa, Heterodera glycines
MAHTKFFCLLRSLTWMCWTWITAQTWSKNCATAGMQIMHIVCFALATRAPPAAPAITTWSAAR

SEQ ID NO: 152984 - protein, 233 aa, Heterodera glycines
PNYLRAGTHVHLQSENGILGVGPYPYPGEEDGPYPYPGEEDPDWINAGKESITFLPGASTFGSDESFGMIRGGHIDLTLLGHIDLTLLGALQVSKYGDLANWMIPGKMVKGMGGAMDLVGAPGSRVVITMEHCAKGGKPKHCAKGGKPKILDNCTLPLTGKNVVRRIITEMAVFDVHPTDGLSLVEVYETFSVEDVVRATGCQFKISENLKPMLQALITISENLKPMLQALIT

SEQ ID NO: 152985 - protein, 44 aa, Heterodera glycines
MRGRETMRLTETSPRWARMRRTPENYALLQQGYINTALKKAKKH

SEQ ID NO: 152986 - protein, 116 aa, Heterodera glycines
MAANTRTLLQVVTMLQAQKSAGLMAANNEVLDALNHATWELRSALDALKEQIIAQNKGSDAQEMDEDENLPQINYENQPHPLDELSHGHLPTLFYESFMLLKMSYRNPLYKNFRQP

SEQ ID NO: 152987 - protein, 128 aa, Heterodera glycines
TICQTQLTAAGAASAGIVPLNTSQWISHILDQQQGDNTDYEQQQREATQLLVGRRLSSMRSMWEERISEESEQKEYEEQVNAALFARRQFLFPKWRSVDPLTASLVASHKTPEMIPVVNNLSKKLIFA

SEQ ID NO: 152988 - protein, 141 aa, Heterodera glycines
MLFLLFIFVFLIINNSTDKTLSVNLCKKCRPTFAEIFGEEWQNEIIIGGDENENETDQNANFHQNDQNESTDQNDQLDVQQKIEIIHKFHAIREGIKKKGKYSAKIWNKIEQKIAKKLGISRQKIYKLKRELKLNKNKRNS

SEQ ID NO: 152989 - protein, 245 aa, Heterodera glycines
MLFLIFIFVFLIINNSTDKTLSVNLRKKCRPTFAEIFGEEWQNEIRIGGDENENETDQNANFHQNDQNESTDQTDQLDVQQKIEIIHKFHAIREGIKKKGKYSAKIWNKFELKIAKKLGISRQKIYKWKKEIGLNIKNDQNYYEMKKKEFIARIDEIKRTSENGKQKQFAKELGIHKETFIKWKKEFGIEMGKNGIRYSNEEKMRKMNVYYKMKRENPSLSDKEIAGILKIGFATLKKWKKENNS

SEQ ID NO: 152990 - protein, 290 aa, Heterodera glycines
MGKHQKAIRSAVWNREGTVFVLASEDTAITMNNAEGETLNTFTCNGEIAELKLTTFRSFSGEREEDFVRGRRAISGDQGFIVCLSAERSAESISQELFSIQEYKTNLASITVNEPLGKMFSIGDNLLKGRDLVDLGEISDLVNVDSDDSGLVEVACSEDGSMTAVSARSGAVCVYLTKLPMLAAASSTHIAVLASLTEISIYQDGEIQPSQNLNIKIEPSLIAVGAKHIAIVLNSKAWFYEIKRNGTSFMYEHDYMTTIVKMKLNRDFVMAQLDNRVHLHKVNTILINRF

SEQ ID NO: 152991 - protein, 67 aa, Heterodera glycines
MKKSEFIERFDEFKELYGQGKQKEFAKELGICEETFLKWKKELAPKYHKTLIKPSNYDKLKKDEAIF

SEQ ID NO: 152992 - protein, 134 aa, Heterodera glycines
MERKIVKLLGANLQLIQKWKNELNLNKNKIKKRIYEEKKRKFIERFDEFKELYGQGKQKEFVKELGISEATFWKWKKELAPNYHKKHHTNDDKVKKMKQYFEIKEANPKVSDAIIAEKLAIGFSTMRKWKKECS

SEQ ID NO: 152993 - protein, 208 aa, Heterodera glycines
MNLWLLIFIIFCIYKIESSKILPDFDEIFGNRWDKNETEEKAIKIEQNENTQSAEVGQMDEEMENDQKNVKINHKINDEATDQQKREIVKKFDAIREKLREKRKFDWKIRNKIETKIAKLLGTNINSIWKWKNELNLNKNKIKKRIYKEKKRKFIERFDEFKGLYAQGKQKEFAKELGISKETFRKWKKELVPKYHKSQKNPKNDEKL

SEQ ID NO: 152994 - protein, 162 aa, Heterodera glycines
MNLWHLILFIISFIFVIESGKIRPNFDEIFGDGWEKKESKEKLMIKIEHNEQNEQSQNAAIDQKRNDQKSSKINHNINDEATDLQKREIIEKFEAIKKRLREKRKYERKHLSKIETKIAKLLGTNRKLIQKWKKELLPNYFKSQILLYFPFKTMTMNALGLL

SEQ ID NO: 152995 - protein, 105 aa, Heterodera glycines
MNKTEWNSEWKLQKIFREKHNYLKTIKEIDEILDTIKDINLEVKRRLKALKPNSPSESDQENESIDEEQENDDEEAGEEEDEDEKEYDSDQEDESQEMHSREQTH

SEQ ID NO: 152996 - protein, 64 aa, Heterodera glycines
FDTSANTLSLVCHALALHAEVQEKVQEEIDSVCFDEDPTYEQLSQLKYTEAVVKETLRLLPIAT

SEQ ID NO: 152997 - protein, 143 aa, Heterodera glycines; identical to SEQ ID NO: 132463

SEQ ID NO: 152998 - protein, 88 aa, Heterodera glycines; identical to SEQ ID NO: 124691

SEQ ID NO: 152999 - protein, 181 aa, Heterodera glycines
WPMIALKKLNRTSEVDIKRLCSLEHANVIKTLGICTKEHFPGICTKEHFPCIVMEYCEKGSLFEHLRRNPNISKQSMFINCSVQIAEGMCYLHSLKIVHRDLKSPNILIDKNNTVKICDFGSLYSWDQSSVVMSVCSVVMSVCGTSQWMSPEMLTNKPCNERVDVWSYGVVLWELLTGVTD

SEQ ID NO: 153000 - protein, 129 aa, Heterodera glycines
MAVTGNAPSLVTGTNSSSGNNSNSNNNNNTEIDSNNTTVIHNSNHNTTSEDGDWVKSPPPPPSVEEATVVDSAAGLNCSPSLSTISLSSASPASVTYLGDSGDDNTTVRRVPNSFDRRRTNSVDLRTDI

SEQ ID NO: 153001 - protein, 143 aa, Heterodera glycines
MAYPPPQYIPLYPLSGAPNYVMARPLADGNFMAPIQAPMARDATTQQQRLGPPHTTPTAPPAAAQSAAPAHSVPPPLNPPAHSAAPPLNPPSTGAGPDMEATENPGPIGLVEKPTLGNGNEPAVAAVLPESDSNAASSLASST

SEQ ID NO: 153002 - protein, 121 aa, Heterodera glycines
DCESNISAQHDFDYRYVTSTNTKEVVLVVEGGEFLIGASFNKKNCTAKDYFLHLPTINSLLFNAYNAYKLHYGYFSYRFRAESNEFKEILDRFFTPFLHLYRVNKIPLVDLFNGVDFLSIG

SEQ ID NO: 153003 - protein, 108 aa, Heterodera glycines
MVPNSRRCPSICCPLLLPTLSPTHRLAPPITTARPPTITRTLWTRPSRLAGADSDLLPNDPTSLESISLTAEKLSRKLSKAQALLKDWTIILSSSSKEVREQENALFD

SEQ ID NO: 153004 - protein, 47 aa, Heterodera glycines
GGGWKDGKSTKERTEAVIGWPFCALWPQIVGQVGQSNHCRGKQREFE

SEQ ID NO: 153005 - protein, 136 aa, Heterodera glycines
DVEQADIAQRVTMFSSVAEEFLGMKAAELLAKEKEPESLAKHLDDLIAVKIIAKVNIKMMRHKLQNGLDVIAILFFLREFTMRQDCTLTIFRNEHREICSWLYPSGGSSTLLITIQLTLLEKLGPYAFVTFDLHQG

SEQ ID NO: 153006 - protein, 94 aa, Heterodera glycines
MISRKQNNKWTNCLGKFLNENKIERVIFSHFYMFSLFPSALFLLLHHIDIYSTDQIEDKKNSHKELDTEIRTLFNETKVRILILWVSLKYKTIN

SEQ ID NO: 153007 - protein, 67 aa, Heterodera glycines
MSPKSSHVNYDLLPEISHTFRSPEPRPSVLVSDMFSVLCASPLIILFLLWLRIGINFGKFKFSLSAL

SEQ ID NO: 153008 - protein, 65 aa, Heterodera glycines
MTTNCCANAIILRPAEGVASYVGEQYMDVCRPGRGGYCSPVVFLNADGTFRGVITFKEGPTPINN

SEQ ID NO: 153009 - protein, 66 aa, Heterodera glycines
TFRTPDQKPQSSSSLFFDLARCTEDHSTQHVDAYQQIFVTVVMLFQLVKYAQIALPIGMEAARYRL

SEQ ID NO: 153010 - protein, 42 aa, Heterodera glycines
MSRCLRMLGSGVYEMIKKRESNWGDQSKKCVILSDQKLPEWE

SEQ ID NO: 153011 - protein, 100 aa, Heterodera glycines
MIILIYRENETSNLVDNLLKRMEQYATNLEGLVEERTQEYLGEKKKVVTLLNDLYLAFDGVVDNFQVYKVETIGDAYMVVSGLPERTTDHASQIAQVPKI

SEQ ID NO: 153012 - protein, 73 aa, Heterodera glycines
FYDTFNNLLYLMEYKTNCCLLNKRSHQKTFFPNSLLRPFSLCRFAEQFDLELKVRVQFRIDVAHQLQQTHNDL

SEQ ID NO: 153013 - protein, 401 aa, Heterodera glycines
RRVRFQVTGILPIRSLKTFQGFYIFMPKYLELQFGIPQYEVNRLMAIIGVIIGVATFAVGVMVGSLVMRVAKLQGRKAAAWVAMTGAIAACFSLLNSLVGCTSTMTALGDSLVANANSTSSCAVGCHCELAPVANANSTSSCAVGCHCELAPLYPVCDPNGAVYYSYYSPCHAGCQLGESAFSILETQKTPLFESCLCSPTERVSREFCREENCRSKMYNFCHFSFSQIIGGMGVVPGVLIMLRSVPPKHRSISLGFNGFLVSSVPPKHRSISLGFNGFLVSLLATLPSPIAWGTIIDNFCLFWTQKCGEKGACALYATDGLRFWLHFAYGGLRIVSLITDLFVIYHAVGLKLTDSDSQNANDERETAKATKKRQRAKREAEGRQRTTNWRGNRQRHFWRK

SEQ ID NO: 153014 - protein, 42 aa, Heterodera glycines
MSEGVLTGPIDFAGLQNDLKMAYNITCLLNFSCITKKVYLVL

SEQ ID NO: 153015 - protein, 800 aa, Heterodera glycines
MAIGHNELVRVAKNRKLYNHFDEVQIGNNHDEFGKYIVFLPNWFNVYQFIFADDNGMPFGREFKSAIKQMKKCLDEIVEEQESPTHRGIKTICILPRKVDRRYDYKNWANKIDQLRNGQNIFKCKKWTKRQEVDKLNKIFKAIFEGKAIPEIICDQITLRKGYKRNKNGKTNNAEATKNGSDAESEKSDSDTVHMTPKVATTATVPKSLPPRSGPSPKAMIGFQSSPKMPRKLNASAIPSHSSNDNYYGMLGPLKSTPKSSAKLNTNAKPSQYRNINGTVDDYYYGGNKEDSETDMEEADPRNKRTPPKKHRKQEKLSDSRRLAQFQSIKGYGIHDGSNNGGNSIPTKSGSSSTPIHKSSGNNSPKKSHSPNQHSLSNSLKYSSPKKAAYSTVNLPVNPPHKNNTNYNSLTSEQRGRNLHNANNGGHHSHKNEGYGSPAGSTNMNSLSKSRSANNSPKEAAYSNPTSNIHMNTSHKSPKSEQKGRNLHNPNNSGHSNHNNEGYISPAMKKNVNLIPKFFFDNNSQEKADNSNPAANVPVNLKSKSLSANNSPKKAAYSNPAANIPVNLKSKSLSANNSPKKAAYSNPAANIPVNLKSKSLSANNSPKKAAYSNPAANIPVNLKSKSLSANNSPKKAAYSNPAANIPVNLKSKSLSANNSPKKAAYSNPAANIPVNLKSKSLSANNSPKKAAYSNPAANIPVNSMSKSLSANNSPKKMAYSNPAENIPVNSMSKSLSANNSPKKMAYSNPAENIPVNLKSKSLSANNSPKKMAYSNPAENIPVNLKSKSLSANNSPKKAAY

SEQ ID NO: 153016 - protein, 248 aa, Heterodera glycines
MGHLNLDEVLQFGGSKEVVIWDTTCIQQKVRHSMRELHAGKIEVSNCYTKPAELTGEPCGTSGRQRIVTTVNEKEPMILSEEDPEEFSSADDSESDMEFTPRTTTDDHGTAEYLGRRRKKFLKQRNIKQRVIALLRKFKPDEVMAEEEEGPHTSGSIVQPTELELQEIFEELENISDSGPEIEDDKLSIVSNPRPKIRPFFGSKSDIMPPIIDLQTEEGLFLSDELSADSEASECRPIASLLETLFRL

SEQ ID NO: 153017 - protein, 247 aa, Heterodera glycines
MQSVLIFSKIRRLLTASLATLRGNAPFTAAFLLRLFAYANSDAVGKREKSETSDPNTEKSKAILGKKQQLVDTNDVRSEVAALTLLKAPFVLKTKHKNIQTPEEQSSDDTLVFMRILKSLTFFNVQLLRRLQMLDEKIHYNSYAYDFWKNPDVDALGTRNKLTKGEQWYLINDFNKMLTEISSGLDYIAQSKDSLCKVAKEVADEFDVKFREAFKMKRRKEKEDKEKEGVKEEEAGTQPTAQEKPKE

SEQ ID NO: 153018 - protein, 413 aa, Heterodera glycines
YQLFSDSLEGQMLVDFTRVPKANVSETKETTVQKETVKKEKDAGVKKKAGKPGAGGGKGGSQLSKKDQILKESREKKNKEQIESDRQKIEYATGIKANVREAIFALDDLLRRLELDESKALCMYQKMLRYNEIFSERLENFENIDNKRIAALELVESIKVILTKYYDHLDSQQKDKSKNMSGGKVLYGIYTNEILNNPLNCQVLVTNPDCFEQILLSTSERCREFVSRIRYVILDEVHCINQKDTQGLSLGHIWEHIFLLIRCPFLALSATIGNIEELRDWLQEAEQLKPIDGAPARTVELECPKGVQFETDETKFFRGSSVTSNEIEDGTGEDAANDRASVASRASNNNSPVPSEISQQSKATWNDVVQFFNPFSVYKLEKLRMFGIPADQRLTARQVLELYQMMSDVDKTV

SEQ ID NO: 153019 - protein, 213 aa, Heterodera glycines
MLSRTWIVAICFYIFFGTILPFSEAIRFYVASNDKKCLKEEIHKNIVLTGEYELSDSVGHTTTVHVTDTRGHTLYKRENFPEARGKFAFTADEYDIFEICFQMHGPTHQQKLNREVHLVLKHGVEAKNYEDLAKAEKLKPLEVELRRLEDLSDSIVQDFAYMRQREEEMRDTNESTNSRVLYLSIFSMLCLLGLATWQVIYLRSYFKSKKLID

SEQ ID NO: 153020 - protein, 506 aa, Heterodera glycines
RRSSTSRGFSFSALAKSSFLASTPCFSTNISEFADVEIFLISLDSLLLELCAHRYHKWVLGGQTIVLCEQIKQFLGGLEELNAKFKLVTFTELTQIKQFLGGLEELNAKFKLVTFTELTPLFKSDTFLAFLHPFILCWITKSKWAENLEFFTSPLDEKWNDYLHQLTPSFMLLSLENAPDIIKEPINFADRFISLAFSLINEAFSLINEAIPVVLFNGFTINFISVNAYRLSTVPLNIEGFSQKIREKWPETRGRKLLSMRKLVYIFSCQNITDSCQNITDFWAVVLRDELKEAEKNKEKLDEFQKFCNAVLLSALICEELGVKRRYLDTEEDYNKGPSPSVNSFRRGLLERAQKLLSGAVEKQILFSLDDIWDGRMVFTCFKKIMEKQILFSLDDIWDGRMVFTCFKKIMSGEKILPLRRQEKFAQLHKSVGLTVSGEKILPLRRQEKFAQLHKSVGLTVAIPTDLEDKLLDPISQISNSKVQLVNIFYKVENELLRQFIPDFLE

SEQ ID NO: 153021 - protein, 344 aa, Heterodera glycines
MNLNGPPMVSEQRFSEQFRKIATPLNDFAYEISAISKILLDLQRDLTLRRCEDAWKRLETHNRQVESIVNQSLKQFWRREIERIQNQQLAVAQQLKPFATQMASLISVIDIRRSSDSVLPSPMEQICMQITKMEPDSESRVAAIEKEETLRREAKLEEEIAQTEEREALKARKALREVRPATPKMRTSNQRVKETNRDRGADALIREGTHSCLSSPCPSTKRHQPQVNRHVHRNSESKVYEPLQMDNIVNSVIATLCEKEELPRQNTIQKQTKTSENTIPSEREDNIKREMETEITAEKETNSQNVESVNAVVTAQMTRGRDPELLQAREKLLEAIREKVKRIE

SEQ ID NO: 153022 - protein, 61 aa, Heterodera glycines
QFLSSYGLELIQKVKFDCNFNIDFPSEFALSVCQPLGLSTLSFADNSSSHGIFLNCDPNSR

SEQ ID NO: 153023 - protein, 44 aa, Heterodera glycines
MDQQRCTRAAVVGQRTLSSAHSDEHTPTAQPSSIVLNAFDMNPN

SEQ ID NO: 153024 - protein, 285 aa, Heterodera glycines
VGLIFFKNINKFLFIFVELKKINFEIFIFLILKAVNTNNWLNTREVLKYYVYPNRTIDNEDLYPPTYYKNSTLGPWRFCWSDPVTDFHCTSVEFNHVTDFHCTSVEFNHEEDTSDVTTSVELSVRRAVPFMLCGCALDVLGLLCNTLCLLRSNPYQSLFVTALANIFAGLVDFNCIILYMASGLVDFNCIILYMASVSKEVGNKLYKASELDNSLFDYTYGFSFILLKISFLCTELAALLIVIVYMSKRDERTYNAHRMRSMLVYMSKRDERTYNAHRMRSMLRT

SEQ ID NO: 153025 - protein, 592 aa, Heterodera glycines
MRSIKDQNEMIKFDESVHIIQNEKVLLSTTERRSLKKRITEALNRGSSLWYRLDEGYIGNLNGLNLMVTPDRPFLGIKRTQGSALGPMLLAGEFFYPLGGVFFDHYRDEFNDFGDFFAGFMKEKEEKAGNGIESAGERGANDSSGLINRNVSGTGKRIEILSQNLGLIITEKDGGLKLNYESKLGSQNEEGKAVIKVKGRGTIKGSIFLLVLYLWGSMLMSNGGWAMGPEKERPVCESDENSEFDFSEEMQQWQRELVGHVVDNVRANNTQNSERACQLELEAGPSTSTAHSTPAGQQIICLNTQNSGSEKGFGGTVIGVETVAPKENGTVDQRVGLVKIRGENDSGSAKAVKRSHTDLQPKAKAQTGLPQNGFRFDALKWAQVHQLIPPPTVLYPNPQILRTAVVVLFNQQSCSSSSVNGVQLMPTNGEMIVTPCQQQQPQHQSQPQHQNHQQQPQHQIQQQHHQMHQNQRQRAIEGESRFTPRRFGPNRSHPYGGRTTASHPFIREQQETQLPINWPWNPLPRIQIPVELRRVLLRRLAQEREHAFGLAGVMRQWNPPMALLLLSMEAFYSTLLAFVVNEGEPGPSLPQL

SEQ ID NO: 153026 - protein, 39 aa, Heterodera glycines
KRNIFWKLDVWEDDSRRRRRFVQNPWGKRHKLAATMQQK

SEQ ID NO: 153027 - protein, 380 aa, Heterodera glycines
TNSNRSNFEMQFISTQQINQFYAEKVQMRRHKIQKVINSIGEIVKEVLKSVEQTEPRFICTLQNSNGNYDGLLVHSPYEFEVILYLNQMGVFNFVDDGSIPGCAVLKLSDGRKRSMSLWVEFITASGYLSARKIRARFQSLVAQTVEKAPFNDKCQVVQDSSDVKLIIYGKYFVQITCAFRCSGIWPRSASHWPSQHVQWPSIEMAKEIRQEGFDLLSKDLCASSPSTSMMEGDAWLMSTVQAEDKLLQAHTNREKVFSILKTLRDRHLDFSGSATTKQLVKVLVLYECEKHYANHEWNDFCLGDRIIGILLQMFCLGDRIIGILLQMVNCLQCRRCPHFFLPQMDLLKNRSPKSLDESARAVWALVRQLMLNGKALEQL

SEQ ID NO: 153028 - protein, 240 aa, Heterodera glycines
MNRRYIDHSVLAFLRSNKQIWDRSGIKLDLVVPLYMTDVKLIWDVFTREIWSLFATNIRHLSFHNADALDNWRRRTSPTFLTDLDELVSFTSYGLLPDGIADDGPNATAGQALSKWLHTPSKNGQPKRLYRYNLLGPQNLEWVNNFKETFISATTSVSYNIQFYLRVEPMPIEPFELVNEVTNEKLTLTKDGTGEFNWLLERCPIIGETAAAVQKQQQKKDENSDANLNKVFFRLYDDIG

SEQ ID NO: 153029 - protein, 291 aa, Heterodera glycines
DKKQKAIKESSSSSSSTSIEIEHIGLSNRQFGCQNSSQGCSTSRDPVIYQAETSRADKSADSRRRPTNQSDSRYKENPGKILTEKHRYSSRHTVGMRENKPLVIRSDSQDTVANRQGQQVRQSSRRNNVRIRENERIPTRQGSEDTVANRTNAGHQSVQSSYRHSVGNMGKQVYEKRSDSSDTVTTPANVRAGTKSNRRDKILKQLNEEGFDSEYESRPTVGIRQNNTVDNHANFGERSQSSDNRHPIGNELNEQSEVLAEIQRLAIRSGISDTDEPSNEFDVDSFSFSFG

SEQ ID NO: 153030 - protein, 59 aa, Heterodera glycines
MKESEATENERNGIFYGNSKFLSHKVSIKLALERALLCVTIMDAFILYKFDKSRISYFS

SEQ ID NO: 153031 - protein, 60 aa, Heterodera glycines
MQKGGGGSSNNLEDILSSVFGFTSSTKASNRSLADMVKENDALLMDPLSVQRFFGKIHKK

SEQ ID NO: 153032 - protein, 102 aa, Heterodera glycines
MLQPDPYSRPSIQDLCEQIEHLALALDVRLDEPVLTFTAAPTTTTTTTSSSSNNGRSKVGESAAAKTARQKPPQQRHDQPRQKQHQKQQGTKKDVANNTGIY

SEQ ID NO: 153033 - protein, 119 aa, Heterodera glycines
MELDGVFMERHGYREPNDEDDVLLNGQPQANCNGKCPKGWPSANGGLMKNGDNYSMNFSLRKLRLFGRPQQQPIASVDNELQHQRHTHEKEETDQEQLDDQITACTDQQNRQHLASNGA

SEQ ID NO: 153034 - protein, 67 aa, Heterodera glycines
MADTTTGEQFKMLNDFMSLIVDNCFYFVFSIRIQKYTICFEMDRIMVQKIKDVFSTPLLPGRQQQKK

SEQ ID NO: 153035 - protein, 112 aa, Heterodera glycines
MGNVQTSSIANQLLPFESYIVEIPELKYVARSSKTEKHLFNLATSVTYFLSLGATRFMKVARVEHFSKGPLVVKVFVIIDQQVAVEPYRDQLLQISRRLIKHPNFAPVNRVF

SEQ ID NO: 153036 - protein, 130 aa, Heterodera glycines
MDFLDLPGPRFFWIFVQKSPDPGLGFVKNVKQIFQDPNLTFSWPIKKHNNLAILFANDDDDDDDGVSQQHKKRMMVQPIITFVITTARLLLSSPYKFVLSNLRRRLHLFDNHHTSNQIIIFLNYKFIILP

SEQ ID NO: 153037 - protein, 67 aa, Heterodera glycines
MGYDYMKVRRRNIRAATNTLLLIISIYLISNLLSLFLSVFAFLNPGFLQKNYPHQYRSVQEIYNKQI

SEQ ID NO: 153038 - protein, 19 aa, Heterodera glycines
MQFLSIEYVQRHASYRQRE

SEQ ID NO: 153039 - protein, 61 aa, Heterodera glycines
MISIFIVVEEEEEEEHFFGGAAPGENLKKKGTKQWEETKKKRRTGIEKSKDGKEKAEQIGD

SEQ ID NO: 153040 - protein, 30 aa, Heterodera glycines
MSTIPPLKNTNVPNGMITMSKIEEVGKPFP

SEQ ID NO: 153041 - protein, 106 aa, Heterodera glycines
LEKVDFFVFGAVPPSRCAQIYGESESFRNSFRIACTLILRWIFAPHNCLSTPNGHLKKSIFFVFGAVPPNRCAQIYGETESFGNSFPIACTLIMRWIFAPHNCLST

SEQ ID NO: 153042 - protein, 108 aa, Heterodera glycines
MSSFSHHHHQQQLQQHRGSALSLGHAIAAPSSAELIVLDSPPPAPPKTPTTTVMMFDSTDHGGGGGGGQRQQQQQQFDVVASGCCTASSASSSFIIGSMNKYYIISVM

SEQ ID NO: 153043 - protein, 89 aa, Heterodera glycines
MQPTNMSNVSAASAAVSTTSASLKTAYSAIIDVLELDDVLIDEISAAPTSFGGGTDGATRTALATPAGGGTCTTSADEQSSSSGTKQAH

SEQ ID NO: 153044 - protein, 620 aa, Heterodera glycines
MDQLAAGIPGVVGYMDDFIIASSTVNEHFSTIFKFFKRIQEFGFRIQMDKCKFLVKEIKFLGQIVSSDGIRPDQNRTRALQEMPAPTDITTLRSFLGAINYYGKYIKNIHQIRAPLDELLKQGVEWQWNEKHREAFDQAKAILLSDLALTHYDPHLPIIVTADASNKGIGATISHRFPDGKEKVFQHAARTLSKTEQNYSQIEKEGLGLIFAIQKFHQYIFGRKFILRTDHRPLLGIFGSKNGIPIFSASRLQRWALILLNYDFSLEFVRTDNTGQADALSRLISEQRNSAASEDMVIAQLCAETESEVEHLLNVQLEHLPVTVDEIQTAQQDDELIREVIKFTQNKWPNHGINPEIKPFFSGRHKLSIVSGCLVFNGRSVIPPSLRHRVLKALHLAHPGIVRMKNLARTLVYWPSIDSDIEEIVRKCRQCQEAAKQPQKQPLQPWPTTTQVFQRVHIDLAGPCSDGNTYLVIVDSFSRWPEVFMLRHTSSQHVIEQLQWLFDRFGLPKTLVSDNGPQFSSSHFKDFCDSNGICHLFSPPYHAQSNGAAEKFVDFFKRQLKKCSGDKNWLKQSLLSYRSIPIAVLNNRSPAELFLGRPLRTKLSLMKPERPSPFFRGPYQ

SEQ ID NO: 153045 - protein, 270 aa, Heterodera glycines
MAINQQFAEAANAAEHLQKRNEALEESLKSAEKRAFDLEEENGKVKQANKSMGYELEQSQALVVELKTSVETKLAELKKMDSVQQRVETELSDALNKLAQSQNKEKYLEQDLKEAQLQLERVKAELGEAQKEITAKKNECTEKAAEIDELLGVVAELNKDKIGEKIKEREEGRRKSQQKTKTDEKQQDMDHSGSSAASSPGQNASLLEVVEMISNHKLSTTEPLLLRTLTMVPDLAGARDGQTWAMGWKYREQKRKQREENCSTFWSWPN

SEQ ID NO: 153046 - protein, 44 aa, Heterodera glycines
MVGGVFCALCVLVVVLMHFFVSKLVATLALLFSVSHFSDAFAFK

SEQ ID NO: 153047 - protein, 197 aa, Heterodera glycines
MHSSEFGSDVDNRTGPAVVAVGTGPGWQKHQIVVNGAKENARLTTTGAVAAVPSEDSSNNDDNGGGFVVVNCSSGVAAPPVGDAPQQRRRRNSNSVLRTSQSADRLSRTARRASRPRNTTVAAASGGAAASAGGGHRRHTQSVASFVNAAYAAAAQAANNNTNGTSAGGGGSSGNNNANANNNRDSISTTTASTDCE

SEQ ID NO: 153048 - protein, 784 aa, Heterodera glycines
MKIRISEQTNIGNSSNDVSGFDQRLKKIEQMLGTMLQFERAVLDVGQLEKRIEHIENAAGLQVDEHKSSTFRPSTFIASKKPIDPKRRPFNSQREQPITTDHGTTGNIQQLLDAIGQLVTAQQQQQINKPNPNNNVPIPVLPDISVFEPTDEKGRITEWIERFSFAVDFSAPNATDAVKVKALMNKLSETAFSEYSKSCLPGKVTDFDFNQSVERLQKLFAKPQSIFIDRYECLMATKTEGEDFRQFVNIHKRLLNDFKFTSLKEEQFKVLMLLTALKSPKDATLRQRILSKLGADGDNVRWRCGWTNHSHWECKHKSAKCQKCSQNGHLEGQCDKVQEWRRRNKLPIPKRKIGNLRIGTSMKVNSASLFKTDVAVDGKDIKFVLDSGAEIIVIDELSHEVIGSPRLRKCTESGCMFDGTQVKFIGKGVANFKFRNICIKGEYYVAKRGSLNLLSVQMMDAFGLLNELKAKINAPVNLCRVGEETRGFTKTPKAPLNSTVKGHIDHPKALFPDIFKNELGRCIKFKAHLTLKADAAPVYRKARPVPYNAQEAIDGELKRWEKMGVIGKVEYTEWAAPNDESRKIWSISTHHGNYEVKRLPFCVKSAPAIFQSVMDQILAEFEFATAYLDDVIIVSKSVKEHTDHLKKVLEKFQEWGFRIKLEKCSFFREEIKYLGQIIDRNGRRPDPEKISAISEMPAPTNVPSLRSYLGMVNHYQQFVKNMRFVRKPLDDLLKHDSEWKWSEKCKQAFDKIKEILSSDLLLTHYDPTKEIVVAADASELGIGA

SEQ ID NO: 153049 - protein, 33 aa, Heterodera glycines
NNDAKLTLDEFKEGAKADPSIVHALSLYEGLAT

SEQ ID NO: 153050 - protein, 294 aa, Heterodera glycines
MASSTHYYKMDPSRDNPDLTEERRKAKFDPEKLGNFFWQGQLKRRRQICDYVQAQGTELAPAQPVPFMTRMEKLEDVARLSVGMRKHAENVIDVGSPQEQFYFNSLICGYDGSPFHLHFIMALPAMINNCDEEQAAEWLPKLFNCEIIATYVQTEMGHGTNLKALETTATYDASRQEFVFNSPTITSTKWWPGNLGKTANFAVVMAQLYTNGKCYGAHPFWVQLRDIETHKPLPGITVGDIGPKFGIGSNDNGFLRFNNYRIPRMHMLMKHAKVLPSGEYLPPMHSKVGYTSMM

SEQ ID NO: 153051 - protein, 211 aa, Heterodera glycines
MGTNEGQEQQQKRKEADDALPHFPISAELKALFGQIEDYVAERVEIVPCWKPFQIDYIPAVGEVDPFIKVPRPDQDRWVQNVKELRRTKAPTRVVYGKPMPSIESLMQEWPAELEQKLKEMKVQIDAKSSFYKFIQLLINANLDADLEDFVDLCLGLVDIPLHKSRLESLHVLFSLYAEFRASQHFRNMAMDRDEAGGANSANIDQFVMPD

SEQ ID NO: 153052 - protein, 136 aa, Heterodera glycines
DRWVQNVKELRRTKAPTRVVYGKPMPSIESLMQEWPAELEQKLKEMKVQIDAKSSFYKFIQLLINANLDADLEDFVDLCLGLVDIPLHKSRLESLHVLFSLYAEFRASQHFRNMAMDRDEAGGANSANIDQFVMPD

SEQ ID NO: 153053 - protein, 529 aa, Heterodera glycines
MINNRLMVAHELALYRFAHQIPVDDPEREATVLKHVGNQANAAGIDAEFAVNFLLAQMEANKMIQVHKCMAKGNLEKRPTSVRGYIDRWNSDHSFESKYVPDFEKEIQPKFSYATNALILALIPLVDAGHQMHNDQNCVEHVEDVLESMEHLRASELEPNGKEAMEKAVKAILDSQTTKEQTKKESPRRRENAKNFEHKKSAQNRNVRKGKKQSEESWEDDIEKVTKKSPRKIEEVSDTSIMITRGEKSRGTNGKDKITHENKKTGKESDTKVKSPKKSPRRIEVSDRSVLIKMEDLISDEKEHLTSRERNETDAYSKTQVKKSPFKNKVTTENEPQNKSKSQAEEQKRSAVAAIDKSFDVRFDSEEENPRKASSTETIRNPSLISRDASIPMNSRNLSAVEHENERKDSLVVHRNRRINDNERAKSIGSEENLQNLGLSRDDKSTADEANDQSMNGSWSVEKTNNQRNRHVQQNGESRQNSNISLHSPSRLLTGISTEHGEEHRQESEEKAMESTRKSRFLMPNASGE

SEQ ID NO: 153054 - protein, 26 aa, Heterodera glycines
MITLRPRISKGSGMRDHPWNESGDLN

SEQ ID NO: 153055 - protein, 351 aa, Heterodera glycines
MSSTQYLIFFLLLCCLKNISGIGFDEFAKNAGAINLADQYLKKEIKTKGELLEKLAQIGVEISLRTLERHLSKIKSKRKSEDSQVNNEEDMENAEISQCFSKFDNKFLFIIGHGDEYRKYQKTNENANTVYAYCIKCEIQIIRTMTRVTKNFMFNPLNEDQRQELCETWFYTFNEDHIDYSEPFEFVSSEYGPGEVTEILGDGNCGWRSISLALTGTVSNHSEIRKDVIEYLEETVYQHSFSNHHDNEWWLLFDSIENIRKHIENAIAPAIGAHEIEKWMNNLDLAAVTKMFRINIIVCERIQERIFRWQVYSPDLETSLSNLQQKESTASIFLYFHDGHYELIRKPQKIN

SEQ ID NO: 153056 - protein, 204 aa, Heterodera glycines
VHLTDSGGGFKKVQFSPLAQFHANNGSNETVVNPYRIEFRLMARDGGNCEDGYNLNAGQLKISVLFASNQTAVRFTRFSLEENDFGGRAMQNDFLRSNGLSFLADYADLWLLGLDMLPMAHQTEEQREQLKMELFISRSSKCLIEAWFVQPSHSLEPSDPNLQFAFSLCKPNPTEEEYERLFPKNVDKYVFPTGGSCAGLSNQM

SEQ ID NO: 153057 - protein, 107 aa, Heterodera glycines
MIASLKQGRVTDENAVNSDSQFIKKFKFYPILSLFFYPSSQFPPSRAIRRNSILVFPCDIENCFGIFLWILSNISEKDGENGKRMRMNQQFNKSAFTLFGGANRCRR

SEQ ID NO: 153058 - protein, 58 aa, Heterodera glycines
MGRSKWETPCNCKAVHIRHDGQEQLHQSVKFDPIKHNARNILLFVSLSYWQLIQFCTN

SEQ ID NO: 153059 - protein, 148 aa, Heterodera glycines
DQVFPRVPSPDVEVVVDGAAIVDEEEQQHVEEEEEQQQHVEEDQHQQHQQLTHCVPATQHQQQPSPMLSAAVQQAISTLQMRMPPLPVFPPFAMPLVLPPLQFTFQPYLQHRQQQQQQHQFASPALQIVPLDDAPAPQPLCDVLQTVA

SEQ ID NO: 153060 - protein, 186 aa, Heterodera glycines
FAGDKDFVMMTIKNKFPRTIILEGLKAEKDSGIEWNVEQLIKGLEEIITMREEAMRCTKITRAIGGQHENWDSDKDNSIGQKAIGKIIGTETITENIIKEKKEILKIIKEEGLVKVQTVFGTIICGEMISSGPKLCPLTAMIIENEDKEPEKYWDLEMIGVKDNPVEKDDDVALKMFQDSVYRKDG

SEQ ID NO: 153061 - protein, 29 aa, Heterodera glycines
MTEKYLYLIVAQKIESFKNFFENLCVNKN

SEQ ID NO: 153062 - protein, 258 aa, Heterodera glycines
MIVPLLITFVQILITVAPLLITVVPLLITVAAVSAPDRFNATNAGQQPRPRTTSSAIGGGGGTADELQQEAEDNESVLLNGAESPTPGGGTLGYAILAEDSKTPAPFYEMMSESELNAELAKYGHGPMGKRAAIRLLNRIYEATHPVISSDTPIPRKVRRALATDDVGGDKNGAAERQRERRTKQKIGQMLRLANKNAETETTGNYAKQNDDGGGDGFANNAKENGAGQMAAATISKQQQRHGQQQQRGAMDATATTD

SEQ ID NO: 153063 - protein, 263 aa, Heterodera glycines
MMFIFFISFFIIGFHQFLITFSIANPLDEDQRLIAVMKGDPKMRLSEYSTQKYEAYLGIVYLMRKNWKCDKIADEFEEYERKECQKYRKYLDILHKYLFMGYAGIPTVKPKFVFKHKFEIEGPLIFVVNCLTEISKFYFTKETGQNFRYKLNEFFNGFLEPKLLNEKRLNYEPKLPMNETILQLAIDTANERQTNESLDGIIQQNCGEQFDENLEEMFKKAVEQAKKDNPKKANQINNEKKQKRILCSKLDDQSIWVTLLTFN

SEQ ID NO: 153064 - protein, 261 aa, Heterodera glycines
MAEEYSNALFRAKKKGNINWDDKKMISFGLFEKEEMKKYLKKKYEAQLGVVYLMRKYWKCDKIEEKFKEKCKTNRKHLHILYNYLFHLYVEGKSGEFVNKFSAVKPMFFYYSGDNQKELISVVETLSKTSQCFWGIHKLSISNSHEMALKNEDDLIDEKNWEEQKNVVEKIDGPKNVQNKQQKILNLPKENEKNLWKEFEQKMEEMSKNAKANVKKERANLNDKAAELLKKGKYDSENEKVDLLYDEYNAKFETFKSSPFY

SEQ ID NO: 153065 - protein, 130 aa, Heterodera glycines
IKSQSQNTSQGKALQKSPPGLTFVDPKELTLSQYKRTEFPAAERPKGFSQYSSQPDEKKKQPKPWSKAALGMRDSFDECDDSAFVGIDQKEQDEVQFQYECKSWSKRSRGQRDSFDEGDDSAFYGPSTSK

SEQ ID NO: 153066 - protein, 54 aa, Heterodera glycines
MTISTYAWNSCHKKVFFRGGYIAIAPAPFGQFQRMRYRRTHRMNPIFILLIIIF

SEQ ID NO: 153067 - protein, 40 aa, Heterodera glycines
MSQYVFNIGDLWFNSSIIWYSLFLATFSLLGFVTIVVCVM

SEQ ID NO: 153068 - protein, 51 aa, Heterodera glycines
MTTELVDKFYDLYKNAGLVPTEIAINGILALVALVGVCLNSCLIYVTIKSK

SEQ ID NO: 153069 - protein, 26 aa, Heterodera glycines
MTFSLLAYSFFNAHKEHLDLSNDSKD

SEQ ID NO: 153070 - protein, 86 aa, Heterodera glycines
MLTPHELDERLGWAPFAMLGQKKNLYLCKFFGFVFSPLPAMISERIKQHCVDLNTFMSSFGDWTLRTEVQAMEEMEIIRNKNLERA

SEQ ID NO: 153071 - protein, 253 aa, Heterodera glycines
VSWAILFSHPADFTPVCTTELARAAQLTAEFARRHVKVIALSCDSSESHRNWTEDIAAYGNSKGNGSEKISSAADFPFPIIADQQRLLAIKFGMIDPLNSDLSGVPLTVRAVFIVDPKKRLRLSLLYPASTGRAVFIVDPKKRLRLSLLYPASTGRNFDEILRVLDSLQLSDKFMVATPENFDEILRVLDSLQLSDKFMVATPEGWKPGSACMVEPRVTDAKAKEMFAGVGGGVRPVELPSGKRYLREVNDPS

SEQ ID NO: 153072 - protein, 147 aa, Heterodera glycines
MKQTKEKERTMSDEEDEDEASFSEEDEEMDGPSKQSKGKEIDDETMAEIEKWLKDLDVEKLMRESSTSKGTTQYSTPMKRKRGGKKVVTTDEDEEEEHGLNSGEMDFSQSSSEEEKSTKRGKRILKGKGKAKDEEQSSAGNEKPKAK

SEQ ID NO: 153073 - protein, 253 aa, Heterodera glycines
MRRIIVDVLFTMIFLLISGLGTLNAVNPAELAADEHAETHSPTTLGEKHQQQMDIPPLLKVPKVEPIETAPAQQSREWGGEEQWEQKERIPKVEVPKVEPSDTAPAQPKRKVPKMEPFDTAPAQQLREGRGEGQWEQQKEQSLGLAEVPLTAKRQRTPSARYHRPEFELSSEEEPDNSSDEDWKDAEEEESDELASLSKSSASYGLGEDIGEGEEEENEAMESKKKRMAQTKGKQTAPIEVPSKTDSSFDSEQ

SEQ ID NO: 153074 - protein, 224 aa, Heterodera glycines
PQGQLATKDTRIGQLRHQQGQLANGHQQGQLANGHQQGQLANGHQQGQLANGHQQGQLANGHQQGQLANGHQQGQLANGHQQGQLANGHQQGQLANGHQQGQLANGHQQGQLANGHQQGQLANGHQQGQLANGHQQGQLANGHQQGQLANGHQQGQLANGHQQGQLANGHEQGQLANGQGQGQLANGQGKGQLANGHLQGQLPTKGGGQLAYIEKVKKIKKYHQ

SEQ ID NO: 153075 - protein, 33 aa, Heterodera glycines
MARVFASRIGLFASKIVMDREGGMRTDPQTACS

SEQ ID NO: 153076 - protein, 80 aa, Heterodera glycines
MSLGKASTKPKDEGLGKNFNTTKNRNRCGRTPVTNGRRRTTSARGSSLAAYMPLRSTWAPLSSKVVKKKRHPSRAAKSAT

SEQ ID NO: 153077 - protein, 84 aa, Heterodera glycines
MTVLKINLMISLPFVLAFELIPERHVRCGFTLIVKHAPDGLADFFGYSTRVKLLAFALIPERHDRRGFAWELSSIYKVLFHKNY

SEQ ID NO: 153078 - protein, 163 aa, Heterodera glycines
MNLELHPRSFHSQEKNTDLHLFRTLVLTSPFKCHNFKKQTNKGSADSVHRVGRRTRAFAQRVLSEGHRPVVRLHHRLCVPYTVTNAGGDRAGQAGQSVAQVGDEEAHWQGGAEPRGTRRDGRPGGTLPQAGTVPGQLLSRLLPAQFFTVFDFLLFCVYRRPTR

SEQ ID NO: 153079 - protein, 140 aa, Heterodera glycines
DYDMDIYLIMGWRDPRLVNNFGKPVLVKEEDILEKIWRPDPFFDAKEAEFHEVTFLNFLMRIYSDGLILYETRIKLKPACNLVLCKYPHDKQTCELQIKSFAYAAETVRFEWFTNRLDAIDKNPDVRLPELYIDQYEPAK

SEQ ID NO: 153080 - protein, 127 aa, Heterodera glycines
MFLFLKISDRSSALIALMARIGVPSLKKVISSSFWLLAQFKMAHFLLTLCLTFALLAHCVSAKRRPGLRTWDFEAKPGMDNSVGKAKEEQDEDEEKERKADDGVGDKAVTEQIPPSKISSTTRQAKI

SEQ ID NO: 153081 - protein, 22 aa, Heterodera glycines
RAIIYANYAIWRYEQFCLTLGL

SEQ ID NO: 153082 - protein, 63 aa, Heterodera glycines
SALKKVVSLKPQKKAEFSKFFISIFFYSSKFSLIFSRLIEPVKSFRMISRLFDSVNNFKSYID

SEQ ID NO: 153083 - protein, 256 aa, Heterodera glycines
RNLTNSIFSSLKFLNKHQEVFNLANFGQLNHQSVDFVLIVQVHNRIDYLNYLVGSLSVHNRIDYLNYLVGSLSRAKGIERVLLIFSYDKHSEPINKLIRSIDFCRVTQIFFPYNIQLFVTQIFFPYNIQLFPNSFPGLGPKDCPEGTKKLRREGLECANLRREGLECANAAYPDTHGNFRLPRFTQIKHHWWWKANYAFDEIMPKYGLENKTLLANYAFDEIMPKYGLENKTLLFLEEDHIVAPGLLLSLKLMTKS

SEQ ID NO: 153084 - protein, 113 aa, Heterodera glycines
MTNLIEMTLNFEWKKLLHEQNNGPNFCKVWLIGISSNVNSAQMNPLLAQFDATIRKDFLKFNPLENAEENGGKNKSNKKFKMPKMEEISAKFDEFKLAFKSILVNKWEMFEAM

SEQ ID NO: 153085 - protein, 232 aa, Heterodera glycines
MLENYLAEKTFKGFAEYEEKMKNSLIKIRKIFDDWSEGHAKLLVSGSFLLGTHTIRSDIDLLCIVPGKVIKKVHIFGYDTTICQHMEHACSDGTNWSLYCELCSNEFVTDLVKFPHAPILLIKFIFDQVPYDVTFVIIPERKMLPAKIDDKTMDELMAKFKKPTENNTKMLRVLSGYHATFYIFNLILDGQNKQEMLQMDDGEGERQKIHQKFNKNAKNFRMLLLVMKLWAK

SEQ ID NO: 153086 - protein, 116 aa, Heterodera glycines
YNNVDVVCDLPWQFHQILWKILNLNNEANLMLAEAANEIVIENFENEFKNVKAQIHLQNFAMALLTNGATISGKWEQNESKKRQKLLEEITGMRCGHIRFDNLKLRWQKMEAQIQL

SEQ ID NO: 153087 - protein, 34 aa, Heterodera glycines
MSKINQWSADCTFKGHTHGQRISLHKHFEKHLNE

SEQ ID NO: 153088 - protein, 263 aa, Heterodera glycines
VSRINYYYYFLCLATRAVYLEATLDLTSESFINVLRRFISRRGKPDIIWSDNATTFKLAQKTLELLSAPGPDQEVQNFLTQNRIQWRFIAQISPWAGGFYERLVKLVKDCFKRTLGRRILSFDQLNTFVAEVEATLNYRPITAVSDAVDGPVPLRPINLLNQRFRSIGKQQQTQLIQRNTSRIQALREANDVFSRIQALREANDVFWAKWHSEYLTLLRERAQWDHKGPRLQHFGEPKEGMVVLISQDLVPRNQWPMGRIVET

SEQ ID NO: 153089 - protein, 443 aa, Heterodera glycines
PAPTPSPQRKVSAAAGTNGGQTQTNCLICADKATGKHYGSISCDGCKGFTGKHYGSISCDGCKGFFRRTIRKKHNYLFRRTIRKKHNYLCRFSKNCVVDKNQRNACRRCRFDQRNACRRCRFDKCLSNGMRPEAVQLERDRIAATRRNGKIGTKTGKTQQRQRQQQKHQRWRVPLATKSKDSQRTATTGDVTDSMHQQLILLVQWMHQQLILLVQWAKHLPEFRRLPLRSQIALLRHFSAQHLILCAAFRSLVRVAASDAVWLANDRCVPRDAPKIPDINRVVARILDHLTSPMRRLRLERVVARILDHLTSPMRRLRLEECEFVALKAVAFFDPMAKGIDESAAKGIDESAVGAVEGMRHHILAALEHQVQRRSECRAAPLRLGNLLLLLPPLVAIARDLVEEAQLAKLFGANVDELMVELLLPEDAETRSYSRLRTSVTST

SEQ ID NO: 153090 - protein, 65 aa, Heterodera glycines
NGMNRTAVPEENGKMEHTFERMGNIQWGVGELEWEAWMRQLDGAGYQTGHKSRLPILLEPMTKKK

SEQ ID NO: 153091 - protein, 19 aa, Heterodera glycines
NYYRHYMIFTKPYKIKKRL

SEQ ID NO: 153092 - protein, 96 aa, Heterodera glycines
MPLVPIADLNGTKKYTAEEVECRNKLAALYRLIDHFRWSQSIYNHITVIFGINQAGYVLHSAIHAARHDVNCVLHLHTASAAAVSAMKCGLLPIIQ

SEQ ID NO: 153093 - protein, 128 aa, Heterodera glycines
MIRSLRGSANFLMALICICELVHQNGNTFFLVVVISGTNFVSVLTADLIMAPSIFAINCGLMAMLCSAVDRLLSVISPLKHMDILLQFKYVYLFSYLLICIIYAAYSLNYVLANAFENAGKYGAIKFK

SEQ ID NO: 153094 - protein, 49 aa, Heterodera glycines
MREGSRMECGTNLEKKLYEKLKSGEMPIAQSRNAFESVKSNLALAFLGL

SEQ ID NO: 153095 - protein, 338 aa, Heterodera glycines
MLDGGSQISLISAKFFSQIMDKVSQKDVISRFENRIIAINGKEVKCFGVVALPIRRGTLETKILMFVAQSAFGYDLLFGTNALKQLGFKMIDEVSNNIVDFSPASMLENSPMIVFKTFVVDGQNLDKTPRNFGGKRKNTSESKNGTGTKKGNKGRRQQKQPETEKSSVRNAGERRPLFTKTFVPQLKPKEIPIKNSENFGEIEANKQRVSSVQMKVAVPNDKAKCVWRRKNLGQFQLGTTENLGRGKVSPKMASSANGRLDLCDRRPDSWSQSSFHRGDTDVKFGQRIFCRGGKRRKEPDRGMFKDGCWHRLNSPTTYRMPNEHKRQGTPFSWRVGMC

SEQ ID NO: 153096 - protein, 430 aa, Heterodera glycines
MQTDRSPSEVDENEIRRRLLQVMMRQNGNAELTRHGEQDIGRRENGRPISDETQRPPIPRIAQPYADSLQMPNEFRENDRSLHPGLVFDGMMAQAIRSLDGFSYTMTLNTIPTLDGSKGSDSVNAFFKQFDIATEEWPEAKRLRALRSKCYGKAERAFNSAVAENRHDYQLIRRAIIRQLDDTDAKQLTAFDQLMKGVWLRPNEGIDQLGERVSRLVRCAYPGLSEQLYDEYSAMHFIRALPNSELAMTLEMTRKPGATFDEFIAQAARAEAVQNAARNSWRRSQNNGFSSTYWPRHGTSQNQRMHVTCYNCGRVGHISRNCASEPMQRMYHQNDEPPKRENLFIGAVNLEHRSEIEQFFGKTTNLSEKGRFLEESPAVGKILATKVSVFGRKLDAMLDGGSQISLISAKFFSQIMDKVSKKDVISRYES

SEQ ID NO: 153097 - protein, 150 aa, Heterodera glycines
MLDVVNNNIVHFTPASKPENSPLIVFKTFVSHDKIRYDRKDVIKSQIVVDGQNLDKTPRNFGGKRKDESGPKNGTKTKKHNKKHRQQKHTTVEKTTIQNATENLGERKKQRQRKENGEIAWAIKRVWRRKSLDQFQLGTTENLDRGKSLV

SEQ ID NO: 153098 - protein, 194 aa, Heterodera glycines
MTERNFEQIRSRTNSSIVHEGNVQFANENNGIEMDENEIRRLLLQVKMRQDGNAELARHGEQDIGHRENGRPIFNEVQQPLIPRTQPNPHSLIQSGHQIHQRQNCSQNIATINHRPNGFEDNERPVPNPGLIFDGMMAQAIRSLDGFSYTMTLNTIPNLDGSRGSDSVNAFFKQFDIATEEWPEQKRVRALRSK

SEQ ID NO: 153099 - protein, 51 aa, Heterodera glycines
MAAVPQANVEDDGPAADDFADENAAPPHNLLPWNAGQAVLLEAEGGGFIPL

SEQ ID NO: 153100 - protein, 20 aa, Heterodera glycines
MSDTLQQNMAEKMQDKNLLA

SEQ ID NO: 153101 - protein, 182 aa, Heterodera glycines
MSDNKEELVQRAKLAEQAERYDDMAQSMKKVGERKLRNFYNFLVRILKVTELGAELSNEERNLLSVAYKNVVAVVEKSQQSYQEAFDIAKDKMQPTHPIRLGLALNFSVFYYEILNSPDKACQLAKQAFDDAIAELDTLNEDSYKDSTLIMQLLRDNLTLWTSDTAGDEQEAGGEAGEAGGN

SEQ ID NO: 153102 - protein, 68 aa, Heterodera glycines
MKGRKEHRERGRLCKQEDARIPGESVEIGTQQKQALRAAEVVYAMLICGNEGENVQLGAVSHLTPVTS

SEQ ID NO: 153103 - protein, 56 aa, Heterodera glycines
MLTLLLAICLSLGPFLAYLSIALFSHRFLIVDRSRNRPICTSPGCVRCNRNANFLI

SEQ ID NO: 153104 - protein, 18 aa, Heterodera glycines
NRQSVSREAEEQSDTAET

SEQ ID NO: 153105 - protein, 108 aa, Heterodera glycines
VGLSVGHSFVINQITTQNLSHCFASLPPLAHLRHQLKSPPPPGCKIVPLEKPSVKLNWRFSRGDKAAKDKNGRRRSRNRKREKRVKRRMGEGIGGLIDGQLLTNRQCN

SEQ ID NO: 153106 - protein, 265 aa, Heterodera glycines
MLQILSQFTLFLLFFNLSEQNNSETKCQNDFFQMAQKLRASAPPIAYEKGANCETKNGLSAFEQMQWFEMNVFGILCCQNDNGNGILDEEKAEKISKIKKKFCREMENGKSIGLMMGNIGEPSLKLDEILEIEPKIYEKLCDFAAISKIEGTKKENMENHIGKVIEKIKAFFEAIKANAIAFSFDSSVGTAHSIAFKAYGRRKRRRNPRLGCVLLYLCSVISLVVGLLDLMELFPVASWAPGAAFGVAALCFLLMCCVCDLRPNE

SEQ ID NO: 153107 - protein, 73 aa, Heterodera glycines
MPSPIRLFTLFSLFLFLLLLLPFLSFAALSPREKRQFSFTDGFSSGTILQPGGGGLLKAIGLNVSSRLWAQFY

SEQ ID NO: 153108 - protein, 130 aa, Heterodera glycines
TNLEPNVPVKRAKEGEAVAKTHFARGHVKGGCPPGPPGEPGTPGPPGPPGDPAPCPKHMKSEAQSVDGKQLANRNKRGETVLNAAKEGTEVKRQIVRHGIGPPGPAGPPGEAGEDGEPGPCECYKDQKSQ

SEQ ID NO: 153109 - protein, 194 aa, Heterodera glycines
MANLLYIRMKANDCPLIAFIRSGCTTSFISESFARKANLLGNIDRSNCETIPIPGKVLGWANDVQIRIDELNLQFVHRLGVMADKHLPIRFSSSLRHVSLDDGILPEFPVDDSAMASDGQAVAKWLFTPHPDNVPNFLYCDVNLSMDQWWSTMEQFKAVWHFPMLLLRLLSAFWFTFSRLFRLTLLCHLIGSTK

SEQ ID NO: 153110 - protein, 46 aa, Heterodera glycines
KFSILMSLSVTRNHYFGDFVTKIVKNHYFGVLSLFFHYFDIFWKIP

SEQ ID NO: 153111 - protein, 262 aa, Heterodera glycines
MQIDELIVLESDDEEKEKQGEEREMPEEESAMQGKVKEKQAEEKETQGEKEKQQEEKETQVEEKKMQLDEEEKQQEEKEKKQTEKDVEEIIMLDSNDDEEIEKEGEDKERQEEEKETQGEEKEKREEEKVTQGEEKEKREEEKVTQGEEKEKRAEEKEKQSEEEEKTDKMEKQQEEKEMQVEEVIMLDSNDDEAMKKQGEEKEKQLGDEDKTEEDKETQGDEKKKQLENDEKRDKEKETQLEDKQKPEEEKETQGEEKEKEK

SEQ ID NO: 153112 - protein, 104 aa, Heterodera glycines
METTALNPRQSHSKNGKFIENCPDFVEFERILRENLVADEISEQILELANQKAKQWNELVEKVQQSLNTQLEQAERKYGALHKMYMELLVEAQKKLKEYAHEFN

SEQ ID NO: 153113 - protein, 117 aa, Heterodera glycines
MPSTSMARCDFMSTPSTSKSAFAFGLDDVHMFDELRRRHIWTEEELQRQRRSNAFLRKQLKAQRDRSTSLERSSSACRQRRVLSDVTTNPQEDKRLSAANDLLITLDAGISFKAREA

SEQ ID NO: 153114 - protein, 186 aa, Heterodera glycines
MTKPQQFTVVVPFLLLCAFFSIICEAVKDNDKNQNNQTASQSTNSAPPTVIYQNEPPVIHVEQQEFSKIVQETTGNAAASTNNKKGGKADGPLSLSSSVFKRPAPKKLAVFKPHETSSRPIINFSTSSSSTHFQRGETKFQMLDGVEKRLLLPPKWLDKMNDKVLTDHVIDQRRHPPFPPGKCMFL

SEQ ID NO: 153115 - protein, 103 aa, Heterodera glycines
MSTGVAVVRQSAFFNPQRKPWHSVDRISQRTQRFGHRAVFTEKGIYCGKALTRQHVHWPGINSQIERIVSQGEENQMPQKAPIHFGGLILQMAGRLTNELNDS

SEQ ID NO: 153116 - protein, 270 aa, Heterodera glycines
RIAAEEQRNTTTRGLATTHSSTQMRSSTGATDQQLFLSRAPSTADSSSSSGDPIKRYHHQQQQQQQKDDSSTTPATAEHRSLAVFVAIQDYVPEPGQAPGEALLLEQGQIVEVLDNKNPANWLVRTKAKPPLTGWVPGSYFETPSKYYTQRKSTRELTADEQTLSEQQQTLLKRDAMLNGLQYYSDDSGKVGQTFLRLERDFEQHVAFLRELDNAQRIVAENGAVQKFLEEIIKYSLRVQQQQNAKVMQKALELIQSVPKRAQEMEFTKN

SEQ ID NO: 153117 - protein, 130 aa, Heterodera glycines
MVGASNLGSSGTQNKGASNGYGKLEGIGNLAANGSSFVLSGYQTDRGAAQIVETVGKSIATNNTAAELRIKNQGTEVINGTMGTNTTNIRGNVNATGDQTYVQSVSSVSDQNRQQALFNSQNGQTADKIK

SEQ ID NO: 153118 - protein, 209 aa, Heterodera glycines
MNKRTKMKTKIALIIFGTTICWLSVRVVFVPPFSYGGHFPQFNFVSSEYGPGEVETIIGDGNCGWRSISLALTGSEWNHTEIRRDVIEYLEESINQHTHLNHNENEWWLLFNSIENIRKHIEISVSPAAGAHETEKWMNNLDLASTSKLFQLNIIVCERIQERIFRWQVYTPDLETSLTNLSQKETTASVFLYYNDGHFELIKQPTKIN

SEQ ID NO: 153119 - protein, 163 aa, Heterodera glycines
MYDVHVKRIHEYKRQLLNALHVITLYNRIKADPAKKVVPRTVMFGGKAAPGYHMAKQIIKLITSVASVVNNDPIVGDKLKVVYLENYRVSMAEKIIPAADLSEQISTAGTEASGTGNMKFMLNGSLTIGTLDGANVEMAEEMGAENMFIFGMRVEDVQALQKK

SEQ ID NO: 153120 - protein, 134 aa, Heterodera glycines
MEADQIGKSIGSDQSNIQLIRQNEKLTRENVQLKQRNQEQQQQIQALIGANRELIWAFNESRREHDELMQQLRVMAKLVNNGSSTRPAGVENTGETLQFEQQKTKSVRPKQIAKKNATTASAANSGGGGGGRQR

SEQ ID NO: 153121 - protein, 132 aa, Heterodera glycines
DWRSVISSVLRKQYVLQLFEALCPEFTGSNVVDLAVKNPSRADFIQKSLNFVFDAENELFGSSTSRDSYFMAIAEKIFTLREAKDRQNLEKSCQNGTTERIGDAVRRRTLADVLKPKHTKSRDEDILDGDEI

SEQ ID NO: 153122 - protein, 139 aa, Heterodera glycines
MAQFPVANILLASLLLGFVILNSKTNAQFQYGGGMLAEGPQMEGLLPQMEGLLEDYGRVGDYPFESLAKRAPLDLAKRAPLDRSAMARFGKRAPLDRSALARFGKRAPLDRSALARFGKRAPFGKRAPLDRSAIARFGK

SEQ ID NO: 153123 - protein, 387 aa, Heterodera glycines
MALLTPVKRPPPAAGQWQQQQQAQPSPQVLTRGQIAATQTDDATVAAATALVVAQHQQQEEQPPQATTTNSSTQPPQMTNSTTQPPKVDEPSMAQQQQQQPPQATTISTTQPPKVDEPSMAQQQQQQPPQATTISTTQPPKVEPSNERDPNVVNDQQQQQKHILPLPPQQNEQNEVKSTTGLTPAEAVRRSQISALVEPKQPQQQQQEINNGAGDEHGGYQFVTHHFPLFRSISVLSDNWYDWVEGNQTDKAGNQQQNVIVHQSVNSTINADEHGISDEASPVASLSTIDLGRVYTTVGTVMESLLVNFAHLWQYRLFRFAFVLLSIYFCLGFLEQCAVAMTAACVRWAWPPVHFMLGSSRGTLFYLTDWFAWMDDFLSSWVCDMAN

SEQ ID NO: 153124 - protein, 44 aa, Heterodera glycines
MSVHYFRVVCSQFYSNCYVQLKIQLDRFMGSGQTPKKQGVFILN

SEQ ID NO: 153125 - protein, 187 aa, Heterodera glycines
YLTHYSNSYNGRRHSKPESADHQEQPQDNREAQIVDDAKCADKPESADHQEQPQDNREAQIVDDAKCADKPESADHQEQPQGHREAKIGDDAKCADKPESADHQEQPQGHREAQIGDDAKCADKPESADHQEQPQDNREAQIVDDAKCADKPESADHQEQPQGHREAKIVDDAKCADKPESRQTINW

SEQ ID NO: 153126 - protein, 102 aa, Heterodera glycines
  unsure (1)..(102): unsure at all Xaa locations
FFRVAFVFLSIYFCXGFLERCAVAMTAACVRWAWPPVHFMLGSSRGTLFYLTDWFAWMDDFLSSWVCDMANRYCHQYDVMCDCQCSFVSRTQRAALLGGRRF

SEQ ID NO: 153127 - protein, 47 aa, Heterodera glycines; identical to SEQ ID NO: 141196

SEQ ID NO: 153128 - protein, 137 aa, Heterodera glycines
DIEKLRDSLNLSDQVLVCDKDEEVEEGEHEEDGEEAAMDKDNANEDEEEDGEEDGEDEEEKEEEDVEKEEEEEEEETEQQSTANDEEEAEEMIGEGEEDEEEEREGDEEEEETEQAAEKKEARKYPEEEEDEDEFYF

SEQ ID NO: 153129 - protein, 579 aa, Heterodera glycines
MMKAKELKGRLEKYQVTLQSFELEIIYRPGKKNKVADFLSRYNIPGNEKDPEPKQEENSDEFDLQPKILSAKNINENLIAENDGILNENPKITLKTVIEAQTKVKELAKIFYILKTGKCPNDVLKWKRVVSDYCLINGAIYFIKEGHFGVEKTWHEIKERFYWVGMKEDVKMLIEACEKCQMRKIQPGQAKSAPSVPIEPSNGPFQRIHCDLMGPLKRTERGNLYIFLAIDSFSKWVMAKAIPDQKANTVSENFVEMVVHQHSTPEIVVTDQGRQFTSGIFNDLAKIYGFEHVTTTPYHQQSNGMAEGAMRIMANIISQMVNEKGNNWDEILPHAIFSYNVSIHSATKFSPFFIINLRQPKLPTDRLLKLPSPDELVSDISVYTRIQTEKAAKAWEISIDGRAKLRKVHQEKVKHFNGPAILPLRQSDKPLNWEKYVDDPNLEQEEIEGESCESDCEETQDNENTQSKNKMGLKVSKYGFESSDDENDWNIVAFVRENQNSEDDEGPEVIMDRNPEIEIMPIFTILEVLIEGSFTEVYTGWRDPVTISLISSIPENLKRKIWKLGMGQTLQLSEIQKKC

SEQ ID NO: 153130 - protein, 171 aa, Heterodera glycines
MINYIKFINYQLQNVISNDVHEFLNFFSMIKVITIFMPRKRSLTTRQERKQKREANSRLRNTLTSSEAGASSSSNIDTRQEESETAVFCDLDHDNLNNTPAEPLTKLGTSPSSNIDTRQEESEVAVFCDLEQDNLTTTPMTKSRKLDQPFSASMAPFVQAQTGQGRIDSLS

SEQ ID NO: 153131 - protein, 64 aa, Heterodera glycines
MNIIRYDVLQLLTFGSICANITFEGEKARMEWYLGRLSKNAQMILDNVEPSLCVRRTCKMILLH

SEQ ID NO: 153132 - protein, 125 aa, Heterodera glycines
MDRGTGPDEDGALDVERIFDDERAEDESSDDDGGADAVARTVGGAHIGTEIGTAQQQQLLDVGAMLDEAAAAQIGGLGDNNGRADATAATVRHQKVAVIAAEKGHQNRRHPERTDAVGVDNEEEE

SEQ ID NO: 153133 - protein, 16 aa, Heterodera glycines
MANLKKKLGKVWAASF

SEQ ID NO: 153134 - protein, 168 aa, Heterodera glycines
KQINKNDSVMLVSDRLHGQCCLFCDRQCFFSSGCRQKQQQQRFSRTKTVLEGKCIHSLSAAGSIGTKRTQNLPIYETSLLIESGLNIAPPCFPVADDDGLEVKIIRPIAQEKCALKSRPGDTVKQYYKLTDPEGKEIGSNFGEKPAMTGMCIGEKRRVTIPGKLGFGD

SEQ ID NO: 153135 - protein, 43 aa, Heterodera glycines
MGMSEEILTYKDDICVFMGLMQMLIRLPRTGWMPKKRVLRKFM

SEQ ID NO: 153136 - protein, 121 aa, Heterodera glycines
PSQFGKSIFLNELKKIRSSAWSVSKKTLTVVGVNSKFSRKKFTLAIQKFHGAHTSERISEILKALLESWNVKECYCFVTDSAANLVKELLNPPKKSLYIIVKKHSPPDSAHSHFGLHLGTR

SEQ ID NO: 153137 - protein, 128 aa, Heterodera glycines
MDEKDVKAEEGQKDKRKGAKASLGGGEGLISAHSAVIFTANFLQSRVVINDIGGQLAKLYDALEVKKAEEFEQRMEELASAGDERRGRKIAELREAFREWETFLARLDVELERVAGPNIQTELGETGR

SEQ ID NO: 153138 - protein, 300 aa, Heterodera glycines
CQSVLLEYFCLFIISFCVFFVLFSCFPLFFPSTFLSFVCVCNRTFCDLQLGPIGWAKDNNAIVYISDPAKFRLHQQQVPIEVEYSDQNHEGIEIVVDASKEYQTVLGFGGAFTDAAGVNLNALSNTTRATLLRAYFDKDGIKYTVGRVVMGACDFSVREYSYCDTPDDFELKTFALPKEDTEWKIPIPNIQQAIEMSGDQLRLFSSPWSAPGWMKTNGRMVGAGQIKLVYISYLNLNFRFFEEYKSHNINFWGLTLTNEPLHGAAWNGLELDHATVKMRDYGQMKYGPVLKKYEVSKNPQ

SEQ ID NO: 153139 - protein, 136 aa, Heterodera glycines
MVASSEEEGADQTDTLSAFGDDEMLMTELLDEVPPFDLINQGIVDTIHLAIMARHGVLGGNIRTVDVRVVDGHGNCIYTPPPAAHVPQLLEQFIQDVNNVIGRASTGLMEARVVAAWAHYQLILIISSYFILQLID

SEQ ID NO: 153140 - protein, 46 aa, Heterodera glycines
MHWKLAEFIGEGTRKVGTWTKLRQGPGPREKLVPRPTRIFSKRKIF

SEQ ID NO: 153141 - protein, 423 aa, Heterodera glycines
YSRCLITEEWRLNSLANDRFIEYCCEILRCEMPPKCLALIDAVKTEALKTLASVVFLEKDKKIQMIVDQLELRTYHGFLPSQIRSCIDSLKAGRVDGSGGGDCSIAFVTSLFSLVYHIAGFEYGGDALNRSSMTAVLLDVVKNFSLPEQNISFVTRSVRIIDNLTGMDITEFNARSGTDAVIKRLNHEVNKCKEHIQIRQSSQSPGPLLCNQQRSALVKSLLNFLKRAVGDVHLAGQMRRIMDTDLPTSLIHVFEHPQYYGPSLLNCAISLATNFIFQEPAQLTTLQNKGLTMAIIGLIFNEKFPISRELVCALPNVCSALCLNERGLNELKLFNEKKPLEKIFRITAHVLGTSFDELIRHHPSLRKDLMGTLAGICDDWLSFEQTCEKEGKQCAISWAVGKAVVEDESALLLPLGDFSTMMG

SEQ ID NO: 153142 - protein, 309 aa, Heterodera glycines
MRSYMLKYFATDPNACAFIYALFDAYKLIGTDRLVVSCNAEQQQATTSQIAEDTAKVRELLIDDDSSSSSNQHGGTMPAITTAAAGTVPMPQLMEMDNGAGTLYFGPPQHQHQPQQQPHRSVDFATTAANILRSNSAGSAGRGGLGVGIGVGAGGAINISILGGPTVMMRGASYSTNSGTLSASISDGIVGSAGGGSGGGGRIAERSTHSIAIRTLKQITELITYIGKAFCTVSLPRVRQRANILPQMDQATVRHHAQKVTKIVFTGLKRLLEMDMNTDNIVYASSASSSSLNTTTMNTIGLRQIWHFV

SEQ ID NO: 153143 - protein, 303 aa, Heterodera glycines
MPPLVGHREEDAFILLERVLCAMKVLIQGEMELLEFTEGKAEQSQEIPVSEIDPAKIEQLVEMGFSQSDAVDALMQYSSVHEAAEYIVSMLERVTVPPTVSRPPAAAAVQEHPAITVSSSATAAAPPPPATTVAAATTVAANLVAAATAAAVSAEPNGTGGSAGTASYDNALQHQQPQQVGDAASGGSTTTNATTPMEQEQPLQQRERDQQQQLQQLTASLADVHQRNQEAAEAVEQLLQALRGEGVHHRGEMSGTLPPPPAAAATAMEQDGKSFDELKPLKREEFQAIRIDFCEITNGRVIT

SEQ ID NO: 153144 - protein, 157 aa, Heterodera glycines
EMLIERDAEPKTAGQKVKRAVETTFYISFGLISCAVLGVMTYLVFKEFFAFNTPQGVYRDAVKRVKADERCREMFGKRIMTFGEESGRGRRRHILHNKYVKDGQERLSVMFHVKGDAGIGKTYAEIYKGEDGKWDYRFVLVESDGFPKKAIFLIDNR

SEQ ID NO: 153145 - protein, 275 aa, Heterodera glycines
MSEWERLSEKLRHPENPIVFFDIAAGGADIAAGGAPIGRITMELFGDVTPKTAENFRQPIGRITMELFGDVTPKTAENFRQLCTGELKKDGVPIGYKNKKDGVPIGYKNSQFHRVIKDFMVQGGDFVNDFMVQGGDFVNGDGTGMTGDGTGMTSIYGPKFADENFEVKHSEPGILSMANAGPDTNGANAGPDTNGCQFFITCNKCDFCQFFITCNKCDFLDAKHVVFGRVLDGLLTVRKIENVPTVQNNKPKIPVPTVQNNKPKIPIVIEQCGEL

SEQ ID NO: 153146 - protein, 665 aa, Heterodera glycines
MASINDLDYVRDYDYVYDLDFVQVEECVEIIDQENEIEIRNYAVFEEHSYAKRPRFVDEGSSQASLSLDIAIAGPSRMSDSQFEERRSNEYLKRKRERERLRRANESQDQRIMRLEQMRNRNNSQRSEESVLERQLRLEQMRIRNSNIIANENVMEKQLRLEQKRIRQRAIRQGVINVYAAGSNENAHEHSLSPMNMRCDFCDALHFAEEKVHGRGNSFKDCCHYGKVFVPEIPEQDFPEELRDLFMKFDARHENFFENIRHLNSSVSFASMNPLRYRYPNRGPYCFRIYGQVYHRMNLALNPENGDEPAYGQIFIVDTEHAVRAMRHANVAIDPQLLRTAYEVIRNVNPFAEAYVMMKEEENDEAERARNENREPTEIKLLFETGRQLDRRLGYNVPRVNEVAAVYVPGADGEVPNAKIVVRERGKELKILNCTNSMVTPMTYPLFYPRGTLGWHPEMKHRNSNRRVTRLQYVCYTLAIREREFNPILYGGKLFQQYCVDEYVKIEGDRMNWIKSNQKKILADAYKNVDNMLMRRAQERGLPLGRKVILPPSVTNSPRYVEKHFQDAMAVVRRFGKPDMFLTMTCNPQWGEISDNLFHEQTSSDRPDLVVRVFNLKVKAIMNEISKKKIFGEVIAWMYPVENQGRGLPHIHLLLTLTEQDKLIN

SEQ ID NO: 153147 - protein, 66 aa, Heterodera glycines
MRTIILKKCCWLTIGCDFISEVLNLSVGHSTFCSLSRNSLLQLWRPLLNPHKREAMKHARSHHWTF

SEQ ID NO: 153148 - protein, 26 aa, Heterodera glycines
KSTPLYPMVYSLYAFSHSQLGMFPCK

SEQ ID NO: 153149 - protein, 651 aa, Heterodera glycines
MTVIVFLLCLIEPICQLALADLQGSVSRMGVRENGNLTKKKVLHKENNIPALKNASLTSSKHEDDDLLSEALINLHKLNEQTQNGSWSENSDETLTTLYSLVEIETKLTKFDEKAAKTIQELNKNLMTNSENVMIGESQSLKELSEELSKTIDTMKNKEDKAAKVSIDGVNGTLVQILQKANVHKKSIRLQIYVQVMKLLNLIHERIEQSPEKDTIGKVIGKSTVANSVKTVMPSQLIKQNEVIPKKQKHALSNKQKQETQKHLVSLGDKFRRRRRSPLPIAIIRSLSLAFAILCITVIALEHHNPWAVVVIAFLALYSQQENTRNFPTQIADGISNIVNRICGTRHTEGGPCLNGHRNNYGHESHRNISQTDVPQAYSCGNYVQHDWHNLAPQANELCATVRNANPSASGNPARRSSNDNNGRAAAGSVRQRLITPDLTLEINYRAPANRNKNKNNSRPGVEPSRSRRPNRFATNSLASSGNNQQNERPPSRISEGSGEETDDNNSIRSSKCTACKFENSSSSENNSRPGRESSRSQWPNRVATNSMASSGNNQQNERPPSRISEGSGKEKDDNNSIRSKCTACKLENIRSSSSSSDMRNAKAAEKNDDSNDHDDDKGENDEDDDIKDSDDDDDDANDDDDECDNDVKNL

SEQ ID NO: 153150 - protein, 129 aa, Heterodera glycines
MTPQYPRCNCLQANDAAHHGGLMTKMAVRKWPVRKRPYENGRTKTAVRKRPYENGPYENGRTKMAVRKRPYENGRTKTAVRKRPYENGRTKTAVRKRPYENGRTKTAVRKRPYENGQLVNLMFFHVLET

SEQ ID NO: 153151 - protein, 663 aa, Heterodera glycines
MDAKSKWPEVVRMRTTTALATIEALRIVFTAHGLPEQIVSDNGPQFSSKEFGDYCQSLGIIHTTIAPYNPKSNGAAERFVQTFKQGMNKLKKEGMRQEIALSQFLLKYRVTPHAATELAPSEILFGRRLRTLLDLVKQTAANDFEAAKMQKSSYTERMKRNFDRETNARKNFKVNQRVYARNYRDGSKWIQGQITRQIGTAMFLVRTARGIWKRHFDQLKENWTEEPSDNPSSESADNSDSEDEVPIEAMDDEQQLPPPEEQPQPEQPQQQANAEPRRSTRKRKKTQIFDSVTTKVKRIICAALKYNVIQVSGDHGRGFTKITISLAHALRPNSPSNNFVAAVFPAKDSRKNLKNFCGSLFLGGDLCFLWAVGHCGSAMTAFPSPVCDCRRDHLISSAKCQLRTVQELERQADQFQQLTHGGDKATAETRALTKGIVCASLLPSISFEQMLLAPFHVFQGLGNALIKERIGAKRKAFRKRDLTGNSIRKILVHADQMEALFETEWAKTIFQTMAHLGKIQIFTKAQPLSPGGLDGLETAVYQFKAFLDEQPMVRTLLSKKTKAHLLLHHFVPFARQHGFLGLLDEQGDEALHSVWRRLEQLWKTMPDSEQMRQQLEHHFVSNWLLDTGRLDELKLREEEQREQAEEDKTNEESDQDADVDIVD

SEQ ID NO: 153152 - protein, 29 aa, Heterodera glycines
VVCEKVTKGVGPRFDSQCMLLMYFYDFNE

SEQ ID NO: 153153 - protein, 63 aa, Heterodera glycines
MRLTTTAVVVSATRLRDRRPPPNKKTTTIKTMATVTSSITIIIVDRYSHNSVAMREALCCEVQ

SEQ ID NO: 153154 - protein, 20 aa, Heterodera glycines
IRSFRAPIAAPSPPTVFSLS

SEQ ID NO: 153155 - protein, 29 aa, Heterodera glycines
CILANMVVANVQPFVSVIKRTAIHDDHSL

SEQ ID NO: 153156 - protein, 115 aa, Heterodera glycines
AEHTAASSLFLPMNFFAHSLMYSYYALNSLGFKLPRWFAMIVTTVQTTQMLFGVAITATVFKLKSFLCFRCQQSMGNLYLSFLCFRCQQSMGNLYLAIFLYSTFAVLFIKFFYDL

SEQ ID NO: 153157 - protein, 102 aa, Heterodera glycines
MIIIILFIICPLNLPFASGQLSTKPVHLTNGQNGLTFVSYRAPEQRESNGTDEKAFGIEFRLPEIAGHCDDGSVTINPAVENIPRYLTFLLNNKKLDYIGEN

SEQ ID NO: 153158 - protein, 35 aa, Heterodera glycines
MALAFFTQITIFLEAIKMLRFSIFCQKLHSRTRWN

SEQ ID NO: 153159 - protein, 213 aa, Heterodera glycines
MSEFAFGQLTFLRPFIILILFCVGVLSDTETNKQTENSAPLSRDNSAHLARVLQLRQNHEVITHRKRDEKRTNAKTNNGKAKRYKCFLVDDNDSEENLTQQKSYFAKFQERQRLPTDILGWEESPRRSAGAAGARYLYFSTKGTTPEPIIEYIDEDNLKEAEVGTTAPFEGTAEFSIGALAPQRTTMRAMAPPKQQKLNMQTAITATTPVVVK

SEQ ID NO: 153160 - protein, 330 aa, Heterodera glycines
MAPPIKKKQKHSSADHRLISSSAATIGGKQQQQTLGSVMSSSGKRQSLRVAIKKNCRTLRKIYIDYSVITFLRANQQIFDKGTNLDLYLYLFYARKAKNVQPIWNVIADEIWPIFAPTIRNLNFFDAHDLEELIRHTSPSILTDHNINSIDSGNLLPDVIADDGPNATAGQALSKWLNTPRKDRKPKQLSCRDASEPPNIKWINGFKKAFLRAITTTSANYIIRLEDFEPAENAPFELTNERTNEMLTLEKEEKDDEENEDDDYDIDYWLLKRCPIGKTIQWEDENLNNVSFRFIRLAEFRQLSPPKAGQKKATNRLKMKPGPSGQRKKK

SEQ ID NO: 153161 - protein, 58 aa, Heterodera glycines
MPKWGDDDGTMDGPKFEQQFEQCQHLFEWRKLHLAIVVHSGDAKKRQKKDVELRGSEI

SEQ ID NO: 153162 - protein, 65 aa, Heterodera glycines
MFNRALFCSMDRWYGLTLTPIRIVEDEAQQALDETDELATDDSSQGMNASNGTERDDDQSSDVPM

SEQ ID NO: 153163 - protein, 182 aa, Heterodera glycines
MDAKFKKWGPPPGCSIVTMKCVINANWSLAFSRKKLPSLLRRLLPKGSMNVHEKVWNAFPYWKEELTNPDFMKDNFLIRMETMLLSDRGNTKNAFGLTKEALNECKKMVRIDIANDTEFLSAEDIQEDSIPSTFRSVCTGRGPLTGQWQTNCEPFMCAYKLVTVKFKWLGFQTVVESFIQKV

SEQ ID NO: 153164 - protein, 52 aa, Heterodera glycines
MAFGGPKKFGKSETEIPRPKYFSEVGNLNSDSKNIGNRGVPVAGEDGVRDQM

SEQ ID NO: 153165 - protein, 37 aa, Heterodera glycines
NVIPTSSASEQMQRNLFEILSQNESFAFQQIAGQTHF

SEQ ID NO: 153166 - protein, 206 aa, Heterodera glycines
MHTTRIVMSSNLDKNLENIRRIDQFASKVIGYSTHAALFNFSTEQNKWLKTEVDGPLFIYERLDQPLYSLVVVNRQSPQNFVEPITDGLKLSYHPPYIFVHREDGYIHSLWVFGEDECKRAFDTLTKLSMAQKMISAGATTSSPKNNISNNNDNGAVAAFAAATPPTKIVAAAKPSTPPPSQQQQQQAIRKEQLVTVPSSLNIRFF

SEQ ID NO: 153167 - protein, 35 aa, Heterodera glycines
FVTISTFFGKFFNKNAIKPKNTPLRIDKKNFKKHS

SEQ ID NO: 153168 - protein, 110 aa, Heterodera glycines
MASGRKHMTMTVFSGVGVSIPLDNETGKHRSFGFVEFELPEDAAAAIDNMNDSEIYGKTIRVNFARPPKVNERSQRPIWADDEWLKQYGHGSGQGEPGECQKFIWASKLE

SEQ ID NO: 153169 - protein, 61 aa, Heterodera glycines
MQTFFSQNHFAAEGIQMQKWRTVVSPYIFTAKMKTMNAVTKLTFSQIYYFTFLHKFNQKDK

SEQ ID NO: 153170 - protein, 200 aa, Heterodera glycines
MAELKAIISRLTAIEKLISTNNNNTLATEMTAQFSAIAERLGEIERKINNNGIVSAEEIERKRSLVLIGLPESEEEVPSLRAKDDAKTVEEVLDRLDVEVCPQMVYRMGRRIDEKRKGPRLVKVVLPASTFQRFALMQWGRRRTELKKRPGWERLLVRPSLTKEELEIEREQRQKKWMEFGKKKTGENITTRRGGNEKNF

SEQ ID NO: 153171 - protein, 453 aa, Heterodera glycines
MTAQIPEIWKKSIICPVPKIQNPVNPVDFRPISLLCSVSKILEENIAGKIKNFVEKNNLLPNCQHGFRKAHSVTTQLLEVVDDFSFALENKKSIDVIYFDLAKAFDTVPHNRLISKLKSIGINNSLLKWIQNYLENRKFFVKIGSDFSDEYPCLSGVPQGSILGPLLFLIYIYDLPKFCETENVKIKLFADDLKAYHVLSNISFSPLQNFINKFNRYCKLNGLKIASNKCLTLHLGHKNQKINYFIDDFPIPKNPGNEPVRDLGIYFTNDLKWAQHIEIISKKALRSAFAILKSIKTGDTKILVNLFNIYCRPILEFGSPIFNPYLKKDIEKLENVQKTFLRVIFRRNNYAADLPNYAELLNIYDQKSLESRKINLQNNESFSFSKNPVKNEFIIRTAYCSTNARYNSFFIRTSRLYRLLPKETRLLNPNEFAKLLERSDLNLLISLPPQLQK

SEQ ID NO: 153172 - protein, 141 aa, Heterodera glycines
MASNNKNSLLLFLLLIVALLLNYGFCHQQQDNDSSSWWTVFLLSVGCAIICAVLIKGQSEPAEQNANNDQNEGQGDGEIAGGGVNLDDIDMDFIDGEIDYQATWGHNPFEHGGGNLLQNLQEQNIDEQEEEKGEHLKGFGV

SEQ ID NO: 153173 - protein, 42 aa, Heterodera glycines
MAVTEAELFCALPTTTPEQLHAFGNFLRQFSQHLHDEHGFTD

SEQ ID NO: 153174 - protein, 119 aa, Heterodera glycines
MAMDGTPTFLSNLNYRQFTFLSNRGRIFGASALQKHSASQTLYVLSLDVLTFDKLYVLQRVGIVFAKREERKKRETDRRRTTAQSAGQWHRRGMKEGCAIKIFCDEIIMNGRKISVMAH

SEQ ID NO: 153175 - protein, 54 aa, Heterodera glycines
MHAKFVQIVAIACQWPEATLTDLNILKLILKSICSQVRFVTQWMIEKKVDFYPC

SEQ ID NO: 153176 - protein, 121 aa, Heterodera glycines
MGRKSRGKKGKREGDEEKEEKGVEEEEEKREEEKEGEEEEAAKGVREAVKEDSEEREGGKEEKETEREEEEEGEGTKEKDGIGTERTEATAENQRGKIRGDIKQSVIRVIADQCQRANGRE

SEQ ID NO: 153177 - protein, 190 aa, Heterodera glycines
MPRFELQNICALQSQHQLRHLPKSEANDGGKEAAEVPIIVYEESDNETEQHTHHHQQQQQKTVGQPPRTAVDRREAARIACWASPELSCEGLSLKVRETQPRGTTEGGEARPEVKERTEQSEGKAKAQFERRKDGGAAETADGEGQFGGRERDDAATTADDVIASEMETRGAQIANEQVSGGWKTDGESN

SEQ ID NO: 153178 - protein, 148 aa, Heterodera glycines
VQKALDALVEGKLISEIERVGGAGFKVLRCLEGATAYVFASRGCKKWDTAAPEALLLAAGGTLSDMSGRLINYGGTLSDMSGRLINYGPSVQLINSGGVLATAPGVDHQSFVAAIPQLVKESLPETESFVAAIPQLVKESLPETEIVG

SEQ ID NO: 153179 - protein, 96 aa, Heterodera glycines
MGEDLKRMTPIGRTPRLDTAPVQPPHRNALTTGDEIAGHRHVGTAVRDPVKGQLRMAKERDRTLHKRKGQFIGHRPNGRAALAEHFHQIQLATATL

SEQ ID NO: 153180 - protein, 65 aa, Heterodera glycines
MIKELRDEVFGKIDELRDEMNQKFGQINTRLDRTDQRLDQMDKRLDRMDQRLDQFETRLINYKFL

SEQ ID NO: 153181 - protein, 312 aa, Heterodera glycines
MKANYQVSELVKCDSFSELLNSLTKFTLECLSMSHFFTTNSIYYLISFWSKLAGSLGYARVDVELISLCIPKVCTAFIQSRIALCESVVRQGVEDPLDDMGSVKQLMELFTILSRKDYKQTVKELLVRFDESLGILFTQGISEEEQIIARKRLIWLITMMAAGINGKASSNSSELDDDLYDGEVAARVWKTMQLTNGRLERQHPSVMDIQLEFAYIYLMDEFRKAYISDQVMRDSQVYEKLAELGITDDSEVLRLYAQKIIVNLTYWGKDEKILSSTLSLLNDLTVGYANVRRLLKTKEIQELLRNHAVTCS

SEQ ID NO: 153182 - protein, 230 aa, Heterodera glycines
MKRTNASNITPPRAKRSMAPALDLDPNTVALAEQERQRTLVFIGLPESNAIRPSERVQEDREAATKILDHLEVEAQPTAVFRLGRYDPQRTTRPLKVVMPTTTHQHMALGGWKRERARLRSLQNLNRLFVRPALTKEQLKEEYEARFRKRQQNPAPVATAMQPRQTNVPTPVKENGPNQKEASDDISKPPEVFDQTILVCYEALKSLPPNDKIVHQIQSLEKQYPRLFNK

SEQ ID NO: 153183 - protein, 100 aa, Heterodera glycines
MAFFNNGTLLCYSLRDYNNNSVETNTKSYKSKHDEQKLEIVQKFIAMKNEYKQKRKYSRKEWNQNYAEICKKIGVGYETIKKWKKQFGICRKINTEKQNG

SEQ ID NO: 153184 - protein, 53 aa, Heterodera glycines
MFATPEFMDAEDSLMEMKSNQFKMDKNEFIAAEKLIDKDYYRDFGDIFDPDVK

SEQ ID NO: 153185 - protein, 236 aa, Heterodera glycines
FVQRRLKLFSKLGSADDSALVKQQFAQLPHRNAFVQCLFIRASCFMERNWDGDQLDSVRDCLAILLFCPSHKKAHSLLIKCLISLKQLPLANECFEHYCTLHHFDDEHTTELKQLLGDKKQEEGEKLWTPEYTTHHRDYVQRYTGHLNINTDIKESNWFGPDDQFIVAGSDCGSLFIWERNSQCIVNALKTQLKKATDANFPEDAEDRNITELYELMRQNRRARTPELVWEQLLNS

SEQ ID NO: 153186 - protein, 96 aa, Heterodera glycines
MSIVAASVLVIVTQCCGCGKKDAAEQQMAPTGDQMQQGSVAKQGSQMGQSAAQGGASKMGQSAAQGSTMANSQMPGLSTYAGVAQSPTPIEVSAWA

SEQ ID NO: 153187 - protein, 93 aa, Heterodera glycines
MTTPANAARARSAKAKLRDAKRRRAAVGRAGYTRKAQRGERCAICMTNVSAITRTTLGCTHPFHRRCLYRWIRYHTNCPVCRYNFTRTIPRRN

SEQ ID NO: 153188 - protein, 110 aa, Heterodera glycines
MVVLLLVVVSAAASAAAALFAVTVTCLRSAVSSACGGQRVPVFVAFVLVMALLIPATPAIVVEIIVLSQKWPTISNPENTHKVGSPSYNTQIEEIEKINFNTNNFQYNTS

SEQ ID NO: 153189 - protein, 220 aa, Heterodera glycines
MVANPPPPPPPPPIPSFSGDTTTAFLAATGAPVVAPPPPSTPPPPPPPENEHAGENKVGSAGSPPPPPPPVPVPPPKRCRPLVLKPRDLPTISEGWGIGSADKFRIIEQVGEGTYGQVYKASDGQTGRMVALKKVRLENEKEGFPITAVREIKILRQLDHPNIVKLLDIVTDRTGPASAEQSPQQQSPSIGGDLSAQRKRRSSTLTNSSTSGGQPAGGGG

SEQ ID NO: 153190 - protein, 125 aa, Heterodera glycines
MPKSERKIGTDNNGHHQNKMDEIKQEDEEEEKEDNLDLLKAKILSDFNKLDNGKRKFTSGATLGYVTPNFCIFLFMIISMIFEKPIKLVASFRMIPSLLVNKEKSYGALNLAQNPIVSGLIPNLG

SEQ ID NO: 153191 - protein, 64 aa, Heterodera glycines
MSPLRFIIAFLLVVLCAFSALITAQEERVDNEPAALRARRGMYGSPYGGGMGGGGPWGGNFGKK

SEQ ID NO: 153192 - protein, 117 aa, Heterodera glycines
MLKRKRYLPIDSYLEALTIPLERKQKRDQFYQNIRSFYKRKWGFDFKAPSANGQELDLFEMYEAVTFLGGWQKVTALNRWSEGGHFTQIFLLILTFLVDVRPTNNNLFYYKSIFCPE

SEQ ID NO: 153193 - protein, 88 aa, Heterodera glycines
VFFAIAFCGQSVGQIRHYFGLCLSSLSLCLFYRFQLIPDVVKARLAGSLLFHLIEYPSLIDSLSDRGNDQAKRNWPFQLDLNIQKFAG

SEQ ID NO: 153194 - protein, 93 aa, Heterodera glycines
MSIGIRYGTERLPISDIFGVGIPTSQNFWGLGMPSLIRTAGPPVPSFLKNCTAKKQTLISGDYLLINDQPKKIFYPKLILFIDIIWLGFIFKC

SEQ ID NO: 153195 - protein, 22 aa, Heterodera glycines
MARKDFRFPTFLGSEFRLPKIF

SEQ ID NO: 153196 - protein, 28 aa, Heterodera glycines
TTPNPNASALPAAAAMAAAAITAKIQAQ

SEQ ID NO: 153197 - protein, 187 aa, Heterodera glycines
SFLNDQVYLVFIFKIFIFSKFLKSPQLIGLGLRKLRTYEKEDLERAKRYAMDQSVKYVMLKQREAHQQQVMCDRTMSPTKTDALSIMSRVYIGSINFDIGEEHLRQVFAPYGPIKLINMCRDPSTGNHKGFAFVEYEVPEANHKGFAFVEYEVPEAAQLAQEHMNGKMMGGRTIKVVELPETGASAF

SEQ ID NO: 153198 - protein, 113 aa, Heterodera glycines
MSGESKEKQPAQKNPKAETASTKLPLDYDLHRVAAKAAGNVYAWLPADKQPKKLADIKPAAPAAPLPPADYDVERVAAKAAESVYSWLPKELQPEMMTEDERVEFTAEVFQDI

SEQ ID NO: 153199 - protein, 51 aa, Heterodera glycines
MKELIGSYFYGHPKNEKWAQEQHFFYVKCTYITRVRRSEALASFCGFLIGQ

SEQ ID NO: 153200 - protein, 51 aa, Heterodera glycines
INKRHYLANNFTKNHPMWQKSISKSVLLSTKRNRTARNFPASDPSVPGKFS

SEQ ID NO: 153201 - protein, 499 aa, Heterodera glycines
MWQLVDLEEEERKRQKRERKERKRARKEAKRARKEAAEADEGTAETEKQLRKRLKKKSKKRKKDKQVSHESLTPPPTPAEETAKDTAGASRAAESRTAFVAAPNNAAPRRTAASSATSRSVADIRRDEDAVKRRSPSIRRPAPERIRRPYRPLPPRRVSPQPRMPVRRKRPLLPSKSQTMTHRRRVVRRSLLTPSPPPAARPRGDTLRPLCARSLSPPTPLPPARVTQIERAVSVSSAGPPPRRRHGAHVAVGPVAAEAAALPPRPVLLPPHARGVRPLPAERDRAVTAAERTALPAHVRDPKLISTLRRPYIPGAGRRSTYGLARTINGETTSGTTTATTTTILGLRGRGRLRGRGGRVNLRFFTQRPKADYLDNRGQIDKRKLLEIATENATKLAMEGKLPKGAELVDTIKIKSVEQLATLCKQVADEEAARPVPFTKWINPNFPLGVAGGAPPKRMHRAGGPVGDDDDYLLLQKVSSGSEEEGDEEERFQRKKTAF

SEQ ID NO: 153202 - protein, 180 aa, Heterodera glycines
  unsure (1)..(180): unsure at all Xaa locations
SSRFSRLLFSGHRTLLWLFGCSLYALYWAVFVKPTVYSSVYFGWFFXPFVGYRPDNQHEFAVQLHTFHDILVAFLCPGIYLIFALVLCASSYDFNTMQKKTFLQVFLVSLINTLTGSLYVYMQHNDLRQQWMLTLAEFAWXPPVIYLALNKTIRKDSCSLFMKVFQRHRISSVGVVAVSA

SEQ ID NO: 153203 - protein, 73 aa, Heterodera glycines
MSPRFGSTSDMTAEPMPSSARCNSLMAISNEEDADGESSMAPMWSNICWEKSKEWGDEGKVDANLSLFGHKFH

SEQ ID NO: 153204 - protein, 26 aa, Heterodera glycines
MWQKKATTTLKPREKAKEKVRKRKKI

SEQ ID NO: 153205 - protein, 278 aa, Heterodera glycines
METKDQVAIHEAMEQQTISITKAGIKATLNARCSILAAANPIGGKYDRSQPLRNNIALSAPIMSRFDLFFVLLDTNDNPLSAEAERALKSAYLRLRINDDGNGTRVTVRQLESLVRLSEAYARLKCEAEVTEEHVKKAYELLSKTIVPISAPQISLDEEDDADFNVAPQPMADITNQTQQDEEQHQMDIDTTQFMGEKDTETEQLGRQRRTASDTAKSAGAPSVCALSVDGGSEGLKLSHDQYMRIANMLVVHMREEEERNGDEPEWPGTRQSQLAEW

SEQ ID NO: 153206 - protein, 183 aa, Heterodera glycines
MMFLIRHFLPCHYNADEDDAEFEEGALVEYCRSKVVRPSAVLKQPPLVVRRPSSAVKGTQNLFQNEKPNSKEKTNSSRNNDQFGRKTFEGELRNGWFIDEKQKRQQNARRNTAIEEGQQPAKIVFGGNSTEKNRWRSNSSTGAGIAERSLLSSAGDIARGRQMAHVIDIEVEEEKGKETPQKE

SEQ ID NO: 153207 - protein, 100 aa, Heterodera glycines
KNRVIIFTVIVELIFGVFPCFVSILYNQVLNLPIGAPNSGLKGEIAITCCAFDGAMCGILYMSVLLKRSHGSSTVANAVTTVPGASKNLQKAHENLPKIS

SEQ ID NO: 153208 - protein, 102 aa, Heterodera glycines
RPGCDRMSALCLPAMGRCARETDQRAEEPPEKYHMNVLARYRTAIPERDGGHSKTNDEESSQNGGMDNNDDDDQQRIMPMPTEEGAGREGGGAQSSRSTDIE

SEQ ID NO: 153209 - protein, 293 aa, Heterodera glycines
MQLKGIDLSFCTLRRYVSRLTIVSAHTNKNDASNSNASSHEMPKHELRFEKCFSKTLRKNVFIIGNESAWRKYVQTNENNEDIYISCSKCRYFREQEKNVNVKSIVASAVLRQGTQLVMLQSNHNANCKPEKLEKLEAEQVDREQRRENYKCESEGKIIWRKGLGKARESDLKTDIDPLDENSISSNYPSWVSVRRAYNRRRQQLQGTDSNNPFDVPERLQLTKLGSLKLLMGKTITETEWMIYRNREIGTLLFASKIQLEAARYCKIMVADATFELAPRGFRQIWLKHLNLG

SEQ ID NO: 153210 - protein, 69 aa, Heterodera glycines
MHPIKKFIFLYLILYQSVKIEQKPVHRRAILSVLAIGGIVALVLVPIVVGSAVVGYLISYSIHGVNGKC

SEQ ID NO: 153211 - protein, 45 aa, Heterodera glycines
MALLNLCILSLSCSCSASTYNRKGCRNWQLFSTNFVHFSTGRITH

SEQ ID NO: 153212 - protein, 149 aa, Heterodera glycines
MGDDDDNIDDNDGNMDDNDDDDLGIDMDAIIRELEMEEGKDGEDEGLGLDYDEDDLEGSDDDPAEKEDEPKPNIAAKKGKKKVLESEDDDEDDLEGSDDDPVEKEDEPKPKALIAAKKGKKKVSESEDDFEEDWDSGDDYWVLAWKKRQ

SEQ ID NO: 153213 - protein, 301 aa, Heterodera glycines
MKKQLHKLRNEQESKIISQGQNSVNKCIRNKLSKVNEIPTLIDSAGNMFSSNEQKCEILAEIFQKSFLENSVVNGSLTQSTQNKIKLSDIELNAGIIWNILRKLPRRNSTSPDNIPYILLKNCAEPITKILADIFRLALDSGQIPEIWRTSLVVPIFKKGEKTDPLNYRPVSLTSTVCRVFERILSSKILEFLNGIRFFDKEQFGFLKNRSTTTQILKTMDDIYNSLQKDQQIDIIYIDFVKAFDSVLIDLLLQKIKKIGIEGKFHNFLTIFLKNRSFKVKLAKNCQTVSEYFQECPREVS

SEQ ID NO: 153214 - protein, 113 aa, Heterodera glycines
MANKVYVKKGIRVKNAFKKKIEENYGGRMETVDFEDIEGTAEKINNFVEEATHEKISDLIAPDALDKESCLVLINALYFKGAWANKFNKKFTKKATFYVDANTKKEVAETNTF

SEQ ID NO: 153215 - protein, 61 aa, Heterodera glycines
MMHGSFCANVTFKGNSTEIQWFQKEILLIAVQIMDHAKKYVENELEKTFPLIEIGLVESKN

SEQ ID NO: 153216 - protein, 88 aa, Heterodera glycines
MATLWNWSSFVFRQKLSADGLSILIQAEKPIVGIDSSALVDVSVEAGYHNMDTVVVQNGKTILRGTAQCEVGIILQICRHKALPIISA

SEQ ID NO: 153217 - protein, 30 aa, Heterodera glycines; identical to SEQ ID NO: 152275

SEQ ID NO: 153218 - protein, 88 aa, Heterodera glycines
MEAIIKHVQYAAVKWQHKMYRNSKTMARRMGLIDGWIKEMGRMNGLTKCLIVLAFCFTPIIFWQFFSFFTVHGSDAHQTLQRYLSQEN

SEQ ID NO: 153219 - protein, 48 aa, Heterodera glycines
MPKIHFMAIDQQRVDCAICLDQIPLETFVRPLPCNHIFHNQCIENWYF

SEQ ID NO: 153220 - protein, 176 aa, Heterodera glycines
EYNCSDETEYNFVKNAWIEINQNDPALSQLLEALFATVISANKALEYDDANKISAQLNELKQSLAYAVFFMAKRGQIPLESPREEKEREPKEILIGLIDIYNECQLDADKVLKSCGECGKKGKEEKWQKGKEKYGKKERRFLEFVAHSLEMKWDANAFSAGGQQQQDDDDGNYMHF

SEQ ID NO: 153221 - protein, 103 aa, Heterodera glycines
MPQIHFMAIDQQRVDCAICLDQIPLETFVRPLPCNHIFHNQCIENCQLLFYDPVLLQLLVNDMEQYNARENSEIKSEARFGFSGLDLAIKTAFNKFQLIKAKF

SEQ ID NO: 153222 - protein, 70 aa, Heterodera glycines
MPDAEKILQQLEHHFVNNWLLDTGRIDELKRVCFFKRIFICHFTSLLLLKIRVPRDREFLPKPGPGLAGT

SEQ ID NO: 153223 - protein, 342 aa, Heterodera glycines
MNFDEHGQINVMSSEHAYFMLKAAHFGDMASFHHIRHAPTPAAAKRLGRHIMPFVEQQWHVVRFELMCRALRAKFAVEHLRSALRTTGYGQLVEASRDEYWAAGREMHDVGLTATANWLGQNALGGALMIIREEVRTHPPTPNNLVRHYVVAQASAEDYVIVAAAFDHEPFFVRVGNDMLQGLGLQRNLAVGDTLVLVGYYWRAAFEQVAQIGHPTLPGWLHQGQIVRQAEAQSVQNVVLVPSFVMPGVIRAINNGRHQGHRIVCSVNVLVHGRIHTLTKRNMNEGVIELLEEGQNVQLHVMEVPAGWWCARNYILPPNALLGTGMEWQSNGGEVFPLWLEL

SEQ ID NO: 153224 - protein, 125 aa, Heterodera glycines
MAPDFDPSTIPKSLPITNNGPPLIAVLWTNDWDAQRRRVLIRETNEETILAMAQNEVNIQFRYGKEFEPKSMVIITWMDSSVTDEDDENELSDADVLFQLALIVGNNACFAHNIFSKLPKSVMAM

SEQ ID NO: 153225 - protein, 163 aa, Heterodera glycines
MQNFFLYRYAKFGATCMHRKKVIWREVKCECEGGQCVTVRVQLLLQCNAFRKTVKILGLLPEALPDEFVFPVRSISVHTFEKMVQWMEHRDGKPEPIVERDPLTGTQKWQVFDEFDKSFFKVVDFALKNATFRPNFQIQIEFAELKMLLNASHFLDLNSLFIK

SEQ ID NO: 153226 - protein, 89 aa, Heterodera glycines
MAKAKHARWAKKTAPQPDTDAEMPQRAVDIRGNGAGQRRTTIINSNTGDTAGNGRAVGGDDGNRCVIPFNACRRRPTNSTNAVNIHGTL

SEQ ID NO: 153227 - protein, 120 aa, Heterodera glycines
MRNMMASVVIFYFKIKIKIRISLISLLTHAFIVIADTAPVQKTMIEQFIAEIGSSISGVNETEFARAAGLGQHSAEKRESDTIGDELPKVMKKGSSLEDQLEELGQDDEEEDEEEDEEES

SEQ ID NO: 153228 - protein, 28 aa, Heterodera glycines
MHCFEGKNGLFRLDIFPIHFRVLINKIL

SEQ ID NO: 153229 - protein, 230 aa, Heterodera glycines
MVFSFATSYGGFQCSVLENADSDEVFPSSSDAVDGLSSAAQTVASLRDRVFSAISETYGQWSQTIGAYFQEDDLEEDDDTEDYEPPVLLKQPVRVGPQFQVTELPNQSMETQPLDELSEKLWCPSTDRCPNAFIDAYLTNFAQIKAVKKPCRNPSAPPTTPLADVRPANVPDDEDALLALMKVRQKWLILPCRTVGELVTFYYSWKKSERYDLWKAEKCRREQQVDARTT

SEQ ID NO: 153230 - protein, 19 aa, Heterodera glycines
MADADAQSDYEEEEEDDDE

SEQ ID NO: 153231 - protein, 148 aa, Heterodera glycines
MRDVAGLDFWLHELPLVEQNATRETEEEKEEEEQTWQSVFVPRRWQEDGKRTERWNESMNHSRLAMSALMAHGTFMAKPLPDQMVGMPMDDDGTEGADEEKGTSDNGKLLSGGGELRRVWTAFWLALSAIVLLAVAVMTHQLTLISFN

SEQ ID NO: 153232 - protein, 29 aa, Heterodera glycines
MMLGRSDKSINTENDFRLIGVFNGIAIRI

SEQ ID NO: 153233 - protein, 41 aa, Heterodera glycines
MSATEFENHLTPNLSGLYAKIDALSAQVQRLGLAMATLPNG

SEQ ID NO: 153234 - protein, 23 aa, Heterodera glycines
MTLVSGFVEAFEFTLCFLMIPKT

SEQ ID NO: 153235 - protein, 100 aa, Heterodera glycines
MFKLGFGLISNLASTCTVLDSLCCAIYFTLAFVPPGWLKRNANATAIGGTTNAQLREPNQQQQNRTHRIPSFNNTVGPGTNQPNRYCNGMVPVVTNHFTL

SEQ ID NO: 153236 - protein, 146 aa, Heterodera glycines
MPMFVIRISKSLTTKVGLSITRERIMVFSKFVINHFFSSKDWSSVFAKHPILLDNNSSNIFYYEISVKNKKGWVFFGFAFKQHIKLDWIIENIGTYAYENDGEIWINKQRKGINAEHSNGVGDTVGIGVNSPLADHFTKNELRLGW

SEQ ID NO: 153237 - protein, 99 aa, Heterodera glycines
MSISNNSINDGDDLTPAENEEVNGDAISLDNDGQFDGKNSKLITDRQQLKEFREKIAKMEMELKMAKLELENVRSFAIKFGKRTKVKTAAGTDGRAEGI

SEQ ID NO: 153238 - protein, 111 aa, Heterodera glycines
MSSRRPSPKASTSRARSEHERARSRSRHERRGMFEIVRQGMWSKIVVTLRSMLPSPPILERESVSNLAFKIEIKNGFDNLANEEYGAYTGSRTLAKPATGQSSDSADSTVG

SEQ ID NO: 153239 - protein, 132 aa, Heterodera glycines
ILHISMSSRRPSPKASTSRARSEHERARSRSRHERRGMFEIVRQGMWSKIVVTLRSMLPSPPILEPNEEYGAYTGSRTLAKPATGQSSDSADSTFFFNACGGPNEEYGAYTGSRTLAKPATGQSSDSADSTV

SEQ ID NO: 153240 - protein, 147 aa, Heterodera glycines
MKRSKRNSSNTKTKKPRISKNFDHHEGIKPCIKKIEEYTTNSKKFRLLRSKSKFVVENIEKCPNPTIELENCIKTSIDEAIADAKRKLGGADKAGVIISSEMLEQEAVFNQFIKVEQSLSTKNINLYGSPFIITVTVLNINDLRKNK

SEQ ID NO: 153241 - protein, 116 aa, Heterodera glycines
MSGEGSDFNPAFFTVEENAQYQTILERLRSFEAAVCSQFRKLESSLNGSERATKDQLSRLESSLQNLDENEEMDEFETKEKIFKLEEKLEETHNKFEVLTANVSENLKECFEKLIL

SEQ ID NO: 153242 - protein, 157 aa, Heterodera glycines
MANPTVQQLMDMVKQLLEAQQNAPQAGQQPSNVPSLPNVENFEFGEQSTDIEDWLQQFDFALDCAAPNLQDVLKVKLLMTKLSKEAFAEYKKSCMPKNVTDFDFAKTVEQLKSLFARPQSIWIDRYDCLRASKLEDKEFRAFVNRHKRLLRDFNSRS

SEQ ID NO: 153243 - protein, 34 aa, Heterodera glycines; identical to SEQ ID NO: 124987

SEQ ID NO: 153244 - protein, 89 aa, Heterodera glycines
RNKTSFPCLSTVCPNFYFAKIFCRAEFASVWSRQVVQRPGTSALMNACDQRVADAGTRATGRRSQSGQLIAVHRRGADLHKQQGISLVN

SEQ ID NO: 153245 - protein, 118 aa, Heterodera glycines
MLNNAVLTLFTGKPGSATIEAMLIDFKLTETSLTTPLPGVQLHWIHFNHAVMLGKYNLAMSFVTCIIMLFTIVSFLYWWYALMLSVRMASNYGEFLGWATVSMALVFYILFFMAFVLL

SEQ ID NO: 153246 - protein, 60 aa, Heterodera glycines
MELGDMVLAILELICCFFVPPIAILLKSGECNQQVLISVVLCILLWIPAVIHAIWYCFIR

SEQ ID NO: 153247 - protein, 46 aa, Heterodera glycines
MEIQHLNNIFSLFLIKMHILWRSKIRVFLELSTNLAPHFGLPDFGP

SEQ ID NO: 153248 - protein, 319 aa, Heterodera glycines
MEEDRAKNTDIKFERLVEECRSILSLRSAAAALEHPGHGWQANSILVKPQREKERQGRQRQFSNSRTQGISMKDGRTVNQQTAASHQSRVCLFHAKRVEEIIGTTSAKASVKVIGTTKVTTNYGKSATTVIESDILHDSAEAKSRPTTTTRWHNFELIGLFDCTVEFAGIKLELECFVAPTGALNLFGLPWIRAFELALQRPIATTLQIVQPEPAFMAMASSADLDIVTELDRLLAIEAIKQIDYSRWAAPIVAVKKKSGDVRVCIDFSTGLNDALELNRHPLPRQYEIICFALGLYQTCYEGANLQFVDDFAQCFDRN

SEQ ID NO: 153249 - protein, 58 aa, Heterodera glycines
MAPRDDSSNNNNNGQPSIQFDQQVRQDPGLNAVFDFVREQGARQMAQHRLNERRAGNN

SEQ ID NO: 153250 - protein, 95 aa, Heterodera glycines; identical to SEQ ID NO: 125597

SEQ ID NO: 153251 - protein, 168 aa, Heterodera glycines
MWVKYFSGKKILNTVLKSYFGKLFITFLKKVIEIKVILGIGTKGNFMYLLYLFNHFCTSFIKFVPLLITVLFLLITVVPLLITVVPLLISVVPLHITVVPLLITVVPLLITVITLLITVVPLLITVVPLLISVVPLHITVVPLLITVVPLLITVVTLLITVVLITVIF

SEQ ID NO: 153252 - protein, 224 aa, Heterodera glycines
MFPDDDGYESEDDEILLPPPPIPPQLGHPPPNVPAVRVQPMHVGQQRLPLRDLPQFEDHLQNVPAVRVQPMQQPLPLRDLPQIFHPPPNVPAIRVQPMQQPVPMRAVPQFLHPPPNAPEIGVGPIHDGQQPLPLRALPQFAQPPPNVPAVRVQPVQQPIPLRDVPLFGNPPPNVPVILARFCYFFSRSRMQAIQPRQRPRQLRDVPLFDHPLPNGQKLDAKPNL

SEQ ID NO: 153253 - protein, 26 aa, Heterodera glycines
PGVPSRSREIGFRDELPCQYNIYITS

SEQ ID NO: 153254 - protein, 327 aa, Heterodera glycines
MTTNSCVFYQHDLQKQKPNELVAYVARAVCLYTDIFNRMTEEERQSLNETMAYEESLTGQKNIELVGQKLDAQVEKKVKSLIADQHIIEYPTDQRTVLNMPTLHEFLRLEQGESSAMGEKKGAIVALPGSLDEMAQTLIEAEQPWDDGTDQFQGFSLLQRRPTLEDMFSRSPLTPIIESSSELRLRSESENSDQMYSLEFHALPSPQWNDKIVIGDQKGDTMVISDQKMSQKADQKHSPSKLTDQEHSPSKLVLVNDQKLKQEAGHARRNSTGSIHRGQKKEKEADHPSSSRATSIDQRPALQYHPAADLYHQRAASATDKSDGQLW

SEQ ID NO: 153255 - protein, 39 aa, Heterodera glycines
MAKNGFVFESWPTQSHPFITHPAVAYCQLLSARATRRQQ

SEQ ID NO: 153256 - protein, 36 aa, Heterodera glycines
MSAFQIVQSGEKPIYSFGAAMDDVALKSMFAFVGGD

SEQ ID NO: 153257 - protein, 569 aa, Heterodera glycines
MNCSLSVAAVTPTRRGQVKRSEQHNINEKCCAFNSALLNALNECIPIKKLLKKDLAPKYPQHLLASIKEKAKLYRQCKIDPTKKALYDSITLHIKIQTKKIHNLIEHKAISKGKNSIFKYIQKHNVNPFEIPNLVFENKCYHESEEKSELFAILFANSFNNSEVVLNDLSLDNSYGNIQCFISDINFNIIETQTLLRKLPNKNGTSPDNISYKVLKNCHFSLATVITELFRLSLDSGSLPNIWKESIVFPLFKKGDKFNPENYRPISLTCSLCRVMERILSKNIYNFLLKNNKISESQFGFIRNRSTTNQLITVVEDWYEAIINGKKVDCIYIDFQKAFDSVPHNLLLYKLEKIGIRGKLLNWIKAFLMNRTFRVKIGDSLSSIKKVGSGVPQGSVLGPLLFLIYINDLPDVIPSGVNIKLYADDVKIYICYKARTETEIMHKALHNLFEWANKWQIKVSIQKTFVLYLGSKNPKETYKFDGNTINAVDTIRDLGVNIDNKLQFSDHINHITRNAYLRMRSLFRIIKSKSSKIWITLYKTYIRPLLEYAPEPSANSIPKSIRIPATANT

SEQ ID NO: 153258 - protein, 187 aa, Heterodera glycines
MPSLNKLTFYESEMVLVNVFCAQLLDCPVKSLRDRINHPEDRVNAMNGLMGKKVRTTYKDRNGMHKTFFVGGITERGAAFVPAYGNLRAPYNVNVAAYFYARHRIKLHFPYVPCVIERFSGRGEDRFYTMELLGIVDDENKGRLFGRMFMEIGEEADDDDNDEDVSTSFDSTLRFDMGRDECSQLWR

SEQ ID NO: 153259 - protein, 761 aa, Heterodera glycines
MPCALAQLVPSYGLDVEDKPFFPHLANRPENYGQHIYPTPDDYLANGMMPEKRRQFDHWFEQHREEPFQLDEALASYCTNDVEILMAALVAFRREFFDVSKRNEYVDGIDDRENHDGIDVLRECMTVAGACMKHFRLNHLPAEHLAIVPEKGYDNTQNQSKLALRFLFWYAEENNVQVQTAYSPDGEKKIANYTVDGWIEAEGCVIEVNGCVWHGCRKCFPSDNMMLPNGKTAGEQRERDAKRLQFLRTQVTRVDVFWECEIQRMLDRSREMRKKFAEYVDGGPLVIRDAFTGGRTGPLKLFHKAGADQKISYFDFTSLYPYINFTTRYPVGHPKVHVLNEDVNWTSPAHNTFPLALIKCWVIPPRKCTIPVLPVKVGERLCFPLCMKCAKDYPTGGVDDEYHCRHNDQQRGWVSTSTSIELNAALEEGYRVTKVFRVLEYEQSDDKLFRPYIAEFMAQKIQASGFDSSIKGDAEKEQQFVRECYEQFGISIDPSKMAVNKGKRSIAKLCLNNLWGRFSLRNFGLSQTLITDDPVAFREHLDNRSVDVTAIDELVLDHILHSYENKKEWVEEHDCSNIVISLWTTSAARLLLLKAMQKVARTPGCVLLYTDTDSLIFVHPKNACPLKTGPHLGQFTDEYPQHEIVEYCSGGAKQYGLKLRRLNAPAAAVLEYVLKVRGMTLNYDVINNQHLRYETFKQQVLDFAATGDYEPIIVTYPNFLRPSIREGGKVTSGPMQKCYRPYVGKGIVKSDFNVLNFGHTL

SEQ ID NO: 153260 - protein, 87 aa, Heterodera glycines
MENQKEAKGTNRRPKGWPFFVKIIRRVAKLMPQPTKSPREKFGIPKFFDPLVQNWPSLWYAQLSEFWPTFSPNGIALVANPIEQRLD

SEQ ID NO: 153261 - protein, 146 aa, Heterodera glycines
TSDLFLSPPFGFPLFPFISLNDSGDFIETNFGPQFKFDPAKVILNFPRQNYWDANVCDENLQIIGNKSLTVHHKGTTSVKQQQTKLDELIHLEKGTYAFYNYGYLCINGGIKGRNAKYSYGVGDTVGIGVNLATRKIIFTKNGLRL

SEQ ID NO: 153262 - protein, 34 aa, Heterodera glycines
MNEKMDKFQLEIGKLNQNIIENKFKVNENRREIQ

SEQ ID NO: 153263 - protein, 89 aa, Heterodera glycines
MADNFGWKVGKVFKRRNGNKQLAERCVGTDGTKGWHALMIEQKKNGLILESSFGKDLSVEIGPKFFVHGSDFLDINITKGTVLQQIKFN

SEQ ID NO: 153264 - protein, 43 aa, Heterodera glycines
KKCQTWEKWRSAGILLQILFIFVVFSFFNSFSAFEFGLHIFFN

SEQ ID NO: 153265 - protein, 46 aa, Heterodera glycines
MNLICFSFFFVVLATNAIGEGLAEDKWKKCELNGNGMIRMGKKAKK

SEQ ID NO: 153266 - protein, 20 aa, Heterodera glycines
IRSAPNFAGILKGRELTYFK

SEQ ID NO: 153267 - protein, 378 aa, Heterodera glycines
PLLIYPCLKSVNSPIIIIIIVIITQMCRALILSGSPDSFARYPKWAQTFENELSFEFKTRMPNALLLYTDDGNVQQNFFTISLLDGHIQVEFRLGEQQFEMPERRPVIQIGFVNAARVDDGKWHRFSFFQAWENVRVQLDEEKAFAWENVRVQLDEEKAFRVLSQRTFALGNIRTNSDVFVGGIPKQFQEIEKLSSPLRRHSQHFAGAIRSLVYRLFPQGVSNPQLMDSMGTRKTDKDYCQPTFTSLASSVYCQNDGYCQNDGRCYSANNGARCDCTDSDYEGRRCETKKPSTEVSFFGNEWLGYDLRKEPSTAAVWSLRQMFNITFRTNYSNALLLLAGDGRHVELFVEKGVILARSQLAGSEKRMIRVQDRALRRV

SEQ ID NO: 153268 - protein, 487 aa, Heterodera glycines
CGLSVMAEKQEAKRKNDQERYRRRTEQSVSPGRSPVPDGSADGNGEASASLRGTTTPSLSALQISTPASSIGSKKRGRPLKAGAKPILATQETVSSIDTPRTAVTQSDQGSPCKKRGKVTECDKPTFANEAIASTPVSTQSRGGRPVKQLGGHAGKGRGKTNESMTKSSEMDQSVENALSPAPSHIVSKKIDFSTVPINFATSRNFACKIWRWAAIGLYERDGETALGPRSGPRFIETCWNRPNEWLNDSFIVAYLAYIASISQRKTVVVDSLASRTDISRFSNVKNYTFGYDPNAVPEVVLMPLHFPNHWTLIVYDVAHGAYFLDSLHMSSLSDERMALIQSIIAEIVPGNASFAVEYVQQLTKQNDGNSCGYFVCLYAESWLMNNRTFVLPDLNINYEKKRILWHINELYGSDNVPYHPREGVPTPCPIVYRHTDEAQSTSKAAELMEVDEHDDIMIIEPQTSGQAVDAILTQAQVAGENQADML

SEQ ID NO: 153269 - protein, 129 aa, Heterodera glycines
MLFQEEAAAKQTKGEKGGKKKGKGGSFQTISMIYRDSLNNLMTPDFVQRYALLAAAEAAKDGKTNPKTASTNMLARLVKQGDLGPDQFKIGHTKVFFRAGVVAHIEDLRDARLSQLVTAFRRCADGIVP

SEQ ID NO: 153270 - protein, 42 aa, Heterodera glycines
MTNDHLHRVPKMNSFIKKVPCVAKKFFPNWMTLTRSFSKRKR

SEQ ID NO: 153271 - protein, 434 aa, Heterodera glycines
MALIQSIIAEIVPGNASFAVEYVQKLTKQNDGNSCGYFVCLYAESWLMNNRTFVLPDLNINYEKKRILWHINELYGSDIVPFHPREGVSTSFAVVSHHNGDVAQTSSKVIMPMEVDDSPVLPSSEDTAVLAQAPVIGENQADTHGVVADTIVQQEPIAQADDVIFIRPKTPPRRSMRVQKRLSASVSRSPSPAPKRPPPANSLGVATPITRRCSAFHKGWQCAAAAAKHFPEYCDSGKLGDKKCADCGAHLFSHEDSTICCRKGRVVLPMLNPHPDELKELIVGNKQSREGKEFVRHMSRYNNLFQFASVSAGNKPSPAGGPMAVILNGEFHRRISSMQAGTTQIPGFGQLYILDPVEAMEQRRNNPRFTGEKITNEDEFVQGHQLNEQTLEILEQMIQVHHPAAQAYKQAREQLTELLQQQTPEELRLCRMTL

SEQ ID NO: 153272 - protein, 56 aa, Heterodera glycines
MRNEGRTTLRMKNLSKRGGRRKTDAFVTCEKLDYFSRIAFPAIYTLFNVVYWTYYM

SEQ ID NO: 153273 - protein, 33 aa, Heterodera glycines
MSDQSAQCYEKKKQISAPKNLLDVEESERKFLT

SEQ ID NO: 153274 - protein, 51 aa, Heterodera glycines
LQICWLKLHMKYISKFFDSVRRFDKDGFRFAISRSTFGNWSRIFSAITCNH

SEQ ID NO: 153275 - protein, 222 aa, Heterodera glycines
PPTVPGQSDERRCTPSARCPSAPFLFRRIPSPFFGGSAAFISHGISNTSTTTSTAPPPFTTATTTTAAGGIDRNVSEAKSRGRGAATAAPITTKPSWANAATNQPTASGTNGHRWKQHNRKPTATGRLALLSVRMSFSFAQQSTPAPLSVSSVSSAALSPHLMVPFSCPSTSSPVDPSTPLQFISHHPQHQGVPPPPPYQMHPMAMSEAPVGPSKFSCSSRL

SEQ ID NO: 153276 - protein, 75 aa, Heterodera glycines
MRCSDRSIWVLSVLLGVLVLGSQTAPIFLLNWVLIREPRPLNITRLGGPVAGVDDQGPLVRLELHLHRGRRNRRI

SEQ ID NO: 153277 - protein, 117 aa, Heterodera glycines
LVDKDEQKARAAVQRELALLRRAVAQLNEGRRIKDIGDLRERMLDAQRPLPWRAMADAREVHEFRSVQQNFYSDRKEELLREMYQLQGKMGMFLLGRDRAFRSYYYMNTAFIILCPR

SEQ ID NO: 153278 - protein, 49 aa, Heterodera glycines
MPFRAITSTKGEVCLFPETMSSRLCKKIGLTFGEKLSMSETSETNRVRH

SEQ ID NO: 153279 - protein, 49 aa, Heterodera glycines
MGVWVRKEKGIAAPIGTAGPCRPLTNVTKSFLENSATKTAIKSKKFKKF

SEQ ID NO: 153280 - protein, 46 aa, Heterodera glycines
FPGGAYRHRLLPLPKKFFGKSAPQKSFLLIFKIWNRILQKKMIFAL

SEQ ID NO: 153281 - protein, 21 aa, Heterodera glycines
MPMCQHFVPTKLAQFGEKVWF

SEQ ID NO: 153282 - protein, 71 aa, Heterodera glycines
MLCDCMIQGVSYVGEFSYFSVDPIERPKKKPNLSGFYKEEIKTAAMRELCNLLHISSMEPMMEKLKKVRAF

SEQ ID NO: 153283 - protein, 136 aa, Heterodera glycines
FLFSVAISFRRRLFRIYAFILPSESDQFGSSHPVLECDLNKTCGAKCCSQPLIFPGLISFESSTFSYFGITQQAPSYIWVTSSPDDESEKDQICATTLMQGRTLLHLIMHDKSIAESEDNNKNFCFSHDECCTYRR

SEQ ID NO: 153284 - protein, 158 aa, Heterodera glycines
SLDNFQIAKSREISENQTEREFTTPQVTNGSTGEEKKRNERRKEADKAPDQRSKKGHDEEANANEVHSTTGAQPPTFTRRHDEEANANEGHSAAGAQTLPFTVSARLPIFTARTFTYEVDVAPAVAERFESAQVVDIYNSLPPPMDPRMKRENANGIS

SEQ ID NO: 153285 - protein, 94 aa, Heterodera glycines
MFSVWGTGPQKRHKKVPPLREGFSDPGRSGERPEIGEAWPRGTSSTSNICWVFFCGYGYPTFADLTFADPTFADPTFAEPDICGLDTCGPDNCG

SEQ ID NO: 153286 - protein, 589 aa, Heterodera glycines
VEVPSVYFQNSRFVGDKDFVMMTIKNKFPRTIILEALKAEKDSAIEWNPEKLWNLEMIGIKDNPIEKDDEVALKMFKESVYRDGRYVVSWPWKSPIDELPTNFGLAYRRMIGIIEKLKKSKEFLKQYDEIFKEQLKEDIVEETEKRSQTLLTLPHHCVVEEKKTRVVYDASAKIKGKKSLNDMLFRGPIYMPELPGLLMRSRLPRIALWGDIQRAFWTLELQENDRNYAKFLWEPISKDNLCVFRFKRVPFGVISSPFLLGATVRHHLENEPSDLAKEVKNNTFVDNVFVGCNNFEEAIEKYKNLKELFKKARMNIREFISNSEKVNKEIPKNDRLIKNPKVLGVNWEINTDKYIIKFPKIIDNENLSRRKVLKELNSVFDPCGWLAPCLLPAKLFFQSLWEEDRKWDDQISEEKQSEWKLITKSLKNMVIKCNRRIVPEKEKADLHVFVDASKDAYAACVYLKSNHIQTKLICSRSRLKPRKVQITIPRMELLGVLLGTRAIKYVEKELKIEIKEKILWCDSKPVLFWIKSKDDQPRFVENRLREIRELNPQMSDSVPTEENPADVGSRGCTPEELLSHPLWWEGPIF

SEQ ID NO: 153287 - protein, 127 aa, Heterodera glycines
MCHRRATIRKLDRPVQEGRTGNGHHLFFLRASSRVLYAFLSATTPSGSYNIYFYLEEQTIEPFELVNEQTGEKLALQQVAHQTYNWLLKRRPEIFVGEAVPVQWEYEIVNRLNTVQIQLPNDEECLG

SEQ ID NO: 153288 - protein, 30 aa, Heterodera glycines; identical to SEQ ID NO: 126607

SEQ ID NO: 153289 - protein, 106 aa, Heterodera glycines
MLMAMEKVHLVITTDGKEFVTRRHLVTECANECLASGGRIALTELAAQLSVDLDHIQTAVNQLLAMNRHYRMTEDENTVEDISTPAEFVVCAGELIHRSFFEHNFL

SEQ ID NO: 153290 - protein, 214 aa, Heterodera glycines
MTTTTTTTTTTTSSTPTTPKGTTTENWSESLAAAVGGKTTLVLIIVGALIAIIVLLVVVVCCCCCKKRKRRRRHTSADDDNDKEDNKKRKRRHHTSADDKKEEDHYHIDQHNKKEGEQHGKEDNKSPIQSELKVSTISAVPSDYNTNKRLGATELDVEAEEVPKTKPVPKKSKSEGGTKRKLSNFFWSTGTTEKRPSAAEHGVEVPETIRDDED

SEQ ID NO: 153291 - protein, 142 aa, Heterodera glycines
MARHIWPLLRNGLRTLVSLKRKQLALMRKHVSPTVLFDCPNLVEIITPILPERPTVDNTKYAADTSARDLYMWLHMPRPDGRPLVFKLTKWSKGWDQFVNDLCSTVAWLRRTEKDFQTADQQQQQQQQQMSPKHNGQSDGII

SEQ ID NO: 153292 - protein, 323 aa, Heterodera glycines
MARAARSNVTRSTDGVSPSSGQQPKHLLNDDERLIHYQQEFKRFKKLLEDEQERPAPVRLTQLPTDEASKGLLRDALSEAARTIQQQQQPQPKQPAPHQQQQQSSHSDSSTMRQPPRRRQRPAKRSPRTTSVSTDGAEASRFPSSSSAASLLTRTDNGGRGGAETTEREDSSNDDRPQNMAAVGPARKGQREEADVQLHPSTSTAAAAVLRDTEQRKRQAIDYALRNAGTLGIGDGQQVYRLMQGAYRPIKNSDLDALLTFHFAEPKPEKAPPGYKTFIGNARKDPRMVRMLFGNSGAESGKKKKKMGGGGCLLHRCYTFACI

SEQ ID NO: 153293 - protein, 161 aa, Heterodera glycines
MSKLGSDGNDEHGGVNLGGGDGGDDGQALPTEDDGLGGAHLPPLLFIDEEEEEESPESRAGDDVNRVGNGQIYTEKVKQEGEEESDDGNADMDSVSHDTYRSSSSSSTMSSSLFLLHDCHMRHHYHHDNNNCNSPPRKQAATELLKLPLIDYLCGLNNGCS

SEQ ID NO: 153294 - protein, 139 aa, Heterodera glycines
MRPNDVNFSNAQKVWKRLYGHPALQKRTPRFRNDQFVRMSREKGQFEKGYLPNYGDEILEIDEVLKAVRPILYKLRDEHGEKFKGSFYDQELARVRKDAETSYRIEKVYRKRKLSYGSTEMLVKFIGYPNREWINESQL

SEQ ID NO: 153295 - protein, 84 aa, Heterodera glycines
MEEANEKKHVPEEYKHLLKFTYPDSVKKPEEYLGGGFVAMEMDAKNKKAKVNFYAAGHIHPTEQKFVEKEKFVEGSKFKYNVEL

SEQ ID NO: 153296 - protein, 86 aa, Heterodera glycines
MAQNRKICHFFVARGRTFPAPYYTVHYNFGINLEKSVRFVMVDTVILCGRNRKMFKDEKTFTEEIKEKSEKHFEWLENELKLANEK

SEQ ID NO: 153297 - protein, 70 aa, Heterodera glycines
MRELQTRINATIVEVQKERFGSDAGGLILDYHCAEMFPKRCASYDESVVHELENSTAEQLEANVRTITNL

SEQ ID NO: 153298 - protein, 103 aa, Heterodera glycines
RKNFKSTGRNIFLGDDVFLNYNCCVLDVCRVDIGDKSMVGPYAADHPRDRAVRDQGWEYGRPVRIGRGVWVGGGAVILPGVTVGDGAIIGWCVNKLAKKAMTD

SEQ ID NO: 153299 - protein, 34 aa, Heterodera glycines
EIGKQIHVGSAHRMALSAWPNDYWRRWTNLDLIS

SEQ ID NO: 153300 - protein, 82 aa, Heterodera glycines
RYRGDCLNQAICKCSCEADPSKPAKNVCTKSNCDCLRIKESCSKLCACKQICKLCACKQICKNKEPPKRAAKVNKPAQGCAF

SEQ ID NO: 153301 - protein, 218 aa, Heterodera glycines
CKCGGDCANGASKFHVPKHVQNCFLEHKHESSGLIVTLIGDGYIYRGDFFHDSKNEPHVEEQLVAAIYDLISKYKVDLYEIVIFVSKSPCFHQDCEPKCEVVDECKCNKACAKLLGLLLSKVRKELSKVDVRMTVKFLYPHLNRGDLYTKQGILSMLQSGIKVEPLLLKDWSAVMDWAPHPEHKGEYLQVVYNYHLFLYLLLHSFIIIQIGVFKNSIK

SEQ ID NO: 153302 - protein, 182 aa, Heterodera glycines
MSEKARQISKDLDEMDLDELRRQQFAIRSFTESVDDEETEWPLPPTNLMMRRGEEVQLGRDGREEEEEEEEEEEKEENAWRRRRRPSPAHSDECGTMRESSTADTIVEVVGEHRQAQNSRTRSYSAQSQLGQHLKMGPPNGPVNGRNAKICDESAGPRVGGPRIRTAQKFNGQFGGGRNWGG

SEQ ID NO: 153303 - protein, 260 aa, Heterodera glycines
MTSEGGAIVELYAGAERMESGDQVWRELKKKAPKTAELLEDAWAQIKKRWAKFNGMLNDEAKQYMEKVKYSGWHWFVRQVVGPFVRLPNDAKTNLTLSLFDAYPLMNTVMSKLMANRTFLDWAGEWYKNAEQQIQTMEKEKNATKEELNEDGIMAQMKEMFKQMNLGNLNDLMGGMGEEEEEEMREGEEQLEEEEEEEKEEEDEKAAEKEGEGEEEKEEGEGQCSKSNESNEEGGQCMAKEGEENAEKSETKMKEDRDEL

SEQ ID NO: 153304 - protein, 152 aa, Heterodera glycines
INGYASNKLSVRFVFASLGRRTNGPTTWRTNQCQPLYFTYLCINEYLTQINVLFPRFTFSMYCFASSFSIPLNFAHRFLICAHASSSSSAVLGAFFFSSRQTWSPLSMRSAPAYNSTMAPPSLVIALISLSNKSLGNRAGKDVSPKPVKTFV

SEQ ID NO: 153305 - protein, 155 aa, Heterodera glycines
MEFVPFLLFIFLFLLAIPPIRCDEIPLDGPDPEVDEHIRKQFQSHADAFSAGIKDGWAEEIQKQMALLPKDLLLKLIKAMTSEGGAIAELYAGAERMESGDQVWRELKKKAPKTAELLEDAWAQIKKRWAKFNGMLNDEAKQYMEKVKRGNRTFI

SEQ ID NO: 153306 - protein, 170 aa, Heterodera glycines
QRIRVEQTQRQIRFRVVGKAYKWAHNLANKPMPTAVFHLFIYLTQINVLFPRFTFSMYCFASSFSIPLNFAHRFLICAHASSSSSAVLGAFFFSSRQTWSPLSMRSAPAYNSAMAPPSLVIALISLSNKSLGNRAGKNCFAKTRKDNSFNTSKMFREPISDKLCHIFGLN

SEQ ID NO: 153307 - protein, 222 aa, Heterodera glycines
FIWAGCSDNIRFGNQFTRKFIDTFTRKFIDTAEKKRSDARSSLMNLHNNRVGRRLLATNMRKKCKCHGVSGSCVTKTCWKTVPTMEEFSCVTKTCWKTVPTMEEFAALLKQKYTNAKQVNKEKGLGMMKLPWGGCSLYAENGQKTISGKRQRMAIYHYSFLALLCRFSFDSFSQIECQQLCCGRGWETRHEIRQEPCRCKFVWCCDVKCDICRREVERRFCR

SEQ ID NO: 153308 - protein, 42 aa, Heterodera glycines
MAAQLASALSSPDYYNCQMQPGLTRRQRDICVRHPSAMRSIS

SEQ ID NO: 153309 - protein, 106 aa, Heterodera glycines
MSFRDISPISSPLSNWSPLPLTFMFSVWAICCSLSVTSQLFDTGTFRYMPKHSFGSLYDGGRPHLPRSASTFFASHFDDRTANGLMDAMPDYLRTTGGATAPHLSG

SEQ ID NO: 153310 - protein, 37 aa, Heterodera glycines
MPNASDLRILGNLNEVLTLMNGYTLASLRISSICDLI

SEQ ID NO: 153311 - protein, 46 aa, Heterodera glycines
MQRAMSNLAVAVATAAEPSLKARHLEAVRMFFDRIADESGCQPEQK

SEQ ID NO: 153312 - protein, 98 aa, Heterodera glycines
DPISEVQLAALRVLMALTRHQWAYAHFCAITDFVNLLVDRSVNFDADAMQLKYALICRLVEAAPSALNDGQMEMLRDYCTKGPFWGAPVVEVATEEAA

SEQ ID NO: 153313 - protein, 74 aa, Heterodera glycines
MRPPKRAPLKKKDSTYEFDPELCTARSDEELVETVRRLERQPKFGRSVFSSVAPDPGQKNKALQAQWREFNKVG

SEQ ID NO: 153314 - protein, 174 aa, Heterodera glycines
QKLFFSFGILKLLITGASESITDEAAMSKEPGFLYYTAGVHPHDAKDFDDGRTLDFLVHPHDAKDFDDGRTLDFLRSHLTTNSQCVAVGECGLDFNRNFSPRDQQLRVFEAQVQLACELGKPLFVHEREAHQEMVAILSRHSKSLPPTVIHCFTGTEMEAKQYMDMGLYIGLTG

SEQ ID NO: 153315 - protein, 105 aa, Heterodera glycines
MPKIIKVTKDFPVCQRKEFRTEPENSLDEIDYHQQNLTSFAPLRIAIKISDLYEANYRPTCPNGGQALQMQTRGVPMTLIGKKCADNFCPTGTKCVEKEVYAHCC

SEQ ID NO: 153316 - protein, 47 aa, Heterodera glycines
WTSPVVRGCACRQRISRVTQSFAPGLATHRLPRHVRPAIGAQCWRTW

SEQ ID NO: 153317 - protein, 63 aa, Heterodera glycines
MKKYILFLKRALLKERISGAKDGMGKYGMKAFSDDGALVGFEMLELENMKFCDSEIQSFYRYL

SEQ ID NO: 153318 - protein, 92 aa, Heterodera glycines
MLRFRPKEFDHRHSSSRSVGLSTRPQHFGHPRKELIKQQNVREYHIDQLLLDQQHAVADHQPQQQPLAVMEQGESSAIKEIVAVGEDGAGKK

SEQ ID NO: 153319 - protein, 201 aa, Heterodera glycines
APSSPTATISLIAAITANGCCCGWSATACCSSQLINVIFSHILLFDQFLSDAQNVADALKGQLIGCSNGGDRTLLAEIEASLATHSADEECALSLGFVRAMFAIAASASSHASNNSEWQTLSGQFGQKVTEIDSKCAEFGISIGQVPINGPKGVHVQNVPNSESVISMPGLAGSPKGVHVQNVPNSESVISMPGLAGSHTQ

SEQ ID NO: 153320 - protein, 159 aa, Heterodera glycines
MVTQIFHIRSQHLEQLDGVKEGDQKEQELSEFMRSICNFLSTVFRSLNIIVIRLCEFTNPNVDILTVLHPIHEYYSRFYVADGQTNQISDTVKDTSKLLCIFLQRLVINQKYAGCAYTILIAAFLNGFCFLLDAQLSVSVSRKFPIGCRGLVQLHGHPS

SEQ ID NO: 153321 - protein, 294 aa, Heterodera glycines
MNIFKAMFLLTEQLSIVPEKGYERCDRASVMAIKYLEWRSKRDGIEIRHAGNGREVKIGNYKLDGFITNVGGRDKCIEVMGCYIHGCMNCYDPAAELIGGRSAQELNDETQERLTELRKTLDVEEVWGCQIEKELKKDEEMRDFFDDRGNEKGPIDPRMAYAGGRTGPMKLYAKSDEKKKISVYDIVSLYPSVNYGTAYPIGLPQIIIPKSDEIDVNWTRPEDLKYKGLYKVRVNPPKGLRIPVLQLKCDERLLFPLCWRCASKFKKETTRCNYKCPHDEAQRRHVATYTSVEL

SEQ ID NO: 153322 - protein, 452 aa, Heterodera glycines
MNNIMRQRDAAIELLHNCGIDINEYSYGVEQLPNVQKYWDEIYPGKYRVVAFEKSADPRKSICVLWKAPMGREKVVPIFLENGHWDGLKNYVCFFNRGRKFCIDCECFFDKDVKHTFECRARCYYCNRVGGMPCEKESGVKIECPKCHRYFYNWECYNYHQGHQTCKLWKRCVICDKTYLFNTKKGHECGETYCQLCSVSHDPKRGCYIMPIEEKEEKDVYRIVVWDSETSQDSIYKGDQKEHVINYISVRVTCTECCDDKNRTNCKICGEERIKDWSEVEEGHEPTKDFVEWILTAFTNYDTYIFAHNAGRFDGHFVFNYLCRTGKNPLPLINGLKIYEFKVQNSKKHSKLIWRDSCLLMPVKLESLKATFNLDCEDKPFFPYYYNKKENYGIRLEHLPPMEDYSPGSMNKDKFIKFEKWYNENKETPFYLDDELKKLLPKRHGDFIAVNY

SEQ ID NO: 153323 - protein, 249 aa, Heterodera glycines
MGENRSSSISSINSNLIDPINSNLSDLSDYDDQPMLIPNEWAINMLMDNSPFVNPSQSLKQNQFSSNNENFPSSSSSLSLPSSSEAPNILYENANENKNELGFLNANWPVVQQKTADKNNDYEIQKEKRQKLEELQMGNGALDEQQIEAQRGLKLLLHNIWYIIMLSFAILQIQLAPIETTMLQVQQGAKFNFYYLNLALEKMNADKILENIGTELVQDKMIQNNKLFMDIIGEINVHAKKVFGQQLYE

SEQ ID NO: 153324 - protein, 163 aa, Heterodera glycines
MSKQSLADLLNETTKNDLACLLLSHKESLNLEQIVKNISISKNDFGASVFFHNILIHIHQKHINQYKEPIYKIITFAHLYRLIFEYFDGIFNKINGPIIQQYIGLDYKIMKEFFEKSTKQLNGLIARGKSDKPFLFALKESEEAFISDYLLENCTHLIDEQNN

SEQ ID NO: 153325 - protein, 110 aa, Heterodera glycines
MFSQIFVFILFLAMCKCQNVRVNNGNARVAQSQQMLGGNGQKFFVIQRDTNALDGSASQVQSSGMGGNLAQNMMQPQQQQFSQNFATPPQAQQTQQAVRTILCLIASSIV

SEQ ID NO: 153326 - protein, 84 aa, Heterodera glycines
MTTINHNQTVFDATYTDVAKRISDGGADGNTNHEHSDEAYRKAAPGPFTFQVHLWRNGNITFVYKQVLPGPTDLCIVNAAIFRF

SEQ ID NO: 153327 - protein, 36 aa, Heterodera glycines
MPIPTAHRTYLILRKLITLLQDGPQAKVAIYMQYIC

SEQ ID NO: 153328 - protein, 94 aa, Heterodera glycines
MAVRKIKNDNARNRNVYTMAVRKIKNDNARNRNVYTMAVRKIKNDNARKRNVHTMAVSKSKNDNAGQCIVYTMAVRKIKRQHWAAYRPTPIPLW

SEQ ID NO: 153329 - protein, 548 aa, Heterodera glycines
MESRVKLPPMMVQPSRCALIEEIFPAELLNNPLASWQQLSERAILCPLNRDTLQLNETIMDRLTTVERVYHAVTLPVVDKTGEADLENIAADANHENLCRMTPPGVPEHILRVRVGAVMMVTRNISLEEGLCNGTRVQVMELFDNIIRCRILTGTHVGNEHDLHAARFVFGGDPKAPHEGPIKCERIQYPLRPGSVMTINKSQGQTLARVGVLLDTSQCFAHGQLYVALSRVRDSDNIRVCTTRSDLRVKNVVIRELLDEEEEEMALAALPDDPSDPFPRHPPADSEPDDDKPIGMPNEAVFKTPTPSTRAQHPKTTPIELDNTVSKQHLDKLTVVKGDITKQQIWMIVNAANSDLVKGGGVDDAIHRACSPRQKELKQLLNIKILSNGGPIADGGVVDTPAFGDLANNVQYILHAVGPKVSAALNEHHRRSLAKCYTNALDHLASMHMDIANPQPRSIAFPSISTGAFNFPRVDAAHIAIRAILNWLADQPADAPAIDEVRLVAFSDDDFKLYKEIRERVKRQMNAGKRPTPKTSLQTPLRIPMVCI

SEQ ID NO: 153330 - protein, 482 aa, Heterodera glycines
MLWDCSFKVDELDVHGPSGHRIAVEQGFKDEEENLNAICEAAQAEEERRQRGEERVTQLTAYFAYNEANPPIGLSYANCYKKLRYDRAKKQWKLNVDAPVPKFCRLKTVSPSNRELLAIRLLLLVVLDPKGWESLRTVNGNVFPTFVEAAGARGLLTDEDLWMKTIDDAFRMKKSIRQRIRWLAVFFATANLASPCTILDKVLVTADKWLVHTSVERASAEEQKQYVLNAMEWFLLANGITPDSEPREDGTYESACEHIGLPRPQGLVLSKDIFMKLAFFRDDALNEHLHVDFLPDGQRRGAMRQDYLQKYISGPKPNEEQQQLIDAVQTALEHVQQVIDGQCPDFSPDIQRLFMVTGEGGAGKTFTYNKIIARAKSAGINFLPMASTGIAAELLYEGQTVHKRLCRLKQVDSSTSPNVDNESNFANMLRNIHGILIDEISMQHRDVLEFVDRLLRSVATQQFKDLSFAGKVAKFDHCFFNV

SEQ ID NO: 153331 - protein, 286 aa, Heterodera glycines
MFFASDRYRIQSDSCDFLYAILSCLVKRVHQLAADVQLRCPIPCICFWAKLPNLSKAREKFRSFSLAFKAENQFEQLEKEACRVSVQMRHVETVFLSATKCGDGEQQNNQLTNIGTLLNYTHRELANSLDKIANVQQMLSKGGRHSLRSLLNLMNALFKINEINLPFDGSILDGTDQKLSERIVQLLSPADVQLVADLNSAEIGRLLAELLEKGDDSGGGGGGGNLGGIAEEDEDEAAEEEENEGNAKREEERERRELQEAIAKSEQSLGLAELRSGSLPVKHHLY

SEQ ID NO: 153332 - protein, 340 aa, Heterodera glycines
MNDGGSNADANNNGNSNNNRNSFGTESSFSAGSSSTIAAVSVVGDQGLHYSVTGVLNQQSNNNVEKIGGIGTGTNRPQRRLSLVGNGGIAVKLPDYQRLPISSFGCTTDGHGREGRIYATAGFVGGTNNEGTLKKGSSKAAFLPSSYSSSNAVGGGNLIVGPAFNNGGPSIFGLRNGNGISTAASHICLNGIGISGGSSSSASVVADGKSTLSRRAQRLAQKAAHKLTIGSLSSELSSSASALYSLFTSSPAENGAGFAAMNGGKTVPSSGTFAGAANGVGGIYAETYLGHEQFYHDKAPFVSAHTSRGIDFLERFGQFAKERALIEEEYASKLKQESED

SEQ ID NO: 153333 - protein, 279 aa, Heterodera glycines
MRTIVYFKLLQIVLGLAFVWQLLSFHQFCGTFVCPKAFLHDISVGHCKRFTLIGKDSKTGEFGAVLDERKWHNQLFMSSTNGLPIKEQQQQFMDELAAKLPCPGRHCIPITTPSFFFWTEKNRNLLDNVVDFFSGQLLLALCSLLTIGIGFARMLRPAAEYECFDYCMALYSVFCWCCSAWASSCLLLYWTSYWSCMNFRADDTNVPLVTFVFDIVMVCSFVFEMFFNNSLVKKRPENASFAAANRKLRNDVATECANVAIHRQQQQQQKNGSAIIMQT

SEQ ID NO: 153334 - protein, 643 aa, Heterodera glycines
MPMPVFHPQPQFYRGQMVPQSPIQNYAPFLNNQMPAMLPHQQNIQHAQMAINAARQQVNQQPFQNAQQQAVLHQAGLSGLEYAMILDRLPDIKGNEGSDLIRNFFKKYSQYTIDWPNKKRIESLEAKLSGRAERAYNAALASEPFAYENIKRSILQQLEETDCREMSAFNDLMNGVLRKSGENLDDLADRISSLVRRAYPGLTRNLADEYSIKHLIRSLNNPELALSLELHRRNGMSFDEFVALASRAETTQKAAKIQNGERSKPYYERNFQHTHQGERNSEMISKNFSPRPICYNCNEPGHISRNCNKAGAQSNRNAPAFFPRNQQQQQLHNSPATGANRIVQHSKNGVTPAVRSQNFLKQNCIRMEEEVKTDATDATVAGVKLEKEVIEYLRDELEKSETFCSGFEPNAMIGKMVTVELGVMGTQTRGMLDGGAQISLMGGKFFYDLITSGKLDLHKTGFKGVSARISDVNGKELECLGTTSLPVDRKGCRTTNVCFHITSAPFGFDLLIGTNALRSLGFCLYDIPNKEMINFEEVNHQKKNQISVIYQMTLKPHTMQFVTLSAGNEWNGKDVLITAANEKTFHKLEPIVGTVQDGKIMVSILNTSDKFVQIFENEIIAELTPALLMWETENSLASVIVSE

SEQ ID NO: 153335 - protein, 55 aa, Heterodera glycines
MAETTSPSLAANIAEKQHHKSGGGGAGSSSSAAAHKCRLMVYHEVLNSADFNFIF

SEQ ID NO: 153336 - protein, 158 aa, Heterodera glycines
DELMRESAENCLTNAYTNVTVNRGAPYEIYVWIDHAGSVLTWDFDITKGECEFVIYRTEKKIAVPLHSHQQQKHSSASFSATAAPPPNAATSSNAATAGGAGAAVSGGGSATVSSSMAATVMGPVERVAIIGEPTFRVGVELFLAQQPLSFGEGDSMQ

SEQ ID NO: 153337 - protein, 37 aa, Heterodera glycines
MNKKYFYSVWESNRGKNQIKSLQNIFKKKNIVATGND

SEQ ID NO: 153338 - protein, 125 aa, Heterodera glycines
MNLILLVLLLLHSKIDQTHSADHDNNFECRNVPTDQMKPFQYKSDRWEEKMEIKISGTKLHQGKELYIGFSTAENDNLPKNQCVVIKIYGDELNEKALYDNSIKFFHLLKENDPENEHIINLIDQ

SEQ ID NO: 153339 - protein, 84 aa, Heterodera glycines
MGKGWKMPRNWGRVENFGKVPWFEAFRFDFITGDENPTSISTVGERKYHLLDSVKRDTLSQKGSGTLTSPKTRCWTCEKMWENQ

SEQ ID NO: 153340 - protein, 24 aa, Heterodera glycines
LTHRPLRRKNQLNCTWSPKLTRRV

SEQ ID NO: 153341 - protein, 95 aa, Heterodera glycines
MGVSGSSLSAYVQVAVHRFTTDAAFAQAVKMITSLAFVPLEDITPALAALEDHLLDELEGVLDWFVINYVGRLRNNGTRTRHCFGPKNGACMSAQ

SEQ ID NO: 153342 - protein, 212 aa, Heterodera glycines
MFSSENAKRGAFAKKSLNGNELESEANEGDAEDIGKSLEEQSHQLALPRLFKALLSFEFANYSRLNESEVDPLLLSWDVLMRFFGDLDVLSRVRILSKVREIECTYRLEETTMTLTILLPENYPIKAPKVETGRSIVNRELHRKWLLQLGVFLNGQNGVMMDGILQWKRSIDQHLQGVEECTICMSTVSSTNYQLPKIRCRQCRKKFHGDCL

SEQ ID NO: 153343 - protein, 92 aa, Heterodera glycines
MALFGTKNNAIGGEQRRITAGIIAIGDELLKGTTRDTNSQFLCKQLFEKGVWVKKVSILGDSITEVAKEVRNFCVEFDIVLAAFLCFSWNFD

SEQ ID NO: 153344 - protein, 146 aa, Heterodera glycines
MDFFLLLSAMAALFLFFLYSMNALLCVRRLRKCHGKEKHNFFIASNRSSNESPLSDHLCQNVPSSLGERKNQLKNKNRSQWPNEWEEEKWRQIPIMKRDSGKRRERGGESVRRETRRVRAEKKGNTEFEMDLAIWRRTGKEQRQFF

SEQ ID NO: 153345 - protein, 33 aa, Heterodera glycines
MIWLVLMKLMALGFPRNLCIEAYIVSDRNEVGN

SEQ ID NO: 153346 - protein, 86 aa, Heterodera glycines
MKFYAYGRVRIDATAHSTGKPGGMNFNMATATPANFGIRNENNDAEQNIEALFRTQNVQEETPLAGPAFCPTTPYLFAMAGGNSEK

SEQ ID NO: 153347 - protein, 331 aa, Heterodera glycines
MEQGGFEAFQFIKVEFVAEEKARLFQVVSQLNSERRSIVHRAIASHFAVDEQYGAKLVKDGATDHQQFCEKINAMIGNLVDPTDAAKVAVAGDFLHQQVQCAYGSLADMNQISNLKAHISELRAQNLTQQAQIGAQQVQIDGLHAQVGNQQNRLQAQVVAQQNLIGGQHNQIGAQQNLIGGQHKQIGGLHVQVAAQQNMIGGLHAQVADQQNRIGGLHAQVADQQNLIGGQHNQIGDLQARNTALLAQVSDHLSLFDTPAQNSSLRKRKLVSDVEKLPSQTSSGPSKLAIGVSETTVGPSTSIVGASETTVEPSKSADDLSQTGESLPSKD

SEQ ID NO: 153348 - protein, 218 aa, Heterodera glycines
KLGLSGTDPFAKLEKITEYRSTLLYSSFGKLNISVFITVTDLNDNAPQFSARRFAVQIAEELPEGTPIRLDFRATDADQPGSNSRIRYRIVRSSPALLLHIPDPLRPELFVAGRIDFEKMPNFTVFIEAEDQGTPKLRTFARLDVTVIDVDDLNPTFEAQMYKSSEHRGFSLAIEPSPIRAWDADRSFDEPIIYSLSGEIFLDGKRQEGGNGRSIPNW

SEQ ID NO: 153349 - protein, 40 aa, Heterodera glycines
MSAQFGNECDYLTPAANTKRRRTRNREKDSTLALTTLTNK

SEQ ID NO: 153350 - protein, 50 aa, Heterodera glycines
MSADQRRYELIDLHKLCKEEIPWRTFTALAKTDKNCNAFVAALQELVKEA

SEQ ID NO: 153351 - protein, 120 aa, Heterodera glycines
MRFLTVDELNRKCPREGLAMAPFAKNGNGSTTEEQRRWLNQPFDETCIRSFFLGLSAQLRRYEPWEEWFYTVMYTLISALALLGNGMVILAVIRKRGMRTARNVLIVNLALSNLMLALTT

SEQ ID NO: 153352 - protein, 327 aa, Heterodera glycines
PSSPPPSFLQVMAIDRYYSVRSLNINSPSGRSGQCLRAVLISLLIWLFSFLFSFLLSFPLLVYYRVHVLYVIKEIAWAKETNADLIVLRSYGWRQCRLNSSSLIAVDDRMVQLGMAAMQGAMLYAVPLVVLSIFNVILCLEFLKNPYNEDETDAIPEDEHQTAETQYGKRRGQRNSTADLMLPRQVSIVTVGTSTRAAEKRRNRTTVLLIAMAGSYAVLWLPVLLIAMAGSYAVLWLPFTFVSILIDLDWLGVESGSPIVERESGSPIVERIDQTCKLLSITSICVNPFLYGFLSITSICVNPFLYGFLNTNFRHEFNEIFLYCFAC

SEQ ID NO: 153353 - protein, 467 aa, Heterodera glycines
RSNEIKWDDCESIGTFEDRRNGQRMAPRRGEKPRQEICGPLKWLCFAVNFFIFLASVACLALGVYLFLTDPRPIDEFVDVLLNPAVLLTSAGLFSGTVALFGLFGALRDNVCLLKLFALFVFFALFVFLSYLVLVVFTCFLFLLFYSDASEGISAQFLLRYSIRRYHINRNIADFVDYMQEQLECCGSTSLECCGSTSFRDWNISEQFKCNSSNPYPERCGVPFSCCRRSVAGGANGGQNPLVPAIRSLQCWQNAQKKREQQLDSDIYVADIYVAGCLQPLRTLFDDHAFHIGFAVVSVVLPVCMAVFLSQCLARQIDYQRFLLRREERRIARAERRERRFREQQQNQSTGQLEKRRRNNQQKEKRKSRTKSSSPLRTAAKVAKRLSVNLENGTARRERARGITGGGEGRRRERARGITGGGEGRRRGAREKRRRPIRGTASPRKNVPRGTREETKAQRKTPPRNRR

SEQ ID NO: 153354 - protein, 150 aa, Heterodera glycines
MGKAMANDQNGKGKQCANKRPPFGIRIGGIAFELLADVPISEGCAATTLKLNKCQKNDASDEIQLPFHLFLHIIHEIRDVSIDKTNVVPEGAEKAEKGDGAREETGGSEQHSRVEQNVDKLIDGTRVGQKEINAKRKASDGSELARTWGL

SEQ ID NO: 153355 - protein, 30 aa, Heterodera glycines
LISLHVFKLKQLINSVSQYGFCPNNLKNKP

SEQ ID NO: 153356 - protein, 32 aa, Heterodera glycines
MAKQCDERVNTLTNAANFWGASIKKQNVSTYL

SEQ ID NO: 153357 - protein, 119 aa, Heterodera glycines
LRVPIIAMCNLQQKLSKIETLRLARNYIKALNQMAEKGAQMMSKVDYARILCEELSATTANQIATCLGVPPILLRAMPTQRQQQHQQEFDGTAQSQTANCTPTNFKTQSRKGCFSGTIV

SEQ ID NO: 153358 - protein, 35 aa, Heterodera glycines; identical to SEQ ID NO: 149064

SEQ ID NO: 153359 - protein, 411 aa, Heterodera glycines
MPRVGDRVMVEANYNPSMPFKWNARSIEKIQNVEYRQETTQQYQPHQNRQVQQPQNGTSSRWNDRPPRDEFPREPRRQPPMSIHRTPPRDAGQKRPLSRQRSPLPRKSPPRRQESTVSKREREVRDETETREKDRESTRARSPQSGKRDTASPPRRRQRIIPRYHCNVSKQTIPQYTLFFLFFSCNCQLSGELKYAELRKRYSSLYIPSDFIRCKFSWVDSVKLETPLQFSPHPIKFHVLHKDVDVLLDEGKQLPLENPPDADSRFVVKGIVERASLCASAACGHLRWMLSDEQYQQTVQKLQDQLASKLSAIDAQDFVSPRRENEKGLNLDSGDGEAAAAETGEKINQEERSGSGGIDQSPKQPAVGDQHQPEITNTISAAEVLSSKRFIKVVSSTSMCSGVAGGVEFLS

SEQ ID NO: 153360 - protein, 85 aa, Heterodera glycines
MQLLYLSSFYSAVISRDLVQTSLLQTVHQGTANGHCGRHQWHLQTTVVQFVCRHSGRNRQSEQGQSKKGAICRVIRFSKFIEKYI

SEQ ID NO: 153361 - protein, 55 aa, Heterodera glycines
MCETLRTINGGVPICKSNFQELDVACQSILRERRIQLADLACGAVVSNCQSKLAG

SEQ ID NO: 153362 - protein, 80 aa, Heterodera glycines
MYVPIGPWERRFLKKIGKGCTVHKKYIVIFYCLVVSRAMLLPCADQHKRPAASMNATIFVPAADHWVDLKCFFFYFKSGT

SEQ ID NO: 153363 - protein, 212 aa, Heterodera glycines
MASSISSVDIDSQSEMASNSRKTVDDVQSFEEFPVYSSKANYDRELSEAVAEHGRCALEANNALLQAQTTITELEQKVQEIRDRTLCSETSVHELTKDIRQLDVAKKNLTESIATLHHLQLLLNGVNLLTQWVTERRYNEITTELPAVLNVLLLFEDYQHIEHVKQLTDKSVLGGKLQDDFINWFINQQLAIYTVLYADSEDVAWLDRIEER

SEQ ID NO: 153364 - protein, 199 aa, Heterodera glycines
MLKNRTQERDDLRDDIANFTAEKAKLERGVAKLEEDIGKLKRDRTKTDEDIIRLKRERTKADEEIGKLKKEQTKWEEEHARLKDQHAKLGEEKADLETAKNLSKNHLYNILTFVECFFFVQLADQQQQIEQLKEDKNQWTHDLTQYFDANSQQNEASMADEQGKMEAKELDEQNQYFYDQQVRYVFKRRGKKLKFEQFP

SEQ ID NO: 153365 - protein, 391 aa, Heterodera glycines
MEVPKGGNKALRRANLDSAQSIDGNIGNKRRRTRNEGNQQQNPQPPEFPPVILAAHHSQPQHQLLNQGHSTGAFPFVDPQQQQQLTPQPLGTPARVSVTYTKPFPMLEQQQPQRTQNLQQGDEAAIIERVRQRQLAELAAMEAARPIPDDLQYCAPYNAYGLTSIGWLLMGWREQMVIRSEKGAFTGERKLRQIGHPKIMSNLGCPVFGVNFARLYFALSSSSLIGVVTQSGPMGGDKAKFKGRKLILQFDKDASQLLTVKEWERDDGRPSELARAQARDRVHLQRLNVVQQKGAIATTNENTFIFTLTFGQFSTMTIISHAGNDGTGSANVQQQQSQQHQQGTSAALHAQVGQNEEEEDDEDLLLCIENGQELSGGDRHQPHQRTSTPVS

SEQ ID NO: 153366 - protein, 79 aa, Heterodera glycines
MMNELECRIGLSIMVKAQKQLNWKHKRVTCDPKSGKKPLAEDHGKRIIMEKTTGTKAAHLWSFLKEMSAGEKATPFKVK

SEQ ID NO: 153367 - protein, 386 aa, Heterodera glycines
MSFTFPGGARRPVIDINSENLMFVWNLPRWIDIGEIKRSLQPKYGRIKFVETFEAWREGRRMGQIILDFGTYSSLSAFTKALSNKEEFNYEGVEFMCFDSKIGQKPFFNFVRQQTGVDLLACEGVPPTFEYKRKGSSFEREQQNPNTISLRPRVRDRDSPRGTERSRYNRDDDDGNNGRPNGAAQAVPSLRGVGRGFGQIGSRFGNRELPPPSDESKRTAAFEKIGSRFGNRELPPPSDESKRTAAFEKIGSRFGNRELPPPSDESKRTAAFEKIGSRFGNRELPPPSDESKRTAADENESEQRNGRGDENRRVHSIVEQGNDKVEDEQTHRTDSPLGDFGSNPPSRNFARRISRPKPSFLGEKRSEGFFAAGKISGTRKRRAIRN

SEQ ID NO: 153368 - protein, 155 aa, Heterodera glycines
PNEENDDEIGQENDDEVGQEQQQGKEEGEERDDGKGTPSADDDGEGANKSDGRTTDSSFTQYREKSRSREDSVSEDRDGHGGAGLDFGFDISKILEALQTVGEVVRFERLGKTSAAFTFDDAAEAANASVLVVDDLAAPNAYFQLMTAEEAYQYQ

SEQ ID NO: 153369 - protein, 62 aa, Heterodera glycines
MQKSNSPVLSFVRMFCRPGVHMIYNSAGHPSGEAFIQMDSEQAAANAAQEMHNKYMELGKKR

SEQ ID NO: 153370 - protein, 108 aa, Heterodera glycines
KVGKGGGGKRDRVDSRCVVRARGLPWHVSDLDVAMFFAGLDIPPGGVAGGVALCLGPEGRRSGEALVRFARADQRDLALQRHRRHLHARYIEVYRASGDEFVKHAVGD

SEQ ID NO: 153371 - protein, 374 aa, Heterodera glycines
LNSVNTRNGNEWNWTPTNGHRQNQKLYQLVDMHGGGELIKWMRYARKGGDYSIVDGYFETTIKQAMYNSGKGKLESVAELVKMRNKERNERLGAFSRKKGKGKSGPNILDDFNQNANQNQGDLKKALKLLDGGLKLLDGGRGGKGDAKYREIVWKIEERGDAKYREIVWKIEERGQMGENLVQMGENLVGCCLMQGGPIHTELAIRLLNEFPKLVNDVMLSEDYYGLSPLHQAIVNEDPSLCNYLLQHGADVNQRCFGACFGAFFCPDDQKGSRTDSLEHEYVELNGSRTDSLEHEYVELNLKTEYAGRMYFGEYPLAFAARMYFGEYPLAFAACTNQFDCYRLLRAKRADPNAQDTNGNDCLHMTVIHENMVR

SEQ ID NO: 153372 - protein, 269 aa, Heterodera glycines
MGMSSVIMSKATVQTAAKERENGEEIFINLNAIAFLDSLRPLFAACPINLTIDSNNPAILKSVVDNIWPMLNVGAMLLSERILCGLRKSNSSILNSCPTLRVLCLYATDDFFTEFPADDSASASDEKALAKWLFTPHPNDVPKVLKCSIGRERFWKLKIVQFKTAFANASSHANFIVVICIPLCFVEPFELINRIGEELTLKITADGENVLLIRCPIERDASEWTKWEEEAIGWRISNQKNRIDVGIYDPADVGDGLLKPAPGPSVQQQ

SEQ ID NO: 153373 - protein, 38 aa, Heterodera glycines
MKDWSDHVGPIIVCKIFVQTFVPDKMRLFIFGSGFFII

SEQ ID NO: 153374 - protein, 101 aa, Heterodera glycines
GELSRSERPFCARPSDCFSAQSPPPSAMFLTPLGNVKNELVVCPTDFGGDFVFGMELEPSNSDFCASTAAFAPSISMNGPFPPMQTQMIRMPMPSLSASIT

SEQ ID NO: 153375 - protein, 156 aa, Heterodera glycines
IELVANSKPGTLEGTNQLGRTYSPLLPLSMVERQKIVQLFHEGWKICDISKYLCVTHSCYLCVTHSCVSKILQRFRATGSVRPKDAKEGRQESFRATGSVRPKDAKEGRQESPLVAAIRDYRQRLGIMRQSEIREQLIRDGLCRRENAPSRSSINQ

SEQ ID NO: 153376 - protein, 346 aa, Heterodera glycines
MLTPATAVGRCLELKNKGLQEKLKQQETNALLEKIEAENGKMKNEIEKMQAKMDEKEKQLEKKEEQLEKKEKQYMDKLEELQKNVLQVKCDSEEENNRKLKNEHKEMKEKQDKLEEKLGKKLDTQKAFQAEHEKKLMEQIETLQAKISKMEMEKQKQKVYNDQMEQLQNEQKKKTNALEKNQRKMALRNFRQNRWDANACHYNIKIITNNHNPYGWLTFGFAIKQQDKLEGAIANDLGTYAYLSGGDFTVNGEWKIQKEDYSFGSEDTVGCGINLATRQIFFTKNGWLLASYDLVDHSPFVDGLAELFPFLSLLCSGEEIEANFGPKFHYNLAKPKQWKSVMLSSN

SEQ ID NO: 153377 - protein, 168 aa, Heterodera glycines
MNRSFICADRGAQWEGTRLHRFPRLRFAAGRFRVELSHHFRSPQTDGCQRHLGRLRAPWPTPSPNRTAGQNGRGRIHGQRAAGVPGTVGRFYGPPEEGGHATENPRSFGSQVHGTFSATTDLLCPLQRLHLGHRRQAGIPVPNLYGCRAQTVPFGRRVEKSRQQNGRF

SEQ ID NO: 153378 - protein, 191 aa, Heterodera glycines
MNRLYKLPRGFGSFAKLELLDLTYNNLREQSLPGNFFFMPTLRALYLGDNDFESFPEDIGHLTNLQVLVLRENDLIDLPRQMGTLQKLKELHIQAKMGGNRLQVIPPELGQLDLIDPNDENAKTLRVENNPWIVPLKDALTRGAQGGDWQSGVESFWNYIRSDNYRRLYESHPVGVGSTPPKRNKEKKVSR

SEQ ID NO: 153379 - protein, 60 aa, Heterodera glycines
LIFIILLLNTLTVQTFSDLSMFLFQNRVLTCTSSFISLLLFCFEFIRTFCVLIIRQIYYA

SEQ ID NO: 153380 - protein, 196 aa, Heterodera glycines
MSTEQLIEVMEELRPCYKWADYNLFNHNCMDFAMDFIRRISAVNLPSGKFFSWTQEIRQPLILLPIRKICETETFKRTVKSLKRKEEKEQGKGGGTEKERKRERKRTKKAKRKSEKQRKERDNAGEGGQQTKERTESAGESPAESAIENAQNISLRKKSSAAEQQQIHIEHRGALGLYITTIRILPMTEEMGQKDE

SEQ ID NO: 153381 - protein, 315 aa, Heterodera glycines
MVGQKKQLDNQTNSGRVISTFSVAEHGRHNNECGEAICYSDQTTTKQKSSSLMQQHYFETNGSKEITTKQRLQRLRRKSTSSRKNMSLSHRYTAPFSSSKGCAGFIVPPVFPKTCSLYDESFSGGVFVDHQEDRLLVEAVDRIRKRNFSCKEKEHDGCLQKQQTSADASQINGDFINENSDIDSGNSSITEGRQSPICSEFTQNFGRTEATQFKKAAENSDVASDANWKDTNQRDGFLRKNCRLLHFVKKKGSESLDNEHMQNDDRENDKLPAQRQWETDTTKRKSWRARLLRTLSVGSPSVGRVMKDKEKQRGN

SEQ ID NO: 153382 - protein, 259 aa, Heterodera glycines
LIVVNLTKIDIPSPSEKPTHFANFRERETREDQPSEMPLPEALHSQLLDEFMIRQIIDILPPRAEGYPWVQIYNIIDILPPRAEGYPWVQIYNSEKHGFSLTTLYRRMAEWDEEMSPVLLVVRDVNGHVFGAVSSGALKPCDHYYGTGDSSLLFRFTGEFPHTRELRTFTWTGENQFELRTFTWTGENQFFVNATRESLSFGAGGGHFGLWLDADLNHGRSQKCATFDNEPCATFDNEPLAGEEEDFVVQFVEVFGFCM

SEQ ID NO: 153383 - protein, 89 aa, Heterodera glycines
MGTIPIAVGIGMGTIPIAVGIRMGTITIAVGIRMGTIPIAVGIRMGTIPIAVGIRIGTIPIAVSIGMGTITIAVGIGMGTITGVLFAWY

SEQ ID NO: 153384 - protein, 79 aa, Heterodera glycines
ETGNFKFADPVAGLEFKIFYRTGSGRINPAILHLKSAGSCAGLRILGNFKKFCINKKVFQSIKKYSNIFLNQKMMKMKN

SEQ ID NO: 153385 - protein, 144 aa, Heterodera glycines
ALYASSKCKQFEQFFALPPPPTKQITFLKQQFNLLSFSPIDEFGFNLHAERGKGHFVGAVDKGGIADDAGLETGQRAGLETGQRIVGVNGRLVSAQTPHKEIVKLIKEIVKLIKSDPLKTVLLVASEEADRFYAEKGLGEATDN

SEQ ID NO: 153386 - protein, 29 aa, Heterodera glycines
MECQQRTFGRVQKGRIRKRRRNKVDTLTV

SEQ ID NO: 153387 - protein, 119 aa, Heterodera glycines
MQGGEDDLYLCCPTGQGFTKLTKNCHFVLWRDRNFALAKIDQKTVAKMLLFAEEESAVTVSKCIGKTVERTERWPKAGSKQFVHAVRPFTFAFSFLKSFSALFQLRGICVEYFGCKIGI

SEQ ID NO: 153388 - protein, 256 aa, Heterodera glycines
MSKNAAQTFVEPRTGNYWHFLATVAKEGSLIEHQKSFGLMKRNGTSEKKIWLKCEKKQCPYRGLYLKEKMALFDRYEHIHNPLEDELKLARRKTGEIGTMKLHGPKLARRKTCGIGNCGKLAPPKKDLAETKGIRKIGTKSEGPKLASRKTDINLRNREKEEKPKIAESKCKGGEDDLYFVLSDLEQEFTKLAKNCQLVLWRDRNFALAKIDQKTVAKMLLFAEEESAVTVSKCIGKTVERTERWPKAGSKQFVHA

SEQ ID NO: 153389 - protein, 106 aa, Heterodera glycines
MSSIEMEVPKVNNRKKRRITWTFLMRVDNGEKFIEFCRQNGLNGQSLHNAVGGKCRRMCRRYWFESAEKCPYKIKLDIATGEVYERNQHNHTTPEGNGNGKGAQQP

SEQ ID NO: 153390 - protein, 443 aa, Heterodera glycines
SIKESAELSAEDKKALTNGYAPLKQLSQTLISTIMAQKVRKYRSQEQLSLADRLLRINMHSLVKKSNRLKYRINRSIGLNTARYTEFDYLVQLLEEAERRLCKFLYCAQLYKKHIEQSVKRHEDTYKGKREHINEKNRICHAQDENVVKAFAVMFRHLDELCRRHLQTFDQEVITEGKKLSDEVEMRRAEFEALNNQIKAQLPRVIGSINTRVRELIQRVNKLDEAFLCRMDEWFARERPEKVRDCFSAALPFRAHLSASHRHTLAELNKIAAHLSSGSNPLQKSQSLCQIGKRLSLIFAEKSLHLSFRGTKSTHFSNEREAQNKQPKTHKRRPQTTKERDALTKICHAQKLTQQLRRVQSDWESASMVLRRGDAVVVKALRQDGFSLCDNAVSSGLVPVALLGPFDESFTAPFSPESPASGNEPHAIDLAVESAGHKQNNSD

SEQ ID NO: 153391 - protein, 180 aa, Heterodera glycines
MITRDRHFEKSLDLDFLKLILKSKKGKSRFFRVLPRPGFFSHLTWTLISWTKIQENPGPGKIQVAEKWPGPGPGFFETHFKNQKKVQEKSRLPKNGLDLDLDFLKLTLKIKKRFFRVLPGPGHGFFSHLTWTLISWTKIQENPGPGKIQVAEKWPGPGPGSRKNPGMDPGPGRSLIKIIF

SEQ ID NO: 153392 - protein, 46 aa, Heterodera glycines
AKRLLEEKEHELQTLNTELASERAVKNIFQSKYRLCWTRKIFRDSK

SEQ ID NO: 153393 - protein, 57 aa, Heterodera glycines
MPIQCSMFVARAPFLPAIALPAKQIKLIFFKSIAPNSPLCYFQLTLRTFYLFLHGYS

SEQ ID NO: 153394 - protein, 77 aa, Heterodera glycines
CRVILRGRGEYGTQSKHLMKEGEVGGASPEGLLMPCPAQCPRQFPSLNCISIPFSCLSLSLCPFPPSIQWQILIKHK

SEQ ID NO: 153395 - protein, 25 aa, Heterodera glycines
MPEAIPEGDYERGKKIFKQRCLQCH

SEQ ID NO: 153396 - protein, 245 aa, Heterodera glycines
MNRRWICADVWMDILPSFNRPQLGLKMALLSDRFDVLVDKHFDGKSELPIWSYIIIFKDQEFGPKPMLFVVSKYVISLPDHPLPNKIRFKDLRIEYIDHSVLAFIRSNKQIWDRMGTKFELKVYSYETDQIWDVLAREIWPIFAPNIRHFGFHCGDHLDNLLRLVSPTLLTDCDQLNSIDSGYLSSSAIAVDGPNAISAWQALAKWLHTPTKNGQPKELRCDDFSKSINYFKEVTDHNFIKLLIN

SEQ ID NO: 153397 - protein, 34 aa, Heterodera glycines
MKTEPKFGIKGIASRGHLGVSNDTNNVGPNKFGI

SEQ ID NO: 153398 - protein, 70 aa, Heterodera glycines
MPRLFNLDASRKSYGADQKLIIFMVIKYSTNVFWVSRSLGRNDLIKLVFESRLFWGTVFLSQKCNLFGKY

SEQ ID NO: 153399 - protein, 67 aa, Heterodera glycines
AKNFFYFRKKIEIFSKKIPFDRARKTMFWKWSSFSRENSLKILKIQKPKNRFLGLARKILKIFEILK

SEQ ID NO: 153400 - protein, 257 aa, Heterodera glycines
HISLCGKGDVMLELQHIISIAQCFPNLLSLNLWKCLKFENGLNPSQNSSHALSELLSKCAAIEYLSLCRATNIGTILFEPTLLPSKLAFLETDDTFDLQAMFKIANEQCRNIRCLSLQILKPTIPSLDFVHEDTLKRLVHLELDFHKTPQAPFFENFVKTSLGFLANLRILRLAKVTVFEFFVLSNCALPTVGFALPMFDRIEPADEQQQRKSGRRSAAKAHIEYQRQLSKIPHNVPPVHPFFAHARLWKRCRPTKL

SEQ ID NO: 153401 - protein, 57 aa, Heterodera glycines
QDLGYSAYNIDILAAFLSLSRLKNLRFLVIRHYGKVLQQISTQKCVKCSENCDETFV

SEQ ID NO: 153402 - protein, 1685 aa, Heterodera glycines
MWLTVSFSWSTVSTEYCYLFMTKIMSQHGSTIMLSPLGSVNNCQFKAGQCEMEDKTLLMWDTNTTRACEFSKIGTWKGLQLDNIWISDEVSFRLTFLNNTKKVNSCGLNLIKSEEGFAVQDLPSDDSNESSKRSRKTRSLESWVTESEMNSKLGYLDEQVREMLTLSFSQTIKSICDYMLETRRWAATALLSDPTTFARKLFQSGKLVAKVAGPELIKVWPCIELQAHDYEFAKIGNSADSEFECFDKIPIKFRVKDNKRMAFIDPRTMILSSDARLAPCSEYRKQLIFVRGSLYEVDQIDAQVKQVNANRIDGFSLNLSLAPTYARHSFLHLALVNVSDFIGQFYDANLARESELTFQIKSEDAIVTKTLSEQWEQVNFLIRFGLMIKDEYVGRGKTRRMTFGGNKTQKIVKSPAHLNMMDLNASVEFGNEIELSPVKLIEPAQTQAHKIAGKRKRPVKRTRFSFRAPKVLIGLLVIFLPNAFANPDVNNQISIQFTSPSMIYLLIIPFLIFITISVLLCSKRNSDLPMLPNLNAISPHHAVVQTLINSTPVRCLMDTGASLTVAPRSVADELNCRTFSSDLEAMSASGHVIRLKEYAQVNLNIAGYTVRSLIYFVDDSEFTVARDYSVIVGWDVFEKLPPIKFDHLNGKFFVGDNESKLCYRSILLLNDLRVSAEKNTLIPADSQILVDASIESSPNPKNSFCIDRPDISLIKKGLTVINSVSPAGQKQIKVAVVNPTMEPKWIWKGTHLAFANELLCDRNGFLKENSTKEILTLNSERKKMEIDPTFVVDFSRAMVKDKDLEKLKALIEEFSDVFSKFRYDLGLFTAAEHHITTTTEEPIASAPRRMPYKYKEELKKHINQLLEAGVMVESDTPWVTPIVIVQKKDGGIRPCLDFRKLNEVTVPDKYPLPRLDSIMERVGNCQFYSSLDLASGYFQIKLSEETSRKCGIITEDKVYQMITMPFGLKNATAAFSRAMAIVLSGLEDTSLAYVDDVLIFTKSPNFSEHLTAVRKVLERFRLYNLKLSPKKCIFASNEMNFLGFVLTAEGFKPSLSRIEILKEMPVPLNVKEVKRVLGQAGFYRRHIENFAMVVEPLLKLTRQGNKFEWGREQQNAFDKIKELLTQAPSLIFPDYDKAFHIFTDASSTGQGGVLMQKDDVTGTFSAISYCSRTLSAAERKWPAVQVEMSAIIYALREFRPFIFMSDIELHTDHKPLAFLLKKSETNQQLARWLIELQNYQVKIVHVAGKANTLADALSRAAEDKPLSEIYNVDELEDIIEFPVCLALAAHSRVVADPFLHTLTIRHEDGNTYEVNLLEEQAADPEAAAYISFVRDGEFPADLDEKEKELFAVGTANYKLISGILYFEDKGSPPRIYVPISLRGLIFESFHSSLLGGGHLNYRKTIAKCKKYFWPKMYSDVLTWVKLCVTCQLRHNPTPAYREEMLIVPANTLFAKVGLDLAGPFPVTQKGNKHILNIVCWFTKYVISVPVPDTKAQTIAHAFLTNCYLKYGGCVELITDNASAFTSEFFKEFCSMLYIDKKYACPHWSQGNASTERTFRTFHNILAKYISKTQPDFDEFLDAANFCYNTSVHASTGETPFFLMFGRDPIFCVDQIIDPKVRDPIAISDRNEFKQKLVVAIRHAWHAAADEYAKAQRKMKEQYDRKARPQQITIGERVLIRNYDGR

SEQ ID NO: 153403 - protein, 163 aa, Heterodera glycines
MWLTVSFSWSTVSTEYCYLFMTKIMSQHGSTIMLSPLGSVNNCQFKAGQCEMEDKTLLMWDTNTTRACEFSKIGTWKGLQLDNIWISDEVSFRLTFLNNTKKVNSCGLNLIKSEEGFAVQDLPSDDSNESSKRSRKTRSLESWVTESEMNSKLGYLDEQVREM

SEQ ID NO: 153404 - protein, 1855 aa, Heterodera glycines
MIKSAVVRALSLYKLKDGQLEVSGFHIDSPVRLDAPQYELHVALENGKSEKIVAYRADWIVKSIRRAEWKTGNVEITDEEPDLLIETGIDTAKNFWDLQLIGIKDDPKENDDDTAMEIFEKKAKRLADGRYSSGWPWKEFPPDLPSNYNMAYRRLVNLLEKLRKTPELLDKYHESISREFNLGFFELGERREGFPEHFLPHHGVVTHKLRIVFDASAHPRGEKSLNECMFRGPVMIPDLKHLKEKASPLALEFAGNAFVDNLMTSCKDAGEVLKKYREGKALFAEAQMNLREFICNSMKAMEQIPEEDRLNKPGTKVLGIPWDIQKDELSIGFPPTNEAGKISKRIVLKTLASIFDPLGMVAPCLLQAKLFLQRLWDRTLGWDEILPADETAEWFAVIREWKTEPFKFPRRSVLQGEMVQLHAFVDASKDAYAAALFIRSQKGEETNVQLLYAKSRIKPRKAEVTIPRMELLAMLIGARMLKFAENQLRIPINEKFIWGDSKPVLSWIESKDSQPRFVENRLREIRRISENARFLHIRTHENPADVASRGCTPEELRSHHLWWNGPTWLREPMKSWPIDFEVTPKGAMNDGQESSELDNVVAVPATTSEDNPWIDPCRFSSWTKLRRTVVWFLRAINKMRKTRIFEISEGVPMSSEDYQYAEILLVKMAQKCWPMWKKQSQELVKTSRKDGLVRLSTRLAMSNASEDMVNPIILPENCPITRLIAQSVHESLAHSGVESTLTEFMGKYWTPRARLTIKKVIRACGRCRRIQCPAYKLPTMPPLPEDRVRRTAPFESIGIDYLGPTNTKINGKLQKAWIALFTCLSTRAIYLEPVLDLSAEAFLQVFRRFTSRRGTPKRIITDNGTQFVLAAKVVAALEAGKTPTCPLEEHLANEGIKWRFNPSLRPWSNGFLERQVAGVKAAFKRVLGRRILPYDQLRTFVAEVEATINQRPITYVDEGPNAVQPLRPVDFIMPKAILSLDVRRNQQSSDTEFENEPKNLQKQLQMRWEGTLATLDEFWTRWKKEYLLMLRNRLQWEHKGPRSCLADQPKIGEVVIIEEEKTPRNCWPLGRIVELQGSDNIVRSAKLKIPKANGERISWREISRPINRLYRLEVPKVDESEDQEEEEVPNGKIGLQGPIPKKDGKQAERPRDVQQGQIRNHGMVTRSMTKAASILGLMFMLVIWTTFVETRFVPNPPDIPKLHRGRQFPPCKMCKLECAERGIKVTVPRKVTKFEVCCGATSSCLVHRYTPDKLIYELPREQLIADYQCGATYWLRDGKVNIGEVECPPQDPCTLIDCWFCIERIANPDCRPDVSTGVYGLFTFTGIIALCRILSILRQVTSNLFWLIRWIIITPIKMVIQGIGKRLQRDDARVVQREPNKRKMTPNRAKKLSKMGMSLLALAASSLLIEHAAGSARVVSISAVAENCLRKANGSECRIESSTDVTLLPVGQPVRLILRDPEERVMGVVEMKLLSLSIVCIPKTERWLRSYTVRTTSVKSCPREGSCFGKFCQRVHEDYMKGYSAFVQELGSVQKGPGFTSCRESCSFWNCGCKLPTASCIFYRVHAVPESKIIYELISCPTWEYRINAKLKAESGGNFKGEMEMSLIPGITFKWKEVKLTPVAVSQAPVPILGHKFLSDGTSFSMVDQVNTNLLCQDREIASNFSGCTLSKEACPKCWVDEEAQRVDCQCRDSILEKEFNNPEKRLPLSLRNLNIRYKDGEIFSETHYTPIQVMVQFEGLRLGIEEDFTKCWAQTKTLKGCYKCQSGAQLKLRCWTEYGSALADVYCVDGTRFTVPCRSKAEDQNVILSFDQAEIDTNCTIECSGGKSKFRMKGHLIYVPIQQQIEMGVRISDT

SEQ ID NO: 153405 - protein, 103 aa, Heterodera glycines
MRFWVNGVKVVPFEVRECKSSLYCLRSNCSAASTNEHYFVLGCTLTNNETINKEWLISDYIKPNSSTKDWKCHFEFGKRDQPMPFPLPEGAILPKTENTQPWQ

SEQ ID NO: 153406 - protein, 100 aa, Heterodera glycines
MTPAEEQQMGNYHAQVARATEEFQQQMAQAVQAPFRGGFGIPSIGQTPQLRLPQLPCFRVDSSSGGDGAQSSQNAAAQNFSGNAAGGVDEENDASVSVEE

SEQ ID NO: 153407 - protein, 122 aa, Heterodera glycines
MTQCNELCSELLQNGSPNNYNSSNTTNCDNDADSANSLATGTKLVAAGRNFSNKKVPVSSPKCVPTTAENVIKRPPLFYDSKRRRVDKFYQKQSSLVEYFEQDSKQIQVQKWPKPVSLFYIG

SEQ ID NO: 153408 - protein, 65 aa, Heterodera glycines
MDSEPDKWEANALANVSVKLTIKESNVRRRDARADSVLHEVLEASDIAREGQCCAAQLRKLKPEK

SEQ ID NO: 153409 - protein, 262 aa, Heterodera glycines
LPHVNSANCFSAYFFFVCFHLFLVACVTVLHSSPSLAMSEASSTSCNTESARASRRLTLLSLIVNLTLTLAKALASHLSGSLSIMSSLVDSIVDITSGLVIWRTGRAIRTPDPYLYPVGRTRLEPAALIIVSVIMALASLQMILKSLNSIVYNDINPKVDWPTIAIMMATVIVKLILFLLCRRYSSTNSSLVLAQDHRNDCLSNSIALLCAWAQKFWLYLDPIGAIVVSVFVFQFFSDLVKPFPGGFIPLFRYIAVTWYNTG

SEQ ID NO: 153410 - protein, 141 aa, Heterodera glycines
MPNSTVKNVALMNGTSPAPSADLPRFNHPTPSASFSFPKGSFFSSASASVESPMTATKNHRPTEPLATAFLGASSSSSNGTIEHAENGGNGHQPMTVILTVRMLMQGKEVGSIIGKRGDYVRQIREQSGAKVNISDGSCPE

SEQ ID NO: 153411 - protein, 50 aa, Heterodera glycines
LIDHSPRGANKWRLTLRAFDWAVGRRAELGEEMPAGQSSKSWQNFFWSER

SEQ ID NO: 153412 - protein, 41 aa, Heterodera glycines
MKLFCPFVFLVLLSATAFAFSNLNKTPKTVHWEDACDECQL

SEQ ID NO: 153413 - protein, 99 aa, Heterodera glycines
AFSPATHSLTSQFILVKNGNLRKNFCSPLRPSYGRFTRRTSHGTVGLLLPVLRQTRGRVRPPGQCQRKRRRARGRRRARDVQILKKGGRKKRSKSDRID

SEQ ID NO: 153414 - protein, 63 aa, Heterodera glycines
CCTATNGNGHDAGDDGTAFQSLPDFAETVAFVHQFGPLFELSPFSFDDLAQALQQLHPPTEQK

SEQ ID NO: 153415 - protein, 32 aa, Heterodera glycines
MTSQAAEQELDECLKDKVVIFVILNQIFIRDK

SEQ ID NO: 153416 - protein, 30 aa, Heterodera glycines
MMNIRSNGKIRFAVSCSSNMNRSMEAHFFL

SEQ ID NO: 153417 - protein, 133 aa, Heterodera glycines
MRIQSVARTGDPNLGRSLIQGPDHWLIHPFPRIRIPLFLSFSFVSWVRTSAPSLVAPEVCWHAAGCPSLPENEMEIRVEKEENGMSALADSPEVHYSCRLRIRAHRPRIAINTYHVNTTPLSTVLIIARVIVD

SEQ ID NO: 153418 - protein, 116 aa, Heterodera glycines
MPRIPWPRGLMWRYSLQYKALNFKQSFPFSITSVFNATLFTDCLYHRLLFGNGLGIGRQSAMLDEFDGFWRWALSGAAVVSIIWLGILTALMVAAFIRMKTIATARTVDRIPMPTF

SEQ ID NO: 153419 - protein, 118 aa, Heterodera glycines
MPPYHRLAKSLSPSFKSVPFLRQRCSSFDRIGAVLPVKTARLYSRLYDALNGNAGNRRKASTPHPNIFDDAPFNPLAILGPQENVWSSPDPDPKVPSTSAAWEHNYVPISPDYAATLM

SEQ ID NO: 153420 - protein, 104 aa, Heterodera glycines
  unsure (1)..(104): unsure at all Xaa locations
EGYITNYSPFANTFSYVCHISSSFAYIQFADVDAVNTSTSLNDSLFLGRQIKVVPKRTNVPGLSSTNRPPRGMRGGRGSGRARVIVKXIYSERRSRGRPPRWQT

SEQ ID NO: 153421 - protein, 248 aa, Heterodera glycines
MSSGSSGPEEGEIGAELFANEAFEEAEEPAGLVQFFQAESKRGRELIRSGGFEYAFEADSGLQEVTINSRDFAVQSLSQIWGHISQLRDIFSYLGVYLKFPPDDCADASDGQALAKWLFLPRPDAVPKVLKCSFEFDEEQWSTKINGLIAAFSTASSPVNFIIGIAYSSAIDAFNVPFNLTNELTGERLTLNTAKNKYRHYLLIRCPISRDENKWTNWEKEALELRFWDQWNIIEIAIVEEETGEWSA

SEQ ID NO: 153422 - protein, 109 aa, Heterodera glycines
  unsure (1)..(109): unsure at all Xaa locations
NHGKFSPVFQPLSGKDKHADFASVARVHPRTSKGITGLLLLNFVRLSADTPSKKLXTEAMSQLFSRLESRSLSEXARQLAPRTKIGHAPPSSESXKSYQSVNPYGVRAG

SEQ ID NO: 153423 - protein, 551 aa, Heterodera glycines
MPKYGHKIWTKMPKYGNMDINREIWKNMDIEILLFCLHLCRLFSHQVYRFLAMVIYPGVNTRSAHRKLLWNHFGPFKILDLTDSTASVIPIDKPNFEPIKVPIERLVKVPEGVPNISTLPRGKNPFKNQLNALISVVCLISREMENEPCGKSAAMEKIKDRETENETTNLGNSQKLEHLGRHLIGQLRTIANSVGGKVMETENSCGPLLWDTQCGGLGIEHRNCVQMTAADLDPVLERAGLGLKVIRKWKKIQNGDECGDFKVIGTPMKALLSNFLLKSNAVSSVAGGRKLTQLIVSAPVGFELITYSGAREDQVKIGNFPTENDIESAFTAWVERCAVTRDKLLKTGYTPIEVPMPNVVAELPESEKLGWNEVLKKASFVLGKVRATTIHRKPLFVEKPRVIVGDSSAKQLLKMWPKSQFIGTEEGTITEVIRAFYGAILSSKVKAVIVMIGRDSIRGEETIENVLERVGRLEQLLKRFSHAPVFWLRPPFIKEKMIEYEELIIRMKEHFGTAQGNVKFVKRQRRRDDQCWNCGAMAPVSIPTMCQTMAK

SEQ ID NO: 153424 - protein, 40 aa, Heterodera glycines
GTSKALLIIYNFYFPLHSIASTVVYLYSTPFQFHPHFSDV

SEQ ID NO: 153425 - protein, 445 aa, Heterodera glycines
VPFFRLIFSHFPLRIRFSEVELFLQYIDYFLDADIARKCSIREWWSLGCPVPLLAMAWHFSTQSVNFLIPTLLLMVLLNSCSFKPPTRRRSDRLKEGVDKQSLASSKPAKPSKRAKTGLCKMLCVHEQLLQYFDLHEFECLHFPTYELPLKLPPRPWLDTGHCGPAYTYAQNVVRKLEPYPDMDPTEMMRLRVGDRHSRARPVFDALNLLGATPWIINKEMLCHMRRTLEMSYDGRHREYLRPLAVPVHPATFDVVQTEGRVGTRGADGGGVGRSDSISISSALFRCEQNSLHCWLVYRLTLAQHFANSVLYFPHNIDFRGRAYPISPQINHMGDDLNRGLLKFAAGPLGERGLEWLKLHCVNITGRKKRSSLRERLKFAEENLSLLTSVANDPFDLAFWWRDSEEPWQAFWWRDSEEPWQTLAACIELRDALSRDRPEDFVSHL

SEQ ID NO: 153426 - protein, 29 aa, Heterodera glycines
MQNFLLNIIVNEDVFVKLLEMKKGASKIS

SEQ ID NO: 153427 - protein, 134 aa, Heterodera glycines
MSHQPFANFEIVRLEAMIIGLEIDKDQLQRDVYHLKNRKTQIHNKKIELLQQKEQLIREISVLRETKATLVNETKDLREEILELRDMDGSKDDDPLCARNYACIPCGHRALCNRCAETVSIDGRCPFCREELIG

SEQ ID NO: 153428 - protein, 111 aa, Heterodera glycines
MKHTKKMLLVPESEYLALINLLKGGAGGTDSLQAEKAAIDASIQKNLNDNKTGADVKMKRHSWLYKQRHQLKDMIENKPQKVIVENATGTAPKTLPRIWAYRNQTSTSLKN

SEQ ID NO: 153429 - protein, 162 aa, Heterodera glycines
MGMTEMNESVFGVRTKKGMFRTVGHMHKEQLTRLMQTLRNTFPHFVRCIVPNHEKKPRKIQSMLVSFSVLLHAQCRNMVRRETIFMALNNEWYIYQQICKGLNRTPDLVLEQLRCNGVLEGIRICRQGFPNRIPFQEFRHRYEILTPNLIPKGFMDGKEAAK

SEQ ID NO: 153430 - protein, 320 aa, Heterodera glycines
MSRLWHFLCALFASVFFTSSPLQTESEERADAEEMASDLKQKNVNMQEMLNDYWMRIEENEDTQTKLVEENKKLNETNKDLEEQLEQEEQARQKLQLDKKNDLYAQLQDAFAKLQAEKQSLEARIGLLSNQLQEEEDKNKQSVKYRHKDEVTRDICVYCRNRTFCARTYAPHFLKGIHSFRHLYRIQDCADDDAATIAALQKQARKLESQLEEVREDSENEKKQKLGLQSKVRQLEQELSGLLEQQDEQEAEHRQLLNANALLKQQLKEAQKKTDDDIVAQLEEQRKRSQKELAEAMQALADSEQAQKRAEQSKKKVQQE

SEQ ID NO: 153431 - protein, 54 aa, Heterodera glycines
MSVASRRCRLSPMMLSQPTVCVIFFGCCMMNWSTRLRKNCAPYLVGQTNDGGYT

SEQ ID NO: 153432 - protein, 133 aa, Heterodera glycines
MAGKLRQHSLSSVRKLQELLHDCNVQLATVRSQTQQIGTAADSAQLRRELDNNAKVGLPIATETLEENSKGTIWHFYRSANASRFGFVIMNCIKRQFVLCSQQLLISYHFRFRSSPNFTPDRQTKKCICICWH

SEQ ID NO: 153433 - protein, 262 aa, Heterodera glycines
MSEFAGESDGRSRFSDAVYITGSQWKIEAKIRKITEGTDEKKYLGFYLWCDAKEGGPWNCVFSATFRIVSGKTEAENSIGKLCDYVINRPCVGCGFKNFITFAELMDPNNGFYNRKEDKLTLTIDVTVEYEKREKLILDQSKSNGTIEMEIEKVSEFAREIFLSERKSETMHIKGLQWKILAEIEKKNESTGNEKCLGFSLLCHAKEEDTNWNCKCTATFRIVSQKSGVTDIKREFSEERTFNSESKASGFPDFISFAVCHN

SEQ ID NO: 153434 - protein, 111 aa, Heterodera glycines
MLSFIYTDDLSELNGDNAMAVLYAAKKFNIPGLVRPSVQIPISELRNIFLAYNQALIFELEDFACKCLRYICQNAAHLFGSDQFLQITRMCFAIFSRVIVCYSTMNLNLEN

SEQ ID NO: 153435 - protein, 48 aa, Heterodera glycines
MTELERMQRMNLENENDNRQRSFSPDPTITEFTADQGNYSINWINNYS

SEQ ID NO: 153436 - protein, 73 aa, Heterodera glycines
MRRFVNSAKCQRFVNSTIRQLDDSSTQPKCDDSSTQPNVNDSSTQRFVNSTIRQPSQNVTIRQLNQYYLKNGT

SEQ ID NO: 153437 - protein, 96 aa, Heterodera glycines
MVIVCYSIIIWLPIVRTDWPIVRIGWSFVRPIPILSPSVVYCCCCCCCSSLPLRLHLFHQRLQVFVLVAVLVNLHVRVHEQTFEPFVHHYVAQQCV

SEQ ID NO: 153438 - protein, 189 aa, Heterodera glycines
MDAQQLQQLLNALQQMVTNAAPQNATPANLSNANLASSIDARLSTFHYNPEVGTTFECWFKRYGKLIEDDGSTLPEASKVRLLLGKLGEEEYSKYRDTISPTQPDQVNWNDTISHLKQLFAETRSLFVRRYECFKIRQQPGQDVSSLIAQINASCENADLSLTKEQLKCIILVIALSDEHHDLRQKALK

SEQ ID NO: 153439 - protein, 41 aa, Heterodera glycines; identical to SEQ ID NO: 129319

SEQ ID NO: 153440 - protein, 1063 aa, Heterodera glycines
MVCQTHVEGTIWSLPIWLPCPKLKHTPSDTPIKQPIRLFRPNPFEQKSKAWVCRKVKKSLIEYTNPWNDVIIKQLPSENLPVLLDECKQMVQEKSCSEGILIQKARTAPCSEYRNIPILINGSLVQVDQITGSVTPLKVSKLTYLIEFDDSKVKGVLSSDWKEVRDEMVKQITGDWSQLRDWFILIICALSACDILIRILALVLEKYFNNLSLLQTFFGLTTNNTNQSRPPPPPPPPSPSNTCSVQSPNFSNHHVVLELGETSEGNPTQWPPSITRFSLLPKFESNNSPRLLNAMFPLNSKSFVTTIPAHADTIPLIALIDSAASSSIAPIKLKDKFICQNLNSSEVSITTAVGIPIPVTGSVPFSLHMANMLCSAHVHFAPDYLDIWDICDIIIGTETLERFPPILFDFHNKFLTFGYGPPTLFQSKSQNISDCQSSPSKNLLIYQNKVHFHPHIPSQINSSISPCILSQTCENSQHFNVPPPSIIDSLNNRLTRDDLGWNPTLIEPINGISAIPISNPSQSPKTIFANMTIATANEVSEDPDLHFFYEDPDHALFSISPQSDEGIIPDPSFKIDFSKSSVSGPDLQNLKNLCEEFSDIFSKSQYDLGSSTAGAHEIVTSTQEPITCKPHRTPFKYRDELKKHIEQLLKSGVMVQSDTPWVSNIVLVQKKDGGLCPCIDFRKLNEITIPDHYLLPRLDTIMEKIGHCHFYSSLDLSSGYFQIPLTKEASRKCGLIIEEGVFQMTHLPFGLRNATSAFARTMAHVLSGLDGFVVAYVDDILVFTKPPSFSDHLSALQTIFERFQRFNLKLSPKKCTFAASSMNFLGHTVSSKGYSPSLSRIEVIKNIPTPQNLKQVKRIVGMASFYRRHIPNFSTIVEPLTSLTKKEKKFIWDKAQEDALTRIKELLSQNPILTFPDYSQPFHIFTDASVIGQGAALMQKKNDLFSAVAYASRTLSAPERRWPPVQIELGAIVYALRTFKPYIYMSEIELHTDHRPLAYLQAKAQQHAHLARWLIELQNFNIKIVHISGKKNALADALSRLSESDPPQIPSDSQELQDIIEFP

SEQ ID NO: 153441 - protein, 89 aa, Heterodera glycines
MFLGKKGNNLFDEIKLEQKNWSHKIKQKRKQILKGQTDTERIREEFEQQMEKMCEIAEENAKEEKAKLEKAIENATNSEEKEVLGQRIQ

SEQ ID NO: 153442 - protein, 254 aa, Heterodera glycines
MLINSVFMIPFFISIFQQFLITFSIANSSVEDNMLFAFLKGQKEIQFSEYSRQKYEAHLGIMHFMRMNWQCDKIAVKFEEYERTKCPKYRKYLDILHEYLYREYIGIPTVKPKFVFKKRIEINGPLIYAVNCLVEIWLFYFKYYWLNTNFRIFIFNRFELKLLNEKRLNYKQKLSINEMILELAIDTANEWQTNESLDGIIQQNCGEKFEEYLKEMFKKSEEKAKKDKQWKANEINNGKHLIIKHSKFDDQGTW

SEQ ID NO: 153443 - protein, 109 aa, Heterodera glycines
MNFALITLPFVLIGVASVCLGSGLYGDDYGGYGHHDPHHDGHHDGGYGYGHEAPHYGGDYGYGLHDRHYGGYGYGYGGPHHDDGYGGYRYGYGHPGSHGYGHGFAGFAL

SEQ ID NO: 153444 - protein, 601 aa, Heterodera glycines
RRSETDGGGIAKEEEAKVEEEAEKPKAIEVEKPTIRQGMQDQSLPKGSPLVLDIQVGGTPTDVQWGSPLVLDIQVGGTPTDVQWFRDGRPLDEASGVIAEDLGDGHFRLTVPEFNDGDFGRYAVKVSNEAGDAESVANITEKGGPKAPSVMVSVVVRVMVTVATVVVTVEPFNYYSWGQNKIITRAKTHRSNSDQYKGQSDQSKIHFSRAFNVLLSNVIESNFKIMISEILAPEEQKPEIVRGLVPVSVRPGEPTKFEVEVKGPVRSVKWYKNGREMEQPETEQDGNCYRLIIHSAGPDDEADYKVVLSNLGGEAQSEAPLKLIKSLRFVRPLEDVTVPKGHRAVLMAETDRSPALAVKWFKEGKEAETDRSPALAVKWFKEGKELVPGDKAQPKRVSDTKFRLEVPDTDADDTAQYSVVFDREDFDREDEPGVECSCALTVLLPEEMPAEPPRFERPLREQTIPEEDELVLEVETQGKPHTVRWYKNGQYKNGQQLSPSDRSRMEKLGPDRFRLVVPSALQDDTGDYACEIANDAGLARCEARQTVEPFSEFIRPLQDLSVVEGERAEFWCETNRRSVRLVHNAAYREDIIKMRLITDER

SEQ ID NO: 153445 - protein, 103 aa, Heterodera glycines
MAPATGPSSVAAITWNVLVAPSREHICRFDLKIIPKFSMFSKAYFILVIFGSIIGGTFGTDNEDEQWEGFEFMNRGERISKFFKNLFFMRIASILCTKHKIDR

SEQ ID NO: 153446 - protein, 158 aa, Heterodera glycines
MPPKSKPNRTHNIRQTAKIIRLLGCCQFGNQSWHKHSLPSHHVFGRNVTPICPCRFMFPSAKIGPLYWAGPFLSGLIHSPAEVKFELQIRKTMCKFFRGIFPISFFFMPFARHAIFSSKCVEKRGEEKWCLAPSSRGCKSCRYGTDDWMALTYLGMPF

SEQ ID NO: 153447 - protein, 126 aa, Heterodera glycines
MPKEDFTKSVVPTGVLTIEEVNSVYQHYSHQNLSDATGLFPLKFPTHRRNKNEGTIEMEIEKVSEFALEPVGSGRFSDAMDIGGFPWKIRAQIKTKNESNEKWLGFYLCYDGPKKEVFKYYLNHSN

SEQ ID NO: 153448 - protein, 264 aa, Heterodera glycines
STGVLTIEEVNSVYQHYSHQNLSDATGLFPLKFPTHRRNKNKGTIEMEIEKVSEFALEPVGSRRFSDAMDIGGFPWKIRAQIKTKNESNEKWLGFYLCNDGPKKENWSCKSSATLRIVSQKNGTEDLIGRIGDRIFNKEWNNYGFNYFISFAELLNPGKGFYDKDEDKVTLAIDVIVDEPKTEKIISDPNKSNGTLSMEIEKLSEFAREVIRSDRISETAVYIKGMPWKISAQIKTKSNEKCLGFFLLCDASKKGLVIKLLIEI

SEQ ID NO: 153449 - protein, 29 aa, Heterodera glycines
MEQSRVTHFAVQNQMIEAILKIFDRNDGK

SEQ ID NO: 153450 - protein, 26 aa, Heterodera glycines
MAKGHIIGNSSGCTWLFTSSFDLIGH

SEQ ID NO: 153451 - protein, 79 aa, Heterodera glycines
MEKQQQSKSDDHQQSDQKQQQQKKAVAVVVPRIVRKENVLPRPSFPILPMFGQQPMEIDAESPKGIRPTGPGWMAYIYI

SEQ ID NO: 153452 - protein, 223 aa, Heterodera glycines
MKLLPLFFLIVILIIKIDQFGAEKKKLKQKSFDEIFGEKWEEKEEERRNELKKREIIAKFYKIKEKIKQKGRKYPRKEWKKIERKIAKKLGTNRNKIYKWIKEFGLQKRKSYKSKTDEEKRQIIQKFIEMTNEFKQKGKYSLKEWNKNYAEICKKIGVSKGTIIKWKKQFGISKKIITKEEKMEKIKIYWEIKKENPKMSERAIAKMMKIDRTNISKWKKLFG

SEQ ID NO: 153453 - protein, 118 aa, Heterodera glycines
LINSIDNVRSKLISDGVFKNTFNRNAKASNEFQQLINTLEHKFVEQIGQQNEEDGQENKRYSLVDKVTFWQNSVRVSEKAGTEVLDELEEMRAKFVQNADEFDQQEWIFNSKKGFWLI

SEQ ID NO: 153454 - protein, 45 aa, Heterodera glycines
MGVWHMSICISGQVAKPFYLHYLSLRFNSLMEQKIFLYFLYHYFN

SEQ ID NO: 153455 - protein, 118 aa, Heterodera glycines; identical to SEQ ID NO: 125192

SEQ ID NO: 153456 - protein, 298 aa, Heterodera glycines
MATGIALTLTDCVMWFIDENTGKFSDRFSDDQFSLFDAIHQPRPLVKNNVREIIDMANNRRLTVVEAEDANILRMRVGRFIDLNGRTEMSLHDAYQLKLVQKPQTLAEVIDSGSLDNDGRFIDGVKPRTLLEAICSGMLDPDVAHIKAGPGDELISIGEALKRGRLTPKGEIVLTLGEVGIHRGEKINLFMAHERGLLTSRVRHTIFDVKGVRNAADGSIMSFKEARDAGILQLQFDGLETRLNEASARGEINSGLAEILVAPCGLSNNGLPLSLVRAFLKYQVRTPRPSEIKFSLFG

SEQ ID NO: 153457 - protein, 53 aa, Heterodera glycines
MVKPSVFRYLSLEFNSTLVQKLFTITAHGSRESRGFWGVMITDHGNHGVFGVS

SEQ ID NO: 153458 - protein, 73 aa, Heterodera glycines
MNCKNVGTDHWPNFVKSELQFSTQANEDGQLATRSEKSLKKTEKIDDIMVHESETKANSNCLGVMNYGRLSTH

SEQ ID NO: 153459 - protein, 67 aa, Heterodera glycines
MRANGPNGRRRPPSGTSMNSGTELFFPIVLNMFLKRNHYAEYGSFPKLYHGRVLNLFLFCVLRGILV

SEQ ID NO: 153460 - protein, 469 aa, Heterodera glycines
NKLENNNNTSIDSIPNIFLKNCKENLVYPLFHIFCFSMMTGQVPNIWKKSIIYPVPKIPNPINPVDFRPISLLCSISKILEEILPRKTNFVETNNVLPNCQHGFRRKHSVTTQLLEVIDDFSLALENKKSIDVIYFDLAKAFDTVPHERLVSKLKNIGINGTLLKWLQNYLQNRTFFVRVGSAFSDEFPCLSGVPQGSNLGPLLFLIYISDLPNFCKTENVEIKLFADDLKAYSILSKNTISPLHSFINKFLNYCELNGLKIAPNKCLVSHLGPKNPNECYLINNIPILKNEEGEPVRDLGIYFSNNLKWEKHIEFITKKAIRTSFALLKSLKTKSPKILINIFNVYCRSILEFGSPIFNPYMKKDIDALENVQKTFLRIVFRRNNNKDDIPGYNELLQLFKQESLLKRRIKIDLKLFHDIILEKIHIQHNDSFSTYSELKNDFIIKTGSTNVRYHSFFIRTSRLYRCL

SEQ ID NO: 153461 - protein, 236 aa, Heterodera glycines
MVYGHITLGFIWTKAKWKKQANRTSNCPIKIIMATDIKNILNRLSSIETLLSNNNNNTLASQMAEQFNAIAERLSEIERKINSNNNANDSAEEKERKRSLVLIGLPEAVAEKPSERAKEDAETVAEVLDALDVEVCPQMVYRMGRRIDEKRKGPRLVKVVLPATTFQRFALAQWGRNRTELKQRVGWQRLLVRPSLTKEELAAERETREQRRMNYEESKKNEMVTTRRGGKMEKNF

SEQ ID NO: 153462 - protein, 222 aa, Heterodera glycines
MALLSDRFDVLVDAHFDGKSEFTIWRTIRIVKDEGPKAKLSVWTDGNVSIDGKRVEFPLPDHSLPNKICFKNLQIQSVLTFVYAKAFLSFFSYIDHSVIKFLRSKKPIWDRRGTNLEVLVDAFDTDVQPIWDVFVSQIWPIFATNIRHLCIPNGAHLDNLRRLISPTFLTDLDQLISIDSGALLRDGIADDGPNATAGQALAKWLHTPTKNGQPKQLRFLAY

SEQ ID NO: 153463 - protein, 172 aa, Heterodera glycines
MEQPNQEIKTKRNKEKLEHEGSLYVLHKLSDDELRKYWRCEFFGANDKCKGRLHTDINGNVLKIIGSHTCDMSAAQVECQRRITQLKRRAVETCEAPATIRAQVLQNTATPVLAAFPTKAATKKVNVCKFLCQSRKQALTRKRTPREDGHAKTEFQSCNRIRKLNFILFIYR

SEQ ID NO: 153464 - protein, 51 aa, Heterodera glycines
MQRQQKQHIFGAMPAQQQQQQMDEGGNAECGEYDEDLQEIPAPVQEQQMNM

SEQ ID NO: 153465 - protein, 31 aa, Heterodera glycines
FRNWQTGKGVLGPVGKVLLIRDLFAHFPSMM

SEQ ID NO: 153466 - protein, 42 aa, Heterodera glycines
MAGQRVADEQQGGFGVANHESDIYFCQIRIPNPYSSYFRTIK

SEQ ID NO: 153467 - protein, 120 aa, Heterodera glycines
LGLRFPYGDEKLIQKIAKAYDICGIPSFILVDENFSLLTRNGRSVCLSDPHGYPWRRKALYELTEHTVHRLSEMPSLILFTEGSAEDIEFSCQILSPCAESVFTQQNESPQIAASLPAKL

SEQ ID NO: 153468 - protein, 283 aa, Heterodera glycines
ERQIKRAIHRRLIYSDANSIPPDQPHFPITGFCPAECTQKFPIDGIYIFASFPIDGIYIFASQLHSHLTGRKLHSSVIRGGSKVTEINRDDHYSPHWQHIRSLRPFVHVRRGDVISTTCVYETRGMKHWTWGGYGIEDEMCVGGYGIEDEMCVNYVHYYPASEVNFDKSAVSNASLHAFFARLRGVKNKQMNIHRGVKNKQMNIHEKYSAVKWMAKFAALRELYAVASLNVACLQHSGDLFPVKIIRPPHKLESRAEARVRHGIVDKRRDGDECLALNDLLSL

SEQ ID NO: 153469 - protein, 134 aa, Heterodera glycines
GSSSPSAGGCSPPLAIALYVCSMFLILILFYVAFRCARGRNNEYILANNGPVRLARAIAPRADADGPEMPDERQLWLEMFESGDYELLSWFGRDRAKQIMEDLRKFAEETGRECTHVKMLLDKINRGMINGKKE

SEQ ID NO: 153470 - protein, 21 aa, Heterodera glycines
FDVVVIRCVIPLGMMSKSPYS

SEQ ID NO: 153471 - protein, 52 aa, Heterodera glycines
MSGSEPMSNEILNKSKILGLDDVKIYIRYKALINFYNITQAWIAWVGFTIIK

SEQ ID NO: 153472 - protein, 236 aa, Heterodera glycines
KKLPNKNGTSPDNISYKILKICHSSLSTVITDLFRISLDIGSLPDIWKESIVFPLFKKGDKNNPENYRPISLTCSLCRVMERILSKNIYNFLLKNKKISEFQFGFVRNRSTTSQLITVVEDWYEAIINGKNVDCIYIDFQKAFDSVPHELFLYKLEKIGIRGKLLMWIKDFLSNRTFRVKIGDDLSSSKKVGSGVPQGSVLGPLLFLIYINDLPDALPSGVKIKLYADDKLYICYK

SEQ ID NO: 153473 - protein, 23 aa, Heterodera glycines
MMRATRVRFAFLSVVRVWSFPKN

SEQ ID NO: 153474 - protein, 159 aa, Heterodera glycines
MSINLRDKKSLMENILPAVDISHTINGITVSSERIAVARTIPFDIVGKCKECKATECETEWCISKEGVTIWCTRFKISPRFVPFDVIYELPGYTFFKIRNKSRVFNVDHGSRSDACTQTPTPLYHLPPPPPPPKLPKRKQEQQQADAPAFFSALSAAVV

SEQ ID NO: 153475 - protein, 498 aa, Heterodera glycines
MTSKRNGTLQKGGPSTKKWDFRAIGNNFTEEMENYKLIDERSTICEKFGFTKNITEFRINSDVRRPDEAMRDAIDTMIKAAFKTTEERMKRKVRMFGMAITGAGLASPVWVPYRAYPQNNADVIMQEINKLGQSGDGDENKKTLLLSEPIMMKITCVTLPSGEGPRNVHKFDFGFKEHQRIRISNVDKFCLFYALVASKLYLEVHRNIFNRFMNSIVRQREAAYGLLRNCGIDINEYSYGVEHLSRVQNYLDEIYPGKYRVVAFEKSADPRKSIRVLWKGPMGRENVVPIFLENGHWDGLKNYVCFFNRGRKFCIDCECFYDKDIYHTFDCRARCYYCNKVGGVPCQKESGVKIECPKCCRYFYNLECYNYHQEHQTCKLWRLCVICDKTYRFNPKKDHECGETYCQLCSVSHDPKRGCYIMPIEEKEEKSVYRIVVWDSETSQDSIYKGDQKEHVINYISVILCLTTSAVPGRTRYRLSMDSKFMNSKCETRRNIQC

SEQ ID NO: 153476 - protein, 444 aa, Heterodera glycines
SRRREEQQIPADIQQEEPFQPAPQPSIPIHPQLNRKRKAQYALNDVQESKKSLIGLEELRPPSLQQEASLRFKQKRTNKSRVTLPQHSNSLSLAKLHNPPRDLLAEAASAPLPDDDADDFELSQNHGSASQVQPPPPAPPLPSKAKKRKSNKVDEDIERKRIRIGSRKRDLLAEAASAPLPVDDGGDDFEPPQKPGTSAQVHPLPPGPPLPSKTKKRKSNKVEEDTERKRTRIGSRKRLSSPTVPKNQPKRQKNSGTERQSEEQRRQFADDQLLFSIPNSQLTNEQKRRRLQFVFNRNPVKYGVREDTILNNAGNPVTDSSVTQALEYIIERRAGRVPRFRQPPGTKLIRDRINRDLILRTWTAPPVPPRGAKRKLPQTDQEEELNQKSQKIRGTVQPRGRAQEGLMLPFPTRGVKRKTTAPPEATIEIPPKTQRLRPQKWKNQ

SEQ ID NO: 153477 - protein, 205 aa, Heterodera glycines
MKIGAPKKKIATKNHLKKYLEKNGRKKKMNRKREKLLKNSHKIKAKIKQKERKYSAKEWNKIELKIGKKLGTNRNKIYKWIKELGLYKCHNKSKTDVQKIEIVQKFNAMKNEYKQKGRKYSRKEWHQNYAEIGKKIGVNYGTIQKWKKQFGMNGKRITEKEKMEKMKMYWQMKGENPKMSDEKISKILKISQWTIFNWKKQFEKN

SEQ ID NO: 153478 - protein, 716 aa, Heterodera glycines
MNRDSGAQATVISFKTWIKLGQPKLSPTDIETRNCNDIAFSTEGKFHCTVSCFDRPSKTLIAYVSSDLKHDLFGLPWIEEFELIPREILFPKSTKGKPNASINANVVKAPNPAIGITDESSLTAVLQKDFEEVFKNGLGHCAIKAHLILKPDARPIFCKARPVPHGAIEAVDTELDRLLQIGAVKPVEFSHWAAPILAVKKKNGKTRVCIDFSTGLNDSIELNRHPLPRPDVIYAALNGAAFFSNLDLRDAYLQMELDEKSKHLCTINTHRGLFQCQRLPFGVKSAPSIFQHLMDQICAGIPGVFSYLDDCLIASKTLEDHVNALHTLFQRIKDFGLRIQLEKCKFLQKELLFLGHIVSSNGIRPDPARSEAIQKMPAPHDKTTLRSFLGALNYYGRFVKPMREIRAPLDQLLRKDESWSWGDDQQSAFEQAKAIMVSELLLTHYDPTLPIVVAADASKDGIGATISHIFPDKKEKVIEHASTVLTNAQQNYSQIEKEALALVFAVQKFHRMLFGRKFTLLTDHKPLLAIFGSKKGIPIYAASRLQRWALIMANYDFEIRYINTASFGQADVLSRLIANYPRPEEDILIANICTETECYISTILQTKTEQLPVTADEIAEATPKDEILKKILAFTKSNWPKKSSDPDIAPYFPKRENILEIEGCLLFQNRVIVPQSFRNRMLKSLHMAHPGIVRMKALARQHVYWPGMDSEIERIV

SEQ ID NO: 153479 - protein, 120 aa, Heterodera glycines
MALTREPLTIDFNCKSRQEAIDFNCSLGVQACTDCIPDHSSGLVNCNCRSHNLEKLLESPERRLPLNIKNYQLRNTGRKVIALTGFSPVQLNLQIEGLQMALELHQSLCTILPLNISGCY

SEQ ID NO: 153480 - protein, 178 aa, Heterodera glycines
LKKAYESDVMYGTMQDFHLHESSDEIYGTNDDVTHERELRLAFNSPGMENLNDQFLLLTKVALPLALKALKDAGGIIGKDGPTKEQEAALKQYLTSFLRWNVEQSSKARSNQTEAESANADEEEGEESSEMLKPQISKHLEEFIELEREGWVNSALQSLSLSEQVHYIKQAEELDNRM

SEQ ID NO: 153481 - protein, 155 aa, Heterodera glycines
MPFTFSLNFLSAFAGGAPFGAMSVADLGSLTRLEDKIRLLQEDLESERELRNRIEANRKREAELQKLRKLLEESQLEAEDALNVLRKKHNDACLDYNEQIEGLQKKNAKIDRERQRLQHEVIELTATIDQVQKEKHAAEKAAERFEAQAIDLANK

SEQ ID NO: 153482 - protein, 120 aa, Heterodera glycines
EAEHKLSLANTEISQWKSKFDAEVALHHEEVEDLRKKMMQKQAEYEEQIEIVHAAKDFAAGEGQVALAVRGRSAHCGPGEGAEHHRHTGEGQAMLTMVRIEGLTRLIYARNKPGVNLATN

SEQ ID NO: 153483 - protein, 506 aa, Heterodera glycines
MDSQKSPKVNGKNLMGTEIKDFLGKFDGIVAQLRAIVFQGTEEVMETDNIDFALTWDMQCGGLGPEHRNCVQLTTADLDPVLERAGFGLKVAESRLKPQNAKFGLKVVGTPLKALLATFLLKTNAISSSAAGRKLAQSVIGAPVGFELITFIGSREDQIKSGRIPVEEDLEAILEKWTECCAVTRTKLAKCGFGAINVPIPRSIEDLPEGEGKPWTELLGKAGFVLEKVKATSVLRKHQFVTSPRIIIGDSSAKQLEDLWPTSQFIGATQGSVGDVIRAFDAVALSSKVKVGVIIIGRDALIRNETADNVMEKIGRLIQLCAQFQHVQFFWLPPPFIRDQQIEHDMLIDRMKDHFALIRGNIRYVSTTPSGRSLLEIWRYGNGYNTEHVSAEGTMKEKGLYMLKAWLMTQVNDFPGDRELGIEKKRAESEEKGRGKTEGKNVRTGESDRQPSHRPIRSPFRHTGHAFHRSNRTPTHHPYANPVDRHQPQPFRMPNQQGPSRRQFQR

SEQ ID NO: 153484 - protein, 426 aa, Heterodera glycines
MPTLLKGPFLKEFPNGRVELVPWEQFSMGQYLHVLVASLRKYAALYKQKQISKKMTKNFPSLHRCYVIIQNVAEHSGSAEEDTERITSIVYSVVSSDGFRQRCNQIKVQKLDLLKNSAVATNAAGQPIVVASGHLPLRIERLPRRGTGSSASRSATTVTTARGEGQQQQTTTMTTGADKQWGEGKTADGATGEEYDWSNAMGSSRPALIRVRFRNREAAIAFCQLFRERQIFLRQKRQQQPKGQDDEGIVRQHGTGIDCGDRETDAGNEEEKEEGDGQQTDSYSDLSDLDVFSSCDEDTNGGHEKTPPVTREETATKEHGKKEGGETKTETEESVGEEGQQQKTESKAKATEEGDTNNNTKASNSGMKRKKMQSSASQRHRHGHCSERRQKHKQHLLDSLICGAFAHRDLTPPELALGYALRQHCR

SEQ ID NO: 153485 - protein, 22 aa, Heterodera glycines
MSNSKDNLFRKNCHFSYFSTKR

SEQ ID NO: 153486 - protein, 97 aa, Heterodera glycines
MNLNKQEEYSTEEWKQNYAKICKKIGICYGTICRWKKQFGIRCKITEDEKMEKMKIYWQIKKENPKMSDKEIGKTLKISRSSIFNSKNQLEKERTEE

SEQ ID NO: 153487 - protein, 89 aa, Heterodera glycines
MQIGYVISRKGMMYDVHFQDGYTGRYHATIWRSIHRPSMKDLDLWTPNRKWKRSPRELQWQTLNAEEEWTCRTDVSRKRMDVSDEKDPF

SEQ ID NO: 153488 - protein, 451 aa, Heterodera glycines
MILANYDFEIRYVNTTSFGQADVLSRLIANYPRPEEDILIANICADTDCFINSVFENRIDQIPVTTTEISSAMANDQPLQMVLQFLRNGWPTKVTESEISPYFPKRDKIFEVDNCLLYEDRVIVPTSLRSRILKALHIAHPGIVRMKALARRHVYWPGMDSAIEKRVHIDFAGPCSDGHQYLILIDSFSKCPEVYRMNTISAYATIFVLRSIIFRLGIPEEIVSDNGTQFRSAEFATFCKEFGIKHIFTPPFHPQSNGQVERFVDTFKRSMKKMSKSEKDWIEKMLFSYRTTPHVALNGFSPDQLFFGRKLRTKLTLIHPKGEKAENFDQKSFKKGQSKYTDKMAQNFDRKHGSKLINFLPNDHVLLINYRNNKTEWLQGKIVERLHKSPTYRVYVPVLRRVVHRHANQLRRRHLLEDEAEKEAPQVEQPPPVVEPPRQPQQIQPANSPLK

SEQ ID NO: 153489 - protein, 105 aa, Heterodera glycines
MNKTEWNSEWKLQKIFREKHNYLKTIKEIDEILDTIKDINLEVKRRLKALKPNSPSESDQENESIDEEQENDDEEAGEEEDEDEKEYDSDQEDESQEMHSSDQTH

SEQ ID NO: 153490 - protein, 693 aa, Heterodera glycines
MCRPDSLGINACNYNDNFICYFIKPPNYSNTHTLILFKIIFACDEVTNLVAGTNDCAVTQEGKIECSYDQTTQLSITPEHLTCLKLDNTKTNTTMETLQITIETLTIICTEKSDYFTRGYELSSTSQKRCSGAGKCTGQTCQSVKMSDRNPEVNDHANNQPGYSYCVPSCGGWHCQCFLATDGCLFYRTYAESVGDEIFEVVNCPSWTIQATIKLSINPELTYSVDLKPGILTHIGDESNSSISVTLTSTSIPPTPLFGSTFIIVREELKAAIVANENLLKNILRCKNKEEAQSFSCTFPPEACQCHGGDSVVHCECEKSPLTEIFARQENLLPIKTQGSYVYFDSQIKAKIQQTTSLQMQVTLKGHKVKAIYDKNICNIVTISLEGCYSCTSGANWTLSCKTNFGTALANVECPSQKVQVNCDKEGKEQQIQLAYNKQIITENCGVICPDGKSEITLKANLEYISQQDTKIIPANNTNEKPIIGTSLDQLKRAEKIAQSKQLKKAIKTVKSTVRANQTDDIIQSEKAIEKLNDIREKTPECPNFHDSVDPETDGSFFQKLKSWEVDHKEIWDQAIRHAKKLEQKRIDSVETQTNNILEATTKAVKGEEFNRTLIEKLVRLIQSTGYSTKAGQDQALISLRKIENNLKHQRRYLTAQERTTHYLKKTFGLPTEQKLKSNNDSDTTTQSTSSNL

SEQ ID NO: 153491 - protein, 338 aa, Heterodera glycines
MNRLFQNSLTIISLLTLISLCSSYSYECPKEPKIWKTRYTTLCIENGFTIRQNKITKEFCYKQLVCKDKHIIKRRPPYCGEKCKCPEGFKFCSFASYNKIKNESVEKINYQSIISFFKPNICAPNKTENCPIMKRKLFNSIVLYDNSIHIVKTLNLLFSQIDSINNFRCFGEGNLTIGTPIYCREHDCFKNNSFKQKYGTKFCFYEPYEKIYLVKSDEELIQIKAWGTIEKIFYLPNNLNQSFIENRRNKREENSSINEEATIECLKGGIIIKAINDIQELQISIENYTIIKKNPQKEEIIYLPPKLTSFEYKPIIKFISNPDKTNEKQITCQSSPVS

SEQ ID NO: 153492 - protein, 81 aa, Heterodera glycines
CSPFVKSVITDKRRTLILSSSQFLHLIYPFFLIARCNWTTHEHKTTFIFFIPCDDIVKFSPVNSLIISNGKTEPIEEDGGK

SEQ ID NO: 153493 - protein, 742 aa, Heterodera glycines
MEEEVRAGATVGGVMLEKKVIEFLKDECSKGQTESEPMEEKPIMGKMVTVELVILETPTTGMLDGGAQISLIGGKFFYELVTSGKLNTMKSGFKRVSTRISDVNGKELECFGVITLPVFRKGCSTTNICFHITSAPFGYDLLIGTNALRSLGFCLFDIPNKEMINFEEIHPKKEKSVGILYQTTLKPLSMKLVTLSVGNEWNDKEVIVTSSNEKSLHRFEPTVGKITAGKITVPIVNSSIEFVQVDEKEIIVELFPTNLFAKADDSLGSPLLVNNLKLTPKMNEIKCQSMEILECLKSQAKDMSDQEFLPLGRLISEFDNIFAIREEELTQTDMVEHRIDTENAKPIKAKHRPVPYAYREKVATMIKDYLGRGLIRPSFSPWASPIVIVPKRDGTLRFCVDYRGLNSVTVKDAFPLPNIDSTLLALGGKKFFSVIDFMSGYWQIRMDPESVEKTAFVTEFGLHEFNVLPFGLCNAVATFQRFMTRLFEGMINDSVFVYIDDVLIASESWSEHLKHLREVFKRIDEAGLKLKISKCRFAVKEIPFLGHILTREGVKMDMDKVKPVIELPTPTSKKELHSLLGFLTYYRKYIFGFGSLAAPLFRLLKKDVKFEIKEVELGAIKALKKSILDHAMLYFPDFKAAVDDQKRQFVMLTDASKIGLAAILCQPDENGNLRPIYFASRQCNRHEARYCPTELEALAIRFGTKKYAQFITMIPTRVITDHRALVSMFKSKNETGNSRVDK

SEQ ID NO: 153494 - protein, 64 aa, Heterodera glycines
MRNPAEKELFISEIVEKYLKEEIGEDKSDGSSSSSSSSESAETSRETEEDEQIWGGKARTDQSQ

SEQ ID NO: 153495 - protein, 78 aa, Heterodera glycines
MAPPNPSLHRVHPLSPPAVPPHHGRQQSLLNPQKGHMPTFSAVPNDQKEQPNAPGRPGNPGPPGKRWRAVARTGEMWR

SEQ ID NO: 153496 - protein, 80 aa, Heterodera glycines
MSKDSKRRHDRDSSDYVEESKRRCDEARKRQIDREDRARRRSREKREQVEKEYEYYLQIACSESKKESQKNGGQQHNVGF

SEQ ID NO: 153497 - protein, 589 aa, Heterodera glycines
MATTRKISSESNSKNKLFAEKGSVNRTTKSSNKKQQPIVLIPKRRKHKNYISKRKGNKTSAALRQCVSDPCIYKSFDHWHELWKEPPDGCDGPCRKTSIRQRKKLSMPSQDQLFSNRIQQLDAAAAKLLAVANASIDEEEKKMMTVSASEQLDVMGVVSSTAMKTGQLDRNPTRNGAREEAEFVSEINAGNSRRNSKKLNIQPSLDITTPSTSKQLEKQQTKAPVRKISGRRRRIEELSRIKEELRNAKLPSFDDISRRHSRLQKKEDIENAQAKSTVDAVSAAFQSTQQDANAKKRSVGAFPASLLDNNREKQKHKKATVMGKPPASPSMLARHELNRLAEYSGQSAGQSAAKSPGINNNNNNINSVISPCSPSLNNCSYMRLRNAPPTSAVRPPSKLPLVAVSIDQDFDNPMFGFDTDIRVPQEHQAETSTTETFDLLASAVDTDANDQCSAESCNSNTHNSAHQQRAKNITPLEFQATIELNNSPQNIADAEDEEREDEHYGTPADETTEARVPVLRVSRHGVGRTEQSDLDGRHQMPCHPPVPPPPYPGRPKPVNPATASLIASLQLPPSVCAKVTKSLPVWISG

SEQ ID NO: 153498 - protein, 64 aa, Heterodera glycines
MILLLKPLIVQPMFGIIRFLFVPLASIGVCLKRRDPNALFAQRRLISVVGTQTDEHISARKWRD

SEQ ID NO: 153499 - protein, 340 aa, Heterodera glycines
ISWRFDFRPISLLCSISKILEENITQKITNFVETNNVLPNCQHGFRRKHSVTTQLLEVIDDFSLALENKKSIDVIYFDLAKAFDTVPHERLVSKLKNVGINGTLLKWLQNYLQNRTFFVRVGSAFSDEFPCLSGVPQGSNLGPLLFDDLKAYSILSKNTISDDLKAYSILSKNTISHSILSLINFGIIVNKWPKIAPNKCLVSHLGPKNPNECYLINNIPILKNEAVRDLGIYFSNDLKWEKHIGFITKKAIRISFALLKSLKTKSPKILINIFNVYCRSILEFGSPIFNPYMKKDIDALENVQKTFLRIVFRRNNNKDDIPGYNELLQLFKQESLLKRR

SEQ ID NO: 153500 - protein, 24 aa, Heterodera glycines
ITGVSIIAVLFLVFLMPSQNLVRF

SEQ ID NO: 153501 - protein, 29 aa, Heterodera glycines
LYFLFLFSISLLLVFSYLFFIETKALSKI

SEQ ID NO: 153502 - protein, 141 aa, Heterodera glycines
KYGNPKQANEIDWVIPARFCTDRYDSKKIRHRIEVQLGEESKEERLEAGESQTKWPNAYVIPSKDGHKVRIIDAPGIGDTKGVNEDKINFDKTLNFISTLPELHANIVFVFTNARGSNYDMGKTAEVLEKLLAPIERAHNV

SEQ ID NO: 153503 - protein, 220 aa, Heterodera glycines
MSIKQAEKVVLECKGEADENLHEDKLKGLRESLRLYQEEKELIDNATADDSNGPTVITAENVKKFFDELCELPFFGADIRQMFETKQKSRHEHQKEYSEKKTNVGVKLRPTKSGKVVQPEQCLNEEQRKLLKAYKKKQKEMEQLEREMENENTLQRQRIPSYNYLFGSSSSQNVSSSSYGTHSRNSFNLSSNFSSYGAWEDDRGVMPKNKQWHNPRWGPK

SEQ ID NO: 153504 - protein, 490 aa, Heterodera glycines
NSHERYIDELLNDGVSQLPKTCVKKAISTNEQNSNAVASSSKSKEHKNEENISIPKLIFLKTKANSISHMTIAKSIHAHMQKMRINEHANLNTVQSDQAMEDIDQNIGGTDQTNVSMPIDVINESANSLISLLVMPIAHSSAADQAHPPLSEGTTNTNLTSDKSDQTGPETPNSQRKRSRQRKQSSSNIQRTEFLGFASTETEIAVIKQKDQRNDQPRNQRNDQPSDQRNDQPSDQRNDQPSDQRNNQPRDQRNDQSSDQRNYEFNEQQSYQMLGLYDHDDQNIEPMFVDTNAPQMIDTSDFDQIAQLAGDDLMFPHPMEVYDEPNNAEEQFVMIPVGNSTQQIVAESVGKTKSNSKSGHGKSPQSADQNMRDYASPSIQLKQKAGRQKKPKIDEKMEKAKSKMGVEKAPIKPAKHKSKMTMGRPLMRNKSIMITERPPMKNKSMVISERSMMKNKSIVITEKQNTKADKGKSIMIEEEDSATDSSDEVH

SEQ ID NO: 153505 - protein, 358 aa, Heterodera glycines
MPWKLREFFALILVHCNPAKPEELWNMFKDSLSEDFSRNFRREIANAKAYREIALSIMKAGKTLADFPSMEQINVDDDVEQVFDLAEELDLGQRNYTLMYDEQRKVCDEILQRVWNPVNEPAFYFLSGPGGTGKTHVNKTIVHMLRGQKKKVCTMAFTGIAATLLPAGRTLHNRFGLTLDMSNSSISPRSRVWQELKETDLFICDEAPMINKRAMRTLDEKLKEIMNNGIAFGGKVMLWTGDFRQTLPIQKHATRAEMVSSTIKRSEYWRLAKRYKLTKNMRALATEQEFARDLLEIGSGKWNNENDEIILPENCISNAPKNIDVSEMNNRVLEMLPGEEVVYTSIDLAQDENRQRAY

SEQ ID NO: 153506 - protein, 68 aa, Heterodera glycines
MRTGQKLRRRMAFLLFGLSIGVPFLNSRALPATVGIRRIGYVNNGLQVLAVRECHRGIFGEPKCQPKS

SEQ ID NO: 153507 - protein, 147 aa, Heterodera glycines
MIKDSSSSDASPCSSPYNFRLTSAFRRSWTIENLKKLTNRTSPSNKNSAKASNGKMTVPDNSPTSTVSRRSILKRGSSTDEVEQTVKTLASEGKQLRRRLLIKKVKTWSIIDFFQLNKMTHKSGQNISGVILLKLSLISPKQKLEAK

SEQ ID NO: 153508 - protein, 216 aa, Heterodera glycines
MKCSLLSYPFIGISLILVVGVASSIGAPAAASGRKIKPPIMERGAVNGGTKPTEMGKEEAEQWKKEREEVKKLLAEHNEKVQKKLLKQAKALEKDEKYQQRMKEQKAARARLPKEKRVPAMDIPEINENSPEAAYLYQGDIQLSLEEAKILFARDDDVEEGRPSTRTPNASSDAVASSGRRRRGAPMNAVTFPDSNGLISSTRSALTTASVCFSVW

SEQ ID NO: 153509 - protein, 161 aa, Heterodera glycines
FWACGSLGIIAHEIGHSLGFFHEQSRYDRDDFVEVNTDNIKPKKLHNFDKQSNINNNNYYVGYDLGSVMHYASKDFSINGEPTLVPKAGPLYLHTIGQRYGPSHSDYKMMNEHYCGLTCEMETTCFNGGFQNPNNCSACICPPGYWHEKCEHPLDMNTAGS

SEQ ID NO: 153510 - protein, 68 aa, Heterodera glycines
MFRIAEIFAKNSLSVGISINVRPALLPFIANDAPNFPPSLLRRWTHRFSPKIKGVKGDSSKRRRSNPA

SEQ ID NO: 153511 - protein, 57 aa, Heterodera glycines
MSMKLASKMGGYTEYALLPKESGKRGRAVGARVWVFAGFGSLSQLAMDLENNYLFGD

SEQ ID NO: 153512 - protein, 54 aa, Heterodera glycines
MARGTLWMGEDPYVIVTDYELIRSTFLLNYNEQTSGRHFFRIAELVSGISHWNA

SEQ ID NO: 153513 - protein, 97 aa, Heterodera glycines
MLIGLREMSAKLRSDIKQNGGFAIFPPFSTTFKLIDQTLTGPYDLIDKEIAKIVKRRQFESNLCAVSLVDDFLDTIQNSEQRKKNGTMPLAQDKHFQ

SEQ ID NO: 153514 - protein, 147 aa, Heterodera glycines
MNDLWANCLCFEWTIGHFRPLVSLLEVMGKAAAEEYGNCKLLSAHKILLVTASEVFETMLCSDDAENEKTKNSAKNYRQIEIKNIYLFFAPSHLRPVPITDIDANVFKVMLRFIYTADLSGLNGDNAIPLFCAGQNKTKNIKSFCFN

SEQ ID NO: 153515 - protein, 84 aa, Heterodera glycines
MAEMGNNATNAMPPLAGDENYETKSENSSTVPMPLPSSGNSSVLEITKNAAVPSRSDKNDIVHYTVWPIVAVIVLLIFYFLVKK

SEQ ID NO: 153516 - protein, 52 aa, Heterodera glycines
MVGEHLAEVLLTRQHCRRPIHSDRFFRSVQMITSDRLLAWRPRVLPLEIDTK

SEQ ID NO: 153517 - protein, 450 aa, Heterodera glycines
IVVCPFTFHRSFLLSHNVSAPLAQYLELAFPSPEHPFQYELYTKMIAQQRMDQMESELSKLLENSQIAFTEFVKRSAFFVDPRTCEKAEEIMTSAGKCFRLRGGEQRSDGFGHGQRIILRLPKKLYNPGVNQMLNDGVVVKLAERGKGIDHDMSFVPSGVHAIPLTATRYEFKNYPPHFKCREDDPSGVYSRVWCFEDCFMSQAERDCNCSLAAASRPTTPYICTTSQFFRCVYPKLYRKGFEERIAVFYRCKSHCGPPCNYWRFDKTVTYSLFPSEQAKHFLFPSEQAKHFVNDSSKWEELRNTIILDVYYITLDYTIIRHMLSMTPPSFVAHMLSMTPPSFVAQLGGQISLWQISLWIGGSIISIIQLLIYLSSAFCAYLRRGATKRRRTTTMRRDGIIGHERGGKEKCQRNTEKRRRKEERKRDGERAKEEGREKGEDERQGRKLKE

SEQ ID NO: 153518 - protein, 234 aa, Heterodera glycines
MVRSMLRPSIFALLPLVCLLSVLPKPGHGLFLFNAWNCIGMDMTQEQCDTLSANKANGDRAQLNMSKVAVSDWKCKCALGNAGEDMANANFESPEAKMACKYRMESENAELNEQLNNKLNKKFNNNEKIQCIKEKGKCGAVFCKTKDGELKWNKWACFSADYSKKVCAKNETNAVNDERDKWSDSKLPKADDWKCRCRFGGNGKDLTNNKFVPRNSTAIRHGDGMPMIVVGIIM

SEQ ID NO: 153519 - protein, 20 aa, Heterodera glycines
MNMLREKSKNIQFEAFHVFK

SEQ ID NO: 153520 - protein, 202 aa, Heterodera glycines
QVFGKDSNCIVRNWLSSTVIDHFNCTLPYLDTVRGISTELPTCEPLKIAKNRGISTELPTCEPLKIAKNYTDIIQLVHSGSVHGPKCIPGCNRWEYSVSLQQSPSLQEFANYTFNLEVSFTFNLEVSFYDLQYEHLKEVVTITVPGFMVVTITVPGFMSQIGGQFGFFLGLSIITVIQEIRLGFFIKWNFAKASARKCSQKR

SEQ ID NO: 153521 - protein, 57 aa, Heterodera glycines
MPTKTTNGREAPLYSNAETSVEMLLAINRCMELLRPELAFAIFSGQIFINIFIRRLE

SEQ ID NO: 153522 - protein, 46 aa, Heterodera glycines
FTPSGSEPAPSALKMMPQNPQSHRDSEVLSMLKVKSDHVFVISVIK

SEQ ID NO: 153523 - protein, 101 aa, Heterodera glycines
MAMFTKPVLFSGVYLSWFYNPYVGYTDDFGEIYSNTIASAHNYIVIIGLSSIYLLFPIFIQVIIISLFNSIASVIYISMQFVRISKIYIIVGTYAWVFSSG

SEQ ID NO: 153524 - protein, 100 aa, Heterodera glycines
MPRLGIIKKRKCRLKSNCTDVRDSMRTKFHLNNGQADRQPPEPMFPKSFLKKAYRKKVHMRDLKIQDKSEKSGHLGALAITDCQKLSKNNFYSLIAVANE

SEQ ID NO: 153525 - protein, 65 aa, Heterodera glycines
MRIGFSCEKKKEVLIISLFHTITAVIYVSMQFVRISKIYIIVGTYAWVFANGCHGVFVAEQTNSK

SEQ ID NO: 153526 - protein, 286 aa, Heterodera glycines
WPSEFIIASLPGSFRQYLSKTNCKWKEVPKVLRLHWELKPDKLYIDFPSMDTESRCVTCRTVLQQLASVFDPLGLVCPALHDAKMFFQSLWETKLDWDVPLPTDIVQKWNTIAATWNQQKVRVPRRVIPLEAASHQLHAFVDASKDAYGACISRAQHGDAITAHLIFAKSRMKPKGSISLPRMELMGMLIGIRMLQFAEKQLDLPFATNIWCDSKPVLGVSSSEQQPRFVENRLKEIRAVDLVRFLYISTEQNPADVASRGCTVIELTSHPLWWSGPSWLIHPEDP

SEQ ID NO: 153527 - protein, 76 aa, Heterodera glycines
MNALETGILGIIGAVYCDYPLLIYTTGALGAALWYAETSVEMLLAINRCMELLRPELAFAIFSGQIFINIFIRQLE

SEQ ID NO: 153528 - protein, 69 aa, Heterodera glycines
MKTSRKFLWDQFLRDKFPKIQNIAVYCDYPLLIYSSGILGGDISTSDYHKFDTFNYSHNLLLNAICQNQ

SEQ ID NO: 153529 - protein, 83 aa, Heterodera glycines
MFICSANLLWFCSCHVHKTRSVQWDLFVVTFLQVIVISLFNSIACVIYVSMQLVRISKTYIIVGTYAWLFSHGFLIEILLSLN

SEQ ID NO: 153530 - protein, 225 aa, Heterodera glycines
MDKDIINFIACCNLPFQIINHKTFKKLLRNPSENLRDESHYRRNVLPEVYKVVKNKIKGEIAEFENICCTSDIWTSDTTKDSFISLTAVGVSSKFSRKKFTLAIQKFHGAHTSERIAEILKALLENWNVKECHCFVTDSAANLVKAFDLMYIERISCAAHDLNLCVKECFSKEKDEMAQIFEKCRKIVGTLKHSAKLMDDLKDVQGELGLPKAKLLQVANYQILI

SEQ ID NO: 153531 - protein, 411 aa, Heterodera glycines
MQEKFDKKEEQLEKNLEELQKKLVEMDHQQKEQQKSIDQMEKQMAFQEKLEKNVMAQIDVKVQTKVYCQIVKGNEQCWICNDVWMDILPSFDHAQLGLKLALLSPRFNALVDKHFDGKSELTIWRKIKIHRKDKGPEPKLSVQMDDKFVPFPLPDRPLPSKIRFKNLQIEYIDHSVIAFLRSNHQIFNKRNIKLLLSLPSPHNTDGQPIWDVFVREIWPFFSANIRHLRFNDGDHLDNLLRQISPTILIDLNQLNSIYSFGLSPAAIDADFDATISAGQALSKWLHSPRKDGQPKRLHCEDHNEQTNTDWINNFKEHFLRANAISSVSYEIHFSVHVPSIQMVPFELVNESTNEKLTLAKAKENEWGGIGWIMKRCKIIGETAAVHWEDGNWDNNWDNVIILLDGGTNCIG

SEQ ID NO: 153532 - protein, 75 aa, Heterodera glycines
MEKRGKRRKRMKIALGKEERRKRESEKGKIRSKKDGEKEEEERMKQKRGRNSSNLTLFNFAEQTKVAFHSFGKNQ

SEQ ID NO: 153533 - protein, 100 aa, Heterodera glycines
MIVISGLFKLVSAESLVVIPDIEAQAFKVMLSFIYAEDLSELNGDNVMAVLFAANKYNISLLVKACLDFPINELSDVFLAYKQARLLNKKVLMIFKYLIY

SEQ ID NO: 153534 - protein, 70 aa, Heterodera glycines
MSEVADLSRDFNGEVFNNTSNSSGFPHFTTFTVIKELMDPSKGFYNKSEDKVTLTVDFIVKEAKMAEDKS

SEQ ID NO: 153535 - protein, 94 aa, Heterodera glycines
MKKKEFLGPRETFEVYEKRTNSPLNVSRVPSPQGVPVASPPNPYDHMPVPISMPAEEAKRKVPLPFIIGLAVAVPIFVILMLFLAIWLQEMGII

SEQ ID NO: 153536 - protein, 52 aa, Heterodera glycines
MLKWTLMSFYKRTDEGQKCPSAHWNFGMEEKMRWEENWMIWAEIFRGKILPI

SEQ ID NO: 153537 - protein, 36 aa, Heterodera glycines
ECESSHCRGHVEKQRKPPPSDDGNGGGGPGPSSIST

SEQ ID NO: 153538 - protein, 33 aa, Heterodera glycines
MFLFYSVIHLDIEQFNHHQFLFQIVIYLSIDIL

SEQ ID NO: 153539 - protein, 94 aa, Heterodera glycines
MLRHFLLRPLPIHRRLAFVPFSTGINVGHFSARATPAAQNAMPTAPMATTAALAAAADGDPPKQQKHQHFLASLPELKQGQGDAVVDFEALDKK

SEQ ID NO: 153540 - protein, 122 aa, Heterodera glycines
LKRFENPPEPPRERMPFYSSTVARFECQSELDSAAKPRGREERGDRERMSLGMSGKRMFANTLKSAVGTVEDRPCIPPEGLNREMLKRRPTPAPVPQFTTRSAERSPANSIFRMLSNNTRNV

SEQ ID NO: 153541 - protein, 53 aa, Heterodera glycines
LFSFSSKLNIPGIIRKHSKNAISLQIFKNFYLCTKKSEQKKVRITGFLSSFWP

SEQ ID NO: 153542 - protein, 106 aa, Heterodera glycines
ELCVVKNNDTTILNHHLSTSDSCLYQHTNAIDTLVRLAERKEFNGISGKYFDANGKEIKLGADTSDVRVQDKLWIESSLICNAILGRKTATESTIENSFKYATIFQ

SEQ ID NO: 153543 - protein, 124 aa, Heterodera glycines
MMELVDVVTDLGLQFGNASLINDVNVLHKHIANGLEFAMITEILKQAIQPIWQDQSIQIAFEKRSNYQIQDSAHHFFDQIERIATRDYRPTNMDILLTRVPTAGGGQRSQRRKWIPFFDDVLFN

SEQ ID NO: 153544 - protein, 45 aa, Heterodera glycines
MGSCQSTEAIIAREASNKINKMLHQKPERYVQKLLLLGKTNAACF

SEQ ID NO: 153545 - protein, 347 aa, Heterodera glycines
CQNLTSSKNLIVDPQSYYRKCFLRISYLVLIEGFFGRRASFNFCVSNAMKNDLERRWGVNAITVYDRPKLVQSVSIFKVFDPFLRNTSSEEKIKFLHCFTSETLSGLTEFVHEFVHEEADGTLTLRENRPFLAVSSTSWTPDEDFSILLDALVRLDQRMADVETQRTSKTHPKIVVVITGKGPQKEFYEERIRNTKWEKVRIFTAWLSADDYPKFLSCADLGVSFLSCADLGVSLHTSTSGFDLPMKVVDMLGSGVPVFDLPMKVVDMLGSGVPVLAKNFPAIGELIGTNGLLFDTPEELENLLADLSLGFPGNSVLVYFLVMLETKNFPRPRLDPETRDPKPRDQK

SEQ ID NO: 153546 - protein, 83 aa, Heterodera glycines
MEKNEPYENSVVEDDEFHVVQSHNSLVHSGSALLRKPRNLGKRWTWKSLQVVLKSILCAMAPLLQLGYWCCLQLSFLPSSDWS

SEQ ID NO: 153547 - protein, 54 aa, Heterodera glycines
MAKKKTFVPTNPIGPSISFPNSAASSKVRCPNGPTNCVTAPHEIHRLRRHCSHK

SEQ ID NO: 153548 - protein, 49 aa, Heterodera glycines
VGVNSVWPTPSQQCSKSYNFFLCWPNFTIMVSLESPRCLEDIYKLFLSD

SEQ ID NO: 153549 - protein, 39 aa, Heterodera glycines
MPFTQSPENELLYQKGAVCGKKVFSELDDLDESFSKRKR

SEQ ID NO: 153550 - protein, 34 aa, Heterodera glycines; identical to SEQ ID NO: 125570

SEQ ID NO: 153551 - protein, 245 aa, Heterodera glycines
MENKFILVPSDLYKNLLKPESGEINVENAKNKLSSLLKQRKLDATSKNLLYNQELRRFLKLRKEVEEKPVKVELSDGSLMVFKPKQRERDSKIPTQIVNDEGLDETGSIPTLEDPYTTAEESDAESTTSTPKTRPLIRPMRVGTSKFRQKQKSFVVKKKGKIMSIINNDPEKFGVGSKGHILRADGTAYLKSNVNQALERILRRSPENAPSPIGTKALEQRLRNDPRTSGILKQKFNEQSGSSVK

SEQ ID NO: 153552 - protein, 85 aa, Heterodera glycines
MKVARINSQYIVLMSAPNAALQIRNLGVQLFPKNLTFFLSAYKDATASPYGYLFLDLHPASSPLLRIRTKIFKEDEEKALYIQND

SEQ ID NO: 153553 - protein, 261 aa, Heterodera glycines
MKSEPGKRYIAKLCLNSLWGRFSMRNLLSKAIIDNDESLIHQYTEDKKIELIDLEMMDEDNDVFMLTYKPKEEFVDENKYSNVVISLFTTSMARLYLYDALKKVADTPGCEILYFDTDSIIYVHPEDNDPLPTGKGHLGELTDEKPDHDILEFISAGCKNYGLKLQRKDNAGIEYDLKIRGFTLDAQTVQMIHYDTVKEQILRYGSDDPADPIIVTYPHFIRPNLIQGKVFTHSLTKHYQPIFTKGIINDSFQVLEFGYRK

SEQ ID NO: 153554 - protein, 116 aa, Heterodera glycines
MDTGETTPPPLAIDERSERIEQLEKQLKDRDDTIKFLREQVRNREALISDLRRQLDEHMVPPMAPPTRDEALHSVWRRLEQLWKTMPDSEQMRQQLEHHFVSNWLLDTGRLDELKL

SEQ ID NO: 153555 - protein, 91 aa, Heterodera glycines
MAKRKLLSKLIGRESVKKRWNKREERQAQTVKARQAYLAKRTAPQPNPNAEMPPQDEAGPSTSAASVEEAMEPPPSTPGPVPTPEMDEEIL

SEQ ID NO: 153556 - protein, 44 aa, Heterodera glycines
MALNLTYLLTLSLYCSNSMHEVGAVQAFGANANFGQTGGRFPFI

SEQ ID NO: 153557 - protein, 158 aa, Heterodera glycines
PPPQPHPPPHPPPPPQPPPQPPPPPPKPPPPQPPPPPPQLTMIGPPPPPHPPPPPPQQHPPPPPPPPQQQQPPPPPPKLNPPSPPPLPPQQHHPPPPPPQQQLCCGSPVPSACSLISVTKKAANIKGKRVEEKRPIVLSHTKREQTNFIGMSKFFRVL

SEQ ID NO: 153558 - protein, 55 aa, Heterodera glycines
MAATSAATAAADPSAANKVHFSSAGNNYCNVVKERVWCQAVSIINCIAFVSSLLG

SEQ ID NO: 153559 - protein, 40 aa, Heterodera glycines
MADDGNGEAEDNENENARDGGGDDDADDYWTVAESSTKKN

SEQ ID NO: 153560 - protein, 542 aa, Heterodera glycines
MRDDIPPLLEKAHRKNIESHAKETEELDGEVGLSAIGTFTKSDESQKSEQKNTRETAKLENGEISQTEAAKNQQEEKMDTDEQQHENTEESGGAEKDKEEAVVREAKEMTTEAIQVAAATALGAAATKAKYLLEAQRQQLIAERQAFHLDQLRYLEQRARSDAQHQLTNDGRMPTILPPGFEVSLNLTPLELEEWARIMLQVSNPTQPQAVVAPAGIPPSQSAAKAQPPPSVQAAQQPLPPVSVPPQQTQPVPPPASAEVSTAAATTSTPNTAPIAAAPPAPSPHATASSTAAPYAPQQPPTSAPPSIPPQQQMPPPPAQGQQPQYSQPPLSTAYYPPPSAYPPPVHNQSYAPPPHNATATYPPPQAFPPQAAPPPQHYYGSVSRAAQPPAQYGQSPQAVGPPGRPIANYPPQYDYYAGSAGQPPPQHRYGQQPPYASYGPPPTSAPQQQPQHYPTPGQSQYYARLSHTQHSLQGQPPPPQPMGLPPSAGPQQPQEMIVGAGSVHHHQQQQHHQGPTGGIVQTAADATSATPPMHQESNKEC

SEQ ID NO: 153561 - protein, 126 aa, Heterodera glycines
MPPKGFKRKREEGSEVAESVDLDRIDDDENSRLTLTPSAIIKTKDKDIEIGYSKQQKLTELDDDGPAANQLDPTQTNLSSTVEPQTHYIIVPSYSAWFDYNAIHQIEKQAHPDFFNGRNKSKTPET

SEQ ID NO: 153562 - protein, 209 aa, Heterodera glycines
MGSSKDTYGGKNGSERTRKARRARGREKVQTDGQSDETLKNRESLREMSRREAEWADERTQHRREVDQLHAEMQETRKMAECRETELIREHTRADEAEREAHARAKRVEDEMTTLAEAQRKARARAEAEFEAERARSCELMAQRTHLETEIERKDAELSEGRENYEEALRERDKFAQALHEAKLKNAMTNSECERLMEKLRRERNDAIE

SEQ ID NO: 153563 - protein, 89 aa, Heterodera glycines
MSVPNLVENIGETDERPSNSQREQRKQKAILEHVQEQARKGTERRTPCFLLLPFSCFVRAFGTRIGEARGVIHRQIRRHDQKKRSGKRK

SEQ ID NO: 153564 - protein, 22 aa, Heterodera glycines
MNSNPQNYLFVNSRKAELSSAD

SEQ ID NO: 153565 - protein, 95 aa, Heterodera glycines
MTGQRIREFLPKNTEAGISTNIKTRKANSSKKAIETNVQKLAQNDDEKRDEISKDGRDVKILIKMRRNSSENVEQFGKKDNINGPKKCQKWKIGK

SEQ ID NO: 153566 - protein, 124 aa, Heterodera glycines
MSRNIRNLRTRRFKTFTEGLNQFTDVTRKEKAFFLLWNGFIGKRTNRQLGVCQLFALLKRFIDTHGKELLTIRKGLVTNFILHCANFENFGYISNSERAELMDYAALKLSSLAKEFEGKMKRGK

SEQ ID NO: 153567 - protein, 39 aa, Heterodera glycines
MCYHQIDHVGVVASRCARRFEKGATIFREDMSRVVNYMD

SEQ ID NO: 153568 - protein, 456 aa, Heterodera glycines
MYKFLKRVKRFDKVSLHLLLILFLGCCQINATNEKHTDKKTEKTSTKFQIGPIGLVNVTEEDQSERENPSHQSTKTLKIQDAKHFVEQLQIPITNLTSRHDPDQVTTEIPITEGSGDDKPMTNSITIPINRTNYQADSKTKEIPIAGDVDMKEPNEHQVADKQDQSPIGGNIRQLMMAELDETSAKDNQQKSGNNDNFLSKSSHSSKSFASHATNIGTPSTSMALSIKSPKVGSKSSLVAVPKASGQLALSKSYPQEKHHGISKFFKFSCSPPKQPDPNFLSNINIRTKSFRMTSRMPSLDNATSKKSLARMYSNQKTKKPPLPPLPPKPSPSASFRRNGPILGVHEGSLKAVGSFREQIEEQKKYLIPADRNSGPTNLAVDNPTKMITMLKQGNFLDLEPNPNAEELLDEMDKCNKFSIGAMKILRIQNSAQTKINEYYVFPEPISGGATSRVIL

SEQ ID NO: 153569 - protein, 386 aa, Heterodera glycines
FVLKKVLDVSICLFNHFGFRHDKEHTLREFHRQYRHTLREFHRQYRICICGEIGSGGFGRVYKVTYRLADGLPVAVKSIRHKRVNGWTMAERRIIPTEICFIEECQDVQGVVRLIGWFTSRRRRGFLIVMERPANFMDLFDLINTFGWLEERMARGLFVQIVDTVVELYKKHSVIHRDIKDENVVVDLDSGTVWLVDFGAAELLERANSPNSSGTLSYSPPEVFKRDCFYPLEGVFKRDCFYPLEGTVWSLGILLYLLVVGKPPFRNELQICTGKLRFPRNVSSECRAIIRRCLCPSPEGRVSLEELQQSEWILNNETTDSFFATFEAQWRKRKRVNKVLSVGIGEQTDKGLFSLIFFLKIHITRFGCFEALSTNQASISTNFEPL

SEQ ID NO: 153570 - protein, 150 aa, Heterodera glycines
MHPQGQQQKQQQQKQQQQQKQPKHSPHSIPIVSRMGGAALSHPHHSQPYHHQQQQWSPGAAVAPVADFGPSSAPSVSGSIIFMPSVVSGDNAGGGGMGFSSTSEFSSRMALLIRDGASVYLSASSSNNDDDENESDSEISPNCWKEELLK

SEQ ID NO: 153571 - protein, 45 aa, Heterodera glycines
MGKMLNLGGNLRRRARIRSYFGSVSNPEPGLEQKFENSIFRTSQF

SEQ ID NO: 153572 - protein, 84 aa, Heterodera glycines
MKKDERHFLGITFGFAVKQQIKLDRSIQWEKGTYAYESDGYLLINGKGKGINAEYSYGVGDTVGIGVNSATRQLIFTKNGLRLG

SEQ ID NO: 153573 - protein, 337 aa, Heterodera glycines
WRCACACANPVAVPRRALGGFLMQFIILLLITFFSVCFILLKLNFLSRFLDAISLFTPLNTPSKWRQVIHDMWPFANGSYVSGRAVTKSREVQVVVVCRFSNRNFEKKCFHQKTASFFFKNNVRVHHEHRNCCSRDLCLQMRGGRQAGGEHRQVTSRSGHRGGGGENENFKTKTSFTPSPNPPNPLGKSVKTKTSFTPSPNPPNPLGKSVNSERFFNLFFAIFLVYHLQFYPSNVSFLSGLWEKEFERTIRTYKSPYISFTYFHSQTLAEEAKRNAHTLVLHFVFAFFILICRRCTTCPICRAHNCYIDWTLSKPFLAILGVVNAGMGIVTAIGLLN

SEQ ID NO: 153574 - protein, 101 aa, Heterodera glycines
MLLSLRPSTKLGDQSINLNCFLIIMFKNDDGEVVEFDDDVLKAVLNKALLSDSAAQAQAMDISFRPHDYLVGILEWISRDLIPLFYQIHGYPGFDFLKFFY

SEQ ID NO: 153575 - protein, 51 aa, Heterodera glycines
MCQCMCDCLLLILCFIFPPIAVLMRQGCTIHFCINILLTCLAWIPGVIHAI

SEQ ID NO: 153576 - protein, 335 aa, Heterodera glycines
MPTRLRRFAICVGVDEENGTCLMVYENDLNAIEVRMVFSGVQIGKWYRFDLAKGTRRNWEVAEERLPTRIMPRGDAGSGGTRGDRIQLCLPIFFVPNFKCFGCTWRVTSPTSFNDKMHFNFVSPRLEAPGKINFSEERLAEWNIRPGEQCFAFLTLYYKICLFKKWMPLFRDCQGPGPSIKPPQWTLDAVEHFHRVNVDPLALSVLSVSLGASKEWGILLDLVIESEDERNGMGFILCLRDGKFAFGRILKTEGHNDSCWRANVGDTVGFSLIDVDCFNYPVRLALNVIAWQSPAFTSVDSDVLSDQFPQESLPEFPSVRLISKSTGKMAQHLVI

SEQ ID NO: 153577 - protein, 89 aa, Heterodera glycines
MSRICHFLSEKKIKPENADFFFCITPSSYSNFCCVFNLYCLKIKIRLYLAIVTFISALHGCIVSLGLLNSGNLHGDLMITCCFIDFFMV

SEQ ID NO: 153578 - protein, 95 aa, Heterodera glycines
MPAQKRRRHKILWTRKVRESLCYALLSKSMPYVMRYLVKSPLCHALIESVFFGFRTRSQSAGGPSRLAPCLDEARKVQGWAKHEKVQVIKLKSKN

SEQ ID NO: 153579 - protein, 57 aa, Heterodera glycines
MPMLVAVLLLATLITMNMLMLTNGLCEYNHTLGWCQNDGDCLKNCAPVAENECDCVS

SEQ ID NO: 153580 - protein, 107 aa, Heterodera glycines
MPLLSLDTLTIEHIVWPISNGLGLVAFSSCTPTSVFFNGILPLLGLNLLTFEYINGLFLMAYSSCTPVLFMCSTEYRKAFCKYLCRNQYGSNVVVPLLNMRSSQIRS

SEQ ID NO: 153581 - protein, 221 aa, Heterodera glycines
MLHEMGLELVYSKSFPDAIGHFMAQRGREARQLMESMNALETVVDARRLETEKGGVEAAQREYGAALARLRKSSGTPTTDGEGDSANDKDGSGRNEGPTGWGRPHNQQQQRQWHQRQQRPVETTVRFFEAWGNELFSLLLTPFIVQGTLSTSEWQVLTMYRVFAFRRRPRQCQTDKDDDTRGKNETEEGQNGANDDEVAKTVTEATAEEEDYANEEKKEEE

SEQ ID NO: 153582 - protein, 104 aa, Heterodera glycines
MLGPSPQHFAAFAVRQPQLSVSARNDFGRVPSLLPLLLLLVHLQQRVEPPTVAFANPAKAKQMPQQFLHRESDREPKWKRIKPSEWMPNCAVNILNNPINAMNL

SEQ ID NO: 153583 - protein, 456 aa, Heterodera glycines
LLIVLVVFLFLFVSIINLHFFLLKKFSLANGPTNAFVLFCPCMGRFGNQMEQFLGAFAFAKSLNRTLMGRFGNQMEQFLGAFAFAKSLNRTLVLPPIINYPPGAEGMIEFDQFFLGMIEFDQFFLVPPLAQFHRIVSLRDFSHGIAPMFCWSPRPGLANASLLGCHATEGNPFGPFWRYAGTHFVGEEYFGVKTGGFDTQRETIREKWATEFPAHSSPVLAFSSAPAAFPVRPDHRFIQRFGQWNDRIKQKAIEFASRNFGHGKAFVGIHLRNGRDWVNVCQFLREEKKRQLFASGQDWVNVCQFLREEKKRQLFASGQCTGPEEENGPLTADACDPSMDIILEEVRFHVVRLSASAVFVRFHVVRLSASAVFVASDRDHRLAQIGAHLAKSALARHRKKCRRMPMDLALLGMADHFIANCVSTFSAFVVRQRHFGDEQRHRSVSFLAFPNAAMEL

SEQ ID NO: 153584 - protein, 187 aa, Heterodera glycines
MANFSPPSDNTAPKKFLSDLDQLQIPKEIDSDNSIPDYAKLLIKQLHSLLSTASVLIHSQAAAVDAVEEERRLRTVVVTNVPESISDKAAERAREDRAVVDEILNATDVDQAPIVFRVGKRMDGRPRPLKMEFPTKHAARHVIRMRGKVQALNGLHNVRVRESMTKEQLSERRKLIEDCAKKRQTDS

SEQ ID NO: 153585 - protein, 412 aa, Heterodera glycines
MGAKRIEFKIGDQVQFVNYQNGKTVWLFGKIVAKNGLILKIQSPQLAHKIITRQANAVRLSAATGTDHEWSNDEVIRPLQQYLPAPVHSPVRSPQGHKQNTPSPDHRMQPQERTDQRDQQQETEEQTPELRRSKRTTKKVRFLSPRPTGQRHEIRDKVKLEHDGALYVFDQLSADGLKKFWRCEFHGPSDKCKGRLHTDLNNVVQKLVGVHSCDMNAAHVECQRLVTGLKRRAAETCEAPATIRAQVLQNTCTPVLAAFPSKSATKKWVIKRLRRDENAPRTEPLNLEQLEIPNTYRIYKRTEIGTISIGDTGVFQIQGQNGPQRILIFGRASTADWAHQMSDIYADGTFSLTPPLFSQIYVLRDGWVFPICYCLLTSKCAAIYTRMLQLLLERWPNFAPQTISMDFELAMV

SEQ ID NO: 153586 - protein, 46 aa, Heterodera glycines
MNAAHVECQRLVTGLKRRAAETCEAPATIRAQVLQNTCTPVLAAFP

SEQ ID NO: 153587 - protein, 34 aa, Heterodera glycines
KVKLEHDGALYVFDQLSADGLKKFWRCEFHGPSD

SEQ ID NO: 153588 - protein, 232 aa, Heterodera glycines
VLGTTLPQIAWNKAGIAKPGAVMLSVEQPRDAMRVIEERCAERTCPLFIVPPLTDYRWPSSTGGQRPFELGIAGPHQHINASLALQLARIWLLKRHGRHIEADQNGTEIANKSSDTNSNDLQQLLQLDGNNTVDKKEPNFPTNRLNAFALTHVLCPMVPPKCRCHRHSAVRFSHSHFVVPLHRRPNCVSDALDKVRAVAVENSKGSAGTELHVLVTGSLLLVSDWLGGGFFR

SEQ ID NO: 153589 - protein, 46 aa, Heterodera glycines
MTLMLHNIRGLFRQKLSGCLEMSSLSSFWFGPFAQREFGHFSFEKL

SEQ ID NO: 153590 - protein, 203 aa, Heterodera glycines
MSSFAVPFLITLLLVTLTIQSDNATTVDDQDGQMAAAAGDKRIFRFKREMANPIATKKQKVKLSYEGHLYTFAKMSSDGMTKFWRCEFKNSTDKCNGRIWTDLHDQFIRLATPHTCPADASRVDAQMVTTAIKRRAIATFEPPSVIRAEALQNVPSPSAILVSKQAAKDVKTKYFSYNKNNSNLVNQKSSPRSECAPRRSCKS

SEQ ID NO: 153591 - protein, 70 aa, Heterodera glycines
MHLKLCLLFCSILFLIILTDPIEAENKKLEQKSFEEIFGEKLEEKRYGEICKKIGNMSPKNVIESKKNHF

SEQ ID NO: 153592 - protein, 213 aa, Heterodera glycines
ESKLEGPFNFSAVPLHGNFKDVEAKVNVTNHIKPVWICSINTHKKTLAYSYEVPFQNASKLIMDKLMRWYHSENHDKQFSLVPLPFQNVGRMREALNKELDANYDGCRDFANGDDALANVSLRLHRLPIPSYMNKQMATITVPPFLTTLLFVCAFSMLKDIAVERESGIMAYMSVMGLNQFAFYGSHLLIAVLKMLPFALIFASLCVIYRLIE

SEQ ID NO: 153593 - protein, 40 aa, Heterodera glycines
MPKWGDNDCTMDGPTKFEQQFEQCQHLFEWRKLHLNNLLR

SEQ ID NO: 153594 - protein, 18 aa, Heterodera glycines
MPSCNGDRHPQGEGEQRR

SEQ ID NO: 153595 - protein, 428 aa, Heterodera glycines
LQGGSKANRRTIGIHFHLFRLWHSKGPPVNSEFYTTWFSMKGPPVNSEFYTTWFSMWGEKSMVRQEIGPVLKTMDYMWAENASFSLYMIHGGTSFGFWSGRETNGPVITSYDYAAPIDEAGQIVITSYDYAAPIDEAGQITPLYGAIRNWIGAKKDWPNPPLPLPKNSPSKMFAVKLGDFIPSKMFAVKLGDFIALTNSSSLSSSDSRQRCIHSSDGPLNFEAFYRDHGFVWYSASLETDGKTLEVPELRDHAYAFLDGIFQANSKGKNVKTLVFLIAGQFESQRNDVTNVENIGRLTYPLTNNFKGLFSPPFIDGKVISKRWIYPLTNNFKGLFSPPFIDGKVISKRWIQCGVNLDNVYAEIEKRMAKSKNRKEVGKRGIREKAFANAKNDTFLDSRGWGHGVALANGFNLGRYWPTQGPQVFLNFE

SEQ ID NO: 153596 - protein, 170 aa, Heterodera glycines
SDAYDLLFSDADDMTANLPTSSSSLAASTSGLANHNETEVLLLEHAIAESLKLKENEDIELAKAISISEVRNDFGNGNGHELLSIDPAEIDTQKALMKQIKKDRKMKMRHKRGAFPMNKLRSHFIVSGNTNEKIDNVFGIHIGIGIIVIILGEGNRVSEGLSNDTNSVGF

SEQ ID NO: 153597 - protein, 58 aa, Heterodera glycines
MHFPYFHQIFVFALIIVNRAHGQAADDNQIDGTGYENYDSDDLEALGWSFYLFSKNCT

SEQ ID NO: 153598 - protein, 21 aa, Heterodera glycines
ISNLNIFIEQTTGTLVLLCGA

SEQ ID NO: 153599 - protein, 77 aa, Heterodera glycines
MARKVKDCFVPEVNLLNDATEKLAQASAQRPIRQLLLHLYCSKAHPPKKDIPNDEDGMRMRSEGDEPSQQQKPAIVQ

SEQ ID NO: 153600 - protein, 73 aa, Heterodera glycines
LFSPPLLLRLNLNFILGLNIVYTILFSFVPSLSIISPSSFPIFIVFFSAGASVYSRHRLFQFLITCIKYLISL

SEQ ID NO: 153601 - protein, 555 aa, Heterodera glycines
MPVPLGALPGAFGLNVQDKEFFPHLANVEANYGHILQSLPPKADYLYGGMTPDRQRRFDQWYAEHRHQQFDLCEQLAAYCTNDTRILIEALVAFRTEFLTISDPMERHGCLDDDDDDDEEEEEQDDDNAFEVIGGGIDITWEPMTIASASMRHFRLNHLKRDQLAIVPECGYDTTNTQSLVALKFMDWYAKKNGVSIQTLHSPDGEKKIGQYTVDGYIAATDTVIEVNGCHWHAHDHPRHRFQPQTVMANGKTAQRIREDDARRMAFITSQVQQVLVFWECEINAEKRNNDEMKRAFAQYNDSGPIRLKDCYHGGRVGPQRLHYEVPEGWRMKYYDVRSLYPHTNAVTAYPVGHTTRVNIIGEAEQAVDWRRADQVPVRGILKVFVVPPHHVDVPVLPVKFDQRLLFPLCRTCALQHPHGAVNEDYECTHREDDERGWVSTVTSIELEEALRNGYRCTAYYRSVEWDDTRWSDRVFRGYVAEFMAMKTHASGFPDEIGTAEEDQQQFIEECEEKFGIRIEREKMVHNKAKRTIAKLCNNSLWVDSLYATGCPKRL

SEQ ID NO: 153602 - protein, 406 aa, Heterodera glycines
GGWPGGQACLPAIQMAFACLPAIQMAFEDNMEPDLLPNYALLLHQFNSQCQPGLTAWQLFQCQPGLTAWQLFELLYKPPTKLILLSGCSPVTTLVAEAAPVWNLLVTLVAEAAPVWNLLVLSYGASSPALSLSYGASSPALSNRARFPTLFRTHPSANMQNPTRVHLFEKFKWKRITILQSVEVHLFEKFKWKRITILQSVEEVFDSTAKDLEEQCSEKGIRVERHSDLEEQCSEKGIRVERHSFYGDPTDALKPTDALKAIRRQDARIIVGLFYVTEVRPDICSAYLHGLYGRRYVWFMIGWYSDAWFIPPEEEALNCSVWFMIGWYSDAWFIPPEEEALNCSRAQMERAAQFHFTTESVMLSRDLQPAISGMTGEQFQTRLRRRISTDPARTGGCPEAPLAYDA

SEQ ID NO: 153603 - protein, 119 aa, Heterodera glycines
MFRGPFTLILSGATGSGLIGEGVETFNGIPDMNKIKEQEKPLLLILDDLMLNMQNNFLDLLFTRGSHNWNVSVIFVTQSLYGRDIKTARANAHYLILMRNPSGQLQLRSKGEYSVPKEA

SEQ ID NO: 153604 - protein, 151 aa, Heterodera glycines
YIVSKMQKPIIVNIIALANLGTGIKLNSLTITECEFKYNPRKFNAAVIKCTTPIKATALLWESGKMICLGTKSLIDCENAIKKFIEIIKGSGCPGASYTGLNFKRGKSMTALIFWTGKVVITGTKNNSEIEEMYHHILPYLKMAQKKLGRR

SEQ ID NO: 153605 - protein, 79 aa, Heterodera glycines; identical to SEQ ID NO: 128068

SEQ ID NO: 153606 - protein, 112 aa, Heterodera glycines
MSLERENAYKCELLYPLQKWPILLRLHSNCLPFLSIHTLDIAAKYFVVAETDSPADYLLKFQILIVIDKNNHPFEQMRDLPLGKWFNFIIFGTLEFGRQFFVNMTVKLGKPF

SEQ ID NO: 153607 - protein, 38 aa, Heterodera glycines
MAQPNTPTVEVAQLTRIRNRPILYNWLPVRVHDAYNSF

SEQ ID NO: 153608 - protein, 83 aa, Heterodera glycines
MYIDEKAVATATTNLKKGRTMPPRAAETGTFVTDRVGAVVFAFFSTTLSQTMQNGEFDCTTICCWSTLRNDFMRSMLINKCFV

SEQ ID NO: 153609 - protein, 201 aa, Heterodera glycines
MGRKTMTLTAVVVMVKSANITHSEFGSRTEQAFHLSFNVSFLLLGPAKSYKMIPSPNSTDQFSILWLAVPAAEHATENHPNRRFPISGQFSKIGTVSGKELAGANGFSSLMVVTSAKIEESKILKIIRSNLFFFFIFQGRCHYVLRSHGLYAGQRADVGDEPANFFAVQANVMELEMYIDEKAVATASTNAASSGNGNICH

SEQ ID NO: 153610 - protein, 99 aa, Heterodera glycines
MKRLLLASTEISSIGTPFSMDIADLLDEIRELHIFGRADLMTQEQIDNFSNKCSMAISRQRYFFSSERFMRYKGDELLLKIGEHQTLLNSIFDRQIGFL

SEQ ID NO: 153611 - protein, 189 aa, Heterodera glycines
MFYEAVRQVLDNITQMVSPSHTMNSNGTMAQSNNQQQKAPLSSAPPPPPPPPPPDFKNLLAGKQQQATFADKLRDVKLRKIGFVVASYGGTPSTAGAASAAHDSQLTCEPVVKGPTQLTCEPMVKGPTSSAHNDIANSEARPKATTTSSDFERMKGELLELFSNELQNFKRELAQTIRDEVAKLSADRR

SEQ ID NO: 153612 - protein, 36 aa, Heterodera glycines
MARKDFRFPTFLGSEFRLPKFLMKSRKFFKFFFSQN

SEQ ID NO: 153613 - protein, 24 aa, Heterodera glycines
MNSHNKIYPMINLHEKNKGSTHSD

SEQ ID NO: 153614 - protein, 62 aa, Heterodera glycines
MLDTKNNNIVGHVFGFGYKRLVLDKDLNVEKKLDFVSTGKAEIKRHNEFQPASISSEFISFF

SEQ ID NO: 153615 - protein, 120 aa, Heterodera glycines
MTHPMKRPIITNAKETPKIVITVIENAVEKFEKLIYYECVENVLLLANHFGLDTIENRSVEFLVEKSKKSAIQKFNLAHQYAIISMKKKILKDMTRKDFVVAGKNIYRDLLEMEKRTLEN

SEQ ID NO: 153616 - protein, 44 aa, Heterodera glycines
MLLKFFDTAPQPNPNAEMPPQDEAGPSTSAASVEEAMEPPPKTG

SEQ ID NO: 153617 - protein, 133 aa, Heterodera glycines
METAVDQFKAFLDEQTMVRTLLSKKTKAHLLLHHFVPFARQHRFLGLLDEQGDEALHSVWRRLEQLWKTMPDSEQMRQQLEHHFVSNWLLDTGRLDELKLNSSEMRNYWLGQILAIVNQKKPIFFVLHLQGIF

SEQ ID NO: 153618 - protein, 46 aa, Heterodera glycines
NHRNTSIACTGNRTWDSPFGDLLTDHFATHTNLFWYRSSVSGRRVY

SEQ ID NO: 153619 - protein, 107 aa, Heterodera glycines
LLVNRLSEHADNASASVAADDGVQQDIGPLLIRCSLDIVAEAIMGVRLDAANAKCREYVQAVKEFNDLAHIYSTSALFTFIPISWHLFGRAKETKKCVAKLKQFTRG

SEQ ID NO: 153620 - protein, 57 aa, Heterodera glycines
MEHALDREELREQVDTFMFEDRIMQEMPRHGLHINEMDMDELDLDLDELDISMIEFG

SEQ ID NO: 153621 - protein, 112 aa, Heterodera glycines
MRLVGFYQQIVVSESAEVWQCVSGTSHDDCKNFFAELGAVLRLANNSLLIEIDTSSTIGGEDIFEFSCDHFSLFGVNSIIGRALVLRKPGEGSVPCKTGEGSGIFLYYLLFI

SEQ ID NO: 153622 - protein, 162 aa, Heterodera glycines
MLRAKIAELEGATSIASFDVLAPNGNEAINESDTCFGKFGGVDQQLKNFRGQFVKLEMELRETKQMNVVTNLENKALQAELKHQKLLMLTEQKAMEEKIAKMEKEQQKMADQLAQRQNDQQMKLEQFKQKNATDLEQLNKSQEGILVKIDEVETNERTHNNY

SEQ ID NO: 153623 - protein, 50 aa, Heterodera glycines
MFFHKNFELLSENGQGLGPEIHVFRDSRYFVQKNRGPEPRVSAKSRSLQA

SEQ ID NO: 153624 - protein, 151 aa, Heterodera glycines
MQNDQKFLLEKVNELKKEQKQRKPTTYFSPVICLLCNIFTQCWYGFSKNVKTWTKTLACPPLSSPADDLTVHIGNRKVKIEKKLVNGYSDYGVRCLVYVPIADGPSNAQRGNEEEAAAVVTLNELGIDMEQFMDFLEAISTNALLFPILPN

SEQ ID NO: 153625 - protein, 96 aa, Heterodera glycines
MEKTSDVVYFVSINNRPSYIRHHIYDETKGRNRKFIRGATHEFREKFAKMEMELKLAKLELEIKVLEQKLKHQEMMVEQKALKEKVIKIEQKNEKK

SEQ ID NO: 153626 - protein, 90 aa, Heterodera glycines
MGEIWQAERDPIMRIMADQLCELCHGMFSHVNPNLRAQCSSQCYKNAQFRKCLEMYTALPEGHPGGTVETKRGKGGGRERNRTMAMGAEE

SEQ ID NO: 153627 - protein, 104 aa, Heterodera glycines
MNWPKSNWNGQKMIKERPANFGRSVKRAKKHRINKPINQRHFFLDKRPLVRQTLYLVRHAEKLDIIDKSWSNDKNELEREDSPLSPLGLRQADELGKWWANWGP

SEQ ID NO: 153628 - protein, 112 aa, Heterodera glycines
MASVRDQGIYGLLIVVFWHSENSTNLSTKRQLSVLDGLRFVHCSDDHSRGVIKRDEQKLLDWMGEQRQCFGDAQKHFSLPNRFFRQIRSKINAWNAKLSELKKCVRISKLSA

SEQ ID NO: 153629 - protein, 115 aa, Heterodera glycines
MADNQKQQRFKGKVVIITGSSAGIGQAAAIEFAKDGAVVVIHGRDGQRINETEQKILALEVPADRILKVQGPIEEEKTAQKLVEETLNKFGRIDVLVKYLKVEEKMVILYKFNHK

SEQ ID NO: 153630 - protein, 352 aa, Heterodera glycines
MPENNSQQRQVVKQYQQMNSATANERLLEHCESAICSGDAEPMERRTSDAGVNEVSDADGTSAEDCSGAECQSSGNQSPILPVESSAGTNALAAAACKALLFGQMDSKVLAKTLLSSSRATNICGAIGQQKDSSADLSNPLQMQATNDEIMRILQQVSSLTDQQQQQQQQQNHQNDASSTAAVSAAAASSKLATQSRDLIAHLASNAHKFPASTPPAATAPNWTHGSNNGTNPLLRISSANGTPMAEQTHLHNVQQQQPQEVVGQLFKEMSPATSLTTATTTQASNFGAGDDGNHQQQLVANELKELRNTVADLRTSAGSSNKLEQASQKGNDQKKQRMAKKKPTKDQNQLE

SEQ ID NO: 153631 - protein, 92 aa, Heterodera glycines
MAGTVNRIMAHNSNTLCTPHLAATNRRTVAAQISKTAGPFSKNPQSWQCWVFKNFSYKLGFIDDFMARVLGTLMAPAFSCHWASIRLIGSEG

SEQ ID NO: 153632 - protein, 115 aa, Heterodera glycines
LCVMCEVFQKRMLQQQQQISLVPQPGDVSQQHPQHKAFVCEICGKAFRFRSNLAEHRSVHTAVKPFVCKFCGKSSRLKGNLTKHILKHHKIEQKEYIGTEDYIIKKGKKSVKDPA

SEQ ID NO: 153633 - protein, 180 aa, Heterodera glycines
MVLVSEFCAQFLSCPTKSLRDRLNHPEDRVRVLQQLIGKKVQTTYKDRNGMRKSFLVGGMTERGAAFEPAYGRLRKPFNINVAAHFYARHRVKLHYPYVPCIIEGFTRGEDRYYPMELLEIVDDKKGGRLFGRLFTEIEAQEEEDTKSEASHSSNSSYLQFNGKGCKWYESIDEITNTGR

SEQ ID NO: 153634 - protein, 561 aa, Heterodera glycines
MTSNSFFVFLPSNVSDYPDNQPNKYRVRLPKPLHFSGSWVCGLHSISYPYSWHSTIGTLDDQWIDIHFTNLHSVDEDRQRVIRVPVPQASHKKVEQLRDFLQATLKSQEKVRLKPLAHEEGYFDKPVVLGSPPHAKRLKRSTIDDLSSLPSPPRYDETDEQQSRQQQQPQSPPRFDETEKEDKKVKEATPPPVTKQPIPPAPTLAPPSHPPTEAPKAPKQAAPKSATVPPQKPSVTPATTKTSPAPAPIPPIKQAPSAPKPSPSKTAAVPKPTPTPTPASKSTIPTPASSTKAQNIPKIPPTLAAKPKEPNVAKKSTVPTTVSTTSISKLTSQIESSPTTPKPPPPPIKPIPTSIPAPSPPPKSIAKDIKRSVEAPNESKKESKRLDVDDRFFGGLAAGDEFPDDDDKESEWPYDPFKNIVDDVEIQYLDDFERFKVVFKNPVISHLSFSPQLGYVLGFENPQHVGPQEISKYGCDLRGGFSSFAVYSKGLTENMIVGNSLSSLLRVVSVSGATPGDYNEKIYDSPIYARVLPREISEIEIELRTMDKGRLVPFAYGTTMV

SEQ ID NO: 153635 - protein, 356 aa, Heterodera glycines
VFNVKNFKLSFEESLKERREIKTKNTKFTILLHHLPHYHPCTNDQTPPPPPRSIQSTEKGSTTNKVEKIRLATASTIASTSRKERTKNRARPSSTSSQCLQKGTESTSSSSSSRVTSPKRNQNLKLTHERPRRVRFPRAKTIAAGFMTDVQVDLADFQALSRHNGGHRYLLVAVDVLSKRLFVVPLKNKRAEEMLEAFKELIEQMPMAPHRIFSDKGTEFKNKLVKEFFEEHEIEHEPVHSSVKASVAERAIRNVKQRLYRYFAEKQTLNWVDTVQQIVDGINSAPSRVHGMRPIDVNFRNAQKVWERMYGQQSFVKKTPRFRKDDFVRMSREKGQFEKGYLPNYGDEILEVDPSA

SEQ ID NO: 153636 - protein, 26 aa, Heterodera glycines
MKASFGRWADQMKECFGDGTFSLAPP

SEQ ID NO: 153637 - protein, 100 aa, Heterodera glycines
MKNEYKQKRKYSPNEWEKNYAEICKKVRVSHRTIENWKKQFGIRCKRITDEQKIEKMKIYWKIKKENPKMSDTEIEKILKIGKTNISKWKKHFVEEILKD

SEQ ID NO: 153638 - protein, 311 aa, Heterodera glycines
AIIKFGVSKCLASLNCVQFVRVCRRRNSLCAEAVVQRFHCHRNSVRWPRVEAEQCGGASGPKRAPGTECEKCQEDATTTTTVPPSDDGKGEKPTRLTDQQFDQMQRVAAGTDEERKMDIDLKDWSKEERKNLYQFIRANFDASALDTECVDGQLTVRRMGANGRRDVDASSVDAAQLGARIAQWTRDGFLNYFGTQRFGTCGVDTAHIGRLLLSEQWEAATAALLAPRAEANGSLNACLRCYAGSSANASAALRMLERSNASAGATVERALLSALAKCPAGHKAAILALHRDMRTMYIHAYQSLVFNSIVS

SEQ ID NO: 153639 - protein, 114 aa, Heterodera glycines
HSKRQYFAKPSHCHGTKDAKAIEQIGSGGIGTNKGRIGQEGQQNQQTVGGIAGGEGRPFNAEGRPRGGSTGLEGMAMPTTEEWHCGGRAMPVTEEWQCQRRGIAMPMTEELQCQ

SEQ ID NO: 153640 - protein, 181 aa, Heterodera glycines
SCGGPLVCPSGVSVATRDPFKCPQKASTAKGRRYTDKLGRSLYALTLAAKQKDPSYCLKNSRSDVKVIKYYEVECDQAKNTCAGMIAVSEEAKALYVIYRDSTIDRQLLQVEHFAIAAQFGAWEKFVNGSGVMTYFHGAFRSLFLEGGMKSQLMKLKETHERHRIWVGNFSISMSLSFLSL

SEQ ID NO: 153641 - protein, 215 aa, Heterodera glycines
MLFLLFIFVFLIINNSTDKTLSVNLCKKCRPTFAEIFGEEWQNEIIIGGDENENETDQNANFHQNDQNESTDQNDQLDVQQKIEIIHKFHAIREGIKKRGKYSAKFWVKTEQKIAEKLGISRQKIYKWKKEFGIYYYKKKKQEFIERIDEFKRMSKNGKQKQFAKELGISEKTLSKWKKEFGIEIGKSRIRFTDEQKMSKMNDYYEMKKANPFFK

SEQ ID NO: 153642 - protein, 89 aa, Heterodera glycines
MVRDSELVDEHAVRIADNVFKFVDWATFVTARRHLKSDPNIRHLFYSLDPATAQQLGIALEPKITTTVITFWSDVSTRYQSIPYEFFEF

SEQ ID NO: 153643 - protein, 53 aa, Heterodera glycines
KSKAMEYFQLDRRHGDELYGCLLLLLLSMAFTICATTFSQMQRTSVISQMHEA

SEQ ID NO: 153644 - protein, 153 aa, Heterodera glycines
VSSKVNESESYDATTLGKLMNLDAKVVEWLEKGPYTDDDPLLVLDFLGPFINLHGDYNQNKAFLVQKLVAAGGAIIAANVDNVIKFATWDMFYEARRILMADLEVRHFFYNPNPAIALQNNINQFPIVSTTVVTFWSDDSLKLKTQPYQFFEF

SEQ ID NO: 153645 - protein, 85 aa, Heterodera glycines
MSTSEVKPEDKSMDETSKNELRAEDTSIKDKGIGSVKETETNGAITTDNEPKIHAEKNETGDAAVGQKSTEEQFDKTDEKAEQQN

SEQ ID NO: 153646 - protein, 113 aa, Heterodera glycines
MPAKQNNDAKQGKVNDDGIFAVQQQHSADDTTDDGWEEDGIFAQCQKLPPCQQQKSSLLLTPAATSSSSAMVDSVISCHSSLASTSAFSTQQRWHRHDTIYICPCICFLISKI

SEQ ID NO: 153647 - protein, 79 aa, Heterodera glycines
LGSAAPSYAICSFDGHAMRGALLADGADMHLLWAALSIYGMHFDQPMAFHLFSIHKCGDDDGDETNVMMTGQAEQIVID

SEQ ID NO: 153648 - protein, 213 aa, Heterodera glycines
SIDARIFKNFIRNYLQVYVTRSYLQVYVTRSVVGGMKRRRFGHISFVCSAAGQLAIWGYSAYSPSKFALRGFANALHMELLPWNVGVSILFPPNTATDGFRDELRTMPPQIRAIIRAISGTAGLFQASDVAARLVQAIEKGHFATTVGMEGWLLGTLSAGASPEPNGIQAFLQVMLGGLLRGVLLIYGHFNRLVRNCLHEAVETAADPQDSSK

SEQ ID NO: 153649 - protein, 40 aa, Heterodera glycines
MCAVLSEERKGGGGGGKKRMSKRKEKEEEKEGRGKEREEE

SEQ ID NO: 153650 - protein, 292 aa, Heterodera glycines
QQKKRIRLPLANPCPIQKIVWSSFDYLRGPELEFVWEADFLPAPTAEEGADGEQQQNYGQKSYCCTNGGTDGTTNAILEDAETVADVSCTNSSTDSSFSKNTGASGTSTAQYEEIDEFYNNELLQLSGDTFHNAGQFLVSSSTSEHCAGGPSQQRLTDELSSLNLSCQTDDTLRAVPSASRRTDNATAYNSQNADGDGEVVAVTTETDFATITTTTNHNNPPSSSSCADAMMKCCSIRMTSAAASKCAAAVPAEGTCSTITFRKRRRSSSSARSMPTRRPANSAMGTVPIAK

SEQ ID NO: 153651 - protein, 190 aa, Heterodera glycines
MYIETAQENLGKELTDQSVRADLLAGRQNLCKAISLLEKYNGKWEAIFLRVKGQALQDEEQNYRDFKPEGKAFMHWVDQARGLVDTIEGALGLSELGDAIPQPNQPAQVVQQPQLVHQRHDVTLPPITLPKFSGEPREWPLFWKLFETSVESLQIEDFKKHIYLLGCLPEKSVTRRAIDLYPPSDENYPR

SEQ ID NO: 153652 - protein, 566 aa, Heterodera glycines
MGHNSQNCTSPRRCSQCGERHHFMVCYGEKSREGTSRGQPNNQMKREARKSSQSHLTMCEHAHKSVSGSEVFPDVESLSITTNVMTSVMVKKPHAFLMTRKILVRSKNNRRVWMEVPFLFDPGSQTSYASDPLIERLKPPKVTSEEMEVYGFGGERNGPMRFHSPVYSIQIRRTDGKCEEILLNRTERISTPFKMAEWNSEEFPLEEMDMADAMRFSREEPEILIGARHFWQFFQAKKEVSPGLFVIKTTLGPLVNGESDFGPELPNPGLSMMAIDESNQGQMPTAKEIEYFFNLESLGIKDDPNENDDQTAMSLFNKSIRRDKDGRYSVKWPWKEEVPDLPSNYRMAFSRLMSTFGKLRNSPDLMEQYDATIRDQLEKGIIEEARKAPGTLEHYIPHQGVLAKGKKLRVVYDASAHTRGTNSLNACLYRGPVILPDLVGMLMRFRCPKFPLLSDIQAAFLQIALEPEDREVTKFLWVKDVSKSLAPTNLITYRFCRVAFGVISSPFILAATLQHHLKGYDSPVANELAQSLYVDNTLLECESAEEALHKYAESKASLPHYLTLLV

SEQ ID NO: 153653 - protein, 112 aa, Heterodera glycines
GVFTNPIYCTIWVFTLIVQFVIVEFGGRWFSTEPLTLDQWLWCVAFGVGSLLWAQVVTSIPTKGLPKSLTIGGGEVEPDTANILSGDEGGEAREKRSGQILWIRGLTRLQTQ

SEQ ID NO: 153654 - protein, 279 aa, Heterodera glycines
VHFQLRPKVNVNGHRAEEVRIRFFHLWLPRVQQRGIRNHSEKVGRIQRNSLIVVLPFYRCKWMLGRNGHLSQFGSKDLDRLVREVIEPMASDGLRTICLAYKDYIADGTAQVEGNQLAFGGEIDWDDENAVISDLTVVAIVGIQDPVRPEVPEAIAKCKHSFETPKALLKANLMSVFLGQRSGIVVRMVTGDNINTARSIATSCGILKPGEDFLALEGKEFNDRIRDEHGEVCQEKLDQIWPKLRVLARAQPTDKYILVKGIIDSKLSANREVVAVTGD

SEQ ID NO: 153655 - protein, 80 aa, Heterodera glycines
MAIKYGQQIAKYGHKMAKIWTYIFQIEGVISQFFFKFAKCKVKRSKMAKYEKCQNMDIKYGQNAKIWTNMEIWTNMEIWT

SEQ ID NO: 153656 - protein, 44 aa, Heterodera glycines
MPSLLLNPGPSTMNFFSSSLPLPSFFFRNRKKCYDLNPAEESHQ

SEQ ID NO: 153657 - protein, 923 aa, Heterodera glycines
MFFKHPFTMCVAGCTGSGKSQWVDRLLSHIDLMVSEGPITGVLYCYGEVNDNVLRLQRMENTATTSSDSNTTEGKHSIRMCHGAPEERDVEREARATGGRHLLVLDDLMSGGLRCSFLDTVFTRGSHNWGVSVVLITQHLFTRELRIARNNCHYMVLMRNPVGALQIRNLGAQLFPGGALRYFLEAYEDATAEPFGYLLVDMHPTTEQQLRLKTHIYPGEMCVKRTEGSGEKRRPSSRKLAPSRPPVLSEHVRRHIDFFRQLKAARSSPTRCQALVAGASSEQLLCLVESALNILRARVPIQRRHLASLRQRASDVRTLSRVRSTRSARRLLLNAHAPSTAQTGRGIPTLVGLLASVLVPVLVQRVFETTSSTHCTHATHPRGCLSTSDGQPQCSGGDVFYHVHEQVATPATPIERTARKMVVASSKHMNDDERLIHYQQEFKRYQKLLEEEAERPLNVQLSQRTTNALRDTVLQKAAPATATTTPARPQRTTPLSRRRGLQQQNQAPSASSSSSTRPTKSSSSSSSDEQQQPLPQQTVAPQKIGGLPKQAEPRMHAAMAYAQQNPGLLGVGGEDGQQILHLAQGAYRPIRGSNLDTLLRYHFVGRHQQQQPRSSTTTPTASVAKAPPGYKTFVNNARDDLQMWRLLFPDERAAAAAAGSDSASTVGGQPRRHQPLRGQKKTGAGRFSLSRLLQPNHHHAHKSVQKTSIMVIGSNAVRSLTVESLLDPIYKDERSPACFTSVEPLLREAKRRHPDARLTRAEISRYLAGQRVYTLHRQVRRRFCRLPTLASGLHTDWQADLADFQRLRAQNRGYAYLLVCIDTLSRQVYVQPVKSKRSDDMIAALKRTFARCGYTPWRLLTDKGREFTASAVQRYLRDEAEVRHHCMETSPLWHAGMAERANRSIKERLYRYFTHRGTHAGTR

SEQ ID NO: 153658 - protein, 190 aa, Heterodera glycines
MDSFGTVAWILRPTAQTTGTAVGSMEFEEEENGTGKGSDGHGTLLFIESDDVEEEDEDIEDTPVATDSPSAATATVVDDSSDTVKGVEQQRSSEHTDVTDGAGGGGGSEGAKLLGGGEKEEVGGGQLIFYLPPLFVACSNAAAQLPVRVQRLFNEGAATPLPQCPRTTAYGGASATTLPTSYRASETGGA

SEQ ID NO: 153659 - protein, 155 aa, Heterodera glycines
MNHKKLEHEGHLYVFAKLNADGFIKFWRCENKNNKDMKCRGRLHTNLNDVVLKQVNEHVCGANPARVEAQRVVTGIKRRAIETAEPPSTLRSIALQNLIKRARNEGITPAMPLNLNQLQIPQQYQIYARNENETENFLLADSGTFLLNENGPPQR

SEQ ID NO: 153660 - protein, 145 aa, Heterodera glycines
MTSQVIGPALFVLHGKTEALIWLPRKEQHFFINDENVGSYKLGDWVLFDYNREKIIEQQKETPYETKVLYSKVVKQKFVQIKVPLVFFSDKHSSEVIAYSPGFGRVGAFVPNLAMDTMCFAWIALYVDFSAHNSQILYYVWVPNN

SEQ ID NO: 153661 - protein, 117 aa, Heterodera glycines
KTESNGEKKVIRCDLDKSPPNWAVTPIRNTVQAVEQRLHKILSALFKIELTAFVPRKWRPEIIAPESRMVPTNWFDEMLDFGMLLTEDMADKSVKVLAERNKVKNAIVRLTLLLLFI

SEQ ID NO: 153662 - protein, 146 aa, Heterodera glycines
MDAMNFSHTRLLTDEVLSANNHEYVLHPDDLSDHKNVHRQKTKRFKASENPIWKIGLYRKINDKEIECIVCKKPNKGCEGGRRPTKAIRHLKTVHKNSHYVHKYEELLKPTMEQVEQMVNKIKVENEAPRKCKAQVKESEQEKETL

SEQ ID NO: 153663 - protein, 236 aa, Heterodera glycines
MPITPPPAAEQHQRRRDSSPIRSAISSTFFADHSRRSLNSMLNSISSNSRNRSASASNASAPRPTISKRNEQLSDDGTTARPLNLTNCNKKCEAAESIIERLSYLGCSKMGDPTSENFWKPAKNARPKFAHFQSKGFVFVHEANPRHRKGPKNEIIYYIYFLFFFFMYTARALFCFAQAFNRRQQQSIGSAASSKAPSPSTPVQFQLPPSTEQCGTSEELFEFETLIEIKAQNFKY

SEQ ID NO: 153664 - protein, 46 aa, Heterodera glycines
QKNSVWAIHKNLSVGDPQKNSVWAIHKNLSVGDPQKISVWAIHKKS

SEQ ID NO: 153665 - protein, 72 aa, Heterodera glycines
NVEMQRTKGKHFSSNCVGYLLFFSPVIFHKCRMRWLEHLFVLQTDQLARLESKKHLVRSFLFIFERRWTGDQ

SEQ ID NO: 153666 - protein, 461 aa, Heterodera glycines
GNSLYSSLLKGLHSVLPGTSPKVENTVKLEAEPPQPHIDEPISKAESVGIPSLFESDQQQRTDDYNKWHMEFYGRPSPFLPGHPPVCQRPVPDSAVESAISVAAKYVALHGAYAEQRLIARSPYYTFYQSQVRQIQWKIFQQSQQNRQQAFHAPQLFTTPFGNIAAVPSPPPPSVAELVKVPSGRQMADTMEKGEEGMELKEAEPDSKQLERREKARLFMERILNERMAEKRRTKTNNKPNEEEDNCVTVSETASTSAAASVGGVAIQPLPSSALSPLALSKAISCLIDEQIKRTLGTSPPQAPAEARKKKKEKRREGEERRRRRKKRRTRSYSSESSSSSPSSSTDSNEEERSRKRRRRKSSKRRKRGREHGSESDHSEGDEEEKRRQRRKQKGQEEGDSRWTNRARRSSAIGECERTFAINALFKVLFVPVSVFPTVVINIGVGHVRHVDEGKEKIISD

SEQ ID NO: 153667 - protein, 135 aa, Heterodera glycines
GFNVSMEHQLRGLASGDTLDSDARETIREAALFMYHQYLSQEVNLRVPLSEAIVNKFLARLRNDEPSDGWFEQIQEQANKPSPKRNPMPILITKHPLQKTRAVRSDARPTRNYHWRERSRCRVGRIRCCPMSQTN

SEQ ID NO: 153668 - protein, 304 aa, Heterodera glycines
MTQAITRVPLSEAIVNKFLARLRNDEPSDGWFEQIQEQANKPSPKRNPMPILITKHPLKIVEILKSEERFFPAFKRHALYGRMLDQLGITTGGSEVAAESAESAFPLTFDEYSSAEFVELSAIANATNGTSVRIEMLGVGQQGRQLFALYNVRVHRTATDLRTGSSSNVTRRYSDFHSLHNLIVVKFPNLRTLSFPGKKTFNNLNKTFLEKRCRALNQYMRCILQPSLWAANPGLEQLVFDFLTQKLYGGDKEGLSGAMNTMLNPLMSGVKAFGTAAAAMPSDLIDGIGKMGSELNKAASNVFK

SEQ ID NO: 153669 - protein, 244 aa, Heterodera glycines
TFSSVQGSSTRHLILSRGRSVSSSTGNLPDSGRVAAHLDENVDESIPLRVLLLLVDEVFGLRESIPLRVLLLLVDEVFGLRAKNQWFRRRLVSLLRHIHAAVGQSINRRIIDAVNWLTSEEQVAQYLVAFRDSFWSDSAADSFWSDSAAASSRADNSPQLEQKTRFLARFLVLSAVPEQLRLFVGSSTVQSGVETVCEALQNRHLNRRLCYVMLERAEVIKTIPNHFRINYRICSNYSPWGIIF

SEQ ID NO: 153670 - protein, 52 aa, Heterodera glycines
MVEQFQLEEARMKKHMEESEQKWAEILLTNGRQLEKGIANSEEENWRKQMEG

SEQ ID NO: 153671 - protein, 80 aa, Heterodera glycines
MTGVLKGGVITAADVQDLKRGWTQLELDAKVGALKAKNDRMYQSICARLQGQAATIQRLRATKGLKRSRGDKRKTSVRGN

SEQ ID NO: 153672 - protein, 89 aa, Heterodera glycines
MQAKTCSLAHLGDAALGGLRKNAIGIQMLGIRGHDPDSVAIRSVYLISDEVSPVRAPQGSSATFELNNNGLCAKNGELAPFLYGFNSCG

SEQ ID NO: 153673 - protein, 181 aa, Heterodera glycines
ISSSSRPISVMLRSEDCARTPSGFKCSGSVGTILTLLPSDQFISFLMRSAQYELLRAVRLRLSSITMVCVPKTENWLRSYTVSTVAVKRCPAAGSCHDNEIFLRPKTPPGRSLRVQKRLSASAFPLETSRALLVVRWPLSLRHPLGVQLFCCRMARQPIPPSDWSEMCHWTSIQAFRLRAS

SEQ ID NO: 153674 - protein, 26 aa, Heterodera glycines
YKAFASIDVDIVCNNTDRLLHLGVHP

SEQ ID NO: 153675 - protein, 75 aa, Heterodera glycines
MKRRVRAVIEDEEEEENGKNGGGRSGPMVIHSSSSESEEEEASDEEDLIGAGSYDEEEEANFVVPDDEIEEDEGD

SEQ ID NO: 153676 - protein, 120 aa, Heterodera glycines
NTVESSSEKTEKIVRLIRAAMECIGFLGANSKEFKERKADKINVNEFFQWLEQNIPENTTKSMLDHLKSVKDGKMKQFLVEIESECAEFKRHMWEQMETKGRQRSDESMGQMVERKKFVL

SEQ ID NO: 153677 - protein, 120 aa, Heterodera glycines
LKKSKFRLTFLHFLPRKCHSGCIFNPDPDRALANEIARRVRIFCWILTGKQNHQKRAIHVKATWAKRCNKFVFMSSEDDPTLPAVNLNISEGRWRIKKYFQKFVYAYQSLLNFFETIVFN

SEQ ID NO: 153678 - protein, 76 aa, Heterodera glycines
QELCFFWTGSPNLPSSEEGFRPLPTIMIRPADDQHLPTANTCISCISRLYLPIYSSKKLLRDKLSLAIKARNFGFV

SEQ ID NO: 153679 - protein, 57 aa, Heterodera glycines
MDALRLLVGANNTSNLSAVVDEQQNAIDDYSDGQQQPPQQQHQTVEQLMAPGHRLRE

SEQ ID NO: 153680 - protein, 357 aa, Heterodera glycines
MLMELCEIRWAASELEAIKTILRLWPVLHELFQHISLQVKEFDKEQRIRAYSYFLSLSHLSFYALVSFLADILEILNKASLNFQISSASLIGHGRKIRNLIDQLQSLKEENGPYMHKFFNSITCIISDRNYPQHPCHQKNIMDNEEGYSHVQRMYLTGYSGSDYEADFVFATDGRKYANAQFLMKQQINTRSSADENIVVGISPPIPEFNRRIRRQLIDNVVEEIKNYFPVGNIIDDIDLLDPSRLPTQASNINNYANSIKKLAIYFNYDENLIYLEFSTILSQILNDSRLINLKNKLSPQRFWKLIIEQLGDNFGNEFKNFLHHMLILGLGSADAERAFSVLFYIRGKRYKNAWFS

SEQ ID NO: 153681 - protein, 126 aa, Heterodera glycines
MPPASMPLWARQWQKFFVERAGIDSLHFGLLLLMLLSLLMLFRCLLQPNGICAGQTQQKQQKNAKTEEQRKMEQRDGQAVTGTNVVDDDPEQSAAQSFQQQPKATENVTIVDETVTVAILNILLES

SEQ ID NO: 153682 - protein, 32 aa, Heterodera glycines; identical to SEQ ID NO: 130522

SEQ ID NO: 153683 - protein, 108 aa, Heterodera glycines
MTQLTKECPICRKNITKTAEFYLKKESNIGDKIWNSLGRKKSNAEQNIEQLQCLKCKENMRRVVFYPCKHASVCVRCAKVMANPGKAEAKKCPICKQKIEKILPFYLS

SEQ ID NO: 153684 - protein, 57 aa, Heterodera glycines
IVKMRWLGQNWPLIKSIFGCFVRICVQNWALPISSSIFGFIFGIGISINKCIKLSDG

SEQ ID NO: 153685 - protein, 40 aa, Heterodera glycines
FLRKSLQRMSHHYLQLSIEITNCRVHLLYPIHLFFYFIKT

SEQ ID NO: 153686 - protein, 503 aa, Heterodera glycines
MNPDGYEMDRAGDRVGYLGRANAHNIDLNRNFPARYPFHKEATGGTLPEPETAALMKWLLQYPFVLSANLHADNRKQTDIRPRSRQPQTCCWSELTRRPGNCSLGWPPTRARWIPNKNRELVRLLFIRQISSLNLCTKAHLLHESVQLHIVAEYTQTELAPYLRSVFADALIVFASGPPQSIVFSAGEYTPRLFNERTFGESLKKVFAPHSVDNEDEQQLVLATTENCEDRLGQLVSVAAMVDQMGLDRLFQLGVGIGCGNSTERDIDSAKLDVALTAIIEMMVNVLKRDEVHEFSVVVPSVAPTDHFTPSQIAAVTSVGFDRLSQSTVCSARLIESADGMKLHAVGSHRGPHTLVIAVEKKTSALVYQLGARLCDQMDAEMAEAVTAPAYLEEEDKQLARILAGSTIVLAPEIPQYYLRNIIPSDHNSQVRFIDVLRPGEDNGMLKNGTAAPFEEEQELMGTEQGMAEEKLPEGNWTATPMAFGQMYIKHHEQMRQVSDEMI

SEQ ID NO: 153687 - protein, 351 aa, Heterodera glycines
SHSSVDKGIMLSGVKMRKLPTNREGIMLSGVKMRKLPTNREKGGNFVLRAEVLEAAIKEDKANGLTEDKANGLTPFILVVTVGTTNTCAVESCRELGPICNREGIWMHVDAAYAGSFFICDEFRHLSDGVELADSFNFNAHKALMINFDCSPMWFKNGDEAIAFFKNGDEAIAFFNVDPVYLKHEHQRDAYDFRHLQVALGRRFRALKIWFVFHLQVALGRRFRALKIWFVFRAIGIQRIQDFLRMQNKFGKLFADQNKFGKLFADLLLGDDRFELFVPQHLGLVCFRMKETSNELNESLFLAINDDRRIHLVASFTHGTFFLRFVVCSSKTRETNIEAVEVIREMADKVT

SEQ ID NO: 153688 - protein, 96 aa, Heterodera glycines
MAECNTNRPKIFVGKFGLILHSLSYVASWFSGLSLFVLFILAVFTVPKTYELYKETSREVALPQIARGREKGRINECSEGKGQAEEKQRKEPANCA

SEQ ID NO: 153689 - protein, 306 aa, Heterodera glycines
AVLSLAFLLFLLTFPFSLLFCVKIVHEYKRMVVFRLGRLLVGPPKGPVVFRLGRLLVGPPKGPGIVFLLPCIDHHTQIDLRVKSYDVPSQEMLTKDSVTVSVDAAVYEMLTKDSVTVSVDAAVYFRTSDPIAAISCIVDSALSTKQLAQTTLRNILGTRTLTEIMLERESISKVIQVDIGKGTHPWGIKVERVELKDIRLPKGLLRALAAEAEAARRASARVVSAEGELNASASLRDAADQISGSPVAASASLRDAADQISGSPVAVHLRFLQTLTRISTFRNRTFVVPIPTEAIRKMMGMAHKKD

SEQ ID NO: 153690 - protein, 90 aa, Heterodera glycines
MTYRVYLYKIVKFANSMQRRSTRKLGSVALEVQQENESQPSEGNSSKRDEGGEEEREEEQVKVGEQYQQQQQEENNSTGTGRDDTKQMRE

SEQ ID NO: 153691 - protein, 86 aa, Heterodera glycines
MPRLILVLKEEERIAQDKVRTYELDPTSGLNLQPRRRTYYNNDVAIRTLVTRFDALANPKPDQIMHHLRALQYRLASNGFDNLIHE

SEQ ID NO: 153692 - protein, 300 aa, Heterodera glycines
FENSLFQQSAVRSIPQIAAFVPHGFVNKRLIPVLQSQAPFFQEHIPRQIDLLVAVRQIDLLVAVAHLSDRCDAQTLHYLLTVTSVCSTLHPAIVHSKSRLVQRILTCDVSRLRDPLVIAHHLLNPLVLGLALPELSPAHFDDVMSSSRILLDIVEQLRYEFDDRVMSSSRILLDIVEQLRYEFDDRNESGERRGEVGKNRLCNRRVSMSSNHLPRLLITAARPSIGDGRKMSFLSADGRLEDRRGSRRESKDSRCSLESEVSLRICNISRVTKLMSHQPNQWLTQFSAKILNSNIFLSVI

SEQ ID NO: 153693 - protein, 358 aa, Heterodera glycines
MYVDMGYRTNPARTDTKVPSSPYSLSRQEKAADTRTKRDQQQLKPNRERITEEEVRMFGMDVTDQMDSGDPTESDQMESDQEGKAENLLPKTGVENHPNLASLGPTHQHSSHWDSFSCISINGTQPSSISITGTQFSSISITGTQSSSIPVTGTQFSCISITGSQSSGISITGSQIYGIPNTGTQFSSISITGSQPSFQSLGVNSPAFQSPGLNPPAFQSLGLNSPAFQSLGLNSPAFQSPGLNPPAFQSPGLNPPAFQSPGLNPPAFQSLGLNPPAFQSLGLNSPAFQSPALNPPAFQSLGLNPPAFQSLGLNSPAFQSPGLNPPAFQSLGLNSPAFQSLGLNSPAFQSPGLNPPAF

SEQ ID NO: 153694 - protein, 46 aa, Heterodera glycines
MAQFDEAEFKTTQSKELKRSDEITIYHLAIKSKFIYAKEKKVHKKE

SEQ ID NO: 153695 - protein, 28 aa, Heterodera glycines
KCSFITVAEQLKNVHSNFKVLQWNIGRA

SEQ ID NO: 153696 - protein, 187 aa, Heterodera glycines
MYRMQHQIDAKRNRSTLQHDGHLYKFAKTSTDGTIKFWRCEFKDSGVDKCKGRIWTSLRDEFIRMATPHTCERNPSHVVAQKVTTAIKRRSVEKAPSVIRAVSTQSISSPALSEVPSKKATNLMINRARHLVDAPPAVPLNLEQLQIPQSYQFYEKTMYKNVFYSAKLTFDADQKSLLQQLDQITPL

SEQ ID NO: 153697 - protein, 121 aa, Heterodera glycines
MSLSVVDRMKRMLSTGEDADVHFLVGEGEEKEASLKIKRVAAHKVILKHASEVFEAMFRFDSQNQNVENACTNCVVEVPDVEAAAFKVMLSFIYADDLSQLDGDNAMAVLYAGQIVFVKLI

SEQ ID NO: 153698 - protein, 153 aa, Heterodera glycines
MALDVQQRIAVKCLARHCSKFAFPLVSKEEFSRNIVPSGVLTVEEVIGIYQFHCHPNLHMVSELYPLKFPRQGRISDRTEGTLQLEIEKMSEFAGETVGSCRYSKTVHIRGLPFEIFAKINATTENDENFVGKWLGIFLWCTAPTEGDYRRNF

SEQ ID NO: 153699 - protein, 43 aa, Heterodera glycines
MGRRIAQGNALTMCLTANQTAWDSPLSLLFGKANNGRNGETAQ

SEQ ID NO: 153700 - protein, 140 aa, Heterodera glycines
MDYLCFRALLLERNRLVLKFAPFFQGLHYDISKIKQLMDPRNGFYDRDEDKVTLAIDVIVGQAEMDRAISADQSKSKGTLFMDIEKVSQFARESIWSERKSETVTCLGGLPWKISVQIFTIMGSAVKCLSLFLCCTAPKE

SEQ ID NO: 153701 - protein, 22 aa, Heterodera glycines
MARAHPAALTWLALSWPCTPPI

SEQ ID NO: 153702 - protein, 58 aa, Heterodera glycines
MSSDDEIPPFLDGPYTPVRDGDEPFEDAPPLVEVINQLPIQLILDDVKGKNEHVTRSD

SEQ ID NO: 153703 - protein, 189 aa, Heterodera glycines
MAETILTHFEIVDQSNKAKERPSLLEESFVIDITAIDSGGKRQKMAGKGGRRRDFNVPYDLLEGATYGLENNDAYCLFRAFEFLRMKHVMPHQRFSEYKRDEGQQLNNIKITFKKYYNEMHPGMFRLFCFDTFGKMKPIWKSAMSDYRYELCVLYTREMMELLDTMTQSNQLEKISAQRITDCKLDYNP

SEQ ID NO: 153704 - protein, 185 aa, Heterodera glycines
MPYIGETNDFKFEQKDVEQSLVLMDDDGATDVAKSSFDVEDKTAQGQRVRSNRRRISTFTTPSTTTSLSSFPTSTSPQLSSTTNGEEFWMTTRSTVMTPYQRVATTPYDIAKFYRMPNGNSRQRETVLTFCSKRAAIRDSANMVIACAGEDGDVWTPLRCPPGTDCLPAADSTFRICCPVAVGKR

SEQ ID NO: 153705 - protein, 213 aa, Heterodera glycines
TMSSLINLFNSFEMYHENNTRNMHSSYKHKFQFPYERIEDPAGLTAYFQKYHQTITIGILYYVIVKSIEWTMRDRKVKSIEWTMRDRKPFDLRNCLFVWNTALALFSICGFIRVGEESLINLIYEGFTFTICHTESLINLIYEGFTFTICHTVNARGPGPFWGFLFFLSKFAEFGDTLFIVLRKKRLIFLHYLIFLHYYHHAAVLIYSAHVGA

SEQ ID NO: 153706 - protein, 107 aa, Heterodera glycines
FAPEGYGLFILALPNCPTRWSAVFENKYGCRVIQFVLENVVQLVHGTANANNSLEKEISIQILHVLMEPILKNAYSVAQNEFANYLVQFIIKSPYLRRQRCYIIKTH

SEQ ID NO: 153707 - protein, 347 aa, Heterodera glycines
MPSHTNRTPLSPPLQRVVCASPTRPSLLPLVAAGQSSPQALADIARHGLLARLSVVQAADAAVLASTNFTFFDCQQLSSCSACASARFPCDWCALSARCVPNAEDVCQGETLVNSISRVGPSSRRGPEFCPHFTVPGGDQYLSSGKRRSVSVKAHNLHDQMSAFKCRYSLESSAGVVHEKLAQRQEDKIICEDMLFEFSGPGDGNGTVVARFDILWASSSDQNANQFHPLDNAQGMRMVRSYFFPITNSLFTHSFIAQIIYKCAQLASNCGICLGLDERRFDCGWCDEETQCVPKDNCDKGAVVGIRSAMDELDDIFKDELDHTTAVLILQKRHAISQLNSQRRNIL

SEQ ID NO: 153708 - protein, 110 aa, Heterodera glycines
FLALLEWIPSAPNNPIVPDNGTAFAPGTNLCKLSMQLTKSNCVVKAWEQKSNASVERQFNVKSVNAKIDKTKKKGIQREFDDETSADQIFQGKPNVLEQPDQIEHILKEK

SEQ ID NO: 153709 - protein, 32 aa, Heterodera glycines
MQSFLLLVNILLCSIVLLHLLSNEHGLVNAMP

SEQ ID NO: 153710 - protein, 123 aa, Heterodera glycines
QMATNLGKTGGFFLVVRSNHISGGCPTGRNTDLSRQFIINVPKFRLFLTLAAVVPGLSAEQASLLSEIAQLAYEIFKLSSRVHQLDIESVFKLPLPDASHVPYSVTNTGKPLGKQFRWRRSFP

SEQ ID NO: 153711 - protein, 437 aa, Heterodera glycines
MCRLQATHLLARLFLLFALCTALVSSLTAVAPPFGQLSVSGTNLVGANGQPVQLIGNSLFWHQWYPQFWNADTVKALKCNWNANVIRGAMGVDEGGYLSDANTAYNLMVAVIEAAISNGIYVIVDWHAHNPHPDEAVKFFTRIAQAYGSYPHILYEDFNAVKFFTRIAQAYGSYPHILYEDFNEPLSVSWTDVLVPYHKKVIAAIRVIAAIRAIDKKNVIILGTPTWSQDVDVASQNPIKDYQNLMYTLHFYASSHFTNDLGAKLKTAVNNGLPVFVTEYGTCEALPVFVTEYGTCEASGNGNLNTDSMSSWWTLLDSLKISYANWAISDKSEACSALSPGTTAANVGVSSRWTSSGNMVAVGVSSRWTSSGNMVASYYKKKSTGVSCSGSSSGSSSGSSSVSCSGSSSGSSSGSSSGSSGSSSGSSSGSSSGSSGS

SEQ ID NO: 153712 - protein, 252 aa, Heterodera glycines
KFGTYPFFCNGSCMGGAAEQSPSQYARALFDTTPSQYARALFDTTYAYFRALNRTMEKRKSNGRDLLRNGTELNAETAGTTFQGETGRITFDAHGNRQPTFFVTMLNALNVPTVMVKVNITNGVLKMERLYGSEASLKMERLYGSEASLWVNWGGFRPMTTPLCGYNGTMCGQNVTVYILIGVTLMLLLLVAALLGIGYAIREKMREKQRLTRECLIPFAELRNLKELRSSEELKSETEKSMRSMRSSQSGE

SEQ ID NO: 153713 - protein, 185 aa, Heterodera glycines
NFKFYFSKRTKFKKCTDDLKKKGVAFCLTLKIQNSAQIMSSWRSVFDSVLISFGGWPSLEASSEPNIRIRIERLYGIMVAKFRADSLFKATVQPDDKNSDKHVLLIDQPALNLFARDFYMLLETEDERLAYRTLIRDVLVLLGADPRIAERIRDVLVLLGADPRIAERDSLEILQFETELANVSL

SEQ ID NO: 153714 - protein, 126 aa, Heterodera glycines
MNFGGIGVVIGHEITHGFDDRGRLYDQYGNIRQWCLSCLQKVRTLSHNAAAIARRQSDPGSAVFPELCADLVWHYERQRGHSQIENVRTFARANSYYFKNGSAGKKKQAFVSAFRQKMNKFLPFWV

SEQ ID NO: 153715 - protein, 366 aa, Heterodera glycines
MFTVYSIVHLLLTCCLLLAITDVVISDPLPQNATVADQPTETLTNQTVTAETTAATESTAETTIATTATDQQNVTVNESIETSPVLTSEIDQQNVTLQNATVIEPVALIAATVNGTDQAAAQTLFNATAQQIDQNNNTTVMYGHDQKLKKNTFKPLLASTNEPNITLNFTVESMHLITDNGTDQNRTDEAGAAGPSVAGGELGGEVPLVSSGQADEQNAKNESASLNGTASAVSSGTVVDTTKFIPHGDDDCWTDQNGEDTPRWFANGDQFRALPYEMYAVWRECASTRDPAVCRTDNWTKRTCGAKSCVNSEKQIWWQCVLENAWLGGCVDEASGNRLNVGDAIDRNLTTYEFISFFTVLPKLAF

SEQ ID NO: 153716 - protein, 64 aa, Heterodera glycines
MDEKAVKREQKQRRKSEDRREEAYPNIHCFLLFFMGWGLNLITILTIKIIKYCHFWTKFVRKVH

SEQ ID NO: 153717 - protein, 17 aa, Heterodera glycines
HKHLFDLFYHIHNLIKI

SEQ ID NO: 153718 - protein, 64 aa, Heterodera glycines
MTKRNNFDFLLASKMFIEENIFGLGYFEICIYLASGPVSRGQLTNQLTDNSADGQLSRTIKITK

SEQ ID NO: 153719 - protein, 46 aa, Heterodera glycines; identical to SEQ ID NO: 147106

SEQ ID NO: 153720 - protein, 45 aa, Heterodera glycines
MPGRAGLVFPGVTGFRSRPLKTRSTRNPVNPAFQIAGPGTGLRFF

SEQ ID NO: 153721 - protein, 90 aa, Heterodera glycines
MSEINAYCSTGTIPTNSDPLEFWKERANEFPALAEEANKFLCIPATSVASEQLFSTACDTYDYRRRRLRPRKAEILIFLNRNLPKIQYKY

SEQ ID NO: 153722 - protein, 21 aa, Heterodera glycines
MMKKRVKMTQSFKKQFFYWRL

SEQ ID NO: 153723 - protein, 145 aa, Heterodera glycines
MKVFVLLICLLFITKAESVEEKQPNYDGQDFDKDDIQTIFEDAVDYAQALALVTLPHTHEGRGDEALIHPFTLFPTPFPRQLYEQAIELQWIEFNTGQLGGVHLARLLTQLHRRTMQKAGLEASKDQLLNNGSDFVIAEALFMAW

SEQ ID NO: 153724 - protein, 270 aa, Heterodera glycines
MNNEVNYCKGSAHDIWSEVNQLRHVVPTGGAAHNRTARQAAGYGEAAAPSSGVAGGQQQAASGGGCDACCLPGPPGPAGTPGKPGRPGKPGAPGLPGNPGKPPTQPCEPVTPPPCKPCPAGPPGPPGPPGPPGDAGGPGQSGQPGQDAPPGEPGPKGPPGPSGQPGQPGAPGEPGQPAQSQPIVPGPPGEPGDAGPPGPPGPPGNAGQDGLPGQPGPKGPPGPPGSPGNDGQPGASGQPGQPGGQGEKGICPKYCAIDGGVFFEDGTRRR

SEQ ID NO: 153725 - protein, 99 aa, Heterodera glycines
MNEIRIYGQSANGRASEAGGAIVGPNERCERRKAKGETEHGTARSTGQTEHNLWTDEAKKHGIEKENNLEVIDDRSMRHKIFETEKKEFSRVEKGKSLP

SEQ ID NO: 153726 - protein, 208 aa, Heterodera glycines
MAAVAAAAVAVGTESMPNFNCPKIEVRLLDGAERIQSAVADQQDAKKEEDKVAPESGTDQQNEPEAEKRKKRNANKKKLPKTRREKHAKVPEASSVCQRVVAGRKLDGNALLAAMPEEKHEKRRRRLARLGMDNVVFIKVPAVIPTIESQINSLLIITLFIGEVADDQQSVQHDQHAQQGQRVLMESPSTATIRARREPFIGVKYALQ

SEQ ID NO: 153727 - protein, 15 aa, Heterodera glycines
MNCQHIKSKSSNYNE

SEQ ID NO: 153728 - protein, 180 aa, Heterodera glycines
MKPKNFFVLIFPLFVCFSIFEGISSYKWDSKNLPNNVHTFAGFMDDLYEDYRVKGQMDIHWLNQPKLYTEKGFSDKQKRTVFNLTFVKCAAEIAHFQVLSQNDDSKDAYLNLKVVTISEIKLVKDEFVGFLHFDQTLGQQIAKKFKDEIFSKEKQIPEEVVHQIQQLAFSFAARVILSIM

SEQ ID NO: 153729 - protein, 303 aa, Heterodera glycines
MKKKVVLGLLKNLISGVKNWPRSNQIEMELFNEPLWNYLRVFGIDANVALDVFKFCKDLHTVVQKKIEEHKKSVFDKMNLQVKNVTTEMKEFKNLNSILKLVEDKENSTALENFSSNYKGKNLSQKKEVLKELLAILMKIYTDYSNASKKEISKNAIRLTHSGNVTLRFGQILYETIENLENLPEDRVKYDENEQLLSILLPFANHLLKRLYEFLERNLTEKSKISDDFDFVQTLQTVAEESTELEAEKRQMPISAGVNVNLFQLLFSLAIRLCLLIDEKEKLANKYLPKFVFALKMCTKETR

SEQ ID NO: 153730 - protein, 35 aa, Heterodera glycines
MKIDGKNVHINLRNWHLPYFVYKQKEDEFKMEKEE

SEQ ID NO: 153731 - protein, 144 aa, Heterodera glycines
MILLDQIGLFNYRTHVKSSEPRIASSSLTVMKADLQQSIPSSLVQFECRGQEKKFTDEQIVHVVVHRMVAQVIRDEMSNILTHKAIPNETNVMKPITDEQIVRATVNRMVAIVTFEVNQKELIALKRKNSTVEQDLVKKPRTDL

SEQ ID NO: 153732 - protein, 69 aa, Heterodera glycines
MKDYKDKQVDDSSDGKAGQQQHPQSDGEDDEQHHFRHCAETDSDEETASANNEIKNIYLFMKHNCSEIG

SEQ ID NO: 153733 - protein, 268 aa, Heterodera glycines
KFRKFSYVYKKKKVRGKKFKNTENLLNICKCLKKLPQFSGIGQKGYQNLIAKNSAQIREAMLQLMDKNYPNEKRRPAVLPVEWRSALTLDEGVTDVATLPKMEFARSTLNSTLMDLMEFARSTLNSTLMDLMYYMYYQSPLYRTEIVNGVIRCLNSIYTTFKANNPNFDGPVSIVGHSLGSVIAYDIITRWSPFLLYDQIVSNAIEENMNSSVSGNQRKLFEDFHNSRKRKKIQSEIEIPGFMEQILISPEQQIGFKVKNLFCLGSPL

SEQ ID NO: 153734 - protein, 90 aa, Heterodera glycines
MDTILTKRNRAKLQHNGHSYTFHKPSADGVYAVKLTHRHQFRTVWQDFNPDSVSMHFETGAITALNVVFTPGIIALDMALPNELTPVLDW

SEQ ID NO: 153735 - protein, 93 aa, Heterodera glycines
MKISEETIRKRLQSINQTQEAVQTCSKWVLHNREMIDRIATCWMDIYKKAPEKLRIALIYLLNDVVQKAASKKDNNVTLALHPHWINATAMSK

SEQ ID NO: 153736 - protein, 316 aa, Heterodera glycines
MASFLESVERHRQKGMKLMELMQYAKQTFNLQLRDVTVVNDAYEKFAEGMRETKQQLEKMEKSGALTSLDAPSSPPRDAPSPTAGDDPFVHGVECDEAVGAEDMEMDEEYGPGPSSCFLKSSKDYVASIPAVPEMDPRLQRLVNQTISACQLSDNSNIPMPSASLSRTTLDPRQLDPRQARFFPPPQQPPPQLTQHLNFPPPIIPPPGLSPPPATQNATQDTAETLLTIDKSQPPPQFFSMPPPQIPNGNGNVTVLHENASNSHGRGSTLSPPIALFNPSNPPPSLMVSQNLIIFFSYFNFLNLFSFSIFHLLLLI

SEQ ID NO: 153737 - protein, 83 aa, Heterodera glycines
AVMGAYNENNGTIEVPLHGYNVGKAIVERILNTKNGTVLLHGMREPISLAKAVEIGFFDNLSLTVVDPNTTQRLFLDEALKRK

SEQ ID NO: 153738 - protein, 82 aa, Heterodera glycines
MDEELHRRRLGPKADTEGDEAEPLLGGRVTAEQIVHLLRQRQMRYAKLKLGEGFYHDLDKELANGILRERKQHGVGLLKLTL

SEQ ID NO: 153739 - protein, 16 aa, Heterodera glycines
MAYKEQKSPQQQKMIH

SEQ ID NO: 153740 - protein, 288 aa, Heterodera glycines
MAVPQEVIDKIEAGYKKLQAAADCKSLLKKYLTKDVVDACKDKRTKLGATFLDVIQSGVANLDSGVGVYAPDAEAYTLFKPLFDPIINDYHGGFGPSSKQPATDLGEGKTQLLTDLDPEGKFINSTRVRCGRSLQGYPFNPCLTKENYVEMESKVKAVFEQLKGDAELGGTYYPLQGMTKDVQNQLIADHFLFKEGDRFLQEANACRYWPTGRGIFHNAKKTFLVWVNEEDRWRRLRHQQQGPSWSHGVRSGEADVRRSETPDRIGEESIMGGPIYDDDFILRNVEIC

SEQ ID NO: 153741 - protein, 96 aa, Heterodera glycines
FCCPSFAFALPFLSLFSSFVCSPMIWPLPSAANVPFPRSHRSVLSTGSEPSRTFGRYFSATAPNSAKEAKEQISKALEEKKGTQSKAKQMPSPLAG

SEQ ID NO: 153742 - protein, 316 aa, Heterodera glycines
LVKNYLIVPNSHKMPPIPMDVDVVPGQFGISLAIHSFNTQFFDSEAVGQTFLFTSESVSEGHPDKMCDIISDSVLDAHLGQDPNAKVACETVTKSGMILLCGEITSKANLDYRQLVRDVVQKIGFDDEPNKGMTKGRKIGGGGSKNERGRNDEARDLSLFHRTSNSQGFDYKTCKILVELEQQAPEIAAGVWMNKADEKDIGAGDQAGHSLCCFYCFAFFKGLMFGYATDETEEAMPLSLLIAHKLLAKLHQLRRDGSLGWSFPDSKSQVTVEYKFNKGACVPVRVHTVVISAQHKQFDGDLEVVRSDLKEKVIKE

SEQ ID NO: 153743 - protein, 47 aa, Heterodera glycines
GKKLVKIVENVGPAVPIGAAGKNFWKFECYLLRNLPIKLFNFRLGGG

SEQ ID NO: 153744 - protein, 298 aa, Heterodera glycines
MNVIVRRLIQTLFAKPKLSKLVKMKLDESEAFRAWIRDSVLNAFFTLNVSPKRIAGGAVRDLLMGTRPSDVDFATDATPTQMKEMFEREQIRMFNKRGEEHGTVTCRINDRENFEVTTLRVDVVCDGRRAKVNFTTDWELDAFRRDLTINSLFLGLDGLIYDYTGGIEDVKQRRIIFVGDPIQRLQEDYLRILRYFRFFGRFSKLDAPHEQKNLEAIVRCRDGLKKWLCETIVERREEASEERANPSYFRHFILNQTFERGGEMREQIKRECVELMKYVGTDAKMRAEIEQWEVPPMP

SEQ ID NO: 153745 - protein, 59 aa, Heterodera glycines
SEFVFLGEMREQIKRECVELMKYVGTDAKMRAEIEQWEVPPMPVGGFDLIAMNVPKGPK

SEQ ID NO: 153746 - protein, 119 aa, Heterodera glycines
MLVHLAKLDAHPVYHFWLRVLEDRREWERLYRPDRLIVDQQLMLVFRFAITHGFLELVHRLWGDLTEGQIETIGDFLAFLNFENAYDFESDEMPREEQMKRFHKLESLLINWCPELRKA

SEQ ID NO: 153747 - protein, 55 aa, Heterodera glycines
MTFRMNSPPSITQNERANAGESVENDGILVEFGEGFRVDSAESTVPKDLKDKRMK

SEQ ID NO: 153748 - protein, 32 aa, Heterodera glycines
IQSVTQSVLHHLRHKLRFPGDQFGVHHSEFVR

SEQ ID NO: 153749 - protein, 37 aa, Heterodera glycines
MVLVSVTLRQLCTMSRSHYDKIMFPPISAHGMLTLDR

SEQ ID NO: 153750 - protein, 40 aa, Heterodera glycines
MVCAEVTPTRLNCYVQLKIQLDRFMGSGQTPKKQGVFILN

SEQ ID NO: 153751 - protein, 124 aa, Heterodera glycines
LIDSHCQIGEQQTLSKCSNFALIIMIINYHNPPPPILINYYFLLPNFHVTLSFLPLKIVSSHYVALRLHHPSSFAHNISQFALLLLHPPRHHFPPLPCPPKRLGGFFPAPPNHHLLIPKAMMSD

SEQ ID NO: 153752 - protein, 28 aa, Heterodera glycines
MAIGMVALTTFVPRAALLLLLTARRAFR

SEQ ID NO: 153753 - protein, 31 aa, Heterodera glycines
FRQKPIFFLSSPWPETHEKHDFWAVVKLLFE

SEQ ID NO: 153754 - protein, 376 aa, Heterodera glycines
SDQITVKLKKNDTVQVLKGKIMEKLDKKIENVIGHELGINQPKPTLKYQQKSPADNNAFVVELEDTLKRIIQTLTQIEPQKQTLRRDNCGAVLKDTETMANCNSKHIVYLAIDEFQIQVKLEYCNNEHTVWVHSMDTVSTVKLKICNQMISYISAYKHIRANEQTLKYDGTDGVLDDNATMAFYGIGAGATVQLSLDEIFEFFVKYEKAEEQKEEKKVETFSLEVKKTNTVASLKEMIKNEKKFVPKRQTLRRFSPYHMLLMDTEILAPTIQHEPTIYLAIDEFQIFVEYASERYNTIWNKIANGLKPSKYIDPDSQALQYGTLALINDRKLLNDYGIGKGGATVSLSIDTFSIDVAHEDQQGRHDHTIWVWKSDT

SEQ ID NO: 153755 - protein, 66 aa, Heterodera glycines
MALRQCLKTPLKLWHFMALAKMITTFTLDKLNPISYNSFLKYWSANVRLTDLGLCYIPLGYLALFS

SEQ ID NO: 153756 - protein, 176 aa, Heterodera glycines
LLGPFAFVGLPAKSGVSGVTIVVVPNLMGIALWSPPLDRMGNSCRGVHFCKKLIDRFNFHNYDSLAHNESQQKFDPRRRVGEREKTAVVSLLFASKAGDLNTIRRMYLQGCDLEMADYDKRTALHLAASEGHFDVALFLLETGKVQPDPRDRWNRTPLDDARSEHHTSVALMLERR

SEQ ID NO: 153757 - protein, 145 aa, Heterodera glycines
MVNFFVIFVPFLLLIVSNQLKAEETEENRHKTEETWNYEEPEEWGGKCQKGDRQSPIDIHKQWFIDYKIPAISFANYEKNGTVTMKNNGHTVVVSGFDTWEKQPNIADGGFGSKYMLSQFHFHWSQNENGSEHTVDGEHYDAEVL

SEQ ID NO: 153758 - protein, 360 aa, Heterodera glycines
PPLLSPLLLSLCPLFPPVVIYAPAISLTGVTSVRLWPFVLLVGVGSTIYTAAGGIRAVIWTDTLQAGFIYGGLAVIIVRGTAAGGLTNVLAINQRTGRLCSLSVLCPFDQYNNLSLSVLCPFDQYNNLWVAMFGGILQWTCIYGLNQMAMQRYCSMPSLRHARVVLSLTMYCSMPSLRHARVVLSLTMPANLLIQLMIGYIGLLMAAYFDQCNPLALGEVETVDQVTILMASRIFEGVPGLPGLFLATIFSGVPGLPGLFLATIFSATLSATLSTASSGINSLTAVLWEDFLKVPLKDLSDAHKSCAMKGISVVFFGALAVFFGALATVMAFACSNLGGIFNVVLTILGPFFAFNVPFVR

SEQ ID NO: 153759 - protein, 127 aa, Heterodera glycines
MPTRAIVSRSVPFLCPLSVPNFTSALPTVPSFPNCLPSAIPAWADFCLHLFWLGKTNRKKAKFWRRDWPNGITKAGAKFKLNVSGGSAARTESNRRRGTDNEQKEKQQIGDVQSDGRETQSDRQTNW

SEQ ID NO: 153760 - protein, 164 aa, Heterodera glycines
MLGNAKLINSSKCPHAENVYAEKRNPGTGTLRCYNPTKNQYYDCSCHGDKKCLAEEKWAHDRFLCPIMQVNGIQIQKDPRYNWTRLDIDCYKAEAGTVSFWGYSKPDTKEIIRVDEIHCLTDGVLKRFKSLQVDEQSPMKKLSPTSPFLANNASSLIHVFVPFV

SEQ ID NO: 153761 - protein, 119 aa, Heterodera glycines
MNSFSLLTVFLCLVINCSAPPIRPLSSDVSIWKLCNGKNGKILVENGCTKLLLCYQSEMAKNRKIGKRFGVGKGIIGKLKFVECAEEIAEDQWHGLIITKHQDGVISYESRQIGRDKIF

SEQ ID NO: 153762 - protein, 388 aa, Heterodera glycines
CLTKAPFVGTTKFHRPTTATTTTSIPTTTEQQTFSFQPFSEFVSHFGTNCSKIVFPVEVAKFIVNITARPYRIACNDYEKEYEIGQLPKDYVANAYKGFFNACMSVPTTKCAKHAELNACYKSMKPVVPSNNAIAKLCQNHLNESNAAGFAVQICIHRDEKEQKLVFETFLNLSTTDEFIKMTRSYQISIEEIIETKKTIPIFFLEFGTDHQQSAIREKANGKVISESLNENAIGIGTVLNDIKSEKFNENLAKMIHLVPPVADRMLAFFQIPTPEFSKLISAQTNLKPYENNPKEVGRSSRCDTYGKDCAVITKLLNKIEQLRNCKNETIDTSGFRLPPSVDVPSPAIPYLSPTKTLTCFGDMYCNKEILQQQYDRERESKLRKEAF

SEQ ID NO: 153763 - protein, 124 aa, Heterodera glycines
MRTGFCWSLSVIPHFFEQELGVSSARSLRSNKTLEKRSIGKWLGLNRYVINQSIINQSKGCGLKPENLISRRKRQFRPLNGTQLGKWNSFPIMISSAEKTATTILNNYIIAIVRATDYQNITSN

SEQ ID NO: 153764 - protein, 275 aa, Heterodera glycines
MSTDRYDIVLYGASGFTGQHVLESFVKNGHLDQFNFAVAGRSEKKLKQTLEDIEFITGKVLTKIPIIIADSSDAQQLAEMAKQAKVIVNVVGPYRLYGEAVVKAAVENGASHVDISGEPAWIEAMQMKYSEKAKEQGVFIVSACGWDSVPCDLGMNYLKQYFKGTLSHAETFAHIQIGEAGYSFNAGTYQTLILGLWQAKNDGLGKIRRSIMPEKMEKTKWRPPKRGMFWWNDSLDAYCLPFMGADKSIVQRSQYFDNIADKTYPVRKAFRFFIL

SEQ ID NO: 153765 - protein, 28 aa, Heterodera glycines
LFYMQPRENDPHAKTATRKRPRENVLAR

SEQ ID NO: 153766 - protein, 98 aa, Heterodera glycines
VLQIIPVLVAELEEMLENGNWNYTNLSHLKMVEWKMLEFALHKRGESQKWKEIQKLWNKWRRKFIRKFKNANKMPNFKKVMEELKDKMEQLRAEKEAE

SEQ ID NO: 153767 - protein, 54 aa, Heterodera glycines
MSTNGPSGKRKRLFGDLMISGAILICQKVMKMIHLITTSVHELILKIVLLNNLT

SEQ ID NO: 153768 - protein, 47 aa, Heterodera glycines
PNFGVIINVEYRLDKISSFFLVLDSILGKLSVSSSTNNNNVHCVMNN

SEQ ID NO: 153769 - protein, 107 aa, Heterodera glycines
MPKFKFDKADRDLHQIGDLWHAHFSININNFCLKITSNGEGYPKDTENTKNNANSNSDKNAKTERIDEAIGIGVAGGTFGKSFATKNDHKWLPKLLHVLVFRRMPTV

SEQ ID NO: 153770 - protein, 226 aa, Heterodera glycines
LTGETKNSDEMNYLRQVGEILSRGTVRTDRTGTGTISIFGMQTRYSLRGGTIPLLTTKKVFWKGIVEETIPLLTTKKVFWKGIVEELLWFIRAETNAKTLSSRGVKIWDLLWFIRAETNAKTLSSRGVKIWDANGSRAFLDSAGFTDREEGDLGPVYGFQWLHFGAENRGADADYWLHFGAENRGADADYTAKGTDQLAELIQGIRTDPNSRRHILCAWNVCSLRL

SEQ ID NO: 153771 - protein, 71 aa, Heterodera glycines
MRFLYEREHKTLARAQEREDERNFLRQWLLGGPQGQQGHGGVQQQGQGLQTLIRPFEFDYLNVYQKCLYCI

SEQ ID NO: 153772 - protein, 170 aa, Heterodera glycines
MPKQHQHQQQQQQHQDQQHQTDVIDHDHCYARPTKQLWKLKRQKYMLTFKLCKMCAQEIYNRKDDIAECNDGGVDLNFHRCKHCTMLNMRLSDMNSVQFMAYQPRNNNYNNTNNSNKNRNNKNNDNDENDSQNNFWYDNYGPTYCRGGPRNNYMQGKRKCLERIDMDDMH

SEQ ID NO: 153773 - protein, 131 aa, Heterodera glycines
MEKLKNFTLADLFKVLALPDKEFEEWLKELKLLHTTRFCDCGNEMSYKWKQDRQQPLWICYSKKNHDGKQPTIGFYTGTFFEGAHLSPKQVLNTLNLHDQLILRFWNFPTIGHENFQMMKSVFKCNWDVIQ

SEQ ID NO: 153774 - protein, 28 aa, Heterodera glycines
ITNKRRFTCLLGTIPRFGSTNYKKYPVL

SEQ ID NO: 153775 - protein, 163 aa, Heterodera glycines
MLHIRKKAIKELRSLPPRTYDVVVHGSTSQHQPPHFKEVPALYSDYLTWLNSEIVKVQNNEREGGILRFAAEVHNKLVKAHVWGDGNGRTARAVRNIVLEKCQQHQVSFETVPHAEYMRAVGDALDGNPQNFENLLDGLLRAAEDAYMTAVHGKPGPSGHQTG

SEQ ID NO: 153776 - protein, 68 aa, Heterodera glycines
WSKCQEISNGFLCNILMAFRSKNCWCTIQTHIQHPNLNVFRQFDGVPPVQFVVESAQPAQSVPFTPPL

SEQ ID NO: 153777 - protein, 105 aa, Heterodera glycines
MAVARPDLVMKAIIPGTNESRTVGGGGGRFSPSTTKNGGTPKSKRGKCKRNDGKGGETIATTETPDAGEEDGVIHAESILAEDLQLSESSSEDEEDGGRDSEDTD

SEQ ID NO: 153778 - protein, 502 aa, Heterodera glycines
SNYPTISDIEFDAGEISCMLRTLPNRESTSPDEISFKFLRNCYLPLTPVISELFRLSMDTGKIPYIWKKSIVIPLFKKGDRNDPHNYRPISLTCCLCRVFEKILARHIYDFLHKKISEHQFGFVKKRSTNTQLISVLEDWYDSIYGNRNIDCVYVDFKKAFDSLPHHIMVQKLDNIGIKGKLLNWLSEFLKERTYTVKINNKYSKSYPIKSGVPQGSVLGPLLFLIYINDLPKVIPSEIKVKLFADDVKLYGNERIKLNTALQNIENWASLNGLKISPDKTFIIFFGKNNSKQQYKLCNKIINEVESINDLGVLIDNKLKFSDHYLKITKAAYLRIRYIAKFLKSRSIRVWTTVYKTYIRPLLEYAPEIWNPKLKKDIIKIERCQKYFTKIALFKCRLPYIPYQQRLSFFKIQSLEERRKVIDLVQAFKIINGLTHLKNIFPLISDHFPYNLRRKVETSHSFINRTALIWSKLNKYFPEFIWRQRFGDRENAFYNFWLHVSE

SEQ ID NO: 153779 - protein, 216 aa, Heterodera glycines
MKKKLGDQNLTQVVSIFQFNILNFIDFKRFNTDPIFAESAKMLTLIAFVQIGDPTEAVNALDVAFRNLPEIQPMLEWLMNNYTGRPRADGSRTEPRFKAEAWNVYERMLSNDDRTNNFAAHKRIQCHFNCHPTLWNFIDVLRKAQTTTDADYSKFVKGIEPPPKKKKYRDTDSRILAKVQNYYIDIPNNNAHNYVNRHPRIIEYLKGISRNYQMNP

SEQ ID NO: 153780 - protein, 103 aa, Heterodera glycines
MKHRWIIKENRQQKNKNKMMGQEMGAGKSDTGKSDTGKSDTGKSDTSRKSDTGGKSDTSIGVGFSNVGFTACVGFSTGVGFSACVGFSSVGFSGVGFSSVGFS

SEQ ID NO: 153781 - protein, 40 aa, Heterodera glycines
MAPARLWHAQAKCSISAIWPPLRCCAKMKWAMDEFYRDKK

SEQ ID NO: 153782 - protein, 139 aa, Heterodera glycines
MPIFMAFSGTIAIEKAPVKMQDDASDQTDQSQPQQKQIMLGVTIMELGEETLHERIYGNPTDFNDKNGAQKLDKQIREIAKPLKELHKGNNIIFWHLDWPGSGPRPGFFLAPEAQVQAIFWQPRFFLDLDCPWIFVQEI

SEQ ID NO: 153783 - protein, 144 aa, Heterodera glycines
MRSQQAKVSASEAAKVSRGSGAASAESLEEQCKCEVMQPGLYDIETEMCTPELDDAKQFIPTELQNNVMDKTPISMFITVYLMDLQTHANESYLSAFGRAILQRRMAQSTVACFLMGLDVTLATAQQQQQSQAQQQQMPVAMEK

SEQ ID NO: 153784 - protein, 42 aa, Heterodera glycines
MICWKCPDATAKKIDKYSMIIFPVCFILFNVWYWFIFMGRLR

SEQ ID NO: 153785 - protein, 45 aa, Heterodera glycines
MLSALDGVTFLYIFCHHKLILGPFCTSPTIGEEEHVIDVHGEEGF

SEQ ID NO: 153786 - protein, 58 aa, Heterodera glycines
YPLLPMHIDDMLLFPNCWACAKRAKNEFVMTKDVKKCNTVQRREHFWERSHQLSYGRL

SEQ ID NO: 153787 - protein, 366 aa, Heterodera glycines
DSIHQHSNHWDSTHLHSITATQSTIVPIVGAQPTNISITGTQPTAFQSPGLNPPSFQSPGLNPPAFQSVGLNPPAFQSLGLNPPAFQSPGTNPPAFQSPGTNPPAFQSLGLNPQHFNCQDSIHQHSNHWDSTHSISIARTQSTIVPIAGTQPTSIPITGTQPTSNSISGTQFSSFPITGTQISGIPISGTQISGIPNIGTQICGIPITGTQPTAFQSPGLNPPAFQSLGLNPPAFQSLGLNPPAFQSPGTNPPAFQSPGTNPPAFQSLGLNPPAFQSPESTLQHSNHWDSTHHRSNRRDSTHQHSNHWDSTHLHSITATQSTIVPIVGTQPTNISITGTQPTAFQSPGLNPPSFQSPELNPPAFQS

SEQ ID NO: 153788 - protein, 165 aa, Heterodera glycines
AGGLSPTDWNAGGLSSGDWNDGGLSPGLNAGGLSPSDWNAGGLSPGDWNDGGLSPSDWNAGGLIGDWNAGGLSPSDWNAGGLVPGDWNAGGLVPGDWNAGGLSPSDWNAGGLSPSDWNAGGLSPGDLSPNVWMGDLSPRDWNAGELVPGDWNAGGVVPGDNAGGL

SEQ ID NO: 153789 - protein, 202 aa, Heterodera glycines
MPSWIFPRVAQQQQQSPFPQPPTTAVGSFQQHFQSPGSRGAPLPPHIPPQPFFSAGPPNGTMNSTPAMNNFGTDGAQLHPSFMYDGQVPTNGGAGHMLMNGAGGPGGTIDFNEDFSGGINGTMPAQYILSDELMGKIHNSTKRKTLLELQIGFEQIAYDVSNIFETWAMVIKERLVGSDPLSSSDLEIGAAILIEMVSRNCY

SEQ ID NO: 153790 - protein, 180 aa, Heterodera glycines
MVKDTLAKMIHFVPPSNDDKMLPFFQIERPKFSKFINNDTDLLPYQDDPNKFNNPDPCDEYGADCVPIKNLLLKIEALANCTGNENNAIFEMPKWAPLPPAMPWKKRSETMLCDGDLFCDKRRLHEQYNRLREICGLQPEKVESQRKKRQYNPNEKWTESPIKITFNKKARNNLTTLYRI

SEQ ID NO: 153791 - protein, 324 aa, Heterodera glycines
FNLYLIKDFNMSVVAGHELMHALGFTHEQSRSDARNYIILRLDIIFHVLILKQSEIDPYTKNFIIFHVLILKQSEIDPYTKNFGFAYDFGSVMHYQSGAIMNSKKKLVITLPRFYQQTIGQSERISFKSKKKLVITLPRFYQQTIGQSERISFKDAAIINRIYCKDSCKGHEDKCQNGGYSCKGHEDKCQNGGYLNPNDCTKCHCPDGYGGEYCKELEESEQAKCGGNWPCRCRWRIKAINNIFEFLGFLINANFNCFQPEAGKKVRIQFIEQFFECTHNCSSAYVEVKYRDDKRAQGINFWGYSKPETNEIIRVDEIHCLMDD

SEQ ID NO: 153792 - protein, 132 aa, Heterodera glycines
MCSSFSNPFFFHFPQSPASAGVTVSSDRTERLLAKNATPTVGTRAVEKAEEGEAVDAFEGTKESVEEEEGEGRGGAGGRGRKGGVGEGRKGGGGEGRKGGGGEGRKGGETAHQQQHTEFEGDQRMWPRPVLC

SEQ ID NO: 153793 - protein, 172 aa, Heterodera glycines
MPPATHQIYSQNLDAIPHVPSTSKSSMPLMKQEPISEQEQINLQLGLDAPKSSRESSVASGSIHFKYHKEGTQPSVSSLRPRRYRIKPDSEKQNPLYRIKRQKNNDAVRRSRDKAKRIQEAKESELKLLQDDNCRKAELIETLKASNAQLQGENLLLRQNCRCGAVLRVAKR

SEQ ID NO: 153794 - protein, 174 aa, Heterodera glycines
MLLLLALFTLALCASFCDGMGDKNNKSFGKNWLSLGDSKGKSKASNAFNSNSGSTTNFANNHNANNSLSNPFNSNPFGSYQPNQPNWASDQFHQLDSSSNPTQSRGQNTSTLGQDFLSIGGEKVYENGSTEFIEEVYKKTGGDFPVVYHSMDQIHENGSAESIEEVYKKTGGGH

SEQ ID NO: 153795 - protein, 56 aa, Heterodera glycines
TLCNLIITTAPFSRPKHSLPPKWCNVYKSIEQKYNTATLARQVRGVNAHSLINEYI

SEQ ID NO: 153796 - protein, 105 aa, Heterodera glycines
MDCASKIKLPDEFLSELANAFRFNFRWSVLRISSSVFNYFLAKRQQQILQNVDLKLQKIVKSYEQREGFSSVEKMSIVINKIIASVVRNVAEAVLGARALINLHT

SEQ ID NO: 153797 - protein, 71 aa, Heterodera glycines
MLHNIAIDCQAPQPAFDDDEIENEQQENLNDENIALSAEAVRTDYINQMASSAAGFAIVTGANTGLGFAFC

SEQ ID NO: 153798 - protein, 35 aa, Heterodera glycines
RRATLFSKIFNPGLRNPGLIVNPGLLNPETSNRPL

SEQ ID NO: 153799 - protein, 58 aa, Heterodera glycines
MIRSALSSPNSTSVPIKRAVCDCSSTMPALWAIPFNWSTALRCISPPTIWVIFCSQIC

SEQ ID NO: 153800 - protein, 16 aa, Heterodera glycines
MDKKRLLGTEKRIFTT

SEQ ID NO: 153801 - protein, 19 aa, Heterodera glycines
MINFGAVLCFRGVRKLDQP

SEQ ID NO: 153802 - protein, 53 aa, Heterodera glycines
MSFFCGNMSFMAKCHRQAMPTPTAHRLAVYKQAMFQTNGQMASFSLIHTSKIM

SEQ ID NO: 153803 - protein, 35 aa, Heterodera glycines
MAKLMLAPTQLWCLYVDVVVLQFDGNAMDAISLAC

SEQ ID NO: 153804 - protein, 178 aa, Heterodera glycines
MISANGGSSTTKVLKCLMCGQSESRSTFMAHIAEHLNYRPHQCAECDFRSVTAEQMADHEATTEHVGQLNLTITTYDKLVQIATKMNRRWICNDVWMDIFPSFDHAQLGLKMALISDRFDVLVDKHFDGKSELTIWRPIEISKDEGMSKLLVDQDFEGFPLPDRPLPIKIRFKNLRIE

SEQ ID NO: 153805 - protein, 627 aa, Heterodera glycines
PIPLIALLLLQIRLVSAQSLRNIHLGFPEAWDGDKFPEIYCPSKNIPKWLDGYFLCQLSAAYGDPNAPPGQKLMHMIDAIGAIGSFHLSGGEAIGSFHLSGGEVVVVFSARYYPSRPYRIWEFYDRNMTKASVPWAGWSHYNLSAMPWAGWSHYNLSAMARWEQVPANPDAARFHPNLDFWRVGHRIIAGTEAPYWVGYEFDVPKLSNFRLASFVEDNDVPKLSNFRLASFVEDNDIFGTSARPSLIPISMAMHERADSDEILWGTFSAMNFDEERFFQGLFGLFTIDSNGVRKVVGMYDYGTWDAKACSKEDEYIGDKSHLPGYMHSISSTEHYVILPITSLVINPCKFKEPPRTAGADPQIQQGGLWGMDFYDVVPMRFLVFDFLVFDKRTNSWFTQKPLEVFPSMFVTHQLNAFEDSEGNIVADMVYDSHDPYVKYFYADFLRSQLYPNTARILRFTLDLRTFRVMYSYLIPQETISADFPQINRETISADFPQINRAFDSRPYQWAYFVENPFAGGNKIVKINVNEPSGTKNLHFTPDNLHFTPDELQLVLHEPYFEQRPGATREDDGILLVRGLELEENKGILLVIDATSMEEIGRAFVPISVPFGFHNRFFSRQQLGLTVG

SEQ ID NO: 153806 - protein, 222 aa, Heterodera glycines
MDDVLDCVWHFLCGTRGASILYRNWVHPMFMKHEEEIDNFLEQAKNESYRQVVSLGSRGLSCARDIVATAALRGAAFSHVQLTDLQRSYSTGDINNAGKGGGGERKRTTTTTTVVYQKQAATTSIEEEHLGDNDDEAQVRTWTGSYDEYGNIVENAMAESNEATVKKVNDEELVVIEVFVFTTLCPFPPIFLASLRTPSVPNRVARTPFHGAVGRVPEKTTR

SEQ ID NO: 153807 - protein, 132 aa, Heterodera glycines
MICDDNDQSLRLANFDWLHFVKSQNDCDSQKEELQINGSEIDSYSEEDDDFIDVSDCEVGNTKEMAEVTRNSSKQQHIEDRIGSGEETTEDELEDEAHFETRKMRNIGLKSKEEDTYADCYVHFIQFNNETY

SEQ ID NO: 153808 - protein, 43 aa, Heterodera glycines
MAHERGLLTSRVRHTIFDVKGVRNAADGSIMSFKEARDAGILQ

SEQ ID NO: 153809 - protein, 212 aa, Heterodera glycines
MENKFILVPSDLYKNLLKPESGEINVENAKNKLSSLLKQRKLDATSKNLLYNQELRRFLKLRKEVEEKPVKVELSDGSLMVFKPKQRERDSKIPTQIVNDEGLDETGSIPTLEDPYTTAEESDAESTTSTPKTRPLIRPMRVGTTKFRQKQKSFVVKKQQKIMSIINDDPEKFGIGAKGHILRANGTAYLKSNVNQALERILRRSPENAPSP

SEQ ID NO: 153810 - protein, 284 aa, Heterodera glycines
MSSTSSKKTLQSVVEQVIQQDAEIKSSEKPLKQNELEKSERKSTHTVYNLLDHQRSFWKLARPKFAVINFLCPGCRRINYKHKDQFKLMGEDEFHFTQVMCPGCVKERDELISPHPKSVLYCYGQFNDSIPVLQKMGVHVHRGSPTDELLSSLKKPLLLILDDLLTIIDEKSLSELFIKKAHHLNMGVIFITQNLFEKKVKVARINSQYIVIMSAPNAALQIRNLGVQLFPKRLSFFLSAYKDATASPYGYLFLDLHPASSPLLRIRTKIFKEDEEKALYIQND

SEQ ID NO: 153811 - protein, 156 aa, Heterodera glycines
IEMSSHKKMNGKFIGKKKRKIEKKWKKEEGTNTNDSKGKKPSSTAKHSPLVGHESDQKWSDFDIRIQTYRSQNRADADWLEMVANRGTFPDQALKDIFLHELLPPKRKLLTMAQRPLEQWVNPTANNKSEADKRLLMWHFEAELKQLYHQFVQGLQ

SEQ ID NO: 153812 - protein, 116 aa, Heterodera glycines
CNLRSSDRILFDILKKIGDGRKVSFTCDSSRVAENSRVIVRLNLESNEISILQKDQSKIEGEIPVWKFIGSLVGTYCADDQSVNELTDQWLALASSVRIDELSRQMSVHLGAHDFL

SEQ ID NO: 153813 - protein, 168 aa, Heterodera glycines
CNLRSSDRILFDILKKIGDGRKVSFTCDSSSVAENTRVIVRLNLESNEISILQKDQSKIEGEISVWKFIGSLVGTYCADDQSVNELTDQWLALASSVRIDELSRQMSVHLGAHDFLSSQHAICLPDLVLRCCFFDTKTTADLLNWSSIKASNNVQLWAKRVDDACANI

SEQ ID NO: 153814 - protein, 57 aa, Heterodera glycines
VLDKLLAEGHKLMLAQSFYDASVVLCKAAELSSKFFGDFAPQSFLPHFNYGKALIEV

SEQ ID NO: 153815 - protein, 91 aa, Heterodera glycines
MDYQREQRAAKDKGSGNKLRLLSLDGGGIRGLVLIQVTNSDGAAVELARRICHDKKVPFFRITPQLRDEIKIDTTDNVQLIKMMWKAKVGE

SEQ ID NO: 153816 - protein, 30 aa, Heterodera glycines; identical to SEQ ID NO: 134381

SEQ ID NO: 153817 - protein, 54 aa, Heterodera glycines
MEMTGGDHQLNHFVQQLQAEIQKQGLQEQILKMNNRCFDLCITDSRLPSKLDGR

SEQ ID NO: 153818 - protein, 52 aa, Heterodera glycines
MFMPMDHNIQQQVQASASRKARDDFFTFIACGFILEIGTRALRYVGFDSFLV

SEQ ID NO: 153819 - protein, 121 aa, Heterodera glycines
MAICKAIDPKARPKNPFGHFERRANVHPSPRSSHHCVLPRPIASFVRRGLAAAVLKRKGWDEHDEARSSPLGLSYGNRLLIEEAMANVGGMEVWGCAGAETLREQSKTKQRHAQQAERNAK

SEQ ID NO: 153820 - protein, 65 aa, Heterodera glycines
RRNWKDREVSSLLACQSTTTVHQQSGQRWTGQKSIAYSIRWGSNAVPLPIAWVVPLTQPKKVLAH

SEQ ID NO: 153821 - protein, 124 aa, Heterodera glycines
KKDLAPKYPQHLLASIKEKAKLYRQCKIYPTKKALYDSITLHIKIQTKKIHNLIEHKAISKGKNSIFKYIQKHNVNPFEIPNLVFENKCYHESEEKSELFAILFANSFNNSEVVLNDLSLDNSY

SEQ ID NO: 153822 - protein, 104 aa, Heterodera glycines
MSDCIWEIYTVLDKINAESERVETMWLEIERSKDFDQTTKLEEKVFKSLNETKKLHFESRRIHTKILEQESSSVYIVLPLRLSQENTIDVLLEQPIFSHFFTIG

SEQ ID NO: 153823 - protein, 157 aa, Heterodera glycines
MLDHPEKVEKHIFICGDCWLSLFHLLPPDKVGLEIALLSCRFDALVDEHFKTRHWTLGIIEIRNKFRRCYRATGKAEMEILNAEGNAMPIPDRPLPNKVVGFGIICTDILRGKWFRKLLQSIFIDQNILKNDYFPIIFYAASRVSRDRDLVLKNTDN

SEQ ID NO: 153824 - protein, 67 aa, Heterodera glycines
METQLGQENGNDLAVDQTNRTPIKEIEKAKSPIGRSQNAPRTSARANRAPQRLDMDPSKPKYDIIRP

SEQ ID NO: 153825 - protein, 54 aa, Heterodera glycines
MPLGQLPVLEVNGVKFSQSLAISRYLGETYDTQNSGAFKEWPMVRLDLVPCGDK

SEQ ID NO: 153826 - protein, 37 aa, Heterodera glycines
IKVNVEASNQVETAFFMLNISKLVRKKKRHMLQNAVS

SEQ ID NO: 153827 - protein, 203 aa, Heterodera glycines
MSSGLHSNFLNRCKQTIGVLFYLGLMLLQPLILLAVVVSFCASLYLIWYISDFETPRSGARFSESIYNWSIWTDLANFFPIEVIKTAEIPPDRNYIFSAHPHGILGTSSAILFSTNGLNFRGLFPGIKMHPVTLGMNFWIPFRREFILAMRIISSDRESIKYVLSLPKEGNAVGMAPGGAAEALEAHPGSHRLILANRKVNSR

SEQ ID NO: 153828 - protein, 124 aa, Heterodera glycines
MSSSLVLILLVHFCLATNESEDKNNGMFYFNEEGISFISPLLPSLASSSSSLASSSSSSNFNQMTFYQAIQQLPFEENEELLLLCSFSEVNEDKVPNKFKDYLKMHLIFNLGTFSNLVLLQNQR

SEQ ID NO: 153829 - protein, 87 aa, Heterodera glycines
MKPEARKEGIEQYGMMVTYFNNILIFNKWEDPRQVATKCDGYHCFLMTDQNEVNVLAVRYLDNQYERAKRANNWYNEKVVEIANVIE

SEQ ID NO: 153830 - protein, 46 aa, Heterodera glycines
MKKKHESDHRSKVNHHHHHHHSVLIVVVAASPPAFRPERPPARPSA

SEQ ID NO: 153831 - protein, 92 aa, Heterodera glycines
MCWKRYKSDKRGTKVMRRGTKVIRRGTKVIRRGTMVIRRGTKVIIRGTTVIRRGTMVIRRGTKVIIRGTTVIRRGATVIRSGTTVIRREILE

SEQ ID NO: 153832 - protein, 233 aa, Heterodera glycines
SRARSLMAILFIAITFYRLPSFMVELQIKWQPVFRIQKRLETTELSPYRIWLYSVIDPIVSHFLPFVLMCVFSLLTLCEIVKSRQFAYAHYIFTERQFTLSHPLRRRIDGVRQKQEYRATYRATLSIVLIILLYLVLHSMELYILARKWQLLAQDDCPTRADYIQSHVSKILSVLSASVNAFVFIAFTNRMRTYIQMLIRRTSRSLSSNSSEPPLHKNKRNTNSGISRDCLEN

SEQ ID NO: 153833 - protein, 110 aa, Heterodera glycines
MKYGGGGTPTAAANFDHHQQQQQHHQRQQQQQQQRGGVIAGNTNNANSSNNGGQMFVMDGQSSVIKTAPPCRANASNSSSTNSAMMMDFSPKQEPIDLAPLAHPCLQVSA

SEQ ID NO: 153834 - protein, 424 aa, Heterodera glycines
MPTQLEHYYVASSKGGIGMPAGYGATAAGPAYYEYLNVGSAAYPTPTQPGPSGVAGGASAALLQPTAAAVVALQGTAGGQPHAAAPHQDWPYMSYSSVAAHAGLHQQHQQQLQAVQQQQLNGYLDVVMEHQQQQQQQQQQQRLYCGGIGTGGGTANVGSSKIFNGIFSSHISSELLLFDRFGHFNLSIPIPITFCLDHFSIPDHFMSLGPFFVHYPKRRGHYNSLFATDQINTKRCAGKAMDAVTAATLAVNAATGGIGTVGAGGGGLLSPVDSGIGTELSLLEHAKQLHEFFAPGCSLASAAVLQLPQSVQAQQPSSASSALQSVIHHQQQQQQQELVAGVVQQQTQQQRRDHNNGRSGAGSSESGQFYTVSLDYIPDLHCPLKGLTSQIMVVFREDKTFEDELRTWMLWHKRQHSHKQRIIE

SEQ ID NO: 153835 - protein, 435 aa, Heterodera glycines
DFFNKRVLMVNRKAKDYFEGFFGTVNLFKMLQKFDLDIGTDVNLSLYENDVPTDHNCADGERATAAAVWGHFGRGRAAQFDRPQCYNDNIWYLCDVLQELFCSFVGAKWSVLLSAHQMDISFSYLTPPNTSAIAPHWEDNDAFLLQIEGRKYFKVYSPASDKDTSPLDSSGTMSESDFDGREPTFEGWLEQGDTLYIPKGWIFKASAGDVHSLCVFVSICRGHSFTDFLEKASAEFVKTMVSGSKHLRKNLPPLLFDMAGNSGNDYPGEETLEEKIIPVAEVFSRKFGENFAAFVPSYIDLMAREFFRFALPPLLTPEEETKICFGGAIDSSLDIGKKTEVRLVRKHTQRLLFENAEKAFIVHRMANSRSCEEYPEKTIDFPIEFEDGFVTLVDSYPNWLEVGELGLESQEANVELAKLLFTNGILLVQREKSFG

SEQ ID NO: 153836 - protein, 43 aa, Heterodera glycines
MEVIGGRKEKGGMWERKRRLTEGRKGRDWRKKRGSLIKEEEKE

SEQ ID NO: 153837 - protein, 53 aa, Heterodera glycines
MAPLCRHASFPIGSAPPARIPSLIVPYGWPPTNEFVSIQKRRWKENAGRVVYF

SEQ ID NO: 153838 - protein, 92 aa, Heterodera glycines
QPKTKFRNGPYNQLKLTVRGEAQVRASVLHRRLHHGTSAVTMDQKVIFARFIARFALNAQEVLIIGAIGRSESDDHFGRLFTAQNLRVFSAL

SEQ ID NO: 153839 - protein, 112 aa, Heterodera glycines
MAATGGSFVCRRYLLNDDEVSDTFDMLDMDKDGRLSRAEIAALLRTANVEPTRKEWTSFSREMDKDRELKNMLANIANLHDDDTIGQMFEHCDLDNDGRLTFDEFLRMIRRE

SEQ ID NO: 153840 - protein, 32 aa, Heterodera glycines
MHTLLNDEYVMDVCTELETRGDDFVLILTRSE

SEQ ID NO: 153841 - protein, 25 aa, Heterodera glycines
LGHFVAWTFCGSASRRPPYEAAKRP

SEQ ID NO: 153842 - protein, 41 aa, Heterodera glycines; identical to SEQ ID NO: 138623

SEQ ID NO: 153843 - protein, 101 aa, Heterodera glycines
MKNEFKQKGRKYSTKEWKQNYAEICKKIGVSQGIIEKWKKQFGIRSKSITEKEKMEKIKIYWQIKKENPKISDQKIAKMINTSAKNICIWKAKFGEENLQF

SEQ ID NO: 153844 - protein, 126 aa, Heterodera glycines
MRATHVGIWHHRMWDSCVFHYITHDSALVTWHCGECNRRSFQTFEFAMGDKTDRWGRYLLHQSKERRHVVNIDEADVHREFMLMRGTGHYNLFYYNCKHWAEEFVINNPGLKCLNYNGTQMTNVFS

SEQ ID NO: 153845 - protein, 39 aa, Heterodera glycines
MYENIYGVLVMIQTELWGPISNSIWPVAEEGHLIMLCFL

SEQ ID NO: 153846 - protein, 71 aa, Heterodera glycines
MDKDKDNKDKIEPNGRSDHPNRPCHSAGTKRDGVGTKNGILPLFESKATAATVSARTRYTPQFKTFDVLIV

SEQ ID NO: 153847 - protein, 103 aa, Heterodera glycines
IESLELWRVSCAGRNCSRRCFGFEEWENPVFCADSIPFCTSGVAWPIWMIASSVGLNFVLIVLVLVHLAVVRVRRDLLFASFGVCDQCQRRVSVLSSRIVSSM

SEQ ID NO: 153848 - protein, 259 aa, Heterodera glycines
MLSYFRKFVYGFAEIHQPIYELTKNESTTEWGPPHEKALEELKTKLMTAPVLAPPKFGQPFVVETDASIKAIAGCLLQENREGEVHPICYFSRVLTKHEKRYSVVELEALAICASLKNFRPYLEGAGKSTVITDNLALTSLFRRKDLEGRLSRYQLAIMAFDVEIIHRPGKRNQFCDHLSRYLDDNDTQINWLKIEPKISQSEMREAQKQETDTQKRRETLKKDQNSEEPNEFSGKWKLRKIFCVQWTEENGKFMCQAV

SEQ ID NO: 153849 - protein, 106 aa, Heterodera glycines
MMANVRERIYRCLFTLSDFLKGLKMFNHKFMWSQNEEEAGKIREHGQMFVGGFEVTPGTRIGGFEMVPGPLVRGQLLAFINDLNDRFGNAKKDCVKLAVWAHRELV

SEQ ID NO: 153850 - protein, 223 aa, Heterodera glycines
MDIDALKRRVTTLERQLQEHANPRTGLPLPGTFDGTTDFYNYLKSFNLVATAHGWNPARCVQILPLYLRGSAKAIYDGLDQNVKTNWKDLVDGLADKLKKVSSGLMARQKLAQRRQFAGETLDEFAQEIRSLVAKAYPDNTLEMDLATLALGDRENEVKEENAKRIQQFRSEIARDFFRANMLPEIKERVMYMEEPQNLMEALTQAKRVEQIQGSLANDQWRM

SEQ ID NO: 153851 - protein, 291 aa, Heterodera glycines
KTNDKYSIFPFLFQVLFQQFKFFLNLYFLLMACSQFFPAIQIGSPITYWGPLGFILFITLIREGFILFITLIREFVDDMVRLLRDREVNSEKYAEGRVLIKSAEIHVGDLIIIEKDRRVPADVVLMRTTEKSGACFIRTDQLDGETDWKLRLDGETDWKLRIAIPYTQNLLDDMQILDLNCEVYAEKLQKDNHAFVGTYRVSVIQNSRENSLSVENLSVENVLCVWANTVLASGTAIGLVVYTGRETRSVSVMTTLPDSKVGLLDREANNFTKCFLFVLTLSAVMVLMKGH

SEQ ID NO: 153852 - protein, 110 aa, Heterodera glycines
MGGQKKIHLVYADKPVSALEEEFNAAGKLYGQPVPALGAYKNGRSTPIEPRLDYSAQSNADDHPGLGYKCGRWQVEGMVPEILEEDIGERVFYTQAQVEQMLDDFKTGLF

SEQ ID NO: 153853 - protein, 129 aa, Heterodera glycines
MTKKVFVETDAAVDGRRDAILAGARRKAAFYQLKKGVVMRMDSMYQQQQQTGQIGQKGENEAEQQQWGKAHTEEQAAFEFVDVVVHPEDLFVNETHSTSTFVYQAGDKILQNNSLRHRMARFLLPPGEL

SEQ ID NO: 153854 - protein, 171 aa, Heterodera glycines
MVADGVLSELVLCESRPTVADAAASAENAGPPAGTTGDNETSPQPHHQQQCHRPQRVYDALRQRSAEVADFLMPTDNEAEELGEGGLFYACGDVKNMSRELWACLSDILQREKGERYLADLNRDGIEPMVLVETNPEYPFVKKPQGFSPVEAIHLLKKLREKERLIEDVWS

SEQ ID NO: 153855 - protein, 95 aa, Heterodera glycines
SSSNTLWQCGAPIPTAFGPLLRTRVVRNECVTRTDTGRIGKAKWELELALITTDQDGADDQQEQQQRELLESCDAGDSFNVLFENPEQEVDFVLK

SEQ ID NO: 153856 - protein, 69 aa, Heterodera glycines
MIPNNKNTFCGEREKKRDQQREEKRERKTETWKQNDDPKMWGEIFSKEIPSQCATDREFCTQSNVKCSR

SEQ ID NO: 153857 - protein, 20 aa, Heterodera glycines
SPCAAPTAAVFEAAPARPLI

SEQ ID NO: 153858 - protein, 32 aa, Heterodera glycines
MSRMVGHTKPTSEKRNRTSIIFKSLKTARFIL

SEQ ID NO: 153859 - protein, 19 aa, Heterodera glycines
MFTSINPLVLFLLFFVAGD

SEQ ID NO: 153860 - protein, 55 aa, Heterodera glycines
STGYREAIPEGFGLPINLSASVRGDCPENKKIDFFKCPFGVLKQLWGAKIQRRKT

SEQ ID NO: 153861 - protein, 211 aa, Heterodera glycines
MAPPVKKKKKFSSDNRRLISSTGIGEHEQQSMGSLTTSFGKRQSLFRHAKKMNNRILRKIWICTDIWMDTFPFFDHAQLGLKLALISPRFDVLVDKHFNCQSELTIWREITIVKDTGSELNLTVRIGGKSVQFPLPDRSLPNKIRFDNLNIDYIDHSVLVFLRANKQIWDKGTNLSLYVCWSHNQNDNNNNFLPIWDVFVCKIWPIFAPNI

SEQ ID NO: 153862 - protein, 30 aa, Heterodera glycines; identical to SEQ ID NO: 126607

SEQ ID NO: 153863 - protein, 30 aa, Heterodera glycines
METDLITLVKEGDFEAGPPKQYYVDYSIFF

SEQ ID NO: 153864 - protein, 87 aa, Heterodera glycines
MLKNENWNYFNLNHVKMVEWHLLALALRKDGQCQKWEEIEDKWEEWKSEFNLSFGNTNESQKFQKLMEEIKEKMENLKKIMEKREKE

SEQ ID NO: 153865 - protein, 39 aa, Heterodera glycines
MRIWPSPFVLPSLPLALFLPICFRVVLLLRFGAGRDDAA

SEQ ID NO: 153866 - protein, 80 aa, Heterodera glycines
MSLDFMNFPRYVLENRHTRPWKRIIDDESPALNALLNFEQNYWDANACHTDLEIIGDKNLTVHYKERASGNFIPKIKLMG

SEQ ID NO: 153867 - protein, 120 aa, Heterodera glycines
MIFRSIKDFFKSGVCFGFGVKKQPKSDERMYDGEGFYTYDSNGIFWINGSYKGMFERNAYGVNDIVGCGVNLATRKIFFTKNGHRMGAFDFDSFSDIYQLFPFVSLPYWSERIEANFGPF

SEQ ID NO: 153868 - protein, 55 aa, Heterodera glycines
MMDKLVQQMDKEIDEAFSRVRPGPRCKPGFSLVQGPGYFPGHGFLFTNLAPVEIG

SEQ ID NO: 153869 - protein, 90 aa, Heterodera glycines
YCWKTYLGPLLEQPKSDDEEKPKPEGGEEATTAGDKEEKKAGSKGDKHKKSGSKGDKHKKDKKSGSKSDKDNGPADENKQPQTSAYATPT

SEQ ID NO: 153870 - protein, 478 aa, Heterodera glycines
NLQEGKSLKDKNLPQKTLENENINYEEEKKIANLYKSMNADQKIIYENKTNSISKLNPKLIYIDGPGGTGKSFTLNALYHLVRSYTLHMTNMAFSGIAATLLKNGRTIHNRFKFPLNLNAHIISGVVQGTKAAEEIIKSDFFVIDEAPMTPRFALDAIEKKLRELTNCKQLFGGKTIILAGDFRQTLPVKKFAVRSEIIDLTIKKSIFWSKFEQMKLTINNRAKDQIFAEQILEIGNGTGDSIQLPNNCIIANDSNLIDEIYDDVFKERNNELKNRLILSPYNDLVDQHNTAALEKFPGECVTYLSIDEVETTNNFPVTPEIMNSFNAPGFPVHELKLKLNCKIMLLRNISIENGLCNGTILQVKELKNNVLKCIILGGDKDGSEAYIHRISLITESEFPVPKRHQFPVRLAFAATFIKGQGATYKKIGVDWTRQSFSHGQTYVALSRVGSWQQIKALVRSRRGCDSRLKSRSQNQSK

SEQ ID NO: 153871 - protein, 142 aa, Heterodera glycines
MLFLCLLQYLLLINTVIYGQESNGGGYGESYAVNGKFGEGNWQTGRFEGQHGQFRGRNWQNGQNREQNGRSEVNILTSQGGGANHRQAASNSCDQIRKSPSTAIEQLIKGRLINPIEDNSQRYTLYAADFARTNKSGGCFPQ

SEQ ID NO: 153872 - protein, 242 aa, Heterodera glycines
HLTLVHRLLYLLVINTVEGKEMHIFILFSKITFLFYFRPFVLLPKKRPVPEIVKRFKNDLVLCWCGRTWMDNELTTKFLEEVLGGFAFRTRLLVWDSFRCHVLGGFAFRTRLLVWDSFRCHISDDTKQTLRRLSIESAVIPGGTTKYIQPPNVCWNAPFKQIRQIYPPNVCWNAPFKQIRQIYDEWMVNGEKETTSSGNMKAPPMETFGTRRKRWSTLLMNNILIKFKNCGLFQFTRPISDH

SEQ ID NO: 153873 - protein, 114 aa, Heterodera glycines
HLTRYGDAAIRRAVPLALALLNTSNPQLTIIETLSKYSHDADTETARNAIFALGLVGAGTNNARILAILSFHSNDQNTMMLLRITQGLMHLGKGTQTLNPFQSDRQLMCPAIVP

SEQ ID NO: 153874 - protein, 130 aa, Heterodera glycines
VRINMQKEEMHVIRNGRNATKHDEVHSVDEAHDHVSGAGGGAHHDESFGDIMVHQSIHTIEYVLGCVSHTASYLRLWALSLAHAQLSEVLWTMVLKNAFAFHLGVAGYFVLYFIFFAFAVLTFSILVLME

SEQ ID NO: 153875 - protein, 220 aa, Heterodera glycines
MGLFSIHAGLLYNDAFAKSFQIFGSAWANIPYNDTEIDSWLSKPEEAGKEMEVHLNPMTAYDRARGPYPFGMDPVWNLADNNKLNFLNSMKMKLSVIVGITQMTFGVALSYRNYKFFESPIEVFTVFIPQLVFMSSIFIYLCLQIIAKWLFFWSRDAGFQDDNGKELPGCYLNQWYPGQSFVEAILVIIAVLCIPIMLFGKPFHILMHQRRAKRAVSDNM

SEQ ID NO: 153876 - protein, 185 aa, Heterodera glycines
MVFYTTPFFMVFINDSAPYLRLILSESEKKRNISILNRKNTLQVPNFNRIKNLKKFFNIKLVKKAKSEDKDEILEAISKIREMLEDSLKGNADEQLIDELVSADVLDALVDCLSKDHASRPTLMANAMAALAIIVTRKEKLVFEIQNVMDYLNYWLMNSTDDEVKKNAVSILKKIMPNVRILAGI

SEQ ID NO: 153877 - protein, 36 aa, Heterodera glycines
IKVNVEASNEVENAFFMLNISELVRRKKAYASKVGL

SEQ ID NO: 153878 - protein, 163 aa, Heterodera glycines
ESAKAKSEKEERKDKRKDKRKDKRKDKRKEKGRTKGRTKGRTKGRTKGRTKGRKKEGQKEGQKEGQKEGQKEGQKEGQKEGQKEGQKEGQKEGQKEGQKEGQKEGKRKDKRKDKRKDKRKDKRKDKRKDKRKDKRKDKRKDKRKDKRKDLLGLRVKSEDELEE

SEQ ID NO: 153879 - protein, 107 aa, Heterodera glycines
VCPSQLPSLSVSSSVSDCAPSRINLLWSLNSRVPSLLLLQQRAHKLCLLPIEVPFSVIAHSTELFRYSLRNALRHFALCHSSNSSSLLTLNPNLAFADSLYSDILYF

SEQ ID NO: 153880 - protein, 261 aa, Heterodera glycines
ILYVCFFTKEILHFVAMEMGKGKKKKSFKACNREWSGDFEKKACNREWSGDFEKEFAMNASDFYDFPFHPKVLDYGQFLAYCRLADRQTQCFIERCGDQSADRVFSPSNFLCTFKRQHFLRARSCLEDSEPISFLRCDQKCHPPKEGTENAAKEREREKGEVYSGDEMDGYERELGRVCAFQHCYSQCQEQIATQICPPGPATLAAELVRTYVQWHSADLLDWHILTGNELRMPQSCAKLAKSMTTAKGPDPVLKAMLVAV

SEQ ID NO: 153881 - protein, 790 aa, Heterodera glycines
MPQLPMDRVRRRIPFESVGLDYLGPTVTLDANGQRQKTWVLLITCLTTRAIYVDATRDLSAQSFISVLRRFIARRGAPSRILSDNAPTFTVMGKTLSDFGMAGDDPRHFSDSRGIQWRFTPQHTPWAGGIFERAVQLVKRALQKTLGSAVLGYDSFATLLAEVEATVNSRPITYVNSTAGEPLPLRPIDFIQENGRLWVDPPDTTGQAQDERRDPPHKQLARQWRESQQRLEHFWRRWHREYLMTLREKAGWNHAQRRVNAPGTPKVGDMVLVEDKFHPRNLWAMGRIEELRGSDGHVRSVLIRMANGRIWGRPVNKICPLEEAPPKMHDQADQAVHEPCGDDARAVETQSEERSRNELSAATKEEENEGNVSEESAEKRGREVEAVQPDGRVNREIRNDNSLGNGPDDPDEKCDDATATEKMAVFETAAEVPSAAPGETGFLAHPHSAPRHEKKYLGDSSTAPGLLNVPTKFQPNPTRSEGGDRFGADGPQAVQTAESGDEFPEATAVEQQQNEFERTPNNPEEEVHDEQDTQGVQAVPEVEPRKSTRTRRNRAVWSPERHVPRKRGRRSPLVALAVLLTLLCPAPSWACQPTLRAAPQEPAEPGMSTTMLPCHMQCTRRGVRTVSGQLMEKIEICCPDGCWTTIPTSTVINYELPDEMLIHGYSCSGQCWRGLGPPVNVTQRCPARAECELISCAFCWEQLANPTCNPRWASTLFGFGAALMLAALGCCCSIASRFWSGATLFSRAIAWGVSYPITFINWATGRHLPRPTANQIESKVRKGARVARAE

SEQ ID NO: 153882 - protein, 103 aa, Heterodera glycines
MDVPLAAPPYQRMASLPPVLPSGHSSSVAQMPAGGGGGGGGISFGTTIQQQQQRPYQLYHHHHHTVQQQHQNGMPMICGGSGNSATNGNTINGNANNDYAAFV

SEQ ID NO: 153883 - protein, 63 aa, Heterodera glycines
MDQQQCALQLAGRTAAHRVPAVRRFMRVLQSDQLVRVVMDAEIPAAFHRTKKPKQNPAEQKIA

SEQ ID NO: 153884 - protein, 26 aa, Heterodera glycines
MKDSFGRWADRMKECFGDGTFSLAPS

SEQ ID NO: 153885 - protein, 281 aa, Heterodera glycines
MPDGTRVTVNAGNDENWLGEVKNGQAEVAIVPNAVKVTVDGPRDSRNASVKYHLNGQHVPRKLRSNLELDAMMGQLKKAAQQQQQVQHRNGIFKSAPPPPHFVHPNFFLTAARQPQLLRCPPTMLQQQNGTGQPPSSQSHFSPLSVAVPSLPMMPFMMPAAASLHSFALLNGNNMMSNRTAFRQPTCAFGNNSLLDAKLADAGMTPPATTVTPAVSSAPRPQQGFIAASPPLRHCATPSAFRALSIFPDPKMMASAAGPISRLRPGRGACVRFCRRRQWPV

SEQ ID NO: 153886 - protein, 600 aa, Heterodera glycines
MKARPFPIGTPHVWTGEQLWQAGAHAFEASAPPPAGLCPPPALPWRRPEDNPFRGFLFCRVLPPTAEELGDREPLLPYRTQADGRLIFGLCARCAELRQQRICHHTERERAWTAAYTHVELNRALSIGYRVLSVHEVWHYERWASPDNGNGLFTEYVNTFLRLKAEASGWPAGCDTEAARAEHIRQFAEQEGIHLRPDNIGHNPGLRQLAKDLLNSLWGKMAERPERDEVVYTNSARDFHELLMRPEQEVVSFTHLNDQLDRCVVRKREPFARAPEHNNLAVACFVTSHARLYLYDWLEEVRRVGGRSLYCDTDSVLYVKQRGAEGVREGNALGDMKRELPGRRIIDFFAAGPKNYGFQHVDACTGGDLKAERKVRSFELNYAADQQLQYERMRQLVINHFGVGQHHQQQQQRGPAADAADGSDGQEERTISVPCQRFVRNRQADIFTRRSTRVYRPVYTKGRVLRRGAAECVDEVPPQSIRTRPFGWSCCAGDVESPDSSVMNEEEEEEEPMQMAPDEADQGEEDRWGEHVWPEEIADDNDEPGPERKRARVEQCVAPPPPSPPPSPLREPHAEPEPVAGCSTWDQITRHTKHICRNNF

SEQ ID NO: 153887 - protein, 98 aa, Heterodera glycines
MNEEEEEEEPMQMAPDEADQGEEDRWGEHVWPEEIADDNDEPGPERKRARVEQCVAPPPPSPPPSPLREPHAEPEPVAGCSTWDQTTRHTKHICRNNF

SEQ ID NO: 153888 - protein, 413 aa, Heterodera glycines
MDMFRFNVHNAVKDTDDAAADSAAHDQCQQRQQREVASPRTMPLLVEEQAHVSAAAEAAAEAASAVDQKMSAAPNDTPAITDTKIDFMTDEQTVAAAPPPLFSEIEPTQQQQQQQQKQQQGRTAEIIAPKVELSAEDNGDDDDDDDDEAGQQVKQEADRNGMDAHHSNCAKGPLLFIDEQENEEEESEEDEDISTTHRRQGMDSSFDYEDDDDDDDNDNDDDDDDDDDEMESVSGCAESDKCGHCHHPHQLPRNALEVLKMPLIDYLCALNHGCSVGELQALFLSKGARGRMLTHLQKRCLLRTVHLRPTERNITLHAHNFSARSASLTFACGGYLNLTVRQYFFAKHGVRLRHPSLPTLVEFGGGMHASYYPLECIQVHVAVTAPEDAASTTSTTTTTTTTASSTACVRLTN

SEQ ID NO: 153889 - protein, 265 aa, Heterodera glycines
MKQQQQQTKEQPLRHQQVPPVFKHPFTMCVSGCTGSGKTKWVLRMLANLDTLVGPAHISGVLYCYGEVNEDVLRLQQLETESGDEEENMGGQPRRRWVRPCHALPDEEAVKRAAKACGGRLLLVLDDLMVGMRAPFLDLLFTRGSHNWGVSVVLITQHLFTRELRIARNNAHYLVLLRNPAGALQVRTLGIQLFPGPGALHHFLEAYDDATADPFGYLLIDMHPTTRPLMRLKTHIYPGQLTVVYAPRVSAATVATTSMFNAEEH

SEQ ID NO: 153890 - protein, 349 aa, Heterodera glycines
MKHTTRMLLVPEEMYRSLLSKAPGAAATDALDITPTTTTTPIEHVAKRMARVARTAQQTATRALMNDDERLIHYQQEYKRFKKLLADEQERPAPVRLNQLPNDPASKGVLRDALTEAAKTLQQQLPQQLQHSPPSLTKRRRRTTAVVPARAGVHSTPPVSPQPPAAAAAPQHPERRQDKDKSGITGQKGKRKRTTTASSYTSAASGAEKEEEQQQQPAAASTSSSTGAVVVAGAQRLGEAEQRRKQQALDYTSRHAGTLGIGDGQQVYKFMHGAYRPIKNSSLQAVLAYHFTSAQQPQQQHHRLKPPPGYQTFIANAKQHPQLSHLLFPTSSTSSISGEGHGGGGGGGG

SEQ ID NO: 153891 - protein, 107 aa, Heterodera glycines
MKKSFYEQKKKEFIERFDEFKSLYSQGKQNEFVKELGISEFTFVKWKKELIPNYHKKHNTNEDKLKKMKQYFEIKERNPKMSDEIVAKKLGISQDTLRIWKKKFAST

SEQ ID NO: 153892 - protein, 122 aa, Heterodera glycines
MARPRGGGRNPAKARGARAKRRIGNKRKAAAGTAANVQAADRRPICPICLKKMTGVRQVRTICDHVFHYVCFHRWLKYRLFCPVCERNFRTELYHAGNAVVEGAYADGHVVLRTDGEQSNSG

SEQ ID NO: 153893 - protein, 29 aa, Heterodera glycines
MPTPSRARVYADVNVNKPREYWDYECHQI

SEQ ID NO: 153894 - protein, 41 aa, Heterodera glycines
MSADKSDELCQTVAEIRQGIDRKGRCLFNSMRRSVRAGKKR

SEQ ID NO: 153895 - protein, 119 aa, Heterodera glycines
MTTIRCSRVHRTNCPNTPATLNVQLMASMPRFLISYWMSFSSSHGFRRPHPQGQDSVENSAHIGRVGQCPNSSVRGPATAGRGGGPDEQLHLDGQREFVLFRRTVPPHLHPKVAERDGQ

SEQ ID NO: 153896 - protein, 171 aa, Heterodera glycines
SVIFSFSNPFFPPGDFPLILLKPKFPPLVNYRRIGDPAYYPMEVCFVLDGQRVKSSQQNPEQIRPMEVCFVLDGQRVKSSQQNPEQIRMIKETAIPPTVLRVHNERVKESLQLVNNEYLTKASVHFDTTPLHVDYRVLGPSATLYRNNHRVPPATSNWEWRPGDPLKNAQI

SEQ ID NO: 153897 - protein, 258 aa, Heterodera glycines
ERSLSLPIVNSVPTNNGAVIGKEEDSGKGGGAVSAQPEEEQPKKQQQNLTHSPTPQIRTKAQSQNNNKEQNQQRQHYHQQQQKQRVQAVPATQPQSQAAVTAADGADSGIGSDSPRTHTQPLSQHEIMPEMTSTSVQQADDIKERHSFENGRDTDEVPTLNRKMSPPPVPPKSRRNSSMDLDEMEPNDPMRSAYEDSTIGRDHSVLPPGARPTFGRKYSAQGTDRMPEGSSSDEKGATEGTTRKVCPMVQPELVAMGR

SEQ ID NO: 153898 - protein, 196 aa, Heterodera glycines
MHVGQQRLPLRDLPQFEDHPQNVPAVRVQPMQQMQQPVPMRAVPQFLHPPPNAPEIGVGPIHDGQQPLPLRALPQFAQPPPNVPAVRVQPVQQPIPLRDVPLFVNPPPNVPVIRVQPMPQPLPLRDMPQIHHPPRNVTSIWIKLWLLFLSLWVFLQGIHVRQIQREYAVPQFAHPPPNVPYHPPENVPKLDAKPNL

SEQ ID NO: 153899 - protein, 32 aa, Heterodera glycines
MNGTITVGVGLVWRFSLRRCFSQGEGLVWRIL

SEQ ID NO: 153900 - protein, 193 aa, Heterodera glycines
EFTIVTTDYNKVLKIADIGNASSSNPLNEEPLAQIVRWHWDQNGAPKIIETKTLNKGSEVNFAIFDDTSSFVIRILKKREKKSEEKRAFPAPSDSSPDDDLTVKIGEKQITNNIDKIGDFDQVAVSAHWLMTVSPVISRMMKEKQQRMITLDELGVDMDQFIAFLESIFYMTKIGPFLPNRNPLKNNYPLFMD

SEQ ID NO: 153901 - protein, 105 aa, Heterodera glycines
MLGELELLLTPAAAVGEEDMAQQRNNNSGHNNQARISRVSGAIGGGGTAHTDSATFAMAQRNAPHMSDGRGGVAVDGRASRVDNLAGISVAQPPTIAAGNNRGCQ

SEQ ID NO: 153902 - protein, 143 aa, Heterodera glycines
MATRKRPRENGHAKTATRKRPRENGHAKMATRKRPRENGHAKMATRKWPRENGNAKMATRKRPRENGHAKMATRKWQRENGHAKTATRKRPRENGHARTATRKRPRENGNAKMATRKWQRENGHAKMATLKWPRENGHAIGGR

SEQ ID NO: 153903 - protein, 41 aa, Heterodera glycines
TKLRFFQLYNMDQQQKIKTKRNKVKLEHDGALYVFEQLSAD

SEQ ID NO: 153904 - protein, 414 aa, Heterodera glycines
MIFACDEVTNLVAGTNDCAVTQEGKIECSYDQTTQLSITPEHLTCLKLDNTKTNTTMETLQITIETLTIICTEKSDYFTRGYELSSTSQKRCSGAGKCTGQTCQSVKMSDRNPEVNDHANNQPGYSYCVPSCGGWHCQCFLATDGCLFYRTYAESVGDEIFEVVNCPSWTIQATIKLSINPELTYSVDLKPGILTHIGDESNSSISVTLTSTSIPPTPLFGSTFIIVREELKAAIVANGNLLKNILRCKNKEEAQSFSCTFPPEACQCHGGDSVVHCECEKSPLTEIFARQENLLPIKTQGSYVYFDSQIKAKIQQTTSLQMQVTLKGHKVKAIYDKNICNIVTISLEGCYSCTSGANWTLSCKTCPDEIGIVKGKRKSKQLMGKWQIQTDNTQKHILIKMRNCSVLWCKKNRI

SEQ ID NO: 153905 - protein, 55 aa, Heterodera glycines
HRQRAAKAGCSERRWAGAGKLRREPFVSNLKFPEKSTPLNTIFFAPKYATISHFN

SEQ ID NO: 153906 - protein, 71 aa, Heterodera glycines; identical to SEQ ID NO: 149698

SEQ ID NO: 153907 - protein, 108 aa, Heterodera glycines
MTSSCNGEFDVLTWQSGADRTGSTVRRMGTAGQTGRAAGTAGQMGTAEWTGTTGRTSTAGRTAGQMGTAGKARSRVVAPILVVATRNLRRTLRGEGDVKGMKWARRAE

SEQ ID NO: 153908 - protein, 2190 aa, Heterodera glycines
MNKEEWNNEWKVQKIFREKHDYLKTIKEIDEILDTLKDVNLEVKRRLKLLKAKSSSDSDPEDESNDYEHENEDEVEEQEEEKEYESDNEDESPELSLNDQIHHDRIPFVNYRSRIKLPPQTLTHFNGKFSQWPSFWDDFKSSVDNDPNLENIQKLKYLRGLLHDEPYRIVSPYPLTNKNYTIVIKLLKSRRFILLIDRIILQMKSQGEDINHPQIKQSIETKLPYNIRLKLKEKFKIYSTKEIMEFLNDHTQAREDIERMEESNRQIRNFPSNRPPQNGVQRQFYPNFPHNQMKPNPWNQQNTSSSPFPYTSAFTTNSNPVRLAQFKSNPTQTRTQNKIFCRFCERENHASKECKIYSTPEKRNERVRELKLCLNCLNKGHMVNDCKSTYLCFNCKYKHNTLLCTRKQTQYKTKEQKTRVNMAQNYENREETQTFMTMDYDKNLYNYEEEELLMTTEVNVINPDKPKIKKEIILFDNGSQKSYITEECAQTLQLSTIEEKLLAISTFNQNKPKIIKSRLVKVGIKTLKGEIEYLTLQTVEKITDVTKMVNKETVDVLGVKIPISHARPQILIGIDHYWHFMLPNSQIQLLPSGFYSINTKLGKILSGKGNIEDTNCNSVTEKRKRDETNQILQKFWELENIGIIDSPHMTDEDTAMIHFDKNVTFKNNIYHVRWPYKRENPNLPTNFGLCLGRLRNVVKQLIKNKNLENYDKILQEQMDTDVNEIAELKSNNLLHYLPHHPVIKESSNTTKIRPVFDASAKLKGNNSLNDEIHQGPKLLPDLCGMILRFRLKNYVLIGDLEKAFLRVGLNELDRDTTRFLWVNKSYLNEIKQKYREIEMRDIELRRFTRIPFGVNASPFLLTAVVNLHLSKIDEMFEKFKTLKVNGELCLNDKEEEFKNLCIELKQNAYVDNFVMMCDNEKEIKFKHYWSKQIFKLASMNLREFISNHEQSNKEIQKLEGSEIPKVTKMLGIKWNVDSDELDLQIKIPLMSKDTTKRQILTMIAKNFDPMGWISPVILKYKLFFQKLWRSNKDWDDKLDDQEIIEWNNISNTDIITIPRSPFTSQYLNHSILHIFSDASELAYATSAYLHTNDQVNLLFAKTRLTPLKGLTIPKLELLGLLIAARAAKFIKTESKLNLENTYIWSDSKCVLSWLKCKKNLPIFIKNRVEEIQQIALELHITFHYVKSADNPADLASRGATMSELKYNKLWWNGPKWLKLEKENWPPHSFYSPDQEEAPYLDNTEEIINTQINLIKNEYNGIIEWDKFSSWLKITRICQTLLKFIFFKLENSKKFKEKFIYSKFENALQLKIMAQKMLIRIIQREMEPNKEEERQLRIYLDNDMILKCEGQLKNAQIQGVNPIFLPRKHYGTHLIIMDYHTRNLHAGTMTTLSEIRKTYWIPKGRRIVDQIRRQCYHCRRYNAKPFQQPQMPPLPKSRVEITEPFQNIGLDYMGPIQIKNFNEKCWIILFTCFTTRGIHLELVTSLSVQHFLNAFRRFISRRGTPKHVWSDNAAQIKLASKILPEVLKLREILKDESIKSYFLNENINWTFSIELAPWQNGAIERLNQNVKTAMRKVIGKRFIEFDSFQTLTCEIEALVNSRPITFIYDEINSYQILRPIDFILPHKNLCIPPILENQETKDPTYYPKKTSYDQTIELWKKTTKLLDDYWKIWTDEYIPSLRERYKIENKNPRNCMKSFPELNEIVIIHDQTPRAMWKTGIVKNVITGSDGIVRGANIELPNKTVLNRPLKLIYPLEINSNDDKEQETLSNLIINQKPNYFNRKRKMDNPLVPIKMNRLFQNSLTIISLLTLISLCSSYSYECPKEPKIWKTRYTTLCIENGFTIRQNKITKEFCYKQLVCKDKHIIKRRPPYCGEKCKCPEGFKFCSFASYNKIKNESVEKINYQSIISFFKPNICAPNKTENCPIMKRKLFNSIVLHDNSIHIVKTLNLLFSQIDSINNFRCFGEGNLTIGTPIYCREHDCFKNNSFKQIYGTKFCFYDPYEKIYLVKSDEELIQIKAWGTIEKIFYLPNNLNQPFIENRRNKREENSSITEESTIECLKGGIIIKAINDIQELQISIENYTIIKKNPQKEEIIYLPPKLTSFEYKPVIKFISNPDKSNEKQITCQSSPVCELINCRFCMDYLKNPQCVDQIHWALMLVIIMIILCYFIKPPNYSNTHTFYPLDFTIYF

SEQ ID NO: 153909 - protein, 605 aa, Heterodera glycines
MPHHPVSPQQPERREHQPNFIAAQVACPECIDNGSWRSRTTAGCRICGPHRTVAFCQRRFVDTHVDHQVVVADDNPLVAFVHWLVFELPMSYDTYAYSHFGGRFDMVLVFRELFRIGFNPEMLRRGNKMYEMKVRKQKRRNPNVVFRDSFNLMPCSLTALVPSYGLEVEDKPFFPHLSNRPENYGREIHPTPDDYMASGMMPSKRRQFDAWYAENRHHPFKLDEALASYCTNDVEILMAALVAFRREFFDISRRQEYVDGIDDRENHNGIDVLRECMTIAGACMRHFRTNHLPAEHLAIVPERGYDNAQNQSLLAFRFFHWYAEEHGAEVQTAHSAGGEKRIGQYSLDGWIEAEGCAIEVNGCTWHGCKKCYPNDNMLLPSGKTAGEVRERDAKRLEFLRRQVNRVDVHWECDIHRMLERSREMRKSFADYVDDGPLVIRDAFMGGRTGPLKLLRKAGPGEKISYYDFTSLYPYINFVTRYPIGHPKVHVLNRQVDWRNAADNPYPLALLKVWVVPPRRVDVPVLPVKVGERLCFPLCSTCAKENPTGGVNPNYHCEHNDRQRGWVSTCTSIELNTALDEGYIVTEGIPRAGVRAERRQTVPPVH

SEQ ID NO: 153910 - protein, 97 aa, Heterodera glycines
MSSSETKLDEKSNEISNNELMGENNAKDGNVKEANNSTDKSAEAEVHTDEAQLGIAAVDPKPTDFSEKPTDIQKSGKPEEQQQQQVIDNISSTIIRC

SEQ ID NO: 153911 - protein, 43 aa, Heterodera glycines
MSQTEKELLAEKVDRQPNEEAKPTASLNLFDLSVMPDSETFIK

SEQ ID NO: 153912 - protein, 198 aa, Heterodera glycines
RQTLKAFIFSKFAQNRVNFTDIDYEVFTEAALLAREGHSPYEQPEYRYTPLIAWLLVPNGQFADFGKLVFKLVFCATDVLVAFLHLLILESRQQNQRNPSSQNEGKTIHSSSVVFRHFGVLFWLFNPFTAIISARGNCDAIICALVLLALFLLIRGHWVVHAGATHFRIFPVSRGHWVVHAGATHFRIFPVSTHLLYF

SEQ ID NO: 153913 - protein, 31 aa, Heterodera glycines
MRKKMNNRDHFELELSAESDHRSPDKSSKFQ

SEQ ID NO: 153914 - protein, 163 aa, Heterodera glycines
MYEESLLGLGLELEHANATAIVKFLFPKFFFFFSTNYLIKNPNIKFVLIHAPFKVLMRQAELMMVRMPVHRNDEWNLTDGFVNACLKRLKFLDFDPRIKKRIEPETYFCQPFVAQHFECFVGYEHPETFFTRADRARMVHDLLIRARTEMLKSKHILGMGFLK

SEQ ID NO: 153915 - protein, 682 aa, Heterodera glycines
EIPRKPPQHGKREEMAQLLESRKVDQGATFVDQGATFVEPRKLPGTAGQKGRMQLITNAHILAHILKLLGTQAIYHYEVTINAVSSRSDRKCCVSEPSGPRDRDDFPLLNRRDKFPLLNRRDKCREVFSAFYRTMEQSLKDTGNLLYYDLSKTIFTLKKLQIESEGKFMFNIGTVPTAERPDAARYKSEGKFMFNIGTVPTAERPDAARYKHYEFIIRPATGFEVNDLSFITNDVSKMERSLEQFLDIATAQKANMDGKQFIGFSSSRVYLLAPTDYGFGANECPVFDSNHSFLGVGVNKGCRIVEGDQGPGQMTPAIVIQTKKDQGPGQMTPAIVIQTKKSAFHIPDMCILDKAKTLSAFHIPDMCILDKAKTLLFRENQGRFETGDFTQSDYEALCNGLVGIYAEPRYGTSGRIYAEPRYGTSGRFFRISDITKPNTGNGLNAENTFITHQVSGKISVKQYFEDTYRKTLQYPKAPLLVNYRRYPKAPLLVNYRRIGDPAYYPMEVCFVLDGQRVKSSQQNVCFVLDGQRVKSSQQNPEQIREMIKETAIPPTVLREMIKETAIPPTVLRVHNERVKESLQLVNNEYLTKASVHFDTTPLHVDYRVLGPPATLYRNNHRVTPATSNCEWRPGDALVNAQIGTWVAYAFGNPVGDSVRRLGLTETMWRLALKFLISFRTKK

SEQ ID NO: 153916 - protein, 136 aa, Heterodera glycines
SAKGQPTRQKQFAEVKTWHGGYISNFLNLFTERDKRTATKHSPYVQRYIDKVLALNRSLSQTTTPPAPTNPPWTTTTNPPRTTTTNPPRTTATITKTRSTIWSTKATTRPNAWTTTTTPMSRTMDYRTTTAAHYGN

SEQ ID NO: 153917 - protein, 485 aa, Heterodera glycines
MPEPMELDQEPGTSTSTSSARPGTSTSQQVISSLMLISLLCLLFTSSAKGQPTRQKQFAEVKTWHGGYISNFLNLFTERDKRTATKHSPYVQRYIDKVLALNRSLSQTTTPPAPTNPPQTTTPPAPTNPPWTTTTNPPRTTTTNPPRTTTTNPPRTTATITKTRSTIWSTKATTRPNAWTTTTTPMSRTMDYRTTTVYRSRPQQRPRPGIKLIRWPKSPITTEEGRDVFWCSNHGSTLWELKGPENSPFCRPPPALTAQWTPLTITLYTKIHRPEPIATAWHCFIKTTKENYYTTSSAISSSKSTKNFLDFPGPITGLFKGKQTSSVTNCFAQPATLFVKWHSLQLLSPIHRADHCNYASEYCQLQNNSSLIWTSACPNDNCFMCDFQEAEEIHGEFTKLNGQTTAFWISDDRQKALTFTETHAVQACDGRQIVLSEQNFGIPKEQFDIIMSDHTRPKRNVQPEQLASQLSAAQLAQQWHSHSFT

SEQ ID NO: 153918 - protein, 305 aa, Heterodera glycines
MIGGAKILFSAFIFMINIEGIFSTYGDDLYADIWEKAFPKNSQNLMAKSKNGKKVGNAQKIIVKQKKTDERQIKLGEKNVKIEENEGGTTAAEEAKVRNVQKMLKIVKNEPIFDEKIQIDEKSGQNFQKIQTNLKFKQAKNWPIKNFEPKTEKYEEEFDKEYEESNRIKQANSKDKSKHSDHFDEKEILKIIKEFDKRREILKNKNIYNWKQLKLIEREIARELGTKFYRIRDWKREFGLVKRAKKEDKETKLALIEQFDRMKNERKMKKGYKNAEKVGIECEIAKELGTHRDKIYKWKSELLSG

SEQ ID NO: 153919 - protein, 513 aa, Heterodera glycines
MLLPNGKSAGEVRERDAKRLEFLRNQIGRVDVYWECEIERMLAGDRGMRQMFSKYVDDGPLEIRAAFMGGRTGPLKLFRKARDGEKISYYDFTSLYPFINFTTRYPIGHPRVHVLNEEVEWTTSADNPYDLSLLKVWVIPPRNCDVPVLPVRVGERLCFPLCMKCASDHPTGGVDENYHCTHNDSQRGWVSTCTSLELNAALDEGYRVTKLFRVLEYQSSDDQLFKSYIAEFMALKIQASGFDTSIKGNPELEEAFVRECYEKFGITIDPIKMEPNKGKRSIAKLCLNNLWGRFSLRNFGLSQTLITDDPVVLAEYLDNRSLEVTAIDELDAEHILISYEKKKDNISLDNFGGSAGITKGNAEDTDSLILVHPLEVCPLQTGPHLGQFTDEYPNHEIEEFCSGGAKQYGLKLRRKAAPADAESEYVLKVRGMTLNYDVIQNQGLRYETFKEKVLRYGETGEPQPINITYPNFLRPSIKNGRVTSYPLHKIYKPFVGKGIVGADLSVLDFGHTL

SEQ ID NO: 153920 - protein, 206 aa, Heterodera glycines
MAWDYEWGDEYKSFTPSADKLILVFLSKMVLLSVFCAELLNCRVSQLRDRLNHPEDRTYILNSLKGRKVTTTYKDRNGMTKTFFIGGLSEKGAALTMAYGCLSRPFNINIAAHFYARHRIKLHHPYIVCIIERFSKGKEDRLYPMELLELTEDNPIWQRWSGPLFAERDPTPSHTSGRFENDDDDNDETLKDVGRNQCTQSPDLFW

SEQ ID NO: 153921 - protein, 237 aa, Heterodera glycines
MDAIELTSILMQNRRSAQIFRGCYASDQLPSPGTLEYPAALIVNRDPHNKKGSHWCAIYARGLEGPQISSFLSKMVFLSVFCAELLNCRVSQLRDRLNHPEDRTYILNSLKGRKVTTTYKDRNGMTKTFFIGGLSEKGAALTMAYGCLSRPFNINIAAHFYARHRIKLHHPYIVCVIERFSKGKEDRLYPMELLELTEDNPIWQRWSGPLFAERDPTPPRTSGRFENDVDDDETLKD

SEQ ID NO: 153922 - protein, 108 aa, Heterodera glycines
MIPKLSYSVAITFKIITKSSSFFNFDENVCVVGLDRTAITFPSTTEPYKRLLFEMGGQIEMLCLIMCFGVSVCWLLFSHSNCSFSPKWAIARAPASGPKSKASADRWK

SEQ ID NO: 153923 - protein, 184 aa, Heterodera glycines
MSLYDDIGIESSTSVQVKEENLEKKADDFPTPNSAQKPQNVTVSAVSAVNKMNLSFLKSQLEAKKAILQNAAAAASQNVRQFLKLKNAFSFGQFCHLFGTFFSEISPRRCLRAAVTRHSSEYASAAEQEGRHVQAEATQSNSIAHRFDRRFHFGAEIAERRQSNRLEKGFRHFCYVLTTIFCIF

SEQ ID NO: 153924 - protein, 114 aa, Heterodera glycines
MFEILKVAILSIFFTSIFAEYLYDSVRISEAQLSVKMKDKKDKSRPLGTVDVPLNEKLSKLIVDGANGRPIENLQQKFLRFSHSKSPEHEVFFVAKEHKESNGHYQLEMVQNFL

SEQ ID NO: 153925 - protein, 69 aa, Heterodera glycines
MREMVIYRLGDGGLTASIVSFSPTKAKAETRTISKQRDNVTMCVGVVERQKSTAKMDKWAKICSQNMNK

SEQ ID NO: 153926 - protein, 36 aa, Heterodera glycines
WHSHFALLCAASALLKWRQNGKRTAWHSIHPTGPQK

SEQ ID NO: 153927 - protein, 787 aa, Heterodera glycines
LLFLLNRIMIKFHDSYNVMPIKLSGLIKSFGLHIKDKQHFPHMFNKSSNYDKVLQHLPPREDYCPNQKKKADLQKFDDWYSNNLYQKFDLKEKLPEYCCNDVQILTHALVELRREFKQLTQRNGKHGESTFFDKMTIASACVKNYALNHLKPNSLAIVPEKGYTPQQQSALAIKFIDWYSHINNVNIQTAHSRYGEYVFKREGQIYQVDGYIKDGRRDKIIEVNGCLWHGCEECFDEMDDETKMPNGKTLREIREREEKKHEILSRYVDFIWEHEINEKLKKDTAMREFFDNWKDRSPIKIRDAFHGGRTGPMKLLHTAKPGQKISYKDFTSLYPWTNFSTDYPLGHPKIISVPPNEQTPYKGLLKVLLLPPYKGLLKVLLLPPNNISVTVMPVKFDQRLLFPLCEKCAKYITNKYPNGLKDNDRAFVSTCTHLELNAALEAGYTVRKVFHVNDRAFVSTCTHLELNAALEAGYTVRKVFHVLQYDQWSNNVFKSYVSEMMALKIHATGFPSWCESEEEKSEYIEECWMKFGIHLEKEKMKAEPGKRYIAKLCLNSLWGRFSMRNLLSKAVINNDPFVLRQYTDDKKIDIMDIELMDDDVFMLTYKPKEEFVDENKYSNVVISLYTTSMARLYLYEVLKKVADKILYFDTDSIIYVHPEANDPLPTGKGHLGELTDEKPDHNILEFISAGCKNYGLKLAMGKLSMKIRGITLDEQTVQTIHYDSVKDQILRYGSDDPADPIIVTYPHFIRPNLIQGKVYTQSLTKHYQPVFTKGIINDSFQVLEFGY

SEQ ID NO: 153928 - protein, 27 aa, Heterodera glycines
MAINSKISEKECNFLGSDKPFLNLHIV

SEQ ID NO: 153929 - protein, 81 aa, Heterodera glycines
MPASVDSGNPPKPKLKDYQKQQLKDEGEKEAEEKKDSKEDYEQKEQQLKKTEEKQVEEESDGKMTVPTDEHTTRRRREESE

SEQ ID NO: 153930 - protein, 45 aa, Heterodera glycines
MNTVRPCSIFTTLHTSRNYTLLDFVCIFSSKLFFNMIFWIYKFLN

SEQ ID NO: 153931 - protein, 119 aa, Heterodera glycines
TQQCGNSCPLFLSAPQFLFSLFFSLWQQQRAPAGHINYFSTSFSLSTQTTLDLTTYTHRTFTLFRTDQPPHLLHCFSTSHFSVTTDSKTRHTVGMVGNARHCPRPGGWGNGVSEHERDR

SEQ ID NO: 153932 - protein, 178 aa, Heterodera glycines
MTPAAQFPGFRHAETEVPPSCQNLSKFDSQKSASYQETNMTFSIEYGLGFAAGLIGQDLVQFASDSNETDGLRVCQAYFGQANQKDTQTPTFNGILGLALNTIKQNVDPLFIQAYKQGLFKKPLFSLYLATQGAANGTLGGVLTLGDVDDQNCAPITDWIPITPNRFGLWEFHIDVRS

SEQ ID NO: 153933 - protein, 308 aa, Heterodera glycines
LISGYWQIKDDGQETAFVTEFGLHEFVMPFGFCNAVATFQRFMTHLFGDKLNDSFLYIDDVLVAYETFEQHLEHLKFVFEDINEAGLKLKVAKCQFSIEELQFLGHVLTRSGIKMDESKTILDMPMLKSKKELHSFLGFMTYYRMSMAAPLFKLLKKDVSFKMDNAEIAAISKLKGKILSYVVLYFSDFKAAMGKFLIMTDASKTGISAVLCQPDQQNRIRPIFASRQCNKHESRYSTTELEALAVRFGVKKFAQYITMIPTRVLTDHKALQWGRSEKGFQKTRKRVNMKLLKFATSTYRPGRTKENV

SEQ ID NO: 153934 - protein, 111 aa, Heterodera glycines
MCKESEEPFKFIPVCCYEDAQAIRAVAFHPSGGYFAIGTNSRNLLICRYQSYERRTSLNDDFLHGFVPPPTILMSRSKHHRGSVYCAAFNQTGNLLATGSNDKTIKLMAMQ

SEQ ID NO: 153935 - protein, 211 aa, Heterodera glycines
MGNDDEAESSSSSSNGTPRDNHYDNDHKPLIKAEIAADLFVLLNLKTQLQMDYMTNESTTMELVNEFNKKYANFVMELPDNLMTKGKFEKTLHKINEKLEQIQFKNEIDIVANNLLIMVKLENKFKNGIEQIECGENVYEVVQYHLERVNSELYRRLDHNVMSHEKISLIYLHACALRLTTELGILINELEEIGTEWTSADAIDDAVEVGC

SEQ ID NO: 153936 - protein, 88 aa, Heterodera glycines
MELSKNDQTMRSNVVQHEGPAMESVAYESDNEILRQSSTFLKMPVPGPGPGFHVGPGPGFPGQKSRSRKPGYSGPGFFETNFKNQKKV

SEQ ID NO: 153937 - protein, 153 aa, Heterodera glycines
AIYQKFGQTTEEELFSNDSSNCAAFDEFLSVIGHRVQLRHFDGYRGGLDTVHGQTGTEERTRASLLDGLYSNLKERAQFYGMAFLDSVDSATKQQQQEKHHHQWQNNGQKPSPAQPTAATDERRNEPNVLFSIGTALVLMLLLFNDQKSKTHF

SEQ ID NO: 153938 - protein, 282 aa, Heterodera glycines
KSLQPLFIICGCTGTGKSDLGIELAKHFNGEVINADSMQIYKGLDIATNLDIATNKVTTEEMQGVTHHLMSFCDPCSNYNVHHYRNAVLPLIERLWANGKLLNKQQNKQQFFLLVGGTGYYMEAAIYYDNLVQTTPKNQVFNNILMIQIVAISDDLRNELSKISHLRLIHEELKRVDPISAGEVHKNAKFKVLRALEIFYSTGQTKSEHHKMQREGQGIHLAGRLHTKSTLLFTLDADKEVLSQRLNSRVDDMLKRLIEELDSFYIEVNQQILRNWQKIIKC

SEQ ID NO: 153939 - protein, 55 aa, Heterodera glycines
MPKNMYYGCAALKVVVLDAACARPPPCFSYAAPPTAVAFLFQHVTGVGHLHNKRR

SEQ ID NO: 153940 - protein, 257 aa, Heterodera glycines
MAPSLKLLIQFAILIAAASHAILVDSDLMSQGQSQSRAWRTSIPETKGQNGSETEDEQAVYESDASRITIPETKDQSGTETEDEQAVYESEEIRTSIPETNGQSGTETEADRPNNRKTDLATNGQSAAKTNPVAKQIWEELFLVRGKRQALDPFTGVAIEIGKGAGNALQYMHGKIVDGIAVVVKKAACKGIQKLCSSCGYGACIEHPGYTADAICCSNNFELKCCEKLVMAQIQKGLKNGQKFTKIKNPAKIVLFC

SEQ ID NO: 153941 - protein, 302 aa, Heterodera glycines
MVDEYLEGIRRRARPGEPVLRERAENAHENRLTFEIALAHFGFYDFQELLKLSQNLLVIVDSCSGREQQRSFNKNTDRAEGTRSKLIRQLTKKFSQQLAYDRASTADPPPLLQSLSISTHHPLLKRTSATGKDFRAETEAAESLACAKMSREMVLQTKLLVAELLQFIMDIRRDFRITTALAFFKRHFPCGDSGELSASAPQIDEQLVQRMCRAVFRWQNGDSFELDMDREHGQQLLRILLQMTMSDFVPLTSLSLQILFRHFTQFQELVEDMGQVWRNVNVNANFECLMKGATAGVQQGSA

SEQ ID NO: 153942 - protein, 160 aa, Heterodera glycines
MQWIKFNCTLCPIGLHCFYPRKYAKPVLCAHPSVRNITDFLSTGQLEEAATTATTTTPFPTTAVVSAAAAECAPPPAQLTAWIAVCTALLALLVIAEQIVINNLYRNERRSSEPPAGKRTDSADLAGYVGRRFSAPDGRQFDCGPRENPRKNIKMVTSKS

SEQ ID NO: 153943 - protein, 857 aa, Heterodera glycines
MQKYTFIKCKGCGTSNIPMSPITKSDITDYQFPILLYHNNNHFDGIKTLSKFFNKKNYCLSCESPYYKKIEHSLKCTSLCHGCREVGVDYPCEPQQGYSKKCEHCNNTFYNNSCYERHLHKDLCTKFQRCEDCGVIYNIKVHGSVGHKCGEQFCKLCKQFHIKEDDDDGMNPCTKCFIQPLKQQRIKSYRIIAYDFEATQDKKVGNRFEHEVNFAAATIICTDCIINSYWNKSLQGKKCQICGPHRSITFSPFDYTETTVDQKIITQQPLREFVHWLLFDHNKKFPTVAFAHFGGRYDMTMIIKEVLAQGIHNPDIIKQGNRLYELKIRENEHGPLTIFHDSYNLMPIKLSGLIKSFGLHIKDKQHFPHMFNKSSNYDKVLQHLPPREDYCPNQKKKADLQKFDDWYSNNYEQCFDLKEKLPEYCCNDVQILTHALVELRREFKQLTQRNGKHGGIDILWQAMTIASACVKNYALNHLKPNSLAIVPEKGYTPQQNQSALAIKFLDWYSHINNVNIQTAHSRYGEYVFKREGQVYQVDGYIKGTNGKRDKIIEVNGCLWHGCEECFDDLDDETRMPNGKTLREIREREEKKHEILSRYVDLEVIWEHEINEKLKKDTAMREFFDNWKDRSPIKIRDAFHGGRTGPMKLLHTAKPGQKISYKDFTSLYPWTNFSTDYPLGHPKIISIPPNEQTVNWSSPSDNPYKGLLKVLLLPPNNNINVTVMPIKFDQRLLFPLCEKCAKYITAKYPNGLKDNDYSCPHFNPNDRAFVSTCTHLELNAALEAGYTVRKVFHVLQYDQWSNNVFKSYVSEMMALKIHATGFPSWCSSEEEKSEYIEECWMKFGIHLEKEKMKAEPGK

SEQ ID NO: 153944 - protein, 196 aa, Heterodera glycines
FQSLGLNPPAFQSLGLNPPAFQSLALNPPAFQSLALNSPAFQSLGQPTNISITGTQPTSISITGTQPTNISITGLNPPTFQSRDSTHQHFNHWDSTHQHFNHWHSILLHFNHWDNPPTFQSLGLNPPAFQLPGLNPPAFQSSGLNPPAFQSLGLNPPAFQSFNIRITGTQSHQLFGITIIRTQYHYFKFFPNTFLS

SEQ ID NO: 153945 - protein, 98 aa, Heterodera glycines
MPFGHWLPQGMAFPRPIGRSSAPFVGLGCRQRAVSALPLHWHNWGETRRYIIGKSCFRRGHSATWYKLAEIGRTSHFERKDFQFSAFLERILIVFVVN

SEQ ID NO: 153946 - protein, 86 aa, Heterodera glycines
MPKAAKSNAVLNRHWISKFPEGTYSTDGKINPGLYKLIDIAKILIGALVICEYFLLCHSFISALVKFVDKKEMTNMNSTFTVRYMQ

SEQ ID NO: 153947 - protein, 236 aa, Heterodera glycines
MDVFNRLLPRPGNGNVQFKKLRHTSNSASIFASDEATGDKQHNDETTNNGMMPATNSPRVELGLMLSNISAEMRHGQNSATEGNGKANGTGKQNKSFVEEKANGNGPSSEVTALSKGKSNGTAKGGGKRFLSALLPGKRKGRLGLSVSEPRLNFDIEPSKNDFEFGIYSESTFHSFFFKTHGNRRGRKCERRTNCGPSTEFWGEEPIMRWHFGRKSQKSAEFCRGTSKGGILENTL

SEQ ID NO: 153948 - protein, 74 aa, Heterodera glycines
MPIEPFELVNEVTNEKLTLTKDENGTGEFNWLLERCPIIGETAAAVQKQQQKKDENSDANLNKVFFRLYDDIGI

SEQ ID NO: 153949 - protein, 20 aa, Heterodera glycines
YRICSNYGPVSINTAVSNYP

SEQ ID NO: 153950 - protein, 78 aa, Heterodera glycines
MNRRWLCSDVWMDIMPSFDHAQLGLKMALLSDRFDVLVDKHFDGKSELTIWRTITIRKDEGPKAKLSVLIDSVPRWNC

SEQ ID NO: 153951 - protein, 35 aa, Heterodera glycines
MDEQIENVMLLNNTKFLIWFTLTQLMTSFLLKISI

SEQ ID NO: 153952 - protein, 150 aa, Heterodera glycines
MIAIFFVHLFFIGIQGTEEDLFADLWKNLIPMKQQKLAKNYERNLKRENWIHQNIRNADKNLLKTSLKAEDVSSERQNEEDIKPKILEEIKKETFSDEEQNAMNVRTKLKFPKKEIYDEMISDGIDEKQAGDQSNSCSSKTDDLGHSSDS

SEQ ID NO: 153953 - protein, 37 aa, Heterodera glycines
LNEIVPEGPEMNDDYNEEEGKAILLRDWDSKNQETSQ

SEQ ID NO: 153954 - protein, 191 aa, Heterodera glycines
MKCPSNDKFYPIYEPLVSRFSTQEGDRAELCTEELPADEECPEGFQIGISMLNGQKEDFTWQTWGAFWVNNIKFGENNVMYKKVEFGVHFKLDISPKLNESSNIVYRVNVYCADNGNLEFKTFTKSETDVVFSSNYKTYEQIGAEYVPSSSEGKKCKKYQVKVWPSNEKRLSYIKEKQEVGNAVTNSICYT

SEQ ID NO: 153955 - protein, 109 aa, Heterodera glycines
MKNFGLCNYLLKKAPLVLLEPEFVASGVITNGKLYNNVKFPVHFNLIIEPSLDHEAEPIYYVKVKCNGKESNTFKTFTHGNTKVVLNVKGCTKFDISVSKMDRESESPE

SEQ ID NO: 153956 - protein, 405 aa, Heterodera glycines
MPSISAAMIAAASASTQFPPATLSKWHSIVTPPSSLAQGGALEEFLRHGLLAPQASSFAPSSGRGAESVGTSAMAAPTSFDELFQPKMSNTSSSPRTFPLNQPQMHQQILANVPQRNATGTNISHQQQVERINCSTGTTPGICLTMRGCRKTKQSISANATTNSAKSGSSTTDAATAPNSATSIGPQQPHFVHTNVPLQPSPQHILPIAEPQQHQEQVQQLAQQKMVKKQSSANKYPVLWQGQLAMKNADTLVQMLKVCGNESLVQQMNAELSSVNENGIPLLRINQRMRLEHTHLESENSYQNGIGLKKPNCPLLLDLIRKMEREDNQLALICVPCGRDREDVVIQTQKMNISFIEYFSSKSAAGIVSSGPSDAPVAKCAEPFEDGGESQRGIPLCDTNQQIEH

SEQ ID NO: 153957 - protein, 35 aa, Heterodera glycines
DEKLIAFFCLHSKQSTEIFFNAFKKTDLPNWVAHK

SEQ ID NO: 153958 - protein, 25 aa, Heterodera glycines
SKSSLTTAQKNMFFVRFRPRGSQEK

SEQ ID NO: 153959 - protein, 114 aa, Heterodera glycines
MAFERIRHGGDNTREAGRTNKTDAGRASTRDGPSFANFAFRISLFIFQFGPSLASTALPSNMMPYVGTILNAKFIYSKQISIKVQESNDYYAIISRLAKLPFKMDNTAYASARL

SEQ ID NO: 153960 - protein, 25 aa, Heterodera glycines
SKSSLTTAQKNMFFVRFRPRGSQEK

SEQ ID NO: 153961 - protein, 34 aa, Heterodera glycines
MVPDFRHVAVTDQIQTKRSVWQVPVAPLGIVATV

SEQ ID NO: 153962 - protein, 88 aa, Heterodera glycines
MNTTAAVPMAQNFRLFCHQTPPSVNSDGSEAKRRQINEPPKEGSGGAPSLSVDPFGWEPTKWERFFLVLTRCYERSADIPAIIPLVVQ

SEQ ID NO: 153963 - protein, 65 aa, Heterodera glycines
MKTIALFALLPLIEILLIAMVNQCLCIDCRSGYFFGNGYGRTESMECAGGKDCFAAKCHNGSFLY

SEQ ID NO: 153964 - protein, 57 aa, Heterodera glycines
MLKPNLWARSINGTSVFLKQIKSFSDESIPTGDSIALLPSLLPIVIMALFGHFVKTH

SEQ ID NO: 153965 - protein, 24 aa, Heterodera glycines
MCMFPYFGIFPKKIKMGFILSNII

SEQ ID NO: 153966 - protein, 75 aa, Heterodera glycines
MSDHSSDDSSGAEGGDIQVTTFMADVVCSLPTVPIEGEQKMSYYTVLLYFGNNNNDCRHWVSTIVSLNGYIKIRC

SEQ ID NO: 153967 - protein, 32 aa, Heterodera glycines
MPLDLLALDKECKVWSSVSVKNVCPRDLPNIN

SEQ ID NO: 153968 - protein, 129 aa, Heterodera glycines
MSTNEFMLQKFKTIAGDNLSTTRIEKELHKLRIGPEQGCWLKTAIEGNEWLRAELLRFADFARQDLLKTTLIATQCANITNNGNMTEIEKEMKAIETLLGEISHHMADWIEEKLRWNSMVLMVMFMDKC

SEQ ID NO: 153969 - protein, 226 aa, Heterodera glycines
PSFAVNFAVSAAPKKANESGQAINLRQLRSHADIEVDDEEEEKKNRRPDGRRRKVPKVPRRCDKCPMEFDEVWKLERHYSTHSDFKQFKCELCPHRTHQKAYLKRHMSLHRYGEKCRFCGAPIVPQWFKHHEKTCAAGTNAGAADGGGGTLRRHQSPPPPAHPSPALPPPLLDHQRDQHEALLNFRQNYCDANACHEKLEIIGDQKMTVRYKGNEKGILSKLLSKI

SEQ ID NO: 153970 - protein, 192 aa, Heterodera glycines
MENNKSIALSLSAVYEFFNVINPLPGVVESPATAAETTTPFVDLRCERRGPVPSTVAAAIVVPLSSSAIGIAAESAVGSGAASSTYDGSAAEENRDGRRHTGAVVVVTALEETVHDEKLPEEWAADATLKQFNLNNFLNRKKCLKMSFNEKKEENSVFKMKEHCRFSMSKINFSSALKLHEGQQNKTKKVVK

SEQ ID NO: 153971 - protein, 185 aa, Heterodera glycines
MFVKTFSRSVRNSTRFFYSTNTKLDPSKWRIEVALLIYRPPVVAPPMTEVEEQFYRMSEFANQKSSYKCDFELQLEKDEKLLEKRRQLENEGRDLSALDEEINVSSAQLRDDWFEKSEQLTKQYKLDSPQTTTDEDKNLKTFGRMQQKKLALLVKQRFPDALNSDYVSPWILPQLIRTGDDTLRQ

SEQ ID NO: 153972 - protein, 193 aa, Heterodera glycines
MSGQLRAKIPLLNRVLIKEIQKIKSKIEEGNFEYDKNNFDDCSRIFNKTKEIIQRIEPNFEKLKILHQKWQNLMRQMNKTEWNSEWKLQKIFREKHNYLKTIKEIDEILDTIKDINLEVKRRLKALKPNSPSESDQENESIDESKKTMMKKPEKKKMKMKKNMIVIKRTNHKKCIQVIKHIVIAYHLFINDQE

SEQ ID NO: 153973 - protein, 1480 aa, Heterodera glycines
MERMEDSNRQIRNFPSNRPNPNKIQRQPYQNFSQNKPKFNQRNQYQTPITPFPYTSALTTKSKPLHPAQIKPIPTQTKTQYKIFCRFCERENHTSKECKIYSTPEKRNERVRELKLCLNCLNKGHMVNECKSTYLCYNCKHKHNTLLCTRKQTQYKTKEQKTRVNMAQNYENHEETQTFMTMEGDKNLPNSDEEELLMTTEVNCINPNKYKVKREIILFDNGSQKSYITEECAQTLQLSTIEEKLLAISTFNQNKPKIIKSRLVKVGIKTLKGEIEYITLQTVEKITDVTKMVNKETVDVLGVKIPISHARPQILIGIDYYWHFMLPNSQIQLLPSGFYSINTKLGKILSGKGTIEDTNCNSVTEKRKKDETNQILQKFWELENIGIIDSPHMTDEDAAMIHFDKNVTFKNNRYHVRWPYKRENPNLPTNFGLCMGRLRNVVKQLIKNKQLENYDRILQEQMDTDVNEIAEFKSNNLLHYLPHHPVIKESSNTTKIRPVFDASAKLKGNNSLNDEIHQGPKLLPDLCGMILRFRLKNYVLIGDLEKAFLRVGLNELDRDTTRFLWVNKSYLNEIRQNYREIEMRDIELRRFTRIPFGVNASPFLLTAVVNLHLSKINEMFEKFKTIQVNKELCLNDKEEEFKNLCIELKQNAYVDNFVMMCDDEKEIQFKHYWSKEIFKLASMNLREFVSNHEQSNKEIQKLEGSEIPKVTKMLGIKWNVDSDELELQIKIPLMSKDTTKRQILTMIAKNFDPMGWISPVILKYKLFFQKLWRSNKDWDDKLDDQEIIEWNNISNTEMIAIPRSPFTSQYLNHSILHIFADASELAYATSAYLHTNDQINLLFAKTRLTPLKGLTIPKLELLGLLIAARAAKFIKRESKLNLENTYIWSDSKCVLSWLKCKRNLPIFIKNRVEEIKQIALELHITFHYVKSADNPADLASRGATMSELKHNKLWWNGPKWLKLKKENWPPHSFYSPDQEEAPYLDNTEEIINTQINLIKNEYKGIIEWDKFSSWLKITRICQTLLKFIFFKLQNSKKFKEKFICSKFENALQLKIMAQKMLIRIIQREMEPNKEEERQLRIYLDNDMILKCEGRLKNAQIQGVNPIFLPRKHYGTHLIIMDYHTRNLHAGTMTTLSEIRKTYWIPKGRRIVDQIRRQCYHCRRYNAKPFQQPQMPPLPKSRVEITEPFQNVGLDYMGPIQIKNFNEKCWIILFTCFTTRGIHLELVTSLSVQHFLNAFRRFISRRGTPKHVWSDNAAQIKLASKILPEVLKLREILKHESIKSYFLNENINWTFSIELAPWQNGAIERLNQNVKTAMRKVIGKRFIEFDSFQTLTCEIEALVNSRPITFIYDEINSYQILRPIDFILPHKNLCIPPILENQETKDPTYYPKKTSFDQTIELWKKTTKLLDDYWKIWTDEYIPSLRERYKIENKNPRNCMKSFPELNDIVIIHDQTPRAMWKTGIVKNVITGSDGIKKEDG

SEQ ID NO: 153974 - protein, 90 aa, Heterodera glycines
MPTATPWRTNVLLWGAEGRFGSAVVVAVVGTVVVVVVVHLTVVITTDVFRDDCQRFARQQMPTTEWTRPALARVRPQADAAKALTAAART

SEQ ID NO: 153975 - protein, 252 aa, Heterodera glycines
MFPNDDGYESEDDEILLPPPPIPPQLGHPPPNVPAVRVQPMHVGQQRLPLRDLPQFEDHPQNVPAVRVQPIQQPLPLRDLPQIFHPPPNVPAIRVQPMQQPVPMRAVPQFLHPPPNAPEMGVGPIHDGQQPLPLRALPQFAQPPPNVPAVRVQPVQQPIPLRDVPLFVNPPPNVPVIRVQPMPQPLPLRDMPQIHHPPRNVTSIWIKLWLLFLSLWVFLQGIHVRQIQREYAVPQFAHPPPNLPYHPPENVP

SEQ ID NO: 153976 - protein, 201 aa, Heterodera glycines
MANIRRNAEEHLRRELHEGAMLCAAHLGPFTNVRFDGFFRYGPANTHMSPGRTFREHFRRRGFQVNPNLPCLQEYGGFSHSQQGIHVDYFPIDMINIQKGLGVGPRPPPTEAEILRPRRIQAYLAFEEIPHEQEELNRRALFFEVIGLRSNRPNDGTAKEEGAQQTRPQDFQRKKELDDPHTDRHLEDQPRKKTSNGPTRH

SEQ ID NO: 153977 - protein, 81 aa, Heterodera glycines
MGAPIWLIVMKLLVLLLLLLRKFRDHDTQTVILDRTKEIKHQRSKTKKHVTKKRRGKAERQKWRRRKKKRQRKMKKLFWMS

SEQ ID NO: 153978 - protein, 208 aa, Heterodera glycines
FFDGFVAAFFTERKKQLSRKRIELAIFSRPTDESKNAFKSLWSLFNSQIGAITSVCNASAADRRNASVADERRNAENTGIYDLGPYFDTVPDWLVAPTLRPVDGIFGLETIYKWIYNDEGGDVVKTFTMHPPEEGAEIPAGDFERFLLGFFRFCDDAPPRYIAKFLHGVVAEDVREFSITKGGHSLSMDSYVEADGTTKDWTLKCSKN

SEQ ID NO: 153979 - protein, 71 aa, Heterodera glycines
MKSANQNGFGRATMNVFVEDFANRDSLESILLIRCCKLPDFIYPASFPISTWNEYSEDIMLSERTYNNMEA

SEQ ID NO: 153980 - protein, 138 aa, Heterodera glycines
MSMHYFIAIFACISQIFGTAKGMNSEMGFQPHFQQNPSSFLRKLELANGVKMLIPIENVIAFLKQFSQLNSLLNSDDFRIQCVDIQILQINKEINEIIETNQLKIGRDLCRILYNLLMSCKEIGYELDGNSRLNAPSA

SEQ ID NO: 153981 - protein, 681 aa, Heterodera glycines
MPVPTHVSEVRSFLGMINHYQQFVKNMRFIRQPLDELLKQDKVWQWSADCQNAFENVIKILKSDQLLTHYDPAQEIIVSADASEHGIGAVISHRFPDGSLKAIAHASSSLSAAEKNYSQIEKEGLAIVFAVQKFHKYLFGRHFVLQTDHKPLLSIFGNKKGIKACTANRLQRWAITLLGYDFEIEYQNTADFGQADVLSRLIAKTPVPDNEVIIANIRESNETGVLNFVTKTLPLDHSDLANAAKSDQVIKNVKKFVCSHWPTKNKMAADIVPFHRRRDALTIEDECLLYADRVVIPASLQKDVLQLLHRGHPGMKRMKALARQYVYWPGMDEQIENFVKMCNECTMEAKMPVKSELHSWPKADGPWKRVHLDYAGPFMGKMFLIIVDAYSKWPEVFEMRSSNSAATIDKLRSLCASYGLPEILVTDNGTQFASKEFKEFVTENGINHLFSAPYNPMSNGQAERFVDTFKRTCRKIKGEGASEMLTTFLATYRTTPCEALPECKCPAEMFLQRKPRTTLDLLRPKPKAPIIRDEAMEKQFNRRHGAKPRSFALGDKVLARHRLSQPWRPGKITKCKGVIYDVEFVDGKYGRFHANQLLVRSTDENGTNALNVFNDAFDLPLAPPLVQHGGQAQLPVVAPAAVIAPAVAEEPVVEEADRAPEVPAQRRSQRNRRPPDRYTPS

SEQ ID NO: 153982 - protein, 283 aa, Heterodera glycines
MLSFIYTDDLSELNGENAMAVLYAAKKYNIPSLVGSSSQIPISELRNVFFAFAQARLLDLKNFANCCLAYIGKNADTLLKSDAFLQIDQKLLCEILECDELQISGEISIWNAALRWADEKCRENGIDCSAENRRQMLGPALFKIRFPLLSNEEFTKKIVPFGVLSKDEVIAVYQFKSLPNCHGISDGIFPMPFSINGRISDRKEGTVLMDIEKVSEFAREEVESSRYSEKVYINGLPWKILAKIKAKSGSTVNEKSLGIYLWCDAPKEGAKLLIINIYKQLIN

SEQ ID NO: 153983 - protein, 166 aa, Heterodera glycines
MLRRPRDSSSGPVLHFFFIVLCNLPFQIDAVGLAPGLYCGTVTCYDVLEISRDDFNKTDLPKLYRRMARQYHPDRVKREDLREETEEKFRLIATAYETLKDDETRTYYDYYLDHPEERYYNFYQYYRLRTAPRVDVRIVIAVTILLISVVQVNSRAEQDRTRWSCT

SEQ ID NO: 153984 - protein, 74 aa, Heterodera glycines
MEEYMACELWKRAEFDRWKEDKDKEEKERLSNSGRYRQYKRFMKKQAGDCSFFKRNEPKSMKSEKLDVVVKRAL

SEQ ID NO: 153985 - protein, 204 aa, Heterodera glycines
MGRKKKKPQKPWCCCLRYCNREFEDEKILICLRYCNREFEDEKILIQHQKAKHFKCHICNKKLFTGPGLAIHCMQVHKESIDKIVHKESIDKIPGALPGRDNVNIEVYGMEGLPPESNEKQGINGLSMAFQHSWPCRGRLGHATLQNSAPAFPPGMSMGMVPPIAAYNQYTPRTPFGMPSYGRVSPRGLFGKSSHFQMPSALSL

SEQ ID NO: 153986 - protein, 598 aa, Heterodera glycines
MMIYSVLVIIFISFIGSAKSVNLEQIFKNIDENYSKLFNLPLDENEISDRNLEAFQMDQNLKLQLEAAIFYSNAKEMVNLRQDGKPKKIREQNANTLKVLVENFAASSTVSLVNLCHLWKLWRTLGDTLVENPKIPKNVKNYLKNRDQIDLNGVECDESIGRNRVFVRDTALANFSAIIALLQLQNGKLTIKFGIDEEFRMIDLPNFFNDKRAKKESNFAFQIRHLRSMDKNKLMIRMKDKLRELIGPFFMTKLELIRPIEMNFDIVGDNELAMDYAKFLSQEHLVEEKAVTKISVRIIFGRIMQIFARIYAIWETPKIKILKKTILNLWNGKELQTIHTDLKMPGLKAVTKYFEFYLKLLRIFNSSQGIGEQEEQIGGLLPTQTFAKFTWEFAAKNKMFEMTWVALLEDHAKNILRLTESTTPNAFTALLKDSLMKEKGTKAKLNGFFTNNTEKGDEIYEALAKKYPKLKQLIAREELSDDQIRDLQIRNYIRFLNVTSSRNESMKSRFKLNLLLYYQWVKQMRDGQNSAEGKKEFDAKMGQIEITMDLVADENMAIEAYLVTVEANIIQELEQFKQNKFLVNNGTPIKRHKEKWTK

SEQ ID NO: 153987 - protein, 136 aa, Heterodera glycines
KISIFPTYIFIPPWWYFTLFTLSGLFSVTFSVVLAYVADITERSERTTACGLVSATFAASLVTSPALGAYLSRAYSDDAVVLLATGIAALDLLFIALCVPESLKSPVAAGQIRPISSVSILKIEGTDPLFVLRFLR

SEQ ID NO: 153988 - protein, 235 aa, Heterodera glycines
MGTQVKKTLFRRSVIKKKHLILNPILDKGAKILNILDKGAKILDKGAKILKILDKGAKILKILDKGAKILNILDKGAEILKILDKGAEILKILDKGAKILDKGAKILKILDKGAEILKILDKGAEILKILDKGAEILKILDKGAEILKILDKGAEILKILDKGAEILKILDKGAKCLYSRKMTINACTRLASRRTRAEPTAAVPSMAADAADIRRRLTQNSERARLLILCQKSGE

SEQ ID NO: 153989 - protein, 77 aa, Heterodera glycines
MSRRARSLFCVSRRRMSAASAAMLGTAAVGSARVRREASLVHAFFSWGLLTVPVINVLAETFPANKFLMNGLILGLK

SEQ ID NO: 153990 - protein, 47 aa, Heterodera glycines
FGILKKPGPGFHVGRGFSGQKFQVAEKYGLDLGIQEKSRPDLDPSPG

SEQ ID NO: 153991 - protein, 23 aa, Heterodera glycines
MRNGEAEENIQFYKLRNFWQFIF

SEQ ID NO: 153992 - protein, 519 aa, Heterodera glycines
MAPKRQRVRPASDYVRKLDSESVFNKKFNVQSSKSSYIIEDLPGNPEFLLRAIFTNCILSAVRLAHENGIKPDRLGATVSSELLNPPVWIPIRQYTSNTVDAILNRLLEVAQSKSREGSLWGAPFTITTTTLDASTLPRQQQIRGRGFRTPKNVRHIVKEANLLRVRNNDSFCLFYALELSRIYHTDMMSKQRFSEYLNQYFDRQRNDVRRLMTSAGIPFNLNEYDAAVHIPPIVDYWNATYNKIFKVFVFGASGEYKPIYKYGPDNFDTSISIFYNNNHFDGIRCGVGKAVFGRDCYCFPCECPFDNANDHSRQCKARCTNCGRIGVGRPCTPDDNYRKDCVSCSKTFMNAECYQHHLTSNYCTKSKKCKKCGVVWDFERNTRDGRKGHVCEEKFCWTCRNYHDKGRGCFIKKLKPKHPKAFRLIAFDCETTQNTIIGPNKRAHIVNFVSAHVACSICIKGNTWRQSLSGRTACKICGEFRTITFSHRAFNNTQVDSMRVCESPMTEFAQWLLSGFDK

SEQ ID NO: 153993 - protein, 259 aa, Heterodera glycines
SNAPRIHEVIHGITSPTTKSQLDNAFGGEEKSKNVINANHCSTNYSKHPSRPNPTPGGREERCPSFGQISPTQRSSILHEGDCDSEVTICPPSARNSGRSAAVAVASGNGAKNDENAVYTASSPPRCTTDSFRRKIKSMECLGTLDNFSTMTPNKYRKNSADPPVDCNGSDEDENEEDDEKQCHQKRRQRTVEEGQEEEDSAKYGQRSLQNLHNLHPTANRIANGAKQQQIGKLTNQNNNGTFGGGGGVTTHWSTSGTL

SEQ ID NO: 153994 - protein, 144 aa, Heterodera glycines
MTGNHDEEHWRYDTLQHIPLPDGVNTVAGVDATLGATIFWTDDGRVFGFGCDTVGQLGLGIKEEDEKVVSKPRQITSAHLDGYRVLGVSIADNHALFLAASIDQQPPLSSASPPPPPQQQKAQQQKQLQTNGNGILETPIDGKA

SEQ ID NO: 153995 - protein, 119 aa, Heterodera glycines
WNTKFSFFFCLISFQQFTSNKWKKNKFLISVIHQFKKGGKFNTILHFVPHQYAWVVERAGKFHRILEPGVHIVYPLIDEIRYRHCLKEMCIEIPQQEAITKDNVQLDLDAILYVQVVDP

SEQ ID NO: 153996 - protein, 106 aa, Heterodera glycines
MSDNRNEAEEKMAKAIFISGDGWLCVFELLPASQLGLAIAMISHPFDFYVHEHFQTRYWTLRSMKIKMKFEADGTQEMDVGHANWNRLEYAKARCKEKPPISRPFH

SEQ ID NO: 153997 - protein, 110 aa, Heterodera glycines
MDAYFDVDDFGRVGSGIDPTFAYQELSPSSNESIEKSELACFKAGQRLEVNGDLFSWWHENAARLPELSKLARMVHSIPATSVSSERLFSKAGLIFTNSLRNRSKINKYV

SEQ ID NO: 153998 - protein, 27 aa, Heterodera glycines
MLYQTFLIINYSKLDWFPVLLYNITFL

SEQ ID NO: 153999 - protein, 20 aa, Heterodera glycines
MSRRDFFDGPTPNPSLSPSM

SEQ ID NO: 154000 - protein, 150 aa, Heterodera glycines
MRRDKSTLLVIDEVIDVLAEAVGAWKKLIDQRANFHRHPKKRSLKTVTYRKKIPVMIPSLIHSPRTSAYIDTSAKQPQNLVELDLEEVRKLQQFIGQNAINHIVVEDGIFAGMFSCQQNIEFRLEDEAIMGDGKMHRMLFSFGAILSAEI

SEQ ID NO: 154001 - protein, 312 aa, Heterodera glycines
MREVISLHMGQAGVQIGNACWELYCLEACWELYCLEHGIQPDGRMPTDESPDGRMPTDESVGVEVGVEDHSYNTFFSETPSGKHVPRSIFVDLKHVPRSIFVDLESTVVDEIRTGTYRQEIRTGTYRQITGKEDAANNYARGHYTIGKELIDVTMDRIRKDVTMDRIRKIAEQCQSLQGFLIFHSFGGGMDRIRKIAEQCQSLQGFLIFHSFGGGTGSGFTSLMMERSGFTSLMMERLSVDFGKKCKLSVDFGKKCKLQFSVYPAPQISTSMVEPYNSVLSTHTTLEYSDCSFLVDNEAIYEIVDNEAIYEI

SEQ ID NO: 154002 - protein, 104 aa, Heterodera glycines
MLATQRIELFSLSLKPKTKLRALIEIVSNATEFSTLPIRHKEEVTLKKLADRLQGQMKNQKWNSPQVKQRLAFARHPRDGIVPNAHSSDVFKRVVHEAIAPLHA

SEQ ID NO: 154003 - protein, 21 aa, Heterodera glycines
MKIFNALVQQVNRICNCKRFL

SEQ ID NO: 154004 - protein, 169 aa, Heterodera glycines
MGSRKILRGVPSCAIFERCTSVALWESDGQKWNETLLKEIEQNSLGRMGENVQRTKRIKMKQKEVEETDEEEEIHQMERKTKKRETEEEEEKEKEEEKEKGEEEEEEREDRMRRRTEGEEEDKRGQSRKMNRETEEDDNRQVLDRLTGRKHPSRREWKNQDQCHESTKQ

SEQ ID NO: 154005 - protein, 38 aa, Heterodera glycines
KLIFSFALHLLFFMFHVFARIFCFKLLKIMRSILIQSY

SEQ ID NO: 154006 - protein, 214 aa, Heterodera glycines
MKRPNPLNLPMSEKKPKLRRRLPAELNSELISFVPLVCLFASVKRAPIGPKGVIALFDVMFEEKRTPKKKKVGRLLLQEELPQDLSRNELLHYLCYGRLGTNLFETYFVMTHATNSIAIGNLFGLLLDFAMSSPTPWLMKRPICCGIFYRQHLPWILQQPMNVMLSHGFFPEVRSDGFEFFWLFNPHLKKYAGYVRILPELSQPDNLHFFLSIF

SEQ ID NO: 154007 - protein, 225 aa, Heterodera glycines
MTNNTLDTILNQFKKVAQSKQQKNVSLWGEPFTVTITTLNRNGLPPKRRVKGGARRPVKTAVHHRINDQCLIKIRNPDDHYCLFYALQATMVDKTCNWPRWKFSRYLNNQYGQQGQLHRDAVELMKQVKAPMDLDGYDADTFVPLIVDHWNNMQQQHRFAVFIFGSLGQYKPIYKYIDNIYDTPLLLYFNEDHFDGVQKQGGLFGQPYCLECERPYRRMSTHSKS

SEQ ID NO: 154008 - protein, 30 aa, Heterodera glycines
INPAVRFLEPSDILSQWVVAFPGHLEESTV

SEQ ID NO: 154009 - protein, 225 aa, Heterodera glycines
MVAMFSLFCGATEPIFSSCLPPHNGGYDYLLFDAKGPEADSAQSLFAATSAVPSAAVHFLESLNPLNGFKDKDDLENYLYNQSHKVEPKNGEIPNAKPKHPPEALKSPGVKQQKTPISGSSGGTFHRFPTAKSSAKSSASSPHSPCNAPSGGGGGGALLSPSHINVPTRSPASAGSASGSSMSMALAEDPNFAIVDISPGEIVESQKRWELIAFPRLRPIPSMAW

SEQ ID NO: 154010 - protein, 39 aa, Heterodera glycines
MRHSSSNLGQISLPLNGIDLGTTTQKWTNFEAPKDVDEL

SEQ ID NO: 154011 - protein, 38 aa, Heterodera glycines
MRHKNYKIKGQKGAFWSYRHFIQSKKDWLFKMPLENRF

SEQ ID NO: 154012 - protein, 65 aa, Heterodera glycines
MHFYVNRAINDTGHKSKNYRSDGGAKTNYGTLKTRARPGPGSRSRSRPFFDNLVFCPGNQGPGQM

SEQ ID NO: 154013 - protein, 44 aa, Heterodera glycines
KRARISIKLMTQSVGPSAVQRLQRRAEDFLAFIFPHGFLEKSQN

SEQ ID NO: 154014 - protein, 147 aa, Heterodera glycines
MRYEIKKDYRVTNPRELIHQYATTTPVTVIDPSLETTRTITRQHYTQTVEESFGPYPPYTSPPNVPSPLKFVQQLRDETMTESQRQANRQQQSMSASSRDSNFEQRIEVKAKPTIAMIKMQMLSICFGRKFGARQAVKRAVIRWWNS

SEQ ID NO: 154015 - protein, 203 aa, Heterodera glycines
SQERETPFSGYGDRVGSGVAYTPTLWKGGELVTDPALVNKSIKPRRFYYAPIGDGVVAADGVELKRLPRDLTPKVEVIQQRIVEKSDRGRPGVRITEKTWSTGGQLERKTRGFRIEFEAPTEDSLKGYGHSDNPNEFPASDAGRGSRPAEDGAAGHPKNWEGDGGPRMGGRGAGRPNGGGGPYDGSSRSTPLDFGKAPATNGL

SEQ ID NO: 154016 - protein, 62 aa, Heterodera glycines
MWERCKLKDEATELGSTLPEANNERTARRMMFSCARQWSQLNNHIELDFIYDVATVIVAFAK

SEQ ID NO: 154017 - protein, 120 aa, Heterodera glycines
MWIIERFGQRFNLKCRGKAEIVDDIMDNIKSLLGQKSEFQSGLKRKQKLVNMDIYVRYLNRIDEKCRPFYANAFLDGLPSLKNLFCQIRFFIQSTANQFSIFKHVAETQGFEVMKQRICE

SEQ ID NO: 154018 - protein, 114 aa, Heterodera glycines
MTHLLYIRMKANDCPGVAFIRSGCDISFISESFARKANLLGNIDRSDCETIFVPAFRGGKLLGWVNDVQVRIDELNLQFVYRLGVMADKHLGMYCPKKFDMLYVLKEEYFSLQL

SEQ ID NO: 154019 - protein, 55 aa, Heterodera glycines
MIAVIDMVPNWANLDKSNDNFFVEERGILLVRVGLIVCTTFGVVVHKYAQMSKKS

SEQ ID NO: 154020 - protein, 34 aa, Heterodera glycines; identical to SEQ ID NO: 137149

SEQ ID NO: 154021 - protein, 27 aa, Heterodera glycines
MLSNLSLRMKSAENGVPNSAGAQVTAL

SEQ ID NO: 154022 - protein, 27 aa, Heterodera glycines
MAINSKISEKECNFLGSDKRFLNLHIV

SEQ ID NO: 154023 - protein, 63 aa, Heterodera glycines; identical to SEQ ID NO: 130392

SEQ ID NO: 154024 - protein, 78 aa, Heterodera glycines
MEVPADYSLHKHTFPNGTNEMSQQRRQQMSHSSDERSCQEEETEEEQDEEAMLYTAKYRHLLEYYKHISEVVIISGTY

SEQ ID NO: 154025 - protein, 253 aa, Heterodera glycines
MPTSSTSSAASSPTRCLGPLFVLIGLPSPPTTTKCNSSNNSNYEPLSESDLSAEELAERLIHRRSSIDHLLPEAPEPDDDADAGEQEKGKDRKEEKSKTERRDAVFGNSKHEKEEGKDKGNGGETQQQQQRQTITQEEKTPSSEDEQHKQQMMTNTTVVPNFMKQSSDDLTEEKSPLASQSHNQQQPPSTTTASSFSPSSAVTPFVPAAIASVSIYAANDGEKRRETEEKNVDQNTTVAEDENEDDDEMEQEL

SEQ ID NO: 154026 - protein, 426 aa, Heterodera glycines
TAGQWHNLWTRNDHKVKKRKKRKEIKNRQNLRGKSEHELARRELNRLIMELLYTRCTVIQNKIKVKFENQILHLLAHSRQFAHVDGAEQWHRRALARVASNIQNALHALQHPKECGKARLLLCELNKGCGFGCQFHHVVYCLLMAAATNRTMLLERDGAEWRYSRDGWAAVFRSVGSCTFAEHVNNTALDKLWTPNSPRIVRLPVVDGLSSRPHHLPLAFPAQFADVLLTHHSNPPVFFLGQFVAFLMRKNERTNKFVEEAMRRIPFELGPVVGLQIRRTDKVGTEAAFHHVNEYMRWAELWFRTEQKKLGKPLKKRIFIATDDKTVIEEARTEWAKKGFEIWANDESAEAALPSNRYSDRSLLGVIADVHILAHCSYIVCTFSSQVYIVCTFSSQVSRGGGEMRPKVKIGTNKKYHLHAKKLFPK

SEQ ID NO: 154027 - protein, 121 aa, Heterodera glycines
MVKYFHDRDKSLEEQRELWLQKIRHLSDEETVDLLAGTDGKMMSNRIFAQRNAVTRLEASGVRVGYVLAEHFAKDLPRFSNELDKMKFICKEFWASTFGKGVDKLSTNHQAIFIVNYQYFK

SEQ ID NO: 154028 - protein, 90 aa, Heterodera glycines
MPIQRPRLTVGNTSEVYTKRPVKEDEMANFPMSQRTRKSFGLSLRRTAKNAEAAKKRKGANKYAGTSANATKVKLTKRLPANWALNKLRP

SEQ ID NO: 154029 - protein, 381 aa, Heterodera glycines
PQGCAMLNWVLAHSIPLHLRSQSALLFGLMWVLGYCLVAPVAYFTTNWQQLIAAASGPSILFGIFYFFTIPESFHFLVAGKKLNDVTIPESFHFLVAGKKLNDVKKWVEKANKCAAKAGTRAIGSTELDQFIGQIAKEKVRHFWTDRTLILYLTVFCFLWTCDTFIYYGLSLFSAQLAGNTCDTFIYYGLSLFSAQLAGNRFVNFTLVALAEVPAYLFAPFLLEKLGRRLFTSFTHFLAASALGRRLFTSFTHFLAASAFLAVLLNDSPKLFLVLWLIGKFAISSSFTGLFVYTSEVFPTVNRGLCMGICTAVSQVNSSNKQILIYFTIIYSIAPMLFFGAFSFFAGLFTLLLPETKGKELPENSIRSRIILRIRTEKLST

SEQ ID NO: 154030 - protein, 68 aa, Heterodera glycines
MKLPLPVCLVPVPPLFRTVRWKVKGFICKNRIGNVENEICEKRRQRENELVAQFEMKRHFEILTKAWA

SEQ ID NO: 154031 - protein, 25 aa, Heterodera glycines
TCTCGVVVKLSTFHNFLPGFNSPLG

SEQ ID NO: 154032 - protein, 335 aa, Heterodera glycines
MPAQGTHQISKKLEPAYALSAVPSSALLRPDQQIGNHSAVSFYPGQIDPNAQSTLGLGPDQFHQYLAQQSYGIGPSQINQNLIEANHLINSEQLFGSNLRAPPEDVQYFTNKELKSDKTIIDYLNSHCVTDQSLFLSQNLVEPLTDSNVYQDQINMLIAENQFFNPSDQTESYLKHDENLNQMLINFVASSSPNNDEGDYRPHLLNSFNHQQGLLQHSPLDSDYHLNDPFGASSSSQMQINPSNYFHYQNVPQDSANIDQSEVETKNTEQMANENEKRKMKRLIVEDEAGKSEAKAKMEKRTKNQPPEAVGRQSASAGELPGRSSISQSEKQIGN

SEQ ID NO: 154033 - protein, 259 aa, Heterodera glycines
SGRESGRESGRESGRERERATESGRESGRERGREQKVELKVEEEQKVEEEQKVEEKVEEEQKVEEEQKVELKVEEEPKVEKKEQEEPKVEPKVEEKVEKKEQEEQKVEPKVEEKQKVEENRKWKRKWKRTESGRESGRERGREQKVEEKVEEKVEKKEEENRKWKRKRKRNRKWKRKWKRKRKRTESGTESGRGTESGRRTESGRESGRGTESGRGTESGRRTESGRERESGKERARGTESGTEIGKKSGKERGREQKV

SEQ ID NO: 154034 - protein, 317 aa, Heterodera glycines
QPTQNSTTIQSDYELTQTEMVKHQIDTGEAIPVKQRMRPVPYAYREKVAAMIQDYLGRGIIRHSISPWACPIVIVPKKDGSLRFCVDYRGLNAITRKDCFPLPNIERTLLMLGGPKFFSTLDFLSGYWQIKMAKNSIEKTAFTEFGLHEFTVMPFGLCNAVATFQRFMSQLFGSKLNDFVFVYIDDVLVASESFEQHLIHLKFVFNKQEAGLKIKISKCQFCAEELKFLGHILTRNGIKMDAKTKPILELPVPKSKKDLHSFLGFMTYYRKFIYSFGSVAAPLFKLLKKDVKFQWERQKQAVSTLKEKICQKSRPLF

SEQ ID NO: 154035 - protein, 154 aa, Heterodera glycines
KANIIADVLSRSGALKPREWAEKIFRVEQVDGNISASVPKMEMIEWVNAIKETIPDKSVESVAKAFVEQLVLVFGKPKRIHSDKGAEFVNKTMEEISQILGVEKSTTAGYDPNANGQAERANQTILNMLKKEEEKMDIAEAEIKWTMTCEGGGH

SEQ ID NO: 154036 - protein, 133 aa, Heterodera glycines
MFPKPSNPMLPNPMIPNLSNAMEPNPMIPNPSNPMLPNPMIPNLSNAMEPNPMIPNPSNPMVPNPMFPNPIVPNPMSPNPSNPMVPNPMFPNPSNPMVPNPMFPNSSNPMMPNPMFPNPSNPIMPNPMFPNPM

SEQ ID NO: 154037 - protein, 18 aa, Heterodera glycines
YREAIPEGFGLPINLGAS

SEQ ID NO: 154038 - protein, 95 aa, Heterodera glycines; identical to SEQ ID NO: 125597

SEQ ID NO: 154039 - protein, 101 aa, Heterodera glycines
MNLLITVVPLFITVVPLLITVVPLLITFVPLLITFVPLLITAVPLLITFVPLFITVVPLLITVVPLLITVVPLLITVVPLLVTVVSLLITVLPLLITVHLF

SEQ ID NO: 154040 - protein, 98 aa, Heterodera glycines
MPNIFKILLIVLLAVVSFRLSASTGDKKTANDGSGNNSSAGIGTKIKRIVTAGLLFTSLATGGAEAIGRSNAQGGNAAGLVPSHVTNRSMVANCAKLT

SEQ ID NO: 154041 - protein, 33 aa, Heterodera glycines
MSNSQEIRRRLHTDLNNVVQKLVVSSRLEEVQQ

SEQ ID NO: 154042 - protein, 204 aa, Heterodera glycines
MVNNDESPQRSKAAQRQKNIQQKEKDELRRHQRNKLLSSIATLRSRRKRESAPISSKSIVIDLSSDSDASGIEIIQNPVRDRQAKSPNEHSTAPIPMAVQRLTPTRKSSSVAKRPAFSSSKQPKGKAANPAQTSQTNELNRKMKALSPTASGSGANHHCVATLARSSDSTTVIDKGSQQNCPNMSSATISKTPCQQHSSEKTLN

SEQ ID NO: 154043 - protein, 521 aa, Heterodera glycines
MAIHQECPFAKSEMTNHEAQLWSTNDELEVNFPGPIAGLFNCFAQPATLFVKRHNLQMFSPVHQVQNCQYATEFCQLPDNSTLIWKSTCNGNECQTCDYEKAEVINGKFTAAYGESMATWISEDHQKALTFAKNAPELITCDGTRIVMSEQNFGIAKEQYDDIVSTTTRWKRHPTRTARITALGIPSGNKRCVKSALHEGMSAKHEGSQPDSSGQTLTTATKHPSSLDRRNDNGSVSMPMNDCRLYIPVTAHFPDRAIAAFLDPELRIISLTAQQASCNSYRFHHLQLRSNPNIWLWIDSRTGTARRMPKDYVHELYETTINQTNSNLELHPLIFHAWQLDNESDATRFPHINEFNNSEQFKDKLEQHITARTEALGALKGGIEGFTMRWLKSLIDEAITWWIRVACVYSTFLMLRDIVLPCTLAYLLNPIRVTLLSLVGVRPHPTFRPTVSKPLGIEEGMPLREVPRTPKPPARRAEHRSMSPIKLDMIARTARYQQPRTQSHLDLTEDSPFARPRRTEF

SEQ ID NO: 154044 - protein, 132 aa, Heterodera glycines
LRENSCQKSVTDPLFLVESPLSTTFFLFSVVRAENIAKQADVIAALTLDVLKGTTRAFDANVHRVRPHHGQNLVAVHRVRPHHGQNLVAGRLRALLHSDLNRSEIAESHRHCGKVQDAYTLRCVPQVYGVIA

SEQ ID NO: 154045 - protein, 73 aa, Heterodera glycines; identical to SEQ ID NO: 148250

SEQ ID NO: 154046 - protein, 196 aa, Heterodera glycines
MCTMGSSLGHDGVIIATFANICIIYSSVICYLILYAKLKWDERKANGITVVASQPFIFKSISLILLLQVVGWSGGIIAFFVVSIHFGDDDLNLQKFLANSVINCFVCVCGTFETPVLFFHSSEHQKAMRKEWRNIVQLVKKCSPTTFGRNNKTGTAVVLVVSRPGKPTAKIRGEFGPFNPRIVSAAPKLADQTTAH

SEQ ID NO: 154047 - protein, 237 aa, Heterodera glycines
MGGSMNRLSENLWATENPEKLTYAWTGEKCETTVNDFLEEGKGGILDFFLVTSFGHNLNPYKNWEELPRKTFIWEIPEPNEKYWATHFSVGEFKAEITENAVVIESEQSVFYFEKEATDEREGIIGVPENAYKMSNDAFIVLSKTEIREKRETPKIEPKRKERPVKQEVQLKSEIGKKENVLKTKEQNATVYVLPQSTVKLVKDSQQKMPNPITILPHSTPSTVTTTSKPQVKISTT

SEQ ID NO: 154048 - protein, 237 aa, Heterodera glycines
MEIENVENWSCKSSATLRIVSQKNGTEDLIGRIGDRIFNKELNNPGFPYFISFAELLDPGKGFYDKDEDKVTLAIDVIVDEPKTEKIISDPNKSNGTLSMEIEKLSEFAREIEESDRISETAVYIKGMPWKILAYIKMKNESTEKWLGFYLWCDACKKGLLIKLYKRKCSATLRIVSQKSGVEDFKREYNEKVFNNATLLSLGWHYFISFAELMDPSKGLYNKDEDKVTLAIDFTCE

SEQ ID NO: 154049 - protein, 446 aa, Heterodera glycines
MDGSTSTTKGTQTENATRRPSAGIKSKIPKAQRNEAGERQGTRRIDTSVSNEGSQAEVDGSVSSRNGNSNQKPTSPTKEMDKSIEKVLERLYNDPKSPAAFAGVDRLWLEAKKELGNKIRKNDVKHYLEGHRTYTLMRPRRINFPRARTTAAGFMTDCQVDLADFQTLSRHNRGNRYLMVVIDVLSKRIFVTPLRTKKADDMVDGFKEVFSTMPMKPHRIFSDKGTEFRNQQLKKLFDEEEVEKYESTHSEKKAALAERAIRQIKNRVYRYFAQTKTLNWVDVIDQIVNGINKSPSRVHGMRPIDVNFKNSQQIWEKMFGDDQHMALFGKPRKRARFVPGQTVRMSIAKGQFEKGYIPNYGDEILEVDAVKRHMKPMRYKLRDSKGEKFKGFFYPEELAPVRKDAETTYRIERVFRKRKMPDGTTEVLVKFIGYPEREWIHETQLV

SEQ ID NO: 154050 - protein, 150 aa, Heterodera glycines
MVIVLFEFFKRGETQTAWFTCDLCSYFKWNSLCFCAIGSRFGMDRHSLDQVYSAIIQKALDLRVESLSMPLLGTVLLSYFLYSLNLGTLFSSLDTASNYLWACLQQFSSFGRLKKIQIVDTNDFHMRSLHKFIIAKLRAQSQLQNGSSAS

SEQ ID NO: 154051 - protein, 219 aa, Heterodera glycines
MNRRWICADVWMDILPSFDRAQLGLKMALLSDRFDVLVDTHFDGKSELTIWKAIEIRKDKGRNAKLYIDHSVIEFLRSNKQIWDRSGTKLEVYIEYCDQRIWDVLDRQIWPLFATNIRHLSFTSGDALDNLRRLISPTILTDLDQLNSIDSVGLLPDGISDDGPNATAGQALTKWLHTPSKNGQPKRLYRYNLLGPPNFEWVNSFKEAIVAASGRRRSG

SEQ ID NO: 154052 - protein, 55 aa, Heterodera glycines
MTQKQIMSQNRDENSQPPVLDGPYPLAQERNEFVEDEAPVLLEMLDRLSQGVVLF

SEQ ID NO: 154053 - protein, 146 aa, Heterodera glycines
YGLCEEHLFIYILPMLTVTFGYSFYVLGEAAQWALFVYPDWPVLCTNSDMFSFGMSTMLLRNGLVINGLTEYRQAFRKHLRKLPLAGICLMRIGQQQQQLPNAVSMVAVFNNAIPQPSSVGRVRHITTIGGGGGTAVPKTMAPIDS

SEQ ID NO: 154054 - protein, 548 aa, Heterodera glycines
MSNFNQNDFAITSVHQMRNRPRNTIGEIAEVRFAPLEEVERPDRVLERLVQRLFDRVLDGRPAPMLIGLQLHPPTFENPFTIPLRPPEQNNPAAIADLIQRLNDQSAAGIDLTGGTTVTKVLAVWPMQSDHSESGRAGACSLEEEHRLVNTVRSLIRIKNPNDRLCLARAVLLGLHDWRSRSPGGGGPTAFKSFANRQHTHGPEARNLLRRAAIPRNKHMYTIDDVQKVQDWIDQRYGPGEIRIAVFEKEREYRIVFKAASGEAAKFNLCLLFENQHFNYIGRIEQLFRVQGYCIDCERRVTRWYHPQECKVVCRLCLRFGAGYPCKQQQQQQSRADGSTGNRLCRYCQFVFPNDDCFAYHLSNQAPASMYNQGGRTFRPICEWRRACRQCGAITYANYPHKCPAQIGQTEWVRCARCSGPHQSGDPCFIQPLKDEPMRRRRRRRGQQQQQQNNNNDDEDDDDGNDGNEEGDDDHGHDADNEEEEEVGTNRSVRLCFFDAETSQDLPLQLRTKVVQKHVPMLIIAEIICEACINEGISVHSGVGQYAN

SEQ ID NO: 154055 - protein, 281 aa, Heterodera glycines
MTHPGVHVRSAQWSIGEANVEDTGYRLDGLVTREPPQRNLAIEYMGCFYHGCPKCYANDRQQKLAGGRTAEDLYERTKRRLFELQNQHGFELEVVWGCEMKQRLRADPEFRRVYNDSFVPRPLDPREDALRGGRTEPFILHYTCSPDEEIILIDIVKKKLGETKNIFSLLKKKYTKILFHRDDVLDMEGVHVVPGSNASIRIEFPQIGRTPCSDLYTYDAHKDYQPHYVKGRIRPSMETVPFGFREAQTDQEQAEHHQRQLNDFDNNLLIVNLPGCSNWNQ

SEQ ID NO: 154056 - protein, 175 aa, Heterodera glycines
MSWLKIIEEEEERARELQNDQMELEQVKDNIELPKHPQPQTKCSCNEKQKSVPLIDFLCKHYKCSMNELHVLLQTLSKRREISEMLRSNLHLRTNHLRPAWKNIRVHCNELTIHPAQTAYAMRGYLGITVRVYYYVKHGIKLAYPQLPCVLQFGGGDHSSLFPLECLSVVVVKEP

SEQ ID NO: 154057 - protein, 229 aa, Heterodera glycines
MADNFQKFDEKHLQLRHPFTLTISGSTGSGKSEWVLRMLRNVNALVSEPISEIFYCYGELNPNIIQLQKSGHIGGCRVIVHAGSPTEEQVNRRAKECDGKLLMVLDDLMVGLGQQFLDTVFTRGSHNWGVSVVLVTQHLFAKELRVARNNSHYLVLMRNPAGALQVRTLASQLFPTKSNYFTEAYRDATEKQFGYLLIDMHPESPELLRLKTNIYGEQGGLPPLVYVAK

SEQ ID NO: 154058 - protein, 151 aa, Heterodera glycines
MTSSCKACPFRSKGLICRRKLSDDNMCEACGQKAIAPIHTVFVRLLLQDVEQADIAQRVTMFSSVAEEFLGMKAAELLAKEKEPESLAKHLDDLIAVKLIAKVNIKANNQTYTGFDWIVNLFKKCPGNDDSDVPKEKNDVDEIATKKAKKN

SEQ ID NO: 154059 - protein, 137 aa, Heterodera glycines
MAMLLIWTIMDNYLMEKTVNNRSLISNSLRWTKEQKQLGEEFHEKFARMEIELKMAKLELENKEQKLKLHELIGEQKALKEKLAKLEQKKGKNAIFPNLSTSEEMIVLIARIAELNRANTAEPSIASSADLFGQDGN

SEQ ID NO: 154060 - protein, 587 aa, Heterodera glycines
MSTSGGCSSEPASGTSQACGQETKMFLSGKDDASSITAIDRKLWQGKVTVKISDLEKVQNDMGKLEDGVNRAFRHLNRSLNQKVTWVNDVVANTNANFETLKVQFETLTERVDILERDNDGANSGGTFSLINQNRASLAPFVMPMGNAQPNQLMPNQVPIQQLSSEDEDDGPTLFGLNMLMSGPAVGSGLEMFREESVFAFDDWAERFKDYLSVSGKAYTEREKVTRLKLALKDTPLALFKELLPAQTDTLDTALSELRRKLDSPQRREITKRTLSLCKQREDETVAQFLRRLTPLVDATNSSLTGNSRKEKICEEFLDRLKPNISFLIRLVGLSRAKDLDLVRAQAEELEALLMMSKSDEAVRLSDVVNALNNQSSQSRWFTEANLNNDFAGQWASGNNVRGFSSFSGSDEQTQQQGGGEGQNRSRNWGESHQEQFSQRNWSRNPRCDYCDRVGHVAYNCYQRRANFSQGRWSNQQPHQSQGQWQNRQSSVNMMDAPSSSNASAEFFQNLAQALLDLKIQERRNYKDEEPRSGAMNALTHIKPETEVKKCQVVSWFLLKMATKLSHGPNVSTLRILSNTNGNEYLT

SEQ ID NO: 154061 - protein, 218 aa, Heterodera glycines
MKKQLHKLRNEQESKIISQGQNSVNKFIRNKLSKVNEIPTLIDSAGNMFSSNEQKCEILAEIFQKSFLENSIVNGSLTQSAQNKTKLLDIELNNGTIWNILRRLPRRNSTSPDNVPYILLKNCAEPITKILADLFRLILDSVKIGEELSENFKIFSGVPQGSVLGPLLFLIFINDLPSFIANEKASVGIKMYADDVKLYYAHENDGHSNQLDKAIEAN

SEQ ID NO: 154062 - protein, 224 aa, Heterodera glycines
MSNEYKQKGKYSTKEWYQNYAEICKKIGQHILSISFFHSNCNFFQFTEVIVDILARLDRLEKLLEGSGNPTLNPIIERLEKLERLVERLVEGENRYGHRFGDPQHTSSTSAPTPTNGNFQWGQPPPFAGTGAVSRMITDAIINSEQLKEKANRAVIEKLPEAIDERALVDQIAEECGVKDKLSPDIHRHPRTRPDGGVKKDRILKFHFWTNFRETNLSIISAML

SEQ ID NO: 154063 - protein, 252 aa, Heterodera glycines
MASDGRQLRVFKRRKSQKKTIRNTHIQQAQQNNSASNGFFLLLPFCLSSSLSVFAPCHCLFGTFKCLGFAFPHFLVFTSFVNAQSMAHRIGTEVSTEDGMATTGTTTTTTTHGKYGHKRDWGHDNHKKDGWDHGYKHGDTMVRNGTKRTLATADYATDDGHAAGYAKGDESDWSSYQYGGQGNKAQGDSYAKGYNSAWKDGHDDGHDYATGHGDGHDNGWGSHGSHHGDGDYGNHGGQHGYGGYGGGEHGHH

SEQ ID NO: 154064 - protein, 260 aa, Heterodera glycines
SFITVFASSPYSTRLRAVPFVLSFGGPSRAFVVSVRFVPFPPNFPSLFFVFLFSIYSSTDENPLNLTPDQLQIAELGKPRLGEFRKCQITIKESKDFQGVVDRMLKTANASFMLGTSSWREQFIDALTVSAGDGDDEETEEGEPSEAEEPAQPSKSDYFMHFLSVPWKLLFATIPMHFLSVPWKLLFATIPPTDYWGGWACFTVSIYWGGWACFTVSILMIGLLTAVIGDLASQFVCQLLMIGLLTAVIGDLASQFVCQL

SEQ ID NO: 154065 - protein, 170 aa, Heterodera glycines
AFLWLLDTFASKVSAVQDKYADNSIGNVTGSNAVNVFLGIGIAWTLAAVYNVTGSNAVNVFLGIGIAWTLAAVYHWFQGSVFRVDPGTLAFSVTITLAFSVTIFCIEAVICIIVIVARRHKAIGGELGAIGGELGGPRNFQMATSAFFACLWAFYIGISALESYCVIAGF

SEQ ID NO: 154066 - protein, 209 aa, Heterodera glycines
MSSDDTFTEKLIAQIIKNLQVHIKRVHIRYEDKFSNRERPFATGITLDSLNFQEAEDALDVFNLNIARQQAEFEIDKQTDLVRVEDQPQEGWVGWAKNWWFGGSPKGKEAVEDAQIFEKFEKESTPMEKSRLYKSIDYQVRMKKEIQMFTITKIGQENVPPMNYPKHFVDNVFKVHLKTLKLKLDNVMELRFSQLSAKLEQRSAASAMR

SEQ ID NO: 154067 - protein, 780 aa, Heterodera glycines
MPSKQQNLKKKKQDVYRRQAERSVSRDNSPVSDGSADGNGEASASLRGTTTPSLSALQISTPASSIGSKKRGRPSKAGAKPNLATQESVSLIDIHRTVVTQNDQDSPCKKREKVAECDQPMFANEAIALTPVSTQSRGGRPAKKIGGPGRGRLSDSMSKSSEMDNNLENAPIPATSHIVSEKIDFSTVPINFATSRNFACKIWRWAAIGLYERDGETALGPRFIVAYLAYIASISQRKTVVVDSLASRTDVSRFSNVKNYTFGYDPNAVPEVVLMPLHFPNHWTLIVYDVAHGAYFLDSLHMSSLSDERMALIQSIIAEIVPGNASFAVEYVQQLTKQNDGNSCGYFVCLYAESWLMNNRTFVLPDLNINYEKKRILWHINELYGSDIVPFHPREGVSTSFAVVSHHNGDVAQTSSKDIVPIEVDDSAVLPSSEETAVLAQAPVIGENQADTHGVVADTIVQQEPIAQADDVIFVRPKTPPRRSLRVQKRLSASVSRSPSPAPKRPPPANSLGMATPITRRCSAFHKGWQCAAAAAKHFPEYCDSGKLGDKKCADCGAHLFSHEDSNICCRKGRVVLPMLNPHPDELKELIVGNKQSREGKEFVRHMSRYNNLFQFASVSAGNKPSPAGGPMAVILNGEFHRRISSMQAGTTQIPGFGQLYILDPVEAMEQRRNNPRFTGEKITNEDEFVQGHQLNEQTLEILEQMIQVHHPAAQAYKQAREQLTELLQQQTPEELRFFRMTLLNERRAPAGLKDPKLHPHQIITPSTGEGMFAIHADPH

SEQ ID NO: 154068 - protein, 188 aa, Heterodera glycines
MGNSCLISDSTRGQTISPPSNDFVAILRRPINTTILIKRQLKNKRTLTKMLSKPRTETAIVLPERGIYLCWHNNIVTSRSDLFHKAMHYCIHASPKMNEIIACGHYCYRDLTKWPKLNRICQAIFKFFDKLINEYKMDEDKMYDACVHLGEMHANYAQYGLKQHFMDLFQQQLLGGRILNIKYGFKMN

SEQ ID NO: 154069 - protein, 25 aa, Heterodera glycines
MTILFDKCRLTSEPKLNLGFWKRVC

SEQ ID NO: 154070 - protein, 251 aa, Heterodera glycines
MVVARRGLVAPQNTFLEAVVRRCNNTDSSFILANAQIIDFSSFILANAQIIDFPIVYCNEGFSKMIGYSRAEIMQKNASLSFMYGEHTDQLSFMYGEHTDQMAIQKIQNAMEMAIQKIQNAMETEKTEQVEIELCKKNKSVLWLSVLWLLMNISPIKNDANRVVLYLCQFKDITPLKEPFEGENNKSGRGRGGDEIKNEKRNLEGGMVRRKEEFLEKSAPHLILSYSIIKTEYNFRIFFTIYFKRQKKFNF

SEQ ID NO: 154071 - protein, 35 aa, Heterodera glycines
MAPNYFVVLFKHIENVIRQAGKEVDEEPRLEVILG

SEQ ID NO: 154072 - protein, 353 aa, Heterodera glycines
DWSILALTFYTAFMVPFNIAFRPRDPLPLGSGIDYVVLLDSVVDVIFSGIDYVVLLDSVVDVIFFADILLNFHTTFVGPVGEVVIDPNVVIDPNAIRKNYFKSWFLIDLLSCLPYFKSWFLIDLLSCLPYDIFYMFKQDDERIASLFSALKVVRLLRLGRVARKLRVARKLDNYLEYGAATLLLLLCAYVLVAHWMACIWFYLWPSKISVPKPGLLSTDGLIRLSYDLKMPFNITSSNLNRLVGGPDRTQCYVSALYFTMSCMSLYFTMSCMSTVGFGNIASTTMNEKIFGICMMMFSSISYAAIFGHMTTIIQQMTSSTQRYLSMVFSFSAFNLKVSPKSANVRVHQIATAG

SEQ ID NO: 154073 - protein, 489 aa, Heterodera glycines
YKVYGQEKVPAGGVVAGIGPICGRLCVIVANDATVKGGTYYPITVKKHLRGGTYYPITVKKHLRAQEIALENCPCVYLVDSGGANLSRQAEIFADKDKFGRIFFNQAQMSAKGIPQIAVVMGSCTAGGAYVPAMADQAVIVHGTGTVFLGGPPLVKAATGEEVSAEDLGGATLHCGRSGVSDYFASDDRHALAIARRIVAGLPAQRKTILFRPFVEEPIYPAEQLYGIVGAKQRKAYDVREVIARVVDGSRFDEFKRMYGETLVTGFAHIFGQIVGIIGNNGILFSESAMIGNNGILFSESAMKGAHFIELCCQRQIPLIFLQNITGFMVGPDAEAGGIAKHGAKLVTAVSCAAVPKLTVLIGGSYGAGNYGMCGRAYSPRFLFMWPNARVSVMGGGQAANVLAQVQRERRLREGGQWSEEDEQQLKQHIEQRFEREASPLFASARLWDDGVIDPVDTRRVLGLALQATLSAQKREGKAAETKFGVFRM

SEQ ID NO: 154074 - protein, 332 aa, Heterodera glycines
MISRSFVHCSFPAAPVLLILLQPDAIGAVPAPPPALDNGSYAVASGDALLLQHHHFPPPPPPPFCYASSPTEKALNNGGVQNGGLSVNLASNNNDDGQTAINGGLATAGPPSYAEYLALAATAAHHRPGPPRTEECAAANRSGGAAHCQQRESKSSNSTSNRRRMRMKRGSNAGRGRGKPLKKGEAMITLMRKSIGEERAEEEEEKRRCGGRLIAVKAVKGEENVGRAWAAAADCDDGDDEVAANSADDRPSRGQKHSSSSSSLAHQFDSSSADSASPPPPPPFALLLRDPQQRRPRRGLKNNNHLPHPNPNHPHHQKLSRCYRTNSSSSSS

SEQ ID NO: 154075 - protein, 384 aa, Heterodera glycines
QRNSFFEKSVEETQTNLVEHKIDTVDTKPIKAKHRPVPYAYREKVAEMINDYLRRGLIRPSFSPWASPIVIVPKRDGTLRFCVDYRGLNSVTVKDAFPLPNIDNTLLALGGRKFFSVIDFMSGYWQIKMEPESVEKTAFVTEFGLYEFTVLPFGLCNAVATFQRFMTRLFDGMVNDSVFYIDDILIASETWSDHLRDLGTVFERIAAGLKLKITKCHFAAKEIPFLGHILTRKGIKMDIDKVKPIINLPTPKTKKELHSLLGFFTYYRKYIFGFGALAKPLFRLLKKDVKFEMGEIEFGAIKTLKKSILDQVVLVLRPTSNNGGQDADGQSGSFTIMCIVAVVSEDSSSKTIESDAANQSTTRFGRIRRRHLCSIVWSSHSVNY

SEQ ID NO: 154076 - protein, 530 aa, Heterodera glycines
STPATPTKQPTPPQPAKQPIPPPPPAKEQPFTAPTPATPKLQKPTPPPAITPAQPISKPTSIPPVNPSPAQIPPKPKSITPITPAKVTPSSPAFKPSAPVSTTQPFLSKPNIVSTPPAPSKPSASIDAIKHPVTTVKPTPPFAKSASSPTQTTKIASPTASAKPKDNKAADKDVKRSVEAPNKNEKESKRILDVDDRFFGGLPAGDEFPDDDDKESEWPYEPFKNIVDDVEIQYLDDFERFKVVLKSPIISHLSFSPQLGYVLGFENPQHVGDQEMAKYGCDLRGGFSSFAVYSKGLTENMIVGNSLSSLLRVVSVSGATPGDYNEKIYDSPIYARVLQREINEIEIELRTMDKGRLVPFAYGTTMVHFYVNKMVHIVFDPSIIGYDEYMQYGSGIESEDYFRGSSPFQRGYGQRGAGVGDVFRGLWRFFLPILRRVGTTVGSEALSTGQRVLERVGNEGVPFKEAFVSEGKKGIDTVLEKGGLPKQFGSGRRMGIKRKRAHAPSHQTIIGRAISKAGNKRIRSDAFGLY

SEQ ID NO: 154077 - protein, 21 aa, Heterodera glycines
MAKNRSASAQTCKPFSIMRKE

SEQ ID NO: 154078 - protein, 42 aa, Heterodera glycines
MIIDAILFSKKRQKRIIENTLAIECYQELKIWFLLILAVFKA

SEQ ID NO: 154079 - protein, 53 aa, Heterodera glycines
SRDVPRFRFSHFAFRIIRIFWRFAFRFLARNATFTPLRIGLNSHKIFQNFTYK

SEQ ID NO: 154080 - protein, 150 aa, Heterodera glycines
MLLKLADYFQVAVLKSRCETHLINCVEIPLIDRFLLIERFGLDNLKNYFLHLNVDKLRFRRACRLGDAGAAYSKKSVDGKLVDDGRRQRQRLQHRSALAVRRRRLLSPVANARRSDRYGDNGAPAEAAGAAVAVNAPVATPKAGAAPTPK

SEQ ID NO: 154081 - protein, 219 aa, Heterodera glycines
MKASRGLIVRDWKPDVVYLVQFPRTHNVLSPSPFALKLETWLRINGLKYRNVNNEFTKASAKGQIPFIELNGRQFADSNLIIDHLRNHFKVSIDSRLSTHERALGRAFTILIEESLFRCLQYDHSIDFGWLATENGWAVHMSGFQKFLFQKIKLKKFQGFVSFIFIELFVKKKTNFKKYDAICVLVQKRFDGTRLWTPFRDGGGRNREKGPDSTINVIK

SEQ ID NO: 154082 - protein, 74 aa, Heterodera glycines
MADTVLNILQKYDGVRVPNYESVCEGLTGDDYLLAIVKFLARRDKIYNRIYNEIFESVSESLKVFTIFDSENGP

SEQ ID NO: 154083 - protein, 231 aa, Heterodera glycines
MDQNDHNIVGDEQQHIWVGRYNEKTGWFPAKCVRKLTATSGGTTDGNNMLNYGTIELSGTTESKHDKLVERGLQLFNKRQLSRVYPQASRFTSTNFNPVPMWNSGCHMVALNFQTGDKSMQLNTGRFMANGRCGYVLKPLYLMDETFSINARDHHNHSQQQQHHHQHQLQRPALSSSTFENVPSSPSNDGTAFDKLTEDRDDVPTKLIGDDGQKQRQKMSTGNGTFSAAAM

SEQ ID NO: 154084 - protein, 36 aa, Heterodera glycines
MGPCLVHWIVWNSGGSPARDTTALKCALGLTNGRAL

SEQ ID NO: 154085 - protein, 112 aa, Heterodera glycines
MLFHFMILNTPYLLIRLIAGDDYDEGCEQRNCCNCVAQAKGDQMYLFEITESAWLPHCNGSKAYFRLNNSATYTTCFSVQKVHFGQNGRGIGVFQVQLSWENVPRRMLKTRE

SEQ ID NO: 154086 - protein, 66 aa, Heterodera glycines
MHGGISNKMRSLSGLRFNQKLMFPHLQFIPSGFEPMFNQRLITVFSAPAYTGQTNTGAVQLFFNVF

SEQ ID NO: 154087 - protein, 336 aa, Heterodera glycines
MRSQCQTDGPIRVSSVSSDGIANVTEPMDSQRHKRRLYELFALIEKEMDALLMENCALRAQLGVQSEEKPAFDPPETPTSKNVASVQTVEFESEQKPSGTSSIKKNSSQSKQQRWKSAFKNPSSKLTLKVGANFPESKHKVVQSFKGHSDGVWHISTAQVGNSTHVIASASADQTSKIWFADHGSHPLVSYSGHKGSINSVAIRPETSRVFSSIYGKHLTLLTCGGDRSAHIWNVNLDELMERRKEKENEEPTQQISHPITLLDGHSDVIMAGEWLIGGDQIITASWDRTANLFDAESGKIIKCLSGHDRELTSCSAHPSQKLVATASKDFTFRPQ

SEQ ID NO: 154088 - protein, 166 aa, Heterodera glycines
MFNYNWEEVPERVLWKQMGTELIPLVPLPKAVLRGARMAKVKTLPRPHPNIIKMYTAFVDRMPILPEAEKLYPEALPNAAENPLTYELKTLHLVMKRYRMTLHDYLELKNDYEKRDPMVGRLLFGQLLEAVVFLHKNKICHRDMKSDNILLDFDSEAEVPHLVLSD

SEQ ID NO: 154089 - protein, 99 aa, Heterodera glycines
MGMDKHLLFRLMCCCFTCAGWNAETATNVIKAVLAPFSHIFVHMRVAAPMEPTPVAEQAAEEGEEDGQKNGEDEADDEQGPVDPLGANWTKLLPCRKTN

SEQ ID NO: 154090 - protein, 189 aa, Heterodera glycines
LRCARACCRSLEGENQGYFCCGYFCCEPDNVNVVESSGQITDFGQHKREERFAAVYAPGGGFQVDWSLFIVDWSLFIIGLILSIFLSILLSFFCCLLCNGCWLHRRRNPHMYENVGERGEDGFYHICCGFGIPTGTVFSTHPPQFSDGVYAPPSSLSSASRSRVRFNEGAAPKGVLKNGDFQQQQYPTP

SEQ ID NO: 154091 - protein, 69 aa, Heterodera glycines
MAPPLDTAADQLRKLFISTRTRAVSQINEQLADFRRRGQPFAGGIPDFENIDRRTLSLITSIATLIKAF

SEQ ID NO: 154092 - protein, 155 aa, Heterodera glycines
MDSGICTQASSHSAATAAAMAATPPAAAVASPAASATTAPPTRSQSIKKSPHSCLAGTSSTSCVELNAEAEERRLVELVEKFDMDWGSDLESILNLFILLNLIFLFHAKVDTEIPSLESLVSWEILKHLKPKEKKRQEVVNELYQTGKELRITGK

SEQ ID NO: 154093 - protein, 127 aa, Heterodera glycines
MGIDPNDQQKREIIKKFDAIKEKIREKGKLEIKNKNKIECKIGKLLGTSRHKIYKWKKELNLNKNKMMKKSFYEQKKKEFIERIDEFKSLYSQGKQKEFVNELGIDEKTFIKWKKELMPKYYKKYEN

SEQ ID NO: 154094 - protein, 16 aa, Heterodera glycines
EAIPEGFGLPINLGAS

SEQ ID NO: 154095 - protein, 193 aa, Heterodera glycines
MDTTNAPTFTRPTTSKDKLVQYFERSLDNFLDGRYRAMERIPYLTEKEKQMQQQQNTKTDGIGMAQAAHNKTEEEHDEFMEGSGEELVELEENSVPSFSSSISGIPKQIPFIPKVPMDFIVPQEDQPTEIVSKLLELNAKKVEKKIDGMTKSVKSFGNRPKAKGAVLHGKSLAEGDGRMAKPTKQYFQVGDAS

SEQ ID NO: 154096 - protein, 108 aa, Heterodera glycines
MLRLANKNAETETTENYAKQNDDGGGDGFANNAKENGAGQMAAPTMDKQRHGQQQQRGAAVDATATTDVDQMLPQLAAQCREQQTVQRTVVTEPCANCAFFQFWSLLF

SEQ ID NO: 154097 - protein, 297 aa, Heterodera glycines
VIGTQLSDFNQHALKGMAAGAFAAAISKTTVAPMDRVKLCLQARKNSSAHSLPYRGIVDCLRRLCADEGIRSLWRGNSAVIRCFPHNALNLAFRDWFRVAFLDGIECRKRPIRFVAGNVAANVAAGGAGAALTLVFCYPLDLARTRLAVDGVHRGLFHCFSVIRSREGTAGLYRGFLASLNFTFLSRAVFFGIFDSIRLTLAEERRQALSFAAIWSLAQFSIIVSSLVCYPLDTVRRRLMLEAGSEFKQYSTQWQCFSTVCRTEGVLSLYKGALSNSLRCTSGALILAIYYEVLKYI

SEQ ID NO: 154098 - protein, 45 aa, Heterodera glycines
MSTVPSTSSVIGTQLSDFNQHALKGMAAGAFAAAIFQTTVAPDGR

SEQ ID NO: 154099 - protein, 20 aa, Heterodera glycines
KCSETHKILFTETALKRTKC

SEQ ID NO: 154100 - protein, 56 aa, Heterodera glycines
FINIFSESALKHTKFYLQVSLGTQMLSLSKREMNKNLKIFNCFLNERKTLGLTFFL

SEQ ID NO: 154101 - protein, 265 aa, Heterodera glycines
VICCAGNDWGERMLFLRDSKHFVDRPMKNDAKNLVEQFKTVFNVAEWKQFMVENERNPSGQFVQIYTPEDWVENPQNLKNIKDKNLKQWAIELNKMWKELSKKMPNDVKNDNQRHSLIYDNQRHSLIYLSDPFFVPGGRFREFRYWDSFWIARGLLASGMEKSVKNMCKNFAELVNRFGYVPAGGRIYYSKRSQPPFLTYLVYDYLVYDYFGATGDIEFLKEIMPTLEKVSQPKTANLTKTLIIGGQVLLIYYTQNSWGGRRAYR

SEQ ID NO: 154102 - protein, 242 aa, Heterodera glycines
MAMRYCEQLLNGNDHFKRKATDELLDSQLIRIKLTIKELPAELGTLRVQLEAKDLLAMPQSLVSLKKHCANIEHLLVNAAYCSIDRFQTARDRLLSFAEQLEKDGLEKKDEGISMIGEATEKFVVELKLAIFEAEFRHKIAAFADPCIYGEAFVKLSEQIANEFEDICYMCKKWKNATTKMNIQEQLSNFVSLARDQSVPLKQKFEQKFDEIFEKTKFDLEQLKRRYNTNQIAEKTEMESGL

SEQ ID NO: 154103 - protein, 96 aa, Heterodera glycines
MPQVFKNWLFLGIIWQSIVFKYSIFFPAAPIGTAGLPPFPWTPKNRAEVPTQQTFVELAENLANLKELAENWQSEMSNGDSMVGSRTIRQWALIRQ

SEQ ID NO: 154104 - protein, 42 aa, Heterodera glycines
MARSLKLHRRYHPLQLFNAIYQNENWQKQVLALYPAEYTQYQ

SEQ ID NO: 154105 - protein, 222 aa, Heterodera glycines
MICEFSTHLLTEHQIFIDGMDIIVDLKRYIEYWRQQFTKRNIAEIFPKICPKPEDDVFGKVGFYFLMDESVKEDYGLRQRLAMRRLEEALACQQREREDSVFSIQCIFCRYMARGNRSKIIHHLYTIHHLNLGSPDNLVFVTEYIEHLREKLLRNECIYCEKTFADRNVLMEHMRKKNHREFYIINYLELGKRWLDVLAEDFEDTMPTFVDSDDEEEEDSWH

SEQ ID NO: 154106 - protein, 433 aa, Heterodera glycines
DVFGKVGFYFLMDESVKEDYGLRQRLAMRRYGLRQRLAMRRLEEALACQQREREDSVFSIQCIFCRYMARGNRSKIIHHLYTIHHLNLGSPDNLVFVTEYIEHLREKLLRNECIYCEKTFADRNVLMEHMRKKNHREVNPKNNYYDKFYIINYLELGFYIINYLELGKRWLDVLAEDFEDTMPTFVDSDDEEEEDSWHEWQEDNADEGDLFAEDNADEGDLFAVCLFCPHAREKLEETIKHMNETHKFDLIGYIHDNSMDTYDRMKFVNFIRKRGILNSARVLSSSQFYMITFNTRTKDQQTMESKCVEIPDKEQWDNEENLVPLFGNDHLLWMLESWHLEQDHLLWMLESWHLEQEMAVTESVVDSPKINMGTLVEESEMAVTESVVDSPKINMGTLVEESKQNAVEGVIAVIAEDLPDLTGSVLANAELQQ

SEQ ID NO: 154107 - protein, 349 aa, Heterodera glycines
MTTTRESSTEIADRYPFGYSTELSSNHESSICTAKRLRQRLQRQQSGQSGHSFLFWDDQIKRILCEGRRYTGESSEGSSLVGTPTESGRCFTFTAAQRIHRNGATNSTTTTNNNNSTSMDDQRKPSMNQNLSEMLLDVSDRKGPRSHSAAITSDICSVCSHLRVVSILDQTPLAIAVRTQSAEMINLLVSYGADVNSVDEDGNSPLMLAVRDSPLSWHCLHMLILFGAKIQQKNSRGICPLDLAPELRKIQETCVEALFQMACSRPNNASQNASPAALHGTESTQGHHQQGSSATGGNGTNGAAERTEERDANGTKQTAGAAASTQERLMRTAAMISATKQSRKAHLDA

SEQ ID NO: 154108 - protein, 18 aa, Heterodera glycines
MGIFSRFELFTFKKAFYL

SEQ ID NO: 154109 - protein, 93 aa, Heterodera glycines
MLFVSPKAEKGCILDGEENADADATNTDEDKCRLRLATVRALFATIGQYARKYGTTTTDESVAASGDQPTNDYGTLCTAFNACFGSVFLSLIF

SEQ ID NO: 154110 - protein, 205 aa, Heterodera glycines
SILPRFSSKSLAIVELIINQCQSEKDLALFRQLFRQFLEDPHKVNWQEIQPMAKEKQMPYEHLPKVEGSEERRAILERIAVIKLNGGLGTTMGCSGPKSLVQLRDGLTFLDFALQQHRILLNCADLRSPVPLLLMNSFNTDAQTKAFLWAQNANSVAAVKCFCQSKCPRIFADSLRPVPNSWDDRAEEGSVALVLFFVLTIFGFS

SEQ ID NO: 154111 - protein, 52 aa, Heterodera glycines
MAKLIAVNCAKGKFCDGYCYHKHKKTKNKIWWKCELYQHGCKGWGYESNGIE

SEQ ID NO: 154112 - protein, 372 aa, Heterodera glycines
MDFEWAEKRETDFVNFVEQCVAEVGRKFDQICRWYMDSYLPAFDYIADTLKKSFQANEFGFLFFDFNFSKVTLDDLLIRAGNNLRLPRLLIRPTLNKFRIDCVRMVKPILYFPREWVGRSDHVTETLDIEHIDYISSDRTYAIAQTLKAAEQLAFHLLAYAEKNSNIVTSQECWLTSTNEGKKVIHSARSLPGTRKNSTSRNLLNVVTDNEQSEDEEERSKREKAAMELKALAGIETTNNDKEAKMEEQRDDEQMQRKETPCKGTENEGKRPPNCSEDKENNSPVLLLDFDDRSSAPGGSSSEERRTEENALKMNAANGEKQKVGTDFVQMFLLLLFSHLFSPPFVGLWGVFVLRKFLFVAMDSNAFDISFS

SEQ ID NO: 154113 - protein, 142 aa, Heterodera glycines
MNFEFNASKDIHERLEDFLIYWTKIFSNEINDKEFGMEMEMYRINEFLKKIFGELFPQIEALKVSLKGELDLKGLVKKCEKLKFALEKAEEKQKQNEIGKMEMETKQQIEKAKEMVNNILEMLEEKKNSFAEEMAKEAPNSE

SEQ ID NO: 154114 - protein, 178 aa, Heterodera glycines
MADIVEIIMDNPEDRPFFTFKIVNDFLEKLFNFSTKEILMVDENPQKQKQFKCRAKKVLLKNVNFEKAISVILSREKAGQIKQLINSINNEQNYVKLAAIKNKEMHKTIEQKMKWEIDTLLFNLLFSFAVRLEALVHGKNEEGIIIVEEFGENSKDKIRAFFAVLKCFPMAEWENELM

SEQ ID NO: 154115 - protein, 53 aa, Heterodera glycines
MESLKKQLLLQRELSRGDQFYMNPIDGKLVCRHDYEAGGKVSIWCRQIYQKFL

SEQ ID NO: 154116 - protein, 471 aa, Heterodera glycines
VFSQFNFEFIFFSLSVQFRPNIFPSIRMVTAPSPPATRPSVSGSSNSSSDGFHCHADADAQNGASDQRRARTVLWMSVGVCFVFMICEVIGGVLANSLAIITDAAHLIITDAAHLLTDLASMLISLFSLYIASRPASQRMSFGWHRAEVVGAFISVVMIWVLTGILMYLALERMITSDYDIQAGIMAITMYLALERMITSDYDIQAGIMAITAAIGVGANLSMGLLLYLGGHSHLSMGLLLYLGGHSHSHSHHGHTHGTRRQTNINVRAAFVHVLGDLIQSVGVLFAGLLIYWKHVLGDLIQSVGVLFAGLLIYWKPNWHILDPPNWHILDPICTLLFSAIVLSTTIYIIRDALVVLLEGRPSTIDFRHVFDRPSTIDFRHVFDALEHIEGALEHIEGVKKVHDLRIWALTMDKVAISVHLEVESAADSQQILRATTLMLRRDFNVHESTIQIEGYQPETANCGQCVVPTK

SEQ ID NO: 154117 - protein, 103 aa, Heterodera glycines
MSSILTLLLSLSLLLFLLVLALSFGLFVLENRLNDGDESVFSIVLAEFCRFDCFLFFGPSNDDGDEEDDDDNDGDEDDDDDGGNDKAFLAIFDTKLGFPILSK

SEQ ID NO: 154118 - protein, 59 aa, Heterodera glycines
MKEITEKYKTVQLSGNETDNNDVWLNEDELAKYSEMGIAMNTYDYRMISRINFFVLMVF

SEQ ID NO: 154119 - protein, 135 aa, Heterodera glycines
MFCLLHFTLFTALYVGALGGMCSSKKEKVHDPLPRYMQPTYSFSQKSNAAKSYQSTPEHGYKTPNHPRENLAKLRRTVARNNTIPMSGAKRGPLAASSSAGSYANSPLITHQSQQKNKYLQQRASDASPADRIYL

SEQ ID NO: 154120 - protein, 233 aa, Heterodera glycines
MGKRPLQQRRQHEMNRSKSTRGMLQLEPTSPRYQQLLTPQQTPQHRAMIKVGWMGVEKEWKIIVMLESLISREKSRKRFETPPPQLPSPEVVFKQRNNQLRIEGGQHQQQPQSKRTLTRVNSMGRTQSYANEMKVKHRQRALPLPSSLSVVGAQIGDRMKQQQQKLQQNRQIAQLQIDSPRGMFDDKRILDEKTTEEKEELMDSLWEEFNDEKLISQMDNRPKAGNMKKSGSW

SEQ ID NO: 154121 - protein, 65 aa, Heterodera glycines
IILRFPKICGVLKNSCKFKNFYKQNLADYLFLLMESAWILFAKNPNIYYIYIYMCQKHQKYLLKS

SEQ ID NO: 154122 - protein, 45 aa, Heterodera glycines
DQLLSETDVHLDTLLAPPLERGLFYMSKFTLARKRWKQSPAENEK

SEQ ID NO: 154123 - protein, 312 aa, Heterodera glycines
HFTGPIKSLRVQSKSLCVQSIITGTNPPAFQSLGLILLHSITGTQPSSISITGTQSSGISITGSQIYGIPNTGTQFSSISITGTQFSCISINGTQPSSISITGTQFSSISITGTQSSSIPVTGTQFSCISITGSPSSIPVTGTQFSGISITGTQSSSIPVTGTQFSCISITGSQLISITGTQSSSIPVTGTQFSCISITGSPSSISITGTQFSSIPVTGTQFSSIPVAGTQFSSIPVAGTQPSSISITGTQPTSIPVAGTQPSSFITGTLSSSIPVTGTQFSGISITGTQFSSIPVAGTILQHSVAGTQPPA

SEQ ID NO: 154124 - protein, 287 aa, Heterodera glycines
  unsure (1)..(287): unsure at all Xaa locations
WDWGKECQGAFIKIKEILSSDLLLTHYDPKLEIIVAADASEHGIGAVISHRFPNGAIKAIEHASSSLTPAERNYSQIEKEGLALIFAVRKFHKMIYGRKFVLQTDHKPLLAIFGNKKGIRQMSANRLLRWSLMLLAYDFEIEYVNTTEFGQADALSRLIAKSTSPEEDRVIASMEFEKEAENFFINTLETMSLSSKDIISAGNEDETIKKVKKFVKDGXPNDKAIASETEEIKLFFRRKDDLSITKECLMYGERVVIPPKFRAKVLRMLHKGHPGIKRMKQLARNHV

SEQ ID NO: 154125 - protein, 595 aa, Heterodera glycines
SHSRVVEKELVWGESLGIITKGEHLDWAAPILIVKNADGTARMCIDYSTGLNNALLDHQHPLPLPNDIFATLNGGIFSQVDLKDAYLQIELTAEAKKLCTVATHRGYYKFNRLPFGVKTAPGIFQSVMDKLLAGLEFATAYLDDIIIVSKSKEEHFQNLVFERIQSWGFRVKMDKCSFFQEQIKYLGQIIDDGRRPDQGKIAAITNMPAPKDVPSLRTFLGMVNHYQQFVKKCDIRPMDELLKKDKDWDWGKECQGAFIKIKEILSSDLLLTHYDPKLEIIVAADASEHGIGAVISHRFPNGAIKAIEHASSSLTPAERNYSQIEKEGLALIFAVRKFHKMIYGRKFVLQTDHKPLLAIFGNKKGIRQMSANRLLRWSLMLLAYDFEIEYVNTTEFGQADALSRLIAKSTSPEEDRVIASMEFEKEAENFFINTLETMSLSSKDIISAGNEDETIKKVKKFVKDDDKAIASETEEIKLFFRRKDDLSITKECLMYGERVVIPPKFRAKVLRMLHKGHPGIKRMKQLARNHVYWPKLDAEIEDFVRNCEPCQLAAKSSIKAELHSWPKASKPWQRIHILDFAPKGRTMPFCLYAKA

SEQ ID NO: 154126 - protein, 31 aa, Heterodera glycines
MLKFGKVQWKRNFGLKRFFLAIHVLVFHHSP

SEQ ID NO: 154127 - protein, 290 aa, Heterodera glycines
MNCTSLCHGCREVGVDYPCEAQQGYFKKCLHCNNTFYNKDCYERHLHKDLCTKFQRCEECGVVYNIKVHGSVGHKCGEKFCRLCKQFHIKENDQMNACMSCFIQPMKQQRIKPYRIIAYDFEATQDKKVENRFEHEVNFAAATIICTDCIINGDWNKSLQGKNCQICGPHRSITFSPFDYTETTVDQKIVTQEPLRKFVEWLLFDHNKKFPTVAFAHFGGRYDITLFIMEIINQGIHTPQIIKQGNRIYELKINDNGHCPLTILRDSYNLMPIKLSGLIKSFGLKIQVKK

SEQ ID NO: 154128 - protein, 345 aa, Heterodera glycines
MTIASACVKNYALNHLKPNSLAIVPEKGYTPQQNQSALSIKFLDWYSHINNVNIQTAHSRYGEYVFKREGQVYQVDGYIKGTNGKRDKIIEVNGCLWHGCEECFCNIDEETKMPNGKTLREIREREEKKHEILSRYVDLEVVWEHEINQKLKKNKQMREFFDNWRDRSPIKIRDAFHGGRTGPMKLLHTAKPGQKISYKDFTSLYPWTNFTTDYPLGHPKIISVPPNEQTVNWRTPTDNPYKGLLKVLLLPPNNNISVNVMPVKINDRLLFPTCEKCAKYFTKKHPNGLKDNDYSCPHFNPNDRAFVSTCTHLELNAALEAGYTVRKVFHVLQYDQWSDNVFKSY

SEQ ID NO: 154129 - protein, 37 aa, Heterodera glycines
MPWKGRRTWVPEKLNFKQIILNSDFGIPFIFCILNFN

SEQ ID NO: 154130 - protein, 32 aa, Heterodera glycines
MVFLRLYFYNRKKYKTMRAISLDERYQVKLEN

SEQ ID NO: 154131 - protein, 76 aa, Heterodera glycines
MGNIIQPMEHTAKNCSDAYEMDSTRLGLCIFEMLFVLIPQYISINSLYSAAFVAPVQIFHDVSINVCVKALLNCVI

SEQ ID NO: 154132 - protein, 34 aa, Heterodera glycines
MICILTKLKIFLQSKENAIIQWIGYFKCAQAMPM

SEQ ID NO: 154133 - protein, 34 aa, Heterodera glycines
MVSHAVNGKKRQMKIESKCSSTLGNTGESQSQHN

SEQ ID NO: 154134 - protein, 45 aa, Heterodera glycines
MWDEHDASNKGRPSLCHHIWKAGKNGQQMAPFRPVYWSSTYVVLA

SEQ ID NO: 154135 - protein, 28 aa, Heterodera glycines
MAMIGLIPRQCKEMNTEPTSSIVPVYLK

SEQ ID NO: 154136 - protein, 150 aa, Heterodera glycines
MVHKFIIVLAVLFFYWSTASATEYHRAVFEGCHYGNDSLAKFRHVNARNSPFVSAMMQWNSIAVEEQRPSFHETGHAVACWLDRHCTKIVIMTIEPAEGSQGETRINYRKLYTKNELTAYMKYFLGSTIAETLIFNNLNRNGAFSDLVAA

SEQ ID NO: 154137 - protein, 71 aa, Heterodera glycines
QGWAKLKNKKRNAKSEICETEKCEMKKKAKCEKPKYAKMRKAKCEKRNFFYNFLIVKIIKQKSLFKILFQI

SEQ ID NO: 154138 - protein, 23 aa, Heterodera glycines
MVVIFHSFARLARPASANFVTFF

SEQ ID NO: 154139 - protein, 124 aa, Heterodera glycines
TPKKEKHRFYARLYNKFLLQNNPIGKWRTKITLDKYLYSEWAENYFNNELKKSDEADQTNKVRKRQIIDELNSIWKCFEKYFWLNERKIRENFDQFMRKNRGKFSKMKEPIQICIEFSEIESIY

SEQ ID NO: 154140 - protein, 283 aa, Heterodera glycines
MNSVLGKIIRMESVLIAYFSKPDKCPALLYDFFFVFSEQSFAIIHFLHHVLGLFNKTIDFFQKEKAILPELLLEMDKFRAKIERRKQERFYGADLAMEKVGECTREALEEQFQSFYTSVLAYLDKWHRIDRFPEKLQWVALASRKIPHDDALALARQIAPELTNDLFDDVSEANQILNSFPNDEFQKLTPEQKWNKLFEANLPHLLKLVSIVLSIPVSNAFVERVFSLCGSQWTDTRNLLQVETVKALVQTKANFDLSCPQMYQMLISNHKLLEKIGGWEKYF

SEQ ID NO: 154141 - protein, 1509 aa, Heterodera glycines
MKAKPMICLPDAPTSIWSLPVDPICPNWVPTQVPVPFALNIYRPNTVQYKTEATACSCILTRISRRRGFFGGTYEEISAFHSVVPTAICRKMAVDKDSPAGELYVNDETLMATNNSLEIGWGKWPSNLFWRTEEIDNCYVYKTIVFTRHGMEGLNTPIGECSNCFYKSGECQCIKISLIWTPDKTQLCPFVWLSKWSGEYASLIWTTESGDFALSFENTSSHSQPGCYAESGELIVSDQAFAVPVSDFQEMVEKAKGSGTRKTRETTEIGPVYSSQLAAQLTALSTKMAITTQRLFTETIRKICTSMQIMADQALTLSITNPSLLARFFLGNPFLSARLITEKLMEVKTCFPIYEGEVHFDWQNGHCFEFLPVTFYLYRQQKHGFIDPNTLIIHTKSKEVDCGNGRFIFMEIFGMIIRYDQKTGNVSQISTEGIREISRYGKIDIPEINLPFFKNKVLANFTELYSRENFKETVEGAKIIQEISRLSRVDSWNSPSEHKNRISGGIVSSGLFSFLRGGILSLNQLWVFGCCCYVTLTIIIQILLPSTIAQALQYLNLGGIFFRFFRFAWHIFFRGKRRGKKPRDEIEEGAYPVEKKTIQKKDSKNRKRLTRTHSVPLTERWPSPEQKPTIPVKKGLKVSVLAIIEWNTRCDETFKIEGFVYGKITRFQLDTGAHVSICSLRTAEKLGIKLLSPEVAGVIGISGEFAPVIGSGKIELELAGVKIITEVAVIDKEIGKGGAYDMLIGRNTFKKTPFYLDLQNGYLIKKGSNEIMECGTSQRKIENLEQHVGKSGNREAERNETEDRQLKSCLEQNKNAFSKHEYDLGTCKIMAPKILTTTELPERVKPYPVPEKYESELKKQIDKMLRAGVIKESHTPWVHNMVLVKKANGQLRPCVDFRPLNKVTIPDPYPLPRMEKVIFRVAGKKFYSSLDLASGFWQIPLDPESSYKCGIITPWGVYQMLKLPFGLCNAPSIFQRTMDKVLDDIKNVNVYIDDILIHSNTLEEHLESLDLVFNRLQKYGLKLKGDKCNFLQNKCHYLGHILSEAGYQPSLGNKEVIDKFPEPTNVKEVKRFLGMASFFRKFIPGFASIAHPLNKLTRGNGTEFVWGGAEKAAMDELKQHLLKAPCLRPPNYDLAFYLFTDASAIAYGGALMQTKDNNEMHAVSFWSRTLTPTESKLPPTHGELAAIVHAIQNFRAILYGAELIVLTDHRPLTFLFQKASTNPKLNRWLMALQEFEPKVIYIEGKANKVADALSRVPIPWENVETKLKEDVPYVLAIESSLNRQTFVKETKDDQIMSKVIAKINENWAEPIEKELEIYFKNRDKLYVEGGIIRKHPQGQFVVPKKLKVAILEQIHKAHFGIVRGKSKARRYVWWPGMSEDIENFVKECEEYRSSPCPILKGNSPAQMFLKREMRTSLDKIRISQVERDKGTPTGDPVRDKGAQNQQRQLPKYEPGDSVWMRDQQDKKWTPAILLEPIGERMWRLEMEGGGERTAHVEQIKARRMVAGRA

SEQ ID NO: 154142 - protein, 64 aa, Heterodera glycines
RIRICPAPSLCWICYWAKAKSNRRGNIRWLMAAALVEKIQERQQHPFRKEESGKPIKLEPFVVI

SEQ ID NO: 154143 - protein, 206 aa, Heterodera glycines
MPIKKLSERSVAQNSSTEHLKTELNEANDEIALLRRTNGEQKGRNAKLEAELIKVEKAYNRERELRIKTEENLKRKELEAQATEERRLSEQRMSQLTYERLSRMGQSRNWHEEAGDDNFNCKHEKQIHASIDKWGGKVGIKTMPKRTDAIETLNELLNELWDKCERWEKRKEKAEEGKRKSGKRERKGWMSDQRKEGLIRGEGMDE

SEQ ID NO: 154144 - protein, 42 aa, Heterodera glycines
MSCSYHYCQFLVKPGQIHLGNPSPGSGPGFLTGSSLCLLFDD

SEQ ID NO: 154145 - protein, 21 aa, Heterodera glycines
ANRASEGLSNDIKKVGLAYLA

SEQ ID NO: 154146 - protein, 50 aa, Heterodera glycines
SRRRQQPREYKRLPKFLIKFHFFKHFHHFTFSISEYLSEHIFSVSNSIFK

SEQ ID NO: 154147 - protein, 249 aa, Heterodera glycines
QQTAPVQHPQQHVGAVRGSQTLPRIAQPARQGQNGTVQSSQLQRGAVPLPRVPTPQPQQQHQQQQQRQVVRTPQLQQQVGAVQGQVPRQAPQQQHEKLVGAVQLPRMTSQQQPSTGTVQGSQTLPRMAPKNQQQPQLQLGAVPLPRMASPQLQQNQREQQHVGAVQQPKMAMAAQQHMPQQVGAVQGNQQVPRMMAPQQQQQWQQQQEIGELGAENGTNRWEEWQECCVQLPAGNSVLGKCMAKMIIWV

SEQ ID NO: 154148 - protein, 188 aa, Heterodera glycines
MGEPQAMFMQSRKDACAKLGAPNESYLCSKSQEKPPSMVPNSVSSPSISPPYANVTPTDDLQCTVPMPIASTVPTKCEEQQTASETMTTPAEQSAEEASIVENVKPTLPTVMVRAKPLTTTEEENMDIENLFSEQQNLPQSQSEDQPQVFDAPKRRFNKGFVETIKSSPSPGEGGIEALPIKHKLYWY

SEQ ID NO: 154149 - protein, 32 aa, Heterodera glycines
MQSVPYMDELWQCILNKQHDWVLINRDAIFRF

SEQ ID NO: 154150 - protein, 203 aa, Heterodera glycines
LWRHGDRSPTGTFRTDPNQEEVWPQGWGQLSPKGMAQHVILGRKLKARYIDQLHFVSERYLNKEIYIRSTDINRTLTSAISNMVGFYSKGMPGTDYPSERESQWWPHGFTPVAVHTIASYEDHIIPDIPDVPCPRQSKIHEIMQNTPEYRQLMDDNKAFYWPPNSPSFEEMTRNITGCETNSTLNRFVERSEIFKPVPSPDEY

SEQ ID NO: 154151 - protein, 58 aa, Heterodera glycines
MKISVIIIGLTIFETLFGTIFAGFFDCFFGRDSDERKPSTTNYRKPAPITTSSRWDMD

SEQ ID NO: 154152 - protein, 164 aa, Heterodera glycines
LINQGRGAQHAFDQSLKSSTRKSPEYQSILDEWNKPKSNNNHNNNDIARQKTNVYNRRISRIDHGKSSKQLGQVYAEQRTATSRNRGKNVQGQRSKPLGQNYTGTPRRNPGKNVQSPEVKPQKDEYNLPSHALAGNGKSSRGKSKKHSQKQKIKEELYELSDYY

SEQ ID NO: 154153 - protein, 112 aa, Heterodera glycines
MSEINSLYEIYKFCGPGGNCAAKKTQFYHHIHNIVQIWREFEQVLLPDEEYERMAREKAHLVTKTEWPQQMDGEGMGNRDNWAREGFANGTNGHWDKQSMGNWSAVDYWPMG

SEQ ID NO: 154154 - protein, 91 aa, Heterodera glycines
MALIAMCFKLMQDDVVQKARWLGQRIGIIGVHDEVGSEESDFEEEGIAMDGEDDFGIFGGVEDGDELVGADDDLLSVKTEQQNFSFSRQKN

SEQ ID NO: 154155 - protein, 280 aa, Heterodera glycines
SEFIFRLTVVECSVKEYTDVFVSFNFLHRHDEAFSTEPSQRDCFLHRHDEAFSTEPSQRDCEGRTSHVTEFKAVVNSAFIHYLQHFPIIFEVFGHLTKVDEQSMFSGTTANNQCKMSKNLSNLQPSLVISTCKMSKNLSNLQPSLVISTPLKSKLSTIKRNSRANSVKSKYDSTIKRNSRANSVKSKYDLLIWFEICEFTSNGEYHPAVVDHVVDHANGLPTHGIFLLHQGIQRRIKITICHEKGDIRWRDCQEVKDIRWRDCQEVKGTLLITPSSFPPP

SEQ ID NO: 154156 - protein, 34 aa, Heterodera glycines
MTQVQFTSNVNAIGAASVGCTTVNVVTNWPEKCV

SEQ ID NO: 154157 - protein, 20 aa, Heterodera glycines
MLKMMPSSALTAADGHKKKN

SEQ ID NO: 154158 - protein, 112 aa, Heterodera glycines
IVVIGFKPLHLLKDSHRMGAAVFVYPIESVISGSSALYRALLKRCMDKQLFVLVRYTHKTNTPPKLCALVPQSADRIPSGCVSSSIRMDGHSHQMHFLDTRARIFLRRLSFG

SEQ ID NO: 154159 - protein, 85 aa, Heterodera glycines
MEDGAAPPVGEHDVEEEGKADGAEVTEGSEQTPKLNGGTNLARSTKRMDHLPFANDQMPIEVEMKRGDQLQMDRQSGHLKKQIGN

SEQ ID NO: 154160 - protein, 58 aa, Heterodera glycines
EHWEKTLWEKERNLFDFRNSKHMTSSAHISRNGDLSSQLKFITIIFTSATSKFSLFYA

SEQ ID NO: 154161 - protein, 330 aa, Heterodera glycines
MQSVIQAYAEMPPVTRAYVTACVVTTLAVHLELVTPFHLYFVTTLAVHLELVTPFHLYFNWHLIIREWQFWRLLTSFCYLGSVFWRLLTSFCYLGSVGFSFLFNIVFTYRHCSMHCSMLEEGSFRGRTADFVFMFIFGAVFMVLSSIFVHLIFLGHAFTIMVHLIFLGHAFTIMLVYVWSRRNPLVYVWSRRNPFIGMNFFGIFSFSAPYLFIGMNFFGIFSFSAPYLPWVLMFFSLLPWVLMFFSLLLGQTVIVDIFGIACGHLYIACGHLYYFLEDVFPNQPGGFRVLETPRVLKWLFDPAPLPRVDPDQRPGGYEWGGQGDEDRLQT

SEQ ID NO: 154162 - protein, 500 aa, Heterodera glycines
MSRDELVNLLGTIAKSGSKAFRADEKNAAAAEAIIGQFGVGFYSAFVVSEKVSVTTRKLGEEMGHIWSWNGGTHFTVEEKADADIGTKVELHLKAGEAEKFAVPQKVVDVINKYSYFVTAPIFVNGERINVTRALWTMAPSETTPEMHETFFKQLAKTHHPHLADDRPQYTIQYQTDSPINIRALFYVPTKRVSHLEFAADSQRDIAISLYNQRVLIKPNAKEKIRKTLTERCVRFFLSQLSKDRVKYNDFYMGYSMFFKEGVVTEQSNTTKEEIAQLLLFESSSFRSGTLTTLSEYVERMQSDQKNIYYIYAPSRQLAETSPYFELFKDKYEVLFLSDPADELVFLSMPQFRMKSLQSLEKWTKEEGLSIDSDKESSAELMRDSSKKEFLGWLRDSLGTVRVSDIKPSGRQSEHPFMMEHLVMLRPVLHVNLSHPVVAGLMRLKRQNAELATEIAIQVYENALCTAGLLKDTSKMVGRLNKIFAELLQLNAEKSQILTP

SEQ ID NO: 154163 - protein, 258 aa, Heterodera glycines
MKKELSFTYQISGHEPRYHSWTVFKSLVARDYDELMAKGTATTEFHDQPSSSSSILEMTKTASTTSTATPNVLINNNNSCSSSPLSVETVRPQQNRRHPPDIRNDAENGIVEQENAQFIEQLKTHCNILQPKRPKRQIKLVQDNHRPRNAVNLNNNNMQQFVPTTESFSSPSSSSAPNTAIELTLMNGELSMDSSATISQFHPIVLDNSPTKTLPEDVRNAYEQMLKENSVDYCRQFEQLANLHNDGSPIKTFEEIRR

SEQ ID NO: 154164 - protein, 269 aa, Heterodera glycines
KDCEDASDEKECTCEASDFTASSSKCTTNANSVETVDKTRRMYWTFDEQAVFYEALKLHGKDFDAISKFMHGKDFDAISKFMLKKKFNKDKDQVRNYYLNTFKVWKCKAQIEDVDWENIPRDARELFVLLNGFEWRKRLKGLSFDEKKFKQLVMEGVRFLKRKRKKFIVNLKTPYCPALLKYFPCERNCEIPQHLVVRLKPLRNCEIPQHLVVRLKPLRNQDREFVVASEQNPLLMVQINVNDKITSLFELLKCKWSVMRQQNEIKVSA

SEQ ID NO: 154165 - protein, 198 aa, Heterodera glycines
KLYILNAIKYSIKLLFLNLNREPRLAQPIQLLTRLHVHVLNPVDAMRSFLDEGVLCFPYGALLDRALAMLGRIEDIVISSAEQINYDEVSSQLARRANVHYRQVVEPEAEKRMSEMYRLSAQQRLQRLDSFLVESSMSRVERESEKARNDMRWELEQLKDQNAQLKKENRELKHLCVRLDGRVDVLERKFKTMARLLQ

SEQ ID NO: 154166 - protein, 236 aa, Heterodera glycines
MNSADETTAYGSKVGKLEAQIAKLVNDGIKVGMRLAELERKSKSIEHSKSDEFNEGKRNEMANYDEEMEGEEYGREQSEEYGKSGERRAKGGEAARAKAMEAGRLVDVLSPRFMSVTASKSRGKANFLSPSLFSLHTKGHGLERQMSLPNLMKEGVHLVDRDQNEWLNLIMEASGVNEQVDTVKHLLSSADDGYGTDDEIAKKVEKRYKREFDGLYLTKENVRSKWAKWTIVHSLI

SEQ ID NO: 154167 - protein, 99 aa, Heterodera glycines
MAKCIVRLLNNEFEIELKNGKIVAGTKNLVKSENWVGQIRIESESAEENGQTEHQKKKAEKGHESNSAVEKETVNAQSQNLKLPKCGKGKQFLPETNGI

SEQ ID NO: 154168 - protein, 61 aa, Heterodera glycines
MVLLLLLLLLLLLLRPIRSSDHGRIWACGCGGMRVKVEEREAEGRSRFNHPNLMGFGAPPK

SEQ ID NO: 154169 - protein, 433 aa, Heterodera glycines
MNEIVNKKVFREVIAWMYPVENQGRGLPHFHLLLTLAEQDKLINGEDVEKKGISARIPDKELEAELFDLVKRFMIHGPCGNLNPNCPCMEEFVDKNGMKGRKCSKGYPKVFQEETVVLENGLALYARPNDGRTVQVFANGRRHELDNRWVVPHNLYLLKMFKCHINLEKVNSVSSVKYLHKYVHKPPDRARLELEEKNDHDEVKEFIDARYVCPQEAVWRIFELPMYDRSHCIMSLPVHLQGEHICYFDENMEEEEIRERIANGSELMAYFELNKTNVLAKNLFYHQIPEKFCFKKGKWTERKTYFNTIGRMVKVSPAEPERYHLRLLLLNVKGACSYDDLKSVFDTNGNAKVCETFSAACLERGLIRNDEEWKRALEEAESFEMPWKLREFFALILVHCPAKPEELWNMFKDSLSEDFSRNFRKEVAYAKAL

SEQ ID NO: 154170 - protein, 117 aa, Heterodera glycines; identical to SEQ ID NO: 139181

SEQ ID NO: 154171 - protein, 52 aa, Heterodera glycines
ILTTRDGLLEGRRCKAGTGNGLYPSPPPPHFISPIGLLPSRGALKRQRITSQ

SEQ ID NO: 154172 - protein, 40 aa, Heterodera glycines
MNPVGFKFLDQGRSSDMKGSFGLKSKQISHRKTNQKKEKV

SEQ ID NO: 154173 - protein, 114 aa, Heterodera glycines
MTAHGDKLAIVEPTGGVIVDSEDDYEHRVSVSVYTVNALSGDCCAPSLDWTCPIPLSPFSRLCWLNFTAVGNLATMDEGIKQTNQSLFFCSCGLKNALSVSIYPALMVASVFGF

SEQ ID NO: 154174 - protein, 93 aa, Heterodera glycines
MKLFYKKVLRYNDVKSFLNMEQRSQTICGRIRALRMYTFGIELGIDDLANFVAHTTPPAQLRSTLALAFFDPTRQNKMAEFTFAQILAVTHSK

SEQ ID NO: 154175 - protein, 125 aa, Heterodera glycines
MYPIFAQQSQPQPFAPVQDPSIRQHLVQILQQQQTQQHQFQLSPPLQRVNNPGLSINPVRMITSGQLIANRQQSQAQLQQQQQEHLLMDSPPAARSSSLHQRIIQHMQQQQLPQLAARLPTISVE

SEQ ID NO: 154176 - protein, 130 aa, Heterodera glycines
MPPKRKNIYLESYEKEFRHIKKSRKGEEFALCVVCNDDINLLSIGKAAISHHQKTGKHQKAAKAANRSIPLQEFLPNTSAPSTEDRKVLAAEGTIAYHTAQHCQSFRSVDCLSSDGLLRTIFPDSTIAKK

SEQ ID NO: 154177 - protein, 39 aa, Heterodera glycines
MAFRDIKNFRKSEFGGPKCHFVSRNYDLKMSELGIPCHL

SEQ ID NO: 154178 - protein, 51 aa, Heterodera glycines
NFFIWTSLFVTRNHYFGDFVTKIVKNHYFGVLSLFRHFLGKFLNKNAIKTE

SEQ ID NO: 154179 - protein, 227 aa, Heterodera glycines
EEEHAELCYAELLVIRALLTFFIDETLGGFIKGAFRIRMCYQSFKSAPPAVPLPSACPSSNPSLRRQFEAGIRAGFGLFNVMLSAMPTRVSALLQLVGFSGDRAKSTNSQEFQFPFTGLCCPSLLILFLISYQLFLAHLLDGCPPDLALCSQLLAPLVRQFPNGAVVLFLRGAVVLFLRARFHLVNGELNRAIQLNNRSIQSQNVYKQFQHICHWELVSANRISFFW

SEQ ID NO: 154180 - protein, 100 aa, Heterodera glycines
MANVLELFVDVLRLNGSVVQLNGSVQFAVDQMETGTKEKHNGTLTNEKKDNGQTNLEMETDIGELADQRCQKLGTQRQIGRTSVQQMGQEELVTDQEQNK

SEQ ID NO: 154181 - protein, 47 aa, Heterodera glycines
MALNWTFRKECVIIFVMNLVNYVSLMMAMVHFLYSRRAKNRKRYCIS

SEQ ID NO: 154182 - protein, 923 aa, Heterodera glycines
MSGPIQKGIINALKALDNAKSATSLLLHPDPDLSNWENAINLEAQFDRVVKEIRTTEMQMDSLRDLSNAWIELLARLTGDDKDNGEKEYIKFDKNEKIAERYDAASTKLRDLRDLEATLSAAAKLHRGRADREAKADQLANPQQQPPMPPAMAAPMTMPTFTAPLYQFQPIQLDKFFGQKRKWPEFYESFKSAIGSQSISKAQKLNLLCNLLGGEARELIAGFRLEDANYETVLQLLKDTYGAPEEHIRSLHFELANLKPCRSLRETKDFLLQLERLTRELNNAGEDIEGPQVFLMLEKKLTPPFLRSILTKKGEDPANWTTTKFRDVLTEAVRKEVQIQEVMGEYGHHYVQPKAEVVSAAPVQAPRTPNQRSRRPNQPMALRDMTFIASSLDEGHRHQGYVSQQHTQQAKKHCQQMRNQVQSVKKGPPYPCIFCNSNHWHDECQNVDTLNQRISIVREKKLCFKCMKPNHRASNCARPSKCYHCKRRHPTALCRDQYKAENGINSPSTSCSEEKPNANDGKRSTVIEQQQMCNAIQSKETRALLMTTKATIFNPSRPSLSMMGTIFIDPGSHRSFISSSAAEQLDLNVLSTEECYLSSFGEREPKRYISDRVEIGILCPDQDRFIFNLNALKFLLNDLPVLQLNALDNDELQQKKLSLPNESRQPDILLGMDVWHQLNVQPIEQLPSGFTICQSKIGNIISGTGRIKLKQPSNISFVLMVNNDESPQSSKAAQRQKNIQQKEKDELRRHQRNKLLSSIATLRSRRKRESAPISSKSIVIDLSSDSDASGIEIIQNPVRDRQAKSPNEHSTAPMPMAVQRLTPTRKSSSVAMRPAFSSSKQPKGKAANPAQTSQTNELNRKMKALSPTASGSGANHHCVATLARSSDSTTVIDKGSQQNCLNMSSATISKTPCQQHSSEKTLN

SEQ ID NO: 154183 - protein, 163 aa, Heterodera glycines
MQLTARFRKQIHMSSTIEEVQQRMNHNRPQPRRSQQRGLRPTQAPKICQSGMAQYKQGRGIRLHPASSAMALTGPRRRLSEQPLQREQGHESSTSPGRERRPRKSQRHAPDRVSTIWKLKSTENSPFCRPPPSLTAQWLNLAIELFAKNHQARAENAHSPSLK

SEQ ID NO: 154184 - protein, 401 aa, Heterodera glycines
MRQNSSPAMARTRIVMSEQNFGIAKEQYDDIVSTTTRWKRGIRPEQLASQLSASQVATSVALNQLYTRECQRNTRAANPTLQARRLLRQPNIQARWIGETTMEVFPCVNISLQDISYRPMNECRLYIPVTAHFPDRAIAAFLDPELRIISLTAQQASCNSYRFHHLQLRSNPNIWLRIDSRTGTARRMPKDYVHELYETTINQTNSNLELHPLIFHAWQLDNESDATRFPHINEFINSEQFKDKLEQHITARTEALGALKGGIEGFTMRWLKGLIDEAITWWIRVACVYSTFLMLRDIVLPCTLAYLLNPIRVTLHSLVGVRPHPTFRPTVSKPLGIEEGMPLREMPRTPKPPARRAEHRSMSPIKLDMIARTARYQQPLTQSHLDLTEDSPFGRPRRKEF

SEQ ID NO: 154185 - protein, 55 aa, Heterodera glycines
MANEECPLLFQTLEVVDEPRGFLGISVSSFLATSRYWDFSLLHLDPIPYHVYSSL

SEQ ID NO: 154186 - protein, 48 aa, Heterodera glycines
MKGNDSGTQGLVPAKNKFNSFNYGPRKNQFVYIFLAVLDYGLMINIFG

SEQ ID NO: 154187 - protein, 196 aa, Heterodera glycines
MKLHIIFSLLLFLIVLIKINYVEAKKEKLQQKSFDEIFGEKWEEKEEEKRNELKKREIIEKFYKIKEKIKQKGRKYSRKKWNKINLKIAKKLGTNCNYIYKWIKELGLNQKIHKCHKSKTDEEKLEIVQKFIAMKKEYKQIRKYSPKEWRQNYAEICKKIGVGRDIINKWKKQFGISKKRITEREIQKCMTRKLQK

SEQ ID NO: 154188 - protein, 61 aa, Heterodera glycines
MNAIWTLALNAVVFLALMVHKRILAVEMFLTQHGIEIPKRPKYGLMKNAKAIGIQNKNSLN

SEQ ID NO: 154189 - protein, 283 aa, Heterodera glycines
DDAILCKVENGGKLGSRKGVNLPGTPVDLPAVSEKDIKDLRFGVEQGVDIIFASFIRNANGIQTIREVLGEAGKNIKIIAKIENQEGVDNVDEIIAASDGVMVARGDLGIEIPAQKVFLAQKMMIAKCNMAGKPVITATQMLESMICLEAETAFFHSRYFEELLQNTLSPTGPGETIASAAANAARRCRASAIIVLTTTGKSAQECSRFRMPIPVLAITRYEQVARQLQLCRGLFPLYYPHMERDTEWTEDVNKRIAYGIGVGKERGFIHNGDFVVIVTGWQA

SEQ ID NO: 154190 - protein, 249 aa, Heterodera glycines
SDWSVEELLVAQGMRCSLIRCVDTDQHSICLAKFACTSPTLSASANLTFAGVEGAIKRIFDVEDGLLWSSDTDNEKTSAFVDSVKKTLLEHFAVDSKLGLLDILYSPKFNKSRIAAFCKELAEVATGGDAFAVELFSDAGKALAQHLVAISRHCDDKMLRELPVLLVGSVFKSWHFMRLGFERCIKESNDAVTDLNRRINRVMLFQLECSASVGAAILSVKQTNDGKMDLCDLKGIQSKKLFDELQLYE

SEQ ID NO: 154191 - protein, 178 aa, Heterodera glycines
MITNFGSCSSVKHKVGPTTKRKNVQVVVRTRPLSEMERNDRCKNIVSCDSVSKVVSLKTNTCDKYSTGQRQFGVFDKVYGHESTQIQVYGDVVAPLMKEVLNGYNCTVFAYGQTGSGKTYTMEGRHDESGAFSWDSDPTSGIIPRALHQIFTELSNEDIDFTVSVSNIELFSDQIKER

SEQ ID NO: 154192 - protein, 108 aa, Heterodera glycines
MRDYKIVVLGSGGVGKSALTVQFVQGIFVEKYDPTIEDSYRKQLEFDGQQCMLEILDTAGTEQFTAMRDLYMKNGQGFVLVYSITAQSTFNDLMDLRDQILRVKDTDD

SEQ ID NO: 154193 - protein, 35 aa, Heterodera glycines
HFRLFSPVRSLSLFVVYFAMDLIDFIPRVVEIGFF

SEQ ID NO: 154194 - protein, 138 aa, Heterodera glycines
MYRRVFCYSSAPLAGALGAYAGVTMANQNSPSTEKNTSEVQQKVAKQAVVKSGTHNSQPKDVQSLGTGEITRWDYNWDKRDPFSMVIGKGYEAADEEKKKEILAKFVPTATRNIFLIRHGQYELDSKTKELTALGIFE

SEQ ID NO: 154195 - protein, 136 aa, Heterodera glycines
MPFFAPAGRSLQTLLFAFIIGILNNFYQAYSSYYSISAAKSLQNFLNVSYAARGVELSEGKLLWLWSFNLNSLYIGNILGTVFTSWLCEQFGRKSDSVDQKMTLAEIVKEKQQNEEKERPMLQMLRELFTQRHLRH

SEQ ID NO: 154196 - protein, 207 aa, Heterodera glycines
MSKELCYRCGKPVYPTDKVGPLKDGAFFHQGCFKWANDDREVYCRNHVPNATPHDPTLPLPPSPSNGVEPNACHQQQQMRRHRHNADAGLHDMKIAHAMKVTQAVKPYPKIKHGGAKYIVDYDTQTRLELLHRQDEDKLYQEFDEHRQKEIQQFEEETREEWEKALAEFARRYEQRHATAREKEQLLHDLTLRKERKLEVKRKNHRL

SEQ ID NO: 154197 - protein, 82 aa, Heterodera glycines
MDSLIFHYNLRSFDTEDAELDGGLSLKRVTKPLTEMVANLHRNGMESRHLQKCVHCSLDDEEVVIELAFPDEGQYGLDIYTR

SEQ ID NO: 154198 - protein, 177 aa, Heterodera glycines
MKMYNKLKLKFKSDTKGIVKTVDPKREEQTIALLGRFQTTLERTTVKDILFDKKVDMSDQKSREQIILATSEEQGKIDLDAADIQGDEWWDIGQRQTLEDHGHLLNHSFGFYLRMDHELVAPEDTSGVTKAKDANMKDSNMEWYPSDDPRNLLNVRRRTQGGTMPDLFKSAEPMALP

SEQ ID NO: 154199 - protein, 876 aa, Heterodera glycines
AQFDRVVKEIRTTEMQMDSLRDLSNAWIELLARLTGDNKDNGEKEYIKFDKNEKIAERYDAASTKLRDLRDLEATLSAAAKLHRGRADREAKADQLANPQQQPPMPPAMAAPMTMPTFTAPLYQFQPIQLDKFFGQKRKWPEFYESFKSAIGSQSISKAQKLNLLRNLLGGEARELIAGFRLEDANYETVLQLLKDTYGAPEEHIRSLHFELANLKPCRSLRETKDFLLQLERLTRELNNAGEDIEGPQVFLMLEKKLTPPFLRSILTKKGEDPANWTTTKFRDVLTEAVRKEVQIQEVMGEYGHHYVQPKAEVVSAAPVQALRTPNQRSRRPNQPMALRDMTFIASSLDEGHKHQGYVSQQHTQQAKKHCQQMRNQVQSLKKGPPYPCIFCNSNHWHDECQNVDTLNQRISIVREKKLCFKCMKPNHRASNCARPSKCYHCKRRHPTALCRDQYKAKNGINTPSTSCSEEKPNANDGKRSTVIEQQQMCNAIQRKETRALLMTTKATIFNPSRPSLSMMGTIFIDPGSHRSFISSSAAEQLDLNVLSTEECYLSSFGEREPKRYISDRVAIGILCPDQDRFIFNLNALKFLLNDLPVLQLNALDNDELQQKKLSLPNESRQPDILIGMDVWHQLNVQPIEQLPSGFTICQSKIGNIISGTGRIELKQPSNISFVLMVNNDESPQSSKAAQQKNIQQKEKDELRRHQRNKLLSNIATLRSRRKRESAPISSKSIVIDLSSDSDASGIEIIQNPVRDRQAKSPNEHSTAPIPMAVQRLTPTRKSSSVAKRPAFSSSKQTKGKAANPAQTSQTNELNRKMKALSPTASGSGANHHCVATLARSSDSTTVIDKGSQQNCLNMSSATISKTPCQQHSSEK

SEQ ID NO: 154200 - protein, 28 aa, Heterodera glycines
EAGPGREFPVIRGPGSRSRILKNSGPGP

SEQ ID NO: 154201 - protein, 79 aa, Heterodera glycines
KHFQLSFSIQMAFKLAFFFIAPVLCLSILMIGQMPCQTDAVAVHPAVRTAVRLANTKGGQIALGIVAPSALPGQSNKMT

SEQ ID NO: 154202 - protein, 329 aa, Heterodera glycines
MIKKEEADKIAEDPGNVPKVIKTEEKADKITEKITESPPETLEEDEADFDQEDDKRKAAEGVDKIKLMVINEYDRMKNEYKKKKGIKDGKDRYKIEQKIAIELGSNRRKIYQWKREINRMMKKDEGDERPTKAEEQKENERRRELINKFDQTKKECQLRIGYWSEKRHKIEGRIANALGTTCNNIYEWKKEFSNKNNTRKRQQQNENEIKMSIVKKFEKITNKNENDNDNENRIKMECEIANKFGTTREQIYEWKREENLKMDEVSQSEKMRIVKAFDKMKKSKNQTENEIAMKLGTNRRKIYEWKREMRQKETGESGENELGKLGEQK

SEQ ID NO: 154203 - protein, 88 aa, Heterodera glycines
MTKIKQFNIGIHVTDNTGKYKVKFDTDGEVTDCQYESPEMPTWTVQYITVLLTNDPQQLIKPEISCIPQKRCMKMRDVDDLLEKRTSG

SEQ ID NO: 154204 - protein, 180 aa, Heterodera glycines
MGSMINETKKKNLVALFFFLTDCTTFSHCIKKKANLNIVASLDTVLNYGDEIWMEMIISETTKKFYIRLMHESVKPSTKIGDILLLLEFDLSKPDISCRNYLHANQNFSIGNNGTHKLNQYGQHFDLLINATAKHFEIRIDQVGFQLDCKYGIPKDFSKDERFIYPPWAVDKIQVKLEVL

SEQ ID NO: 154205 - protein, 97 aa, Heterodera glycines
MKFTSYSVEKAEPPETFNLYLTRLTDIKIIAQEGYQFSVTFNENKKTYSLPTIVPIWAVNFIRVKGEHIRLLDRPYLPPKTEKQIFMMSLKKVFCVL

SEQ ID NO: 154206 - protein, 48 aa, Heterodera glycines
CFPTKSGPQIEYVSVQRIVAAGEQRMAAQASGFERAMGPANKPVVQNN

SEQ ID NO: 154207 - protein, 89 aa, Heterodera glycines
MCYKNVLLFIVTTVAIFETSFGAENNATQPQKKQELTFEKTMEEMIISAKTGKFVRQCSCDEQEPCLKDILTDFQACFETCWEQKNSGK

SEQ ID NO: 154208 - protein, 36 aa, Heterodera glycines
MHFDDPLVGRLVHGFNWELAWPCPVGSMFFRPVSAG

SEQ ID NO: 154209 - protein, 45 aa, Heterodera glycines
LRGLSRALRAGFSIFVGLGRALRARFLNSLNSYGASRPFFSLLGR

SEQ ID NO: 154210 - protein, 120 aa, Heterodera glycines
MLQFRDHITINGTITKNRPQIIILLLNEALESYNSGTNEEVEEHHLKSALTEGQNFHLKIIMRRRPMFHLEGFGKFMFGIETMPMWAIQYIRIEKEKLPREEGRLMDQLRRQLIGYDRAN

SEQ ID NO: 154211 - protein, 150 aa, Heterodera glycines
MVAVFKKRPSTYLRHVLDVVVPAGHGHRHSVPDGTSLPLLLLPVHVCLVAVLTVPFGHLLVRWLGKMLLRPKLSSLLLLTISSGSGGGTKHLTKNTTPATAATRTNKPKLLGITKSGAEDDNWGKVTQSDPKDNRLKTSEKKLELFSGLC

SEQ ID NO: 154212 - protein, 543 aa, Heterodera glycines
MKSLVKMSPLACFEYNGHSFTFFEDSESGETTIFRGHQHKIVQRLSKHGRVVFDHLSGRLFLIDKYQRRISEIELEYLEHWWLRKNQSSAHTILKSNFVAFLPPDKSDFTLVDNHVFVIRDQRIYKFHIGEYAKGNRALTFVTNSNDVRFNYLIYKPKDQNVSRGVFAHLRMSDAWMPISYLFNLFLIVLCTYILKQLRRVNQKSPLNVSDSADYYSSPFIDDAYSSQHQQLLNIPYETATSSDQSGGARSRKKLLSFYIIVTIYLPAYCMQRAIRYLIDSYGLSSVDDLYTCLKEEIKSGPEGGNCLYPNPLCAVDCVHVANADHPNQPVHIDGSLELIADVELYSTCYPKRKFEGIERTSVCGAEGPEDLSGRLAAVSFTPLRTSAQQQQQQQQQQHGPDRGRVGFGQLLERRRTRKRDCNLVRVLCRFNNCGPYRLTKQLQKRRTENLAYLSQLDIETVHLRRNIKIIPDALCPNGANQVFAYRGFLGITVQQHLYTRHRVMLKYPSLPCVVQFGGGHHRDIFPIELLRVASAEIQSERG

SEQ ID NO: 154213 - protein, 301 aa, Heterodera glycines
MVMVPESEYLALINLLKGNSAVSPPLGDPLQGEKTLLDVQIQKNLVDPKTNAEIKMKRHSWLYKRRHQLKDIIENKPQKVIVESGSVTAPNVAPYMGIQKQQTPSHVSTPHRNSASIQSIGAVSKSNTDVEEDTDFSTASDQFEPAADAATTSSKKTPHQKTPTVSLRTSPKNFPKMMGIIGKDHKKFGVNASSGEILTNFNKPVSGSHFTESLKHLTGQREDVPRGHRFFIQRISKDPEMMKLLQKIPQTGEGRRRSTVKKMGKKKLVLVNMMNSSSIKTAGLHRTEPKRKFKPELWARL

SEQ ID NO: 154214 - protein, 138 aa, Heterodera glycines
MLIAPPPVKILYCYSEMNDSVIGLMKQGIETYNGVPTQTLVQSMPKPLLLILDDLMLSVNNDFLDLLFTRGSHNWDVRTVGSQLFPKRLNYFMEAYNDATSEPFSYLVINMHPNAPESERLTTKIFPDEQREVYLPIE

SEQ ID NO: 154215 - protein, 264 aa, Heterodera glycines
MMDGLLKVKVIPPKILLYPLLPLHIDDMLLFPNCWACAKRAKNEFVMTKDVKKCNHRPAQRAFLGTFTSIELRKALELGYRIVGFYRAYHFEQFDSQLFKGYVRMFLKIKVEASGWPAEVKSEEEKRAFLKMYKAKYDINLDYDKIGLNPGLRMIAKLGLNSLWGKFSMRNTLSNTEIVGSMERWMELGRDNTIEFGRPVKISEEISRVVYRKKEEFIREHKVSNIVLSLWTTSAARIKLYEYMEQVYREEGSKLLYCDTGGQE

SEQ ID NO: 154216 - protein, 114 aa, Heterodera glycines
MTREYADSEILEFVSAGPKQYALKLRRKKDGVIWHKTKIRGMTLDRRNEFKYELFKEMVLDYKEGVKKVFHYPEKIGPTNDFRVLSKNVQKEYTPVQKKGIIDDHFNVLPFGYY

SEQ ID NO: 154217 - protein, 72 aa, Heterodera glycines
MQTIAGIKNFEIVDGVRVFVVRARIENVTEAEYRDEVKSLAGAVCTMKVGARVKEFGGKKGIYYSLIDIVSL

SEQ ID NO: 154218 - protein, 101 aa, Heterodera glycines
MQTIAGIKNFEIVDGGRVFVVRARIENVMQAEYRACTLCRKGACSCGAEKKMTPYLKVSVADDTGILENVAFFGFGSCWSERKVVAFQKKKKSNLPVPEEL

SEQ ID NO: 154219 - protein, 155 aa, Heterodera glycines
MNFHKSEKANAILLEAAKRETERAWKDVVALEEEVSDFAKSSRETLNRAIKSREKAPYANGVREFYIKISDSIWEIFTILDKINVESEKAEAVWRELEKCKDFELATKFEEKSINALTEAHRLHFESRRVHNKIRAYESRLQNIVWEFIGLRGEI

SEQ ID NO: 154220 - protein, 118 aa, Heterodera glycines
MRRSEKGRSAFPCPRENGRKWKLAEKFRSNPSEPLDTNAMAQKFLMQFANTLFTVNQEFPMEYVQQKRGTGRRKLPPGKVNLMDSIRMATTYTLKLVVERMEGAVNLNTAPEEVLIFN

SEQ ID NO: 154221 - protein, 29 aa, Heterodera glycines
MTYLLSICPQQFIETHGTARNTVRHADLN

SEQ ID NO: 154222 - protein, 177 aa, Heterodera glycines
MKCTASFRKSKENELKSVVGYCEEHCDSESAFICPFNFMKNETKQRPTDGDDPSVFRILSTVSAIGRVKLSELPLLCSSQAQNSSKSVADYQKLTRQLILSGLLRMCLQFNSFMKCTAFVSLSFKGYQQMEVTKQIELAEFEKRALEMNLAAHNLSDLQFQLTEESAAFDELESDEL

SEQ ID NO: 154223 - protein, 39 aa, Heterodera glycines
MPEPFPMSDKRPWTVCLKFDLDLGITRAIPQFHRLVPNK

SEQ ID NO: 154224 - protein, 264 aa, Heterodera glycines
QRCNCGDFAINFTYSGPNDEIEEWHCNIDIFIDRNLILIFFNGKTTIPCAVFDAERMARDVYINRIPTFKLLYVTPERAVKNRQFLKYLRYLHRMNLLARFVVDEAHCVTQWGNSFRPDFLQLGDLMKKFRENAEKKVPIMALTASTSEGDCRKAFQYLGMDCESALWPNLNYRVIPKSKSNFKQTVHGLLSDIGNEMNVKRPLLCSETLRNRIFPVYPRDSKDFTKTSGWMGAFVCSVPLPRLEWALTKGTFVSSFTAQCRDH

SEQ ID NO: 154225 - protein, 86 aa, Heterodera glycines
MPLTVEEEDAKLALTADDLRVQMTDGMVGCIGRISMDGTELPKTGQGFRMFNAAIGCEERTLGPCLRWTNGRKGKKTDKFQNYDEK

SEQ ID NO: 154226 - protein, 166 aa, Heterodera glycines
MPIGERKNTAEEDKMKGVELAKIDRACSAAADTQKQKATSSKKGTANKTTRDDGRSDGKGKDEGKSTDYLTMKPVHRAKPFRLIPKASRGGGGENPPPPPMHRTPLLNMRGRRSNGTNMEHYDSPSDALDYADGYEENNDGEQDNGRGEERRGGGEEEEKEKTSKR

SEQ ID NO: 154227 - protein, 127 aa, Heterodera glycines
MGFFNFLLVIIVLSNVCICKGKNNVEFMLLPSLVGDFKYRVSVQFDNEKFVVNYGNKQPKTKSELVQLYFGTEALKAEIYTFHIEMVDTKHIVGFSIWPNNYSKQLIADEITKKPFRYFWELFPSGN

SEQ ID NO: 154228 - protein, 296 aa, Heterodera glycines
FGGPGLLQEGISVTNGGTHRIYFPNYFYLNISPKISAKTDKFYWVEVNCHDASREAEKYSTYTQKSALIVLNCAQNCAEYEILVRKLDKKCLTNAMKKKLNLYNEKAKKGQIAVKILNGEEYEFVFQQASPFLKRVSDNSNNQRNTNKQQKLDIKIYEKPINNTEEINEQQQEKFVQVFTFMKNEMSNMRKQDEKKFEEIIKKMKELQKQIEESTTNKNEAENSSLSQITAANVSNETVAIVKLEYEKKFELMSVEMGQLKEQITSMKHQIGQNESNFVRTIEEIKRFMEEQFKDE

SEQ ID NO: 154229 - protein, 269 aa, Heterodera glycines
MSSLAPFNELNIITGDRRQNLLKVRQLIAKIERERAKNEAVNHTEKLLIGFLDPMTMIVKENSEIQTCNEGQFKTLLLNNKLIKINQLTGKYTFIGEPTIYKIDQKIWGEENLPIFPLQIFKQLILTNLTNKQIDMLEMLHAFRTSRIIDNRPNEDRKIWNSNQFQAFTFQNLITEIDWWKYVIRSVVLVIIINWVYKIYKWKQKIMIRKEIEKRNSQNFQQQTGAIQIPLAALKQRFVGGVSAPTTDAAEMPENAERIKCQKQKRRRK

SEQ ID NO: 154230 - protein, 63 aa, Heterodera glycines
RDVPRFRFSHFAFRIIRIFWRFAFRFLARNATFTPLRIGLNSHKIFQNFTYKLANFQGKPVYK

SEQ ID NO: 154231 - protein, 180 aa, Heterodera glycines
MNVTPMPFETESDGFFIQEHVSEYSFLGYLNGMKSLTSVIFLLLSLLVNLSTLIAYRRSKKVHQQNSQNGSDVIEKKLLIYALLTFAGHAFVSVFLIIMGTGVFYDYPSIVYTQYPWINDLCTLVLSSWMLLFTSSIFRHQFVKDFCPKCIWPMPTNTFQTPVTHLTQQNQNDCRLFEKP

SEQ ID NO: 154232 - protein, 50 aa, Heterodera glycines
MSKVSCQDNNNWLAAFSKPLFTTGSDAYMPLKDFGFNPNSLETDLWAKRQ

SEQ ID NO: 154233 - protein, 84 aa, Heterodera glycines
MRRFVNSAKCQRFVNSMIRQLDDSSTQPKCDDSSTQPNVNDSSTQPKCDDSSTQPNVNDSSTQPKCDDSSTHPKIVLKSSFKSF

SEQ ID NO: 154234 - protein, 107 aa, Heterodera glycines
MEVPTVGEDHEDLEEDAVGMLIVEGQNLRNLVRRLSPDKISSVVRLLTAHFAVGRDFGLQFVNPNAFTPAQLAIRQINALINNIDHSNGTAVANAGHFLHELVNAFE

SEQ ID NO: 154235 - protein, 130 aa, Heterodera glycines
MCRARQNPIPIKSPIPIMAKNPINCDSDYDYPIPIMAQNPINCDSDYDSDSAHPCGQKNTFFYGRRTGRNEKPRANRPCSRDQPSGCPCVFMFGRIIYAFKSQVGDENWNNFVAQIPEPLKQRLGTQYQL

SEQ ID NO: 154236 - protein, 20 aa, Heterodera glycines
MKKSRTSRKVSCFFDFGLQD

SEQ ID NO: 154237 - protein, 673 aa, Heterodera glycines
MNNIMRQRDAAIELLHNCGIDINEYSYGVEQLPNVQKYWDEIYPGKYRVVAFEKSADPRKSIRVLWKAPMGREKVVPIFLENGHWDGLKNYVCFFNRGRKFCIDCECFFDKDVKHTFDCRARCYYCNRVGGMPCEKESGVKIECPKCHRYFYNWECYNYHQGHQTCKLWKRCVICDKTYLFNTKKGHECGETYCQLCSVSHDPKRGCYIMPIEEKEEKDVYRIVVWDSETSQDSIYKGDQKEHVINYISVRVTCTECCDDKNRTNCKICGEERIKDWSEAEGHEPTKDFVEWILTAFTNYDTYIFAHNAGRFDGHFVFNYLCRTGKNPLPLINGLKIYEFKVQNSKKHSKLIWRDSCLLMPVKLESLKATFNLDCEDKPFFPYYYNKKENYGIRLEHLPPMEDYSPGSMNKDKFIKFEKWYNENKETPFYLDDELKNYCRNDTEILLLSIIEFRRILINDITKGFDPLPRSCTNAGVAMNIFKAMFLLTEQLSIVPEKGYERCDRASVMAIKYLEWRSQRDGIEIRHAGNGREVKIGNYKLDGFIGNEGARDKCIEVMGCYIHGCLNCYDPAAELIGGRTAQELNDETQERLVELRKTLDVEEVWGCQIEKELKKDEEMRGFFDDRGNEKGPIDPRMAYAGGRTGPMKLFAKSDEKKKISVYDINLPSLSPKI

SEQ ID NO: 154238 - protein, 24 aa, Heterodera glycines
MSFKRVNSFQPTVPLAKKWDFRSI

SEQ ID NO: 154239 - protein, 28 aa, Heterodera glycines
MCILRNWGTFEEEYLNGEIFGRKEKQTV

SEQ ID NO: 154240 - protein, 71 aa, Heterodera glycines
MVSLSVLVSIPFLISDEVCPGRDRDQLRVRLIAATFVTCGIGTILQTAFGMRLALLQGVAFAYIPSVGVKP

SEQ ID NO: 154241 - protein, 203 aa, Heterodera glycines
TKNASNLAFFQISLASFALSVAFCFALYGHPFLNAAFLYHLSRVDIRHNFSPYFLPLYLVRDSPFTQLIGLIAFVPQIVCICVFALWYSDDLPFCWFLTTFAFVSFNKVSTSQYFVWYLCFVPLLFTRLKFSWQMWLKLFALWLFGQAFWLLPAYLYEFRGWATLNWVWFASLTFLGINTFLIIQFVRNYSPEEERMVEVDRQ

SEQ ID NO: 154242 - protein, 49 aa, Heterodera glycines
MKKALQFYRSADKGHRSLSCMKSHFRFIKTESELKMLRSLLNSMQYVLC

SEQ ID NO: 154243 - protein, 221 aa, Heterodera glycines
MGQQRAEEEGRRLPPFDHHSVCRAYLLGCCPRDLLSDTRLESMMSCRKLHEPAHKGEFNRAQEKKDLFYDIEAFEELDDAIRIVDADIRRLQEKVKRDAEQNMDISEQQRTQKVFEMNEKIGTALVQVEALGNEGRIAESIELSKEVDELKRKKRELESEMRNMNPAMMQRLRVCEACGAQLNIMDHESRLQDHYGGKMHLGMVEIRDRFAEMKARVLSTQ

SEQ ID NO: 154244 - protein, 43 aa, Heterodera glycines
MGGRHANLDTLRKIECVCAFEMKNIPRHGTKSAPFLVPPCQNR

SEQ ID NO: 154245 - protein, 47 aa, Heterodera glycines
MPCHSLEKRCVNGQRLMPCYAKHVPSVVELQACGGMGTAFWRLKENT

SEQ ID NO: 154246 - protein, 258 aa, Heterodera glycines
MGKKECGIIFSTQVSTSPTRSEDSVVTVKTIRNKGRVFNVDHGFRSNVCTRTETPVYNLPPPPPPPQLKPKGNERGTDEQTTQKFFESITAATTGLDVPQKKHGEANEFFDALTAATMGMEVDENKEKKALPQPQSNASDFFSPISAATMGISGDHLKPKPKLRQHLPSASDFFSPISAATMGISGDHLKPKPKPRQHQPKASDFFSPISAATMGMSGEQKKDEPNSNQQKKDIPEFASAISAATMGMSNYELQQQLP

SEQ ID NO: 154247 - protein, 74 aa, Heterodera glycines
ASDFFSPISAATMGISGDHLKPKPKLRQHLPSASDFFSPISAATMGISGDHLKPKPKPRQHQPKASDFFSPISA

SEQ ID NO: 154248 - protein, 254 aa, Heterodera glycines
MTDQGKEFTAAPVQRFFNEKEVQHHCMHTSPQWHAGIAERAIRSIKVVERLYRYFTHRGTQCWTGVIQHLVSALNASPHRALSGLRPRDVNFANAEQIRRQQLESSKHVRGRNPRPPRFNAGDRVRIEKHKHVFKKGYLPRFTDEVFTVAEVRDSRTPTTYKLRDDTGELLTGWFYAQDLCLVLPPPAPPQRPTQQGAEASAAAAAAAVVGPVYDIERVLKRRRQGRNGVEHCLIKWKGYSAAHNSWIPATSII

SEQ ID NO: 154249 - protein, 293 aa, Heterodera glycines
MKHTTRMLLVPEELYRSLLARSSAPVADASSARGGLPQHTTPIEHTAKRMARAAHSGGVTQSTDGVSPASKQQHLLNDDKRLIHYQQEFKRFKKLLEDEQERPAPVRLTQLPTDEASKGLLRDALSEAARTIQQQQQPQPKQPAPHQQQQQSSHSDSSPMRQPPRRRQRPAKRSPRTTSVSTDGAEASRFPSSSSAASLLTRTDNGGRGGAETTEREDSPNDDRPQNMAAVGPARKGQREEADVQLHPSTSTATAAPAAAVAAALRDTEQRKRQAIDYALRNAGTLGIGDGQQ

SEQ ID NO: 154250 - protein, 17 aa, Heterodera glycines
GLADENFQKPHSASKKA

SEQ ID NO: 154251 - protein, 105 aa, Heterodera glycines
PGLKCPAQAKIFFYFREKIEIFPKKIPVDRARKTMFWKWSPFFWENSLKNHKIKKPENRFLGLTRKILKIFEILKSGKIELSKLYNKSAGATSLRSNPNELFAWY

SEQ ID NO: 154252 - protein, 277 aa, Heterodera glycines
MQWKPEVRTKVIRRGAKVIRRGTTVIKGGTTVIIRGATVIRRGATVIRRGTKVIKRGITVIKSGTKVIQRGISVIKRRTKVIRRGAKVLRRGTKVIQKRTKVIQRGTSVIKKRTKVIKGGTKVIKRGTKMIKRGTKVIQRGISVIKKRTKVIRRGAKVIRRGTKVIQKRTKVIQRGTSVIKKRTKVIKGGTKVIKRGTKIIKRGTKVIQRGISVIKGGTKVIKRGIKVIKRGTTVIRRGTTVIKRGIKVIKRGTTVIRRGTPWLGEVLPLGKRYNMV

SEQ ID NO: 154253 - protein, 56 aa, Heterodera glycines; identical to SEQ ID NO: 141389

SEQ ID NO: 154254 - protein, 38 aa, Heterodera glycines
MLKTFVLRLDRVYRSRVMDSYSHCMGCYCYCTDSLELF

SEQ ID NO: 154255 - protein, 214 aa, Heterodera glycines
MHTKNKFSPVYSNPSYPFNSNNLYNGYNPSNNNNAYNPYNNGYNPYNNVNNPNNNGYNPYSNGFNPSNNRYNQYNNGYNPYSNGYNPINSGYNPMNNGYNPSSNGYSPINSGYNPINNGYNPYSNGYNSGYNPMNNYNQYSNGYNPYSNGYNGGYNPMNNGYNQYSNGYNPYSNGYLNNNGYNQNSNDCFTASMVQDQRACSAMQRTCSNPVGN

SEQ ID NO: 154256 - protein, 144 aa, Heterodera glycines
MAAEAAQNGDDADKTATGRTDNPETTTKTMEGQAEEQEMEDDTEQRTTTKTVMSGGQQRQQLAGQSSVVAGDSDDGGEEDNDNCTTTTTTPTYINTSSCSIILDDHQQQQQQSDAEEQDEEDGAENDGGGNAEENAQNGDGGEE

SEQ ID NO: 154257 - protein, 109 aa, Heterodera glycines
MCIIISYDDDQHAKTVGIRIGTVLVIQKLNFQNAKISIFTIHTFMVPNRVLPAADRPAELAQFVVKLYWTLKMDAMVAANIFHIVTGQQKLNVTDSEVQVDHLKEQPTN

SEQ ID NO: 154258 - protein, 176 aa, Heterodera glycines
MALLVSRATVLFASSYTVVYNCQPWSTVGGEECGKVYGIATEEDHPMRGPGRVFLLTMLSSGAVQLLSCSSDLAQPFQLIATTNHFPYKIRQMAFADDRLLILTDDGFFGTIDLTLQMINLNFAVRDIQFLLASDNVEDVGGDHRIHFEGPIQFDDKLGQFSWTVSSWQNPVGHHE

SEQ ID NO: 154259 - protein, 63 aa, Heterodera glycines
MPPVAVFFRGYLRDGNACTEHVIYNIILCFFLWVPGMVHAFWYCFSDMFSGPKKEGAGYSKNA

SEQ ID NO: 154260 - protein, 43 aa, Heterodera glycines
MQNNRASEGLSNDTNNFDIVYEANLHVDDLFRHNQEFLMCHFY

SEQ ID NO: 154261 - protein, 30 aa, Heterodera glycines
ADPQNVQPTKCPSLEFEFFIIQTGLRLGKG

SEQ ID NO: 154262 - protein, 203 aa, Heterodera glycines
MANRRSFLTGTFTLKGVKAFNSENDFVLRGTVANKENGQSAAAAPLKALSERKRPKRLPKNLQMNNDVDGRLSEKQTDNLQLLAPEAMRSMKEFFWRLLIEGRYNKLMKMTREIAFIGSDRHNSQNKLNEQHFLSLATFALAFARHSHISCQNVYATFSVEFFHMVTSYMTNCFELMKADRHSIRKYAFYARHAIRNFKEMMI

SEQ ID NO: 154263 - protein, 231 aa, Heterodera glycines
MEMPTETKEREREMPEVEIGGECFGTARGAAPVATKTTESPQKLGIQMGEEWRNHFSITTSMPNSIKELFSARNNEIINSANDGSDLFGTTELRLELVKIQPELSHSFIESLIQLLPDPECLVNVQIVHQNKMPKEMDFECTYETPNNAKNSGQSLKVQEKSPARGKKSSSLVDNCCKLLLDLVDESGAVGVSEEELKERMSVHNFDVEMVQQQLNKLVETADVVICGIDE

SEQ ID NO: 154264 - protein, 172 aa, Heterodera glycines
MGISCSSAAGTSVPVTKVTPVTGSSNGSSDGGGGTTPLQRIPGIASALAAAVVAVQQQHHNNNNVPPWPSGTPPNNATHPSLDTPPIRQPLAQRIFSPAVSNSSSLSMSSGSSKSSSGVSSATSNALLQSPGSSGTTMMTGLNNSDVGKEFRLRSTLFPYVRRILLKKIRRT

SEQ ID NO: 154265 - protein, 227 aa, Heterodera glycines
SLSAEPSSQRKRHSSTGSPISVQSLDEGIETKTERDKGGNQKPRQIKQTRKSNEVARLLNDLTAGNCTDELKKEGTNESKNGKKRARLEELNNQKEGNETKEKEFDHESGPGQKHFGRDKCDQKERHGTEIDNDYFLEEKMAGKYLKMKSQKTNEQTLFLGKWVGQNGSWQYMAERSQKLASQGSKPNVRGDGTDSTPTKKDGRTGVEKGQKNLQSQFAKIERKRPL

SEQ ID NO: 154266 - protein, 339 aa, Heterodera glycines
VSSFGGTDEQQQQQFQCDEVEEELMLMMKLNGHKNGVGPSSESATVYEQILNGKNGRRVENEPEVYSGKTGLDLPTIHLDKFETEVKACHTGPDGGLTKVSEDFEKARNSFEVQVQPIRQRAIATMAKLDDEEFSLSSLDEDETTEAVLPPSGRSRKGKRRAKNSLSRTPNDSLDILDSIDSKKNPEKTTTPPILALADGVNWGEGARLAARCAIRGAIEQLNLAIERDSFKTTNDVFHCLLGSFHAAHALILQEGGALTTLCVALVAPVRASSSFVLCACNVGDSLCFVFDDKNGVREVTLASHDIGQMRDMRDAGGALGPVDGRNPQLQNLTCSMTI

SEQ ID NO: 154267 - protein, 89 aa, Heterodera glycines
MARTTTTTESIGTEDEANREFVQSLRIKALQHLQRSLESLSSLTANSLMLNEALQPSEETPNEDEEEKSWEEKEREEEEEETEQQNVPN

SEQ ID NO: 154268 - protein, 178 aa, Heterodera glycines
TINARFASTVTTNGIAPSEQQQLNTTKAKERHKGGEVFLFPNDTIFAEGQPVWLIGWFPIIFELSCIINRCKLDVRTRSLTVLFVLFELIKTYGGTFGADAWSDLFRVIFRIFDFGKISELGNEKNEWMVTTCNHALYAIVDVFSQYYASLGTLMLPEVYRQLFWCVQQGNELLARSA

SEQ ID NO: 154269 - protein, 156 aa, Heterodera glycines
MNLQAHASAPNPVPVRQAIADARGNIPIEVRMQQGTSASAMSRTYRNYIAREKVERGDDLLDLADISQIVIPERLQNQLLLDRIVDQQRMFVFASPFSRNLLEQYGNHVAVDGTFKCAPAHFTQIYTISVLIDKVAVPCIYGILNSKSENTYANVS

SEQ ID NO: 154270 - protein, 120 aa, Heterodera glycines
MAQPTQYHGKLMHSLASIPKAIIVDFFYQITLFTAVLVICARRELISARKRDNNKIHATNSNNLSEDDVKPTKSGGFRHSLERKFNAFKDIYICLVSVPNSKQKQMDIPFTGLIRSKINP

SEQ ID NO: 154271 - protein, 128 aa, Heterodera glycines
MRECWISVPVIQNIFDEGGRNLCSFTNLQQKTNQQKDETQRKFHLLRNQATAFGIDAKECINFPWYCVGWAICVPGCNPPKAISLNSEANSATSVPSLWTSKIVRSAPFTSKSNQMPTTSIRFVQTPV

SEQ ID NO: 154272 - protein, 40 aa, Heterodera glycines
LLILLDILPRFEHQQVGQLEKALWNGRKCSLFRLGNNHTF

SEQ ID NO: 154273 - protein, 33 aa, Heterodera glycines
CCMLERGSQLTSNTTFNELKEISFKIAFVFTIT

SEQ ID NO: 154274 - protein, 118 aa, Heterodera glycines
MPPPHPLPSTPQHPHRYGGLHTIFEDTVEQKAGHEKDVRQQKEQRSHTSSAATVNTEAMVREAHRVTSQLAAAIPEPMRSAVTSSVAIPILVSAAQSGGGRKEATQHNSEEEEEKERN

SEQ ID NO: 154275 - protein, 87 aa, Heterodera glycines
YRPNYSDHVYTVDEARSTNPQHYLLKDYYGTKLKRKFYLPELTKVQVDENTMYRIEKKYKERVRDGKREMLVKFIGFRKNIGSQMKK

SEQ ID NO: 154276 - protein, 364 aa, Heterodera glycines
MYPRGLIDPEYNCDHFEDSERASGYPASCTEAGISEEESARRKQEHIDKAKEKAQVPLEADRIKHNPGLRYLSKLCLNSLWGRFALRNRLTKTEIVECHAELAKLLNDSKIEVSSIDQLTEKFWMVCYKAKDEHVVEHSTSNVAIALWTTSAARIHLLESLKKVYGPAPGVERFDTRILYMDTDSIFYDYLTRLGDPLPGGEQLGELADEYPNHTIMEFICAGPKAYGLWLRNNATGEDEYKLKVRGITLDSDACERITFEKMKDMVQNKLGQPDNNVRFNYPTKNFRITKKGEIFTVPLVKQFNPTVNKGVVRDHGLKVVPFGYSDEEWCKWNCPGACTCLFNPDLNVNMFTEEELNDPDIMP

SEQ ID NO: 154277 - protein, 123 aa, Heterodera glycines
MMERLDEDKNLAIESNGKGNNSKNVPFTPFKRCYGMGCPSCFPDDAQLWGGGETAGALRARDAKRTRDIAREFEVEVIWECHLNAMLEDNPAMKAYFDNCPDSGPIDFHDAFFGGTFFHLIFN

SEQ ID NO: 154278 - protein, 115 aa, Heterodera glycines
MASLQVDGSMLETSCGQCILLNIFFIVPIIQKHFPKKGSPHYACPEVIRGEKYDGRKADVWSCGDDNLRNLLEKVKKGLFHIPHFVPADCQTLLRSMIEVDPAKRISLQEVLKHP

SEQ ID NO: 154279 - protein, 214 aa, Heterodera glycines
EMPVAQVVTHIIPNEENIDPDVFRHMTNLGCFKDKEKLVTELLSPKHNTEKIVYFLLLDRKRRRPAKVYFLLLDRKRRRPAKEDELEVVEDELEVVHRGSALNIIDPPRKRIDQTKPRFPLSARRADGSPMNARRNRWAKIKLSRQSSLSGSPECSPHPSPRPFFGEGWQQQHKFDIFNDLNYQQIVSASYNNSINCAAALLLPRTITQMSRQL

SEQ ID NO: 154280 - protein, 38 aa, Heterodera glycines
MSNVLCITVVVSAMIAGSSSISLHAEILWRDIKPWSKW

SEQ ID NO: 154281 - protein, 105 aa, Heterodera glycines
VAAHLHYSIDKLIFVPINPNGNEKLVKLIDFDRAQIIRICNNSEPCNEIEEEPAIMADTTTVIHSTLDIGKYSSPEIFVGNKQLSVKADIWSRGISVYEAILVAK

SEQ ID NO: 154282 - protein, 200 aa, Heterodera glycines
MGFMLSIFIFVLLKTLKFSSPFITNCNGFVTENMLPFEEFISTKNDGHEHNIWKTVFSIDSKPSADGQVFGGYMNEEKVSRNAQNFVEKCVAIKIAINRIQEQQIINGVQVLEEIQKIEESKRKHIIGLIDYGTLTSRPAETENAYSVLIMELGGISLREQLGRRLHFEMPMEEVELIKEIKRMAQPLKELHQEQNIFIK

SEQ ID NO: 154283 - protein, 97 aa, Heterodera glycines; identical to SEQ ID NO: 146978

SEQ ID NO: 154284 - protein, 56 aa, Heterodera glycines
MGGGWGGEECPVAWMGRGLALHAKPRVGPCPIVSAGHFRVPRGAMDRTDQNANRSE

SEQ ID NO: 154285 - protein, 214 aa, Heterodera glycines
MLRFANDMDLVMAISILEQYNRQSEGVERLGGRQRTNGGGSDAILEQKLAQFHQCLERAGHGKGPGRIRFRLRRDHLMNDAFEKVLTVGAEQLKKCQMMVTFDCEDGPLRLDDLRDLDPQLWHSLCWLRDHPIGGAAEEEKEEENEVTDQPTTLALAFCVTEEVAGEVNDGKRRKKATIETIANRLAFVQTLGEMPKKCMGLDWNTWNRLMDDI

SEQ ID NO: 154286 - protein, 253 aa, Heterodera glycines
MIWPAQMAVTLIPTIAISAFVLRKPELLEHWRSDGRRICGKHFHSVIDAKHELLLENIGMFLITIKNLFKLNSADRRVMVTIRRLDFPCNRETCSSYVEVKAKQDKVATGARLCCAGVPAAIYADIGAEVVIILSVDDANQRNHTGFDIEYKSISSLAQFEVPSVRSFFSTKYIPIYVVFKFKPSFSNANNANRGTILPAPKIANNTIQWPNMPNIASSPNNTVQAPSMVIAEFSLIKLTIFSKRLLRQFPTI

SEQ ID NO: 154287 - protein, 131 aa, Heterodera glycines
ADHLENKLKSVDNKTDSIYQWLDNAIGVMCSYKFEFQMDENVQQMRTNLCEQKSIEKAAEILQKTTGKSEYVIDLSIFKTFIQKTQNFTSFIKDQNIKNLRKFVGYFGAAIKKCYAVPSVDSRKVKGQTGF

SEQ ID NO: 154288 - protein, 67 aa, Heterodera glycines
MTVTFNTEFRLIEWVPMLEEVAREFGCITPLPNLGSHRDYRVSGCLMIRTLTSLNRLYIFDAEDCIE

SEQ ID NO: 154289 - protein, 525 aa, Heterodera glycines
FTVNNYSLDFDTSFSSPTINDVEFNIISVGKVLKTLPNRNNTSPDGITFRLLKNCSLSFTPFVTEIFRLTLDTGKLPTIWKQSIIIPLHKQGEKSNPMNYRPIALTCSLCKIMEKFIFWAISDFLLKNNLFSEHQFGFIKGRSTTTQLISTLENWYDGIYNKNIDCVYIDFRKAFDVIPHNLLLYKVHRIGIRGKILNWISDFLSNRTFRVRVDNTLSSEYKMSSGVPQGSVLGPLLFLIYINDLRELIPKQISIKLYADAVKLYSVHKTKNDRIAMHHALNILSDWSKKWYIKISIDKTFIIYFGKNNPREQYKINDNAICEVKTIRDLGILIDNKFTFSEHISKITRNAYYRMRLLFRVIKSKKIAIWKNIYVSYIRPLLEYAPESWNPQLKSHIIKIEKCQKYFTRIAFRKCCLPYIPYDQRLQFFKLATLEKRRKIFDLLTTYKILRGFTHLDPNSLFKRTNLNTRNKSFLVICITIKISKSFVNRSVKAWNALNKTKKLLTFEAFLTLTSILFSYKFFVI

SEQ ID NO: 154290 - protein, 18 aa, Heterodera glycines
PYRDRDLSFSKSGTGNRD

SEQ ID NO: 154291 - protein, 150 aa, Heterodera glycines
ISVTQPYSCQISFYNILGGKDYVVKAQVLAGGRGKGKFDSGLQGGVQIVFSPNEVREKASQMIGYHLVTKQTTAEGRLCQAVLVSKRLFTRKEYYFSITLDRSTAGPILIGSSKGGVNIEEVISRFQISLIYANLKISVSITIAEKREIE

SEQ ID NO: 154292 - protein, 56 aa, Heterodera glycines
MVLLGEDQQPSLFLLLGPNGWVQQQQMPCDGSAAPRNRFLAPLNKGTSWAISKNVK

SEQ ID NO: 154293 - protein, 51 aa, Heterodera glycines
LHVIAEKIRDQFPNVDRLIAKRKPSLSKRLTESKNLEMYLIHMQFQPLNLK

SEQ ID NO: 154294 - protein, 77 aa, Heterodera glycines
VHNGRGINLGATTGEGVESKQYLEIDTNVWNGMNDNDQIVFHVRTPHSVTKCDKATVRELRQTDQPKDFADQTIRTV

SEQ ID NO: 154295 - protein, 94 aa, Heterodera glycines
MSSNIVSVNENDAIGDSLPRATIRTELGVAAGGIGMRIADIDRQIEVLMRCECLTEQEVKVLCSKAREIILQEGNVQRIDAPVTVPFSFSGLSH

SEQ ID NO: 154296 - protein, 303 aa, Heterodera glycines
MSAESPTTSQRRARSRKTKKRAVSAGETKPLRRSARIAAQKAAKEKAAKVTFSDSIPPPSSLIHFPFFQQKARDGSTASTKSAGRGRPSRSPKKSGPKSRRSPAGRGGGRSQTPRKKKQPMKKAPGPSSRTPGRRVKKPPTKKSPAPRRAKTSTKKRGRPAKKAEQAEPSDSGTAADSDRDDSEHSEESATETKKKPTRKTAGGRANKQTKSRGRKTTKKTDQEEERADSGSEAEAAGSPRDSEHSEESASGTKKKPTRKSAAAGRSTKQKASRGGRAGNKKAQEERSESPTESGSDREEDEE

SEQ ID NO: 154297 - protein, 253 aa, Heterodera glycines
MDDLTLVPTFFNQPSASGEQMNVKNDHTVTAEGEEVTVIEATEPPKYKKRQKQTKQIKAQKLKPLKRQKSSKEDQNKRNALENGKRNMPAVGQQNAIQSAIVPQNMPPIGNAIGISLQSVIVSQNVPPIGNAIGIRPANAVVHSFLAAPTEKQFNTTNQRERYRIEPIGKASTAEKAAEKGTIGTEEQRQSALFVTFSVMENNAQRTDRETLLFWINIAKTQIIEEQQQQQQQQQQQQQQQQQQQQQNEWQKM

SEQ ID NO: 154298 - protein, 16 aa, Heterodera glycines
MSLHILSRKYKSIAIS

SEQ ID NO: 154299 - protein, 87 aa, Heterodera glycines
SKIKVHKKQIEEAEEVSAMNTQKFRQIQSHLGESEERADEPENSLMRVRSKIRVNAAPNAFGTMRAASSSALMRAASGAMIMNGQSK

SEQ ID NO: 154300 - protein, 109 aa, Heterodera glycines
MAAEPNYDLVKERIKDFLHEFYIEDEEGCKVFKYRDQISQIAHRQQIALYIEQDDPAVIDALDAFIFQRLYMDKMLKIARGEMNAREDDPSKAYPPELLRRLYGTFNKR

SEQ ID NO: 154301 - protein, 64 aa, Heterodera glycines
MEELYKKYELKLDEIQRGIAEQLTYMCDGTIFNSQILKFHFFKNASGNRCASAPSTRAQLTITI

SEQ ID NO: 154302 - protein, 463 aa, Heterodera glycines
MLLPSGKTAGQVRERDSKRMEFLREKVNRVDVYWECEIHRMLERSKEMRKAFEDYVDDGPLVIRDAFMGGLTGPLKLLRKAGPGEKISYYDFTSLYPFTTCYPIGTPKVHVLNQEVEWRSAADNPYPLALLKVWVVPPRRVDVPVLPVKVGERLCFPLCITCAKEHPTGGVDNDYHCEHSDRQRGWVSTCTSIELNEALDEGYLVTKVFRVLEYEQSDDKLFRPYIAEFMAQKIQASGFDNSIRGNAEKEQQFVRECAEQFDITIDPTKMAVNKGKRSLAKLCLNNLWGRFSLNNFGLAQTLITDDPATLAEYLDNKSIKVTSIDELDEQHILITYLQKKDWVDEHSCSNIVISLWTTSAARLVLLKAMQKVVRSPGSDLLYTDTDSLILVHPEERCPLKTGPHLGQFTDEYPDHDIVEFCSGGAKQVHFQFIFVYFSILPRFSMVFVCDARARRREPNWNMC

SEQ ID NO: 154303 - protein, 134 aa, Heterodera glycines
MTKTFFVTGISAQGAAFLPAYGQLRNPFNINVAAHFYARHRIKLHFPYAPCIIERFSGGGEDRHYPMELLELIDDNMDMDINNNEHWLGRLFTEIDDKQSSSNSSDTTMRLVFEGDMDEDIGRNECSQSTVPLY

SEQ ID NO: 154304 - protein, 50 aa, Heterodera glycines
LHRIAEKIRDQFPNVDRLIAKTKAVFVKAPYRVKKFGNISHMQFQPINLK

SEQ ID NO: 154305 - protein, 111 aa, Heterodera glycines
MRCCLFSVAVVLIVALLLLDVAMCKKHHNKRNNKIANNKHKNSSSSSADSSSSCSSESDEDASKLAEFLTDEGRQKRRFRAKSRVAKCNQRSGGHWQASKEHLFLSNDFKD

SEQ ID NO: 154306 - protein, 263 aa, Heterodera glycines
MFNFGSAVIYFIILQHFSFSISNANSLANDNLLIAFMKGHQKIQISEYSKQKYEAHLGIVYYMRTNWKCDKIWKKFDEFELKQCQKYRKYLNILYEFLYKKYIGIPSVKPKFALKNEKFEFDSPIINVINCLAKISQFYFNSKWSDHYDHILSNLFFYHFDIILLNEKRMNYEEKFEIEPKMPVNEMILKLAIYTANECQESVDEIIQQNFKENMNKMLKNAEEKAKEGFSSWRNNAVNYDKHKIILRLKFDDSNTWVGIQLK

SEQ ID NO: 154307 - protein, 51 aa, Heterodera glycines
MVSYQEHCTGTAMGDKDAVELRTCTLLTDCNNCLLQKGCGWCESSQVKDGK

SEQ ID NO: 154308 - protein, 49 aa, Heterodera glycines
MFEFGLGIRNRSEMDVWHISDQFSPKQAFTRKRPAPILLSLLPRSKPTL

SEQ ID NO: 154309 - protein, 33 aa, Heterodera glycines
MDSNLLPLSLYYLTKTTEPHMQIFIVKGAHFWE

SEQ ID NO: 154310 - protein, 48 aa, Heterodera glycines
MCTTDSNLLPLSLYYLAKTTEPHMQIFIVKGAHFWEVIQPFFGLYIIS

SEQ ID NO: 154311 - protein, 26 aa, Heterodera glycines
IYTPFQKTRCVPINRECQRKTLSFFL

SEQ ID NO: 154312 - protein, 341 aa, Heterodera glycines
MNRRWICGDVWMDILPSFDRPQLGLKMALLSDRFDVLVDKHFDGKSELTIWRMIRVGKDEGPKAKLYIDHSVIEFIRVNKQIWDISGTNLGLSIAYIQQIWDVFVREIWPVFATNIRHLGFRSGNDLDNLCRLISPTILTDLNHLNSIGFNYLLPDVIADDGPNATSAGQALFKWLHAPTTDGRPKELNCNGYLVSQDLEWINNFKEVVLARCYVIIKIHQKGNRPFWCRTTYHFYLPTKLNILQANRGRSFLRATTSVSYNVRITFYKTTTPIEPFELVNERTNEKLTFMKKDGGGELLNAWLLKRCPIIVGERAAAVQKDDNLDHLNGVHFSLYGDCIG

SEQ ID NO: 154313 - protein, 181 aa, Heterodera glycines
MLSEQAGLMGRDYKDHRCQHEMMTHRQMMVQEFLMSPEIVMGCAQQIDKYCSPQGDIESNGKSAHCLMAHSQEKDEEKLKFFTAFVDQQLNDACGQEVVTVDNWHKSANKLRGQDDKVAADPGPQGDIEPEGKTVHSLMAHEQEEDVKKWWDNEQNKYVQPNLKYQPFDFQCLNESIGMLM

SEQ ID NO: 154314 - protein, 146 aa, Heterodera glycines
MYQNLTLIVEHKLVVSHVAAVNENHTWKGGHLGIRTNAIRTIKIFYKIKLTISIGPSKRLCHCTNCLCTTFCKGAKATKEIQIQLRDLSHKQFKDNWAELRGLYINLMNPMDTRQYSYVEFKYIDLAENLEGIQWFNMVETEDDGF

SEQ ID NO: 154315 - protein, 59 aa, Heterodera glycines
ICFQKKLGNFLIFSFFSCKGAKATKEIQIQLRDLSHKQFKVRFLGTKQNANLQNAIKGS

SEQ ID NO: 154316 - protein, 119 aa, Heterodera glycines
MNRKIMYTDRIRTPPPQKMTQNPQSHRDSEVLTMSKLKSDHSLNSLKHTKPEGPACGDPFYEFAKHCAMVKFYENKSPKKWIAENNPDSLLVLIDGCVVCDEEGSSGTLANPKDQQIEA

SEQ ID NO: 154317 - protein, 61 aa, Heterodera glycines
MDKAENKEIVKKLSELMELIKLKRVEKVKGLKEKFVELLEKDEVLYPSKKTSVSKNFHFAY

SEQ ID NO: 154318 - protein, 395 aa, Heterodera glycines
MRAQPTNVVQQQQNPPPTNQAMAQHNPQQEVIRQPTGLSGIEYAMILDRLHDIKGNEGSDSILNFFKKFSQYTSEWPNKKLIESLEAKLSGRAERAYNAALATEPFAYENIKRNILQQLEETDCREMSAFDDLMNGVYRKSGENLDDLANRISNLVRRAYPGLTQNLSDDYSIKHLIRSLNNPELALSLELHRRSEMSFDEFVALTSRAETTQRAAKRANTERFKPNNGRIFQQPQQSGRDFGSGFKSPITQSPVVCYNCNEPGHVSRNCNKAFHPNRGESSTPAQQNQQWAQNSAATGANRVFLNSKNGTSPVVRSQNFLKQNCIRMEEEVRTDATVGGVMLERKQRPNRTRANGGKADYGENGNGGTCYFGDTNNCNVGRWSSNFFDRRQILL

SEQ ID NO: 154319 - protein, 70 aa, Heterodera glycines
MNEVKCQSVAILECLKSQPKDMSDREFLPLGQLISEFDNIFAIHEEELTQTDMVEHSIDTGNAKPIKAKR

SEQ ID NO: 154320 - protein, 244 aa, Heterodera glycines
GEEVQTWHGQCPRGRIRRQPCPKGDHGRIVDDAQEGHSGDIDGAGRDRGQLRQIKQLTGGPAKQDICHPEHFKAKVLWMLRKLKANRERPPSLIFIIRDGLDEGKVDNVEERLPDAAQPRNVCNPQPGSAVDRKLTRSGVLNLYVQAHHPVRGTAKIPEFIFPCNEVCATKEELEAFINGLCHSWQIVKAATSLPVPVYQAHELAKRGRSNYMELRRYSSRKNQIDPSQKEWRPNEFHGVLTDK

SEQ ID NO: 154321 - protein, 279 aa, Heterodera glycines
VHIERGDRTNSSLSEEDGQSNHNGNDLAKQQQQNVHNVKLENEVIQNRQLAAAATEPAKIVANGHNSSATMNNDDLSPDLDVHGNKLASSVGRTQSDSSKSSLRTVNSSLLSNRAEGILGKLIGGKHTKKKKRKSLLSSAGRIQIGLKYDGDRFKLIVSVIAAKDLSPIEKEGHADPYVTLRLMPSANGHPATTKVQKGRKHTEMVPNSLDPQFNQNFEFDIHCSDFPNFKLHLAVKDGINYGLLHSTPTFGVAEVPLHNFDPLKPIVSQWLDLSSPQR

SEQ ID NO: 154322 - protein, 94 aa, Heterodera glycines
MVRINNSPHLAWYGMAIILLAAVVVLQDPAESCIKIKFAGPVAGLEFKIFYRTGSGRINPANPVNPVFSKICRIADWDPAKSCAGSCPAPVSSI

SEQ ID NO: 154323 - protein, 113 aa, Heterodera glycines
MSIIRLYISFNWMDLSQFIVCINKRSYLLRSGFKYRYEINLSIRVGNEQFLENGNVLVIEDETEIFEHDIDDVLSEHNYAKRTRFLTDVNVASQASLNSDIGVAGPSRISDSQ

SEQ ID NO: 154324 - protein, 119 aa, Heterodera glycines
MMMKEEEDEEAERARTENREPAEIKLLFETGKQLDRRLGYNVPRANEVAAVYVPGADGEVPNAKIVIRERGKELKILNSTDMMVTPMTYPLFIRVGSHHPCSVSKDGYANLQGNSGENS

SEQ ID NO: 154325 - protein, 256 aa, Heterodera glycines
AECVELFLQFLLDHPRHRQQNAKRAHHLTELFLRCVHSSHTMRYQLGHDAITTILKSDEHPNFLPTAIAQINRFLEENLVECETVGDAHNQHESSDANVQHEEQMVDQKSDGNRKRHGTDEANFASLQGFFCFHKCLAFAFAGRFSSVNSRKTIMEEEEDESDIEEFADHSNASASVTSDGPSSSSADGKALAERKKVMKIRAKIVDALLTLITTFSHLDERQSIVLISENHATLFGGFGLKKFVEFDPDLDPGMD

SEQ ID NO: 154326 - protein, 98 aa, Heterodera glycines
  unsure (1)..(98): unsure at all Xaa locations
WFASRMKGIDFETGQQILCPSQFALVGSGSDEQLGGYARHQTVFKSKGLDGVAEELSMEMHRIGARNFGRDDRIGTVNGKSLLAPXLXEPLVCWLNTL

SEQ ID NO: 154327 - protein, 78 aa, Heterodera glycines
TVITVPKSFKNLKLAFSCPTCSEMLSKDQSHFVERHQCIRFFARVYGYNPLVFSQFRADSVLFKTRVPHNHQKCFRYV

SEQ ID NO: 154328 - protein, 74 aa, Heterodera glycines
MAKSLILAPNFIGPWLTGEQLIGHATSPVLFPGPYRLNLWLNYFSQKFLIGQLHPMGTDHLDGQEDDAQQQIDA

SEQ ID NO: 154329 - protein, 135 aa, Heterodera glycines
ELLCAENLDELLSSEKQKPTNEDDDESAPPWRFGPAQMWYDRFGVPANPSNFDYGLKRRGTALSKRSTDDGTMPLPSEDDRNFLPVHFLHWEDDIIIDPEQAREKLVKELSSVKLPRCGWIPTPYTRSYKAFIAA

SEQ ID NO: 154330 - protein, 299 aa, Heterodera glycines
MTSTESPHQQQFLRLPLFCNNNRLRHQSAHKSSNNNSTRAQGREYCVEMRPNDRLGQSASAGPLLAGCWRNSSSSVTTEGGVATQQGTFTADPLARVGAAISGKKAVSGVPIEGKQQPKKRGRPKTNCQTQQLPLVSANATTKSVQQKQKNNQRTEQRAVDIAKNQPKHHKLALGNHLTLTTLNESAKTSKSKQIITVQVEHITEVFETEQKKRKYQKRTPNIDPLTGARKVRKKGSGRKSKKELAAKAANGGGVFGTDGRWVLTEAQPAKSDANSIPNHKMEEFDNSHQPSQNEAPEL

SEQ ID NO: 154331 - protein, 204 aa, Heterodera glycines
MDSSESAVRAPRNRSYNPQHLTVPKHLDERCVDRLSADIFCSLFNSYDEFKKTTNSMRLLPVACAYFDASQRLLSSLRTSLRGFSLYHALQKSDQPTIKEKNMDEILVEESDRWFFGDGLVGIEEAETEWDDDAEGEREERLSRAFFAKLDKEYQNIVRRQCWDDDEQNEAKGDNFQPKMAHQLLLQLDVAQTLDLVLHNVEND

SEQ ID NO: 154332 - protein, 35 aa, Heterodera glycines
MRRADDGTADEQCDRRPTKNLCLKNDFFCSLVPSF

SEQ ID NO: 154333 - protein, 22 aa, Heterodera glycines
MHWRRRRVRRADDGTADEQCDR

SEQ ID NO: 154334 - protein, 34 aa, Heterodera glycines
LGTRQCQTKLLLTPNSAFSVNFCALIQNLHWKMP

SEQ ID NO: 154335 - protein, 223 aa, Heterodera glycines
IGISANIQSFQSASVHGPQFTWGLGLAFGVYISAQISGGHLNPAISLVGHLNPAISLVQLANGSISLVRFALYIFAQLFAAFLGSAVAFLGHFDSVMRSHSFVYISDHLTAQLFATFPSPNLSIWGSVADQIALTFGTNGGFAINPARDLGPRLFMLCLGLGWEVFSNNNFYFWVPLNNNFYFWVPLAVPFVGALVGHWLYKILIGVHGLQELIEISGAKYPR

SEQ ID NO: 154336 - protein, 271 aa, Heterodera glycines
DMKDTVKEGGRVNKFPGMSELAKKVSLTMSELAKKVSLTVAIQSMRELFPDEYAFYPQSWVLPAQLDKFKNHCTDQRDADKGQCFIVKPDEGAQGTGIYLAQGTGIYLINSHDQLKSTTTRQLVQEYVTDPYLLPDDLKFDLRVYAVIKSINPLSIYVAREGMARFCTEMARFCTEKYVRPCPENFDKFYAHLTNYSLNKENNAYMHSNSLREQLRGSKRLLSTVFHQMERKGVRTRRLWKGSKRLLSTVFHQMERKGVRTRRLWKDVKLI

SEQ ID NO: 154337 - protein, 64 aa, Heterodera glycines
MGVTCKILSSWGWSSGPDENAIWNGIFGLDLISHEQLYSSNFSAYHLNPIRGAELVGIECEIQD

SEQ ID NO: 154338 - protein, 35 aa, Heterodera glycines
MKAQLQNDALLFRYRAICKGVPKLAKARISIPFRS

SEQ ID NO: 154339 - protein, 151 aa, Heterodera glycines
MISLSSVKGFFTSSTPLVAALSQPSISSSPASTRYGVNTPKSSSAASSSTYGTTQNYGGGAAAALCNGGGGGPLPSPAGTPGGGGSRQQQQQQHHYVVQQQTNAGGAGCDGNGRYHPQQQPSPQFKAKPNKIYNILQNFPFKMSIKWFYLL

SEQ ID NO: 154340 - protein, 208 aa, Heterodera glycines
MVEPIEGTDREEEGANDHSDMTLPSEFDENGGNGGAVRSLRSDTETNEESAVDEQFRKQKGMPRGETEAPENAEATDVPESPNSGTTSAAKGAQKKHPILILLNNIEGMPKPSDPRKSKGIRNAAQNNQQMDEEGPSLTDWEINVGRAAPTGDVPLVTLPKFATEYKQNNDNTTKGGEEQEKEGERTAQKSPNDAGQQQQQSGIGTLL

SEQ ID NO: 154341 - protein, 204 aa, Heterodera glycines
MVRQPQMRMLLPTLLTIDCFEPSDDRSISDWLERFNFAIDCAAPQLADQAKVKLLMTKLSEVAFSQFSKSCLPKKVIDFDYSQTEERLKIAFSRPQSIWIDRYECMRASKSEDESFRPFINRHMRLLRDSQFEKLNEEQFSCLMLLTALKSPKDAELRKRILSKLAANGDLVEYDGVVEYLQMYQSTIAEAKVVEQQPMGSRKT

SEQ ID NO: 154342 - protein, 172 aa, Heterodera glycines
ERFNFAIDCAAPQLADQAKVKLLMTKLSEVAFSQFSKSCLPKKVIDFDYSQTEERLKIAFSRPQSIWIDRYECMRASKSEDESFRPFINRHMRLLRDSQFEKLNEEQFSCLMLLTALKSPKDAELRKRILSKLAANGDLVEYDGVVEYLQMYQSTIAEAKVVEQQPMGSRKT

SEQ ID NO: 154343 - protein, 100 aa, Heterodera glycines
MCAKHQAWLKKNGGKKEKAVNNVRVGGVFLVKSENETKKGIIDVPIDVNGIKVDFIADFGTERTVLCEDTVRQIGTLKLSRCQEPAQYGKRYKNADRGCG

SEQ ID NO: 154344 - protein, 69 aa, Heterodera glycines
MPPIKHANNDEDDEDAGGHRRANVQLAKHDRVANVQPMEVQAGHWGGQTPVHHFGINKQGANGRRALLS

SEQ ID NO: 154345 - protein, 169 aa, Heterodera glycines
LVIPFYLPMKKGVKFAFKKILVQPKDWFRAWILKLFSTANFVLNDGDEKMKQKANDGKVPITDLSEIEPSINVPNFEESLNENLGTTIKKMSNIVEKKKANSNEKAFKKVAQMLKDLFINFGLKKSGENTNTKKSNRRRRKRGIELGAGINAYIEAGKILNYEKFSKFS

SEQ ID NO: 154346 - protein, 177 aa, Heterodera glycines
MPSLLSTVFANFSPNAPLIWPSERRMIAFRISFFTTFGQCSEKTFMACDCPPDFSTVCVNSSPQFSMIAFASASSPANFIISVWFPSSFAASIVPFVLTNELTREQLTLKKINNSHRFLFVRCPIVRDESKWTKWEKEAIDLRIYNQCNLHIEINKDDYICKGLLDEIPGPSDQQQK

SEQ ID NO: 154347 - protein, 83 aa, Heterodera glycines
MTQWGRALLIGACLGNQSRVNREDSVDEQLARHHAGARLVNAPEQIRHACLAVIVPRQIPFPPIVKGEALKAFQFLAINQAIS

SEQ ID NO: 154348 - protein, 202 aa, Heterodera glycines
GTVPLRSSLGTIDKKRTRRKSDTLHDNWKRLWTDLVQYEQKLNERKAHLQELERLKGFTFDDWRERYLAWNDHGKARVSDLFRRIDKSGTGMVPRKLFIDGILASSTLFCSMCFFLFCSMCFFPEFPTSALEMARVADEFDKGDGLIVSREFMNALRFDPKKRRYEPKTETERIHEEIARETARCTCAHRFPIQHISSDKDR

SEQ ID NO: 154349 - protein, 99 aa, Heterodera glycines
MEQANTRRENVEKVRERARKILDTNVGDAHELAELERKLIILNDQWDRLNDGTTQRRLEEIRQHEQMLDELMGFVEEKQGQLELMRDCSDEGQLSRLST

SEQ ID NO: 154350 - protein, 91 aa, Heterodera glycines
MPLYVLCNSFYSVQQSFDVLCTPADMPLIYAFTKSNFKYNTNVMEMADKLLCKAVKPFSRLKLSTEEFVLIRAIIFSHMGQLINEMPKLLD

SEQ ID NO: 154351 - protein, 168 aa, Heterodera glycines
MIEPDSAESVPVKCCVCSEKCKFHSGVKCCEGVFIKILKKEQSLQTFFSSLNFVDEGILLQKCRRNFFYKDSTCKRCRLKKCFTVGMNPRRVCVNNVNNEQILAYIQRIKRLMTSTNSAAAIAPSSAEIGMELSTETSATNGPLKCHIPNSVITNHGQIKTKLRRLAL

SEQ ID NO: 154352 - protein, 25 aa, Heterodera glycines
SKWGFEPRRKIMKGRKFNHYTTCAC

SEQ ID NO: 154353 - protein, 655 aa, Heterodera glycines
MDPQQLQQLLNALQQMVTNAAPQNAAPENLSNANLASSIDARLSAFHYNPEVGTTFESWFKRFGKLIEDDGSTLPETSKVRLLLGKLGEEEYSKYRDTISPTQPDQVNWNDTISHLKQLFAETRSLFVRRYECFKIRQQPGQDVSSLIAQINASCENADLSLTKEQLKCIILVIALSDEHHDLRQKALKMLEDAQKNGTNISLKKIEEELRAIQIVKESALSLVNPPIVTNAINTRPRQWTDPAQRQSGTNQRQHKNANTSGKPTRGRPTLPCGSCGKSDHWRSDCTFKDATCLKCNKKGHISTVCRQNKTKAPPNSHRSFHTVKVDTHCLHVGTTQGRWWKLIILINGRQTSMNGDTGAQATIISLQTWRELGEPELTPSDIDAKNCNDQPFALLGKFICTVQFSDKTPQTLIAYVSGEVGHNLLGLPWIEALEIIPRQILFPSSKSADQATMIENFSAVKPPNKTINDVSTLKAALQKDFPEVFEEGLGHCSKAKAHLILRSDAKPVFCRARPIPHGAMEAVNAELDRLLQIGAIKPIDFSHWAAPILAVKKKNGKTRVCIDFSTGLNNALELNRHPLPRPDDIYASLNGAKFFSNLDLRDAYLQMEMDDKSKQLCAINTHRGLFQCQRLPFGVKSAPAIFQHLMDQICAGIP

SEQ ID NO: 154354 - protein, 130 aa, Heterodera glycines
MPLSLHSPSATGRHNRRQSWRRRRSPMCHCRRCAMTDESPMPLNSQTAAIGERSPMAAFVAAAAEIRRSVPGKRCAGSPMAQPCRRTLRTWTHRRCWGRLLQKQGMSGAVEGVLPYGYRIDIKNALPCGT

SEQ ID NO: 154355 - protein, 35 aa, Heterodera glycines
VCVDDADGLLAAIRGGADRVELCSALEVGGLTPTP

SEQ ID NO: 154356 - protein, 179 aa, Heterodera glycines
MSGKKGADWYDESDRDKMNMLDACASGMVAEVERYLNGGVDMEEEDDDGVTGLSHDTLVKLYKQFLMSGKGMDNLKKELANKRETGEIGGGKAPLGERKSSAGIALAKLVLNDSGNGGGGMPSPASVAGGGSWMVRGDTLRPMIFGDNVPHSKSAEESAEVNGLYMAAQWNAEKLFKNV

SEQ ID NO: 154357 - protein, 68 aa, Heterodera glycines
MDTILAERKRAKLQHNGHSYMFHKLAATNVNQARCVTSLAFLPIGDLTPGIIALDMALPDELNPVLDW

SEQ ID NO: 154358 - protein, 472 aa, Heterodera glycines
KKMDTILTKRNRAKLQHNVYSYIFHMLSADGEVRFWSCEHHHTKDIRCKGRLHTDLNNNALREVGSHQCEPSAARMEAQRVITGIKRRAVQTMEPPATIRSLALQNVVTPVLAQLPTKQATKQIIRRVRREIDAPPPVPNTLTDLIIPDAYKMYSRTDEQSEQFLLADSGVYQENGREQRILIFGRESNGRWAHEMKECFADGTFSITPMPFQQVYAILARRNRWVIPVCYCMLSNKTHTTYERMFRMLVAVWPDFNPDSVSMDFETAAITALNVVFPFTERYQNDPTFAEMARCVTSLAFLPIGDLTPGIIALDMALPDELTPVLDWFIMNYTGRLKNDGSRTRPRFDPNTWSVYTRTMQVDDRTNNHSEAANRRLQCSFACSHPSIWHFIDLLRKDQKLSDDDFAKCSTGQDPPQKAKKYRDADRRILTMVQNYLPLNNGDTNIFLIHQPFNHHFIITFLIGISRNYEMR

SEQ ID NO: 154359 - protein, 77 aa, Heterodera glycines
MLKNGQNRCKKEFSRSLNTVIAQLKKENSNATICSILYNHQHWTALKNTTNLLDLILEPRGKLMLTNASFECQDANL

SEQ ID NO: 154360 - protein, 72 aa, Heterodera glycines
MYQETDVFPNLQHESLFSLFFRDTLPNTIVGPIAHQSVQCRHRCQRGQTESRTDHRGESISEQRHRKALLMG

SEQ ID NO: 154361 - protein, 45 aa, Heterodera glycines
MRRATAQARKGAGKISRAVTVAPTAPESIAIQTPTAKLFAALHTR

SEQ ID NO: 154362 - protein, 55 aa, Heterodera glycines
MEPPASAQNFYVPEKCDFGTDPQWCGDYVQQYVKWFEQYGSRGKIFLSDKTYQID

SEQ ID NO: 154363 - protein, 126 aa, Heterodera glycines
MGGYGNKFGPSLGYGGYTNPLMMMDAGRLGGGGGYGYGPYNRGYAGIGVSGFNNPYGMYYNNGYGAAPSLPYAAYWPQSPALQYPMGGAAAQLQYSASQNPYSTAYWGGFLSPLKAKTTKKRMLLE

SEQ ID NO: 154364 - protein, 234 aa, Heterodera glycines
MANSKIRKNELTVKIIPSLVEDDAHTYHMLAYCTGKRGLIYTENGCSKGIQLPTAKNNWRHVFDEVAKLEFNDTQQCVAYNIHIWLKLKEDQHWVSWPTSYNSEIENNLLNHRVLFGNHFYLTISPEMDSNSEHFYSIQVYCEEKTVENQQHQQMVDGKTGPTNSDKNWPMNDENDKYNFKTYTKRSTMVVFNSEARQCTDSNTYRIKVWAVHKQLLYFNVKNLAFFWEPIKFL

SEQ ID NO: 154365 - protein, 250 aa, Heterodera glycines
LFLNSFMFSKLLLLLEKSTLANNIIKKISIISRGMHSLILIYLLYPSARRNESVVERICGQKVMDPYRWMEDPDRPETKQFVAEMNDLSRPFLEKAFFRAQFRNKLVMLFDQKAYGLFDQKAYGCITKHGDYYYYAYSEGTQKQSAIYRQRTLSGEKEFLDPNQFSPDGTAAIVQSAFTRDGQIMAYTVAEKGSDLSTIRARKLKKGNDLPDKIRNVKQSSLAWMPNNKGIFYSVNTNYNNKNIFVLLYY

SEQ ID NO: 154366 - protein, 74 aa, Heterodera glycines
MADGATIVKFVKKIRHSDEWRGVNLTGVTVPVFIISRNDTKRDGSNPALLYGYGGFKSVYLGISISHHGNKLLN

SEQ ID NO: 154367 - protein, 111 aa, Heterodera glycines
MDMLRFHKFTVGSYWMNEYGDPEKPEEFEYIYKTADHDDRVVPSHTLKYAAQLYHYLKKPEVKLTQRKPVIVRVETDAGHGAGKPRDKVIDELTDIMSFLQRVIQLKWYDD

SEQ ID NO: 154368 - protein, 91 aa, Heterodera glycines
MELGDFSVVIPTSSAVVMFCSAVVIPTSSAVVISPSSECQNQGDAVLTEYDQKFVNSLRLNVQEGRDFGYILVVLANQHKDVLSGLQQKSD

SEQ ID NO: 154369 - protein, 93 aa, Heterodera glycines
MIGNDALLPSRRKLSYFPFFLRILLINVILIMIITKNKPNCRLLAFGGWGDHNGGGCGDHNGGAEHNDGGGCGDHNTKITQLHTEEKNIFSMP

SEQ ID NO: 154370 - protein, 176 aa, Heterodera glycines
MAIFPTNALAVFTLLFFAYNIQIGFIHGEGWGEHIKFIFSQFHHGGGGHHHGSEEHQHDGGQQNGPTNGGGKNKTVAEKFKTSKLVPDILPLPPPKFLYVEYPKDVKHNGAFWLVANVPGNDMLWGDQATGGYFASFVLDSMSPTLPIKNNLDNLLLAISLPQHTKTRTSDIDEGH

SEQ ID NO: 154371 - protein, 316 aa, Heterodera glycines
MLIAFVRNDRQMQISEYSKQKYEAHLGIVYFMRKNWQCDKIANEFEEHERAECQKYRKYLDILYEYLFREYAGIPTVRPKFVFKYGIEIEGPIIYAMNCLVRISRFYFIPWPNFGEYKLNEFFGVQFEPKLLNEEKLNYGVKFENQPKMPINEIILQLAIDTANEWEINESLDGIIQPKMNKKFEENLEEMFSAWKIYEINDDKHKIIVDSKFDDKWAWSEDALVSEFVKGLTTKFENFFKMVKEYANFGIFEIEKLHEHMTHKYEAFLGLVYLMRENWQCAEIGEELKEYEREECQKYRKYLDILYEYLFRLYAE

SEQ ID NO: 154372 - protein, 68 aa, Heterodera glycines
MFLPTILWAHIQSQIGKKVDRTRNGKKKTLFPLDFLYPCVKYHSFPRTSGKRDICNFHGVMPKSKDVL

SEQ ID NO: 154373 - protein, 78 aa, Heterodera glycines
MIDQSEGMIKIYFECLARSEKYGRGGRRTADRGRWGYGRIGRGNGNNAKEWAQEERLSQRHRYSTSLSIGFTVPPYCI

SEQ ID NO: 154374 - protein, 81 aa, Heterodera glycines
TGRSGTNCATTGARTAPFATAETTTAHFCWTRRTKRRRTTNRRSGTDGRSEGRKCHHSMRNAILLSLGRRKKKFAKYGHRK

SEQ ID NO: 154375 - protein, 210 aa, Heterodera glycines
YECSEEIITISAMLSVNAAVFYRPKAMVIHADTARKGFWSSSGDHLTLLNVYNKWRETNFSMQWCIENFVQHRTMKRARDIRDQLEGLLERVEIEPKSSSDTMAILKTITAGYFHNLATLDKGGQYKTVKHRHTVQVHPNSCLFEDRLRWVIYYELVFTSKEFMREIIECDPKWISEVAPHYYQQTQLEDSVNKKMPKQMGKAKSELVGS

SEQ ID NO: 154376 - protein, 221 aa, Heterodera glycines
VDLSVRPNRFMQFGGIQFKCFNPSEVPKISVLEVTQTNTFDEAGFPVRGGLYDPLLGTSENNHEAGFPVRGGLYDPLLGTSENNHCETCGMQGTHCPGHFGHIRLTVPVFNPLFYSFTLNMMKGTCIHCHMMKGTCIHCHRFTCNSNSVAAKVVIAKLRAFRFGVPEVLDRVESGLKAKFEKRDELLTERIDLIGESVFLREINAFIAELKGVSNADQLQK

SEQ ID NO: 154377 - protein, 232 aa, Heterodera glycines
MLNAANVPTVTMTVNISKGVLNLDRLYTSEASLWVNWGGVRPLTTPLCGYNGTQCGQNATVYILIGSAVILMLLIVAMLGIGYALREKMREKERLMRECLIPFGELRNLKELQSTEELKKETEKSMRSMQSSHSGSDRHSPIIHRCPRPFVLRKLSDQRPMASENQRLWTEHDQRESADAEEKPFVDGARTFARKQSDGHKRGRCVQFCNYLCGDGEQRDGLEWDGEGRRRG

SEQ ID NO: 154378 - protein, 202 aa, Heterodera glycines
MLFCMVLLFLGPFYIAKLQQQRNIRRFVAELEQRLVESEAEIAALCSEKRELAKRVGHMANKLDTERVQNASAMESVRRDRQLLVEENERERALHAVMRDKFDELKRKFDTIAKTVLDKQSELEQMTKMNTELSQQLHEQAEALERHRTELETATKMVAERDTELKGSECELAKCREENTKLDELRQQMVHLLEEFGANLGK

SEQ ID NO: 154379 - protein, 54 aa, Heterodera glycines
ELLVLFDSSMCLLLICKISKIFVKFQKSYGQNELKNPVIRTFFALIFLCINKNF

SEQ ID NO: 154380 - protein, 65 aa, Heterodera glycines
MVAVVAMVAVVAVLVVVAVLVEVVTVQVVHGPTLKRTMSALEVAALTLGAVPSVEAGRPLGTIMV

SEQ ID NO: 154381 - protein, 41 aa, Heterodera glycines
MTILEKMLMDTSIVVAMFVLAIVVLSLVLGVMKIVAHQKTN

SEQ ID NO: 154382 - protein, 430 aa, Heterodera glycines
PHFLLSRIQSLVTPRNFQCEVRGMMDTEHLLERCTVLLNVTETLLEDIVMKSEWVVQLFELHSLKNGRKSRFITGQQRTIHQQLKSFSRPSHRPPHFPWLLSCSIEHISRARVSFARLAIPTNFGVGLTNVRFVVLVVAPLQIKETKSAAEIARTFASLLADPLLYHELATTATERQFVAKIRLRAYELTNEKMLKMRSKGKRYSINYEKKTFRKTAQNWYPGRGLIGDFRRRLPFYKSDFLDGIADTRAFQKTISSAAFLYFIVLPMAIALGMLNEEHTHGKITVSKAILGQWIGGLVFGLFVSKAILGQWIGGLVFGLFGGQLFLVLLTSPPISLYITVSHSHSLGCDFFQLYAGIGTWCCFYLVLFAFFEVSNVMKHAKRSLEEMFSMSLEEMFSMFIACTLAIESAKNAFASLGRAFLPHCPPNGH

SEQ ID NO: 154383 - protein, 125 aa, Heterodera glycines
MFSCLKYCLCCIIVFLLLALLAEETHIRKENNQPKNGSKYHHEQFTKEASRGKTVQPQFKKDEVFNNATEQQQNEEDEQYSNTTVQQRNLNLEYNNSLGDGQIDNFSIIHSYDMYEFDLVIVDAD

SEQ ID NO: 154384 - protein, 389 aa, Heterodera glycines
CVSRLRTDPTNGLSSAEASRRLGFSGFNEFELNEKVSLFGKYLEQFKNPLICLLLASAIVSVFKNPLICLLLASAIVSVLVKQFDDALSIAVAVLIVVTVGFVQEVVTVGFVQEYRSEKTLEKLNRLVPPTAHCIRDGRSIRDGRSVTFYARELVPGDLVLLNAGDRVPADVRVIESVQLQLDESSFTGSVQLQLDESSFTGENEARQKVAAALPENAAKGGSIEHMDNIGGSIEHMDNIAFMGTLVCAGWGKGIVIGTGPNSKGIVIGTGPNSKFGEVFMMMQSEESPKTPLQNSMDQLGKQLSLYSFGVIGLIFLLGLSMDQLGKQLSLYSFGVIGLIFLLGLIQGRDMLEMFTIGVDMLEMFTIGVSLAVAAIPEGSLAVAAIPEG

SEQ ID NO: 154385 - protein, 206 aa, Heterodera glycines
MYFHFKPIIPQKSLEIKFVVGFCLFFEEMANTFKIYEFQSFFGRQNEKPKRKEQKMDEGTTENNNNRKSGAKKRKQKQKQQSVVAEVTEPHNKQSETEEAEKEKSKNGDSEKDGKKVNEASKPIPCQSISHQKDSTVNNTKINNRCCAFFGFTGGTGFLRSLFRTGLGEGAHLLVGQNSKARGAAGSNGTTMIPAMDIQEASLARC

SEQ ID NO: 154386 - protein, 109 aa, Heterodera glycines
MGILYGSHKKRESFSPQPHGHLPITRPPAPSAPNPMAFPITSPPAPWDLPITRPPAPSSPNPMAFPITSPPTPWDLPITSPPAPWDLPITRPPAPSSPNPMGTCPSPDP

SEQ ID NO: 154387 - protein, 15 aa, Heterodera glycines
MPMRLGADGARGLVM

SEQ ID NO: 154388 - protein, 152 aa, Heterodera glycines
MSFQNTPKEVRRARNTRHFFKATPDKGKCLEKIESHVNERAKFGIREHVTSFYFKCPPNEDAENNFRIIIDKLIHEAKEKEPAQGWKTERISLNLYCAALSDPVMIPVRPLHQVTSDVVLNEFMHRQQSFGDVNLMDERISVIVTTFAYPLK

SEQ ID NO: 154389 - protein, 114 aa, Heterodera glycines
MTREYSDSEILEYVSAGPKQYALKLRRKKDGEIWEKTKIRGFTLNRSNKMRYEEFKEMVLGYQEGVKKVFRYPEKIGPTRDSRILSRDVKKEYGPVQRKGIVDENFNVLPFGYY

SEQ ID NO: 154390 - protein, 160 aa, Heterodera glycines
NSGQKWVPRALLVDLEPRVLSDICNHEANSYSELFDMDNFYQGPTGGAGNNWARGYYPGGHIVDDIMELMEAESERADHLEGFAMCHSILGGGTGQSQRAQQKSADRYSPPFSFRFMLFPPSSTTVAVVHPPFYQSLSLTCDELSAICALCIPQLSSKIV

SEQ ID NO: 154391 - protein, 214 aa, Heterodera glycines
RTLMTIVTEYKVHRSLKARRMLFESQSRRRSVVALEELFESQSRRRSVVALEELREKVSRTVAIFIAIKFLIFRSLPIFFDIYESFYGIESFGIILSIRSLPIFFDIYESFYGIESFGIILSILVRLSDFGVVLNSATNSLAYFGKTEFFANRLRVKLLREKQRRKWSALIKHYNSNFSLVFLQAVSACLVACPSPIIERSSSKSSKGTYVPCP

SEQ ID NO: 154392 - protein, 261 aa, Heterodera glycines
MAEHSEDKLDETERIFEIARVMWKAIKKHDKNAVGIVPRLRFIGLVLWHLAVRQSPLIDQQQQHNGAPLLVFTAKMRPNIDPHDPTEWQTMLWHFDQNLANAAMDAEDGQREANEGGIEDGKGEGEEEEEQNDGEEIKLLRELGEKVGQGRAQFGDRERHAELGKKFSLLKKSTSNDGAAHGMVNFCVIYRPFLVFGSQSVDILLFIRGLLEGHFNAKTMDEYLENGKQIETNSYLLTTHLSLRMMTIQLLTVGKHFGYKF

SEQ ID NO: 154393 - protein, 178 aa, Heterodera glycines
MNSSFLFVIMLVLRICGEQNVANRRYITAVHEGAHVLALWRSRYGDKVESVTVERTATTFGRTMFWAKRWYTPDQLFSRLIASIAGEEAEIMFFNQGPPPEGLKTDQTEMDDVALTWIHHFYENSHDVAPFVVPVRYRTTAQGRLMMAQLIAKARRTFREAFGTEESRQCLRMVNFNN

SEQ ID NO: 154394 - protein, 399 aa, Heterodera glycines
MTFISIIVLALINKINCAAEVAIIQATSEDCIRKTNGSICRIKGTAEMTILPAGQKISLALKNQYSQTIGLLKIKLNSLTLNCVQETVAWLRDYGIKVKSARRCPTMGTCKKGKCANIRTSKNIEELKEYWDYPGNSYCMEGERVWGSKCALPSFGINECFFYKIIAIPITPTVWKQVRCLNWDYEIKAEIELKSENKSVKKELTLYPGITEEWNEFSFTPQGVTPPISPLLSDYFFISQKDIIYAGKEVKTKLICKNQINASNFECDLQKDVCRECWINSTKEEPLIQCECEDYLIEDLEPKLPFTNDKLNLRSDGSKILSETSYTPIQLLVRVENLKIVAEIDGNICKAKQIGQLSGCYECQTGGVLNYTCWTNWGESIAEIRCPGGLIFLAKCKKE

SEQ ID NO: 154395 - protein, 301 aa, Heterodera glycines
MENGKNNCDISEMVMSTGLPNGFQLDGLNWAQVHQCIPPPSLFYPNPKIMRTAIVQPQLLAQQPQPLAQQPQPLTQQPQPLTQQPQPLTQQPQQLPQQQSQQLPQQPQQLPQQQSQQLPQQPHQLQLQPQQSVQQPQQLVQQPQQLVQQPQQLPQQEVPQLLQRVLYSVQPPLPSQQRHHRPLFGRENRFTSRRIGPNRSHPYTIRLPATAQQPFREAQEVQPSLINWPWDTPPNLNVPFEIRRVLLRRLAQEREHAFGLAGAVHQWNPPMAILLLALESFYSSLLAMAVNEDGGSVSAQH

SEQ ID NO: 154396 - protein, 144 aa, Heterodera glycines
MGNEHSNRSKGHPSSSSSKKDSPATRLQKALPSALKFGSNDLSSSALRRLLEQSKKSRSLQLKGAGIKRVPSGIVEEVHSLLRILELSSNKLRELPSTIGTFSMLKQLYIANNRLTNLPDEIGCLKTLELLDVSGLPFFCFPIE

SEQ ID NO: 154397 - protein, 127 aa, Heterodera glycines
FAKDQTTNDDEGCQVISDEERAIVNNRVFFVDGPKQMWYQSAVSRSAQSPLLPSASSSSLSSLQQASTDSTQGTFATSGQQQHGTLANKSNTMLAMEMIQKSSIIFYPTNSNYGNQLLPGFPRFLAD

SEQ ID NO: 154398 - protein, 86 aa, Heterodera glycines
MFTNSLYVGGSSEAIFAENGTDKGQKRHGAGKEAERKYCRQMPKIGFFRIGPNVMKGTSDSFSYLNGHFSFGHKPKKYDVPSPSMA

SEQ ID NO: 154399 - protein, 48 aa, Heterodera glycines
MPYQISMTEKERIGAYFLAKDKEEYKQCEDAQKLSKNNFYSLIAVANE

SEQ ID NO: 154400 - protein, 47 aa, Heterodera glycines
KFTILEFCHYFFTISTFFGKFFNKNAIKPKNTPLRIYKKKSKSTPKK

SEQ ID NO: 154401 - protein, 89 aa, Heterodera glycines
MTTTVLITILLITVIGIHFCLANHSQSEDYEHLRQFFKQLNGHGPSSNSSSANSDAYVNNSVVPNVILWCILLFALVALVIIVRLFDQI

SEQ ID NO: 154402 - protein, 33 aa, Heterodera glycines
MKAKFWVWLIDQFQIDKKRSNGESENAFDVVIN

SEQ ID NO: 154403 - protein, 76 aa, Heterodera glycines
MNGDLIGYLNEMESMESPQVRKSKSSPTIAEVNGGKAVEKTQQTQQGKGALNKLNHGHGRQRNSNSEKGPSPSGQN

SEQ ID NO: 154404 - protein, 38 aa, Heterodera glycines
MVSDATDGEQQQQKRKKKRKRGSPSVHLLFSVALNKQP

SEQ ID NO: 154405 - protein, 376 aa, Heterodera glycines
GDYTDFYSSIYHATNVGTMFRGKDNALMENWKWLPVAYKWLPVAYHGRASSIVVSGTAVNRPWGQVKAEDGSFPNFVTSRLMDFELEMPNFVTSRLMDFELEMAFFVGGPENALGTPIPIEKTEEHIFGMVLMNDWSARDIQKWEYVPLRDIQKWEYVPLGPFLGKSFATTISPWVVTMEALRPFVVDNPSQNPSPFAHLNHSDPYSFNIDLTVEIKPEGSDRSVPEGSDRSVPICRTNFRHLYWTLKQQLAHHTSNGCNHLYWTLKQQLAHHTSNGCNVRVGDLMGSGTLSGPTPDSFGCLLETPDSFGCLLELSWKGTNAVKLGESGETRKFLKDGDEVIISGVAPTGEIRIGPTGEIRIGFGECRGKLLPAIK

SEQ ID NO: 154406 - protein, 54 aa, Heterodera glycines
MNACLFCLIPTVAKLVEERGGLAVSSEWVIQAIVTGSLPDLGEPGGEKFRYDFV

SEQ ID NO: 154407 - protein, 113 aa, Heterodera glycines
APQPDTDAEKPQPSEEGPSTSEATAQDNDGQPSSTPTPVTPLEMDVPSVEMMGIGVSFPSTPAYEDQQIQPMPSTSTARCDVVATPSTSKGDGGFGLDDGWPLLSSRHTREDR

SEQ ID NO: 154408 - protein, 382 aa, Heterodera glycines
SPGLSFYDSITVNHSPAFITGTQPSSISITGTQPSSISITGTQPSSISITGTQPSSIPVTGTQHTSISITGTQFSRTSITGTQHTSISITGTQFSRTSITGTQFLCISITGTQDTSISITGTQFSRTSITGTLFSCVSITRIQFLCIPITGTHSPAFQSLGLNPTSIPITGTQFSIIPIPGTQSTSIPVTGTLFSCIPITGTQLSDIPVTGTQFSSIPITGTQLTIIPIAGTTSPDSSVSQSSRLNSAAFQSLGLNSLAFQSQGLKSPGLITGTLFSCVSITRTQFLCIPIAVTHSPAFQSLGLNSLAFQSLGPTGPSASIIETQFCDIPITGTQFCDIPITGTQLTSIPITGTQFSIIPIPGTQSPSIPITGTQSLCGEFL

SEQ ID NO: 154409 - protein, 114 aa, Heterodera glycines
MCSTGQYTNSECHNTQSTVPDSKLNPQNSDNDKQVSLTNPYKGISPSPPALDTPAHRPNRTGLSLEPTSEFKVQRLGLLTPLRPAIIAWLIARIIPFTCGEPLAPTTTPIFIHV

SEQ ID NO: 154410 - protein, 49 aa, Heterodera glycines
MFQAWNETWVGSALGFLKPEIHGITDDLKTVRYPGDEKFPTYLVDLKKS

SEQ ID NO: 154411 - protein, 83 aa, Heterodera glycines
MISQPLLLLVGAVLHHIVRTTGDSGSGLMKNNNNIWVQVGVSSQTTCYPTDPTRTEGLTGQFAPIDCAWIEKATNGEVKCKNN

SEQ ID NO: 154412 - protein, 195 aa, Heterodera glycines
MLANLSLPMVLLAFYSINSKLLIVSCQQSSNFSECGISDFEPQLANVSKMAIGTNHVYKGQEVGDDKALPWIVRLIFGKSYCSGTIIGPRHILTALHCTEHNVAENQIVIAYGSANLKQQQQLTGVAAVKLHPKGTDAQRNQINDAKADKNVIIKAQRVQPNPYDMAIIELKNPLAFTANARPIWFMEIWLPNKF

SEQ ID NO: 154413 - protein, 56 aa, Heterodera glycines
MISPEILRQNNIVALERQKGVNGDEAKAQEQWNELTVERHKTYYLQIILLYDGYSS

SEQ ID NO: 154414 - protein, 170 aa, Heterodera glycines
MLFKKSSIFDERSSALFASVSQVLACLHPFDSFIFSPILRWFEQCVVGQFFGQIHSDLLKMLINFLEMIQFRGGHKTGKLMADGLFCHVHSELESIKNDTHFANSSNYFLRFKSLNQKFLLKKFKYVKKLNYPGNGRCRFLPMVITDYLLSHWDLSTVIGHPSPIVLFPT

SEQ ID NO: 154415 - protein, 156 aa, Heterodera glycines
MAQQFDKKHGAKRVEFNIGDKVQFVNYRDGKTLWLFGEVVTKKGLIFGIRSPQIANRIVTRHANAMRLTQALGTDQTWPNFDEEPKKNKSPVRAPQIQRNVTPTPPAERTHDQFEQNEEQEQNQQQTPVLRRSERVPKRVRFLSPSMTGQRHNIRQ

SEQ ID NO: 154416 - protein, 46 aa, Heterodera glycines
RAVREVIFTGNRETRPRNDPGKRYENRDPKNPRNFSTRESRTEKSK

SEQ ID NO: 154417 - protein, 59 aa, Heterodera glycines
MDDEEMGTNPNDQMSEYYNENNTKSDQNKKAEPNDQQKREIIQKFEAIKEKLKQKGKYQ

SEQ ID NO: 154418 - protein, 90 aa, Heterodera glycines
MRGKRTHRMYLPFLIVFGIGLVFMIFYGGADIFVKMNENEIGSYFFSWFLTLALNVWLYSIVLRAYFFMKRQNQNMNGAERNQKFENIAL

SEQ ID NO: 154419 - protein, 265 aa, Heterodera glycines
MIRDYQSQLIYRPLSLEDEVMDNRICVCVRKRPLGKRELASREVEVITVPNRDHVIVHQDCSNGIYAMTAHDVFAMLHSPEYANQKLTLSCSFFEIYGSKVLKLIKLGSDQRTAGQTSANSNSSRSHAVFQIILRKWEKERDNLYGKISLIDLAGNERGADTISSDRQTRLEGAEINKSLLALKECIRAMGQDEGQHIPFRGSKLTLILRDSFIGQNAKTCMVRRNAQKLGIGLSFIYILQQIAMVSPGISSVENSMNTLRYADR

SEQ ID NO: 154420 - protein, 101 aa, Heterodera glycines
AWTSLVAAFSQQTLHCAKVGGENAAESPRGAAGRRLREAHSTASCVRFACTRSQLALLLPSPRSLYVSLRPFEFATHFHRFFHFRRASRISLSDSEDTKTV

SEQ ID NO: 154421 - protein, 235 aa, Heterodera glycines
MWTVLEKYFRSLRDRDCPKFLRQIFDDELTPRSEEWKVVVCVMCFAFDQFNQLNVISQQFYEDAYAYLCKWSRQFSEMDEVIGDWVIFESEPTSEKVRKAYRHFCGASTADEMNDLFAEIAELKQTLKELEGERFNRKNVDEKWPAIFKNPNFVLLKSLVSAILSIFPSNAFCESVFSVLKNIKTDERNSIGIPLLNSLISIKFNSKISCLNVHNYFLSLPNLLKQVKSGDKYVV

SEQ ID NO: 154422 - protein, 370 aa, Heterodera glycines
MGKRHQCPYSSLFTRHEFKTAGGLGNKINEAFTHHYKIKKQRGKREAKAEDTKDSKIDVAKRAAERAGRDVERHLNHINNVSSSIQTKLSTLREVNPQILEEPDIKVWFDKMVEKGTEIQTYRNELKSFQEEVDKAKNTTLEHVEKNDLKEAKKSADVAKGIAKQAKSKYSSTLEEYNDKSEKGYIGIVNRLNEALGEHIKRKDIENRQVSEAEKGPQKRERLANEDVQFQYDSIDQKFIVYLSAAVSHIDLSKHLAYVLGFKNTRLFHAEEANYMPDLTGGVRQLYIYAPNLIENTIIGNQMAPLLRIVNVVNDPGSISEVIYSTEYFHRLQSKRISEITIEIHTPFGEFVKFHWGSCILTLHFKKSIF

SEQ ID NO: 154423 - protein, 20 aa, Heterodera glycines
MKDLEKLLFLVANKTSVTNP

SEQ ID NO: 154424 - protein, 209 aa, Heterodera glycines
FCEWLLDAAISDFNPRIKKRIEPETYFCQPFVAQHFERWVVNHPETFFTRADRARMVHDLLIRARYDRGESINKLRFGIDKLLRNRTYTAAFPLHENIKKRNASILNGNDRQLLYESWVKMKNVFKYQPLDLIRTYFGTKIGFYFAWLGYYTRCLWPVSVLGILFVLYGLFTIPSDTPRQVLAGSVVLQKIRVLSRLKILPYRDLDPGF

SEQ ID NO: 154425 - protein, 31 aa, Heterodera glycines
LRLRCLPPINFAFKKILNNHDGKKRILKNIN

SEQ ID NO: 154426 - protein, 92 aa, Heterodera glycines
FYSKLALKLTEWECPRTQSEFDNSYTFKVFLFQFVNFYSSLFYIAFIKGKFTSPSHVNRGINADRTELRFGYIRKLLLNIIIQIFMFRKSVF

SEQ ID NO: 154427 - protein, 99 aa, Heterodera glycines
MSSDNEIFICSDCGLLVFDFLAPSQLGLEIALISRRFDCIVNEHFKTRKWKLGKMQICHEIGENGTKQMQIVNSDGNPLPIPQNPLPNKVIGFRRIHIM

SEQ ID NO: 154428 - protein, 15 aa, Heterodera glycines
MRKNGQNVSQNFGKS

SEQ ID NO: 154429 - protein, 111 aa, Heterodera glycines
GGSTIERGGPDVWNTSIEPFELVNDRTKEKLTFEKMPRYGAADEDGCEFTERLLLKRCPISEKATAVQWENWDANLNKVTIFLWADINKSIGPLSPPTEEENEEADESNEK

SEQ ID NO: 154430 - protein, 100 aa, Heterodera glycines
MANQNAFINSFTFHFSRLSWAMEAPSSVAVDDASFDYSAGGDELANKSTPRRRRGYIPYSTIYERQKGGYWVPGLQVEATIVHVERDVSSSYHILNPFMC

SEQ ID NO: 154431 - protein, 149 aa, Heterodera glycines
PPPTTVVRVNQTVPGLGAAVRPDLLAVDEQNKTALIIDVAMPFENRYQAFERCRQGKRQKYEDLAEHYRAIGFDVLLEAFIVGPLGGWDPHNEFVLNKMKIGQHYRQLMRRLMVSDAIRWSRDIYVEHLTGVAQFRDDDVEGVRGEAPN

SEQ ID NO: 154432 - protein, 21 aa, Heterodera glycines
MGHENGRGGVGGRLAECFAAL

SEQ ID NO: 154433 - protein, 130 aa, Heterodera glycines
MPKLSFSNWRFPSDVLTEKELLGVYQFNSHPFLYLRGVPGLYSLDFPSHGRISDWNKAKSNRRRTLALEIEKVSEFAGESVGRSRFSDAVEINGFEWKIEAEITKGIDEKKYLGFYLLCDAKEGPILIMF

SEQ ID NO: 154434 - protein, 50 aa, Heterodera glycines
MFWRLNCLAAILFALCCTSSTFWLGSDTTDEQNKAPHVDHHTLTETQQYE

SEQ ID NO: 154435 - protein, 94 aa, Heterodera glycines
MTDRQQKAMAAFRVQKQLERHQALTEENVHVGLMFGSKALVQLLANPLIGPLTNKLRNHVSVHAAVRLWHFLLHSLARPFFARRRFRLYQHFRN

SEQ ID NO: 154436 - protein, 37 aa, Heterodera glycines
MAAWLDAFVQKYRSNRRVLLCIVYVALFLDNMLLTTV

SEQ ID NO: 154437 - protein, 132 aa, Heterodera glycines
MEVEQDKPPKPSQKEQLNSDASEFAASLSAATTGLDLGQTAVPKEQPNKADASGFFSAVSAATMGISSEQQQQTTTKKEKEQTDHEILDEFLESVSAATTNMDVSQKRKPKKKVKKDMEDEEMTAIASITRK

SEQ ID NO: 154438 - protein, 181 aa, Heterodera glycines
MSINLHDKKSLMDNILPVVEINQTNNGITVSSERIAIPRTVQFDILGKCRECKATECETEWCVSKEGVTIWCTRFKISPRFVPFDVIYDLPGYTFFKIRNKGRVFNVDHGFRSNACTQTPTPVYHLPPPPPPPQLPKRKQESHQDAEQRVAHQFFDSVSAATTGLDIARHQTRQGDGKEFF

SEQ ID NO: 154439 - protein, 58 aa, Heterodera glycines
MARQSTILPIYKRQSRRQQQHFHFDNVLVFDGGSRRQFQLSWFCIALIVILFVAWFIW

SEQ ID NO: 154440 - protein, 23 aa, Heterodera glycines
MLLIIVRKENYFNWVSIIFLEEL

SEQ ID NO: 154441 - protein, 51 aa, Heterodera glycines
MEAVHNETPSGMPTHKRTIKVNKILFDYCLTNKSRTRFTMRINHKRINFLN

SEQ ID NO: 154442 - protein, 386 aa, Heterodera glycines
MSINLHDKKSLMDNILPVVEINQTNNGITVSSERIAIPRTVQFDILGKCRECKSTECETEWCVSKEGVTIWCTRFKISPRFVPFDVIYDLPGYTFFKIRNKGRVFNVDHGFRSNACTQTPTPVYHLPPPPPPPQLPKRKQESHQDAEQRVSHQFFNSVSAATTGLVIASHQTRQGDGKEFFGAVSAATMGMDIEQKNEKPKLRQQRADASDFFSPISAATMGMTAEYLKPKPKPRQQPVDASNFFSPISAATMGMEVEQDKPPKPSQKEQLNSDASEFAASLSAATTGLDLGQTAVPKEQPNKADASGFFSAVSAATMGISSEQQQQTTTKKEKEQTDHEILDEFLESVSAATTNMDVSQKRKPKKKVKKDMEDEEMTAIASITRK

SEQ ID NO: 154443 - protein, 254 aa, Heterodera glycines
AIGRALSLALSLRDAMAGSVKLDFGPNIAVIGSGPSGLYVCARLLQRSRCRIDVFDKAQAPYGLIFYGVAPDHFDMKKSMNNFERMFNDYGVAPDHFDMKKSMNNFERMFNDNRDRIELFCNVDIGRDFSYGELCDSYEAVVLAYGANRARRMSIPNENAANCLSGSAFVSWWEIKKGTSKHSTCGQSVVIIGNGNVAIDCARILLSDPDVRLAGTDITEKALRALRQSRVRRVRVLGRRGPQNFVLNQARVKG

SEQ ID NO: 154444 - protein, 257 aa, Heterodera glycines
STKQPKNDDANYAVESQKQKVRASSSIEISDSSSSGVQNSDEKRYLKQYLFLNFVTKRLKIINQIVKKKVWSERMFLQVAHEINEIFSHSHYFHSGFTGSGTCVLSSGDWFGGKIVGMVEIMVEQYRVAFYTTHLHAEYNPENGLCNIQNEAAVVQISLRLLLNYDFLMSQFIRHTSRGCGRRLHGQRLDYVMYRSGKTELNLVECVNCFNKIPGSELNFSDHIGVSATFSFVKGLTIEMKALKETKNSIKKLLRSL

SEQ ID NO: 154445 - protein, 106 aa, Heterodera glycines
MQRNFLSALFLLLFVLLYVHQTLAGGCASSISLNKIKKKKKQQSSTAEEEETVHTPRNRANAEHGNVSDIGTGPAGNVGMASTSADTRLNEEESPLRKTGKISKDR

SEQ ID NO: 154446 - protein, 73 aa, Heterodera glycines
MEAAARAKLGTKKPAMMARKTTTTMAVMTRKPMGMKRLTLKKNHSQQQQQTAMVAVVVAQQCCPALALPCWTE

SEQ ID NO: 154447 - protein, 43 aa, Heterodera glycines
VWPVCFVTTAIRSAKCRSTRFCFHQRSAQCHVPDWPSWTCANG

SEQ ID NO: 154448 - protein, 28 aa, Heterodera glycines
MANPKSISQNHIMPFHDYLFSEAEKTRS

SEQ ID NO: 154449 - protein, 35 aa, Heterodera glycines
TLFLLFCLRSLSSSRSNYAISLKGISIRTARIIQI

SEQ ID NO: 154450 - protein, 104 aa, Heterodera glycines
SAVHTVENPPMPFRWPIEYGMQTGAELIMTGATYNGQQKQFVVNLNGRGDDVVLHVNPRFKFLEDTIVLNNRSYAGWQKEERHRNKWHIGEEFDLRKIMGHPDF

SEQ ID NO: 154451 - protein, 189 aa, Heterodera glycines
MNSTPTNVTAARRTKRQAGYEAGGGSGAATNVAVDAYGTSCDSCCLPGPQGPPGAPGRPGRPGKPGAPGLPEWQVVLCVYMIITLKPIKLSGNPGRPPMQACEPITPPPCKPCPQGPPGPQGPSGPPGDPGTPGMPGSPGRDAQPGEPGPKGPPGPPGEPGLPGPPGDPGVPAFSEPLLPGEPGPPGDP

SEQ ID NO: 154452 - protein, 43 aa, Heterodera glycines
MFSDYFSLSAQFKELLFDSWLIVYFFSMFGLCVQFVYRFLVLN

SEQ ID NO: 154453 - protein, 72 aa, Heterodera glycines
MKEMLINVTCNLFAKSTVHKKAFMKLRFGFFELKNRNSESDGSKPEPKIISFNDLDNKLTDFLQIWILRKIN

SEQ ID NO: 154454 - protein, 76 aa, Heterodera glycines
MRIFCILILIIFTCFSNQSIFFLNLSPPSPQHFFLSILAVFETAALFTPVALMPTAGDKADEDEAPLLAADRMAEE

SEQ ID NO: 154455 - protein, 243 aa, Heterodera glycines
MIKIRGWSVSSLLDDHSSAIRSAANSGASSSSALSPAVGINATGVKSAAVSKTAKIDRKKCCGDGGDKFRKKMDWLEKQRATHQFLLAKMVSMNIVSPTAAGPKLPKHKPKLGKFIYLLAFIAVIGGFLFGYDTGIVSAAMLYVPKNSDLKPMSNAWIGLIVSITPGMAGVGALLAGKASDIFGRRKMIILSTIIFTFGAIVCAIGVSKWILLAGRIFLGIAIGFASMIVPIYVSESSPAHIR

SEQ ID NO: 154456 - protein, 42 aa, Heterodera glycines
MQIWYHCKAHKKCYPMSMKVNAILKLVCSDGFYRPYEKDLSH

SEQ ID NO: 154457 - protein, 17 aa, Heterodera glycines
MAKTGGNEVHPLEMAGL

SEQ ID NO: 154458 - protein, 58 aa, Heterodera glycines
MTIAETRKMPGFRPGWPKSLGSRLGMRKSRDLDLDGKIPRVVDWRKVIYALINILSLL

SEQ ID NO: 154459 - protein, 101 aa, Heterodera glycines
MPIYSILAALCNGIDYNPQNQQQHNWTYEGSQSPSPVGPFADGSTDFSLFANMSQPWHSQSDSQTEPPKPTDSYAEVAAKPPTVANTRYNSIIYMDMRFTR

SEQ ID NO: 154460 - protein, 134 aa, Heterodera glycines
MPLASVEPKKKSPTVGDEDEKAATDNLQKSQICHFWEAHKSGKSRTKCQNGANCKFAHGEKELKKIVPPYFKNHLCKVSAPFGIINNVRVQHWSSGKCLNGEGCHFAHGPEQLRKVGLTKGYHVFYATYVKIYM

SEQ ID NO: 154461 - protein, 759 aa, Heterodera glycines
MGHTMKRLTENLWTTERPSKVEYAWIGERCETTVNDFIEKGQGGILDFYLVTSFGHNFNPYNGWEEGQKWTFIWEIPEPSEAYWATHFPVGDFVAEVTENAIVLESEQSVFYFEKEKGDEREGIVGVPDEAYKMSNDVFILIHTPSPQKAREKRETKQKSEPQRKERPAKQEVFLKIRPGQNSKFENLDPASRPKSNWTRTTLSPKRNTTELIILSTPVPQSTSTVGSTTKVTMAIPTKIITSTVPTTIRPKTEVKKPIFEKIQIKNEQKTQSVYKAVGKKVEQLVATTTKAPFTTTKKSKIENTLKKATPKPKIVGLKSTTQKVLSTVRPSTNKVVNELFPKSVTTPSTILAVKSANNSKNFSKHVLGKKPEVELKKATTASLFPKTIKHTEPTMNVTEIPALMTPIPPTTQKIVEKVELPKEKVENKSDSIKAEKKNEKLLIPSTAITVVKKIEDEKVREVSEKTVKNKKSEEEYSQEVEAEVIESLANDGNEMEEFENSFEDESDEEVSVELSDEIEIFDMDRRKRTTVTTPDARWIKKVEKSKVRNKAGQENKNLNTRVNYALYRLNEEKRRQYDHIYKQACENTKFQLQLAKAVLQINPNEGVRKIFNRDDLVARWKGDNLEVGFCAPVTPEKIFWDRKMGNDCYEWIPIFAENTTFFIRPGTRELSIIGKRMECTEMEKTNNMNNATQKEIVQRLTENLGNIKPKYRNIQNPLVLRAGALFESDSLRLEEAMREYRSKMNNLPLSIVESCSET

SEQ ID NO: 154462 - protein, 124 aa, Heterodera glycines
MKKQLYKLRNEQESKIISQGQNSVNKFIRNKLSKFFEIPTLIDNAGNMFSSNVQKCKILAEIFQKSFLRKSIVNGPQTQSTQNKIKLSDIELNAGIIWNILRRLPRRNSTSPDNVPYILLKNCA

SEQ ID NO: 154463 - protein, 100 aa, Heterodera glycines
MITEAIINSEQLKEKSTRAVIEKLPEAMDQQAVVEQFAEQCGVKDKLSPDIHRHPRTRPEGGNTKKLLKFISDQSDSENTIFCGDFNIPNILWDENKKRF

SEQ ID NO: 154464 - protein, 192 aa, Heterodera glycines
SYVCKGGGDFRSNYLFNDKIANIEKCDALLLVGTNPRYEAPVLNARIRKTYLYSDIEIGLIGANVDLTYDYTYLGPNSSVLDDLLNGKSSFSKKLENAKHPMIVKLENAKHPMIVVGAQAFQGENSSSLLQKLHQLAEKLRSTSQPKPKVLNLLHEFAGHVAAFDLGFRPFNELNSEVKRSIKLLYLLGSDE

SEQ ID NO: 154465 - protein, 87 aa, Heterodera glycines
IIFIQKIFFWVFGAVPLNRCAQIYGETESFGNSFPIVCTLILRWIFAPHNCLSTPNGHLKKSIYFCFRGSPPEPMRPDLWGDRILRE

SEQ ID NO: 154466 - protein, 48 aa, Heterodera glycines
MHFTAIVDAFSTNSQCWPSPDRSLQRRAVFRPEKMKIYTNCKDEAKGN

SEQ ID NO: 154467 - protein, 134 aa, Heterodera glycines
MERTFICLRPTNPSPVGRVIARFESNGLKLIAMKMINATRNQATEHYKEYRDRPFFNKLINYITSGPVVAMVWEGIDSVKKSLHLLESACFYNLRNMDECRDIVRHGSCNVQDAQRKINIWFSPNELRINSTSR

SEQ ID NO: 154468 - protein, 54 aa, Heterodera glycines
ELLVLFDSSMCLLLICKISKILVKFQKSYGQKELKNPVIRTFFALIFLCINKNF

SEQ ID NO: 154469 - protein, 240 aa, Heterodera glycines
MAELAAKNLMAAKGATESARRSNGGTNANDELESVFEKAHYPDVVQREELANKTQLAEDRIQAKNGKNVGKKHNYGRVSEKKKAKRIEPPKRYGLYGAMVRHQLPLPDTITKCVGNPDDPQESAAPWLLGMHKKSMEAAVQFDQIGDHQDIDEMGEELKAMVVGGVGTKCGAGALMEFSEDEKFPKEEQRNCSGQGHEKKRRPHGKYGGKGMPTANNDSTLETQLGGGDSRQYIFGISGQ

SEQ ID NO: 154470 - protein, 69 aa, Heterodera glycines
MALCVAIYDKHDALLYLRLKDRMSASPLEVQRFLHSSCDIVADKMNSPGNKATQQENFLGALLLSDRFR

SEQ ID NO: 154471 - protein, 81 aa, Heterodera glycines
MSKPGGIVRIKNVSDFVEPSQKCILPLRQNGEGQKAVVGKRLVGIHAKSVPSAATAKRVKVTLDDCLVCSGCVTTGEVEFF

SEQ ID NO: 154472 - protein, 67 aa, Heterodera glycines
LSDNTGTKFLLVIDAEEGTLKDHEIRLFFKNIHTKYCSAISNPFYSFGSTLQSSKIDAVVNELLASF

SEQ ID NO: 154473 - protein, 390 aa, Heterodera glycines
MGCMEMHFCRVDSHIECLYNGGAILRMCDECNGEQLCNAKEGAKLAHHSPSLAAFLRDRLQPVVGQQQWLQQQQAAHGIHQAAANAMQYQRVHPAPKAAAAVAAFFPPHAGSVQQLQPPAAGGSVLTQQPAAAHALSQAQAVQKQQHANGGAKGLQHPAHGSNILLHSASGSKHLRPRLRCFVGSEGQLQLVTCSQSELCTSSLCDTDGELTEVKFCGVPQFCTMTNDLCKRFNRGISLNCSQCDTDSCNGNSAFALASLVNHTFRDIMAAKINTLTALNGTKVSKKTEDDKKSNDTTPNETKMNARQKKKEEEEIKKKFEEIKKREEEELKKRKAEKERKAKEKEEAEKKEKEEKKEEKKNREKVKGNEKDKKEGEKRAEEPCRESVLQ

SEQ ID NO: 154474 - protein, 83 aa, Heterodera glycines
MPRFCLFGDSVNTASRMETSSSANKIHSSKETRNLLLENSNCGYIIESRGEMIIKQSWIGKDNKIHLKQFMLSPKTQNKAHEK

SEQ ID NO: 154475 - protein, 244 aa, Heterodera glycines
SRPTSLDQFTRKFKIQNALIINVLFNFSLVLVNAVYFKGNWAERFNAKYTKKKTFFVDQQNKKEVAQKNDWKDSSQSKLSLSLQLLGMPYKGGEVFMFVLLPKDRFGLAKLLANLDGKRLLELTKKRFIPPSFQVVLPKFKLESTLQLEQSLASMGMANAFSDSADFDGIAEGDSLKISDVVQKAFIEVNEQGTEATAATGIRLVPLINAKNSPARFIADRPFFAVVVNSDPLPFLAQFSMDNL

SEQ ID NO: 154476 - protein, 94 aa, Heterodera glycines
YPMASLRSHLKNHHQPKLKELEEKDKAAESLKNNEANPRQPTLKRIFATSSPVIKKIARAESATSSQLTIEKTFSQWTPDGEMTKKIDKAINDL

SEQ ID NO: 154477 - protein, 33 aa, Heterodera glycines
MITALAFVPIQHLTAAITALNDVVGQALEGILG

SEQ ID NO: 154478 - protein, 44 aa, Heterodera glycines
RQIALSLSHYDDSTVNDAQIAEAMGKAWQEQADAELARRLADQL

SEQ ID NO: 154479 - protein, 55 aa, Heterodera glycines
MEIKMAKNTGIDACPCFISSKQIGHSSFVAVLCFVGAVTTAFFNFFHIFGAVPAV

SEQ ID NO: 154480 - protein, 106 aa, Heterodera glycines
MAAIAAHKKPWRKLVATALHEGIHCGAVYLGGCSKRDNICRAMAKAYGKKVTPQFDALRKIVEKAFPFVKPHLDVYECKRKILNTIYKEIVYRGAPPATTAVVWWW

SEQ ID NO: 154481 - protein, 336 aa, Heterodera glycines
MPPPSLAPRRTSSRLSHTPSLFSTPVSSRPSFLPITSQCASRHSSHFGYGCGAKSARHLPEYYDSLKNEQISCPKCNALLLPSEAKGPTAFSKCCAKGRVSLMERFNDLQKRPSSIMALFNNNDTTNIRWHSHLTQHSMAYNDSLAFGCVRIQRDPKLQNSFRIVKCNNMIRYVLWDFNAPKDDLPQLHGQLFTIPPEHARLRLDEIAKEKHLDENLLNYLHAVLREHHPYRKIYLTAAQTFKALNEDEKVNFKMLVVDTNKKGEERCVKTNCQNDDQLCSQERQISEIHPGRINVETVAGSKLVAQFFLDSGANVPPSHEYDIILRGKHGTGQHI

SEQ ID NO: 154482 - protein, 308 aa, Heterodera glycines
YKCKELESETVPVWAPIFKSKLSEKHLVYLGRKLSLDSSQMGQVGLWFGNDRMANESELSHRLRILSTNSEFDKLKAVKTFMELFLMQNSHIGILVVRHPLTFSAEVMRENELFISVSNLLEANMNTSSNAVRWLEFYFIFGKTFSYFKQIYNDEVLKTKIQNLWEFFTKVLKKVQEEQQTLSVNEMTNSIFQILSQLENNFGTRKLGQKSEDLFKKYAQHLSAFYKENESFRKKFDRNKLGRENIKKIFQLIDQSQRIMPRKFWELFDNAKNEFHAKSSSYLACPSGSEIWEKPTNSSEDSSECNYN

SEQ ID NO: 154483 - protein, 281 aa, Heterodera glycines
MFPDDDGYESEDDEILLPPPPIPPQLGHPPPNVPAVRVQPMHVGQQRLPLRDLPQFEDHPQNVPVIRVQPMPQPLPLRDLPQIFHPPPNVPAIRVQPMQQPVAMRAVPQFFHPPPNAPEIGVGPIHDGQQPLPLRALPQFAQPPPTCAGRSGPTSSTTDTTERRAAICQPTTKCAGNSCPTDASTVAAERHAANSPSTAKCDFNLDQIVVAFSQSLGVSSGNSCSTNSTGIRRTAICPSAAKLTVSSTRKRSGNPTTATTAPAERCATIRPPTAKRTEIRC

SEQ ID NO: 154484 - protein, 104 aa, Heterodera glycines
MSSVSKFITNKGPFIAVGMGVVGMGYFGYYKFWRSSREIAMSYKQEDESDGYTVKRIEEAYKTLQEAKDCKSLLKKHFTADVKDKLKYKKTKLGASLFDVIRSG

SEQ ID NO: 154485 - protein, 490 aa, Heterodera glycines
SVASIDLDTFFEVDRICSWILSNKFQRTALQLPDELLEHSFHLVEAVERRVESAGTWEEQRGRLYVLADTSYRSCCLCCLDEIAAEHVACDSIVHFGDACLSARSSSIPALYIFCRLEKFVEQLEKFVEQFRIEFSEFGTEKQWDDCLLLCEAAYTHIQNSLGSAISRISLGSAISRILPPSVRLFNFEVSEPNSPSSSRRQVPVGFVIDQCSEKKRHCFLLFVGSTDSPLLPIWISFNLSFLFATLSSISDKSQSFSSTLTNRMLLRRLYLIERLRDARTVGLVVGAVALRGCREAVARVRKLCEMAGKKLYVMYIGKLNEAKLSNFGIDVEVLNEAKLSNFGIDVEVFVLLSCPFGIILDGTKFCRPILSVFEAEMALDPAQSNWLAEMRWTSDIERISMDKSKKEGKSKKEGTDEDVGLMSLTSGNIRRCYGPTNADEEKNNGIGPTTGGTSNTKQWQQLSDGVTERQCPCELKQGMDGIATRYANE

SEQ ID NO: 154486 - protein, 135 aa, Heterodera glycines
MRGLAVFISDIRNCKSKEAELKRINKELANIRSKFKGDKTLDGYQKKKYVCKLLFIFLLGHDIDFGHMEAGYLFISVLINLNSDLMKLIIQSIKNDLQSRNPVHVNLALQCIANIGSRDMCEAFAHDLPKLLTSG

SEQ ID NO: 154487 - protein, 82 aa, Heterodera glycines
MAQRLAKIVDDFLPEDIDRANGRLIISVTKQRVNIRNVMRGAQSLFPQSLERLGRLYRAGYYDAMLYLLRKGCFEREVGSEI

SEQ ID NO: 154488 - protein, 26 aa, Heterodera glycines
IQSLNYNIKRMILQLHWERKSDEIGK

SEQ ID NO: 154489 - protein, 36 aa, Heterodera glycines
MAHSTESTDWSAYERKQWAMKDKREEDNGNAGQLEG

SEQ ID NO: 154490 - protein, 26 aa, Heterodera glycines
MTQSELKILYSLRQQAYQANIAAEEI

SEQ ID NO: 154491 - protein, 90 aa, Heterodera glycines
MRQSINNLTNSQVSTNTPAQRGAMTSKGDSKTDKPKDKKEATSKGGSSSTKNAPNAMVTANAPAQGEGPSSEGGSTKKPITDKSNYMSQP

SEQ ID NO: 154492 - protein, 158 aa, Heterodera glycines
ISPVAITLLRDESNEHTLLPGERLDQTVRREVAEEVGIECWDVRPLDGSQTWPLPAGSLMVPFVATANMGDEIQASISELEYAKWFSRQEVAEALRRSEEDPLLIKLYRHLSESGKDPETRIQLRYIPPQGAIAHHIIKVELASTRVLIASKKSILLF

SEQ ID NO: 154493 - protein, 141 aa, Heterodera glycines
MKPKCHTNANEMAPNSKLANLWPSTDCVHRICPFLFLLLFALLLLQQHMHTEQLEQRLSRLEQRCKNVVELLEEPSDDVFTIENAQQLRRTLRSLYDDRRRQRDGGGTRHHQNRHHHHNQQQRTAAATTTACMCPHGNYGN

SEQ ID NO: 154494 - protein, 292 aa, Heterodera glycines
MSISRIASSHSSIEIAPKKSVEAIENQIIKRKSEINLENELDGQSATNSNISPNFKCPLNEYLAAVVDYNGFYFNVPAKTIAKLAMNLIFAVLSSQNWSAKQQQNSDQPIFDGILTFDHFSVIRQNEFEFGAEELAGNLKIEFNKMVEMVKDPRERTLPPEQRPKQQIIWLKDVLFMSPEQIKDKRSTTTGKDLVWFVGLLLYRMLFNNKHPMDNWEPKRRLDMEFMAKMGFSKLKQFNCMYKTDDFVTGDFGIVPLKPKSRWIWMPESGRDETGEMALVEERIGMEQVAAN

SEQ ID NO: 154495 - protein, 81 aa, Heterodera glycines
MITQQQQQNQEVQAVQQEQQILMGNEMKMDNSKNGETREEEGNSIEEGGETEEKERKRKNSAQKGGENEAEKRKEQQQIGT

SEQ ID NO: 154496 - protein, 191 aa, Heterodera glycines
YIDHSVIAFLRSNHQIFDKRGTYLHLRIPSSHTMEEQPILDVFVREIWPIFSTNIRCLGFSCGDHLDNLRSLISPTILTDLNQLNSIDSFDLLPAAIDADFDGPNSTISAGQALSKWLHSPRKAGQPKRFRFCRNLKDFYWVNSFKEVWPLSPPPEEEDEAGQSSEKGASSADKMSDGQKNKYSDQPQKKK

SEQ ID NO: 154497 - protein, 82 aa, Heterodera glycines
IFPNLSTSEEMSVLIARIAELNRAKTMEPSVASFEVFGQDGYGMNDDQFSLEEEEGKEQQEDRKTPTKDVSEDHLKAILERI

SEQ ID NO: 154498 - protein, 42 aa, Heterodera glycines
QATATMCDNLKWRDAQEGISAFITRPKRQPQWTHTDQRVIKD

SEQ ID NO: 154499 - protein, 17 aa, Heterodera glycines
MVVSGGLLEVFHGFNLH

SEQ ID NO: 154500 - protein, 144 aa, Heterodera glycines
MSQAFGHQLLHRFRRPALFALSSSKFCPLFRATAAFATDGAATKQPTASAAAQHQHQQVEQQQPSTTKTEWHLGNRVARLTAESGTEMHRKVFNKCLELMTFIRQMQLPVIAEVDGLVAAAGTQLVAACDIVIASGRASFNVAG

SEQ ID NO: 154501 - protein, 123 aa, Heterodera glycines
MICCSNLHPDIRILDANNLMDLKFRVHYKWLISRDLFQFGPGPRLDFCEMDCKNPVSIKSKKSSVALDFGIKSYFFVAINQVEDLITKSNVKSTATFDFLIFVSIQITVMVNEKSFQIYREKS

SEQ ID NO: 154502 - protein, 37 aa, Heterodera glycines
QKGGPFCFAKFFKIKNHDNFLSGVLKVANHESDMYFD

SEQ ID NO: 154503 - protein, 610 aa, Heterodera glycines
MRLELSVADTEAPSIMGLDWIIPFERATQQPIATTLEQQSLIVNSVQPTNDPVKLEGQIKASFPKVFQPGLGHCVKTKATLHLKQNVKPVFCRARPVPHGVQAAVDEELDRLLDSGVLKPIDFSRWAAPVLAVRKKSGNVRICIDFSTGLNDALELNRHPLPRTEDIFHALRGAKVFSQLDLRDAYLQVELDESSKQLVGINTHRGLFQYQRLPFGIKSAPSIFQKAMDQLTSGIPGVFAYLDDIIIASADHSQHVAALIELFSRIQDYGFRVQLDKCHFLKAELKFLGHVVSSDGLKPDPARSDAIRNMPSPHDIGTLRSFLGALNYYGRFVKEMRDLRAPLDLLLKKDTPWFWGPDQQKAFDQAKQVLQSDLLLTQYDPSLPIIVAADASQCGIGATISHVFPNGVERVIEHASRTLTPAERNYAQIEREALSLIFAVQKFHRMIYGRNFTLLTDHKPLLAIFGNKNGIPIYTASRLQRWALILSNYDFTIKYVKSANFGQADVLSRLISEHRTDEEVIVAHTSDNDVDSTEEVEYALLVNLEQLPVDAKEVSELTTSDDLLQQVAQFVRSGWPNMFNFDRKPSHCSCAASSTCTQRLCTLLILALCE

SEQ ID NO: 154504 - protein, 48 aa, Heterodera glycines
MEEQEEETERVEAEEEEVMEAEEEETESVVGMERKLEKQDFKINQKKF

SEQ ID NO: 154505 - protein, 68 aa, Heterodera glycines
MQEHLGNRNEWLLLDVCFLRKEALYSLNSAWHKYLRTGERMNSDDGGDDQNEEEESEEEEERDEEEER

SEQ ID NO: 154506 - protein, 142 aa, Heterodera glycines
MAKRKANASEELRVLKARIVELELECMEQTNVSEAFEQSRNVEVIDDGVQIVEIQGQIEADPQQKKFRENISKMKEELSNTEQLCMITQLKNKLLQSKLKHHELMEEQNELQAKVAKMVDHHQQQQKKKQGRKEGEQGQYGR

SEQ ID NO: 154507 - protein, 110 aa, Heterodera glycines
MALINVVLFNSRASPSASVVGEEGPPIVQFGAARRPGKCRPGNKQQQQHNGNDEQPPPPPSAPAAATSSRSARFTKTLSIKTFFHNQKNFFIKKLKIDFYTIFKITKFGY

SEQ ID NO: 154508 - protein, 29 aa, Heterodera glycines
MFAVGSRIQMHAKRRQSVAVGIGGMPKKV

SEQ ID NO: 154509 - protein, 164 aa, Heterodera glycines
MQRIFLVSLALFPLSHAFLFGGLVGGSSCCCPPPCPPPCCGGGGGGGCGGGCGGGGGGCGGGCGGGGGGCGGGGGGPIIVNCGGGSQGGGCGGGGGCGGGGGCGGGGGCGGGGGCGGGGGCGGGGGCGGGGGCGGGGGCGGGGGCGGGGGCGGGCGGGGGCGGG

SEQ ID NO: 154510 - protein, 20 aa, Heterodera glycines
MFSEEGSAEIIRRKYLGNGK

SEQ ID NO: 154511 - protein, 90 aa, Heterodera glycines
MTKRTDHRLDSMKVNSNCKTGQKQSVDIQMAIELLRGPKIVPIALPPRRFKATDAIGPNAEQSRGDDQRKGKQRDQKAQKTFRERSVQLK

SEQ ID NO: 154512 - protein, 449 aa, Heterodera glycines
LNSGKQYPLIVRLLIPKINSSQEKSLIDTGASISVAPKLMAKLWGCTLYPTSVSVISASGHTFTLKEKGTVIFSIGNYSVEGIIHFVDDFKFKTHFYKALIGCDILGKLPAFTFDYPNKKFQIGDYITPLGIQQNNCLINNLRIQASNSIILPPNRGMIVQANIDTSIDLNKPIFIHSLDERLNNISFGLIPVIAAPFRGTVKMFIINPSAMPFQLYKGQHLAYADEVRQISNGVMTDSSEKVMSMSPMMDIVIDPNFKIDFSKSSVTGSDLEKLKILCEEFHDIFSHSQYDLGSFTEGEHEIVTTTNEPMSAKPRRTPYRYRAELQKHIDQLLKSGVMVESDTPWVTPFVIVQKKDGGIRPCLDFRQLNDITVPDHYPLPRMDAIMERVANCHFYSSLDLSSGYLQIKLSPEASRKCGVITEDNVYQMTHMPFGLKNATAAFSRAMAQ

SEQ ID NO: 154513 - protein, 258 aa, Heterodera glycines
MSYAFRHVAASTCELMGETHRWAETALLTDPTALARMLFTNYKLIAKRIYLGEGRLGQLLLGNRGARLAQNVVQSQSQNIVCNPITSPSADETPDIQFVPVNRIASSTNDLNSLRRERKNATICESVLMLRVYPNQEKIGFTSVCLDLSITRIKVNGIELVSVIDSASQTSIAPLRILGSLRVPEFNMMEVCVKLRPFGMDPEKAADNAPEGKTVAWVLFSKGGVILGEAPLLFINNAFFEKEGFDLIIGADLIDQMV

SEQ ID NO: 154514 - protein, 459 aa, Heterodera glycines
MRKEHKERPVRVQLSNGAQLLNKTVETGVQVRPGPDEPKDKSVMVTDEDEEEEIEVPKFLTPTSQTQGSSRSPRTNKKAAKQQKLIEKKDHLLAIIMSDPQRFGATDRVKIINPKTGREFIDSDLAWSIERLVDPRPENAPSPRGTKELKRKLAQNPLASSLLNRLFVGSGLFTGSDVQADLADFQALSRKNSGYRYLLLAVDVLSRRMFGTPVKSKRPTDMKRAFEELFEQMPRVPDTLYTDRGLEFVANPLKEFYADKGIQKFETSSKKKAAMAERAIRTVKTRLYKYFSANNTSVWVDVLPKFLSAINNSVCRATGLRPNEISDTNAREVWKRVYGEGLAQLDKTPKIRAGEAVRIPEPKHIFEKGYIPNYSDHVYTVDETRSTNPQHYLLKDYYGTKLKRKFYLPELTKVQVDENTMYRIEKKYKERVRDGKREVLVKFIGFPEKYWVKNDEINE

SEQ ID NO: 154515 - protein, 418 aa, Heterodera glycines
MYPRGLIDPEYNCDHFEDSERGFSTTVTHIELEAALRSWYKVTHVYRAYIWPLACDWSNGLFHSYLLKFLKMKFEASGYPASCTEAGISEEESERRKQDHSDKAKQKAHVHLEADRIKHNPGLRYLSKLCLNSLWGRFALRNRLTKTEIVECHAELAKLLNDSKIEVSSIDQLTEKFWMVCYKAKDEHVVEHSTSNVAIALWTTSAARIHLLESLKKVYGPAPGVERYDTRILYMDTDSIFYDYLTRLGDPLPGGEQLGELADEYPNHTIMEFICAGPKAYGLWLRNNATGEDEYKLKLRGITLDSDACERITFEKMKEMVQNKLGQPDNNVRFNYPTKNFRITKKGEIFTVPLVKQFNPTVNKGVVRDHGLKVVPFGYSDEEWCKWNCPGACTCLFNPDLNVNMFTEEELNDPDIMP

SEQ ID NO: 154516 - protein, 490 aa, Heterodera glycines
MPFHQQTQHTAKCKWKCHNCLRVGSAFRGNCVQGNDNFFQTCLGCNKTFKSRDCYEHHAKCTNCRVKRDNEEEIVGKSICMSSKKCVDCGVIYRMADQDKKKGHVCGHKFCKICLGFHAPRDCYIPYRPKVKKEKRFVFFDFECTTDFKPDPQLMRFKHQVNFCFAHVTCTRCIEKGVWDQELEKACALCGRFRTYAWSPFEFWHTDVECRKVVEDPLAAFTKWLLNFETEVLGMEPGAKKRRKRKNAENTDGEAMECEEEEDAVDEDAENNWMLGYEEAGEKPESVTTYAYAHAGSRYDHVLIYGEMLRMGVRPELIRQVNHLLEMKARKTGVYTTTVFRDSYKLIPIKLANFVKTFGLEIEGVENKKYFPHKFNKAENYGTVLDTLPPIENYYPGGLFPAERAKFEQWYDENRETGFELSEVIADYCKTDVQILAHGMVKMRQLFLSETRHDITDSVTIPSGCMKYWVQLAHHDKERVAIIPHLGYEK

SEQ ID NO: 154517 - protein, 103 aa, Heterodera glycines
MSQYSDNSLPSTLDGPYSPVGDDGTELMDEAPPLDEVMKRLPISVVPSDNNERKAQKEPSITRELEAELFNGDGFTCLSATQVEAGRFKGVVVNNTSYKIIII

SEQ ID NO: 154518 - protein, 142 aa, Heterodera glycines
MARAHLAALKWLALSWPYTPPTPMGGYRNPDKMDYIDHFVIAFLRSNQQIFDKRGTNLELWIYSAHSSDDQPIWDVFVREIWPIFASNIRHLRFIDGDGLDNLRRRTSPTILTDLKLLNSIYSFGLLPDPISDFDGPNATAG

SEQ ID NO: 154519 - protein, 40 aa, Heterodera glycines
MSQKTVDDTSSWWYYFIRTDEPHVKLIFINIATFNLFRKI

SEQ ID NO: 154520 - protein, 419 aa, Heterodera glycines
MERGLQEAIQIFQGHFEIGMAATGAEPAGHQDFFYDILTAPLPAATKELQLRNHPTPAELLQIADEHIGDLRTMRRALEDEEEAIARSRLSGSFGTNNSHPVGDDPPPLENRNMEEWERSFQVAAKRWKNDGQGVPQHNRRPMGRVAIPVMSYLDGIFQRRAKVPSVASMRVTNTAREWINRNRDEMGAFPPATAHRPALMQPKIEKHQAHVNDDYRERQTYPIRRHARDEGEHDRKHGRDEITGMTTFETRLQPAIFSEKPEDWTTFWAYFKRAVDDKPIPGFEKQLHLLRCLKEGSPARRAVEVYPPSDGNYPVVVQLLKERFGDTDDLQRAIRARLLHLAPAKDNVNSLTTMIDEFERCVCQLEQLGANVDDDSFGPLLEAKLPVRLLTELRIRESMMGSKWSVRDFRRALSAQVR

SEQ ID NO: 154521 - protein, 115 aa, Heterodera glycines
MLSLGLPSANSIIGRTFRALFWIVAVNVSLCYFFLIKPYISSPITAWFFNVFAAILLNIGSASIGPILYFTSTDYRLAFQKELKKAIKLMTKQNRVTPKHNTPILLVSTNRILNN

SEQ ID NO: 154522 - protein, 35 aa, Heterodera glycines
MVNFGSCSLAILQVELQTGCVSLSRNFSLDNALLQ

SEQ ID NO: 154523 - protein, 129 aa, Heterodera glycines
MIDASLFQGIGGAKIADTKIIPSLHLYPGGYNQQKSRWVDKSDIDDLAKAGRSLIIGEFGSLPPQNGGSDWAGIVSYAKSKGKKSEKFPLICKLTFDAEQINLLDQHDQITPSWRSESDKFYLHVNKAL

SEQ ID NO: 154524 - protein, 79 aa, Heterodera glycines
MNKIIRQFCPFVIIQYLMLHKYQVYVVEETRDTFVVPLNSQHANEKENATFECEVNDKDIDVKWFYDGAEIGMDGRHFK

SEQ ID NO: 154525 - protein, 117 aa, Heterodera glycines
MKIKIIFSILFFINAIDNIYAGKINEEKSFDEIFGQRWDEKLEENGENENDQNGRIIGQTDGQNETNYDENIAQRLFAEQFDQIFDDNSEVHDEQSVLLSTNCDELEQAPVKFVIIL

SEQ ID NO: 154526 - protein, 113 aa, Heterodera glycines
MFRLSGLEKVYFEADFGDRRSRSPRPDEVMVNERGEMVVDAQSLVVIENPEQNTAGMETVNDLMTNFGTPRDVKGKHLKRIWELEFPEEAADYQQPTAPVNAAPQQQQQAAQV

SEQ ID NO: 154527 - protein, 44 aa, Heterodera glycines
  unsure (1)..(44): unsure at all Xaa locations
NPNSTKRKLRIDQKQKKNEESRLQADQPNXNDFFISCKXIQLSS

SEQ ID NO: 154528 - protein, 243 aa, Heterodera glycines
ILYRVYGFFQQIKICICIFLPEYNPNFHLSYGISVVHQLERGDLGPDGSTGGRAQGAAPSGDEAAIIVHGVSNKITRFNGIINALRARGIEAYGTTWGDGGTTPVGLVELKCAYVKQIRSMIISMIIAVREYTGKKVDVIAYSMGSPLARKAIAILGGICVDTRELLGVPLTEHVDTFLSVAGANNGAALCVLPANNGAALCVLPVPLGTCNRKNGLHCESEFLADVNSRRNYEGAATFSIFS

SEQ ID NO: 154529 - protein, 63 aa, Heterodera glycines
MALLTVNYRGTTFQRIVYRDDYTLWELLSDVGGVLGLYFGLTIIAVYELVVFALLVDRKNARK

SEQ ID NO: 154530 - protein, 75 aa, Heterodera glycines
MGETKKQRRMLGEENGNGAAIIGRKQFHQLVRVGKATQRPSEQRMDGTICQIFGSKQRRATFGGFYEAKSKIKIV

SEQ ID NO: 154531 - protein, 69 aa, Heterodera glycines
MGPICDAICRLWTGSVGSILKLVLRQKLSRWSKWLNIFTLPATTLLQMWPKNHRKLFQSNLSIRWMSRS

SEQ ID NO: 154532 - protein, 133 aa, Heterodera glycines
MRPISREREREIIQFLKIAFLIIQIEIEAEKKKVEQKPFDEIFGEQWEEKCNDQNGNDQKKREIVEKFNKIKEKTKQKERKCSIKEWSKIEKIGVGHTVIEKWKKQFGMSEKRITKKEKMEKAKMYFQMKKYF

SEQ ID NO: 154533 - protein, 254 aa, Heterodera glycines
MFVRTPPLTWQENFGGEQQLRNRLLPATRNTGNSVVIVVDEIEQNERTAMNVPVVSSSSSVNKRNVRENGLGETNERFLSNNFDLGVSNLNTAGLVPTYSPAHESNPVSLLHGIGRRVGGHGNAIGSARNDVQYTQSRLDGAHPVFVRQMAVHSQLTALRQSANHRSGIATNSAEHLALNARTENILCHNNPQQQMENFQQNFGRQTFRGVENFEPGNRNYVCDGRNANAELNKPALAIILDASRLYFKIFEPL

SEQ ID NO: 154534 - protein, 493 aa, Heterodera glycines
KIFGLSQQLELERTRKDSEKQSLLELVSQFKSIFAVSDSQLTQTTLIQHEIETGIAAPVRSKMRPVPYAYREKVAEMLKDYLERDLIRPSYSPWASPVIVPKRDGSLRFCVDYRAVNSITRKDSFPLPNIDILLLLGGKKFFTTLDFMSGYWQIRMKPESVEKTAFITEFGLHEFVVMPGLSNAVATFQRFMNRLFEGMINKFLFVYIDDVLIASESLESHLEHKCVFERIEKRLKIELSKCQFSAEELPFLGHTLTRNGIKMNEEKIQPVKNLPVPKTKKELQSLLGFFTYYRKFIYSVGTIAAPLFRLLKKETKFEIGEMEKNAIDKLKEKILSDVVLYFPNFEAAKNDPLRNFIIMTDASKIGISAILSQQNEKGRIRPIYFASRQCNKFERYAPTELEALAIRFGHQFITMIPTRVITDHKSLIECLKVKRKPEMQVDKWILELKKFTLKVEYQPGKKNMIADVLSRTFETKECETLEIAAPEDIADWD

SEQ ID NO: 154535 - protein, 292 aa, Heterodera glycines
MAVPQEVIDKIEAGYKKLQAAADCKSLLKKYLTKDVVDACKDKRTKLGATFLDVIQSGVANLDSGVGVYAPDAEAYTLFKPLFDPIINDYHGGFGPSSKQPATEENCVDMESKVTAVFEQLKSDAELGGTYYPLQGMCRYWPTGRGIFHNAKKTFLVWVNEEDHLRIISMQNGGNVGQVLERLIKGVKAIESKVPFSRDDRLGWLTFCPTNLGTTVRASVHIRLPKISAKPEFKSICDGLKLQIRGIHGEHSESAGGVYDIRNKARLGLTEFEAVKQMYDGVKHLIELEKKA

SEQ ID NO: 154536 - protein, 361 aa, Heterodera glycines
MSDRRKEVEKKMEKAIFISGDGWLKVFDLLPPSQLGLEIATISHRFNTYVDDHFKTRKWALKFIQIRREFGKKGKKKLELAALDGEKLPIPKKPMPKKVVGFEAISIRFIDQNALTFLHRFRRLFAASPIVFAIGSTSDRILILILELIWPMFAKNIDSMHLMADTFFRLRLFESSFLNKCPSLRIVKFCDDDNFFIKFPADDHAAASDGQVVAKWLFTALPDNVPPKMLKCSLDKDDGFLESDIEDLKEAFAEASSAVNFIFVVRFPPSFAKSVVPFSLINELTREQLALKSTPNSRLFVFVRSPIERVASEWTKWENEAIGWDFLAQSNRIDIYMYHEDQIGDGILNTMIGPINRKKKK

SEQ ID NO: 154537 - protein, 126 aa, Heterodera glycines
MQNIAVKHQTKRGYQLTCASGEPNVSIDNRRCAETRLDREPSRPGTPQSILGPVLRNAPRQRPPEPKLLLPNRPIRKNPVECSLIFVKSIRIVRSDDADSMSFFHAMIWWCHDNSYIVTKATRTID

SEQ ID NO: 154538 - protein, 141 aa, Heterodera glycines
FNSMLYYVVSLLSQIYCNGPILQAVQEAHLFPDSKYFVDMPLKQDPVSTLRDFYELGDSVKEVSVLEAFVEAHFEAPGQELIEVYPDDWAPYPNGFQHIDDYRLKRWALHLHRFWILKGLLFSEMYDTAKGVILNLIFMVD

SEQ ID NO: 154539 - protein, 18 aa, Heterodera glycines
MIILRYFNYPLVKSALFI

SEQ ID NO: 154540 - protein, 95 aa, Heterodera glycines
MSGSLSVGYPSVVRSPNVGSPNVGCPNGGSPSCKSPKSRQFCASSKGSDRPMWSRVKLIASPHITSNCFAKTWPLFATCFWMTSNFSRECLDERY

SEQ ID NO: 154541 - protein, 34 aa, Heterodera glycines
MQRISNPKNNFYLVALKKFWKPEAFRFIFLCIIF

SEQ ID NO: 154542 - protein, 69 aa, Heterodera glycines
MCPKFKKWWDEQFGEWLRVNSFYTHLNCQKRGLNLANKNFFYPFLGPVINPSVSGQSNPSVDNPSVTNP

SEQ ID NO: 154543 - protein, 142 aa, Heterodera glycines
TIILEHIAKLEFYGHTNKKKLGTFKATSVAQIDVKTEGDLIKANLTLPTLVLTDIGTDIKSGMTQDGLDSLTGLVKDKVPESANKKLAKGCKLDLPPGVGGLPIRILKPEVNFVAHAVHLKSNFELYSTDGSSPLGASEPCE

SEQ ID NO: 154544 - protein, 234 aa, Heterodera glycines
MSDIYVERIETAKYAIELYLDKPLPILPQGVLTSQQRHNLICDQREWKEVADEIQTQVDEIKAARALYNQEASTLHGDEKTEFQRQYRASVNANDLQNLLRRANHKLADTRTLKGNIDRLLQDGPGGTARRNIALPKLNLKEFDGSNWDDFWPLFESTIHADADLDYVQKMSYLDSLLRGEAKKVIQGLLPFSRDNYDLSVSLLKDKYGKNENLIRDLHNQLARLSILSLLETT

SEQ ID NO: 154545 - protein, 401 aa, Heterodera glycines
MPEVREPKFNFGFNSAGTLIEVVKSLGQIWAFFFDKQLRKRFGTYWKCMSELSNYKRKPKLANEREIVEILETNALRLYQHYEYLFNNSETATLSPNSKLENLFRTLRKVFDKNLEEMWSKMEMIKSSLNELNVEISEMPFYDIDKAIKDSAFLTFIIDRNNLKIFSMILSAKTFFNVFGSVHKINVGTYPENVVGYLAQEYEAYLGIVHLLREKWQCANVLHEQKKCETFRDYLDILYEFLFHMYYEGQNLAMEQNKCAVRPNFVLGNETKILSLIELLKKLGRISAFFFSPKYSMTFAHKWEVFVHYNSELKLVIDQQLENERTQQCPTLVKSIKHMKIRSQKRKPTMDLSTMAQIRGNFVNLLAICAETVKRMNLKDVFGEYDNNWDWLFSNKDQLTV

SEQ ID NO: 154546 - protein, 200 aa, Heterodera glycines
MSLNRFCAICCSQMYRCHWSHKISKYLLAIILLFALAISAPILWHSVCFRLSEVRTPFEEGQHKIVGLVFMEISTQQIYYNITKMFAICHLAFLLFAYPLMCRRVRQMNLKQRSHRVEVRMCYAIILLSIANLLFAIYLITWEILSRGHAELSPIAEWILLMIVDFYDLNSPYGLIITSKIIRKYTLPFCLLMRRNEINI

SEQ ID NO: 154547 - protein, 27 aa, Heterodera glycines
MRVFGVANHESSIHFAQFRTPDSIDCR

SEQ ID NO: 154548 - protein, 135 aa, Heterodera glycines
MDGPTKAKGAAPPNAAGPMGLLHLLNGNEKGKAPSGESKPILGQKPSVERQKRDVLGHAGGYVGGWDHPIDSTLDWVKSQWNDANWLADVVNRNGLVGVIKNFHTLLDSFAVKQKRQKSLTDEITGNRFGPAVGL

SEQ ID NO: 154549 - protein, 197 aa, Heterodera glycines
MSSDESTTSSASAVSVQLREVPIKDFNDVLPVLQKTLNQLEHPFIKKAEEISGMEPLLHHFLSCAARVDVLPWQFVSLYSYHGIHPVARLLVRVRRVLPVGPSLWLYQWLPSAAVRAFEDRLSALLGPSANLWRSQHVREAYPQMDCHDERIGQDEEDVVIEETTYHCVMSAVRNWSKWVSDSWSASPKTTYKCLYV

SEQ ID NO: 154550 - protein, 315 aa, Heterodera glycines
MWCPVSMFLQPVPLRSSAMRWRCVAQCRCSSSRCRCGLLRCGGDALPSVDVPPAGAAAVFCDAVAMRCPVSMFLQPVPLRSSAMRCPVSMFLQPVPLRSSAMRWRCGAQCRCSSSRCRCGLLRCGGDAVPSVDVPPAGAAAVFCDAVPSVDVPPAGAAAVFCDAVPSADVPPAGAAAVFCDAVPSADNTEEPQMPAGQEGAEASAKPTGQSAAPGGTSAVGQLPAEASKKSLAPAGTGSAVPSAYAAPGTGTAMSTTSQKSAAPAGGASALSTASQKSAAGGTVSQKSAAPAGGASALGTASQKSAAGGAASQKA

SEQ ID NO: 154551 - protein, 83 aa, Heterodera glycines
MFGTLRFIATLFAVTALFLDDALAFGPRAFLKRQAPPSAEMAPPKAAMDQQVAMELQQQQKHFERFVMEPQRVVPFVPSPATA

SEQ ID NO: 154552 - protein, 154 aa, Heterodera glycines
MSLNQRLSCNNGAGLTASFAPTPYGQSPPDQNQAMLAVPMAIRPTSGAPPTMIQYGTTTAMYFNAPAQQHQMMVSSSGTSSSAEQQQAAAVHAYQQQQQQHHHEQQMLYATGTMAGGSQQQQQPQQQQHFFPPQGGPSGAAHPGKSSLIPNSNI

SEQ ID NO: 154553 - protein, 69 aa, Heterodera glycines
LGKFNVIEIHRRTTIYDHSSAADLYLLREIPPSIIQHIIVRLSASKALQIFMCGPSLNFSSVFNCSDWR

SEQ ID NO: 154554 - protein, 156 aa, Heterodera glycines
MLRAGSSASTSSRLSKEEIDEILDSPYETRYTYSDSAAYKPHIGSHDYVHPRLCRRFPATQIPRSASPPFLTYPTGTWQNYWRRPDQWTWTQLFFYAVQFFAIFAYTVVQYALVRVYYAFRYLTTRAAWYAIKYTILWPILAPYNAAVSYYNKGGF

SEQ ID NO: 154555 - protein, 122 aa, Heterodera glycines
LTDDKRQQQQKRINNREQYNDMMSSSSSSGCWTPAQLISSDEWSKWTVNEADLSIRPCPKTVQLSLRLPNGQMERIRMWKAAPLNAVFSMLLAKGHNYSSNNYQLVLDYPRREFVLCPQVAN

SEQ ID NO: 154556 - protein, 347 aa, Heterodera glycines
MGTFKLRFCAPYMFTALRAVFDHPPVITSEDLIRSIAEKPLKLMPNPAQSGASFLRTNDAQFFIKSADQNEIKFFHTFTDRIVFPQNFPKIHYKFDLKGASINRKELKFGTSDEAQHKTCRDLDFFRFNSEDKNGTMAEGLFRHGICIGREKHEELVQLLEDDTWFLKAHNIMDYSLLMAVHFVGKQKLPDEWLDELPFGVFHGKCNNCKNPFRNVYENDQKLLISIGIIDTLQTYDYPRELEDIYKSSMSIFRKKPNSVKHPSVYRNRFLEAILTVFLRPNCISSPENDEIIHEKREYKAESQSKEFILKAMAEKSDQTQQKLISPSRKQLERRKQQEKILEDLRN

SEQ ID NO: 154557 - protein, 15 aa, Heterodera glycines
MSIFGCEISHGAWFI

SEQ ID NO: 154558 - protein, 96 aa, Heterodera glycines
MTNEFKQKRKYSTKEWQQNYAEICKKIGVGYETIKKWKKQFGISSKRITKNEKMEKMNIYWQTKIENPKMSEKEIAKMLKIDRNSISNWKKQVEME

SEQ ID NO: 154559 - protein, 233 aa, Heterodera glycines
MKFRLLYLTILFFVIEINQIKIENKKLPQKSFDEIFGEKWEEKEGKQRNELKKREIIRTFNKIKEKIKEKGRKYPRKEWNKIDQKIAKKLGTNRNYIQKWIKELGLNQKRHKSHKSKTDEEKRQIIQKFIEMKNEFKQKRNYSRKEWRQNYAEICKKIGVGYDTISKWKKQFGISCKITEKEKMEKMKKYWKIKSENPKMSDKEIAKILQIDRRTISKWKKQFGGEILEDLNG

SEQ ID NO: 154560 - protein, 35 aa, Heterodera glycines
MAGQADVQYSSASEAMAYWRSTPNPESGFKDFSKF

SEQ ID NO: 154561 - protein, 185 aa, Heterodera glycines
MQSENVPPKPLQNEAEKLEKQLLKAKEKKRSEEKITEAVGKMMDELKSSIKEEIKVAAEDLWAKTEPLLKEQKRVTAAMVESLDEFMAGKNGIDEEEGTCPAPASDQRSEGTVEKSSSVEDGEPAQALPPQNPGQGPKEQINRAPLGKRGRGYAMGGHGPRGQWKNGGQKTQKRVGYLVRQLERE

SEQ ID NO: 154562 - protein, 347 aa, Heterodera glycines
MSNQNCSNSQSGENEIGSDFDPVFFTAEENGNFANILNRMRLFESAVCRQFRRLEYELAEINGMFQKSNENLRGGKLEQSMADLEDREELDHFQMEEKVIKIEGRIDTVGLSLKSLEKFTKVRFNKIIEKMKSEMAKMTEDIDILRKRVEFLEMEEVSDENLWAENGHSFEHEQFLNEDPPNSGENCEIMISDPFLGGIAPLESYDGNPSISFSRWSSKFEDMLSLYPQLTEAQKLSRLRILLIGQARAELESMEPQPENLASALNYLRQKFENENTRSIARQALSICKQAPVERVYESANRLNEAIRTALAGEGEDVIRKRLEEFVERLTPDLQFEVKAGRPTNYS

SEQ ID NO: 154563 - protein, 30 aa, Heterodera glycines
PSGLVFRILIFKKAHFSIFGLGPKRPRGPK

SEQ ID NO: 154564 - protein, 128 aa, Heterodera glycines
MGLSPETQSGKDPNLTTDQWGDQKQGSIARLAFDAADEAEKDAKLWELANPEHFRVDKSYKGPTISLPLRSAHVETMLEYFKQNKAPVGHCCGQRIVCGPWRRVGQDGSGLSAADPTESSQSVSRTVP

SEQ ID NO: 154565 - protein, 60 aa, Heterodera glycines
MPQCPPGMCADALQFDSLKLEFRRPKKVQKSEIGMPTHLWCAHLLIDKKYINGFFSLEKL

SEQ ID NO: 154566 - protein, 150 aa, Heterodera glycines
MTTITPQQKPILKAQLENLHEIFIVGFYPAEQFANFISDCEKKYRRVPIRYIQENCPLGTAGGLLQYKDILIDRKPPDALFVLNADACGEFPFLEMVQELNQKTEAKCLILTTEATREQSVNYGSVAIQIWLFRTRQKWYHRKLTKRQTD

SEQ ID NO: 154567 - protein, 78 aa, Heterodera glycines
MWTDWTNLATWTLNGRRMAATAIGWTTKLALLQWQFYHLSLTNLAKIINLNKFKIPGVMITNWTLDLSYYLANYAFIY

SEQ ID NO: 154568 - protein, 68 aa, Heterodera glycines
MFEVWPKAESGQLLDFVMGRRCETKAQIGVINERSGRRKKQKWKKKQKRTNDSHSKFNSLLMSSIRNK

SEQ ID NO: 154569 - protein, 214 aa, Heterodera glycines
MAVIRPFLLFLPFLLFSPSAAFVDDPNLCLRLTSAAHDEIQELPGLSFRPNFKHYSGFLKTTSKNLFHYWFVTSENKPCQDPLTAAENYEAVKQFFNKFPLFRSNPTFITGESYAGIYVPMLVAKIVDGQAEFPINLEGMAIGNGFVNAPLDTDTLARFAYAHGLVEESKWNQIAKQCCGGCLGQPLVDYLNKDQALIRSLFLYKVLLLELCKN

SEQ ID NO: 154570 - protein, 102 aa, Heterodera glycines
RNILERRVTFASGCFITYTDRDVNQFTQPYQVLNTTFAYEATEGGREVFACEFYQDATVRSPLYTPYTNIYIKRTSECKKSALGSQALETAEPDERTFKRKM

SEQ ID NO: 154571 - protein, 312 aa, Heterodera glycines
SFNDCGFDPAILRNIQRRNYSRPTQVQKAVIPLIQQTGDLVAHAHTGTGKSAAFLLPLITGDLVAHAHTGTGKSAAFLLPLINEVQQMRNAGNTQHNGDSPYSVVVAPTRELVKQLYEDACTFSAGTSVDVALAYGDIPTSVDVALAYGDIPMGVSINNVRKGCDLLVATVGRLFHYAREHIIKLDKLRFFVLDETDKFFEQSKSVGIKKCKEQSKSVGIKKCKNSEGFPARTLMFSATIDREVQEIANSFLTDGYYFVSVGEINQAVGTVNQTVLKVNWKEKKHLKRNVIKGVTYETEKTIVFINGRRECD

SEQ ID NO: 154572 - protein, 205 aa, Heterodera glycines
MGQPNAAPPADAGEEDENACPPQLDAEETMDRPILSIPKRLLEMALTAITAHSKKQKGADASATLCPRPAPSLPSSVCFSSSSSSSNISDDPSSNERKRRNGQTDGGAERPLRKRRRVRSRIGPRRKHRGQRQKGRDAERHNGEGEEQQHIDNGTAPLRMALISVPKEAEANLEDQKRQKKRNRKGQSIAAKHKRQNPSGFGRFK

SEQ ID NO: 154573 - protein, 57 aa, Heterodera glycines
MEMELNPDPSRVQWEVDLLMVRAELAWRKQTTTKNGNPPIRSDQRSIIGFYSILPNW

SEQ ID NO: 154574 - protein, 24 aa, Heterodera glycines
MLKCHGRTETRRGMLGTMPQFVKK

SEQ ID NO: 154575 - protein, 235 aa, Heterodera glycines
KRAKKSVYKQTSGLCNCRHEMRTQQLGMGRFQMFQVRVCDECPNVKLGRFQMFQVRVCDECPNVKLEAQTKNLEVEVEVGADNGQEVRFIGEGEPHIEGDPGDLIFKVRVEPGDPGDLIFKVRVEPHKLFERRGDDLYTNVTISLQHALSGFEMDIDHLDGHKVHIVRDKITWPGARIRKKDEGMPSMTNNQERGILYITFDVEFPRGELTAEQKALLAELLAQGDHVPRVYNGL

SEQ ID NO: 154576 - protein, 241 aa, Heterodera glycines
LIKFKIDHFAYSAKKCIQVQEKSQAYRVFFFHSKNIRYLKKIFRKMARQHHPDKNPDSKLANEKFQELGEAISVLGNAEKEKFQELGEAISVLGNAEKRKVYDRHGEEGVRKMGDGDAFGGHDPFSSFFGDFFGHGSQEQDEETPRGADVVVDLYVTLEEVYKGKFVEMTRKKSVYKQTSGTRECNCRHEMRTQQLGMGRFQMFQVRVCDGRFQMFQVRVCDECPNVKLEAQTKNLEVHFK

SEQ ID NO: 154577 - protein, 48 aa, Heterodera glycines
SGTGNFGQNRDRDLPGPEKPGPGPRFFFGTGTGTNREILKIQKNFKKF

SEQ ID NO: 154578 - protein, 32 aa, Heterodera glycines
MLNHCGRNLNETSNINLETEMKRMIVNVPRIH

SEQ ID NO: 154579 - protein, 97 aa, Heterodera glycines
MSLIVGRIDKVLGMIYACNFGGPPIVQSTPLVPPPLGISQNYARHSQAPTMALPSPIFGHHFPSFGPMPTVSSRARVFWGVHSESALKRTKFYVQVK

SEQ ID NO: 154580 - protein, 59 aa, Heterodera glycines
MHIYVCVLNFGLLSPSLLGFGLFCTKLMLDRYWNMLLRNISPKEFFSNAAFHPFHTNKD

SEQ ID NO: 154581 - protein, 26 aa, Heterodera glycines
MPKFAGDLEIALDTKISFARKAKSEF

SEQ ID NO: 154582 - protein, 243 aa, Heterodera glycines
WVCNDVWMDILPLFDHAQLGLKLALISPRFDVLVDAHFNGKSELTIWRQITIQKFKGPKAKLSEWIDDKWVAFPLPDRPLPNKIRFRNLRIEKPDHSVLAFLRANQQIFEKATNLCLSVSSCFHDCLSLFVDNNVQPIWDVFACEIWPIFAPNIRRFNFRDGDHLDNLRRRISPTILTDLNNLSAITSGRLFPDGIADDGPNATAGQALAKWLHTPRNDGQPKRLRCGGGYMSKTEFVNIFKE

SEQ ID NO: 154583 - protein, 500 aa, Heterodera glycines
MGAFADRRLAANFGEILSINGGTKIRSRIQFDRRIKSEDIDEEEEQKYKLRATGYRKCRAAVAEDGGGAVAVLNPLSMHLLKVTGGALPQQNAEQNGETCEESLEYLRETLNLSRSLKFEIPDKSPLNRSLTMNGRIPIWRREAEPKADNEPKQQRKMANGEKRMRVKAEKRRERNRGEEPTQRRVRAKRRNAKEGSEGHRKRNGRRKKKEVEEERNGTREKDEKEAEKEKEEANNNKEIGEEERNETTGEEEKGRAKADDGEEKNEGAVLDEEEEKQETAEEKSNTSSMAEEDGGGKERNGARLEEEEEEEKESSSKNGTEKERKETIGEARMEEKEEEENRETAEEKSNGTSRQKVNDGDTAEEEDEGGKERNEGRLEEEEMSSKNETEEKSNGTFMAAEDGGRKERNEGRLEEEEEENSKNETEEMKGQEEKQEMNGKDKSEEGTMTKRKMANDCPKPIRVSKRKRNISPEFNLNDLLYEDYRTKFGDAIPRDVYRH

SEQ ID NO: 154584 - protein, 112 aa, Heterodera glycines
MVKMCVQPLLPIVAFISFAFAPPHVGPSSADDRCVRPLAVVRFPGDQLHAQRGDEGEAAANDHFGRIGRGHGPIHGVTALKSRCELHLINCVEIPLIDRFLLIDRYGLDNLK

SEQ ID NO: 154585 - protein, 60 aa, Heterodera glycines
MLHKNAINCFIKIKKVKKARLQGTIEDFPCLCDVKITKCEVNNQSLSKAIQPQWEQEFVL

SEQ ID NO: 154586 - protein, 83 aa, Heterodera glycines
MEDELSLEVPAAVADADLSLEVPEEWSDDDLVFAPDPLADADLSLEVPEEWSDDDLVFAVPDALADADCFEAEVVFFEVLTEP

SEQ ID NO: 154587 - protein, 48 aa, Heterodera glycines
MVYKMQKTTILYDLYPLRLPIQNISNAIIASVVLHNLALKNAFAVSRR

SEQ ID NO: 154588 - protein, 17 aa, Heterodera glycines
HKHLFDLFYHIHNLIKI

SEQ ID NO: 154589 - protein, 72 aa, Heterodera glycines
MTWAWNERVTMLLLLILLVLMCHFAIVLKASPIPTAIFIGKFTVRFLNGTKNDKATKAEWTTESNFQKEGGL

SEQ ID NO: 154590 - protein, 142 aa, Heterodera glycines
MPKLRMPQLQTTISLTLSAGGFGLTKSTNLPLSAKLFLETLFATSFKKRNFFNALAYATPYWFNTNEFDKRAHTTGGRTASATLNAGGSQAIGKKVQTERTPIQMYHWCTEITPGGRPSTPSFNVGDPHEIGEEMHIRRAQI

SEQ ID NO: 154591 - protein, 232 aa, Heterodera glycines
MSLLDQFTNLFNCSAYDVSNRLLSDAERTKALVLCNHKLLTTMYKDRNGLNHTFTCTGLSAEGAESLLAYGKLREPFNISVAAHYYARHRIMLSHPKAPCAIERTTLSHRGGQRTTVLKFYPLELVRFSSYCAIPSRSPHMNTYVDYADYYADDDDDELSDTTLLRDNTNGDNGDDDDSDGPLMVLPSNNLPPMCSLRLEYWKVSDDGEWARDEVWVADDELDKLRTILHNL

SEQ ID NO: 154592 - protein, 602 aa, Heterodera glycines
MKERVEEEEEEDAGGIELGDNGNGGIDITWDALTIASASMKHFRLNHLRSDQLAIVPESGYDTANNQSLLALKFMEWYAEENGLQIQTAHSSGGEHRIGRYTVDGYIHETDSVIEVNGCCWHAHDHQRHRFKADTVMPSGKTAARIREDDARRMAFIRSQIRGTVSIFWECDIEERLRREPDMRQAFSSYRNSGPINLRDCYHGGRVGPQRLHYQVPEGWRMRYFDVRSSTEGGVSASYRCTHSDEQRGWVSTVTSIELAEALRNGYRCTAYYRSIEWTQEQWSERVFRGYVAEFMTMKTHASGFPEEVGNGEEEREKFITECEERFGMVIDPARMQHNKAKRTIAKLCNNSLWGRFSLRNGLSKTVVTDSPSELRAYLDNPQLEVSSVDPLNEQCVLITYTAKKEWTDEHDCSNIVLSLWTTSAARLHLLKLMKRVVRAENTELIYTDTDSVCFAHREEDGCPLDIGPHLGDLSDEWPDHELLEFVSGGCKQYALRMRHRQTGKEQTVVKVRGITLSGDACRLLHFDTFKRAVLRYAKGPKEYDGNNTDDEVILIDNPNFLRPNIRTGSVHSVALTKRYRPVVTKGIVSPNDTRVLNFGFV

SEQ ID NO: 154593 - protein, 80 aa, Heterodera glycines
MMRIYHRCSHRLIGQQIGERHQIIGAISQRLFEQRMAKESAEQMQMGGVEKAKRGKGKGEGTVEPNEEEGAEQLKKGDTN

SEQ ID NO: 154594 - protein, 119 aa, Heterodera glycines
MGSGDARVVLDGLHFANGVQLHPDKVSVLVSECSMARIQRSVQLLIVVPEQYLFPLMELVAKKYGFVMELALDGHVLRTYQDPTGSDVPDVSQAIDDASHIYLGSFHSDFIALIPKKSK

SEQ ID NO: 154595 - protein, 126 aa, Heterodera glycines
MPKAPPHSFYTPTRTCQTGKMPSDGREREEKEKFEARRRGRKKRKGMKIAVGKEERRKRKRGKGKIRSKKEGEKEEEKDENSSGEGGETEEKERKRKNSTEEGGGERGGRENEAEKREEQQQIDTF

SEQ ID NO: 154596 - protein, 33 aa, Heterodera glycines
LNFLIFLFLAANIFYSNLSVWSDVRQTEKIFKI

SEQ ID NO: 154597 - protein, 177 aa, Heterodera glycines
MVLLHSSSLSISIAILLLLMPTMLQSCHPTDNTAAAGTTAPRRSTTNVPTLTTASTAATTGGGGTAACTTCSPSALRLLSVPEAVASGLLQATATTTPTNTAGTNAAGCATLTPNCDAGQVVSIHVILANGDTDFGNYDSGSLPLECNSNGKWVVPAGRQHAGNVVDGYSCVTSATG

SEQ ID NO: 154598 - protein, 212 aa, Heterodera glycines
MDNQMFDADNKKEFEINNNGMENESQRWLCANLNYASVGTALLKGTPNRDSALLVQALRQQITKAGSMTAGEANLSKMISNDIFMLRNKKQVDGFEEFSFGAREKARKIRFQLYLYEEELINYGEFGIFMLNAENEHLFVPFCPCFWFPPNNPRPISLPLILVVPICFLPFPPPLSSVAHPPLVLVLAFHHQYPHLWICLRQEKGANLMSPN

SEQ ID NO: 154599 - protein, 138 aa, Heterodera glycines
MMMGQGAGTVAPGITTMAKASVTNPLGQSSGPSSQQATITKQIDRAKSLVATGNVKGMDRVSMMRSALKVCDIGRSRASDPRPEWKIKLDEQAEKINQCINRQKQQGEEGDGEGKVPPNSEPTKADDGQQPKRRSRWT

SEQ ID NO: 154600 - protein, 110 aa, Heterodera glycines
RIPGVLTKSSLMLGLGEADAEVEEAMRDLRLVGVEALTLGQYMQPTKRHLAVSEWVSPAKFDRWRELGDRLGFVYTASGPLVRSSYRAGEFFLKNVIETRRIKENGGGIG

SEQ ID NO: 154601 - protein, 74 aa, Heterodera glycines
RDSNVPLRPKIFSISGKKSKIFRKKYQSIELEKLCFGSGLRFSAKNSLKILKIQKPKNRFLGLARKILKIFQNF

SEQ ID NO: 154602 - protein, 28 aa, Heterodera glycines
KIELPKLYNKSAGTPSLSSNPGELFAWY

SEQ ID NO: 154603 - protein, 500 aa, Heterodera glycines
MIIVRSPKNTRQRTVNLGVQPLSGDNDQQRGQQIVENPVNLAANPNVNEGNRRNSVSSANTSVLDANEIRRRLKMTENANNAADGRNGQQQVHREEVLLNDHGNNLLANANLGENVEKSFVQPLVNDQPQQIQQNFENELRQNVIVGEQRVATSTPYIEMQQLRQQNIERRNISPLRSPFEQNFRENVVVNPNVIVNPTRNENRGPNLHFSDRIDVPPNPNARLQVFREQHVEIDRHYSSAFHAPVPMRQTCHGQIQQAAYMEQHGAHQPMLLQQQNMRGVMHHQQPMAGRNEYFPEYYGGRHLYPDGREQPNSGNNELKIGNLEYVLTMDRLPELNGNEGTDKMKSFFKKFSNATEEWPEKKRIKALESKVNGRAERAFNAALNTQPYRFDSIRRAMQQQLEDTDCREMSAFDELMSGVKRKSNESLDALADRIQSLVSRAYPGLTQNLCDDYAIRHLIRALSNPDLSLTLGMSRRPEMSYDEFVALAARAESIQRAPK

SEQ ID NO: 154604 - protein, 136 aa, Heterodera glycines
MIIVRSPKNTRQRTVNLGVQPLSGDTDQQRGQQIVENPVNLAANPNVNEGNRRNSVSSANTSVLDANEIRRRLKMTENANNAADGRNGQQQVHREEVFLNDHGNNLLANANLGENVEKSFVQPLVNDQPQQIQMII

SEQ ID NO: 154605 - protein, 101 aa, Heterodera glycines
MRLIVDDFFDQQVRQFSTELRLGNAFLFLGGAPSGPFSNRVLLSSTLLHWLTKAMANRMFKHLAIYPIHVPQMLKCLKCLPSTVAKILANCQPGNRPPGVP

SEQ ID NO: 154606 - protein, 34 aa, Heterodera glycines
MDNEYSHIFYCTCTTAVDLNYNYTNGQCLTKILK

SEQ ID NO: 154607 - protein, 113 aa, Heterodera glycines
MNYSARNYLMNVLITSTEEKLWKKDNKYSKFDNSTYRHLSVQIENINYTNIYSFTCHSHVLFTVPIHGLMHGHGRDSRLIHDHLDDSSNIEWQCSRVNSLSQFTGKFTFGNLD

SEQ ID NO: 154608 - protein, 127 aa, Heterodera glycines
MGPALAQTPAKALFFATLTQHCQRCNDFELKALQSEHCRPTGYFDVYTCPAVAEYKVDNGTKSHHTIIYKPCLTMSRDQESDSFYMFCMASMASAVLSALYVRWRRELIERRAFGSSAHSYARLATA

SEQ ID NO: 154609 - protein, 673 aa, Heterodera glycines
ELLREPYNELSLPKKAPKDYIKKLDSEIEHVPKFKLVKNKSRFIIKDIPADPEALLMGVFQHCMDEAIIDSRQSGVEPTHLGCIVSSQNLSSDIWIPIWQLTPDTINTILNRFNDVAQSKKQDGVTLWGEPFTVTVTTLNRNALPAKRQLKGGAARKLAPVHHNIHPNCLIKIQNFDDDNYCLFYAIQATLVRSIGDLDRRRFHDYVNGNSEMRGKLKNDALEMMNAVNAPAGQPNYDAEVYVPRIVDWWNGEKFVGQWKFKTFLFGSAGHYKPLFKYGPEDYVVPIILYFEEGHFNGVQKSGNLFGKPYCLSCEKTYDRPKRHIVNCKARCIKCSQMGPIFPCKPNNGFRQKCKDCNKLFFNNSCYQYHLSSEFCKMSKECKYCGVVWDLRNNTQNGREGHKCNERWCENCQIFHEFKRGCFIRPLELSPKNEARGWRLVIFDLETMQHEPVDPQIPERRKHQVNFVTAKVACPDCISNGQWKESLLGKKCNICGYHRTITFSQMPFNGTTVDRQVIDRHPLVSFVKWILYNLPKQYDTIAYSHFGGRFDMVLVFRELFMEGLNPSMIKNGNRLLEMKVKSRKKLNPNISFRDSWNLVPGPLASLVPMFGLDVQDKPFFPHLANRPENYGCQIFPTKSNYLAGGMNPEKRKEFDIWYAQNQNQPFLLDEALA

SEQ ID NO: 154610 - protein, 159 aa, Heterodera glycines
MARQQQSTASSCSSSSMCCCNALAKMHESFVAKFRVIRPQANLITLDGDNNNDIILHEEADEDEAIAQPCTSSAGQQPRPIGGGTADELQQEAEDNESVLLNGAESPTPGAGTLGYEILAEDSKTPAPFYEMMSESELNVRDGHSSFCFKYKFCDNFLV

SEQ ID NO: 154611 - protein, 225 aa, Heterodera glycines
MEALGAIILDCKKPPKILQKEADDLSNKLEMRHFPANPKEVQMARKQIMHEMFEENPALLYQWEDTKQRPTLSRMFDKEAQKRLAATRYNWKPLKFDTKEAAVVYALSRFGGYFAEMRRVFSEFDRNGFEPETVLDYGSGSGAAFWAAFERWGNKVREYSLMDQDYGKNYTGAGEMITQNVFFRKDLFPSPQHTYDLVILHRTLIEIQSEEERMELIEKLWKRTK

SEQ ID NO: 154612 - protein, 128 aa, Heterodera glycines
MNTWCPCSCQFDGCQPHPDEWNQYQQDPTGQICKDRHSQCERWANFHKTRHASHISAHHIFNRWHSSNYPRNIMPKYNVSSSSGECARNAHWMAQNCAKSCGHCRAAIGTSRKCSLMMPKDYEMPIIN

SEQ ID NO: 154613 - protein, 138 aa, Heterodera glycines
MWSSMFMGTTNDFGQIVNGEFANWITPINGGCTLPNLNPANMIEIIHSDVHTWVGGDMIWEQWRLKWQSRAQRETQFPPDSQIVPCSGSENYRLSAIMRPFQDPVVLNRDGLSNAYTDNLYTYAPRPSCNGAGQCGSP

SEQ ID NO: 154614 - protein, 47 aa, Heterodera glycines
MFNQLLPIPFGAQHESMSYRRANSPFKTDAAFAQFAKMVTSLAFVPL

SEQ ID NO: 154615 - protein, 427 aa, Heterodera glycines
MDAQQLQQILDAALKKSAEVFAAALNIQNQNPNPGSSTTASLAASINVHLEKFNYNPEVGQTYDAWLNRYGKIVQQDGASLPEQSKVQLLVGKLDEEEYKRYVDSIAPKATEQFNWLETVANLKKIFGETRSLFLRRFDCFQIRQCQNQDLSSLLALINSSCENAELDLKKEELKCMILIISLRDEFSDLKQRCLQRMEEARTNGKSITLQELGEECKKYQILKESTLALSTKQYNANAIRAKPQQVKDKADATKQYAKPKAVPKPYESKHKLPNRPCQSCGSTNHWRSDCGHRDAKCPKCGKIGHLGKVCRSNSSIRHIQTVNTTERHAQINTVIIDLNCMEIKADHPKWWKILIKVNGADYPMHVDSGAQITLFTIQTWIQMGKPPLTSANIRVKNCNDQTFAINGQFMCKVQYMDRPPMKLLAY

SEQ ID NO: 154616 - protein, 580 aa, Heterodera glycines
MQQFEFENGSESNMDPANEGHHRNGAQHDENVQDGDGPVASTNEEQQKVARVNEATRGSNMATGVATNQQGMLPFPSRNLRSVSIPVRTARDRIERASGTLAARIAEAREVIDQDLTEGEAGYQAARLLAMERGLKEATQIFQGHFEIGMAAAGAEPAGHQDFFYDLLTAPLPAATKELQLRNHPTPAELLQIADEHIGDLRTMRQALEDEEEAIARSRLSGSFGTNNSHPVGDDPPPLENRNMEEWERSFQGAAKRWQNDGQGVPQHNRRPMGRVATPVMSNLDGIFQRRAKVPSVASMRVTNPAREWINRNRDEMGAFPPATAHRLALMQPKIEKQQTHVNDDYRERQTYPIRRHARDEGEHDRKHGRDEITEMTTFETVRLQPPTFSGKPEDWTTFWAYFKRAVDDKPIPGFEKQLHLLRCLKEGSPARRAVEVYPPSDGNYPVVVHLLKERFGDTDDLQRAIRARLLHLPPAKDSVNSLTTMIDEFERCVCQLEQLGANVDDDSFGPLLEAKLPVRVLTELRIRESMMGSKWAVREFRRAVSAQVRCMRSAESALAAMKDPEEGTDHKTERDQTGW

SEQ ID NO: 154617 - protein, 28 aa, Heterodera glycines
MGQRNGQNVNESALKRTKFYLHVNKALL

SEQ ID NO: 154618 - protein, 1110 aa, Heterodera glycines
MERGLQEAIQIFQGHFEIGMAATGAEPAGHQDFFYDILTAPLPAATKELQLRNHPTPAELLQIADEHIGDLRTMRQALENEEEAIARSRLSGSFGTNNSHPVGDDPPPLENRNMEEWERSFQVAAKQWQNDGQGVPQHNRRPMGRVATPVMSNLDGIFQRRAKVPSVASMRVTNPAREWINRNRDEMGAFPTATAHRPALMQPKIEKQQAHVNDDYRERQTYPIRRHARDEGEHDRKHGKDEITGMTTFETVRLQPPTFSGKPEDWTTFWAYFKRAVDDKPIPGFEKQLHLLRCLKEGSPARRAVEVYPPSDGNYPVVVQLLKERFGDTDDLQRAIRARLLHLAPAKDNVNSLTTMIDEFERCVCQLEQLGANVDDDSFGPLLEAKLPVRVLTELRIRESMMGSKWSVREFRRAVAAQVRCMRSAESALAAMKDPEVRTDHKTERDQTGLEVQAGREPFQRAFMVRDSQPTRAQSNGTRSEERYGTNARFARRSITHANENESSGGNWPRVASNGPIATTEIWNCSLCLRSGHRPSKCQAYPTAQARRKRLIEQKRCLRCMSSNHLFKQCQRVNRCNACRKDDHHWLLCWKSISGGQSRSFTEHERRAKNHATLISGMDRPTHFTAVRDEQNNRDEFDMNAGEQRAFTTFGSRLPAQQMICRVIAAAEEGEDECQTTLLLDPGSHVDGADTELIQQLGPQPIDKRPLTVQVFGGKKQRIRSATYRLRLKRTDGKWESIEVSEVPQICTPIKTELIESGATPDSEPRTVTQTTQPQIMIGIRKFWDYVIGFRKIESGAHVIDTVFGQVLCGEGTQASSGVTPAASILTTMPCGNIHQTRTNKRQQIGEVRRNWKRKRKSRKNNSRGIVSRDRHNSPAEFGPDRSGANEVITSREEPIGEMDPKQRKWPIGRIVETKGASEHNRNAMIRIANGRTRRRPIKKIWPLKEARPKTGETDDRADEAVHERHEEETRAAKTQSETRDRNKPSATRREERNETKRNGKSAEKRGREVEDVQPDKKANRQIRDDNSRGNGPHYSDEKYGSATTTEKSAVFEKAAEVPSAAQSKAGNSARPHSAQRHEKKYLGDSSMAPSLLNVPTKFQPNSTISEGGD

SEQ ID NO: 154619 - protein, 311 aa, Heterodera glycines
LILLAAAVISLVLSFYKPPNREEINAISSSHLATTTPNSAEDEQSSGITEQHAGWIEGAAILIAEKQFRGLQSKIETEHKFSVIRDGRAMDIVISEVGKEGHSSETHCLSVIHFVFDCRWRHRPGEIRRPFAHRWHFAPKQRPQNRRVHADGRVGSHPKTPRDGSDPFVRHSCDGRQRKDGGHGGGHALANGHYNVGDGPWVCTSIRSSGVCWDVQCHEKCQPKRTTFERQFVEVRRQWPNDFRRFVRRCAAAKRRGDDGTRGGGGQFEEQIVWGPEEKKHFEAKDIANFVDFIIIGVTVLVIAVPEGLPL

SEQ ID NO: 154620 - protein, 191 aa, Heterodera glycines
MDEEILLLNNAKQLEEEEIQQQYVAQLNERIEQFRATKRKLKIEINQLINKAESNEPFTFAVYIHIKMNERHNPRALHELLINWERTKRCEWNCDQLRLWVRNHSTNEDKGITNLFNEVHPLHIHAKLNHTNEQLARDVKHLLMVDAAFDREARDECQKMAFEVPLRNWAAIAQQMDDDEIKAYVVQPLNS

SEQ ID NO: 154621 - protein, 227 aa, Heterodera glycines
MEQLAAFWAQSLNSQSMETKLTRTRCDLMGKECEPTRELLRKIRKISKCCSPSNAAGPCICKLPKPDPSEFAAPPHHYNWNESPSLKYGNSQSEDPLDWTGDVLYTEEQAQRLHDRYKSACAQCYPPEKKKWRRKRQAQPNLSKWTKFPIAIRFNRTLGEPTPPQFIDAVEQGIKFIMLPGTVCHEFLHAIGLNHEQQRDDARKYSKLNPEERNVVLKIINLWTYNN

SEQ ID NO: 154622 - protein, 201 aa, Heterodera glycines
MKLCQIFILIIFLIVLININYVGSEKKKLRQKTFDEIFGEKWEEKEENQRNELKKREIIRTFNKIKEKIKQKGRKYSTKEWAKINSKIAKKLGTNRQYIYKWIKEFGLQKKKCYKLRTDEEKTEIVQKFIEMKNRYKQKRKFSEKEWKQNYAEICKKIGVGYGTIKKWKKQFGIHCIITEKEKNGKNEYLLANKNRKSENE

SEQ ID NO: 154623 - protein, 253 aa, Heterodera glycines
EEHKEFANVTKTYFASLHAFVLLTDLNYEEFALKLHFQIQNSQEKFAEYYTNLKSKCDNWTIDKWQNKMERIGEKIVDKSSKEKCREFAVKLDEQRNRSQNEQSENIEPPKQTSFHRTSFKRSVKTSKIFADQRILRNRLISPLDAQFRAELFQFLDSLFLPNLLPFPNKFVAGPGDLALLDPSLSVEFDRCFSDCEQSDEIKQLDIVNVYQLLVSHDSLYYTFPLSTLQEAFCLLAKPIEVGTHRSCQIAAQ

SEQ ID NO: 154624 - protein, 78 aa, Heterodera glycines
MAKLNCPILTVDSAEMAFLLNQHCPFQSRAFSPPGTALKWATQILIVVDNDYSVNDVRSGATNINDVHSERIAKTRQH

SEQ ID NO: 154625 - protein, 106 aa, Heterodera glycines
MLKFQRSASKNTTTDSPTISRRSLPDRRSSFVSSQIGENSPCNWHSALQMERNISQNQLRKLTLNRLLQKDRQIEAKLIAGTHFFALTWPFAWTVVEKVFYPYFRK

SEQ ID NO: 154626 - protein, 55 aa, Heterodera glycines
MASVTDRFLMNWKGIPLGFGLVTSTTFHIFNNRWLRNRFNANAFESKETKIAEQM

SEQ ID NO: 154627 - protein, 352 aa, Heterodera glycines
MPTIPFSTPIQSFLDSNSPFDEITVAVPSDLRKSSSVVDPFRRKVPNHQKGGYHRFSHRSRLMHGSGHSLSADGRTVALPLLDKVRSPLPSLGFLLIPIFCQGYPTVHRPLLISDSLSAVAHQHHGKAPGFGASNPFFGADELNLGGITEFGDQQLEKDATHSIGRRSIVSSSIVDLSQLREEAFAPRFHGTSLNRRRKLVSDGTLTAETLRMRHKQRSRKRRNRTSDDVLNENDGEKDEGMTSKSSGVSSQNPQIFTVPLLNGSFASSLPPYDSSSAFESDGTQSSKEGNGEGDEAEDESEGSLDEEQLSESDRMGRSSPKTLQKCSSAALLFFDPIPSLKALLDHCCAMV

SEQ ID NO: 154628 - protein, 83 aa, Heterodera glycines
MERKIKERERGEEDDEEEEGRENKMIWREKETKKEEEKEEKEEGKERKRSREEKKVRGTERDEEDEQQERRVCEKARERKEWK

SEQ ID NO: 154629 - protein, 77 aa, Heterodera glycines
MLQKVLGYISKVRVTSTYNFWSHSQEVFVHVTKDFPLVNWFYLAFKDVNPSWSLIGCALIYGITPHLESFSIHLSLL

SEQ ID NO: 154630 - protein, 19 aa, Heterodera glycines
MLPALRLRPDNDNPYKDIF

SEQ ID NO: 154631 - protein, 18 aa, Heterodera glycines
MRNTGENEIQKASNFVTL

SEQ ID NO: 154632 - protein, 353 aa, Heterodera glycines
MPQFPFLILSSFLFPLLFCSVFSAIGPNARVDCAPKFGEGKSDCLARGCLWDGGLLFADQFIQIATYLPTDLVYGFGENAHQQLKHDFSKYTTWGMFTRDEAPNPLVENVENLYGVHPFYLALEPSGKAHGVLILNSNPQEITTGPAPHLVYRTIGGQLDLFFFPGPSPELVVRQYHQFIGRPYLPPYWAFGYQFCRYGYKDLNDLKATIGRIQAAVIPLDVVFVDIDHMEQYMDFTVGQQVPFDGIWIDMNEPSSFGTNEKPSAQSHNLQPLQCPLSGTDSQFDKPTYETINVYQYGSVLSEKTLCMSAMTMRGQQRMFNTHNLYGWSQMVATRKALGEIGQNICEKVKYEI

SEQ ID NO: 154633 - protein, 63 aa, Heterodera glycines
MAIPETKAAATGDWPSWWNGPANVVLNMFLKRNHYAEYGSFPKLYHGRVLNLFLFCVLRGILV

SEQ ID NO: 154634 - protein, 638 aa, Heterodera glycines
EPTRECNFLDLITNNIIKDISVGPPFSLSDHNTVKFDLRLNVFPCRKFKHFNFKKASYLEINAILSSTDWAFLHFLIAFLHFLISKYVPLTVSNSKHNFPDHIKKIMFIVDNFGKTLKKKKLEKFIETSKKLEYEIKKYLTNRENKFFKNTKIPPLKNSENKNTKIPPLKNSENKIVSEKAKSNLLAEQFYSVFTDQNSCFMSHPKNIDFFTMTLNEIYLALNKLENNNNTSIDSIPNIFLKNCKENLVYPLFHIFCFSMMTGQVPNIWKKSIIYPVPKIPNPINPVDFRPISLLCSISKILEENITQKITNFVETNNVLPNCQHGFRRKHSVTTQLLEVIDDFSLALENKKSIDVIYFDLAKAFDTVPHERLVSKLKNVGINGTLLKWLQNYLQNRTFFVRVGSAFSDEFPCLSGVPQGSNLGPLLFLIYISDLPNFCKTENVEIKLFADDLKAYSILSKNTISPLHSFINKFRNYCELNGLKIAPNKCLVSHLGPKNPNECYLINNIPILKNEEGEPVRDLGIYFSNNLKWEKHIEFITKKAIRTSFALLKSLKTKSPKILINIFNVYCRSILEFGSPIFNPYMKKDIDALENVQKTFLRIVFRRNNKRMIYPGITNFFNSLNKNKVQSLEFLLTE

SEQ ID NO: 154635 - protein, 173 aa, Heterodera glycines
MSNSSDLPPKPSKYQCHWMERLSDAVALVQKERKRSLVLIGLPEAVAEKPSERAKEDAETVAEVLDALDVEVCPQMVYRMGRRIDDKRKGPRLVKVVLPATTFQRFALAQWGRNRTELKQRVGWQRLLVRPSLTKEELAAERETREQRRMNYEESKKNEMVTTRRGGTMEKNF

SEQ ID NO: 154636 - protein, 667 aa, Heterodera glycines
MEKVLISNPLELSSVHNCACDLTPKDLFRSVGPGTNGQRGKGVGEHRCPTSDCAGKDPPQRGLQKGNLSCKRWTPSEEKAVFEEWSRLEAQTRLDGSAARGSCAINKRQFLVHWDGVKESRSSAEGVPTYPERSERAYFERIRLLRKKRGWEWDCANDRIVTGQPEVPGRGSRTRVIAAKADLSVRRKLVKGKCITPPHRDGTEDQESDDEEVAITVPVDIIQVEEPECTGVTEGQIPGDPTGNPEKEAAGEPAQRSVPISGIISDGERKYLKVRFWSAYKKAQGSVGNRPALKIEPSKVNRAQWEVLDSCVAAVLKRRETSKGCRGCILRTLNVAVYAAGQVLAEGDRERRQAIRRQSMEWLLRQKSEISNIRRHIGWITDELKRRRTGKNPTLRQLRNFQWLQRRYQVLGKPVRETRDLETQREKLVVRLHMALDRVSVTTRRSERTQQRLLPMRRKLEEPMGDSKLDPAQAREFWAGLIGKRKEFERIPELEDWAEETKSKVPSDQTLDEDRKDLFAWKKILGKARPLKAPGPDGVPNLLWKRLPSANQALFKWLMGIKRKQLRVPNWFTRGRVVLLPKGGDPMDPANYRPIACLNTQYKLVTGMVTAWISDHLTKHSILPSEQRALVAGTWGCTHAMVIDRVITSYAKASGIPLYVGFVDFRK

SEQ ID NO: 154637 - protein, 64 aa, Heterodera glycines; identical to SEQ ID NO: 131646

SEQ ID NO: 154638 - protein, 97 aa, Heterodera glycines
MKRRSCKSGVDDQCVGPPIESRPCNDEQCPTECVSASLLGTMPMLQFVQLALVLNIVNANYEAVPSGPNGNHGRHVQRVAVPVNRYNIYWTILPCYS

SEQ ID NO: 154639 - protein, 154 aa, Heterodera glycines
MTGGGNEVAPSYNQLCHKVRRRQCRNAASKDECQGGDVERLLCNTQLCPAWTTWTEWSACSNSCGTGGTQSRKRECRYAGELSNECTGAAKDEKQCKQLEACPSWAEWGEWCAYDVTQKPQKKTNLPLLKSNQNFNSRYHSIALRVFYSLAKFH

SEQ ID NO: 154640 - protein, 159 aa, Heterodera glycines
MLAQQTQKRHHQQQVQQQKQAIVPDFFATSSGGDTKTNISIFMNKGERKKQKYAWRALEELHRMRVSPLLYAQRLLCKDGKLLIRKNEIKSGILTPVDKPLDIWGQTYIGYRTQLIFIFGMRIVLCETVMKKGTKNWENPTQRLAKGKYQQQIKLPNQF

SEQ ID NO: 154641 - protein, 104 aa, Heterodera glycines
FYGIIRPLRGRLLSLRTGASRPFFNFFGDIRPLRGLMTVASRPFFKNIRPLRGLRTSASRPFHNFIKNIRPLRGLITGASRQFLILLRTFGRFAASRRSLRARF

SEQ ID NO: 154642 - protein, 53 aa, Heterodera glycines
KNTQKNNVTPSGSEPAPSPLKMMPQNPQSHRDSEVLTMSKVKSDHVFVISVIK

SEQ ID NO: 154643 - protein, 105 aa, Heterodera glycines
MLSEDDEDKVEDELDEAISAQHHHHNQQLNAAQQKHNNGTMTTAVAPKLSQCRHDGTKLFVQNHQANTVEDEDDYDYDDDDDEDYEDRIIVEPMFRCCVQCMKLI

SEQ ID NO: 154644 - protein, 287 aa, Heterodera glycines
FKNNFGVWYFALNFNFFFSVPKAKKRLSVHSILVERDEWSSWADFIMSCVGYAIGLGNVWRFPYLCYQNGGGAFLIPYIIAILFCGVPLFILETSWGQLVSVGGLGMFKICPIFKGVGIAAVVMAFWGLGMFKICPIFKGVGIAAVVMAFWLNIYYIVVLSWAMSYLFHSLRMDSNVPWRTCDNYWNSPRCRSEYTPVLCESNRTIAGYFMLRILTDDHLNEYRKQFFIGPKVNFTICTEADLSVRSPVKEFWDHRHRVLGISEGIEHVGFKKFNVLFFQNLLKIIP

SEQ ID NO: 154645 - protein, 15 aa, Heterodera glycines
MNIFWNQWVRVQCFE

SEQ ID NO: 154646 - protein, 185 aa, Heterodera glycines
MKRSSNTQASSSFKKSQTNKCIRKIDQFTSKSIKHHFIRSKSKFVIDEIDKCTDPAAELRSCVHHSIEEAILDGQNILGGANKVGIIISSELLDQGDIILPITPITSNVVDAVFNQFCKVEQSKAKYVSLYGAPFVVTVTVLNTDGLPRRRTTKGNAPPIHSSQSHIFKINNNDNYCLFYALELM

SEQ ID NO: 154647 - protein, 27 aa, Heterodera glycines
FRLFIKNFGSRNSDPKNVGNRKSYRAI

SEQ ID NO: 154648 - protein, 68 aa, Heterodera glycines
MTLKRGAECEIKQIIAKIWGRDTFKATPQLALEKSRVRIRVKWGNREKAASNRENAATRQCHQIISSG

SEQ ID NO: 154649 - protein, 21 aa, Heterodera glycines
ITGVSIIAVLFLVFLMPSQNL

SEQ ID NO: 154650 - protein, 39 aa, Heterodera glycines
KFPGWSRSRTKIEVPVPASQVPASPGPGFAQNSRSRRTL

SEQ ID NO: 154651 - protein, 177 aa, Heterodera glycines
MKLLIVLLCVSAIYARSLQKRGQNSYGDEAGAKAGGAEGAAGAAGGEAAAPAPSEAAPAAEAAAPAPAPAEQPAAEQPAPAPAAEPAKQQASGYRRKRNQNSYGDEAKAAGGGAEGGAAAGGEAAAPAPAAGGGGGGEAAAAPAAEAAAPAPAEQPAAEQPAPAPAAEPAKQQASGY

SEQ ID NO: 154652 - protein, 699 aa, Heterodera glycines
MDAQQLQQLLNALQQMVTNAAPQNATPANLSNANLASSIDARLSTFHYNPEVGTTFECWFKRYGKLIEDDGSTLPEASKVRLLLGKLGEEEYNKYRDTISPTQPDQVNWNDTISHLKSLFAETRSLFVRRYECFKIRQQQGQDISSLIAQINALCENADLSLTKEQLKCIILVIALNDEHHDLRQKALKMLEDAQKNGTNISLKKIEEELRTIQLVKESALSLVNPPIATNAIRTRPRQWTDPAQRQSGGSNQRQTPNANSSGKPTRGQPTLPCGSCGKTDHWRSDCTFKGATCFKCNKKGHISTICRSKKTKAPPNNHRSFHTVKVDANCLHVGTTQGRWWKLCILINGRQTSMNGDTGAQATIISLQTWQELGSPDLSPADIDAKNCNDQPFALLGKFIFTVQFSDKPPQTLIAYVSGEVGHNLLGLPWIEALEVIPRQILFPSSKSADQATKVIDNFSAVKPPNKSINDVSTLKAALQNDFPEVFEEGLGHCSKAKAHLILRSDAKPVFCRARPIPHGAMEAVNAELDRLLQIGAIKPIDCIDFSTGLNNALELNRHPLPRPDDIYASLNGAKFFSNLDLRDAYLQMEMDEESKQLCAINTHRGLFQCQRLPFGVKSAPAIFQHLMDQICAGIPGVFAYLDDGLIATKTLDQHISALYTFWAHKRVRSSHPTGQMQIFAARTFVPWAYCVSKRHSS

SEQ ID NO: 154653 - protein, 243 aa, Heterodera glycines
MSDLRMEASNDVIIPVNVAIRIFSFVSRDDLENCKLTCKSWKDVIDYADNRKNSELQLRHIDAICLSTNSEFSIKIYYNQTIREFYYKKYFADREIDEIEVKKVRHLTSQFDEKKYVFPCGEHLPIRQSHSFVFPAVDIFHQHRCKMVRPTVYQDHVNYTRKLFTPPLSFYERLQRMLKKCKIRLVIFHAFTFTDFFVEKMREFASDAFSRVVFLSLHYNYQQQIPPVEFIYSRIIWGRSLFI

SEQ ID NO: 154654 - protein, 106 aa, Heterodera glycines
ISFAVSFLAGGLAIGYLLGWRTAASKLARCNTRVQLSKDKVVDTVELEDIGEKKAYCRCWQSKKFPLCDGSHNEHNKKFPLCDGSHNEHNKKTGDNVGPLIVQKAK

SEQ ID NO: 154655 - protein, 259 aa, Heterodera glycines
MRFVAVIGDGKAVDIFVKVAAVVSKLCRKRAVVRITPNEFSFVNVYNVREGMHVDFRIHKDNLFNSWSFDGLSLDNNAIFFELSTDDFVRSLHSRATQIKLKMTKKDGVPHLRVELSANSLVNEIPIVLVVLRQWPDFNPPNMGISQLAVALPNVKTLVSYYWMKMNKWAHIYLQLEMDHNFKIFRANNRGEFNIIGYADQAKVAVYAQGLHNQSISGAEGLSQTAPQPEHFFNVTLDIRNFHAFLSALHALASRLTMS

SEQ ID NO: 154656 - protein, 313 aa, Heterodera glycines
MDWNELFGPSAEGHSPEFADIGCGYGGLVADFVQERVKALRAQNPGRYDNICCMRSNAMKNLPNFFRKSQLSKMFFLFPDPHFKKTKHKWRIISTNLLAEYAYVLMPGGRIYTITDVEELHHWMVNHLQGFPLFRRLTDKEYADDVVVPLLFESTEEGQKVTRNSGNKWAAQIEMPEQSSGADEYESLAPTYSLWVHLAAGAAAGMAEHCVMFPLDSVKTRLQSLCPCPESTCPTPIHGVASMVRREGFWRTFRGVNAVAVGSVPAHALYFTVYEKFKVLNTQQSPQPVIDKRSLLYLKGSYNGQYLHFIFLL

SEQ ID NO: 154657 - protein, 231 aa, Heterodera glycines
NQKYNKISCYSTVGQLRDGHPQKVSIGPRCDNPFVVSHEIAHSLGFHEQSRFDRDKHSLGFHEQSRFDRDKFVQIQPKNIQLGFLNQFTRFSQSQETTFDVSYDFGSVMHYDAFVRVFPWGLSGLSSIQTVNPNYQNTIGQRFQLSFNDVKKMNLAYCHSICPFELSICPFELSCQRSGYTDPKACDRCRCPNGLAGACDRCRCPNGLAGRFCDRVEATDSLRGSASASNR

SEQ ID NO: 154658 - protein, 98 aa, Heterodera glycines
MTNDLLTPHDLERQRSFVIGGVPESNATKPSARAQETMQWSNRFWMSWASKFPRAMYSQSGKSMSRQFGVRLQTKNERMNVRPSLSLEELSFGKACSA

SEQ ID NO: 154659 - protein, 62 aa, Heterodera glycines
MPSRNLSAKKKQQNSLVRDESTSSPSRTPKSVSKASNSNSSQQKLQKKHNSSELSTISSESV

SEQ ID NO: 154660 - protein, 518 aa, Heterodera glycines
SSPHPGGDQFQVCRSDITFDVSDIFEKLNRLYGKNNTAPDFINNQILKLFSSSCWPITDLSKLSFNTGKLLKIWKHSIILPVHKKENKSHVKNYRISLTFSLCKIFEKILVDRIYVFLTEKISEFQFGFVNKRSTITNLISTLEDWYDGIRDRKNIDALYLDLQKAFDKVPHNLLLYKLHRIGIRGKVLNWIKDFLTERTFQVKINEKYSKFKINSGVPQGSVLGPLLFLIYINDLPSYIPSKIGIKLFADDTKIYVNKSDTERKIMDLALINVLKWSEEWGIKFSIDKTYVLYLGTNNPKCPYKIGNFTISEAKSVRDLGVIIDNELKFTEHITYLIKYLFPYKILFKLIKSKTIRIWSLVYKTYIRSLLEYATEIWNPKSVNALNRIERCQKYFTRIALKKCNLPYISYNKRLELFKLDRLETRRKVIDLTTAFKIINCHTHYPQKLYTFSKRLRFNCIRLISKHKTNKTENSFINRTIKQWNNLDSKITASSSICSFKNKVIKWVKPLNTIKIFT

SEQ ID NO: 154661 - protein, 168 aa, Heterodera glycines
MALFQALRPGLPPPLAVAASSDSDGEDAASERRRVVRFSGDERMQQKRRREKDGDAEGDDDEEAAEEEEEDYAPVEIPDSMLSTDTMPPPQHQPVYARAAPPVMPPPSSQMPSMGAGGVGRAPLPPGMAPPPPGYPPAAPQVKNAGFIGTRQLGPGTFGPSGFLAITF

SEQ ID NO: 154662 - protein, 213 aa, Heterodera glycines
MAKRMANFSPPNNTAPKKFLSDLDQLQIPKEIDTDNSIPDYAKLLIKQLHSLLSTASALIHCQVAAVDAVEEERRLRTVVVTNVPESKSDKAAERAREDHAIVDHMLNATDVDQAPIVFRVGKRMDGRPRPLKMEFPSKHAARHIIRMRGKVQALNGLHNVRIRESMTKEQLSERRKLIEECGKKRQADNGDWVIYANQVVLRQDIDQIRKNF

SEQ ID NO: 154663 - protein, 194 aa, Heterodera glycines
DRRFHPAELSQLAADTLLLAASLNSPTNFSQMDECDAFFGCSQSAGKSGELSSVAHSLHSLLNDNFAKTLLIVDGVQMADSVKFFDQIKGKMCKILATSTSRTLFNGLENIQTFEVPSDNCSGEELAQMALNYGIKETFSAERINAILCETGGNFALLEKMFVMARGCPAIFDSLLAQLRHSPLSLVSCHSAYY

SEQ ID NO: 154664 - protein, 307 aa, Heterodera glycines
MASADVSIEVAQLKNNDGGQMGTNAPAVIIKPERNGHFCRMFAPGKYTARVMRVVSSENVWWDSTEQSVHVVEKDVDGVHFVQKGFRMDIQSTHPAKMEYAPIVQHKKPSTDAVQQLKMVHLVSGLNTLFFPMPSSPTEKSAAKGKCQNHRTPPQPFKFALSSCHDFDIVVADGDGKAAENAFNDQQKDDNNSGKFTVPGTKRVELVAKATRLPIRIELDGDSTGRDELNLVDMKLTWFGPVWDEQDFELMLEKDGFEFKPYTPTADGIKIRKAGGWGEGLRLVNSKLITDNEIQFGLNFCFWVAYR

SEQ ID NO: 154665 - protein, 97 aa, Heterodera glycines
LIIYYRHFQLNSVIVKTGNEDRRDVHFVVFPNELPAATVVSELELPANATIGGGVSSSTFRVLLKDSATGKIIQEQNVPGTVFFFTLPALLLIALCH

SEQ ID NO: 154666 - protein, 201 aa, Heterodera glycines
MPSFVHHHLTLLCLFLGALCAFGAVPSLCHLLGAPGGCSPIAVISAAQQPNGGGAAAQFQQPFGPAFGCPLNPLGAFGRPFPPPPPPPPPGIGGQFPSMQGQTVNLSPNFMGGGQQQQQNGGNAFGTMGGGGNCNCGTCCQQQQETNGNSNNNNFIGMPTANEFTGFNNGNNNLMNGIANGGAIDMANSGGMGVFGRRRRR

SEQ ID NO: 154667 - protein, 242 aa, Heterodera glycines
IEKVLERLNDPKSPAAFAGVDRLWLEAKKELGNKIRKNDVKHYLEGHRTYTLMRPRRINFPRARTTAAGFMTDCQVDLADFQTLSRHNRGNRYLMVVIDILSKRIFVTPLRTKKADDMVDGFKEVFSTMPMKPHRIFSDKGTEFRNQQLKKLFDEEEVEKYESTHSEKKAALAERAIRQIKNRVYRYFAQTKTLNWVDVIDQIVNGINKSPSRVHGMRPIDELKFTTNMGSVWRSAYGSFGK

SEQ ID NO: 154668 - protein, 329 aa, Heterodera glycines
MSINYNDKIYHGQHFAGCRDQSYDQWHYTDQREDCGARTIPFDIVGKYRECKATECETEWCISKEGVTIWCTRFKISPRFVPFDYVYELPGYTFFKTETPVYNLPPPPPPPQLKPKEKDGETEDQTTQQFFESITAAITGLDVSQKKHGEAKEFFDALSVATAGMEVDENKEKKALPQPQTNASDFFSPIAAATMGIVGDHLKPKPKPKQHQPRASDFFSPISASTMGMSDEQNKHEPNSKQPKKDSSKFASAISAATMGMSNNEQKQQIPIEKDKQQTDKEILDEFLESVSAATTCLDISHKKKPKKKGKKEAEDEEAAAIASISRKE

SEQ ID NO: 154669 - protein, 78 aa, Heterodera glycines; identical to SEQ ID NO: 144867

SEQ ID NO: 154670 - protein, 107 aa, Heterodera glycines
MSAIFGFIINLFCWFTCGFGILFNGILIRLIYRHTPKPMLIYSKYNFVSERGETEVIVYGLITIKGVQNRIWNLLAFVCWVFLVYVSMFGYVSQFIFRYLVIIRYIN

SEQ ID NO: 154671 - protein, 107 aa, Heterodera glycines; identical to SEQ ID NO: 154670

SEQ ID NO: 154672 - protein, 35 aa, Heterodera glycines
MTKTKNGRETETQNLMIDENGEDEEEEVAQQKEQI

SEQ ID NO: 154673 - protein, 666 aa, Heterodera glycines
ILSKKYFNLCRDLYALRIPSLPPPICPLKVISHCPEGIYSEEQRAYRVYANAPISFFGILSNLFNIAIFCDCEMRQQLVNHFLLALSVSDLLLLLCNFLLLLLCNFFFLVLPVLIAEIDSFFWNNFCPFSLRYSYPLALTVQCPFSLRYSYPLALTVQTSGVYLTVLVSVHRFLGVCHPFVYLTVLVSVHRFLGVCHPFKAKRWVSRKAVEWAIVGSVLFSFSKAKRWVSRKAVEWAIVGSVLFSFSVNIPTWLELGVVPCYSTRFNRPFSQIQLAPFHDISYILIKPFSQIQLAPFHDISYILIKKCLVYTLLMFIVPFSTLITVNWKMVCALRSSTRLRTKHTLSSVCALRSSTRLRTKHTLSSSKPSRLMTFSTLSRYSEVFKVISKINYSRTDKQLLNCNSNSTRDRSITLMLLAIVGLFLVCNGLAFLNSIVESMSLQNTVELLRNSSEGAEEQKFVQNDAKEEMWWMELMVKWFECSVEVSNVLITLNSSTSTLVSNVLITLNSSTSTLIYLVFSSKYRMIVKSIVGLQKRDRFNRIAFTTALAARRAMELFNRIAFTTALAARRAMELSLIPEVFDVPLKEKFQNQEVENRSRQSRKRTTTLTSSGTDPRRVDSSEFKIEPARFNALAVAVQASDRGGAVQMRGRETEETKIFDFPGNV

SEQ ID NO: 154674 - protein, 104 aa, Heterodera glycines
MMSFCSGLQLSSIGDANSANSATAVPMSAASHRRTMFKGLQKGSKELFRSQGTLNRSMTNSESNLRLMDEQEKPEKSSAEDERKKKIGETMEMAEAPRQNCYNL

SEQ ID NO: 154675 - protein, 152 aa, Heterodera glycines
SKLKVLSSSADFSSFLFLALLFDFSFSQPTIQQKSIQELLNTPTFLPTAEKHDYFVAPFLQQQKQRWLSVRPFQEFRRSPQTADLGLLLQYLDNKRNAPSLMEDEGNGRHGISGSPLGTMRFGKRTFNSPLGTMRFGKREYNKSPLGTMRFG

SEQ ID NO: 154676 - protein, 290 aa, Heterodera glycines
QQALSCYVVSMSASTIVSKGQFGQFTSHQLFRYFADLSNPDFVTHLAMVHSRFSTNTYPSWSRAQPNRMVAHNGEINTLRGNINFMKAREGTMRSREYKEELNKLYPVVENEMTDSGCFDNVLEFLVCFDNVLEFLVRAGNRTLPEAAMTMVPEAWEKDEDMSHEKRIFYRWAAMQMEPWDGHEKRIFYRWAAMQMEPWDGPALLAFSDGRFIGAILDRNGLRPPALLAFSDGRFIGAILDRNGLRPARYCVTADEHIYLASEVGVNDLPVEGVVKRVRPRWGKSLTLLT

SEQ ID NO: 154677 - protein, 51 aa, Heterodera glycines
MDFDGGDGQRTETEEEKRKTLEAAKPRENGKGGKEKKEGKERERERRKRRE

SEQ ID NO: 154678 - protein, 96 aa, Heterodera glycines
MRCFFPRVVRSVFPSPLSFVRSSLSTFYPIDDQLFGLDEEQRQLRQLVFRLAQKELAPFADEIDRQNEFTKLRDFWRLLGQQGRRGVTVPAEYGGS

SEQ ID NO: 154679 - protein, 99 aa, Heterodera glycines
MPFLLLPLTPFELPWHYFPSGAVLAESVHALAPVPPFRASVKDGYAVIGRGRADGGHNEGASGRTGHSVRKGSTDRANRSATERGEATWRRANFCSDTA

SEQ ID NO: 154680 - protein, 466 aa, Heterodera glycines
PPTQKPSPPLKMPFPTQNAFPPTQNAFPSPPSDPIIALALLGAVLAESVHALAPVPPFRASVKDGYAVIGRFSSSTIKPMSIKPMMGWEHGELNEIGTGECVRITTGAMNEIGTGECVRITTGAMVPRGADAIVQVEDTVPRGADAIVQVEDTLTVDIMKEPREGQDIREREGSGESKCHRERGSDVAEGQLLLGHGTVLNAAEIGAIALSGRKKVLIYERKVRVSVISTVLIYERKVRVSVISTGDELVDFYSSADARHGAVTDTNRPVLLSLLRSNGFCPVDFGIVHDNLFALIDSVRKLFALIDSVRKALTHTNILVVTGGVSMGEKDLLKEVLSDHLGLSIHFGRVFVKPGLPATFASGHLSASPSSNPPKFVFALPGNPISAFVAAHLFALPQLHELTTNKPIPITIPQLAHPIGPLDSRPEYRRARLVRLSSADGLPFAECVGGNRSYRLASALSANILW

SEQ ID NO: 154681 - protein, 230 aa, Heterodera glycines
FPGYGEPGATGLPGVPGQDGLPGVPGESGEPGYGFPGQPGVPGEKGDAGLHGMPGLKGEKGSPGPLPLVAPPGRPGQDGLPGLPGAKGEPGNDGLSGMPGLKGQKGEHGFPGQNGLEGPPGMEGQQGFPGNPGPPGMPGSKGEAGWPGAPGLTGPKGEAGIAFNGPPGSPGFPGIKGEAGFPGTPGLPGLDGQPGQPGSPGEKGVGGLPGLPGAPGFLGVKGEPGFGGIP

SEQ ID NO: 154682 - protein, 270 aa, Heterodera glycines
PGPGGSKGEPGPRGIPGISIPGIPGISIPGLQGRDGQPGIDGIPGRKGESGLAGLRGPPGDSLNGLPPPGDSLNGLPGPPGISGPQGPKGYDGRDGAGYDGRDGAPGLPGIPGTKGDRGGGCSICAPGAKGEKGNAGFPGFPGPQGDRGHPGMAGPAGDPGDDGLPGPIGPPGPPGAPGFDGIPGLPGTKGEPTQLVLRPGPPGYPGPKGEPTQLVLRPGPPGYPGPKGEAGFPGLPGLQGPPGKEGLPGLPGTPGQLGKHGMNGLAVSN

SEQ ID NO: 154683 - protein, 131 aa, Heterodera glycines
EAITVVTVSSNQALSVPKLIKLTATKTPAARKQLSMAPPLPPLAHHHHRLYSFFAFFITIISWICVFNGCECVVNGDGQYEEVEIETTFDGIDGLIDLPNLDTFNSKNGQPFDGGNELVYHDEQMELEPSF

SEQ ID NO: 154684 - protein, 252 aa, Heterodera glycines
NRKLNLYLFEEGHSRSKWCIFFHVTSTSFVVLSITALIFVVLSITALILASMPEFQVPDLSNQNAQGYPGTIYPTYAKATGHTISTTTVIKNNRSKIANIFWLIEVIKDGEETTVIKNNRSKIANIFWLIEVIKDGEEHRVEMVEHPVFNYVENICVIYFTLEYLLRFWVAPQKAAQFVKEFLNVIDLLAICPFVFELILIFVGIRGDNVRKVRYVGIRGDNVRKVRYSQLTALLKALKTFIIFLGQFAELI

SEQ ID NO: 154685 - protein, 168 aa, Heterodera glycines
KNNFRWAFLTVRLLRVLRVVRIAKLGRFSPGLANFALTLRKSKKQMQLANFALTLRKSKKQMQMVAIVLLTVIVFFSTLVYFLEKDEPNTTFTSIPAAFWWSVVAAAKKGLFLLIETILAGKIVGGGAITCGVLVLALPIAILVNNFMQVVRLREEKVLKQYASIATA

SEQ ID NO: 154686 - protein, 713 aa, Heterodera glycines
MAGRNQGLNVGQNQGGRPPEDGRYNLRARQNRRNWAEFEAEYDAEIDRELRILERNRSENLAEQAPNQQNSRNLRLNQNRTYVLAARPPEDGNQGREVALWNRFQFEGVQNENANLGRPVAQSSSISGNAGVQNRIVMDESPHISYEHNPRNRAGQAHEMRERQNILYEELLETLERQVLRNENEFLGGREVPVEQRNEQRNGRHVENLHWYHRAQENEHDGRHFERNNQIYKPRYEMNWRQEQYTNSEQGRNRRAYDRFQSHEENFPRPNQFERNLLMNPMVPVETNPRAMDNLAFQMYRMTLATQYASVLREIPTIEGTEGRDKIQDFFLTVETLLSDWEPDKQINVLKTRLRGKALKALNMALIKFGPVPPFNILKTEIMSTLRETDCREASAFTELTQFAKRTMNEDLMSFGEKIYRLVKCSYSGLNATQIDEIAKKFFIMNINDGELARFLECQNKPEQTFDEILMLANRIHLADPEKVKERIESRMRNEQQTRPFQSRSNWNSRTEWNPDRNRPPNTGNFWGNRRNEFRRDNQNQNWRIHQTNQFSGSNATPLNSVQPNRQTAERANPRSTNSIFLRQEEKQVKEATEVNIGRLGVSEHEKFFDSLILHTKAFPAENPAIPQISECLTLHLSVIGVTSKALTDSGAETAIVNPIFLHTLAKEKGVNLLDCGFNPNSGNSKLPFEVSSFTDTKINVIGVINVPKKKIF

SEQ ID NO: 154687 - protein, 857 aa, Heterodera glycines
MSGEEEQLALEKLGVVESGDKENAGRTDKSDKIVVETGVVEAGEKGHILTSEGLKKDPEKFMPILDFPRPITLKELQRFLGMLNWHRKFIKDFAKIAGPLTRLMKKSEDHKKLGWNEPAENAFQTVKKLIVEDVVLKYPNFEMAEKNLDFRFHIYTDASATGLGAVHCQKDNSEKMRPICYASRRCSDAEKKYEDTKLKEKLIKSLANFMLMDGVLYRLNGKGEPEIFVPEQFRKQLFKEHHIGICASHQSGKKVYGRLKSLGFFWPNLLGDCMHWTRSCRVCAHNRIPTRNHPGLNPIVTIRPNELLCMDILKLGPTRNGNKYTLTMIDHFTRFAEAIPIPDKKAETVAQNLIEKWILKFGAPERIHTDLGTEFVNETLKEISEKMLIARSTTSGYDPACNGMCERLNRSIVEMMRKCITSPWEWDTRIGFIVFSYNITPNESTGFPPFTLFFGRTANFPTNLTVPKRPNPVYLVDHDDYLQHFRENFENILNEAKQNMVKARESQKTQFNEKSHVRLNKYALGEKVMVFFRPRAQEPTPNSAISWSTECNGEGHANCCRITLGKIFKDLPSNDPLRRLPISKLSELICLHFASDVLHGQLREWASKKDRDPTALIRFVSEPQRKIRGIEETMEKWLNNCSKAFPELKASKFKPIIFEIPPGPLEKFGTEIAKAFENIRAVKIHGLHRTIRTPHIIAGDRTAEEIGKRCEAEIILAENCIGLSDLLGKTAFGREVKEVIVCVGTSDLDIDTPLEWCEKAVKKLLTHLGQFAIKIWVVPPPFYRQKAVKHEEFLKMLVETVPKEDLCLMKGFRSIIEVTMWGNQEEKRYVDERGRLKFSGVTATLKHLKEVFGLEVP

SEQ ID NO: 154688 - protein, 216 aa, Heterodera glycines
MQFLRQHKISPEENWKDNRNFLVSLQNGGCETLECKVSGKAERAFSAAAVNRPAKFDAIRSEMESLLDEWDCTAIQAFNELWDGPKRRPGENLEEFAERVYQLVLCAYPGLPLDLYNDYAAKHFIRALENAKVSIALEMARRPGLSYDSLVALAVRAEIAQKAANLIAEDENAHIARSFKPNKAEKTTTDWEKFYVRPTNKNVCYNCRKIGHIARN

SEQ ID NO: 154689 - protein, 75 aa, Heterodera glycines; identical to SEQ ID NO: 151730

SEQ ID NO: 154690 - protein, 82 aa, Heterodera glycines
MADVEQSYMTEADRRALERFRRAERRLFSTEIELDKVLFTFQQYDMLRRRWAMEQARQMPHGRRKRNKRRRQLWRRQRHSHQ

SEQ ID NO: 154691 - protein, 155 aa, Heterodera glycines
CTDHFEPILARIGQLEKCRQKQNAHFDQLNTSQKDQCEKWAKMENEIATADQFSKIVEKVCDLEKEQKQRMQKAFQKEFKKMVMERIVTVQTKVEAMEKEHQQQNATSDQFSQMQNDQKILLEKISELEKEQKQRKFVQLWIRNQTTDKIGWTNL

SEQ ID NO: 154692 - protein, 22 aa, Heterodera glycines
SKPSFIQIKMCQSMLTNAKMKI

SEQ ID NO: 154693 - protein, 201 aa, Heterodera glycines
MDKTPKKQKTECQKGKKDNDHQRDGSEFGGAAEKHNTEENSGRTKGAEEGTKCQNSTDGKHCQAAQDPTLLRDGRTLQPPLGPNGRGQLRLISTNESDLVELLDLIMDLAGASRVLDKIEAQIAPRQSIVEKELYPNVLKLEKMERKWQMVSKTFSEEQKRHLREFGYTLMRDSQFRSLYGRTKKGETKRENLLGRKSEQI

SEQ ID NO: 154694 - protein, 214 aa, Heterodera glycines
MPLIRRKINAAMAYTMKLNESCAILGKKFDCSFAWLLERYKLSDKYAIKANNQVKFPGHPKCVFLTAASANYFPSLRMLIANIKEHFGCNQKIIAYDLGNVTKNSEWVKEILINFIFFYKDVLLEYDTVIWVDTSIFFGSDNLATILKPLQNGKIGPVQLMSRMYQYLPMAANFLPNKTYGLLGNDPQQFEAGFVILQKMEQTRQLMKWHNLNY

SEQ ID NO: 154695 - protein, 42 aa, Heterodera glycines
MTFRVDKNPALQVLPSVGLAAHGADKYAMCGQTQTVDRYNVS

SEQ ID NO: 154696 - protein, 358 aa, Heterodera glycines
MSSEILWRAVLLLLVDCASILWFFLDHVKKRRRPRKEIFISADCWLLVFDFLAPSQLGLGIALISRRFDLRVDEHFKTRKWKLNKQLLIHSKIVGNGTKQMQIVNSDGNPLPIPRNPLPKKVIGFTGCIQIIYIDQNVVAFLHRFRRLLGICGIYLDISTGNDRILDYFLLQIWPMFRDSMHLMLLDTITFRRFRQLAPSMLSNCLSLRYVVFNDEIVLAFPPDDSAMASDGQAVAKWLYTPLPNGVPKWLKCYVKSSVDQWSSTMEQLKKAFSNASSPVTFRIRLKSSTVIDSVVPFDRINEVTGEQLTLEQYANGFWLSRCPIEWDERNWHNVQHELLNPPNPIHFLIRDGGFDDG

SEQ ID NO: 154697 - protein, 95 aa, Heterodera glycines
MAFVELGVRLFLCGDVMAGRGVDQILPHPSESHLYEGFVNDANDYVRLAERHSGPMPQKRDFDYPWGDALPILDEWKPLVRIINLETSVTTSEDK

SEQ ID NO: 154698 - protein, 41 aa, Heterodera glycines
MRMSFFKQFYETNTGLLSVRQNMNVCCPIESAFGNDNCLNQ

SEQ ID NO: 154699 - protein, 107 aa, Heterodera glycines
MNAREIGKQQKMYKESLSKFAFEPICPIICDGTDGKEKEKKETKETEKEEKEEKREKKNEQSEEKQKNSTERQNEGQKEETDREKKAEKEKAKKGKEKKKPQRGGSN

SEQ ID NO: 154700 - protein, 67 aa, Heterodera glycines
MTWPNFLLPVFLSSVLISYRKEIVQIFLLIGLGLRLRGVWVLLTQIVIPIEIWSRIINIKHRMATHT

SEQ ID NO: 154701 - protein, 1380 aa, Heterodera glycines
MESHSTKHSSNSPIDHILPKKPRQGIVQQGEGGTESSKRDAEAYVKKLYSSIEHVVKYHYAKVKSQFSIEDVPADPEGLLVGIFQYCIDNGIKDSRERGIEPTHVGCVISSSLLDGGDIPIPLRKINDNTINSILNLFLKVAQSKQQQKVTLWGEPFMVTITTVDRYGLPSKRHVKGGQRRKLATVRHQINDQCLIKISNPDDLNYCLFYALQATMVAKTRGWPRMKFHRYLNNKHGQKGQLQCDTVQLMQQIEAPMNLEGYDAETFVPRVVNHWNQAQQQHRFAVFIFGSSGQYKPLYKYIDNSYDTPLLLYYSNNHFDGVQKQGGLFGKPYCLECERPYDKASEHSKSCKARCVLCSRMGPEFPCSSTPGFYKECSGCYKRFRNNDCYHYHLHSNFCMRSKKCKNCGVIWDVLDNNKKGRKGHQCGENFCRLCNNYHNTERGCFIQPFEPKQQNVPYRIVAFDLETMQHQAMDPRQPEKKQHQPNFIAARVACPDCIDNGKRNKATAVCQICGPYRTVAFCQRRFMDTQVNKQVVTENPLKAFVDWLVFQLPKKYDTYAYSHFGGRFDMVLVFRELFRIGFNPNMLRKGNKLYEMKVHQKKNSNPNIIFRDSYNLMPCSLGELIPSYGLDVDDKPFFPHLANRPENYGREIFPTPNDYLASGMMPEKRKKFDEWYAEHRHEPFLLDEALASYCTNDVEILMAALVAFRREFFEVSRRNEGIVAKRAASDEHHNGIDVLRECMTIAGACMRHFRMNHLPSGHLAIVPERGYDNAQNQSELSRRFLHWYMEQHKVQVRMANSPGGEKRIGQYFVDGWVEAERRAIEVNGCVWHACTACYPDDEMLMPNGKTAGAVRERNVKRMEFIRNQVDKLDVYWECEIERMLAKDKQMKMRFEEYPDDGPLRIRDAFMGGRTGPLKLLHNVGADEKISYFDFTSLYPYINCTTRYPVGHPKVHVLNFEVEWRSAADNPYPLALLKVWVVPPRQIDVPVLPVKVDDRLCFPLCIACAKEYPTGGVDNDYHCQHTDQQRGWVSTCTSIELNVALDEGYRVTRVFRVLEYEQSDDKLFRPYIAEFMAQKIQASGFDSSIRGNAEKEQQFVRECAEQFDITIDPTKMAANKGKRSIAKLCLNNLWGRFSLRNYGLSQTLITDDPAVLGDFLDNRSIDVMTIDELEEEHILITYEKKKEWVTEHGCSNIVISLWTTSAARLLLLKAMQKVVRSWGCQLLYTDTDSLVLSHPLDFCPLKTGQHLGEFTDEYPDHEIREFCSGGAKQYGLVLRRKNTSSDAELEYVLKVRGMTLNYDVINNQGLRYETFKQQVMRYARTGEIEQIRIEYPNFLQPNIRSGGSVTSTQMQKCYRPYVGKGIIGNDFNVKNFGHTL

SEQ ID NO: 154702 - protein, 180 aa, Heterodera glycines
MILWHFLIFIFFIAFEIESGIIRPNFDEIFGNEWDKNQNEGKVIRIEQNERNENLQSAAVDQIGEEMGTDPIDQMSEYSNQNVMKKSDQNTKMKPNDQQKRETIQRYEAIKEKLKQKGKLQNKDRKKKEFNERFDEFKSLYGQGKQKAFVKELGIDKKTFINWKKELLPNYHKTKRFFKK

SEQ ID NO: 154703 - protein, 53 aa, Heterodera glycines
MRKGEAMTMSCVSGVSSPASVVTWQLNGSPTKIQPQEQKKQLQVSDIYKYLWI

SEQ ID NO: 154704 - protein, 47 aa, Heterodera glycines
MENTWGFPNFISFAHLMDPDKGFYNKEEDKIALAIDLTVTEEKTENP

SEQ ID NO: 154705 - protein, 96 aa, Heterodera glycines
MATVWSKFASQLTIFGTIRTQWAKCPFRGGVGAVPKQPKGIGRRPPKSINTGKDEDEAISIFWQRKRNDGSAGGRGRKRIFKRKFVEKVCLVQIML

SEQ ID NO: 154706 - protein, 773 aa, Heterodera glycines
MALKSINSASLIKIKVLLNGRIVKFILDSGAEINVIDEETYRLIGQPKIWECAERGRMFDGTEKSFIGKGEGHFEFQGVKVKENFYVAEKGSMNLLSVQTMDAFGLLDGIKAKINSPINLCSAGKESRGKNAPIKSNKADGTPNKDAEKQISQLKQEYTNVFKNELGLCTKVKAHLELKPDAQPIYRKARPVPYNAKNAVDGELDRWEKMGVIGKVEHTEWAAPILVVKKADGNARLCIDYSTGLNNALKDHQHPLPLPEDIFATLNGGQYFSQIDLRDAYLQVELDEASKKLCAIATHRGNYEVKRLPFGIKTAPGIFQSIMDQMLADFDFATAYLDDIIIVSKDQKKHSEHLKKMFSRFQEWGFRVKREKCSFFQDEIKYLGQIIDKNGRRPDPSKITAINEMPEPTDVSSLRSYLGMVNHYQQFIKNMRFVRKPLDDLLKKDTEWNWSDKCKKAFDKIKEILSSKLLLTHYDPQKEIVVAADASDQGIGAVISHKFPDGTMKAIAHVSSALTPAEKNYSQIEKEALAIIFAVQKFHKMIYGRKFTLLTDHKPLLAIFGNKKGVRQCSANRLLRWSLILLAYDFNIEYVNTNDFGQADALSRLIAKGKDAEDRVIANTSVDSEVESIFIGTVEKLPIKFDDIVQSSKSDQNIKKVMKFIRNGWPQNIGNENVEIRIFHQRKEQLSITKDCLMYAERVVIPTQHRAKILQLLHKGHPGMKRMKQLAREYAYWPKMDQEIEQFVENCQPCQNEAKAPTKTNLQSWPRQMDRGR

SEQ ID NO: 154707 - protein, 134 aa, Heterodera glycines
SVFNIVVCIVSYAIPFAGFLYWYSSVPFFLWRKKEHLMASQQSSQVTLLKVVLTVLVLALVYLVCWTPYWVGIFGRRLLNLRLSSGVITMYFVHLMPYVSCAAYPAIFTLLNRPIRSAHSHWKRSMHRRIQQSS

SEQ ID NO: 154708 - protein, 188 aa, Heterodera glycines
SSSAGPSLSVANFTLVEMALPLRGFRQYVALTYLGCNLIGLFANSWVLFVVGPLLWLHNVRVPKSILFHILALCVSDLATMCAMVLLNLEIFCGTWRMVLLNLEIFCGTWRLGSMACTAYLLFDSMNKFSAPIIVLLISRTCYSTVCLDKRRQQSAASLKMAFLHVSVSLCLVLVLLWPLFAYSEVTT

SEQ ID NO: 154709 - protein, 97 aa, Heterodera glycines
MGRKKLTTHCGQIGHAKCQNVEKNGFWDADIVQPQEGADHEKDPRIGEQADEVAAEVSQSDVLTKAPQGKCHFDEGKIGNGKRRAGGGGVQAELHHW

SEQ ID NO: 154710 - protein, 62 aa, Heterodera glycines
MESASVASSEVFEQNGNGSHSMFTKRCILSTSSSISYVEEMHQYENCSTIGLAIKEMPLYGR

SEQ ID NO: 154711 - protein, 54 aa, Heterodera glycines
MPCPGVGEMVATFGCVAGQLSQQGWPTSAAAGATRIRIDKIMQKCSGLCSWFCF

SEQ ID NO: 154712 - protein, 68 aa, Heterodera glycines
MALAKKNRVVKAAEEVDLNVSIASSFFERGFEPSRLVTSTPRPSQQREETPQEARSIEDVTEADFDSP

SEQ ID NO: 154713 - protein, 161 aa, Heterodera glycines
SSAYLINQPKYAFLAELGIQQQNDGVFDGTWNASGKEVDSLCPATNTPIAKVRFGTAEDYERVIEASRAASAIWMEMDYERVIEASRAASAIWMEMPAPTRGEIVRQIGDSLRKNIDNLGKLVSLEMGKIVSLEMGKILSEGRGEVQEFVDIADYATGLSR

SEQ ID NO: 154714 - protein, 75 aa, Heterodera glycines
MVLRPFSSHFSFPSDQSMFFLIRATKFSIQHRNLVLLFMITMAQQQKAHFTTFMESVVLGIIYANDSVKTAETQR

SEQ ID NO: 154715 - protein, 127 aa, Heterodera glycines
MGLKSPAFQTLGFNPPTFNDIPIAGTQPTSISISETQSPAFQTLGLNPPTFNDIPISGTQSPAFQTMGLKSPAFQTLGFNPPTFNDIPIAGTQPTSISISRTQSPAFQTLGLNPPTFQSMGLNPTAF

SEQ ID NO: 154716 - protein, 165 aa, Heterodera glycines
  unsure (1)..(165): unsure at all Xaa locations
AIHCHNRPDRHFVQLPPSRLRGFTVLALTRNNIDVLPSEEVLLEKLPDLKAVDVEGNXTFDCSTLDHYRTLMVMSDCGKTPEQLEADRAKLPTDTQPNEDCDFECVANRRSRELREYVKHLWEMVKEKVGRLAKKHGLDKVVDDVGNFFNDVGERISNIKLKKKK

SEQ ID NO: 154717 - protein, 305 aa, Heterodera glycines
SCCGYRTHEKCIDKVRRVCPSLALARTEFSLQFDLCPEKSLLEQNYQCAECFSPIGFDDDSEKLPRICDFTGLFCCRRCHWNDEMIVPARIVKNWDFEKRAVCRATKQMLTTAMKRPLINFEKRAVCRATKQMLTTAMKRPLINFEKENPTLFKFVHKLDKIQKMRTNIMLMKCYFVYARFARKMRILQHLSRFQHFVENDTMFTMDDLLQLANGRLLADIEAIVRIFTAHITEECEICRGNAFFFSIYPFSENAAICKSCCLSVYHRSCFDRASKRCPRCLRRKARKSGMEENEGDEEEEEDGQ

SEQ ID NO: 154718 - protein, 119 aa, Heterodera glycines
MDRRAYKRKDGLRCSSPSPASSLFSADYLEKIFDFPKVQAAAERRPTCPISRLPVLRRPQQPPLNSAEHVKPAAVNGQPPALNGIENLLQCLENVAFELTEHVCQLQLPDVPSSSSVEK

SEQ ID NO: 154719 - protein, 55 aa, Heterodera glycines
MSKVCAREKCVGIERFLNEQTAEREQQQQIFRMDFSKCTLGSDKIKDLYSDKKIR

SEQ ID NO: 154720 - protein, 266 aa, Heterodera glycines
ARASSLQALSPNFNIIGLLRTGLEQSVPPNAHILCTGRLFISILCTGRLFISTTRARDYKNVIISEFDSREELIQAIICSCAIICSCFIPFYCGLSAPCYRGEQYIDGGFSDNQPAGQIRPGTITVSPFSGESDICPSDDDISMFGFDSMFGFDFYGTPIQFTTQNLFRMVVTLFPPSPEICSRICRQQGFEDTLRFLTKNCNIFQNVSSSNDFAKMAPCVKCLTVQSNVIPEERNCTWMNYLRRQRIFRWWYRLLIPVILPCEMV

SEQ ID NO: 154721 - protein, 67 aa, Heterodera glycines
VLLHCFFPIQMERAKRYIVDQENRTEKDARRTLLKLAEMFESPIPTTSNVARLRKQFDDDDNDADDN

SEQ ID NO: 154722 - protein, 615 aa, Heterodera glycines
DESQLKTSGRRDSRGLLIGSVHSHAPSLEGVSTEDTLQRLPKEDQAEQSPTGTLATRTPKDFFFIKVLGEGSFSTVYFAKEVTTGDEYAIKVLVYFAKEVTTGDEYAIKVLLKSEIRREAKVRYVLREKDIMAALSHPFVIRLYCTFQDNDRLYFALAYAKHGELLDWLRRLGSFDEAGTLFYASEILCALEFLHRCKVIHRDLKPENILVGADWHIMLSDFGTAKIIVKPTKRSVRSSFVGTAHYISPEVLKSEDVPEVLKSEDVGPECDYWALGAIIFQMISGQPPFRAVNEYKILKKILSLDFHFPPFRAVNEYKILKKILSLDFHFPDGFPEVARHLVSRLLVYKPSERLGSSQKGGIEALMRHSFFKDVEWSSLFTRKPPELKPYLPAFKDVEWSSLFTRKPPELKPYLPASSGEPEFYGEYSAAGLWANGLARTERSGVIPADGPRQFGRRRLRIQRNRIQSGSLSVAPSVEQSEQRRQNRLEKQRRENKYHRFVEDNLILKSGLIDKKKGLFARRRMFLLTEGPRLYYVDPVTMHLKGEVPFSEQMRTEAKNFRTFFVHTPKRTYYLFDPERHAKPKRTYYLFDPERHAKDWCDAIDWAREKYLRRDQ

SEQ ID NO: 154723 - protein, 17 aa, Heterodera glycines
LSGVLKVANHESDMYFD

SEQ ID NO: 154724 - protein, 218 aa, Heterodera glycines
MLHNTLSCKAKISVDTIISIEKFLNRDITTRNSAQKKDDQRKNLNESLLYSPEDLNEYSFETEDEDEREGEGSASVELLNWVDKYEPINIVTIIQIKGNFADEFEGTNFEMVRKRWLRKSLISMSMNMDILVICTAQKFVILECSKRPTDGLNSMEMAARVEIERVDDRSFILSLAVFGVQPPQSNSSSQSLTTDWTCICIVYNHSAKYYQNVRHLLL

SEQ ID NO: 154725 - protein, 296 aa, Heterodera glycines
SPTIFPSFGFRSFTGIGTSRKDRYVKKSAADVRTNWVPIKSILRDGKRSADRTFIAPTPGWPFVAVSDNYGRIVLINTRTRRIIRIWKGYRQARCAWIETVSTSRTTPMKKALFLAIFAPKRGLLEIWSMLNGPRVLAFQVEEGSRLLSLPVVHGGILFGGSDVRETESQEAGGRAGAVFLTPDGLLYSVDVPFYLSALSTSATSIYDEHLIKDFSLEHFMIKTENADNESDVDLEKLAEFALRIKTNLARQRFLEALIVSSRGTSTKKSDAGNKKLRTLISVRSLRELVNRMVGK

SEQ ID NO: 154726 - protein, 420 aa, Heterodera glycines
CVKHLSQIQCDRTNPLLAKALSILEFVYDNSGSSAIASSLLNIAKCRLELNDFVGFFNLNLYQTFDNNAQVGTPITAKYDENNLSTKIPTNLLAKLGATLFAPFLVNSFSDFEPFLKSLTSKFRLRKDFFVTSLCAFWLYPPCNFKLDCFSAHFAEFMLGLFNLLVEDSDNSNWTTSFKETLKTIEQMVIESTNVPAALMVAVQMGDLCQKMSVTLNERKASRGSEQKTPTEDGDAFIVFDKPELELYSELCNELPSFWALLSLHLSVLHLLQWLSQQMTDESLSSQLSTSNFSVAKLLQKGVSFYREQLGLWVSNLPTFSAHGIVSLFSSNVHIEKNTDEIHFNAKTFHALRLLCKGTLPHNLRLELILCDCVWECASAWYKDESRRVTKLKVVFWRCIHCFSFRPIPSSAFYRPAPIP

SEQ ID NO: 154727 - protein, 96 aa, Heterodera glycines
MAPQKANGTDMAKPRGYVQQQQPKQAERDEQKPSICTVMDEQLKKRYLSVKEPETPTEGQQKMVYMDLGSKSQGEIDGAFEMPPKRRKGRPPNKKA

SEQ ID NO: 154728 - protein, 29 aa, Heterodera glycines
MRKAKCETPKNANNAKGEMRKAKPRPIPA

SEQ ID NO: 154729 - protein, 24 aa, Heterodera glycines
MTRTKYSNLTCHNLWHCFAQVDCQ

SEQ ID NO: 154730 - protein, 178 aa, Heterodera glycines
MGRAQFEYDEVGNTFYYVIVSFFAVILFPLTHFLWPSLPKRTEVLKRGCRCEGDLVKRFRKEQIKPWEKAKCVIKGFVLLILWALFILLAYKVSQLEQTFEEYDPYKILQLDVDADVGEIKKKYRELSKQHHPDKGGDPVTFDGIVKAYKALTDEESRENWRLYGNPDGPKGDDFDVQ

SEQ ID NO: 154731 - protein, 122 aa, Heterodera glycines
MNTIRDIKNIELVCGSRIFVVRAKIASVVSTEYNACISCRKGKCNCGMEKVKSSFLRLSLLDDTDVLGGVAFFGVKNVEKGDGMEKVKNLVGTICTLKVNVSVKEYGGKKGIYYALIDIYEI

SEQ ID NO: 154732 - protein, 38 aa, Heterodera glycines
MALINALFKSEMANRTRRCPRLCRPRPPSPICRIASIK

SEQ ID NO: 154733 - protein, 351 aa, Heterodera glycines
ALLFELEGFAHKCLRYICQNAAKLFRSIDFLQIDQNVLCNLLESDRLLLSNEFEIWKAAIRWADKKCRQNGMKWSAENRRSVLGPALFKIRFPNIHEENFAKSVVPSGVLTMEEVIGVYQFNSHPYLCHPFRYPYGVPGLYALKFPSHGRISDWNKAKCSIKRRGTLALEIKNLSKFAQENIGSERISKTVFIKEFPWKIRAYIRTKKEAPEHSDSGESDSEDNPTEVDNWTEVDNWTEVDNWTVKYTKRLKKNAVAEGTNYEGWICQCSSTVRIVSQKSGVRDYMRGEFTEEDTFYNESNSCGYANFISFAELMDQSRGLYDKNEDKVTVAIDLTMKDEKTEENHKYPNV

SEQ ID NO: 154734 - protein, 122 aa, Heterodera glycines
MSWIFGIKPQPSSIPAPPDDPNRNPPTPADEKQQKIGAQSAYTFDSTALERAAHAAKTLEKSTNAKQALELSRLQELTKQKEYDLQQKQLEARIAAMQSENVRVAEEERRKTLIEETKHARA

SEQ ID NO: 154735 - protein, 66 aa, Heterodera glycines
GKNLLEFNVLTKWGCTDKAPEEFQLDPEQLIINSNESKQIIRKECSYKLGKIGVLMANAAIKLPIP

SEQ ID NO: 154736 - protein, 89 aa, Heterodera glycines
EIEFKKRQNKSFDDSAFVAEEMKKKKICAPEIECQHCGGVFGCIPDEHWWQSEGNGCCPPTQKAVCCLTKLPEAPLTISLFFILTVSVL

SEQ ID NO: 154737 - protein, 131 aa, Heterodera glycines
MSEGSVPFLSRKTGFHDLATPPSEWQLQIQRRKNARTNSNANDGVPTPTVILRVDLTSQQTQERIVYDRTLITAQAYALAATNSSAVAPSAHGTSADLLAVLAPPPPPPLKAAKQEVDVLGGIRAREQNTL

SEQ ID NO: 154738 - protein, 38 aa, Heterodera glycines
SYRTTPTILNLIYSEQSYGSKSLPTTFRPTTFWGAPQF

SEQ ID NO: 154739 - protein, 17 aa, Heterodera glycines
MTTVFQLNVFSTYCNCC

SEQ ID NO: 154740 - protein, 59 aa, Heterodera glycines
MSDNIFAMLDDFDIENIDPTLNFSNDAWMEEVGETVTYIFFEGEVLGHMEKFNDNLNMY

SEQ ID NO: 154741 - protein, 118 aa, Heterodera glycines
MRREESHEWLQEKVINIEKTQFEMEKQLQMLKQQQQQQQHQQQQHQPQQQQQQPQQQNAEIFEVERIVDVRKARDGKSEYKVIWTGYTESSWEPLSNLWGATEELYNLNCFIVAELLS

SEQ ID NO: 154742 - protein, 65 aa, Heterodera glycines
MASISPNSEPLIRIRTKIENSNFSKFTFIQHNRSKSEEVHEEGYTVIWFKRFRSIIYMSIVLIIL

SEQ ID NO: 154743 - protein, 58 aa, Heterodera glycines
MVKNDVFPCFGNSLAIPCFVLALSDDSRGFDARVSQQLPLTTGPRNCGKFDRHNAGWQ

SEQ ID NO: 154744 - protein, 37 aa, Heterodera glycines
MSNGNDQNDQENVLQVHILTFSKKSLLERPPSDNFAL

SEQ ID NO: 154745 - protein, 26 aa, Heterodera glycines
SFKPLGFILDKFCIFCFLCIYSIINI

SEQ ID NO: 154746 - protein, 74 aa, Heterodera glycines
MPSPIAAAPIKKCSALLANSRKRHQPTKMETDRAESAENIAPIKWSDSCRSTGETSRTWRALKGKEDQRKANHC

SEQ ID NO: 154747 - protein, 79 aa, Heterodera glycines
MPFSRKYFAIASTILLELLARFPQMFFVLGIGLGWLSRLMHKCFETNNVQIGAHRSAIITQFDGLSGGHKGGRIAFCWP

SEQ ID NO: 154748 - protein, 228 aa, Heterodera glycines
MAVHSYYGQLKERDLMFAILNAIKLVREGTIPPIFIEKLSAVVHDKFVAVDASLAFQQSEEWSRDGTQNTALFRGTDQHGPQQQQIPTGRKGRFPDLVRIADELDDILIDHMLCSVPRPFSPYKTSARTAPPDSVAFISGLRRSLYDPDSVKDPQTHKFNNIYVEVVLSKKLLQKKLDKFNQLREGDPVELPQNVDPLCASATFYDLNLRRLDAMEAVLLGERRVRDW

SEQ ID NO: 154749 - protein, 111 aa, Heterodera glycines
MAGFFSYFWVMADNGWMPMRLFFLRKEWDSVGVNNLEDSYGQEWTYDQRKVLEATCQTAFFIAIVVTQWADLLVVKTRRNSLVQQGMDNWPLNFALLIETAIAVFLAYTPG

SEQ ID NO: 154750 - protein, 226 aa, Heterodera glycines
LNASTVAMFIRGAPPEGEKGGGNDINQLNAIRDRRQLWRNARIPYALSSQYSSYSRSVIASAMQEYAKNTCIQWTPRTAVDNDYVYIVPERGCYSMVGRTGGRQILSLGNGCIQKVGRTGGRQILSLGNGCIQKGIIIHEMMHATGFFHEQSRTDRDNFITILWHNILPGMQGQFEKYSAATIQTLGSDYDFGSIMHYGPNAFTRNGLPTIPRRRATIGQRSGFSK

SEQ ID NO: 154751 - protein, 97 aa, Heterodera glycines
MKGLSVEVVSNGVLNGPQQQPLASSMASFPSLSSLHHHQFAAHQLKPSESAGTVTDFAARFIANGTTGPPLQSYLSPNTTVASGGIGKTKGLGTGGN

SEQ ID NO: 154752 - protein, 65 aa, Heterodera glycines
MSAPLFTLFTCFLFVLCYLVPLFLVTFFYTKLLSKLFWVATAFAVYLEYAGEHNGAVPPIFVYCM

SEQ ID NO: 154753 - protein, 143 aa, Heterodera glycines
MNVLNSLNSSTAVDLEGGGGGGSIKAAYDLTQEVLEKVSAAVVAEKEQHQQQQQQVEGVQSELNEQQQKQQQQHHQQQQHEDTSQLPNWATSSSAETEANNDHFPGDADEDEAAIVHEQTLLLHSSDSMDLLLRIDCESTTYL

SEQ ID NO: 154754 - protein, 241 aa, Heterodera glycines
KKTKIQSDWDVWSLKYGHFCDNISPLAVRNVDDLDNLRRLISPTILSDLDQLNSILPGDLLPDVLADNDFGGPNATSAGQTLSKWLHNPRKDGQPKSLHCLNFTTSAPTNFEWLTNFKEVFVRARTSVSYSVCLTFFVTTMPIEPFELVNEQTKEKLTLKKESDIGSSRCWLLKRCPITIVGETAETVQKQQQQQKKKDGNSANKLNNVYFHLSEGKNCIGPLSPPAEAAKEASQSSENDV

SEQ ID NO: 154755 - protein, 396 aa, Heterodera glycines
MEEQRSDQNSCKSAEHKSDQSKSKEQRSDQNSRKSAEHKSDQSKSKEQRSDQNSSMSAEHKSGQSKSKMEEQRSDQNSSKSAEHKSDQSKSKEQRSDQNSSMSAEHKSGQSKSKMEEQRSDQNSSKSAEHKSDQSKSKEQRSDQNSSMSAEHKSGQSKSKMEEQRSDQNSSKSAEHKSDQSKSKEQRSDQNSSMSAEHKSGQSKSKMEEQRSDQNSSKSAEHKSDQSKSKEQRSDQNSRKSAEHKSDQSKSKEQRSDQNASKSAEHKSDQSKSKMEEQRSDQNSSMSAEHRSDQSKIEEMWSDQRNNQFEDKRKDQSHEEEIYYENHDYRQSYDDEFEEEIDDYAHKSNDYNFEPFDQQKILQLYSMWMAKLALSTTNTVDKMENIHRIPCTFSGL

SEQ ID NO: 154756 - protein, 132 aa, Heterodera glycines
MLRFVLLFLLFVVGLALAKKADLEELESILDELDESRTAGTGAGGAEPRQERDQQQLDQLRASEPNPCDQHVCGWGKECVVDKKGRPVCECITKCPELDNDPLDQARHFWGTGRKKFYLQSLEGEKMANLCI

SEQ ID NO: 154757 - protein, 73 aa, Heterodera glycines
MTSRKTVRVGAVRVGAVRVGAVRVEAVRVGAVRVGAVRVEFLREFRQISNNRIENRAYIFRVLPYFFHELPVQ

SEQ ID NO: 154758 - protein, 17 aa, Heterodera glycines
GLADENFQKPHSASKKA

SEQ ID NO: 154759 - protein, 129 aa, Heterodera glycines
MDNQSDCIAKTFKNKRTLIGSTISRSYQIHFSVPALSMQMVPFEFLNEWTKEKLTLAKANEWDIDWIMKRCKIIGEKEEKQQKDDNWDNVFIWLFGTTNSIGPLSPPPEEVEEDEAGQSITKGTSSADK

SEQ ID NO: 154760 - protein, 23 aa, Heterodera glycines
MVSSLGLGRLNSRGHRASLEPRG

SEQ ID NO: 154761 - protein, 48 aa, Heterodera glycines
INNNYFFFSLFKFILTPAGVNVVLFFPSHWSHPLICREIIISHNTYYN

SEQ ID NO: 154762 - protein, 21 aa, Heterodera glycines
LGTHAFRRSRFGARVSALPFR

SEQ ID NO: 154763 - protein, 52 aa, Heterodera glycines
MEDKWPQMEQMSTRSWATGHMITPKWFEGTHPVQRWLVLFNLSDCCWTPFWH

SEQ ID NO: 154764 - protein, 38 aa, Heterodera glycines; identical to SEQ ID NO: 140703

SEQ ID NO: 154765 - protein, 136 aa, Heterodera glycines
MYANFPGTCRAASSSFSAHRLRLLLIVVIFVVLSVVADVAHAMGSMFSKNQSDVMIGRDLSDVVIGHAMWQLCMNQCGKHNANLALCEAGFGFIINRKICRCKILEEKCVPFSFGEPLPDVPVDDDDEYINCFRNS

SEQ ID NO: 154766 - protein, 244 aa, Heterodera glycines
MVLTRNKTEKFKEMRSSSTEANRKRKEWRRESGRKGGSTPKTLKQTEAETTADGEGTLTQAAESGPSTSTLDLRPRSSPRPLSATPVRHHVRVRPETTDKATNMDFTTTDNATNMDLTTMDKATDVDLAYEDAATQTEQLDKQLEEQEQTISFLRLQVRNRDAMIADLRRQLEEKMAPPMETPTTSKTTPTGRPKMNVDHLQRTSRRKLADEIAARRSDQREEHDEFDQPEEETDEISLINVID

SEQ ID NO: 154767 - protein, 120 aa, Heterodera glycines
MAFGGHIANIAREGIWASLTGGWYYEPANSLFCNTLHLYIWSLLFVLPILFGLSTTNSTITVAIIYLSLLGFLFVFIKMSVAFLHHIFDTVQPIKYKREREYLLRDIFMSGAEMNPSSGF

SEQ ID NO: 154768 - protein, 186 aa, Heterodera glycines
MHFLILVQIFLICFTNTSLNLTLSNLFESCGKYTVDSLQMKLRYNSHNRSSPLEIWISSEDDFPGPLGMTSIGFFVDNDGVVKCAAVNFFKGYEGRRIMTKTRNVMEQIQARLPRFQRQHIIELYDTGNALRFNEEILIMELSIETFHDRLYKRIDSYKNDQEMQKYIRQLTQPIMELHQGTYYAN

SEQ ID NO: 154769 - protein, 75 aa, Heterodera glycines
MKITPSNYMYVSVNDEQILKIKNFESAKIIDSGDKNESYLFEIDAVESFTSFNSEYMGPENYAQTKEVRFHFSIS

SEQ ID NO: 154770 - protein, 145 aa, Heterodera glycines
MFLIDQNALIKISTKFDIWSLGMIIIEIHVDQLRFAEGKNSLNEVIYFHVIRVWPGSGSCRALILPGSRSRPFFGNLDFPWTCFPGILARNRFKSNMESMSRIQVKDQGPGFSMSNSAQIEEFTFAKSVICTKDLNETQHWTPLA

SEQ ID NO: 154771 - protein, 273 aa, Heterodera glycines
MTKKIVSPFNSNVEKQSGELFVFGFRFIKNRKDGSWFRCEQRNCPATAKLDDNDLMTGILGAKGHHHGCAPSRYDAETKRNQMKRLIKEEPKMKPCQIRAQIRTDIDDEVFELLGTNEALDQMANSCCQCSNRIVGGASTAHSAVRQSRGCKCSSSVVMSTTEWWLQRKPCYLRELNHHPSLSDFIAAFIKDIDKQLDIGRAERLQKSTKRRQRYIIKEQNVVRILDEADFESQEGLTNALNLIGLVMQGFVEGLHIRGNEDSEEETDDTDGN

SEQ ID NO: 154772 - protein, 156 aa, Heterodera glycines
MDTSAMQSAERIQKNERVEEKGKRCKGVERIQKNERVEEKGKRCKGVERIQKNERVEEKGKRCKGVERIQKNERVEEKGKRCKGVERIQKNERVEEKGKRCKGVERIQKNERVEEKGKRCKWPSRRGGKRNGRTDWAKENVIEKPALIGKTPNFSY

SEQ ID NO: 154773 - protein, 57 aa, Heterodera glycines
MDRIRRVASNLSLTAKGQRERRQNLALLWGRGEAKKAKNGEQKERTKEEGALSKLCK

SEQ ID NO: 154774 - protein, 192 aa, Heterodera glycines
MSDNPKEAEREMEKAIFISADCWLEVFDLLPIYQLGHGIALISHRFDRRVDEHFKTRKWTLDKLEIRCKIGTNEMEIINSKGKALPIPQNPLPNKVIGFRSIEIFFIDYNVLTFLHHFHRFFAVISTKWYITTENVRILEFIVLTIWPMFKHPIHEMILSPVIFRRMRQFAPSHSVQLSVPPNCLSLFRHFA

SEQ ID NO: 154775 - protein, 273 aa, Heterodera glycines
MQIVNSDGNPLPIPQNPLPNKVIGFRHIQIIYIDQNVITFLRRFHRFFAFCSIYLDIRTENVRILDFVLLNVLPMLRDSIRLMLLNTIAFRRLRQLAPSLLNNCPFLRAVVFEDAIFPAFPPDDSANASDGQAVTKWLFTPRPDGVPKWLTIRSFVDSPDQWSSTMEQLKAAFSNASSPVSFCIHFLMSSPLDFIVPFDLINEVTGEKLFLLQSENDFWLIRFQIGWDERKWDNVKDKLKNRTNPIVIRIKDGGFDDGLLDDASPGPNDQQQK

SEQ ID NO: 154776 - protein, 167 aa, Heterodera glycines
MRRTANCWTCWMLWSSTRFYPVYLHILIGTNAKVVIFLRSVSRCRALNQLLIEQNFPSIAIHRAMAQEERLARYQQFKDFQKRILVATNLFGRGMDIERVNIVFNYDMPEDTDTYLHRIGFRFLILTFFCPGLKNMLGFLKVLTTNLNADLPNSVLEARGSKWMPDV

SEQ ID NO: 154777 - protein, 226 aa, Heterodera glycines
MDEEQLLDYEEEQEETQEQQSKNDAATNGDATKKIKVKMQHECIPQAILGMDIVCQAKSGMGKTAVFVLATLQQLTPTDGTAFMPRVKVSVFFGGMPIKKDEEVLAKNTPHIVVGTPGRLLALGRTGHLKLKGVKFFVLDECDKMIGDADMRHDVQEIFKMTPQEKQVMMFSATLPRELRVVCKKFMQEKSCDCSAKWVPQMAILTQRERDGRCASQLSVGRKRIR

SEQ ID NO: 154778 - protein, 810 aa, Heterodera glycines
MELDEKSKPLCTINTHCGLFQCQRLPVGVKSAPSIFQHLMDQICAGIPGVFSYLDDCLIASKTLEDHVNALHTLFQRIKDFGLRIQLEKCKFLQKELLFLGHIVSSNGIRPDPARSEAIQKMPAPHDKTTIRSFLGALNYYGRFVKPMREIRAPLDQLLRKDESWSWGDDQQSAFEQAKAIMVSELLLTHYDPTLPIVVAADASKDGIGATISHIFPDKKEKVIEHASTVLTNAQQNYSQIEKEALALVFAVQKFHRMLFGRKFTLLTDHKPLLAIFGSKKGIPIYAASRLQRWALIMANYDFEIRYINTASFGQADVLSRLIANYPRPEEDILIANICTETECYISTILQTKTEQLPVTADEIAEATPKDEILKKILAFTKSNWPKKSSDPDIAPYFPKRENILEIEDCLLFQNRVIVPQSLRNRMLKSLHMAHPGIVRMKALARQHVYWPGMDSEIERIVRQCEECQKAQKSPIKAPLAPWTPTDKVFQRVHIDFAGPCQDGHVYFILVDSFSKWPEVYQMNSMTAAATVFTLRSIIHRLGIPEEIVSDNGTQFRSSEFAALCKEFGIKHTFTPPFHPQSNGQVERFVDTFKRAMMKCKGDKNSLEKVLLSYRSTPNSAIDGYSPDQLFLGRKLRTKLALVHPKGQIDQSEKFEKGKFKQHQKDYSTKMAQQFDRNNGTKAIEFLPTDSVLLLNYRLGKSHWLQGTIVKRFNNSPTYRVHVPTLGRIVHRHANQLRRRLDFEDNSNWEPPIQEQMAIDPNQRTPPRQHAAIDQRTPPVVDQARQKAKSPIGVRRSQRVPKPVKRFTPG

SEQ ID NO: 154779 - protein, 84 aa, Heterodera glycines
PYPLCCGLGFIPTCGLALSRPPPLWLTISCILPAPSHSSPCLMSIKRSPPPPARPSAVGSARLFQSNIYPPLGASSSPRGRGGG

SEQ ID NO: 154780 - protein, 125 aa, Heterodera glycines
MSHPPPIDALSTSTAASSSLASTGAARLAPALFHAGSAKTNWTAMDCVWLEEVHNIQARTEDYEPFVLAPEQSRVVAELVRGCVHVRHGGQFVCAVVICSGFTASQFAQLFHRKFGRGRTCFCAQ

SEQ ID NO: 154781 - protein, 30 aa, Heterodera glycines; identical to SEQ ID NO: 136834

SEQ ID NO: 154782 - protein, 205 aa, Heterodera glycines
MCRCRQGFLDISPNITIKPGRLCKSLENECVKGSHDCARDGGICEDTPELKRFGKGWDIFRNDEVIIEIREWLNCLTDSYTCRCAANFLDVSLDRKNRPGRNCKRLIDECASGQNDCFPGALCTDTEDSYTCACPPNHLDVSPDSAKRPGRRCLLRVNECNVQGLSDCSPNANCQDTDEVGMGATTAHARMALWTKVQTKGNGRA

SEQ ID NO: 154783 - protein, 265 aa, Heterodera glycines
MRLRSIVQKLTCPQPPRPPPSPGGCSVQSQIGCDRTRNEHCELVNGKPTCRCPGPFARHPQTGVCGGDLCNPELPTSCPHPELCAKTPFSNFRCVCPAQHSRDHQLGICLSSVQQRQNQQHQQQQSNFSNSSTNANFGTTFVSGGTNQKPAPQQHHVSTQSTAGGGTNNSAGNGGKFPPCAAGTVPNPRTGKCAVPGSCDPAEEQPCDVRKREKCLLHSTGQFHACQCLHGEKRHPATEICLRNECLDKRENDCDRSAKCIDTDE

SEQ ID NO: 154784 - protein, 227 aa, Heterodera glycines
AICVNVFDSFRCQCKPGYWDMSPDPETKPGRACKELININECATDSHDCSPFAECVDATDGYACVCRDGFVDSSSQYELLPGRKCSNASNECTDRSLNTCDENADCVDTPAGYSCKCIPGYVDVSSSANLPPGRVCTVVTTCPKQKTDLMFLIDGSGSIGSAVFRNEVLRFVRDFVELFDIGLENTRVGLIQYSDQIRHEFDLNQYVDKPSLLQAIAQTQYLTGLTR

SEQ ID NO: 154785 - protein, 386 aa, Heterodera glycines
DYGQNAPESEQCRNANCAPEAECNEGPQGPVCRCLAGFLDVSAQHGKGPGKVCRLIQNECNAGKHDCSRDANCIDTADAFTCRCKEGFRDDSPSREKPGRVCTRTEVPDSPECDVNDEVPDSPECDVNDPMSCDKGKHEACLFISGSYHCSCPMGYGRLPDGRCLAINECEDARLNECSEDAECIDQAEAYTCKCKSGFADISPQGKPGTLCRQRINECAQPQAFDVDCDANAICIDTEESFSCRCRPGFADISEQFNKLPGRRCVEAVNECLDRKLNDCSDNAQCEDSKEGYTCKCRAGFLDASENAGKYPGRVCIKSDRNLSGGSASSAFEFDDTCDPKLKACGLQCTDRMQPGTFVCACPEGQFLYTDGTCRLATACVSANAT

SEQ ID NO: 154786 - protein, 72 aa, Heterodera glycines
MAKALAVPKTVLDMWMNKDLPSLRELVPALVQLLRDNFKHESIMCQIHYNGCIVILNKCDALLNILIASFPK

SEQ ID NO: 154787 - protein, 33 aa, Heterodera glycines
THFVFINFEKFWTFRVFLLFWTFRGLDTLWGCL

SEQ ID NO: 154788 - protein, 369 aa, Heterodera glycines
HASHNSLSPASSTAAMPTEAALAVNTKFTSYSPHWTPRQSQMALNTQHFQQRVINVSNAPPVALKQSESGEWEIKQGSGGLVSCVDPVMSVNPENMWLANLGMVNPENMWLANLGMNIDKFKITSTEYLEKIPAHIAAPATNTLGPAHIAAPATNTLGLPLMKQALADVLFHVIANDEQKEALADVLFHVIANDEQKEDDESAVKKQIREEMSLLGVLNNYNRGNYKLNPVIVQEQDYNVYYGGISNGLLWPALHNLPEYILPEYSDSKVLNEHWFSYVRVNYQFAIDAVRNSRPQDFFAIDAVRNSRPQDFIWIHDYHLMLTGMIMQSLERNLEIGFFLHIPFQVFGMPKIINYRSHRGEKELVTNCL

SEQ ID NO: 154789 - protein, 65 aa, Heterodera glycines
MQSICSIFELKLTFPLSSLLWSSVELEAGRDPEGSKLHFLKISKTACQPNIFNKFITNSIRYQKC

SEQ ID NO: 154790 - protein, 128 aa, Heterodera glycines
MRVPIKVPDYYDYIPFPVDLGSIAERLKLGYYTHVTYHILNGQSKRTLRYYCAHNSYQERMFVADIRRMFDNCYKFNSPESQYYYHGYKLNELFDRLTRQHFAHCKLQAPLPAVKPEYVPNAGGGGRK

SEQ ID NO: 154791 - protein, 160 aa, Heterodera glycines
QNFIRSFREHHVDPTAITRHDFVEVNGDNFMLCIPKLGHIAWQHWTSEPRELEQHLPIHWFWFLCGFYVALTNQIHKWSHTYFNLPGWVILLQQCHLILPRQHHKLHHISPHACRYCITTGWLNPALDAIGFWRKMEFLVSVITGWKPRDDDLKWATKLE

SEQ ID NO: 154792 - protein, 90 aa, Heterodera glycines
MGFFKVPEESPNGNANVCMGEAKPRWGPTHAGAKQLASMYGKGKPGMGLKLSSTQSQGNDSKKSLAFALRQPFFCRSAAPSFTTFGLSPS

SEQ ID NO: 154793 - protein, 124 aa, Heterodera glycines; identical to SEQ ID NO: 128488

SEQ ID NO: 154794 - protein, 79 aa, Heterodera glycines; identical to SEQ ID NO: 126221

SEQ ID NO: 154795 - protein, 36 aa, Heterodera glycines
QISRADPQLSNVKDEDDQPDYDEPQNDEPENEENSF

SEQ ID NO: 154796 - protein, 278 aa, Heterodera glycines
MAKRKIVCKLNAIKSAQKRVQNREERQEKLERARQAKSAKKTALQPNPNAETPQQDEAGPSTSAASAEEAMEPPPPTPGPVPTPEMDEEILEFDDPPPSTPATPIGDLVPFPSTPTAPMDTGETTPPPLAIDERSERIEQLEKQLKDRDDTIKFLREQVLNREALISDLRRQLDEHMVPPMAPPTTSKTPPNRGRPKKRLDELQRSARRDIVDKIVGVIDRNRSRSASRASLDRIHREIRHKFSHYTPKKGQSCRREWKRRMDFCCLPSSGRRWLTNG

SEQ ID NO: 154797 - protein, 17 aa, Heterodera glycines
MKWVEEINNDVTEVKGI

SEQ ID NO: 154798 - protein, 51 aa, Heterodera glycines
RLIEPVKSFRMISRLFDSVNNFKNYIDSNLAQTELARRSWPVPPVAASARR

SEQ ID NO: 154799 - protein, 42 aa, Heterodera glycines
MSVKVKEQMKVSGNKAFFVLLVQMIGVVLGVLIAAATGFFNE

SEQ ID NO: 154800 - protein, 29 aa, Heterodera glycines
MDSDVFNYLIYKTSYRAKRDEEDNNGDGD

SEQ ID NO: 154801 - protein, 96 aa, Heterodera glycines
APQPTTSTKTAAPEWNVAPSAAKMDDCFEDEEEKRKSSSSTTGNAVKILAIAAGAAWAFALAVWRMPEVDDENEEPEPPAQRFENVEEEKPAADEE

SEQ ID NO: 154802 - protein, 138 aa, Heterodera glycines
MYEFRIVAANDEGTSVPVIVLQETTDNWVPPIPFGQYVIALTSTVLALLISALKKCLRHRFSDFMFSFALGSLSGSATFHLLPKAFSICNPNFGLSLFVIATIYVSFFSANAIKIALKMRKNDEETAGNEMDEQQEEA

SEQ ID NO: 154803 - protein, 28 aa, Heterodera glycines
MSKIVSILFNKILSIKVVVKYANVCVYI

SEQ ID NO: 154804 - protein, 42 aa, Heterodera glycines; identical to SEQ ID NO: 154799

SEQ ID NO: 154805 - protein, 107 aa, Heterodera glycines
MNRALSIKLLTIFHNVFDGFLIGSSARAPLSCLSISVALLCKRSKKLRPGKSMKMNLVLHLVSALTCAIGFSSGLLIDLLLYDTVVKYGYALGSGMFIYISAVCLFF

SEQ ID NO: 154806 - protein, 27 aa, Heterodera glycines
MAVLKFSIPVILLDEILKFVARRMEAH

SEQ ID NO: 154807 - protein, 81 aa, Heterodera glycines
MSFEYNLEMFLEKSENELSLEEHWLGMVLRNEEEINYGIIKEEENGENAQSKGKKQSTKIFYGPTDTENVLRIDFDGKIAQ

SEQ ID NO: 154808 - protein, 118 aa, Heterodera glycines
MLLLVKTHKKIMLPKRKNLKALAEKAFSDSHFINRDNCIKCKFLFIFNYLLVLFRDWYFGKSLNLNLDFQIDLDLDFLDKKSRPGSRPISNIVVFTQRNLKGLIKITFYFIFCHKKQQ

SEQ ID NO: 154809 - protein, 49 aa, Heterodera glycines
MTPEEQQQLMGSRRPFLEPITKSTKQQNGKPRLNKADIPLNFDARQHFY

SEQ ID NO: 154810 - protein, 53 aa, Heterodera glycines
CRAMEKHKAAASMGIARESRFESKENNGTNEGMNERINFVPNCRATVLLPIIF

SEQ ID NO: 154811 - protein, 47 aa, Heterodera glycines
NVQSPVTTPSRGQQTLSLSAALVQQQQQSGTYTPNVPQGDGAATATD

SEQ ID NO: 154812 - protein, 104 aa, Heterodera glycines
MGIVARRLLKNRAIQKQLDRRQKSRLNYVEKFKKIIFFFKDMKTLRRQQAAAGRSPIVVHSAGIGLPRTEPVHQRQEICTVPAHEVIYDVPFDGQREEEDEDSF

SEQ ID NO: 154813 - protein, 100 aa, Heterodera glycines
MSTSESKNGKNLNSSLNINNLSPTAPDEGDCEMPDERVLHLECFESGDYDMMELYGLDRAKEMLIDLRDYAEAHGMACKHVKMLLYKLDKGLIKWKGTKP

SEQ ID NO: 154814 - protein, 241 aa, Heterodera glycines
MAINISDKKSLCNQILGQTDLTVTSSGITISGPRLSTPRFIPFDEAGRCRCCKGTESEIDTVITKEGITLWCTRIEKTQFIPFDVVYDLPGHCFFRLKNKSRVFNIPYGDIPSSDTHTTKRRTHTNDHQHELKRKAKVALDLVEAGLMADAMQDGARWKKAKTAINVLGNLLLAESLDNTSANDTPLKNDTVDIKKEEANVEEEKVQEEPKEKEENKEDLGDIDKTLDEFFNSIKASTSNM

SEQ ID NO: 154815 - protein, 529 aa, Heterodera glycines
MDTAQQRIAIRRKLKKDEAYDDDSEHKKYRVHYPPSPPRLPLPPRAKAKIEPPPSRPTAKREPKQQKPTKFELKPSKFDSDLRPKVAPPPRPKKEPEFPLDPRPSTSRQAGHLPPPAPKIIPKPEPTKRPVPYRIPKREPKIVEQQPQPLQQPLPASAVEEEMPTVPPPRRGTKRHYPVNGENDGEVRIRKRVRQARRVRVQYSPELGPSTSAQSDEQQQQQQRELFAIPSNQLTMTQRVERLYIKCNRYADRMGALSRHNRGHRYLLVAVDVLSKRLFVVPLKNKRAEEMLEAFKQLIDQMPMVPHRIFSDKGTEFKNRLLKEFFDEQEIKKHEPVHSSVKASVAERAIRNIKQRLYRYFAEKETLNWVDAVQKIVDGINSAPSRVHGMRPNDVNFSNAQKVWKRLYGHPALQKRTPRFRNDQFVRMSREKGQFEKGYLPNYGDEILEIDEVLKAVRPIRYKLRDEHGEKFKGSFYEQELARVRKDAETSYRIEKVYRKRKLSDGSTEMLVKFIGYPNREWINESQLV

SEQ ID NO: 154816 - protein, 99 aa, Heterodera glycines
LPYNAQREIEQMDTAQQRIAIRRKLKKDEAYDDDSEHKKYRVHYPPSPPRLPLPPRAKAKIEPPPSRPTAKREPKQQKPTKFELKPSKFDSDLRPKVAP

SEQ ID NO: 154817 - protein, 134 aa, Heterodera glycines
MNVMLKTEGYKNRENPLAASPRERAATKKQLSLAFGALATFLKCDGLNTSADSAAPLSLYYTFNRTKKNILNAAGQFKDKITKRDVTPPLKFYSDLCFALTTGFNTNIRELNNLAHLPLTSAKMAFYFEQLLDS

SEQ ID NO: 154818 - protein, 140 aa, Heterodera glycines
MDKEFYPPLAQLVDYKLPVYGDPSKLKHIGHALASKRDGPEKQQLLFFLSVLIAVTGIDISAVMASLGDDDLNLSGGTAMDISSADITLGASNVRKKTRLDILVKQLFKTISCPWLISSWSRSRWKKSTSYSKITISLSL

SEQ ID NO: 154819 - protein, 318 aa, Heterodera glycines
LLFNQLFFTAAYQQHHVSFPSLLLLLLKTTFRIRREAAHCLVQIYNSLPESRLGESPPLIDYFRQNFGSKTSPDIPLPNNYAATSSNLQNNLLGQALPAAIGLIRGQDGALPAAIGLIRGQDGRECPEYVLEFIINLIRLNDNSTNRYSDDYYRGALIHALGSTNRYSDDYYRGALIHALGTKGKTLTMSERTVEQPDTKGKTLTMSERTVEQPDCLSVHARGVLREVTHALNMDTMRPSFGRIISIHCIQVLYELQKLRHLPIDTDIFWKFGLQKLRHLPIDTDIFWKFGAKAFMHRAIIIYEDEFIEEPMSADFDL

SEQ ID NO: 154820 - protein, 382 aa, Heterodera glycines
MFRKFIAIGEPNLEAMDYAAGVASFLVIAVGGVLIGLLFSLITCIATKLTTRLTTRVRILAPVFVFIVPYMAYLTAELFGLSSILAIVACGISMKQYVKGIVACGISMKQYVKGNLSHDASNSVKYFVKMLAQCSETVIFMFLGLSAVSKVHLWDWAFIVATIAFCLLYRVIGVVVVVVQCIFLNRFRTKKFSFSDQFVLSYGGLRGAIAFGLVVSLEDSLPPKQMFVTTCISVIFFTFVTTCISVIFFTVFFQGITIRPLLHWLKVKKNEDKEETMFEKLCSRNCDYLMAGINCDYLMAGIEDIVGRKGPNAIRDTFERFNAKVLFERFNAKVLKPALMRGEQRKAFDASPIIRAYNKLTLLEAQRTVRGSNEFKNRHLTV

SEQ ID NO: 154821 - protein, 54 aa, Heterodera glycines
RKKCVCITCALTHSVLIGGPTERTEKKKGTADGLSPFSVSISANCDGGTFLFTK

SEQ ID NO: 154822 - protein, 29 aa, Heterodera glycines
MAISFFEKFSMQQTLSNMKRSAKNGYLFF

SEQ ID NO: 154823 - protein, 29 aa, Heterodera glycines
MAISFFEKFSMQQTLSNMKRSAKNGYLFF

SEQ ID NO: 154824 - protein, 29 aa, Heterodera glycines
MAISFFEKFSMQQTLSNMKRSAKNGYLFF

SEQ ID NO: 154825 - protein, 29 aa, Heterodera glycines
MAISFFEKFSMQQTLSNMKRSAKNGYLFF

SEQ ID NO: 154826 - protein, 255 aa, Heterodera glycines
DFALRCLDYIDQNAETLFESEEFLQIDQNLLCEIFERDQLKIDDELTIWKAAIRWADEKCRQNAVECSAENRRSALVEEFRVFITVSSCVLTVEELLAVLQYHCHPNLRGAPGQYPMAFPCHGRISDQKEGTLSMEIEKLSEFVREEVNSRRLSKCIYTKGLPWKIWAQIRTKENSTEKWLGFYLFCTAPKENGDWSCKCSATFRIVSQKKGTEDFTKKFDHSFNNKSTCWGLIMITFTELMDPTKGFYDSEVDI

SEQ ID NO: 154827 - protein, 33 aa, Heterodera glycines
MGFSGALITLCHLIRPISNLGPELEQMWIIRNF

SEQ ID NO: 154828 - protein, 107 aa, Heterodera glycines
MSSKLQDRFKLMLSTGEGADVHFLVGKEKELLKAHKCVMMFASDVFGSMFRFDDKNSKTKTNKYNVSLLVKALLDFPINELPNVFLAFVEARLLNQNVQIEIYTKYF

SEQ ID NO: 154829 - protein, 24 aa, Heterodera glycines
MAKYGPKYGLKTAKSQGRHLENGP

SEQ ID NO: 154830 - protein, 56 aa, Heterodera glycines
MITRESLRVSLPNCDLEKALEQPQQQEKQSGANIDNDNEAVQKRPQKSINHFEGID

SEQ ID NO: 154831 - protein, 90 aa, Heterodera glycines
MITSSPAASPSTAPRAAPSAAPAVSAPATAAPRAPLRGCVLDQSASAEQRNQKKQQNETRHCKIKFRKLFFDAEIHRENEQTFMVIIELN

SEQ ID NO: 154832 - protein, 39 aa, Heterodera glycines
MWGEIFSKEIPSQCATDREFCTQSNVKGLGFVLRCQVHT

SEQ ID NO: 154833 - protein, 40 aa, Heterodera glycines
MKVNKCELQKWNGCKKCLYMADTTVDTKWAWQSRTPWRIE

SEQ ID NO: 154834 - protein, 231 aa, Heterodera glycines
MNRKFTQNLLVLSFALALANFFSIFGHPVEHDNEEDNEPNSQNVDKVTRNYVHKLVKDENHLSSMREFAVEWAHNNALIFRNKESPKRSDVSVFAPVSLFPSPFPRHPFEHALSIQKQLNYCNSLFQRPLQGQLIALIIFLTPRKNYILLGNVEKIWAYDGVAKRHGRNLLLKFALPPKALRPAPLALALWLGQRESPRARPEILVKINDFSKVLLSKLKGAERAVLSRWH

SEQ ID NO: 154835 - protein, 52 aa, Heterodera glycines
MKISKKPLGIFDLLFLSTSFLRNSKTILYLRKRRPTFLMGIISSFFIKLSMG

SEQ ID NO: 154836 - protein, 30 aa, Heterodera glycines
MANKIIFGAKLNLKSINVANLKMFIKINKS

SEQ ID NO: 154837 - protein, 133 aa, Heterodera glycines
MDSNTFFVGFIMIPFTIPCQMLLLVTNHFTNCTPFWGGHKGSNTKLIRSLLHGDLISPFWLGTRNIMVQPDKVSKIDTMASELGVYGVLMGNMRTGEVSHNVQQGHLLKTKLATSDEGGISAGFAVHDSPILF

SEQ ID NO: 154838 - protein, 122 aa, Heterodera glycines
MCNFVTGERWWLSKACPCLCGNEKCKYDGDWWANLVQNGKNLARGHGKQMACKTAAPLPLQRQRHTARKSVVTLPMALSRIEVGPSLGNLPCVDMKLTGDQLAQLLKMKILGFSFALIVRLG

SEQ ID NO: 154839 - protein, 75 aa, Heterodera glycines
MSFSFVLLIFCLFYGVGEMTDLAKEGQTPNFDFSQPQPMAQMAQIANAMAANGNGNYGMGNKFNSEGEENICKTS

SEQ ID NO: 154840 - protein, 98 aa, Heterodera glycines
MADLANKNGQQYQLDALRKVNLARFVNHSCQPNCCAVLITTAVRIASTATAGDQYHQRGQQVPSVLIFALRRIFAGEEITVDYGNGLTLLLSGTVGAP

SEQ ID NO: 154841 - protein, 60 aa, Heterodera glycines
EIPTTADFVVDNDLSKGKELNKLRVINTENKDKISPYKMAKMWIYHAKLFRLCVPLRDFK

SEQ ID NO: 154842 - protein, 120 aa, Heterodera glycines
SALPPTGAASTTATVSSPIGTVIASPHHRTPLAGSENCLLIASTSLHQPSGGTPAESTTIPATAKMHRQYRNPRVRNGIPNVRQGREWDNEHQRIGCRNANIGTQSNRGRTVEHGQRSAF

SEQ ID NO: 154843 - protein, 663 aa, Heterodera glycines
MSNLFYVLLPSDTPGYRNKPNKFRVHLPRSLTFSGQWLCGLHSIIYTNSWPAVGTTENQWVKVHFRNGKTIKIDIPTGSYQNEEELENAINDVIITGTEKSFVAARFKRQQNLAEDGVDLFFHYNPDDYWERIEEERQKYNEMMKSIEKKSSERANEMDNDRKRKIEEEEIDPLQKQSLIKRARLDALEAEARQRDEGKEEKENRTGQEFLKMYPDNYKEKLNEVRLELIRDLFKIQDHMKKYQGIADGRKIQELNKEALRMRTAMKHRRKNLNAFSKAVFNKDLQISAEEFERTNYEQNKDYVESFFDSYPTDYWEHIHKKYQGLQEDYRKIREYREQQQFTTEEQKIKSIQSEIDQLRRLIDYRRKRFAALEYEAKKRDSQQQPVALALTHGEVLKERISQVIGNRPHDDRGDDQTTKTNGQSLVSLIEQLQKERDESNAVSEKETQGDKLTVKSKSDVKGEGKTHGDVLKNKLEEIGDNEDGGDDDDDDVDTENKKTRGEILADKIRNRSENEEKTEGKIYGDVLKNKLEEIGYNDDDDDDDNNKKTRGEILADKIRNHSENEEKIEGKTHGEILKEKLYAANDDDVQLVAPKGEIFKERIESIKTTDKTENKTHGDLLQNIIASRHVERIRFKYIKERRKFSVYFNEQIIAYIELSAQL

SEQ ID NO: 154844 - protein, 39 aa, Heterodera glycines
LDILWEPKFIPTVPTIDQQHRSFSRSQHWTQDGVDQFDH

SEQ ID NO: 154845 - protein, 122 aa, Heterodera glycines
MTHIQLEEITAQIVAFIKVIVWREVNGKWQKSYEYNQHEASINSISWAAPEYGLIFACCSTDCSISIIQFMGDVWSPVKIANAHDEVVPFNSNLAHDSEMFLGMQRGELGTRQTTAVGLGCQ

SEQ ID NO: 154846 - protein, 52 aa, Heterodera glycines; identical to SEQ ID NO: 142931

SEQ ID NO: 154847 - protein, 52 aa, Heterodera glycines; identical to SEQ ID NO: 142931

SEQ ID NO: 154848 - protein, 75 aa, Heterodera glycines
MEKIPRHSSEVLSAFIKTDFTPFFDYTSDIWMDGIGSEGEEKEKEEEEGDKENAQLEIVPNWHNQSARKSEGGNI

SEQ ID NO: 154849 - protein, 177 aa, Heterodera glycines
MGVFIGTIVCLLVVALVRCAVAQFPQNPVPIGTVIVAEQHFATTTQMPINPASELVDQVESIDVSSTQMIITTTRQGPPDTARVAISIVDTVTGEELPPMNLTGVLLVLTRGRYTVNWLQPNRWYGVNFRAEQQKIKTFFFLVIRAERYGEHGRSLENLVLTMRWEQHPDERQAEKI

SEQ ID NO: 154850 - protein, 102 aa, Heterodera glycines
MPIAKCVNIVISDGICAVGWQDTHSFRSIGSWSYQSEYLRLVVDERDVFLGDFYDNQEWLLVSLVAVIGFHAPINATGRRESKFRLGVMTLVKLKITHEWCH

SEQ ID NO: 154851 - protein, 292 aa, Heterodera glycines
MFIPISCDFLSRIFDLWLKKLLLTLQGRRGAEQLKKRREAQTEKARQAYLAKRTTQQPNPNAEMPQQDEPGPSTSAASVEEAMEPPPPTPAPVPTPEMYEEILEFGFSLPSTSVTPIGDLVPFSTTPTASMDTGETTSPPLAIDERSERIEQLEKQLKDRDDTIKFLREQVLVIKQKICAPLHYQKIETTAGVGFVCLDVKAALEFRLSSAKDNSISFDDELLIKLSGDHGQGFTKLTISFGQALRNNSASNDFIAAVFPAKDTRENLEQYGALLWPQIDQMNALINRPIKW

SEQ ID NO: 154852 - protein, 211 aa, Heterodera glycines
MSISYRPLLFIAAFLFIGCHAGVEHVRLASLSCATAKDGEINGFRAVDDGLLIGSDATNATGAMILFGFQTNKKEDLSFKVFAPTSASCLSSVNNFVVSGRFCELGALETETESANCPDGGGAGSGCNSRSVTCQIKTVKEVAELPDGRVFKVNLGNLTQVTALCTKWKAYFTNVRQVMESVGGGEPCVIGDSASGFPVWLIVLIVVVVIW

SEQ ID NO: 154853 - protein, 249 aa, Heterodera glycines
MRGLQLDLQTGNAVQWRDPAGGYEYANQTQLNWQPTDLKLMKQNGMPDGTLMYPTNFVLRPVGQSEFVMDLFKHIYLHKNPEIYTSTTEDTVVAPQLAAIGLAIAYNGARGNTKAQIGKVLLDEDSSEQLMHNNNRQFLQEIQLLPSNDVFKLKMESKMFLSDSFDVLDQFNTKTNTFYGNNFEKINFRQGTEAANFRFIGVPIGSDNDQLHLAIVVPNNQIDLSVVIKEFKSFKLFDLLTKSPTTEAK

SEQ ID NO: 154854 - protein, 77 aa, Heterodera glycines
MKIGIFSVEIKEWPGDDGNDGGGIPFTFPIEFRNRLCWNLFSSQIPDVFVGITLTLSGKCVFLASIFIHIGRKGEFY

SEQ ID NO: 154855 - protein, 38 aa, Heterodera glycines
MVSVLTLTQLLSYNKGIGLTENQGYQFSGFKTLIFSKN

SEQ ID NO: 154856 - protein, 70 aa, Heterodera glycines
MRMEFVGQNKSSSATKSFFPMVPPFPLRMNRVQNSDILPQKANENFKNLHENKNDCCLFGDGTQIDDLFA

SEQ ID NO: 154857 - protein, 55 aa, Heterodera glycines
LISSQKSCQLKTAKKAELLKFFISIFFYSSKFSVIFSRLIEPVKSFRMISRLFDS

SEQ ID NO: 154858 - protein, 154 aa, Heterodera glycines
MEIFDEFIVVDEEAIGQFSGQFTGKTSFREMIRFAELEFMRSDFHALQITDVGNASSSNPSNFEPLAQIVRWDWDTNGAQQIISTHTLNKGSEVNYNNIANDSSIVIRILKKRETKKKIQFPAPSSSLPDDDLTMKIGEKQVKHHHQTATLSIT

SEQ ID NO: 154859 - protein, 78 aa, Heterodera glycines
YPITQPPSAANNTCLSGEIDGQHGVTIARTNRGISRRSDRRDGHGRRPSGNGFIGPAIGHSVRLVNNALMRMNTIVLH

SEQ ID NO: 154860 - protein, 44 aa, Heterodera glycines
HSLIFYNFTYSKSYYFLIVNQFDVHSDLDIFQKWLTQLQPKNKK

SEQ ID NO: 154861 - protein, 661 aa, Heterodera glycines
MLDEALASYCTNDVEILMAALVAFRREFFEISRRQEYVDGIDDRENHDGIDVLRECMTIAGACMRHFRTNHLPDDHLAIVPERGYDNAQNQSLLALRFFHWYSEEYGVEVQTAHSAGGEKRIGPYSLDGWIEAEGRAIEVHGCTWHGCKKCYPIDNMLLPNGKTAGQVRERDAKRMEYIRARVNRVDVYWECKITSMLERSKAMRKSFANYVDDGPLVIRDAFTGGRTGPLKLLRKAGPGEKISYYDFTSLYPYINFTTRYPVGHPKVHVLNQQVQWTSAADNPFPLALLKVWVVPPRKIDVAVLPVKVDDRLCFPLCIACAKEYPTGGVDNDYHCQHTDQQRGWVSTCTSIELNAALDEGYRVTKVFRVLEYEQSDDKLFRPYIAEFMAQKIQASGFDSSIRGDAEKEEQFVRECAEQFGINIDPAKMVVNKGKRSLAKLCLNNLWGRFSLRNFGLCQTLITDDPVTLAEYLDNKSIEVTSIDQLDETHILITYLHKKDWVDEHACSNIDTDSLILVHPEERCPLKIGPHLGQFTDEYPDHDIVEFCSGGAKQYGLCLRRKGAGADAEKEYVLKVRGLTLNYDVINNQGMRYETFKEEVVRYATTGDYEPIIVTYPNFLRPNIREGGRVVSMPLQKCYRPYVGKGIIGSDFNVKNFGHTL

SEQ ID NO: 154862 - protein, 251 aa, Heterodera glycines
MSSCRGIVMGGTKNYFDKICVPHHGLELSFVDLTRLENLENEFKPNTKMVLFETPSNPLLKIVDIEAVCRMVRARSKDCVVVVDNTFMTPYFQRPLELGADVTVQSLTKYINGHTDVLMGTVVTNKEQLDQHIYAQQIYAGAVPSAFDAFLVLRGIKTLPLRMRQHMENALAIGRWLEKDPRVEKVFLVARSLGGFESLASLPAAMSRDSVPAKVRAQTGISDNLIRLSIGCEDKADLINDLDMAMRVATE

SEQ ID NO: 154863 - protein, 85 aa, Heterodera glycines
MPEMGVKNEFVTTSWTAGFNHKISVLKCSDGRTGPLKLFAEPKEDEKISVYDIVSLYPWVNYDTEYPIGVPKIIYPSAVQMLVNW

SEQ ID NO: 154864 - protein, 291 aa, Heterodera glycines
MKLDERLLFSCCHRCASQFRTLNTRCQHVCAHSDAQRAYTGNYTHIELAMALRYGYRVDRFWRAWHYEQSDQIFKEYVRLLLKLKIEASGFPDGITTEAQRHQFIDAYATVYAVTLDVDRVHKNPGLRFIAKLMLNSLWGKFSMRNELGTNKVITRPQEFYSLVLDHKVEISAIIPLSDTAIRVMYRHKKSFVEEHSSSNIVLSLWTTSRARLKLFEYMMQVQNTDGAELLYTVSYRRRTYAFVTDTDSVIVLHKRDRVPILTGEYLGQMSEEYAGFEIQTFICGGMRYAN

SEQ ID NO: 154865 - protein, 196 aa, Heterodera glycines
HNSVAIEKVKDQRFDALAQCHVINGTDEATKKPCGIEFRLPHGGGNCDDGFWICYQPVLQRGRTLDTSTNYKAKRTFAIDTEKDHSITKECAQRMPKDSGKSGTMLWRGIKLRTVPVPSDKNKGKHSSSSTDNDDEVTILETTFNDSLKMFVFKINSNVVATAPWRPGLANQCQIENDNFELHHFDHFLIILYSFC

SEQ ID NO: 154866 - protein, 42 aa, Heterodera glycines
MLLFADPLVKQIDDKTFVPNEENSKFSSGIINTETDECVGEN

SEQ ID NO: 154867 - protein, 131 aa, Heterodera glycines
MEPKFPFICQRPITVVEEDERAQVTDSEYEDGKGVEEEGEEEDGEEKVKEEVEEEGEEEDMDDPSGERAILRAILEKNKPKQSEEGEIVDKKEEERDETKEDKGKEREEEGEEDEEDGTSSVVTDFEFQAY

SEQ ID NO: 154868 - protein, 262 aa, Heterodera glycines
MCNLSTFLSIFLLPSTVYSTGDDRVFHHNRMNVVRRQLLQLPHFLNGCAVGGGGGSSGKKQKQYNQQLQQQGQNGIWDSNEVEQYRNDYQLNSIRPCYFSPVQCLLVTPGQHRAFVNHPKFNQQQKQQQQHNFEQQIKVAGEKGTAVKAIKGSSKIWHRQSPKESAKDGAQPRHEQYDAGDVQVVHQDEAVQHQQHLNHHNRRRHRLLTSGQTLCQHRHGGIGGDANANTTDGGRIKQWRRKYGERKLRRHPIFGNPFRIGL

SEQ ID NO: 154869 - protein, 25 aa, Heterodera glycines
MALNLIYLLTRSLSAPAPCMKREKD

SEQ ID NO: 154870 - protein, 268 aa, Heterodera glycines
FLRRSQYFKRMAQPPTNIGTAMRLKKMRWKRDVEKKCEKRTESFLKTLSGRKSQISSELTQALCTVIEAVFIHGLRDAFFLKGSRHSNRPSPNFWPFVSKYTQRSIKTQISTLNQIHTEIGRARAWIRIVLNAWIRIVLNEYSLDHYISMFVKDTRQMKQFYAQFYADDAFLRDSECVNSLGVHLKRINGLKITAPTNSSLLNTWTPSPLSLAGLIKTAPSIGGAFKFSPSPSGHYVKKYPIPAIQKKILIENFDFFLGSGLEIRQKR

SEQ ID NO: 154871 - protein, 279 aa, Heterodera glycines
MSSKMILLIAVPMFVGGCAILLKYWDRLKKPAKPRENHKKKIFISADCWLCVFDLLPPSQLGLGIAMISHRFGIYVDEHFKTRKWALKFIQIHSKIRENGTKEMEIVKNYGKELPIPQIQLPRKVIGFECIEIFFINQNVIAFLHRFRQLFAKCPINLSIHTNNDRILDFIFHNIWPMFGKNINRLELSAATFHRLRHFVPSILNDCPSLRIVKFCDADNFFPEFPADDSAMASNGQTMAKWLFTALPDNVPKMLKCSLDKDAGNLVQKFEAFKTVLTN

SEQ ID NO: 154872 - protein, 43 aa, Heterodera glycines
MNHMHMLFISLNGRIIDYFKFPCNRYVHSYILSTTSNMFFILL

SEQ ID NO: 154873 - protein, 120 aa, Heterodera glycines
MSDNGNEAEDEMAQAIFIAADCWLSVFDWLSPRQLGLEIALINHQFNIYVDEHFKTRRWALKSIEILRKIGENGTKEMKIVNYAGEEVPIPQKPLPKRVVGFKAISIGLIDETPDPSDLQ

SEQ ID NO: 154874 - protein, 179 aa, Heterodera glycines
MDAMEGDEAQQQNFSADQLDKLESGFQKSKYFSASEREILAKEIGLTETQVKAQKQKFPIEQLIKLECEFETIRYPDIFMRKEMAKETGPTEKQINIQPQIISADQLERLERRFSETRYPYPVQMGNWAKQLGLEMHQVNFWFLNRQAQHRQEEKKAKEKWLEGRRDQWKLQIPTEGTY

SEQ ID NO: 154875 - protein, 51 aa, Heterodera glycines
MCSADPSLSLFVLGMGVGQTNTFFAEINTHSSKVPIEETQHTFCGVNNGRK

SEQ ID NO: 154876 - protein, 19 aa, Heterodera glycines
MTTLIPCSVTRNTTMKNVM

SEQ ID NO: 154877 - protein, 49 aa, Heterodera glycines
MFGSANLQSLAPLSSTATMANNNDDDNDGFAMAMMRRRPPFADDNLYEF

SEQ ID NO: 154878 - protein, 83 aa, Heterodera glycines
MPALCEEELYSLLMQHDKTAHQQMADDGASLPWQTHHYHHHYYSPSSLSKKAVPNFANLHFQTFLELIATLYERETDQIVRCS

SEQ ID NO: 154879 - protein, 74 aa, Heterodera glycines
MDPINNPIKSIHLAAKNDGRRADGARQPKPGDHLPNVQVDGDPVRVLHCAQLCHDVVRDQGEAVVALHAVHEEE

SEQ ID NO: 154880 - protein, 126 aa, Heterodera glycines
MALKKWAANVRTANVRAANVRFGWGRKCPSRKCPGRKCPGRKKHISKIIRNAYLRIFQILRVLKSREIKTLTAAYKTFVRPQLEYATEVWNPNLKKDIDKIERVQKFSQEKHLENVVLCTKNMGKD

SEQ ID NO: 154881 - protein, 27 aa, Heterodera glycines
IWQHGKSYSELIAFSKSLNSFALLICT

SEQ ID NO: 154882 - protein, 392 aa, Heterodera glycines
KDSYPIPTWTILMYLGNKHYFTILDMPGYWQVRVKEEDIEKTAFTVPGGLYEFLVLPFGLSNAPATFQRLMNKILFEYINEFVFVYLDDILIASETFEDHMVHLRKVFGKLNENGMKVKAEKCGFALDQTPYLGHILTREGLAKDPEKYKPIKEFPMPKTIKELQRFLGMVNWHRKCIMNFAKIAAPLTKMLKKQDAIIWSDEAKKSFESLKSLIVDEVVLKYPDFNLAQNDPKFKFHIFSDASKGLGAVLCQRDQSGKMRPICYASRRCKQTESNYGPTVLECLGIKFAVQKFKHFIAWLPTIVFTDHKALPQIKSKNSVGNSKVDRWIMELGAPFQLEVIYKPGKENHVADALSRAVNSKPLNLEEKGNENCAHISALMKKSFNLNSDQI

SEQ ID NO: 154883 - protein, 31 aa, Heterodera glycines
GTGSANWATSGVGSPNLPLINSSLDANCSSG

SEQ ID NO: 154884 - protein, 129 aa, Heterodera glycines
MCLSALFINGLKKDSIRAELIKMGVNEMKFKDAVETAVLLEQSELDAEQIGGHKKAEVAKVFAPKGGRKSSAPTQQQQMQCHRCGRNGHRNNECPNKDSKCRKCGNVGHWAVMCKTKQGSNWPRRQGKP

SEQ ID NO: 154885 - protein, 70 aa, Heterodera glycines
MGPTNESDGPKKQKKGGRRRDGMLKSTPKPKGMAAASTALRHLSPLHKVLLVVVALLQWTATGGRAVLLQ

SEQ ID NO: 154886 - protein, 124 aa, Heterodera glycines
LLFMDQIEEVSSELQQVKGETAIVVKLKEGLKESKVILTNQDEISLKEWHTSLRTVTNQMHSFGGSMARPFQAHRVSQELLQRMGRKAIKIYGVNHDPMLQENERPGSVTRAFLNRAASVDSGI

SEQ ID NO: 154887 - protein, 301 aa, Heterodera glycines
FRFRDSVGSFNSPRYPSNYPLDAECTYHIVGPSNAYPLDAECTYHIVGPSNAQILLFFKQFALFEENSMDECNDWQFALFEENSMDECNDWLEIFDVFRENGGETLKLQAKHCWHVFPGPTVSAHGSHEMRVVFHSDNFGTANGFDARYEIRPAATKDDNRSERTADDGAFWSGQRMNEFKNSNNLASPGFPVKYTKNLTCDLEIRVREGHQVLLKANMFNVEGQMTEEKCNCVAKVRDDSGGLFVFCCERCHFFTFYVSSSNSIRLSFLTSPEKVFLTSPEKVGHFVRPFAFSLFVLTYF

SEQ ID NO: 154888 - protein, 30 aa, Heterodera glycines
MGQRCDKCTRHQADTETEEQTEWEAKRMTN

SEQ ID NO: 154889 - protein, 127 aa, Heterodera glycines
MPIAAFTDCDHVFDSPRSGHFSLPVFPREANADSSALFASSDDENAENDEAPNGNYERVPSSSWQPFVTATAAAEEAEEAGKRDEANGIVRYQSLPENIQCIYTFVAQPRERVKLQIEQFQLEGTTN

SEQ ID NO: 154890 - protein, 564 aa, Heterodera glycines
TDKSEKVIEPPIRNDAQKNSQLKEAAAQKHRRRKTKDHKPGKKGPAAQRARREDIKYINTSSFGQADVLSRLIANYPRPEEDILIANICTETDCYINTILQTATDQLPITKAEISEWTPKDEVLRKISDHTKNGWPQKCTDPDISPYFPKRKEILEIDGVLLYGKRVIVPTQLRERIIKALHMAHPGIVRMKALARQHVYWPGLDLEIERMVRQCEDCQSAQKSPPKAPLAPWTSCSRPFQRIHIDFAGPCSDGHSYLILIDSFSKWPEVYRMDRISTPATLQVLRSIVYRLGFPEEIVSDNGTQFHAAEFKEFCSEFGIKHTFTPPYHPQSNGQAERFVDTFKRAMKKCAKDGKFWAEKMLLAYRTTPNSALNGLSPDQLFFGRRLRTQLSLVHPKDRPSQNPQITSYARKMARQFDQHHGSKSVEFLPKDPVLLLNFNRGKRFWLNGTIIERLEKSPTYRVHVPALGRAVHRHANQLRHRYGRKGTPRTDQSSALGKLGDDEYNKYRDSISPSQPETIQLVKDSALTLANPPVATHAIHTRPQQWRDPKGKTPQQPKRANNA

SEQ ID NO: 154891 - protein, 803 aa, Heterodera glycines
MASSSLAHATLASSLDNRITKFQYDSECGNTFDRWFKRFGVLIEEDGKELPEQTKVRLILGKLGDDEYNKYRDSISPSQPDQVKWGESLTKLKDLFAETRSLFVRRFECFQIRQKPSQDITSLVAHINAACENADLSLKKEQLKCIILVITLRDEHHDLRQKCLKMLEEAQKNGTQVTLKQIEEELRTIQLVKDSALTLASPPVATHAIHTRPQQWRDPKGKPPQQPKRTNNAKEQPARPPNTNYGKASRGSPTHPCGSCGESDHWRTDCRFKDATCHKCQGQGHIAKACRRSSNQAKNRRERSVHTVVVKSHCMGIGTAAGRWWRLTFIINGIKILMNIDTGAQATILTLKTWKKLGSPKLDKPDIETRNCNEVPFNVEGKFVCTVCQPNQAPKKLVAYVSSEINYDLFGLPWIEALEVIPREIMHPDIHPKAQPAPAEINAMAIPQPTHKILDLESLTKALQADFSDIGAIKPIEFSHWAAPILAVMKKNGKTRVCIDFSTGLNNSLELNRHPLPRPEDIYTAISGSVYFSNLDLRDAYLQMELDEESKHLCGINTHRGLFQCQRLPFGVKSAPSIFQHLMDQIVSGIPGAFAYLDDGIIASKTLEEHVCSLYKLFKRIQEFGLKIQLEKCKFLQPELLFLGHVISAKGIRPDPGRSEVIRQMPPPHDLSTLRSFLGALNYYGRFIKSMREIREPLDQLLRKDVKWEWTDEQQTAFKKAKEIMLSDLLLTHFDPFLPIVVAADASKDGIGTTISHIFPDKSEKVIEHASCTLNDAQKNYSQIEKEALALVFAVHKFHRMLF

SEQ ID NO: 154892 - protein, 217 aa, Heterodera glycines
MDQIVSGIPGAFAYLDDGIIASKTLEEHVCSLYKLFKRIQEFGLKIQLEKCKFLQPELLFLGHVISAKGIRPDPGRSEVIRQMPPPHDLSTLRSFLGALNYYGRFIKSMREIREPLDQLLRKDVKWEWTDEQQTAFKKAKEIMLSDLLLTHFDPFLPIVVAADASKDGIGTTISHIFPDKSEKVIEHASCTLNDAQKNYSQIEKEALALVFAVHKFH

SEQ ID NO: 154893 - protein, 100 aa, Heterodera glycines
MDWTIRQWHQGQSVSNGLDNPSVDIKDNPKLRTENNLRRSSKEYYDVFERFVEKGRRILLVREKEGEKRKAKGKLTQFKWTNERMNEAEELGEGLGRGDG

SEQ ID NO: 154894 - protein, 280 aa, Heterodera glycines
MAQRVGFTQIKYTRTPAEFHQLLDDPTLDKLDFVHVSEHMDRVVVRKRPEFAKAPLTNCLPVAIYVTSYARLHLYSYMEKVIALEGAELLYCDTDSIYYVNKMGGRCVPEGEALGQMKREHVDRRIVEFVAGGPKNYGIRHTARDGTDERANLKIRSFRLSYATQQLLNFEAMKDLTLATYNIDGPIDDVIDNDDLYVYGGGGAHRCIRVTFPQIDRNVRSDVYTCEAHKDYRPFYAKGRVRPGMQTRPFGYVEDVSHPPIQPTAERRKRTLIDPDPTRP

SEQ ID NO: 154895 - protein, 67 aa, Heterodera glycines
MPPLSLEDDSLATHSRLNESRISKGWSGFIHFLFFTKFENGFFYSFRSCKNDLNIAGKYLDMRTFYM

SEQ ID NO: 154896 - protein, 116 aa, Heterodera glycines
MIKLNKAELMEVIEHCCLMDPELCCKLALTRTRMLLNVLLQVIRIESRWTSGAGFIFELLIAFTKFCEPSLNCRKRECIIALTFTNISKSLGWEGQNFFINPIEKANEDGYGETLK

SEQ ID NO: 154897 - protein, 24 aa, Heterodera glycines
MDQRNNTDAEVQKISLNIQQLSQK

SEQ ID NO: 154898 - protein, 94 aa, Heterodera glycines
MAFLKALSALEQDIGDINQIFKDLAHLVHDQGEMVDSIEANIEHASIHVQQANTSVAQAVHYQAKARQKKLMIYAFCIFVLLVLFLVLYLWLKH

SEQ ID NO: 154899 - protein, 55 aa, Heterodera glycines
MGRGGREGGGREKEEGKERALNEEAMRSKKTEGESGGETKKGEPNENGHMENDVL

SEQ ID NO: 154900 - protein, 26 aa, Heterodera glycines
MSKCWRTFCSRWNWATPSTTIPTTTR

SEQ ID NO: 154901 - protein, 58 aa, Heterodera glycines
MLNGERDWSPLGTDRRQPVRLVHIKRPNTVTETGPMDVAQKETFWRRLSTLKGYTEVA

SEQ ID NO: 154902 - protein, 650 aa, Heterodera glycines
DRPKLSSPAPPRPPAPPPPPPPPPAPPRPPAPPPPPPPPPPPPPPPGRRPWRGPSPPPPPPPPGRRPRPPPIPPIPAPSPPGSPPPHPKRPSPPRPTPMPRAKAKIEPRPPPPPPPQRPSVKIEQKPKLELKPSTPKPDHPTPAPKSKSGPKFEQLDSRPSTSRQAGYFPPPTPKIEPKYEPQSTKRPVPYQIPKKEPKINETPPQQQPPPAAESPPRFDEEEEESQTKDTGIAPVTPKEIDDDEGLLEESPPRIEEEEAQTKDIGIAPVTPKTKSPPPAATPSPIKPSITTPSAPTTKPTTTTTTLTSQPPAKHLSPAPQPQKPLTTTSQPQKPSAVQPPKPSNPPPPKPRIATTPAPTTTTTTTTTTTPSKTQPPPPQTVAPKSTTPVPPPPKSTTPVPPPPKSATPVPQPPKTITPPITKVQSPSVKPTISAPPAQLKSSAPSPKSTDPVLQPTSLPAKSRPSAQSPPSPPSGSPPRFEEEENKAEKLTAKATTPAKPQVTSPSVKTTTITAPPAQLKSSAPPQRKPQLPTKPLAPISLSAKFPSSGSPPRYGETEHQQPSPAPIAAALAAVTRANLSCSKVSRLKFTRKYPQRSNPSDMCPTQSQYHIIDQGHVTPFLLPGIGEAAGSVDAANNRLQSASSWSAGL

SEQ ID NO: 154903 - protein, 516 aa, Heterodera glycines
MANKFLLVPQEIYRGLTSMSDTGDINLDAVRYDLDRARAERTHPSTKNVHYNQQLRRYLKMRRELTDRPTKVELTKGISVLMRRGGEDENGEVVDAPPRPPAPPPPPPPPPPGRRPWRGPSPPPPPPPPGRRPRPPPIPPIPAPSPPGSPPPHPKRPPRPSRAAPYRRGGRLEQWQKRRYDIQRRRPVVRDLLAEAAAAPLPESDNDDDYMLESGFALPAPSQYYGDLPVLPDNADEIEEMDTAQHRIATRRKLKKDEAGENNLRHKKHRIFRPSPPRPTPMARAKAKIEPRPPPPPPPQRPSVKIEQKPKLELKPSTPKQADHPTPAPKSKSGPKFEQLDSRPSTSRQAGYFPPPTPKIEPKYEPQSTKRPVPYQIPKKEPKINETPPQQQAPPAAVVEEMPYVPPPRRGTKRRHPVNGENDEVRIRKRVRQPRRVRVQYSPEPGPSTSAQSDEQQQQQQRELFAIPSNQLTMTQRIERMYIKCNRYADRMGVRGNTINTANGKPLAHSNLRMAI

SEQ ID NO: 154904 - protein, 167 aa, Heterodera glycines
MNSAVPALQKAGVDVYAGVPSEELLKRLPKPLLLILDDLMLSIDEKYLSDLFTKKSHHHQFAVVFVTQNLFERKIKVARLSAQYLVLMRAPNSLLSIRNIGVQLFPRQLDFFLDAYRKATARPYGYLLIDMHAASDPSLRLRTNIFKDEQEGEDEGTVVFIPKNGAT

SEQ ID NO: 154905 - protein, 229 aa, Heterodera glycines
MAINISDKKALVNQILGQADITVTTSGITVSGPRLSTPRFIPFEECGRCRACKATEVEVDTMVTKEGITLWCSRISKPQFVPFDVVYDLPGHCFFRVKNKARVFNVPYGDLPSDTCITTTTTFSTQETQTDQDLKRKAKVALDLVEAGLMADAMQDGARWKKAKTAINVLGNLLLAESFDTKVTNSPVEEENVQEEPRREDEQNKEDLGDIDKTLDEFFDSIKASTANM

SEQ ID NO: 154906 - protein, 169 aa, Heterodera glycines
MQMIKEEKDAWWNRFLCNSCDFGLHCYRAGNYKKPIVCVHPDISNFTDYLQRAPQTTATTTDCPQPNNEPLATVNDGVRKALNCAEVATTLSQHLIKLARFLSLRRELKRRQKEQAERREHGTETTPAAVQDAPVANTGLDHVYDTPANVPSNQNGEEEEDEWDDESEF

SEQ ID NO: 154907 - protein, 259 aa, Heterodera glycines
MGILEKGSGTDRHLLSFVNNPSFKAFLEKYCGRSIPHHETLRSNYVKNCFEGVLSKIKDDIGENGFVWCSVDETTDRNGRCMANLLIRLLNERWNAPHLISVKPLLDENGDPKVDHQTVARFVDEGLADLLSTGAKKNRLLFMVTDGAEYMKKAARNLRVFYPNMVHFTCLAHGLHRIAEEIRNQFKDVDELISSTKMVVDSFDPEEAQCIAKSQRCFSMTTVPLDIAYIAANFGSLPGAITRLEKEGLTIHECANILV

SEQ ID NO: 154908 - protein, 285 aa, Heterodera glycines
MGYSMVGPPFGDDDEFGPLFEMNCTGEDKTVVGTAIGGGTISVIQQQTLSSSSSAANDNKQIFIGVPTPPPVPPIPYGYGSKGISQNQTANDAPSNSKQIYLGVPTAPPVPRVPVQHDDRSKSISQQQNAAIDNEQSNGGNNKQIFIGVPTPPSVPRVPVPYGYGNKGISQNQTANDAPSNSKQIYLGVPTPPPVPRVPYSNQQRAVARGVALRPQQSVNYAPTPPPIPPIPAIPYYPYHQAKRRSISENDEPFSMSNGPQRIFPRGGNNKYVYVLHNQKDALLR

SEQ ID NO: 154909 - protein, 90 aa, Heterodera glycines
MPSSDYADNEADDRIKAPPSERFLNYSLFHNYSPYGMRSLAYDYAKYAERTKWPVKNPCGTIQFEDEPRTPRFQFWSPLTARYECSYTQN

SEQ ID NO: 154910 - protein, 280 aa, Heterodera glycines
NSIIRKSNGPFSLVIAPTKELASQIFALLERLSESLVFIHSLNLAQYAEANDEMLENESLDVLVSTPGRLLAAVKKVPKLLINVAHVVLDEADLLFSYGYRDEIGRLKSALPPHFQTVMTSATLNEDMTELKRTFVVGQILSLKLKESDLPGIDQLQQFQIQCLNDEERFTILLALIKLKLLVGKTVIFVSGVNRCYKLHLFFQAFKIVSCVLNAQMPANSRCRVIHEFNAGRWPYIIASECNDIFDGDNEQEQNGEQETAKNGDEAKEQQGDTTKQQKA

SEQ ID NO: 154911 - protein, 444 aa, Heterodera glycines
MTTTTATASLFGPPPMTTTTAMASLFGPPPMTTTTATASLFGPPPMTTTTITASLFGPPPMTTTTTTASLFGPPPMTTTTAMASLFGPPPMTTTTATASLFGPPPMTTTTATASLFGPPPMTTTTTTASLFGPPPMTTTTATASLFGPPPMTTTTTTASLFGPPPMTTTTATASLFGPPPMTTTTATASLFGPPPMTTTTATASLFGPPPMTTTTATASLFVAPSATTTSAPLFGLPSSTATFSAAAAPRMNFKDLQQTLLKLRVDFERQEKHFMAELDDLNAFDIVLRRAQDKVFSLGQNIDELEQERERFVCELDILSQQQTELDALITQMEKTMGLSPLDQQQLSGQPSVVIRDMANATPADLQRQNMWVRLSGDSLSGDDLKEHEHHRSMLDQIHQILRSQLDTLVWVDKQSGSLLTYVTLLAILMDRVNRATSDVLTLR

SEQ ID NO: 154912 - protein, 105 aa, Heterodera glycines
MQKISHFIISIILFFFVRSGLNEESYNSKTRAEPKRLGPLHFHPVFSTVIDFDSDWFRQYFLINFYMIYCIFELILINIHFANTKFIIERPFLAILIIGVPTKIC

SEQ ID NO: 154913 - protein, 112 aa, Heterodera glycines
MADKNLSAIDGNVFFTFSMVYNFFVFSEGCLRIDTNSPNGEVSAPPLPTMMARCLPGANAEDTFVVDVENTSHSINLVNYSDTSSNETTFTCTTDRPKRKAAEKAMMLLIKP

SEQ ID NO: 154914 - protein, 51 aa, Heterodera glycines
MANKPADVDYKIVCIGDKAKMLMQRLYAKEFLFTVNDIGRSPPTFQDASIA

SEQ ID NO: 154915 - protein, 40 aa, Heterodera glycines
VCLNFNLLHRENGNLINFTFTFETFSPLFSPLFREFFAPI

SEQ ID NO: 154916 - protein, 95 aa, Heterodera glycines
SEIRGKCNELNDALKQLDLTATPHKIRTTPSKRRSFIDMHGGHGKKSEFRGLEMAGNRTKNVRTRNFEASKWQGIGRKNVRIRNLRPGNGSKSEF

SEQ ID NO: 154917 - protein, 195 aa, Heterodera glycines
MYEDCNTVFARCHDAKKARLFITFTNNREWPEFKENLHKNGQVFTDRFDMWMRVWSSKIAEFREELYDKKFFGTILGYGESMEFQGRGGPHAHIVAQTDLDAVPYVIQEYIWAHIPSLPDKDDDTPIAKMHREIRETMHMQLHRCSDSWCGPSDPIYGRCKKGFPAPYSKCTILRPDRPAMYFRPSPTDGGAQLE

SEQ ID NO: 154918 - protein, 245 aa, Heterodera glycines
MELEKEREEKQWAESVKKQNEIAGPYKMIQKMHFEELKKSIGKPKKDEELQGMITTLVQDLRANKNNCRENLLSLLLIEDRNEFLKEIINETKEEIDQTELEKNLEELLNGEKKKKKSKKSKKKKIGKEKSEKSMENTKDTDREREEEKRGREQEEEKSENGKRENCDKNENKNSTKTTDGEKAKETDQTTKMAINEQMLAEELNKIGTFKKLCDELTLNELFKTFICSPSVERLLIIDQAAIIC

SEQ ID NO: 154919 - protein, 99 aa, Heterodera glycines
MQNSDFCFCFSSLHLFALHSVSAFPKKSDCLTLFPGTTQIKSMSESKVWVPSKCDPTHPSTAQRTEFIMAFVCWSKCSSECSADGGKFRTINWPKKIFN

SEQ ID NO: 154920 - protein, 200 aa, Heterodera glycines
MGALISIKIFLICLGLRRPNFYMLNFVEFESFALSYCSNLYIKNLLMEGHKTENHNENDNEEEKSAKVLKNLRLMVTTLKLWAKSNLIYSNKFGFLNGVSLTIMATKIILLYPNAPILFLLEKFYLIYAKRETKVPIKLKLVANESDKKHFDEKKIAMEEVMRIYTPSFPEQNTAKNVTHSTEKIIRKNMDEGGQLINNH

SEQ ID NO: 154921 - protein, 102 aa, Heterodera glycines
NLNSKEIKTVNLTFKGLPRELSLKLAAMSLYGAAKMFLETGEHPAVLKEAVQSPGGSTIFGIHELEKGGMRGLLINAVEAASERSRRTGEAALPPDVRNLSK

SEQ ID NO: 154922 - protein, 184 aa, Heterodera glycines
MLPSQCKKQSDAPRPNTSNLSSCNLQLLSDYLEWVHNIPELNMLNEDDRNFLVLCRARPSAWLLLAHHRMHNTENRPNIELDKLELLLHNEIVGPLRELEIHSVEFEILRNVCFFSTVPQLSEAGRRLVTSVQNAQLRTLSEFSLSRINLIEKANESPLLLSSVFRLNRMMNTLLTIEVKKPGI

SEQ ID NO: 154923 - protein, 328 aa, Heterodera glycines
MLKGCPKCYANDRQQKLAGGRTAEDLYERTKRRLFELQNQHGFELEVVWGCEMKQRLRADPEFRRVYNDSFVPRPLDPREDALRGGRTEPFILQYTCSPDEEIILIDIVKKKLGETKNIFSLLKKILANSLWGKLAQRVGGTEVRYTRTPAEFHALLENRNIDIIDFHHVSHHMDRVVVRKKAEFAKAPSTNCLPIAIFVTSYARLHLYDYMEQVLRLGHKLLYCDTDSIYYVTRSGRQQVPEGEALGQMKREHCSRRIYEFVSGGPKNYGFRHCDRINGEDERAELKVRSFRLSYSAQQLLNFESMKRIVLEHYNIDGQMLTHFSLT

SEQ ID NO: 154924 - protein, 209 aa, Heterodera glycines
MDAILATDWLHNAYPEQKMTTGNEEEDKATQEGQMSWLKIIEEEEERARELQNDQMELEQVKDNIELPKHPQPQTKCSCNEKQKSVPLIDFLCKHYKCSMNELHVLLQTLSKRREISEMLRSNLHLRTNHLRPAWKNIRVHCNELTIHPAQTAYAMRGYLGITVRVYYYVKHGIKLAYPQLPCVLQFGGGDHSSLFPLECLSVVVVKEP

SEQ ID NO: 154925 - protein, 229 aa, Heterodera glycines; identical to SEQ ID NO: 154057

SEQ ID NO: 154926 - protein, 249 aa, Heterodera glycines
MRHAMRMFLVPEDVFQSVFVQPQAATAAADGADGTPIGLLRSRIQQIERSRELNEEQKAAQYHQEFKRLNKLVREQEEQPINVRLQHEKEREKNAATPPPPPPQTIDHSTPKRLEKNIVPSAFGLRRQRHHYTQKAGALSNRRPAQKQQRKAAAAAAETPNSSGNGETEKEEGDVDDGEQWDDAQSSSSTVSTGGAAPKRVLRARDGEAGKGGGGGETADRLQPKHNYQMTQKCTDHTHSKKGAQSGSQ

SEQ ID NO: 154927 - protein, 32 aa, Heterodera glycines
MARLIAMPFKRVLVLVLLVALLGLAQDGFWRY

SEQ ID NO: 154928 - protein, 199 aa, Heterodera glycines
MSPRRAAASGRTSNGGGGGIVNHANAMAPAPPPPPPPPPTGWAPPRHLQEHRHADDDGKAQQQQQQRGDEDGGLVVVWPPFPATDQEDQHDIDQAADQQQQNRPPKAEAPTPKNVRRDFPEEYARQERMQAEAERQRAERNARLREKQVAHWLGEMYGLADQENGYILIDQRPIFFVDRRKRIVCLIKFKADFNCDQSQ

SEQ ID NO: 154929 - protein, 71 aa, Heterodera glycines
ALFHFWQIERRAGNKVVTLVSNLASFGIDASALDSEIRGTGTSILATAPACEGPQLLVQGNEVYSRIVLCF

SEQ ID NO: 154930 - protein, 97 aa, Heterodera glycines
FFNGRGQFRFYETNEFKIVFFCVICGADHKYDLCFSKFRTPNSNENSEFINYNEDIFLGVFEVAENGYGIRFALENTRTRTKKSIFSQQTLGCNDNS

SEQ ID NO: 154931 - protein, 172 aa, Heterodera glycines
QSDRKYIYDYMDYCLIFGHSLGGSLAALAAAWVAKSGMTTAEQIRFISFGQPRTGNLEFARHFDSLLPHKYRVVHSEDIIPRLPSKLLLNDEHSLFHHRYEVWYNNDMTTGSAYEVCESADGIQCSGTDPLGSYMAHLSYYNTDPLGSYMAHLSYYNVSLITWHRSGCASKG

SEQ ID NO: 154932 - protein, 78 aa, Heterodera glycines
MEMRINVRSLAPKHCCQFIMTYVIVNNGEPLFPIIEWNHHAAVLANLTSTNNAQEGYHLAQDWHFRIYILLFPGQKIN

SEQ ID NO: 154933 - protein, 27 aa, Heterodera glycines
MSVFYFILSLFYIQFFSELVLVKKTVI

SEQ ID NO: 154934 - protein, 758 aa, Heterodera glycines
MKHILEFLKKKIFPDDPRQAQNLKETCHKYTLLDGLLYLCEDNGKLRLFVPSEFRENLVKQRHEGKCAGHMSAKKLFLQLAEQYFWPNMLKDCMKIHQHCRICAHTKEARANEPPLKVVRTSEPFELLCIDILDVGPSKSEFKYICVMVDHFSKYLIAEPIRNKSAEAVAKVLVEKAILIYGTPKKIHSDKGKEFVNSTIEEIVKTFGIERSLTAGYDPQANGLVERVNRIIIAMLKKSTASCWTWDERLPYIVFAYNITPSKTTKFSPFSLIFGKIARFPMDGEVPLQVNPAYTIDSDTYLQLFRENVLNMLNEARENSEEERMRSKIWYDSQPKVTANKFEAGQRVMVAFPGLNRRSRHKKLLWSHFGPYLILEINESSAFLVPIDNRNAEHIKVPIERLIRIPPGIPDISTLPKGKNPFKNALKSLIVSILSSFEVCESDGQMAHYEQLGAIANLKGGEGMIGKTEKAAQSREISFSEMEIDNEGEAEDMFGWNAKCDVGQGEHEFCAILRVAELDPALGNAELGSITVKTPLQALLAVFLLKAGTVKSMTAARSFVKSIIEGAPKEELSLFVTKKGDYVATGQCPTEEDQMKALECWFEKCSVAKHALEESGFKKIGMDEPVGLNHLADSEKKKWEEAMGETPWVLEKLRAKIIHKATKLIALPRVIIGDSTAHQLAEILDQTAVIGPKNGTLAETVRSLKPVVLSSKVKAALIIVGRDSLLGGETIEVMMEQYEMIANLCRRFQQVKFFWTCP

SEQ ID NO: 154935 - protein, 252 aa, Heterodera glycines
MPTVREILESLQKRVKKPRIATNEDSVLNVERTDAEQQIERNNFDVASSDDEENCEPVQFKRGETIRGALCLWYQGAFDLSKTEKISVLSLALIPPVYVWHAFSIIVNAAPLGVQGWLAYFGKTYIGTTQFEIDRGAEAFGPNADVGRFFLRRTQSTTRKCICYFHAFIKDIDKQLDIGRAERLQKSRKRPQRYIIKEQSVVRILDEADFESEEGLTNALYLIGLVMQGFVEGLHVRGNEDSKEETDDTDGN

SEQ ID NO: 154936 - protein, 294 aa, Heterodera glycines
SYYLCTSFTNTTETTHCDTEIMNVTYAIIDTDRITSQIFHDVRLFCIQDEIDVGITRRLVGYCVPLQSYEKEFEASPEPTRLIIPTEAFDNQFVDTFTNHYKFKIRPMFVVPADANAFQQMFRSAPPLLCAHRILKSSTICIRTDMEPSSTRMALPSQVSKLVQDKFRLDCNPHLVPIRLSCGSECFLLLDLAEHCRDTYDAKKEPEFGHYRFRGQPIEEAKALSSHTTEEEGKLSSANFGSCSPPSNSVMECSTTTEQRPGTSEHIDNDDHCSSPPVKPLTYAQVAANRPRRK

SEQ ID NO: 154937 - protein, 43 aa, Heterodera glycines; identical to SEQ ID NO: 148805

SEQ ID NO: 154938 - protein, 52 aa, Heterodera glycines
MINTQPCFAYIDKYADTLIKSEEFLQIDQKLLCKILERDQLQIRGEISIWKA

SEQ ID NO: 154939 - protein, 114 aa, Heterodera glycines
MSFSRDSTNDEFTADQGTFENVTPPSAVEELQCLRSMEMEWVQKMPSQDENVSGNVHKNEMTKSDYLAKFFKRLSSVENLADAHLSYGQGNSKNKARIFIYIFFKKPNFPFILD

SEQ ID NO: 154940 - protein, 589 aa, Heterodera glycines
ARHFWQFFQGKREVSPGLFVINTSFGPLINGESNIGPPNSNQKVFSMMAIHSTNLEQMPTINEVEHFFNLESLGIQDDPAQDGLSSVLTKLRHSPEILEKYDATIRDQLQQGIIEKAQRAPGQLEHFLPHHGVLTKKLRVVYDASAHTRGTPSLNSCLFRGPVLLPDLAGMLLRFRCPTFPLLADIQAAFLQISLEPEDREVTKFCRVAFGVDSSPFILAATLRHHLQHFDSPLSREISESIYVDNVLLECETVQEALEKYKFSKDILQQGCFNLREFISNSKEVMKQIPQEDQLDKPKAKVLGLFWDTEKDEIVFKFPTTDPLRPVTRRLVLSHLASLFDPLGVLGPCILPAKRLFQELWKEGHSWDDALSEEDSIRWNSIQRQWKDEEIRVPRRAMLNDTQSIELHAFVDASVHFIERLKEIRECLGCTFHFVRTGDNPADLATRGATPSELRNHHLWWKGPPWLAQASHHWPSELCFQVTESDQQPDSTENVGPSGAFLAHTHSNQPNEQVLIDPSRFSSWKRLMRTTMFVLRFLALMFKRGEETVASLAKHRKEIRQISKSGDFKAEDFALAERVLIRLDQMDDA

SEQ ID NO: 154941 - protein, 124 aa, Heterodera glycines
PSLNSCLFRGPVLLPDLAGMLLRFRCVDSSPFILAATLRHHLQHFDSPLSREISESIYVDNVLLECETVQEALEKYKFSKDILQQGCFNLREFISNSKEVMKQIPQEDQLDKPKAKVLGLFWDT

SEQ ID NO: 154942 - protein, 144 aa, Heterodera glycines
MATYLFLAAAAFGAGIYCWKTYLGPMLDQPKSDDEEKPKPEGGEEATTAGEEEKKAGSKGDKHKKKDKKGEGAAAAPAADKKEEKRKDKHKSKESGKSDDSKAGKKDKHGKKDKKGKKKDTTDASTVDEALGEQSAAETSQAEQ

SEQ ID NO: 154943 - protein, 51 aa, Heterodera glycines
LQIYWLKLHMRYISKFFDSVRRFDKDGFRFAISRSTFGNWSRIFSAILCNH

SEQ ID NO: 154944 - protein, 23 aa, Heterodera glycines
MSFTQAPILWNHRQLHTETKAYM

SEQ ID NO: 154945 - protein, 401 aa, Heterodera glycines
VAFYGRDGYKYAAEKYGIEKAEPPTKNFNDMDEFDKFGFMHDMVLLLFDGCAVCNGNKVPNVTISLLQHMPPGLLVDECKEFVNRSGEALALQMEMVEKQQKSKGTFAYGVSLKERLCVEKKPGTEKAEYYMQKLKYKYRVVLEVKHTCGADGEQKTIRQLHLDFADMEDTVDLTLILSGSDSDKSGQFVNATLIPYKHEPVVPPPSPNPPIATNVDHLGANCTQIVFSELMPQFFLNVSNDAFAIACQKFAAPIYTGKNFSADDYYANTCAQVPTSLNCNNDHELIGCYKTKKVKHVVNNEIAEVCQKHLGNVGQQQAHGFRIRFCAQRNAKEQLISVESILDFSFSDKIYKREHSYSYKPGGHIAMKEKMPFFFIEFGNAKQHSMLRGTGDSSELSAEL

SEQ ID NO: 154946 - protein, 94 aa, Heterodera glycines
MAMEDKRRRKTTVGSDERIRRNVPGREAPEGTADGGAKNKCGKKDGRHTDQRNDDVSDHLGTLRQNDEGIGQRRIKKKRPEEMIKVIKPGIIVG

SEQ ID NO: 154947 - protein, 132 aa, Heterodera glycines
ICTFSMSQLSPNHLFENLKYFETRFDGDGTFGVGLSSTPVQQNEFIGWHSGIGFDSDGDIIETSYTLGVCALRQGKNWVYAQWGGVIVYMPNGRSHWVYAQWEGVIGYMPNGRSHWVYAQWEGVIGDMPNRE

SEQ ID NO: 154948 - protein, 41 aa, Heterodera glycines
QNEEMETIYLNIGGANENVPPPKHSFIRSAHRPKLGLHALF

SEQ ID NO: 154949 - protein, 73 aa, Heterodera glycines
MASHLSVTVLTSIIALFVLLLALHGTAPNQLKIGENGLFEEYLRWKMPKRVANYAEALPIGLLDQLNGAERLR

SEQ ID NO: 154950 - protein, 200 aa, Heterodera glycines
MMDFEDDDQSLSSKYSTKIGTSNGIRNRSFLDKSNLLSKSAFKKSSAPSLRSFSVCSSTVPSHSFGWREKREETPLKEVNQLIDQLMLYSTDEETAENELDDEAIGRQREMAIGTAAKNEGKTMLSTRAISPGRQCRHGKQQGPFASLTFNPAVRKIAAGHAFPFEGGLFGSKAVSLSRAGSSCSSLSISNNSSSPFRHL

SEQ ID NO: 154951 - protein, 148 aa, Heterodera glycines
MGPETPKYGELMKTTCSSEEDTGLEDHGVETEDGAAAVAVRVKRQDAGDLTSLGVCLGDILPAVREQYPNQLVYVIIHTIRAPSIILSSQNGGAHVTGHADVVSMHLEDVGNQLGLPQDALDNLGTLGRDLMLKVVTFVNKSYRTFFI

SEQ ID NO: 154952 - protein, 120 aa, Heterodera glycines
MNQQQVIKTKLNNDKLVHDGAQKKKYRDADARILRLVQRYNDINNNIVPQNDHNYANANVNPENLNNFLAVLKFFYLNLTLVQELVRKCPPYENGGTKTTLTARLACICQINVCPYFENL

SEQ ID NO: 154953 - protein, 296 aa, Heterodera glycines
MVSTRNKTGKFMKLSNSGTEAKRKQKEWRQEHGRRVALKQTEAETTADGEGTSTQAAESGPSTSAMDLRPHSSPRPLSATPIRRHARVRAKTTDKATNMDLTTTDNATNTDLTTADKATHMDLTTMDKATDVDLAYEDAATQTEQLDKQLKEQEQVISFLQQQVRNRDALIADLRRQLEQQAKDQPTTSTRRKKNAATLEQTSRRNLAKKIADVIDRDRSRSVSRCLLQSLHREVRHKFGHYTPMKKEQLRQQQTIHEEDGLLLLSQLGTQKAYERMKALLRLIGGKFDVFPPLKK

SEQ ID NO: 154954 - protein, 63 aa, Heterodera glycines
MSPRDLDELEMSIDQFRTFLNDQPRMRTLLALKPKDREEQQEEIGGQKSDGESNGEEQQFDFE

SEQ ID NO: 154955 - protein, 113 aa, Heterodera glycines
MPKHWPQSKMCSVTTCCARRRPRRGRAAFGLPWVYTTRPICSDLCLALSVLISALALSVLISALALSVLISALALSVLISALVVSVLISALALSVLISALALSVLICASPYLF

SEQ ID NO: 154956 - protein, 39 aa, Heterodera glycines
MTRTERAGLILMEKLEMLQVTNYSIRAREKPKMYSMVTD

SEQ ID NO: 154957 - protein, 138 aa, Heterodera glycines
MPKCDGKQRDDNANKMGQCQCQKFDCKRRGPYNVHGRSFQTAGALGLSPSPFLHQILSRLTEMVGDVSEESQSYITDLFMCLQNLAQNITIAAHLANSPQLQSSSISTGHNRSALCIRPVLNVPFPSFAIVCRTSANK

SEQ ID NO: 154958 - protein, 150 aa, Heterodera glycines
MFGWIFSFFDRLQLGLKFALLSPRFNALHIFIKNVVPFLITAVPLLIIVVPLLIIVVPLLITVAPLLIIVVPLLITAVPLLITVAPLLIIVVPLLITVVPLLITVVPLLITVVPLLITVVPLLITVVPLLIIVVSLLITVVPLLITAVPL

SEQ ID NO: 154959 - protein, 82 aa, Heterodera glycines
MPDGPKRADEGAIVGFTEGKCQRQNGTTNGAKGETKGINEMGFVKAKEKWQKIKRMNEKRREFGKIKKPKRELAHVWVEVDQ

SEQ ID NO: 154960 - protein, 193 aa, Heterodera glycines
MKSLPRPAQDEFGECSNVANSVPRHARCVSRLLRAGFDGRKIYAKAFAKSYRFDRYRMKKRAQIRESRRKTERRQKRLVWLSKKSTFGGQKVGDKSALFSAEKPKSISKIKNNSLGPPRPLGLELANAYAAHRRERRHTSIVKKNYYELHSPSQARLSPLGSVAKLMMAEVLRVKGKQRKDVKPWEIQNLKGF

SEQ ID NO: 154961 - protein, 25 aa, Heterodera glycines
TCTCGVVVKLSIFHNFSPGFNSPLG

SEQ ID NO: 154962 - protein, 78 aa, Heterodera glycines
MPNWNNESASPLSESAADYLAILRPPPNRKCFHAFLVFTFLKKSNFVCLLSVKQIRAILMIIDILKRAFSVHIEKRNH

SEQ ID NO: 154963 - protein, 159 aa, Heterodera glycines
MEKFRSKIESRRRERFFGADLGLAKVEQHARKSLEEQFLAFYTTVLEYLDKWFRVDRFSEKLRWVSLMSDKIPQNDALDLARQKAPDLTNNLFDDVSEANQILNSIPKDELQMLNPEQKWMKLFEADLPHLYKLVSIVLSVPVSNAFVESFFPLRLTMD

SEQ ID NO: 154964 - protein, 310 aa, Heterodera glycines
MPDKTKNSIVSPNSSTESEDKFYSPENFEIDETPQKPIVANTNKKIGGQIRKNYEPQMPKAIKTNLKSEIVEENSSENEEQFYSPKFVADLKHTNKRENVHGINYLKMFNQFTSEFLEETMKNDWKQLKFSIQIADRFLVYLTEQVGEKILKRKWKILGHKNWCKPIENKQFIDFFEQKNVFNVRISNLQQKWKDIMPKINVNFFNVMILFGINLADHRLVKMGEPKNRAEKKVKKKMLKMKTMLSNAFHCFPPNELDLNDNNDVHIILQYVMSRLLFVTTKNKLSNEIVIHVFQLVERDGQLHAESNDD

SEQ ID NO: 154965 - protein, 124 aa, Heterodera glycines
MARANFGKIRNLLEISGLLETDSEYVYLAKTLNEANLKRNFDAVSRIIGLHVGTDMLKILEKFNALPNRASISKTKFSGMFQVAYLEILKNTQDKCYQQFVEPVKGIDMSSKGLVNAINTVYFI

SEQ ID NO: 154966 - protein, 419 aa, Heterodera glycines
MPEGGYERAENQSKIAVKYFEWLAQKKRVKVRHACNGGEVQFGGLKVDCVIGAEKKIIEFQECDVREELKKNKEMKKFFESVPDKGPINLRDAYAGGRTMPFCLYAKATEEVEISMFDIISLYPFVNYDTPYPVGVPKIVVSRDFNVNWTVPDDIPYDGLLKVKVVPPKNLLHPLLPVHIDEMLLFPNCWSCARRAKNEFVMTKDVKKCNHRPAQRAFLGTFTSIELRKALELGYRIVGFYRAYHFEQFDSQLFKGYVRMFLKIKVEASGWPAEVKSEDEKRAFIEMYKAKYDIGLDYDKIGFNPGLRMITKLGLNSLWGKFSMRNTLSSTEIVASMERWMELGRDNTIEFGRPVKISEEISRVVYRKKEEFIREHKVSNIVLSLWTTSAARLKLYEYMEQVYKKEGCKLLYCDTGEKE

SEQ ID NO: 154967 - protein, 114 aa, Heterodera glycines
MTREYADSEILEFVSAGPKQYALKLRRKKDGVIWHKTKIRGMTLDRRNEFKYELFKEMVLDYKEGVKKVFHYPEKIGPTNDFRVLSKDVQKEYTPVQKKGIIDHHFNVLPFGYY

SEQ ID NO: 154968 - protein, 135 aa, Heterodera glycines
MSKKNFQETSKEFRRSKNTKNYFKNSPNLEKCFEEMESHIKENKKFGIKEHVTTFYFKCPENEDPEKMFKNILKKLMGDAMIREAEPGWKIEKISVDLYCSALSDPVILPARPFQHSNPDIVFNEFITDSNHLGK

SEQ ID NO: 154969 - protein, 38 aa, Heterodera glycines
MGTNYNNPDYSTLMGATRCGILEISPFESNGEYELKLL

SEQ ID NO: 154970 - protein, 129 aa, Heterodera glycines
MYSHEPAGIHVVLWPLDSDKAGRSVYLGWSIFLGGHFDKRIWRGIVLAFPNADGHSRVVIAGVHHLLFFPLFLFQIHWFMALLRFAETKTNRGKILLSRGGYQGWHGIPTSEFRLPTFLGPRNSDFRNF

SEQ ID NO: 154971 - protein, 52 aa, Heterodera glycines
MPALYVMDSILRQAKKQYKHKDVFAPRFATNLTNTIQNVLTCESADRVCSTY

SEQ ID NO: 154972 - protein, 608 aa, Heterodera glycines
MKIILRGNILNKKGEDPANWTTTKFRDVLNEAVRKEVQIQEVMGEYGHHYVQPKAEVVSAAHVQSPITANKRSRRPNQPSTQRHESFIASTLDESLRQQGYKKQQDMQLANSRHPQARDQAQSINRIPPYPCTFCNGNHWHDECQKVNTLNERIGIVREKKLCFKCLKANHQASNCSRPSKCYHCKRRHPTALCRDQCRSENDINMPSNSYSEKKPNDQNGRRSTAIEQQQMCNAVQSRDTRALLMTARATIFNPAQPGLSMMATVFIDPGSHRSFISSSAAKQLELTNLGTEECFLTSFGEREPKRYLSDRVAIGILCPDNDRFIFNLNALKFLLNEMPVLQLNALDHDGLQQKKLNLPNAPRQPDILLGMDVWHELKIQPIEQLPSGFTICQSKIGNIISGKGRIELSQPSNVSFVMMVTNKESTGSKPTHMQKAKQHRESKTLRRHQINKLLSSAATLRSRRKRESVPNSTTPIVIDLSSDSERNSSDVEIIQDPVAGQQISSSNKHSTAPLPKALRRPTATKQSSSIAKRPASFRKQTRKAAPSAGINRTHELSSQMKALPPTAKEKSVNQQCIMALTRSADPTTSQDDWKLAKFPKHLLDNNQ

SEQ ID NO: 154973 - protein, 206 aa, Heterodera glycines
MLKSRSSVSIWIQNVQLAALAMPISLAMVAFQDWHKVWHNGGLNQGFDLVVWGVVATQSKTPIVVIKYADNILKTFANSFSIIVISIASIWVFASMPKPLFIVGAALIITAALIYAKFPYRAKPKADQRSNSNSATDSGSADSDSSNMSNCGTAPPTGRGGDRMPKEEDKVSRLTKLFRMGRSPTMAKLTPGQLDANGDGNGVQKF

SEQ ID NO: 154974 - protein, 93 aa, Heterodera glycines
MPTFWSKTGNEKGINCTICMYVSLEMSVFYPIDRLIDQWQTPVDQSIISLQLLENFLYFLNRLKNREYSKKYKNLQNILLKKLIIFIYRKGIF

SEQ ID NO: 154975 - protein, 35 aa, Heterodera glycines
MEDSKTINSRCDSTERANQWPKAADGFLRKTLIDH

SEQ ID NO: 154976 - protein, 864 aa, Heterodera glycines
NCATMFGRFPLLTMLNSASNWHRFRPVLNIWSTNISVAKSNRSTMFDGHFPSFEHAHLDLKLALLSLRFDALMPSKQEMLKKRKKEEHLRRTEKSVSPGRSPIPNCPPKGNPNCSILDNPLSADGNGAASPRGFNTPNLSALQLSTPASSIGSKRRARPPKAGDEAITASQNNVSSVDTQFTSATQNIETPFSKKWKVDDVNRPSSAIEEIASTPIFTQRSRGGRPAKKRRGPGRSKANDSMSESSSMDQSSEATTSVALLPTVPEKINFSTVQINFATSRNFTCKIWKWAAIGLYERDGETPIAPRSGPRYIETCWNDMTQFLNDGFAATYLAYLATISQRKVVVVDPMVWSNGLDRVMPYKNMTFGYDPNVPAEVILLPVHFPGHWTLIVHDVQFGTHFADSLPTTYGRLDPQLTDKIKNIISDILPSAVLAGIVDVENLTVQHDGNSCGYFVCLYAESWLMNNRTFVLPDLSINYEKKRILWHINELYGSDNVPYHPREGVPTPCPIVYRHTDEAQSTSKAAELMEVDEHEDIMIIEPQTSGQAVDAILTQVQVAGENQADTLGLVSESCIPQEPIAQADDVIFIRPKTPPRRSMRVQKRLSASVSRSPSPAPKRPPPANSLGVATPITRRCSAFHKGWQCAAAAAKHFPEYCDSGKLGDKKCADCGAHLFSHEDSTICCRKGRVVLPMLNPHPDELKELIVGNKQSREGKEFVRHMSRYNNLFQFASVSAGNKPSPAGGPMAVILNGEFHRRISSMQAGTTQIPGFGQLYILDPVEAMEQRRNNPRFTGEKITNEDEFVQGHQLNEQTLEILEQMIQVHHPAAQAYKQAREQLTELLQQQTPEELRFFRMTLLNERRAPT

SEQ ID NO: 154977 - protein, 194 aa, Heterodera glycines
MNSLKRFQLPEQGTRQQEELDSVEPKHISDVVNFNSAGVFYVLGKACPFRSKGLICRRKLSDDNMCEACGQKAIAPIHTVFVRLLLQDVEQADIAQRVTMFSSVAEEFLGMKAAELLAKEKEPESLAKHLDDLIAVKIIAKVNIKANSQTYTGFDWIVNLFKKCPGKNDSDVPKEKDDDDDDVDEIATKKTKKN

SEQ ID NO: 154978 - protein, 934 aa, Heterodera glycines
NLMSSGGFICFHFFSLMNCHFEDVDRVGGLMVAFHAFWSMPINFAIFWSMPINFAIALYLLNREVGMAFLAGVLVSLLLIPLNKYIASKVGQFSNKMMQMKDARVKLCTASPPPCFFPFLNTVTELSRSMRTVKLNNWTAFFEAKIGHLRSRELANLKGMKYLDAVCVYLWASAPTVIMVLMLVTYSVVLGELLTAASAPTVIMVLMLVTYSVVLGELLTAAKVFTTLSLISILIMPLNAFPWNAFPWVLSAIINGMVSKRRFDAFFAIRCGDQRQNIVTQAEGGGERLLGLDLLGLDGNSFAWNETKSAVSNVHFNGKKVQKMIQLEFIFPVKGMLIGVIGPVGCGKTSLLMGLLGETIATEPYVRVSGVDEGFAFVGQDVWLREGTIRENVLCERPFDQKMFQLAVDSCALSFDIQVNEKPIDQRANEIKFLQGPGKENYRISGDGITLSGGQKLRLQKLRLALARAVYAEKRVILLDDPFAALDRTVAEFVHKNCLLKLKEAGKLIILCTHHERFLSDADLVIRLNEEGSLIRSVGGEGRDEQMTKGEGVISLMGVIGLRKPGVDASPADAQSADGGTLNVIGKRDEEENAAPMDATEFVGVEKQRRKRRTNPSKLRNWLYYFEIRGFFVEEEWSFLIGVALSPSNSYCPKLWHFSGRCGQNPSLRQLRAFHWGGTECVNYSVPFRFVCQFLILHFLTLSLPLAMQMSKIGSDIWLSRWASAVSPLPNGSEFTFSESFPSLLVFLFSRSESFPSLLVFLFSRPIQKMVPLTNAQQEETNFYLFVYIGIAALNTICTLIRAFLYAFGCILAAKQMHERILHRILNATLTWWDRTPCGRVTNRATLTWWDRTPCGRVTNRLSLSTDVNRVDDALPFQLNILLASLFPLVSSLLVTVVALPLLSPFVLLLTVAYFFLQAHSKTSNHSHLCCLAI

SEQ ID NO: 154979 - protein, 107 aa, Heterodera glycines
MYHFGNIVGYVLAKMEEEMEDDEPHGHITSLAVKRTFRRLGLAQKLMNQTARSMVEVYNARYVSLHVRKSNRAALNLYAHTLKFDICDMEPKYYADGEDAYMMKRRL

SEQ ID NO: 154980 - protein, 41 aa, Heterodera glycines
MSTSLKHRDFVGEPMGDKEITAVAGIGPVYGKKLEDKGFDK

SEQ ID NO: 154981 - protein, 70 aa, Heterodera glycines
MTKQSVFNLNKNFWQNEVAKKCAAKRQEECQGDQKGDKLMCRRSSEWHGIRNNWSNCWMVFALDWNLILF

SEQ ID NO: 154982 - protein, 453 aa, Heterodera glycines
CMGLPFQWGMAICTIDGQQFSLGDSLAPFCFQSVSKAFNYAIVASDLGDYVHSFVGHEPSGRLFNEICLDPNGKPHNPMINSGAIIVKPHNPMINSGAIIVTSLLKKGVAMADRYDFAFKEYKAFKEYKKLAGGGYIGFNNATFLSEKKTADRNYALSYYMKENKCFPPENKCFPPDCATLREELDFYFQLCSLETHCESAAVMAATMANGGVCPLTEERCIQSRPCRDVLSLMYSCGMYDYSGQFAFDVGLPAMYDYSGQFAFDVGLPAKSGVSGGMVVVVPNLMGICLFSPRLDRMGNSTRGVLFCQKLIGVLFCQKLIDTFNFHNYDSLLHADSKKIDPRRRLGNTETDLIVNLLYASKNGDLETVRRLYLQGVNLNICDYDGRTPLHLAACEGHALLLKFLLNIARVDYTIKDRWGRSALDDARTFHRTTCVALLLKTAQRRRRSYEQH

SEQ ID NO: 154983 - protein, 237 aa, Heterodera glycines
MFDDLSRNIEAFEKSMVVAFDKWHSSSELAEQQVDSLRNAVAKLETCDADAVARLSASVARFETGNFAKLKESGQRIIRPLSLERKRQIEVKVAAIERELCFNKSSIQHHSKNSLQIIDKEVLGVREWIEERDEDADLIGTLLKHGEKKHIDEIDALMARSKKNQARVAEYHKNWQLFNEKVKEIAHQANDEEKGEDIVGRVGASVERLRQLEERFKKFVEELEKLRTTAANDETEQ

SEQ ID NO: 154984 - protein, 65 aa, Heterodera glycines
MATRKRPRENVLARPNAWVPVDPYARALIGNAITNEYSIHNHLNVCPRERKKIQRKKWFHHKKAI

SEQ ID NO: 154985 - protein, 214 aa, Heterodera glycines
GQDERLTIDGLLCLCDGQWLNADIIDCYLDLICRCSPRAHFIPTYAILSYGRKGTVPSEWYWQLAETDTIFAPAHLYNNHWAMAILDMRERTLRLMDSMNHGYTDTEKKEFMETIMNILRDVAILQKVDIGDRSAWDVQERLSVPQQRNGTDCGIFALLFAQYSLERRQLEFGQCHIPYFRRRICHDIISVILHDQKSPVNRSDETVVQCPFAL

SEQ ID NO: 154986 - protein, 189 aa, Heterodera glycines
MARLSHNLSIALLQSGRTQLSKRNNNDGPSQRTIKHTKALIKEVPEAIFCRSFLLSNGSLKIASSILNAKKAVSASSDDDPSFISEFVLCGEAPRLWAKVKQLEGQKRFLEAAQLLDGVEVENLRLIHQFLANQMTDSLRLLLDQARLYRIAGNTKKALSCYQRAHTLDCTNAEGMDAFAALLGTVSES

SEQ ID NO: 154987 - protein, 29 aa, Heterodera glycines
FTVYALIIAQSLLIPQSPIIPQSTRCFEK

SEQ ID NO: 154988 - protein, 301 aa, Heterodera glycines
MDTTTINRILAGNTKTREHYLGCFPCDKLPNIINKYPSTFVANNDPSNKEGTHWIAMFIVDDRTVYYFDSFGRKPNRCISQFLRNYEKVISNKPAIQSVFSENCGYYCIYFVHFMCSFGGRNYESNFEKMRKKLIGEDNPDLFVVNFVKKLIKNTIIASLLNCPARNLCDRLNHPDEIQKVEKYLKGKTLQTTYKNQLDEYKDFEYGGITKECARKQMAYNGFKNVTVDQHFYVRHRICLRYANNPCVIEKHKNGNERFYPLELVRVKDKNDIYLGQNFPKPIPSICNDNDFIDDQPCYHW

SEQ ID NO: 154989 - protein, 222 aa, Heterodera glycines
ILTSSAYNLIFTPDGMTSGRFWDVFVRELWPIFSTNIRCLGFFRGDHLDNLLRQISPTILTDLNKLNSINSYDLLPAAIGDDFDVPNATISAGQALSKWLHSPRKDGQPKRLRCVDYNKQTNFDWINNFKEHFLRANAISSVNYQIHFSVHVPSMPMVPFELVNEWTKEKLTLTKANELDNIWIMKRCKIIGETAAVDWKDGNWDNNCNNVFIWLSYGIKSI

SEQ ID NO: 154990 - protein, 53 aa, Heterodera glycines
MMVGNNLKDTQLQQIVDKTILFHDKDGDGKISFEEFCDVVGNLDVHEKMVVKP

SEQ ID NO: 154991 - protein, 153 aa, Heterodera glycines
MAKLKRNIKREAVKQRWQKQEERKAQTAKAIQARLAKKNAPQPNLDEQMSQQDEAGPSNSAASAEEAMEPPPPTPGPVPTPEMDEEILEFGFSLPSTSVTPIGDCLQEMRHCIPCGGDLSNFGKRCRTVYKCANSWSIISSRIGCWTPGDLTN

SEQ ID NO: 154992 - protein, 100 aa, Heterodera glycines
MKKVIKKLTSMSLTDRGFMVFIFITSAIHAPGIEPGTPILVTFSQTTETGSEYQILITISTQFDPQILIGTKNRILWQWLLARIELRKIQPIIIKYIAAK

SEQ ID NO: 154993 - protein, 53 aa, Heterodera glycines
DHLCFDHSAALGEHGHRWFISVGIRFTFGALRLARVDERKKGQLPEQMFTSPR

SEQ ID NO: 154994 - protein, 126 aa, Heterodera glycines
MCEACGQKAIAPIHTVFVRLLLQDVEQADIAQRVTMFSSVAEEFLGMKAAELLAKEKEPESLAKHLDDLIAVNLIAKVNIKANNQTYTGFDWIVNLFKKCPGNDDSDVPKEKNDVDEIATKKAKKN

SEQ ID NO: 154995 - protein, 312 aa, Heterodera glycines
MLDLDLDSMLDLDLDLHVGPGPGFHVGPGPGFHVGPGPGFHVGPGPGFHVGPGPGFHVGPGPGFHVGPGPGFHVGPGPGFHVGPGPGFHVGPGPGFHVGPGPGFHVGPGPGFHVGPGPGFHVGPGPGFHVGPGPGFHVGPGPGFHVGPGPGFHVGPGPGFHVGPGPGFHVGPGPGFHVGPGPGFHVGPGPGFHVGPGPGFHVGPGPGFHVGPGPGFHVGPGPGFHVGPGPGFHVGPGPGFHVGPGPGFHVGPGPGFHVGPGPGFHVGPGPGFHVGPGPGFHVGPGPGFHVGPGPGFHVGPGPGSMLDLDLDS

SEQ ID NO: 154996 - protein, 301 aa, Heterodera glycines
MEGEQLENDENVSPSRVSPTNAFGVQKSGHLLHNFAEPGPLTTKIYYYVDDQQIPFSTEIAIPPSKITLADFKKCITRRNYRYYCKVMDPALNAEVKTDIRDENAVLKPNSKNGRFELFLLSETQQTHSSASTLPIQKLQHVDAIRASLMEKRTTANNYILDGRPKFIDDSSSSPEEDSTNLRLFGESNFEGITGSIDDSDSQYTTDFTSVSQQNPHVPKRKFAMAERWCGESCDDGKHGHGQQQQSHRHRLAFHIRGHHGSINVLGNDHGEKPLPYMIYKGTFQTVTAQIALKPLLSCRA

SEQ ID NO: 154997 - protein, 83 aa, Heterodera glycines
GNNCQGRICRNPCFERQGKHLCQFGLALAVQTQIQRTIGGERWVFDVFRLMDCFSIYLIVFLGIFLFGFNHWFSLTYDKLIFC

SEQ ID NO: 154998 - protein, 154 aa, Heterodera glycines
MCSAAQKFEQHIQYADIWYLTFQFKDSEEPVVVEITDPGTEKTGERQMAIQQKSDAIILCYSAFNPGSFLALESVTEDFQTFNGKPPATLLLCNEDQLAEEGFEDGHETDTADDGYGTNSGGGSPSDREMPPQTVPKRRSTTPTGRQHSMERIR

SEQ ID NO: 154999 - protein, 138 aa, Heterodera glycines
KKDEKRGKEEKVKETEKPKEEKKKTKEVKEEDEKKKESKTAKKKENKGEAEERKVDEEEEEGEEDEEEEEDEEEEEGEETEIDDEEDKENIEDEAEIDEEEEEEPRKKKRRKGRRKKKVEIDNLKWKGTNGQKSTFGT

SEQ ID NO: 155000 - protein, 232 aa, Heterodera glycines
MDGHSYSNRAEQDIILDYVKRVCTELHVKPSEIGVVTPYNYQVRRLRHKLSTEHKGVTVDTVERYQGSQRRVIIVSTVRNNEKEAIGFLMSDKVFTNSKSWMIDYCRKNGATVDMPSEAELFPSGQFQNDVLTDSDKSSSSSSSEVDEKERTDELVKKGTSSAAAAEQQNLRAKASSAEEEDEDDSSVAGETTTEDDDEEEDDEDEDDFDESSSSGDGDEFLTDTDEEEEQH

SEQ ID NO: 155001 - protein, 84 aa, Heterodera glycines
MVDYFKKIGISSSLIERYESNPNYKDDPRIVTMLRANYRSHASIIDVPSRLFYANQMYVPEDAQPRDPLATWKALPKQVVSVLV

SEQ ID NO: 155002 - protein, 251 aa, Heterodera glycines
MGSRRTVHGGLEIIPLPRLEILEYLNQKEPPGLLAYAKKQKAYNRLLMLNDQITSEDNKTGPHTVKLCSRSRTGASVYGVQLSIDYCERNSNDIKASPVIILEPYEQQQSRQNMQYYDPYYKGRVISTDEKKQTIHFLPFFRTMPEGNYMVRFLPSQFVYNSRNHIMNELQDNQRPYRFLIFPPPVDEKLTVEQYVELRDLAISKCQFMSDRFNTEQRQAIVVSSNNNRLGYGQIVYHLVKKCLLRQLPMR

SEQ ID NO: 155003 - protein, 289 aa, Heterodera glycines
MASKHQMIATPMEYMYNLDADKVLERFGKYGKYQMIVYLMAALNFFIFSYKTTDSSLSLNDSRHYVTLATDFGIGCEDKHLLEHANGAFMLESIHWLIANGKTKGVKRYISRASRVNNVTLNLHSCQSDIVAPDQTPPHPSNAPRAKRNFLDLFRMPTLLLHLSLNCYIFIVLNFVYWVLTLYSVKLHEQRMIGFFLSAVVEVPAGILAMLLLFCCGRRTVTVVALFGQTVSLGLTILVPQGSTSNLLLSLVAKVFNGVSWASEPLLLSEMAPTTVRNMVRLLLLLLLF

SEQ ID NO: 155004 - protein, 142 aa, Heterodera glycines
MQKIVVTAMSVLAILFALVAPETSGRALPQDLADFDGGPCVAFLCRTLKRWRSGGDTKKRRRKSNALVEEGSSGERTALAEEAAAEDGGDEDGAVPAAEQRQRQQTNSNNNDDNASRTGQAIVGDEAVVVDNNRTPNRKWYQ

SEQ ID NO: 155005 - protein, 374 aa, Heterodera glycines
GKLQRRGAEPEDQRKIKIKTKDVKMQIKISIFRKAIKAFQSFAHLAETGKLDIKTKKKMAQPRCETGKLDIKTKKKMAQPRCGMQDAQMIVGPGGDQKKWNKNLVTFKINNFSPQLPQSRIRDAIKRAYDTWSQVIPVRFQAQETQGQADINAQETQGQADINVQFAARSHGDPWPFDGRSGVLAHATMPTDGKLHFDDDERWALGPEDARKIAKFGYTDLFPGYTDLFPVAVHEIGHTLGLEHSKVENAIMAPFYQESVDDNGNYIPQTLKSDDIRRIQAIYGGSGGGGRTPSSAAGTSGGRRPTTTTGGGSTGSGSFGRRLGKREQFRRIRKQRQGQQLWRQCRFGTSDDDWGGLFGSGGRSRTTSNGMGGG

SEQ ID NO: 155006 - protein, 184 aa, Heterodera glycines
MAKSYRITKNGAMGRNGGEKVVNGLQQHREKKISVLHAHVDEQHNNEGNGGPTANEQNMGMVMGERAFVATPLLQQRRRMPTTPSATTSNNNNLYCSKLSAPPLAPMNNTSSPPTNDQQNGTYERQKPPTIRVQMANGANASLPGAADHSGDAKPLACRQKQSQRQNDQPNRWPSAPIAPKDEL

SEQ ID NO: 155007 - protein, 90 aa, Heterodera glycines
MNGPEEFAIVEQVDEAENGRTVDQQTMAKLRTFAKRCIFLQLDRLHLSLIMAMSARAHSAGDVVAQVKFVNALKGLTLPKYYKKIGVAFL

SEQ ID NO: 155008 - protein, 143 aa, Heterodera glycines
VQHENLHQICDFLGYRKSPDSNVFSGFMFLVTEKLGPKTGCRKAFPFDFVPHLNLNNDSPEYMDYLESLDDCKRPMGTENRRRPIKPLILKKKSKSGQQQESQSACAAPKLLPIPKSVAESVDLREGQPVLIRRYKKERRQQN

SEQ ID NO: 155009 - protein, 74 aa, Heterodera glycines; identical to SEQ ID NO: 140367

SEQ ID NO: 155010 - protein, 55 aa, Heterodera glycines
MELNDSQNSNGMPREKHVDLVDFKVKEFKLETFFSMHLEVMGKYDTRAGTLRDCD

SEQ ID NO: 155011 - protein, 97 aa, Heterodera glycines
IYATKARRALAAEAATALDDGTEEPIDATEIFEHIRDINDPEHPYTLEQLNVVQEELIQVSADPTDPFVDVRFTPTIPHCSMAALIGLAIYAKLRRR

SEQ ID NO: 155012 - protein, 529 aa, Heterodera glycines
MNLESGPLRIHENGSMELIEALNFEQSAEWIQSVQIDGTHKTRLQTIRIDVLDVDEPAVFINRPRPFLAVVPPLEILPRGFQVFRLEAKDENGEGSAEKVTFRLINTERKTKSKASFDEYAKHSAPNSFTVDGLSGAIRTALTKYSPGGTYKVFVEAMDNGGAEQRVVDAIDADSGLNSALLFAVDHPQFMVNGRGELQRKPGTKPLDADQVAEDALGGTPVVQVQAIDPDRDQVNYAFVDEEGDETVVNGLFEIDPDTDDGSCCSHRRKGLAVRHTTKATVSEQTDKDRANYHNKVNTNKDDCAICVKVLVGVLDLNNNKPEFPHCADYSRMAMVEEGQYRVNASPILRVEAIDHDLGRNGHVSYSLYYARSESRKPFLIDSDSGELRPSPYFVFDREQKVVEEVTIKATDKGDRPLIGFCQFKVQVIDVNDNAPAFDKSIYETSMGRAARVGTAVLTAVAEDRDGPRNAHISYALAPDETSSAEHFEDFQSFTLPDPEIGEIMLAKKVPPENDRLLFSIIATDNGFP

SEQ ID NO: 155013 - protein, 132 aa, Heterodera glycines
MCRLQRDFSLHRIVQDRLLNNYIGQPRPNGTWSQPTFPPEQWNVYTRTLNGEARTNNHAEAEHHRLQGAFNCRHPSIWHFIDVLRREQKGTDGKYASFVAGLEPPQKAPKYQAPEQAPLQFGAKLHSSEPEQ

SEQ ID NO: 155014 - protein, 119 aa, Heterodera glycines
MQIKIEEAEVTALKTGPKMAAKLEGQLKAAEEERKNYEKLCDLAEKLQVKIRAQKKLLDDTEEHANISLQKYRQFQISVDNAEERANTAESSLARMRSRSRLAVPSGSGPLAKSETFAL

SEQ ID NO: 155015 - protein, 19 aa, Heterodera glycines
GPGSRSRVLKSSGPGPGRA

SEQ ID NO: 155016 - protein, 91 aa, Heterodera glycines
MGQRPNVRDAAPRGTWESIAQMLGPNDAINSRFSALSSKRCTRRENKICFTADRDVLISGVAIYGANQSGSRMITDDSTAKTNWEHKIAIK

SEQ ID NO: 155017 - protein, 189 aa, Heterodera glycines
MDLRAAPKENGTSSNGAFFKSADDAEGISTEGNSHAEVSLTSRLNAFRLKDVGCDVAFVVGEEKEQLKAHKLVLGASSAVFFAMFYGPLGSSFVGTAIPQIAYEVPQIVHESTTTTAAGHQKAAQIDFVYSDFDVRSLSVRGQLTDDNVMNTLYAAKKYAIDALVTECCYQVIDQNTDLALDAANVADI

SEQ ID NO: 155018 - protein, 366 aa, Heterodera glycines
SKMAFGPTISLKHFLFLTGKLPIVNERDELTSLIARTDLKKAREFPRSSYDAKKQLMVGAAITTREKAREAVKALVKAEVDVLVIDSSNGSSKFQVDLLRWIKSEFPEWPQVIAGNVVTMRQAKLLIENGADALRVGMGSGSICITQEVCAVCAVGRAQGSAVYNVARFAKTFGVPVIADGGIRDVGYITKALAYITKALALGASTVMMGGLLAGTNEAPGEYFWAPGEYFWGPSGVRLKKYRGMGSLDAMEANECSQDRYFTCEDGNIKVAQGVTEDGNIKVAQGVTAAQRDRGSVFKFVPYILRGIQHGLQDIGVRSIAELWNGVNCGAVNGVNCGAVKLERRTHSAQLEGGVHSIHSYVSRLI

SEQ ID NO: 155019 - protein, 35 aa, Heterodera glycines
MVLLLLLVVLDGLFMLEVMLLKLLKVAIKLKLLLL

SEQ ID NO: 155020 - protein, 94 aa, Heterodera glycines
MDVTSNPNGSVEFEKVPKSLKKGCADTGLDFDEDGLTIHELFSQGTGLTYNDFNILPGYIDFPVSDVELGTHLTRKIRLSAPLVSSPMDTVTES

SEQ ID NO: 155021 - protein, 200 aa, Heterodera glycines
MKTLTITVRNEKSVKDEIKYPVHIYDPKYSKSVNLWKQIRHFGWSTAIIAIEHGGQLNTCPHPLTPNNTWPFSRHQLHRSLIINFFPLSLSYFPFLLPSLSLAYSSVGQSPSHFVPQFAESFVVLCSASSPICDQSTARLPADFDGIFAPFVGASFPSARPLSRLHLLQAFGCAFPWPSMSSAKRILICVNAASARAVTS

SEQ ID NO: 155022 - protein, 20 aa, Heterodera glycines
MHCLKRSKQISFSMGCCVIK

SEQ ID NO: 155023 - protein, 219 aa, Heterodera glycines
MDKGNGGRNVCRMDWNEEWKREINEQKTFAELLKPIVTRSAQRREAAEDTVLAKRQMGFRRGPLANQGLPLPMPPSNAEVVVEPNGTTSTTTVKVAARQKAKTSSTTTAAKVVATQNAGCSSSSTAANVRQPSLSSLSAEEIARQKKGQKQIQQKTGKLSRARGCLSTKSDALELTHFHDIDSTIDSTLHAIVERPVAPFLQQRLNARPLFHQCNKKFF

SEQ ID NO: 155024 - protein, 42 aa, Heterodera glycines
MAVNIERNLKEVQEEIVKMQNRKRRFCELLEMNEVKSAIFAL

SEQ ID NO: 155025 - protein, 37 aa, Heterodera glycines
THLRLSCYCTNNRDGAHLTLLPLVWPTSRPHQLPSHL

SEQ ID NO: 155026 - protein, 54 aa, Heterodera glycines
MVAVKLLVWNVAKNFRQQRKMRWAGTLSMLTTNTRLNCSRNNSKNSEMRRQTGP

SEQ ID NO: 155027 - protein, 47 aa, Heterodera glycines
MRVVINGRNEGKVENKEKGDEEKPKQSAEDGKNGFEEDIDSDADSWG

SEQ ID NO: 155028 - protein, 124 aa, Heterodera glycines
MKEKKMGLNSNRKISLIVPVWGHLGWQKAIWAYLRPIKVPKNSETSTKVPRDNKRGKVIGNIMPRLRAFLSKLLPVFEGDQKDANVHQNAGDDDSIEQRCREDEHWGMARVFVLDPQLKKHWLT

SEQ ID NO: 155029 - protein, 111 aa, Heterodera glycines
MANFIAIVFYVFIWVVVKWKKCNRQPIAHQCHQIKDQHQRAFVQVTGGDHFDQHRLLSDQCRRPTVRFAALALGPSQSVVCGAVLWHSVECRRCAECAGAFHLQVAKFFNF

SEQ ID NO: 155030 - protein, 163 aa, Heterodera glycines
MDNLWKIFGIHLKKLPDFENSQKKLERNSLKPMHDFLEVLEKNIGKKNTEKGTQRQRILVENYAALLTDSLVEDAKLRTEFKRRARVRQRLRKMFEFAEGNLGIFEDEFWNIFNVNGREKGKRKENESAEKDGGEEAQSDGWKLIKQIGEQSGKMPKKGGGGE

SEQ ID NO: 155031 - protein, 177 aa, Heterodera glycines
MPQLGIKGTAGILNIFCCIYFLYSLHKLQTSRAMMKMKNHLVIVTICFAICLDFFPAFLSIGLTIFGSGLLSNVASTSTVLDSLCCAIYFSLVFVPPSWLKRGGANNANAIGGTTNIQQQRQHSQLQPQQRTNRIASTVSMMSPIIVPALNRHPPISRYSDGMVQIGTVSATVRHGT

SEQ ID NO: 155032 - protein, 67 aa, Heterodera glycines
MATIGIGDFHPDAANVLEAAVAIVFLGSGIGLLAALMIGIAYHFQSLFFITLRGWLLKRIQFSKQQK

SEQ ID NO: 155033 - protein, 33 aa, Heterodera glycines
LFMLLTAIILAVIAVMNPSWQTVDIREFQAEHH

SEQ ID NO: 155034 - protein, 427 aa, Heterodera glycines
MELEIDLNRAFGIPAIRAVENKKELDACLAQYPEVFQDGVGRCKKMASLKFKEGCQPKRCKPRPVPFSLRNEVEKVLDQWQSEKIIEPVATSEWATPLVIVPKANGKLRLCFDCKVTVLKRLSENGLRVKREKCEFLKPEIEYLGHIVDKKGLHASPGKIETILKMPEPKNLKELQSFLGMVNYYGKFVPSLATLSEPLNELRRNDAKWTWTKSQQKAFDGIKKVLTSTEVLVHYDPQKPLFLAADASDYGVGAVIFHKDEKGKVGVIAYSSRTLNSSERNYSQIEKEARAIIFGVDKFKQYLYGRKFVLQTDHEPLKKIFGPKGELPIVAAKRLHRWSLTLMNFDFEVVYCSTKEFGNADGLSRLPCPEETTIDCVGLEVQQVQAENISCLPVTVSAIAKEVKKDEILRKVKEFIEKGWPQKSKKD

SEQ ID NO: 155035 - protein, 376 aa, Heterodera glycines
MSGFLRTKIAIELKALEKAKTATELYAEPDQTLTSLENAILLESAAERIKSEVEAVNAKIEQIWITASKWHDVIQKMDKDERKSEQTAYEQFQTTEKLNTKMEAANTKLTELKDLEMKVEAGAKLQRSKADRDARVEQREHAKAMAKSNAEADKGNNRARGNEMTAALYQLPTLRIKPFGGDKREWPMFEEAFKVAVDQKPGSKTEKLNLLKSLVEREAALLIGGLRLEEKNYEIAMKLLKDTYGDKGEYVRRLHTELSNLKRCFSVEDTKHFCMELERLARELEAAEEDIEGPPIYLMLEKKLYKPFLREILEEKAKNPDFWDTSSLRKALGSALSKELAIKEVMREYGFEGKEANPEHGFKRQLRRNRFGGSVN

SEQ ID NO: 155036 - protein, 367 aa, Heterodera glycines
MEKSIENVLERLYNDPKSPAAFAGVDRLWLEAKKELGHKVSKKDVKHYLEGHRTYTLMRPRRINFPRSRTTAAGFMTDCQVDLADFQSLSRHNSGNRYIMVVIDVLSKQIFVTPLRTKKADDMVEGFKSVFSKMPMKPHRIFLDKGTEFKNQQLKKLFDEEEVEKYESTHSEKKAALAERAIRQIKNRVYRYFAQLKTLNWVNVIDKIVSGINNSPIRVHGMRPIDVNFKNSQKVWERMFGADQHRALFGKHRKRPKFMPDQTVRMSIAKGQFEKGYIPNYGDEILEIDAVKRHTKPMRYKLRDAKGEKFKGFFYPEELTPVRKEAETAYRIERVFRKRKRADGTMEVLVKFIGYPEREWIHETQLV

SEQ ID NO: 155037 - protein, 109 aa, Heterodera glycines
MVLMFRRAVFQDDVTVYPVAIRQEARFGDAYWSEDNFMHYLFRVMTSWAIVYNVHYLAPQHRRPNENATEFAARVQRLIATRVGVRPIAYDGGGIWWVFVYLSDMNSHA

SEQ ID NO: 155038 - protein, 314 aa, Heterodera glycines
PDFRRSKAIDRFLAKSDSAKKQRSDKAHVDSVFFRRLLRILRILIPSPFSMELLFMVAIALSLMLRTYADVWMIQTSTKIEAIQTSTKIEAAIIAIISRHKPRFWRSLTDYLLCMPLVSVINSFLKLSLCELKLRFRERLTHHFYAQYLDGFTFYKMTNLDNRIANADQLLTQDVDRFCEGIVELYSNLSKPFVDVLLYVSRIGASIGWQAPIQLFVYLLFSGTALTYLRRPIGRMTVMEQQLEGDYRFVNSRLIVNSEEIAFYQGNERERVSVLNAGNERERVSVLNAFQRMVGNLEKHLFQSLNSRFLDSFF

SEQ ID NO: 155039 - protein, 182 aa, Heterodera glycines
VQVEFCNCFPIKFNCAIIHRPYFNEQNEGMMRKDKTELMQAYYAYYTTGRMMVKLADALGRLALAGREMTRLAGFTARVDQLMHVLADLEQGEECGRTIDTSNDLGTHFISRPGSGHVLVQDNLIRFQQVPLVTPNGDVLIRSLDFEVPSGTNVLVCGPNGCGKSSLFRVVRRKWNTIGGGG

SEQ ID NO: 155040 - protein, 38 aa, Heterodera glycines
MAGAGAEGGQGAGGGRVGGGGEQQCRRGRRKNKFPVRK

SEQ ID NO: 155041 - protein, 67 aa, Heterodera glycines
MFGAVRVHLQREPRADGQMVFEGQRIGGRSLRQQSEEASGQVLVHTDHQISKSARSRHLQGDLKKEI

SEQ ID NO: 155042 - protein, 221 aa, Heterodera glycines
NFIHFFSSIFMFLLGELWPLWGGTMILPAKGKLFYVPQRPYMTIGSLRRPYMTIGSLRDQVIYPDRPADMRRRGFTDSALEADQVIYPDRPADMRRRGFTDSALEALLDQVQLRNILEREGGWEGQQDWMDVLSGGEKQRIAMARLFYHSPQFAILDECTSAVSADVEDAIYRRCHELGITLFTVSHRKSLWKHHDFSLHMDGRGHYDFKRIDHEAEQFGS

SEQ ID NO: 155043 - protein, 214 aa, Heterodera glycines
MTLSFANLLITPLIHVLPNLLKANRWMFMSTSSNYKVLAACFDVALVALIIGSVKMLSDSPVIFSLYWCCVLTTGLLETLLLRSPKENCAFKSVVACALGAGIGVLFGLFTVSVDPSYAISKDPTKPLSLRETWTEMKTRVGRYSRNFASIGLLFAGTECILETTRAKSDWRNGTLSGAIVGGMLGFRAGLQPALLGAAGFAAFSTAIEFYMRR

SEQ ID NO: 155044 - protein, 76 aa, Heterodera glycines
MTAKLEMFRQKSRTKPPKKIGRKSCEWTAPETDNPGKAIYAVTRPLLVEHKEKLTKLRDQLKAQIEANERELMEED

SEQ ID NO: 155045 - protein, 69 aa, Heterodera glycines
MTFVRHFPHFSFDLSLFSFVFRLSARSVLLRSFARGRSPIGHRSGENSHRKTDVSTSDDGPLGAQAGVR

SEQ ID NO: 155046 - protein, 110 aa, Heterodera glycines
MLENSSAQLKESAVSFTTPTPLPMADIRLNSAAYGTFYMEQMRENGTRDEANIWPRTKNSVEQKEGSLNNGGIEWQRKIKRRKTSAVQHQVVFNIKFFFGQKAKISTKKG

SEQ ID NO: 155047 - protein, 65 aa, Heterodera glycines
MSWIPFFLDHRSLPARITLAVSSLMSITFQYGNILKSLPRVRLPKLSNSMIFWYISWAFVLIFLH

SEQ ID NO: 155048 - protein, 120 aa, Heterodera glycines
IPNYRWKKFKKIFFPVSKALRRRSPWTDKDELLDVLYWGRQLLALCIGICWGLVPMKGAIALLLYILITSAVGHSYLTWFQEAHDEEFGGFWEIAKEGFGAAFATFMGTYVTLFCYFKIS

SEQ ID NO: 155049 - protein, 199 aa, Heterodera glycines
NSIVDEYNENIINRLPGEYHTYLSIDESDPNSDFPISHEILNSLKCPSLPNHKIELKTNSMIMLLRNLNVREGLCNGTRMQIKEMGDHVISCVIKSGDKTGETTLIPRITLLEDKKFPFPLRRHQFPIKPAFAFTINKSQSQTFSKIGIDYTDEPFAHGQTYVAFSRCKSWKGLKIKLLDDKKKGKSKIVWQEILKRKI

SEQ ID NO: 155050 - protein, 77 aa, Heterodera glycines
MFEYRKRTLEIIDFFVFGAVPPNRCAQIYGETESFRNSFPIACTLILRWIFAPHNCLSTPIGQLERIHFSVFGAVPA

SEQ ID NO: 155051 - protein, 210 aa, Heterodera glycines
GTAITFFTPYNGPKARDLIKVLEEAKQNVPVELANLANNVSDNGYGDRRGRSYGRGGGGGGGYSGSSFAPTGANRSAFNSGGGGSFRGGGGSGGGSRGGYGSSNSYGGGGSGYGGGASYGGSGGGASYGGGNSYGGAGASRNTRGGGGSGGSSYGSGAGGGSNYRGGGGSGSGAGFKASGGSRGGGSGAGWAGGGGGDSNWGGSGGWSAN

SEQ ID NO: 155052 - protein, 178 aa, Heterodera glycines
LKQNKSIKKTTIPPLKLLNQLALHPPLPPQFESPPPPPAQPAPEPPPRLPPLALKPAPLPEPPPPRLLPPPAPLPLLPPEPPPPLVLRLAPAPPLFPPPLAPPPLPPLAPPPPLPPPPLLELPYPPLLPPPDPPPPLKLPPPPELKAERLAPVGAKLDPEPPPPPPPRPYDRPRRSPP

SEQ ID NO: 155053 - protein, 130 aa, Heterodera glycines
MVRILLPNGESANVSPSESVEEAIKHCVGGDISSQNDYSLVFFGRKLNSDQRLADIPHLDGESRSVRLVCRKSPGVSIEKNLADVDKLRSQCRTLYQNLGEELQQKVGRTNNLFFLLMFNYKAGDIYGGR

SEQ ID NO: 155054 - protein, 117 aa, Heterodera glycines
LSAAGFLTIALEAPFCCAFVDFIERIAQFSESRAYWQKAALYGGMGIVPILLCAGTETILGAGMICASGVAYGFMALGKKADRTTMLGADRTTMLGGANTAGQDPAWSPQLNQPFPQ

SEQ ID NO: 155055 - protein, 116 aa, Heterodera glycines
MPLIIYFSVVFLLLLLLFKIDTKGWSWLQYYNLLSTIPMFLPAVLNPIVPICTINYYRHVLVSDVKRFGNFLKVLFHLKIGQQNMNENEPKQQQHTSQQDAQLMCQERKISKRKIN

SEQ ID NO: 155056 - protein, 1155 aa, Heterodera glycines
MTSQNSASSVGTQNTSATQNVESPPSSKKLKVEDVDRPLSAIEAIASTPVSTQKSRGGRPAKKTRGPGRGQTVGSMSEGSSIDHGSEAITNVAILPNVPEKINFSTVQINFATSRIGLYECDERRSGPRFIETCWNDLTQFLNDGFIVEYLAYLASISQRKVVVVDPMVWQMGIDRVIQYKKMTFGYDPNVTAEVILLPIHFPGHWTLIVHDVQCGTHFADSLPTPYGRLDFQVTDKIKNIISDVLPSTVLTGIVNAINLTVQHDGNSCGYFVCLYAESWLMNNRTFVLPDLSINYEKKRILWHINELYGSDNVPYHPREGVPTPCPIVYRHTDEAQSKSKTAEPMEIDEHDDITIIEPQTSGQAVNAVSTQAQVAGENQADTLGLVSDFCVVQEPIAQADDAIFVRPKTPPRRSSRIGRRQSSSISRSPSAAPRRRSSTNAVEQVTAFTQRCYLVHKGWCCAAAAAKHYPEYTDSGKLGEKKCSYCGALLFPHEDSSLCCRQGRVVLPKLNPHPKELQELIVGEKQSREGKEFIRNMSRYNNLLQFASVSAGNKPCPAGGPMAVILNGEFHRRISSMQAGTTQIPGFGQLYILDPVEAMEQRRKNPTFTGEKITNDEEFVQGHQLNDETLEILEQMIQENHPAASAYKQAREQLHELLKQQRTEELRFFRMTLLDERSAPGAMKDPKLHPHQIITPSTGEGMFAIHADPNGAPAPKGIWVENKQGQLNEIAPLSPWTDSLTYPLIKPKGDDGYKIGIPYAKPAQRKRKSDMSDDMFDNQAMSDDDICDTESIASSGSEASMQSVTSRYDKSKKFVSLRDYCKYYLAIRDENLEWQYHHILSCGGGLGQRWILDQASKIDWQIATFLRRPDMDLRISTPKNLLHYLVNQYNKQQARQNPNARQKTVDDIGSVVRLSERNVNSLQYWKKMYEDCNTIFARCHDAKKARLFITFTNNREWPEFKENIYKNGQMFTDRFDMWMRVWSSKIAVFHQELYEKSFFGTILGSGESMEFQGRGGPHAHIVAQTDLDAVPEVIQEYIWAHIPPLPCKDDDSPIAQMHREVRELMHMQLHRCSDSWCGPRDPNFGRCKKGFPAPYSKCTILHPDRPALYYRPSPTDGGAQIEVNGLIYDNSQVVPYNPYILLRYRVHHNVLFAY

SEQ ID NO: 155057 - protein, 96 aa, Heterodera glycines
MEGCSAPKRSRQSIGIKTTPDHQNEHVHVYSKHQNRIQFSQGNFLFSSDTLLEFVDPDEISLEQYIKSDDLKRCSVPRPEGMDLWERDSECGSPKR

SEQ ID NO: 155058 - protein, 71 aa, Heterodera glycines
MANIYDANFIHQFHNKKCARIRWWQIFAGSYWHAAFGLFIPFFRLLMVNKNSEKRAKMFNGKMEKMGDENN

SEQ ID NO: 155059 - protein, 321 aa, Heterodera glycines
MFFLCPPIVLLPLALFCVASHGLTNHSKAFGNESESNRTDFFGTEPMEIPRHKSADGFDPMVDDVFALLSAGEEGEEEGNGTKVGITVEEEEEEEEQQSFRDAITSEPNCHLFVGFVDHFHSFPTNTLVTKLNGKTMNGKEAVVRLFLKTLVVVEKTWLPGCLAVFFDSRTLDLQLDEIAKLLWKDGQPKLGTSNGKNKWAASKKSDEELYCSEQVICLTNGHFGFIFPRPRRDSFNAFGTDCLDKTGREEETEGRRGRWRKRSEEKEEDGGGRKRLKEEEEDGGREVRRKKKMEEEEETEGRRAGGGRDGRRKRDEHGND

SEQ ID NO: 155060 - protein, 34 aa, Heterodera glycines
LADYLSLQVDPIHSIGNWQCQLGTQCERRGGGGG

SEQ ID NO: 155061 - protein, 21 aa, Heterodera glycines
FHSNYVFFMNRNIDNFTNWTW

SEQ ID NO: 155062 - protein, 16 aa, Heterodera glycines
EAIPEGFGLPINLGAS

SEQ ID NO: 155063 - protein, 305 aa, Heterodera glycines
MTIIVLILDFFFESGNTATGRQLPGGPPAPITDPVGAAEQCVVPAPLRWQQRELLHPFGASPSPRPHMRRARHNLSFDAAWQQCVAPDEAIGGNENDDGGDDENGRGNNSGGRNKKKGGGGGQKDGGGSKDGANGGGREEEEQNDNNGKRGEREREEERREEEEEEEQNGNNEERGEKKRREEGRGKEGGEQDRREDEEDEGRGEEETRERGDEKETEEAREKLKRGEEKGGGEKGGGKAKEGRSEGGGKAKEGRSESGGKAKEGRGGGAGEKKQPPPGSKMVGHLLFCEIRKRKCVLAIGGQSL

SEQ ID NO: 155064 - protein, 42 aa, Heterodera glycines
IRRGTTVMRRGTTVIRRGTKVIRRGTNLIRRGTTLLEGVKTD

SEQ ID NO: 155065 - protein, 59 aa, Heterodera glycines
MSPQPIRNCAKMSPRNVPMSSFIASSRRTEVPSCRLKQRTSGMNDAGANKTVNAMKRYM

SEQ ID NO: 155066 - protein, 40 aa, Heterodera glycines
MVINDSDDENSGDVPLSDEAAQLLRQKYSDLDGPNLTKKH

SEQ ID NO: 155067 - protein, 108 aa, Heterodera glycines
MVSDGIMELLDRNVINNSKKSMFPGRVVVCFAMGSHKFYELMDNNPLFLFASAGFTNKTTTIMQQSKMTAINSAIEVDFTGQVASDTIGTCFYSGFGGQVDFINGAAL

SEQ ID NO: 155068 - protein, 167 aa, Heterodera glycines
PPTSTRVYLRHFRPLSRRPCTKPGVAQQFNILKYLLLSAKTGFGVEDLITNIYQKWVSPRGSIRNIYQKWVSPRGSIRSDIYVVGSTNAGKSTLFNAFLQTLFNAFLQSDLCKVRAMDLVERVTTSIWPGTTTTSIWPGTTLSLLKFPIMNPSTQQLELLKSFTLTI

SEQ ID NO: 155069 - protein, 109 aa, Heterodera glycines
MGRRGYCRSSHRKMGRNWPTKLWWCKQIAEQFTDQRRNHGQRHRQEGLGGIQIGWTQMPTATKAEIVGATATFNQSDKQWKNAFLAWFEASTNDFYNAYFCQFLDFYYF

SEQ ID NO: 155070 - protein, 99 aa, Heterodera glycines
MKFSVQIDQLFLLIFLFSMVRISKNRGGNLLKGQFVTGFRPFECQKESNIDEAVPILRGVYCPNLGNCNKNDKFEQLANGLKLTLTSKDAASCQDSKFQ

SEQ ID NO: 155071 - protein, 109 aa, Heterodera glycines
MMMMLTMIMMSEDSMSLLARHGLRWSGESPICAKSPIHRQQSTEIVRQNRLPAAICEEFLAKNRAQCPIDLIHLLQSVYVEKMCKKMPRYWSCLIVILFHVICFFYVCC

SEQ ID NO: 155072 - protein, 1477 aa, Heterodera glycines
MLRQLEETDAREWNAFDQLMSGIRRKNGEDLDDLADRVITLVRRAYPGLTDHLVDDYAIKHLIRTFESSELALSLEMGRRPGMTFDQFVGMAARAEATQKATRRIASNNAYGKTNFGATLTRQGPEPKTNFQHSTGNRPKCFYCEKEGHIARNCFRRQAEEGNQNHNSQQNHNVTGSNKTPLSLYPSQSPAYKPEPNNANPQRPQNTQSRNFLRQNYLVEQKDLNHESADIKCAGVISNDSKMLEFFQKFWKQNDENFEPNSNETSLVGKIIAITVTIFDQEAPSMMDSGAQISLVQAIFLKELFEKQNFGKEKMIIFPKTRNVVDVNGKRVECYGIISLPVARRDCEPINIQFHITDAPIGLPILLGTNALGPLGFKILDSKHGELIEFELASEKSDSVRLIHTIMLEPYSTKLVELSVSKSFDQKNVLIASSGVINDVKVESSVDRVRNGKVFASITNFSLNSIILKENERVAIVETVDEIANAEDCLTNSWLFDNFQQKIDSECRNTNFSEWTPRIGALDSDKAKTLEKVLLESKDIFAFNDNELTQTEMIKHHIDTGEESPVKKRMRPVPYAYREKVATMIQDYLGRGIIRPSLSPWSSPIVIVPKKDGSLRFCVDYRGLNAITKKDCFPLPNIERTLLMLGGRKFFSTLDFISGYWQIKMDDESTEKTAFVTEFGLHEFTVMPFGLCNAVATFQRFMSHLFGDKLNDFVFVYIDDVLVASETFEQHLEHLKFVFEHIKEAGLKLKVAKCQFCTEELQFLGHVLTRNGIKMDNDKIKPILDMPTPKTKKELHSFLGFMTYYRKFIYSFGSMAAPLFKLLKKDVPFKMDNAEMAAISKLKGKILSDVVLYFPDFKAAMEDPTRKFLIMTDASKTGISAVLCQPDQQNRIRPIYFASRQCNKHESRYCPTELEALAVRFGVKKFAQYIIMIPTRVLTDHKALIPMFKSKNETGNARVDKWIMELSSRFILEIEYNPGKTNIIADVLSRSGALKPNETAEDKTVIGQIAIGNEPDCVGNEAEINEWIAATKESEFGHIYEFLQKRKLPEDPRDSQRILDTIQKFTVLNGLLYFHESNSGNLRLFVPKKFRTDLIEERHEGKCAGHLSGKKIFGQLAENYFWPNMRADCVNAALKCRICAHTRSPRSNVPQLKPVITSEPFELVCMDILSIGMSERGNKYVLVMVDHFTKYLITAAIPDKSVETVAKAFIQQLILIFGSPKRIHSDKGTEFVNKTFEEITKILRVERSMTAGYDPNANGHAERANQTILNMLKRSTESNWSWDDRLPFVTFAYNIAPSETTGFSPFILLFGRPVKFPSANGVNFPVNPLYTVDEESYLQLFRENLQQILMNAKVNADKAREKMENWFNSQPKVTANKYKKGERVMVLFPGANQRVAHKKLKWNIFGPYEIMEISTSSAKVVPVDKKSAEQISVPVERLIHVPEGIPNISTVPRGKNAYKNLLNAMTILKLLELNDVE

SEQ ID NO: 155073 - protein, 67 aa, Heterodera glycines
MISQPLLLLVGAVLHHIVRMTGDSGSGLMKNTTIFGFKWASQAKRLVILQILHEQKASQNKVHFTRN

SEQ ID NO: 155074 - protein, 224 aa, Heterodera glycines
MDAQNRGELDESALLDSHGNSVFHENSQEQNLGRENGRNIQQQNLGINLDQRIAHLDLVDNWEFNPHLTSTPNVAAARIRQQEENLAINRQLAFQQHFFAEENFAAHPNVVAEHLEQRGQIHFAPARRPMNVQQRQNADYQPRLTHQQNYAQFEERAYRQQNPGNLFVRNQPARYENANPNCGYGTSGHVMADPAGGAQPPISILEYVLILDRLPELKGNEALT

SEQ ID NO: 155075 - protein, 164 aa, Heterodera glycines
MAPKKFMPMELIVEIVTFLQFRRRWANVRVSRAFDHFLLEQIGFFLTKTNSSAKQCLTEFGQMVNNLPSKHKRNVFNESARELGVKLLFGNIIWFIQKWIPYIGQKIEWRPDKTNTDDIYLATAEQIVQLLMTNYEGKTAELMTHHIQHWSEQIAKLSTTVWIT

SEQ ID NO: 155076 - protein, 178 aa, Heterodera glycines
MPSGEGPRNVHKFDFGFKEHQRIRIVNTDKFCLFYALASSMNYLIMDRFEFNRFMKNIVRQRDAAIELLRNCGIDGNEISYGVEQLPNVQKYWDEIYPGKYRVVAFEKSADPRKSIRVLWKAPMGREKVVPIFLENGHWDGLKNYVCFFNRGRKFCVECECFYDQDVYHTMDCRARCY

SEQ ID NO: 155077 - protein, 44 aa, Heterodera glycines
MPIEEKEEKDVYRIVVRDLETLQDSIYKGDQKEHVINYISVILF

SEQ ID NO: 155078 - protein, 137 aa, Heterodera glycines
MPVKLESLKATFNLDCNVFVAEQLSIVPEKGYERCDRASVMAIKYLEWRSQRDGIEIRHTGNGREVKVGKYKLDGFIANNGARDKCIEVMGCYIHGCLNCYDPAAELIGGRTAQELNDETQERLVELRKTLDVEEVW

SEQ ID NO: 155079 - protein, 47 aa, Heterodera glycines
MFLVFNRDNCKIFQELVDANCTKLADTKIIFLFYCKKKINWRIIELL

SEQ ID NO: 155080 - protein, 48 aa, Heterodera glycines
ITMSPGITHHWPLAKLSVTFTPSGLPPLPILGSDFIHNRSHAALVPEW

SEQ ID NO: 155081 - protein, 212 aa, Heterodera glycines
MDSFVKTPKISRPLPTELLLEQIMCIPLMRLFNSNGGNQMNEIVQKFNMASRTRKVEFEGGNLDFSSLREENGLTKDEFRKGVLLYLCYGGNEKAMLVNNVAITVPILNYIFIRPLLEQLFEFILESPNPFTMQKRICVGGHHPIHLPKSLSLPARVMATKGIQPQVRSDDKEIYNLFNVHLKRVVGRVTIFYHIRFDDTFSVMSSHFVLEC

SEQ ID NO: 155082 - protein, 50 aa, Heterodera glycines
MASIVLAVIWRTGTKTSPPSNNALLIRHPRGRNNGDGKSIMEEGLVYGNK

SEQ ID NO: 155083 - protein, 41 aa, Heterodera glycines
MELFVRQTATVRGHFQHLSVHARRFATTWRMGLYDGKRICG

SEQ ID NO: 155084 - protein, 380 aa, Heterodera glycines
MRTKNLPSKLSNPEVLTSDESSASFESPAGTIYESFEALSIDSSKVASNLEGYTNVGAEIVIEGTESNENPAGSGYEEVRIECSSVIIACKKSPKSKPNVENSDNFMSLFENLELTDSEKLANQWEIDKILADTAPSLAGSSQIESSVIGFVCISHPILWALVQPDILGEQNELLDRKHLNLEFDQLIFQSTPSYVTAITLNPNNNWPHFTQISLNWNKQSLLGTRIKTSDLRQLTSPPKMGPSVNQIVPSSCCGIIREVIQNKITSQIIAIDVFLYGEENNQRFFTHQIDSSVNLMELEEGTRVQTTGFWAKTSAIEWQTSSDGIRDWWTEQIYVGTNLKIFGADEGEDNHQWLQNEQFLLSYRYLCAAMDLQQSPKRR

SEQ ID NO: 155085 - protein, 129 aa, Heterodera glycines
SAPPPPFLCSNCAFPFDQFPHFFDLSANISFGQCHSPFYCLIKIARNPSNYLHPFPNLFKISPTLRGPQMVPFGQSVPSLFLIKWRTFSFDQCHFPILLFIKLPQIILVNRLLAISFDQCHPSPFILIN

SEQ ID NO: 155086 - protein, 182 aa, Heterodera glycines
MDLIRTEDGVNRMTRHLNRKINQTNRDLTELKDDTQTLITQVNTLANSYGTVQVLQKPNQAPKFNNPPILNYATPSPLKNQNNSFSNANASVLEAIPLNNSEEDSQDEEFQLNPSGFHHINMLFAQTSHSFTFTIFSGTSPLEFDRWARKFTDLLDCNGRKWDKSEKLARLKACLDGRAGRN

SEQ ID NO: 155087 - protein, 103 aa, Heterodera glycines
MRFFGIFMQKSPPIDSSTQRFVYSTIRLLYDSSTQPKCDDSSTRSNVNDSSIIRFVYSTIRLLSQNATIRLLLQKSSKTRIRTRTNFKAIFRGFLLKKAVSIV

SEQ ID NO: 155088 - protein, 85 aa, Heterodera glycines
MLKLLISLLILNVQKIVRQGERNYKEKEKRRDSTRLFSAQWGVPIGAPMIRLLDDSSTQPKSDDSSTQPKSHDSSITRFVYSAKK

SEQ ID NO: 155089 - protein, 68 aa, Heterodera glycines
MFNNLLPQHRHCLFLMRRLHLKTFLRPPPEIFKESQFLGLFVTLITNMTFVLLNSETWTRTRAKIQIH

SEQ ID NO: 155090 - protein, 101 aa, Heterodera glycines
MVWSNERVIKWLEEIGLGAFVVNAVDSGVHGALMALDVTFDVPAMAHILQIPDSDSARRTLEEEFQKLVANCRGRGEPRDENGKGGSGEKQPQQHKTRSHK

SEQ ID NO: 155091 - protein, 324 aa, Heterodera glycines
MSTAKTGIIKNTTAKTTINLLDKLANSSKGTNIVFSAAFQQNIPLGQIYVGFAGGSASPQANANDGVSSVASDQRLHFENGSEISFDQFVNSALRGETSVKGGTDQANNHLANCAANGVKREMLVPDATFMDKLRVAIRNIIQESPPNSKWNTFSRIRQNLYFDIICQVVSVHVPIAGLSVTYLRVCDGTKADIEDGHSFYSGVSFRETHAVQSQLFPEEAITDECKEFIYLIGCWDTFCTTAMGIEAGDIIKIFNAKMKTRQDNVIHFSLHGHTPNSEGRYKRAIECVRKAKRRIGDEMAMNGGTENEGDGTGGKRTRQSEDS

SEQ ID NO: 155092 - protein, 143 aa, Heterodera glycines
IERERGVKIFLFTLFLRYLKMCPEAKERYHKLNGLDIDSPCSEPAFETIASNYLKVFVFDEVISAVEQTPADASSACQRLSSIGKMHRSKVNGIKFDDFQQLEAPFLYMIGEVLQDRFNEKAEMLFRKFFQFCLRFILEGFNS

SEQ ID NO: 155093 - protein, 218 aa, Heterodera glycines
MGMPPAPPSLHSPLVGVRSPCEGGVPGPFPGGGGGMPSAASALPPGAIMGMPSPYGTMPPGMTTNNPNMNMMMLQQQQQLQLQHQQQQMMCHQQQQQQHHHQQQQMNAAAASACMNTQQQQQLQHQQDAIFKGGPPNTDWDLRVAQAGIYGTYVANSLINSSEQMIIAGHAAWPFALVTEACLVAARIRHVHAAVHADADAGAANPTQRAVPSVPLGT

SEQ ID NO: 155094 - protein, 161 aa, Heterodera glycines
MISRRAIIIWAIALLALAAISPNISPNFSTADKGVDAVDAADEIIDDPKVEVPKNGVGKGTDDQTVQREEEAIKLEGLSVAEFKQLRESAEKHQFQAEVNRMMKLIINSLYRNKEIFLRELISNASDALDKIRLISLTNSTALAATEELSIKIKAKNFQNF

SEQ ID NO: 155095 - protein, 385 aa, Heterodera glycines
MHREIRETMHMQLHRCSDSWCGPSDPIYGRCKKGFPAPYSKCTILRPDRPAMYFRPSPTDGGAQLEVNGLIYDNSHVVPYNPYILLRYRVHHNVLFAYGNKANIKYALKYPFKGPGHCYVECKEESGNKIKIDEPAQYAKMNFRGATEAYAIVHSMPFARLSHHVVKLAIHLPNQQPIVYRAFQLVSKAQQIQQGELPETQCSAYWKQWQNEWKNDPKFKDILFEKVPERFRWAKDKWVLYKRQQIKRPPIGRIVPVPPSDPERFALYSLMRHFPGDPDHLKMVNGLLCTSFTEAAIMHGLLEDDKIWDKTLAEAALSRWSDQMRWLFVSILVYGQPSNAIELWNKYKDQMYNPQGIITLAQHKVAELEALADIDWRLHSCFNLS

SEQ ID NO: 155096 - protein, 75 aa, Heterodera glycines; identical to SEQ ID NO: 124542

SEQ ID NO: 155097 - protein, 481 aa, Heterodera glycines
MNYSKLVFLLIFSISLISTAKEAKPLFNDDNVLLAFVKGSSKFEHFLADEKFDYNQSEKEILEQNYEKKLGLIFFMRKHWHCAKIGTDFEEYEQRECRKFRKYLDILYEYLFRVYAGLPVVKPQFYFGKTFTICLVTEVVQSLAPIWNFYFCPNFASGKGHKLDKLFVRNYELKLYNEQRLNYGAHLDNNHHKEKFQGIFVEMALQNANYAFRHNFDTFLAEMLKRAEKGSLHFPILITNNDGSLMIEQLAFESYFLTGERLFVEFVRGQSYFEQFCCDLERDGKLKDFVMAQEATLEEKQNFLAKEYETYLGILYLMRHNWHCDKKGEEIGEEKWRTKCERFHKYTNIVYEYLFKVYAKTEEPLLGQQFPVFKPTFNVSTLINEVLLYLHKCSVLFFDEELRNQNYYIFKIQLQNGHKLRNYKANFGTLEESLRKKFDKKLKTMLKKARENERRTREWSANYNDSSNLLWESPFFHRVSR

SEQ ID NO: 155098 - protein, 26 aa, Heterodera glycines
HHRVAIVTRKTIRRIDSNEWTMKKHN

SEQ ID NO: 155099 - protein, 170 aa, Heterodera glycines
MSAAQVECQRRVTQLKRRAVETCEAPATIRAQVIKHVRHDEDVPPAAPLSLDALELPPSYRMYNRTENDEENFLLAYTGVFQIQGQAGPQRRDKWVFPIAYCLLTSKCEMIYTRMLQLIVQKWPNFAPETISLGFEQAVVAAVRTMLPLCRVQFCFFHLVGNMKKRIAAE

SEQ ID NO: 155100 - protein, 16 aa, Heterodera glycines
FFASLVNHNFFKKHPN

SEQ ID NO: 155101 - protein, 491 aa, Heterodera glycines
MYSEEEIRFNAQAMIRENNETNEEEALFQDEISMSISSGESPKRHKNDSVDSEKEIQSRLNDQAMTRQNKEINNENALSYGEKQSSFSKEINVHDQYEKTMASDELEEGEIEPEIRDKELPCWGNESDSNAANYHSKNNTLPSPSEKRQEYNKDHRHIAVEKQRQGREWTDRSKHRRRSQSPERAEKQRQGREWTDRSKHRRRSQSPERAEFNDSSKRQDLYLRNTSKDKDLRVRSDHRKLTNSRKNCRSNYSPDQHWQESPSKRRLILPENRAPVRFQIKKQSKPVNKHALDPDHNKTNIQSPNVKPRNNETSCSQQISSEQTHAETNIEKHEEQGNKKALDAELINDKSPNLQPSNEILSGAEKADKEVPNVEASNMEINSENEQLRMRNQQANIQETYADPMQLEANIETVQVQRRLTKKASIDLPESSHRGQINNEPTYSQRLEYIRTSLEHANIESSNSKDKEIVDPPATTAATNDQLQFLLSQIQ

SEQ ID NO: 155102 - protein, 206 aa, Heterodera glycines
HSHPAVLPEMRTIGHRQLFHSHCERLRLGFGGLAPGGGRSPCTARRALRRANDEHETESSAVDEDEYVVESDDDIPAVEHRSSVDMRRESLAEILDLGTSGTPARIGASLFPGKREERWVDPLPEKLQFQQQKNKIAELKCKYSRANAKVHWYKGRKELFSDCLKYKILIDKQSITLIINNPDPDDSGKYSCEANGVPTNSFITVE

SEQ ID NO: 155103 - protein, 254 aa, Heterodera glycines
PKAGEPPTEVPQERWVDPLPEKLQFQQQENKFAELKCKYSRANAKVRWYKGRKELFSDGLKYKILIDKQSITLIINNPDPDDSGKYKCEANGVPTNSFVTVEDSTDQQPLSYTARRSESRRPKSARKEAAALTPLDAMQCSHLTPPHPKNTVRCADEPLLANAPFNVPGRPYPPDSLYTTYNSIMLHWAPPLRDGGTPITEYELEKREHGTKLWEKADTNADPKANTKKQWEKDAFANVPDTRFKQFFAKTENR

SEQ ID NO: 155104 - protein, 221 aa, Heterodera glycines
MFFKVIPFAANEEHCSKLVNGDYLKPAKFIFNELLITKELAKLSENTGIGVTPTFTQLLMSKIVRGCFPPELLTAWDAFKKRKPELAENERPDTYADEGLHFIVIGLSYGGKDLEAYTIKNGRECYSIFHQIALSIAIAEDVLKLEHRDLHAGNILVEECSVDEKIRYKYLGKQIAVRSNGVRASIIDYSISRIEKTKFHPIYENFSSPNSYSVFVCSLAL

SEQ ID NO: 155105 - protein, 148 aa, Heterodera glycines
  unsure (1)..(148): unsure at all Xaa locations
NRRTDSGMPHHCLQLKVGSVVVILINKSDREGLINGTRIVLEELGDDHLVGRXSINSNAIGGQVRCFLERSRNIFEDKTPGGLKYARLQFPIKPAFAMTIQKGQGQTIRTVGIYQEREVFTHGQLYTAFSRATDGNNVRVHAPKREID

SEQ ID NO: 155106 - protein, 53 aa, Heterodera glycines
MAVRKRPGPENPCVGFAILKSFKFRDVKSKMFPKRSRGAQEKIMKTYKSYPYR

SEQ ID NO: 155107 - protein, 76 aa, Heterodera glycines
MLTDEEEEENEDFGEESNGEEMSEGKGEEEERMAERFGGEEQRQDEEEEESFANSRRVEHPIRRQPTDPNFDEQSA

SEQ ID NO: 155108 - protein, 87 aa, Heterodera glycines
MPKMEKIPKSEIKKCLICGGLSSFKYYSIPSCEGIVMAQALFDERNLIFKLRVNSFFVAQLCYRYYTCAKKAEIANCYLHTTVIVLE

SEQ ID NO: 155109 - protein, 481 aa, Heterodera glycines
MPKTSTPLNQRDQHGQRKEAVLQVHEAKPPRIKCARPSKCYHCKRRHPTALCRDQYKAKNGINTPSTSCSEEKPNANDGKRSTVIEQQQMCNAIQSKETRALLMTTKAAIFNPSRPSLSMMGTIFIDPGSHRSFISSSAAEQLDMNVLSTEECYLSSFGEREPKRYISDRVAIGILCPDQDRFIFNLNALKFLLNDLPVLQLNALDNDELQQKKLSLPNESRQPDILLGMDVWHQLNVQPIEQLPSGFTICQSKIGNIISGTGRIKLKQPSNISFVLMVNNDESPQSSKTAQRQKNIQQKEKDELRRHQRNKLLSSIATLRSRRKRESAPISSKSIVIDLSSDSDASGIEIIQNPVRDRQAKSPNEHSTAPIPMAVQRLTPTRKSSSVAKRPAFSSSKQPKGKAANPAQTSQTNELNRKMKALSPTASGSGANHHCVATLARSSDSTTVIDKGSQQNCLNMSSATISKTPCQQHSSEKTLN

SEQ ID NO: 155110 - protein, 88 aa, Heterodera glycines
MVVSRATRFTYVEQQHTKHQNNCQNWHNSDLRVHFVVLMMVMICPNLEVSNLKKKIFRLLRSFGVRHPNIWMEPNMDIPHRPSNLSQT

SEQ ID NO: 155111 - protein, 40 aa, Heterodera glycines
MPTNLFMETEWPKNTKNGGQHPTIEYHFVIFLEKEKCLVE

SEQ ID NO: 155112 - protein, 204 aa, Heterodera glycines
FVKKIRRIFTVLGIRGFYRGFFSSLMLYIGFFSSLMLYIPSAMVFWFTYYTFLTRLKSLRGEWKISAKSSGKNTVNIRGDSENLLVLQAFSGALGGICASLFTNPLEVLRVRIQVHRTNYWETVHRTNYWETIRRLYHFEGFRVFTKGLAPRMISSGINSCLILTGYEVIKRLCVLINSCLILTGYEVIKRLCVLPEFRDAIVW

SEQ ID NO: 155113 - protein, 32 aa, Heterodera glycines
MRTQLFTIWFFFLILPDFAYRHYKDHKPPQFI

SEQ ID NO: 155114 - protein, 45 aa, Heterodera glycines
FLNNSHRCASIQKKEKIFGTKLVNQYIKKSIGNLSVVFLSISVLS

SEQ ID NO: 155115 - protein, 158 aa, Heterodera glycines
DVMEEGLGLTHIHSKGIIHCDVAARNCLYTDGQVQVKISDFGMATKALSKQLESGAKLPVKWMSPDALTDHFFTQKDDTWAFGVLCWEVFTNGETPFAEMRGSVILAAVTNGYRLEFPNVTNGYRLEFPNDAPPKFVEFVMQHIWDPKRNNRYSMGAV

SEQ ID NO: 155116 - protein, 63 aa, Heterodera glycines
HKNGTDVEAALEARLSSAKDNLIRFGDEIYIKLSGDHGQSCMKITVSFSQAARSNSPSNNFVL

SEQ ID NO: 155117 - protein, 51 aa, Heterodera glycines; identical to SEQ ID NO: 124998

SEQ ID NO: 155118 - protein, 229 aa, Heterodera glycines
MIAQKEKLSTMKLCLFSILIVFLIAQIEIVAEKKKLEQKTFEEIFGEKWEEKENEQKKREIVQKFNKIKEKIKQKERKYSTKEWNKINDKILKKLGTNRKIIYQWIKELRIYKYQCKLKTDEQKIEIVQKFNAMKNEYKQKGRKYSTKEWSQNYEEICKKIGVSYGTIQKWKKQFGMGERMTEKEKMEKVKMYWQIKRENPKISAEKIAKILKINRRTIDKWKKQFGEE

SEQ ID NO: 155119 - protein, 16 aa, Heterodera glycines
SHSPGKKYGFPYNWTP

SEQ ID NO: 155120 - protein, 79 aa, Heterodera glycines
MAIKYGPKIAKYGHKMAKISKYGNKWQKCQNMDINFSKLNVKFLQIYWLKLHMRYISKFFDSTSHSPGKKYGFPYNWTP

SEQ ID NO: 155121 - protein, 47 aa, Heterodera glycines; identical to SEQ ID NO: 150674

SEQ ID NO: 155122 - protein, 219 aa, Heterodera glycines
MKLCLFSILIVFLIAQIEIVAEKKKLEQKTFEEIFGEKWEEKENEQKKGEIVQKFNKIKEKIKQKERKYSTKEWNKINDKILKKLGTNRKIIYQWIKELRIYKYQCKLKTDEQKIEIVQKFNAMKNEYKQKGRKYSTKEWSQNYEEIGKKIGVSYGTIQKWKKQFGMGERMTEKEKMEKVKMYWQIKRENPKISAEKIAKILKINRRTIDKWKKRFGEE

SEQ ID NO: 155123 - protein, 63 aa, Heterodera glycines; identical to SEQ ID NO: 155116

SEQ ID NO: 155124 - protein, 60 aa, Heterodera glycines
MHKLTSQNKVEICKNSYFIFTGSENYLILSVIDLTHEFCEAHNIIQNYYYSLRFVVDRPH

SEQ ID NO: 155125 - protein, 91 aa, Heterodera glycines
MPLIFLLSFFLQILLFWFIEGHAGPIVARELMGELFETYKTDMHEEDDEQPSEVSVVNKKGKGSFSSQSTGSLDDDTYGGIAQRFGNVTIV

SEQ ID NO: 155126 - protein, 44 aa, Heterodera glycines
FALSDHSFFSPFLLISFLITFSPPPAFDHFFYCLSDHSNFCSFR

SEQ ID NO: 155127 - protein, 400 aa, Heterodera glycines
LSVYSLKNSLKETLIEINTEVEFDPYMTADEIIATGRLKHLRTRARIVIVEMGMDLHSVTAFMIAAYRSGMKTSDYVYIIPWLAHMNDHYPWESTNVEKQEVKMNDHYPWESTNVEKQEVKAAFDDAIVITAHGYDKKFIEDFERRFNMVTGVVSNHYATLSYMSLYDALYATLSYMSLYDALFLYGLAIRDAFEETKNKTIYLDGKTVWRKMTGRQFIGATGQVLMNNKAIRVPSYATYHTKNGTMTMKIVVELTARLGDRLKCLKMEHDCSEHVAHEVLSHYWSSSDGYMPVAHEVLSHYWSSSDGYMPTDMPRCGFDDSLCDYTAMYVLGSALLFLAVVIPFGYFLYVREKERMLYDMTWRIPREQIKLLGEGGKHQRRSDPSLGKSMGASAGSMVA

SEQ ID NO: 155128 - protein, 49 aa, Heterodera glycines
MQKSDGRPCHFGGRNNGRKTEEKKQWQKRKQCQRRRKRRYHLNKRKKME

SEQ ID NO: 155129 - protein, 188 aa, Heterodera glycines
ISIHSIQLFLNRWCSNCAPAIKSATFCRSRNLQVNQLMANHLMGLLNSIDNQLNVKAKSAALFICQVYTMESCNRFSGVEHSAYLHYLRNASVYFGPGCNNEMLMLVIGRLVSRWNVPIVAHLSGDDALSDRTVFDTLGSVALTSATEMFDTLGSVALTSATEMARATITFLHLYGWKQVNIIRNNQL

SEQ ID NO: 155130 - protein, 76 aa, Heterodera glycines
SHGLGKTVNFTTRMDSIRRNFCKYLKTFKNSGKTIFLQFFQHGFVSVPCRPVSTIVQLQLRCEPSAVRGSSTHCTW

SEQ ID NO: 155131 - protein, 96 aa, Heterodera glycines
MTLFRPISIAKLPHSFDGPRWLYFNKYGKQFLIVCSQQRSDQQQNLPPFLAAQLDENNDQPKQKRTKKKAVGMAKRTKTGAGNNKWKRPGKGATTK

SEQ ID NO: 155132 - protein, 74 aa, Heterodera glycines
MMHNRVAETLSRFWHCVVWHPMTHPLISDHKGFVRRKSGTLKKQIRKEQLIVWKQTLSFCHCFPTSIKYSIVPD

SEQ ID NO: 155133 - protein, 137 aa, Heterodera glycines
MQQLLFFLLLVADISHGKGQKEEKSEAKCDEKNNNEAIRLHNWGGNFKFCTQNVEYPRTTAEVQQIVRRAQKLRVFGSRHSYNKIADSCGTLLSTLGMNSIIAINGSRPTVTVQPGITYTDLAPTLCQLKMENKSGI

SEQ ID NO: 155134 - protein, 34 aa, Heterodera glycines
MRNMNSAFALLSTNSSPLAHTYNCFPKRVYCTLI

SEQ ID NO: 155135 - protein, 135 aa, Heterodera glycines
HVDQRSQFDHPGFINGAFLPTIHGSSSFQSLLENEQEQNCNKDDREADEESDFLGEEDLNLINNEDVPEWLKLYSQAPFNSDHMLNFNLFKLNQLEAYDRMIMRLYKQDVINTVVKYEGPMSEIDNELMQRHNLT

SEQ ID NO: 155136 - protein, 206 aa, Heterodera glycines
MPHSRSTTPNTNRDRSHRSNRKRSRDRSSEKRQKASRSSHKDRRRDRSRSSSRHRDSAADSARIYAPSDVAVELGSGNVNMARLDKRAVEWLQSKINEQIEMEKRLRQQIEAELKEEMENIHRREKESQERCNAMERALETKIKELEKAERKLNDERLEMLESKRRYEEERIELEKQRENVKKTEQQSILNKGGLMREKIRLSFGK

SEQ ID NO: 155137 - protein, 229 aa, Heterodera glycines
MGISLTTLLSQTLSKNGQRANKKGTTALTPLETLNSSRQLLVAVSTVRCATFACSAKTTTVFCSAAAPLRKHASPCFPFGWICYLGPVILWVSLFSPFCLWVALCRWFFGYDSLFNALLSVMFSISAASSFAAFGFFVFQVGSLIITLVTSVFVQMIYTLNGYTMHDFHRAGLRRMESEDFRERLALVFDMAAKEYIRNDNMNKRKTNPNKEKGKAMRIWGWGGQEMFS

SEQ ID NO: 155138 - protein, 99 aa, Heterodera glycines
MRISTVEVISTSNKRLQVRPLRRGGNGWTRNVAFAWRALKEPITCASLPAQLFRYARTFRAVEFGLRIADPFLRSLDYVVYVMRMRRILLRLRRAQEMP

SEQ ID NO: 155139 - protein, 182 aa, Heterodera glycines
EKQSGFAVKLAVDANFGCWGKENRDCVKCRNFTMEHNVCAEQCHTERGHFIVSLSSADSAPVRHCLRCHEQCHECYGPSARQCSKCQNFQLWLNTALPLADNPYVDAGTAGAVKQCVAKCPNMTYPEDDVCVPCHKACRGGCTGPSARVGTGGCNQCNYALEGEHFGEYICLFGDEPEKAVC

SEQ ID NO: 155140 - protein, 68 aa, Heterodera glycines
MVSKTGIFKAPKLHNVLKVGLEILNLIKQDKHNKTPISKMAFDVCFCLLIKWKMPKNDGRTVARQNSF

SEQ ID NO: 155141 - protein, 502 aa, Heterodera glycines
FIGGDISFIWSLIGHCGSAVTTFPSPICTCRADQMLHEQCCQHRTIDQTVELAEQYRAALQNGDKATAAVRSASMGITKPPLLRSINFDRIIPAPFHVFQGIGNAIVRELERQEGCAPIVQQFFRRIGARREQFRKRDLTGNSIRKILVRAKEMAELFTMEWPKAICRTLEHLGKIQNFSKAQMLSPNDLDGLERSIDNFKVFLAEQDRMSAFLSKKPKAHLLLFHFVPFARKHQFIGLLDEQGDEALHSVWRRLEQWWKCMPDAEQILQQLEHHFVNNWLLDTGRIDELKRNYEERKGEDDTDEEVAEEIDDECQIDLGVQSLGLYSPAFQSLGLNPPAFQSLGLNPPAFQSLGLNPPALQSLGLNTPAFQSPGLNSPGLQSLGLYSPAFQSPGLSFYAFQSPGLILLHFNYWDSTLQHFNHWDSILLHFNHWDSTLQHFNHWDSILLHSNHWDLTSPGPSASQSSRLNSAKFQSPELNSATFQSLGLNSPSFQSLGPNLT

SEQ ID NO: 155142 - protein, 153 aa, Heterodera glycines
MFLGIDLGTSAVKVLLISADQSVVGSASVPLKVSRPFDGWSEQCPSDWLRATREAIDQLRHSNPKAFAFCALRGIGLSGQMHGAVLLDAAGVTLRPCILWNDMRSHREADELNADARFRSITGNAVFGFTAPKLAWVRRNEPKIFAKIRWKKG

SEQ ID NO: 155143 - protein, 198 aa, Heterodera glycines
MGVILSATDSLNWLTKATGASPDELTAELGGDLNAPGAVIFLPYLSGERTPHNDAIIRGSFTGLSHQTDRKALTQAVLEGVAFAFRDSLEALCKSGTKMPSRIIATGGGVRCAYWMKLIATVLGVQIEVPTEESGNLGAAFGAARLGIIAAEGIDPLSVCEPPTIGQSFSPNEQLREAFERNYRRYCALYPALRAIDQ

SEQ ID NO: 155144 - protein, 59 aa, Heterodera glycines
LIWTCKSTTFFRSFFVARFSKKFWGTDGVGGGMPTGATVEIFKYFVKKLLLISFQLSDH

SEQ ID NO: 155145 - protein, 30 aa, Heterodera glycines
TFKGFTGTGFPAVWLTGSMLNLKVVYSGKA

SEQ ID NO: 155146 - protein, 21 aa, Heterodera glycines
MQIREKGKGSVLAVTMSDPNT

SEQ ID NO: 155147 - protein, 208 aa, Heterodera glycines
MAANENMQTEDNKKGKVTNDERNLVVSFIQFLRHKVSSNQCTDEQIEGLEVAIQCLETAFFVSDRNYAFQPSKPLIEIFKAAEGLPDGDQEFPKPTQTDVEKSNALKEEGNELVKSNKFEEAILKYNEAIKLNRDPIFFCNRAAAYCRLEQYDLAIQDCRTALALDPKYAKAYGRMGVALSCQNRYDHAVEAYKKALELDPGNERYHE

SEQ ID NO: 155148 - protein, 43 aa, Heterodera glycines
MTKCYPWSRIQYYRHSVPFRHWATQWQKFVDPSGWGGWQSAKI

SEQ ID NO: 155149 - protein, 134 aa, Heterodera glycines
ALNCYICAENGLDEFGECKTSFPFSCDGYAKRFPKDEKIFCRTTRHKTANGGTFTVVKECIATFTVVKECIADSAHHVTFPRKPYQLAEECDVVDLNGVEVAYCLCGDQNLCNGEAIVGQFSAFEENDKEKIGE

SEQ ID NO: 155150 - protein, 76 aa, Heterodera glycines
MSLSPYQMKSAKRKNLKNDQSLPVFVQVDDISSSVDLGNDGINPEQHSNTNSMESNSKEIEMREHLEEIESQTTRR

SEQ ID NO: 155151 - protein, 111 aa, Heterodera glycines
MRSSGVRARRRAAHPPLRPPPPSPRPPPPSPRPPPPSPRPPPPPQKSHGHGNGTYWCLGLWCRYRRSRTGPDDVESQAPVAALVDSIVISPPTDSLQIFNSPDVQAMTRKQ

SEQ ID NO: 155152 - protein, 148 aa, Heterodera glycines
MSSENPPSPMQRQQSSVQRQQSSVSDMGDPDELSSNTSERLEQCHFTQILFQVQVIFRLGRIRRKAQGPGSQENEQISFLMFFFAGLFFILPCVDECVVFYRVFNATQAVMMGNISSSTTLLAQTTLRHVLDTKTLSEILGNFLVEQP

SEQ ID NO: 155153 - protein, 24 aa, Heterodera glycines
ITGVSIIAVLFLVFLMPSQNLVRF

SEQ ID NO: 155154 - protein, 31 aa, Heterodera glycines
TICSRLNAGRDTFHKTEGLWALLNHLLYTHM

SEQ ID NO: 155155 - protein, 48 aa, Heterodera glycines
MNTTNNGTLKWTVVIGFFDRNLGFRNKKKIYALFSHESNLEIINALIL

SEQ ID NO: 155156 - protein, 41 aa, Heterodera glycines
MKNIPLEIAFWQFVLTSVISFFVFLLLFGLSQLWTVILNVI

SEQ ID NO: 155157 - protein, 135 aa, Heterodera glycines
MLTNKSLPLLFYSEFAKCKRCRLNKCLTVGMNPRGVNCNKSNVHETLAFAQRMKQQMEQQQQQENANANQAEKAASSEATDIGTELSALTTEQSSEPPKWALTDSPMVQKNFARFILMKHMMEVERKVQDSRLEN

SEQ ID NO: 155158 - protein, 115 aa, Heterodera glycines
RQAPMNMSYNDKVGFINSASKQLGDRLSEQNKKMHEMLKEDKNERSSTSHFDEGNKKGSSYNFEKFSSSESRPAPYSYSGKPADYFRGPTIRDVPPSNGSIGGTVTTWEWGTVSN

SEQ ID NO: 155159 - protein, 158 aa, Heterodera glycines
MPREMLLRELADAEALFCLLRDKIDDELLARAPKLKVVSTMSVGYEHIDLEACKKRGIRIGYTPVPEAVRSAQKGILVDIEALTEALKNGLIGAAGLDVTDPEPFPTDHSLFRMDNCVILPHIGSATYATRDLMALTTEQNICNCLEGKEMVAELKID

SEQ ID NO: 155160 - protein, 368 aa, Heterodera glycines
RREKRLRRRRLRTPTEAKAKKDAEEKAKKDAEAKAKKDAEEKAKKDAEAKAKKDAEEKAKTDAEAKAKKDAEEKAKTDAEAKAKKDAEEKAKTDAEVKAKKDAEEKAKTDAEVKAKKDAEEKVKKDAEAKAKKDAEEKAKTDAEVKAKKDAEEKAQKDAEAKAKKDAEEKAKTDAEVKAKKDAEEKAKKDAEAKAKKDAEEKAQKDAEAKAKKDAEEKAKKDTEAKAKKKDAEAKAKKDAEEKAKTDAEAKAKKDAEEKAQKDAEAKAKKDAEAKKEEEMKKQKAKPEEKPEAPAEGVAVVPEAKKAEETKERLKQEEKPVEVPPSPAEKKRKEAEEKKAQKDAEAKAKKDAEEKAKKDAEAKAKKDA

SEQ ID NO: 155161 - protein, 623 aa, Heterodera glycines
MPEAKAKEERRRRKLQKGWPRLKPRKDAEGKGKGRKENEEAKGLGPKEKPEAPAEGAEKKRKEAEEKKAQKDAEAKAKKAAEEKAKKDAEVKAKKAAEEKAKKDAEAKAKKKDAEAKAKKDAEEKAKTDAEAKAKKGAEEKAKTDAEVKAMKDAEEKAKKDAEAKAKKDAEEKAKTDAEVKAKKDAEEKAKKDAEVKAKKDAEAKKKEEEMKKQKAKPEEKPEAPAEGVAVVPEAKKAEETKERLKQEEKPVEVPPSPAEKKRKEAEEKKAQKDAEAKAKKDAEEKAKTDAEVKAKKDAEAKKKEEEMKKQKAKPEEKPEAPAEGVAVVPEAKKAEETKERLKQEEKPVEVPPSPAEKKRKEAEEKKAQKDAEAKAKKDAEEKAKKDAEAKAKKDAEEKAKKDAEAKAKKKDAEAKAKKDAEEKAKTDAEAKAKKGAEEKAKTDAEVKAMKDAEEKAKKDAEAKAKKDAEEKAKTDAEVKAKKDAEEKAKKDAEAKAKKDAEEKAKTDAEVKAKKDAEEKAKTDAEVKAKKDAEAKKKEEEMKKQKAKPEEKPEAPAEGVAVVPEAKKAGEKKEKLKQEEKPVEVPPSPAEKKRKEAEEKKAQKDAEAKARKDAEEKAKKDAP

SEQ ID NO: 155162 - protein, 44 aa, Heterodera glycines
MAKECANIRVTVPICVQIGGTDEGQMDSEVTVDRRAIDANENTT

SEQ ID NO: 155163 - protein, 184 aa, Heterodera glycines
MANELISPTPPDIENIFKRLRANPSNKVCFDCGARNPTWSSVTYGVFICISNKVCFDCGARNPTWSSVTYGVFICIDCSSVHRNLGVHLSFVRSTNLDTNWSWIQLRWIQLRAMQIGGNANAVAFFKQHGCESNDVAFFKQHGCESNDAQVKYHSKAAAMYKVSGVDKYGEMANVGHSLDDQET

SEQ ID NO: 155164 - protein, 71 aa, Heterodera glycines
MALVEFKLGVRDQCIVNVCDTSETRNDNSTNDPNAFYVIPEERYANRKDTARKWKQQLMTTATTTTDGKQT

SEQ ID NO: 155165 - protein, 167 aa, Heterodera glycines
MLKKGGTIGAEGETNLPVSLVIRFLKKREVIENPCPPICSPDDDLTVHIGDRQLTISAHWLMSVSPMVKQMLSVEMQEKHQRAINLDGLGITMEQFSEFADAISISSLGQPFFPNPQNVLTFLLIADYFQIDWLKERCGVHLANCVEIPFLERLLLIERYKLKNLMV

SEQ ID NO: 155166 - protein, 31 aa, Heterodera glycines
MKTYKNSFCLIYFFLIVIFTVLTIVIFIPIL

SEQ ID NO: 155167 - protein, 38 aa, Heterodera glycines
MSFKRVNSVKPAVPMEKMGFPLNWILYFFLSYFIFYFH

SEQ ID NO: 155168 - protein, 64 aa, Heterodera glycines
MIKLILHDAGPLQKHELVKKILETYKLNSKKHVNSRVKKTLRTYVGNGARSRSWKIFGGRIGRW

SEQ ID NO: 155169 - protein, 180 aa, Heterodera glycines
MNPQGVSATKFSGQQILAFVQQMKQQMASLAAASTSANLTGFELCAQTNTTTKNGPQQLGSLNSIALCSNIAMPLYVLCNGFYSVQQNCEVFCNPAGMKPIQKFKNSFYHEDPIAMGMGDTLLCKAIEPFRRLKLSTEEFVLIRAIIYSNMVSPGLSDQAQKLLLSEAEKYSSLLMSILQ

SEQ ID NO: 155170 - protein, 451 aa, Heterodera glycines
MWDTRGGVIPQAVPPCGFDGNGCTVSVFELYKVRYISVTLTILFAIQKGYFISGIVLFVLIIGSSLLIMVYLIHSKIVENRKTNLLWQIPFAMMKRVKQRHGAERSHHSLRSNQTNVSALTHSTMDSLAQSKNFSLYTYNGDKCIVCTFGSMTAAAPLSVAEMAECRAMRLFDHENMNRFLGLSLDGPNVLAVWNFCMRGSIRDVILSENAMVKDVMFIQSAVKELCEGLQFLHNSPLQFHGRLKSSACLINERWQVKISYFGLRWLKSPQKMQAKDLLWLSPEQLRRATDGAEINVAEGSKQSDIYTMALIFTEIHLIRDCWTEAPNERPTIVKVLQRLRQMNAGQSINLMDHVFEMLEQYANKLEEEVQERTRELAGEKRNQVADRVKLGQSVEPEQFDCVSVFFSDIVQFAALSNQMRPLQVVNLMNDLYTIFDAIIDEHDVYKVESI

SEQ ID NO: 155171 - protein, 115 aa, Heterodera glycines
PAHSIFDHLSAVRAVCHAFVPLTGKGTGRGTRGTDDCDETVKDEDEDLQLSSSDLYSLNTAVHYQPVPTATTTMANAMVSHACVAADHQTINDYHYFFIFAPHFHFFFLLPLSIY

SEQ ID NO: 155172 - protein, 49 aa, Heterodera glycines
MQRQVQMRSFSILTAVHDIAAIQNRAVNPNFIRPNQLNAFNPSDRFSRY

SEQ ID NO: 155173 - protein, 127 aa, Heterodera glycines
MIISNELINYFVGQIECEGNASLVGMEIRHANVSLGQEHVLNFVEINADNGVLRAGDKINVRIPIDGTIGKTEVINVSVNLFFEALRRHPHIGVRAPGQSDSGQLDSGQSDSGQFDSKDIPTVDNPT

SEQ ID NO: 155174 - protein, 79 aa, Heterodera glycines
MNVIYGPWRISVFLDGISRSKFFRKWIWAIHFEVDFINFDDEMFRRTINGQIEFLAIFIKQMLNRAPICDIMIKILVLL

SEQ ID NO: 155175 - protein, 221 aa, Heterodera glycines
MDFVTLDTNYKPPYMDLPFNNTLRKLQYAKNIIFRIQLNNVKSFGFIISLLHDRPEKNEDIGATIMEMNVRPTHISMTSFSVENKSSEPVKDSIDLSKAGALEINITLFKDDKITIQINDILKRNYTSEMPTWATNFVRVEEINKYKGGITLMEKPFIGIDTQLAEANEGQQQQKDGLPLTKRLMTVLNYGDVIRMEFLIKRQIGKLTIALMHEAKYFDKR

SEQ ID NO: 155176 - protein, 125 aa, Heterodera glycines
MTSHFLVGVAAFGAGMCFAKTYMEKPKSEDDKEAPKKEEATTGGDAEEKAKKKDKKGDGAAAADKKEEKRKDKHKSKEGKSDDSNRRSKKDKHGKKDKKDKKKDAAEPAANAGEQSTAETTQADE

SEQ ID NO: 155177 - protein, 113 aa, Heterodera glycines
MSENTTEAERRQMENELFICADCWLSVFHLLPPSQLGLGIALLSHRFDCLVDEHFKTRKWMLGVIAIGNKIGENGKKEMKLQQCANFWEWRTVPIPQNPLPNKFIGFRHILIT

SEQ ID NO: 155178 - protein, 91 aa, Heterodera glycines
MWGVIAIGNKIGENGKKEMKLTNFPEWRRMPIPQNPLPNKFIGFRHIRIRHLPMPFLVPISSFTFAFAFLFGVFGLVFRPLNCSTIQLGSD

SEQ ID NO: 155179 - protein, 61 aa, Heterodera glycines
MSTNGPSGKGKRLNGYSMISGAILICQKVMKMMDMISSVHVVVKLLLKFLKPISWFLLFRI

SEQ ID NO: 155180 - protein, 57 aa, Heterodera glycines
MIALLALILSSIAFRTMLRLESLLTLPKRLALPEVCFSAKASIPLRLGLLLTSECRT

SEQ ID NO: 155181 - protein, 69 aa, Heterodera glycines
  unsure (1)..(69): unsure at all Xaa locations
ISSDFLLAHNLKSNANLIQIQLNQNFKKINLKKGRISFSSSMTELLWIGWRNGFIPIRGSAFSIFIXSN

SEQ ID NO: 155182 - protein, 139 aa, Heterodera glycines
SDFFKSFCSLLYTYKCYAIPHWSQGNAVVERSFRTFHNILAKYISNEEPDFDEFLECANFCYNTSIHSSTKETPFFLVFGRDPIFCIEQILNPNTEPENTSEVDNVKQKLVKSLRKAWESAAAVIKEAQLRSKVQYDKL

SEQ ID NO: 155183 - protein, 434 aa, Heterodera glycines
SFCSLLYTYKCYAIPHWSQGNAVVERSFRTFHNILAKYISNEEPDFDEFLECANFCYNTSIHSSTKETPFFLVFGRDPIFCIEQILNPNTEPENTSEVDNVKQKLVKSLRKAWESAAAVIKEAQLRSKVQYDKLVRNQTVQIGDRVLLRNYAGKVKTSKKFQLPWKGLYRVIEINGVLITIVSCTSPQTNPRIVHINQVKKYFEYSGPPCTTKNLQKDEEQALKELESREQTNGMQDPFSNFYFSPFVYEGESYCCVEQAFVMKKVRTYELNGVAAEVMRFVHKDDSTPNSPRWPDGHPRELKWFGREAEERASPATKRNWSENAQRSSIAFFVELKFRQNQHLAALLLATNDMWIAEACKDRKWAVGYYKDDPFLHNYTPENGAFGRNWMGNILMSLRMRMLNEQQSVAGPSRQIGKREDSIAYNYENSEELI

SEQ ID NO: 155184 - protein, 782 aa, Heterodera glycines
EHDIVTTSDTPVSSKPHRTPFKYRDELQKHIDQLLASGVMVESDTPWVSNIVLVQKKDGGLRPCIDFRKLNEVTVPDHYPLPRLETIMERIDPKTTRDVKHVVGMASFFRKHVPNFSTIVEPLTRLTKKESNFEWGTEQAAAFNEVKRILSEKPILVFPNYDKPFHIFTDASNVGQGGALMQWNELAEAYEVIAYCSRTLSASERKWPAVQAELGAIIFALRNFKPYIFLTEIELHCDHKPLAFLLKKAEAHPHLARWLIELQNYNIKIIHVAGKQNLLADGLSRYPHERTQEIAIRDLAELEDIANFPVCLALNMKPRMVHEHFLLTITARDIEGKTFAIDVRKEQNDDSEVRKLIEFVNFGSFPEGTTEVEKEDIASRAENLSLSSGILYQHLPDQNARMYIPLSLRPLIFEAFHTSQINGGHMNIKKTLGKCRKFYWPMMHRDITNWTRQCITCQLRHSPNPSYRAEMQMPPKNTLFAQIALDLAGPLPLTQKGNKHILNIICTFTKYVISVPIPDAKSQTIALAFFKHCYLKFGGCTSLLTDNATAFTSDFFKSFCSLLYINKCYAIPHWSQGNAVVERSFRTFHNILAKYISNEEPDFDEFLECANFCYNTSIHSSTKETPFFLVFGRDPIFCIEQILNPNTEPENTSEVDNVKQKLVKSLRKAWESAAAVIKEAQLRSKVQYDKLVRNQTVQIGDRVLLRNYAGKVKTSKKFQLPWKGLYRVIEINGVLITIVSCTSPQTNPRIVHINQVKKYFECSGPPWTTKNLQKDEEQALKE

SEQ ID NO: 155185 - protein, 162 aa, Heterodera glycines
FKHCYLKFGGCTSLLTDNATAFTSDFFKSFCSLLYINKCYAIPHWSQGNAVVERSFRTFHNILAKYISNEEPDFDEFLECANFCYNTSIHSSTKETPFFLVFGRDPIFCIEQILNPNTEPENTSEVDNVKQKLVKSLRKAWESAAAVIKEAQLRSKVQYDKL

SEQ ID NO: 155186 - protein, 314 aa, Heterodera glycines
SIHLFKFEVLKVFKRIFSHIWVNSARMCQIRQISADRSVPIVWLPTHRSYLDFLLLSLLSYHYRIQLPAICAADDFRASRLLGEALRRCGAFFIRRSFREDLLYRSVFSEYVQQILSHGDLLYRSVFSEYVQQILSHGDRPIEFFIEGQRSRTAKSVFPRVGGQRSRTAKSVFPRVGLLQLVVEPFIRAQVYDTILVPVTIDYDILVPVTIDYDRILEEKLFAWELVGFSKPRETTMGLLRAHSILSDNFGDIRVTVLLRAHSILSDNFGDIRVTVGEPISLRKYANGTLILWPFVALAILQTLNEFPLNSQPI

SEQ ID NO: 155187 - protein, 256 aa, Heterodera glycines
PDTKSLTTAKALLRHVYLKFGGCTELISDNATTFTSDFFKSFCSLLYINKSFSTPYWSQGNGATERTFRTFHNILSKYINPKEPNFDEFLDAATFCYNTSIHESTGESPFFLVFGRDPIFSIDQILDPSVHLPLPHNDLAEFKTLLVLSLRKAWNSAADSIKEAQNKSKVQYDKKFRNPNISIGDRVLLRNYTGKPGTSQKFHNPWKGVFRVINIEELHVTIVSCSSPQSNPFKVHINQLKKLFEISDPGFQRRNA

SEQ ID NO: 155188 - protein, 172 aa, Heterodera glycines
FSEMRIITSNCPLDQRSLGATDQMIPFFGGFSSSDQSLFVRSLFLSLSALQSEPSPPASADPCPRLFRPPRQRRSIPFQRRRLDESAPRGSARNSANETRVVLRVHEQLGGNGCAAGATGRGRTKADGLAIVAEIEFEGDGEENHRKEKKKRTEKQRKRRRKHRQREGTNWG

SEQ ID NO: 155189 - protein, 141 aa, Heterodera glycines
MHDAKSRLFQPGRISAEQSLCPRLIDYIVIVGRRPNATVRRRRHPPSAGGYVNVTAGGGAGPMAIPGGTVSHPELLRRYPSENHRDFELPRDVTYFCQPEGCVSFNGSAFRQLKKRNAFQEATFFVFTLTDKDSARSRFGV

SEQ ID NO: 155190 - protein, 66 aa, Heterodera glycines
MFCVRRPRRRPQCSEPILRSYRRGKEHVVLELGSPMAIRDNDEDGANKEIIDQELEVTLEGNEKEC

SEQ ID NO: 155191 - protein, 135 aa, Heterodera glycines
MLQINLMIVFFSFLFVLIDGTDEELFDDLCENLQPSTSENFKKTKLEEMNAIKKEIVDNNENTEKQNANQIEMEDIKPKELQKIKKEKILEEQNIKVTKIELDKLSEESFENEFDEQADQNVSSADAEGYNDMVI

SEQ ID NO: 155192 - protein, 78 aa, Heterodera glycines
MTKIFQTTKIEKKTFDKSQMDKAIAKDQMLNDNNKRMFKKLFNNSSKIVEIYETLLKEIRTILVATPKLEILINKNNV

SEQ ID NO: 155193 - protein, 39 aa, Heterodera glycines
MAEAATIITTIWGEIHFAEKWAGPGSKKNPSWIQIQVKL

SEQ ID NO: 155194 - protein, 59 aa, Heterodera glycines
MVNLTSNLQAAVHNDDFSDFRRAYDAPPGPAFSDANAIDGRTYGEPRVAYPAAIKSRKN

SEQ ID NO: 155195 - protein, 97 aa, Heterodera glycines
MEGERQFAFDYIANVQRHVDAKGVFYEVSVRRMPCLPRPKSGGKCKGGEEKEKPTNLKLKVEAGVDKEMIKRLMGTEEGTEEKNYRSQTKAGTNVIK

SEQ ID NO: 155196 - protein, 76 aa, Heterodera glycines
MQRAPHVGAVIVEQTDDLFLTKNGRPRRVMSCQQLRKLLNGLVASVCNNSDHLDEADEHYDYDDIPPKSQQHQQLK

SEQ ID NO: 155197 - protein, 37 aa, Heterodera glycines
MVHYAKDVSKNVSNTCSNNRSDREEVYKKENPLIVNF

SEQ ID NO: 155198 - protein, 31 aa, Heterodera glycines
MALNGTYLFNLSLYCSNSMHEVRAVQIYFGK

SEQ ID NO: 155199 - protein, 232 aa, Heterodera glycines
MPSPAQMSSPSPPTFASHFKYSVAVCHGIGTAGGRRSPMRRVSLPSALPHPRTPNTLSPKLGFLKEISEFDIDPPFISPAASSSSSADTSPMLLSPSFQRPASARLYRRNPQHRHSQPNSPGSRKSRFLNRQPPPMGDGRTAAVAKEAEDDGFRWTDVDGFYGRKNSIPLQQLLANDLLNGANLFGDRHDELKPNRGRMMISNGMDNNENNETDYDNTIDGSLLNVEQQQNE

SEQ ID NO: 155200 - protein, 93 aa, Heterodera glycines
MKQQQQKQQEDENFRKMLEVLKNPRKFNISLTESSSSESPRREQKPVPSQQPLTTVTAPPALPPTGPTVPAVTVPQMYTANRDSSDSDSDFFK

SEQ ID NO: 155201 - protein, 115 aa, Heterodera glycines
GERTFEGKSLHHLDTNELNPYQQVIEIVGKTLSSFDADGIIPVYGFGDEECTDQSCFNLVDRDDVDSACVGFEGLNGLNGCRTAKILQIVKQRCSACTTSECRPLPCRDRQILCH

SEQ ID NO: 155202 - protein, 87 aa, Heterodera glycines
IIFMQKIFFWVFGAVPLNRCAQIYGETESFRNSFTIACTLILRWIFAPHNCLSTPNGHLKKSIYFCFRGSPPEPMRPDLWGDRILRE

SEQ ID NO: 155203 - protein, 218 aa, Heterodera glycines
TIIGNIEKERQKFMEELRKEGKCVDEIGLDGLLADVEAQQHIIAISSNPRNLTDEPPLTFALDSDIALVKQYADALFRLDPRLAVLRFELVPKLVPEDKFWRNYAYRISLVRKFVAEKTTSEQRQGSAKEEDKSKKCVETEHKQQQQPQKLQQTTADATPENDEEEKLEKELLNDLHEFEMVVDDGKEYGTDNANDEDGQMGDELDKHLDELLDNNSN

SEQ ID NO: 155204 - protein, 45 aa, Heterodera glycines
MLLEIEKRLYPDGLPENAPNFVQKHFNLVGGTSTGALNYRHYHTF

SEQ ID NO: 155205 - protein, 79 aa, Heterodera glycines
MAIKYGPKIAKYGHKMAKIAKYGHKWQKCQNMDINFSKLNVKFLQIYWLKLHMRYISKFFDSASNNPGKKYGFPYNYTP

SEQ ID NO: 155206 - protein, 51 aa, Heterodera glycines; identical to SEQ ID NO: 124998

SEQ ID NO: 155207 - protein, 76 aa, Heterodera glycines
MLAPLCIYDNVGDFYRAKIPLRLKVKKKLSAKMALKEKKMVFATGRYYGAPTFAAPTFTPMSKIGLKVEFFQPLIA

SEQ ID NO: 155208 - protein, 151 aa, Heterodera glycines
MQNRKMNGRVRGCQCATRTCLWPAHRRPIRADDQAVFMTAFHLVCDYAEAELGPAEQKFMRTYRFRISIPPKDEKKWGTSLASAAYIGMVVLLTGRAVRANWCVTGALDSDGEVNEVAGIPQKVAAANFKLKTYIRIEREIQVGYVVHAII

SEQ ID NO: 155209 - protein, 118 aa, Heterodera glycines
MSLPHPELSQLLEGLFAASKFHWKALESPRRGEKENEPKAILIELIDIYNELKLDDYKAIESCRKCDKKGKENGKNERENHDHKKRRFLRFVARSLEIEWDSNAFCADGQNDNDDAGN

SEQ ID NO: 155210 - protein, 417 aa, Heterodera glycines
MRDTNNGSLTPTRLEHPCSWEQCTLRGQFQLQRRVAQLRQQLAELQRTPSLVREPEKRPNDDDDKENRTPRGRPKKRFAEKKGSAQRADICQLTSVLSAETSAGIRVAFADVARQLADICEIDGLSTQFFLTGDLMFISKIFGHRGAASANPCFCCEAKNLPSEPGRQRTLERMRQQAAQFQEGVQNGVNVTQMSKQCAGMQFDPFFNIEPSMTIPPSLHIVACQGVFFGIFKELRHLCTRHGTEYEEQLEMRLRALGAYKNAWYQEYSGYHVRNILRGGGPMHVTEFLPQSPRRDNILMALELLAKLQSFAVADLLSADQIADFRATADQFRVHMLEHFRRHCSTSKFHHLVHHAPEFAENHGFWGLLSEQPVEKFHALFNDDLARKANTKDLHDILMFCARESAIRNAIFDSNEL

SEQ ID NO: 155211 - protein, 53 aa, Heterodera glycines
QYAVTDQRKEDQKTVDSQVMEVIRKHPEKKFLFGYLGSRFHLAKGMHPHKMVF

SEQ ID NO: 155212 - protein, 217 aa, Heterodera glycines
SLLSAAIDEKMTQHESLLIATDQRIVHFLLLAFLLIAAVCLTLLLIKAIVDQFLKQKFGQNNNNTMDKEEEKRTEEEEKKENGKGGGGEKGERKEEAILGKNDREEEEQEEEKEEEEEEKVGDEREEFVGVGIEEEEKEKDGMEAFLEELEGATDEEEEEEEGEEEEKRTTEEEEEEFDSEEEKEEESDGGKERRETENKLGGKRAFCIIRWHNKKR

SEQ ID NO: 155213 - protein, 436 aa, Heterodera glycines
MRTRISAFTVLSHLVRTFPGIMNDYLGTITINITKTLTDSAADGTMKIEILRFISLLLNTHEPERLVPFVETVLPHLAAAVGDHFYKIASEALLTTQSLLRVLRAQKTDFSKALPVMYSAVVSKLKIADIDQEVKEKNIATVGLLVALFSAELGKKITDECLPLLLERLRNEMTRQVALRAINHIVQSPTKLDLQPMLPELLSLCADFLRKNQRSLRLNTLTLLESLVCRFSHNGLQGPNLIKVVKEVPALICEQDLQIALIAVTFITNVVNSYPDQILADSLNNMFQSLITLVHSSLLQGTTLNRISEPVYNTGTSQFLHRQTYSSIAKATATVAQSNAEQTDSRTLVLSLRDAFRNAGPVINSECGECGTVGDADEIFKKGVEQIWELLMKYCDSAEESIRNVVAECIGRLIMVNPQNYVEEPFWFSQLYCSIV

SEQ ID NO: 155214 - protein, 41 aa, Heterodera glycines
MELSEKGGVIASATSLTERKDMNEGRKIVFLNLTTTLFTIF

SEQ ID NO: 155215 - protein, 52 aa, Heterodera glycines
RISIPWRGHRDDQLEKESGIEGAIFVHANGFIGGTKSLEGAMRMAEETLKMN

SEQ ID NO: 155216 - protein, 108 aa, Heterodera glycines
MSDNPKEAEEKMAKAIFISADCWLCVFDLLPPSQLGLGIALISHRFDFYVDEHFKTRKWTLKPIQIRRKNGENGTKEMKIVNSRWKPLPIPQIQLPRKVIGFKRIDIS

SEQ ID NO: 155217 - protein, 50 aa, Heterodera glycines; identical to SEQ ID NO: 135818

SEQ ID NO: 155218 - protein, 224 aa, Heterodera glycines
MPPVSIDFGEGNGEICAFQQRFEALIGQLPAECEPIAAAQKMEKLRFVHAVMVMANSDGERGERIKVKNQRKKKVKHSQQKRYKAPLLNEWTENNERAKGQRNAAQTEEPSWGDPIGEAVKVLRETTKMLEQMLDDWRGEERRGGHATLWHRKKDGAMAPPSPNGTVEGRTEAAEAVDTDQTAWKPTTENTRHQQPHSLLSSKISFPSELRRYRMTEERHEERI

SEQ ID NO: 155219 - protein, 286 aa, Heterodera glycines
LFVLIFQFVFRFLQSLRWAFEKCRAKELQPTPDNLRLVLGSALSKIRFPLISPSDFATFVAPTKLLTDAEPTKLLTDAEMVSVFLYYHLGPKQPMPFPSTYRGLYTPELVVKRFQRIESSWGYTGTPDRVKFMVDTPVFIFMVDTPVFILGFGLYGSNRESCQYTVLIEIILNFNSGKSLASNECFFLSDGSPTTFRVLFDEPVEISSNTTYVASAKLTGNESHYGTKGLRKIKGNESHYGTKGLRKIKLERNGRPDINWHFQYAPGNNNGTSVEDGQIPEIIFCA

SEQ ID NO: 155220 - protein, 216 aa, Heterodera glycines
MASQKQLRDKKCSEVEDKTNDGTEREMTNSTSNFYKLTKSEPPIAFDRNLSSNLVVPSTSGRCANRRDEEETSNPKNAQLLEQTKCTPEQHEEKTDECPPKESNVRLTNKICKRRMNKVENVAHLNGRGGIGALGWQATLPSARERLTFMLMNDTLADIFFIFRGSDGSVQRIPAHKFVLSVGSAVFEAMFRFGDSSDCANGIRVGLLNLCHAIRN

SEQ ID NO: 155221 - protein, 45 aa, Heterodera glycines
RLIFSFFNFYSLFLSFNIPSHLKVQYFFIFINCTVIVGKCVNLER

SEQ ID NO: 155222 - protein, 181 aa, Heterodera glycines
AAMTISIGFSVDIPAHVSYHYYQAAAHGVDQPQAKLVLCVVLCNLHGLVFLPAFLILFDSVVQHMRKRAAQRRAASAATDANGGGGAVNKRWPTPIPEANSSQESSLRVGTAPMSPPAQHRNGVGGQYRNGRTKAPAEQSRVTDRPMLDRFNSVDETDGGGTEMVASKPSMKSIVKVPATE

SEQ ID NO: 155223 - protein, 116 aa, Heterodera glycines
MREVKMIMLRFEAEHQQNWTVAMVKQYELAMRNTFQREYKSDRIAMYVLSKSVIEDEMVSVCSQVDQAVLIRQIRAGLSIIPYMSIGFAVMVICSVFCVYMRALYMHQHSAPKVMA

SEQ ID NO: 155224 - protein, 114 aa, Heterodera glycines
MSTTDRVRPASPSENGTAVTMRQRRSTLARQGSMLGGGFPERRRSSILVGQRSMDLQMEQTGNVGPRFVLFIIRMFRRWGRFVAKHDWKAMLLCLITSLIGFIVVMLTPYGTFN

SEQ ID NO: 155225 - protein, 18 aa, Heterodera glycines
MHTRPIWQVKQRLLTSQK

SEQ ID NO: 155226 - protein, 219 aa, Heterodera glycines
LRFSLPFLGFVPLFRCSHRQVFIPGDIILGGLFPIHAGSRNTSDGTLCGRIKADQGVQRMVAMLFALEAVNRSPRVAMLFALEAVNRSPRLLPGLKLGAQILDTCSVETHALEQSLEFIKSVGSGVRTTNSTAPNGRRQKITAVIGSASSQNGRRQKITAVIGSASSQVSVMVASMLQLFKIPMLIPMLSYSSTGVELSERPRFAYFSRVFAYFSRVVP

SEQ ID NO: 155227 - protein, 53 aa, Heterodera glycines
MTEAKRTKRGERVWQMGKEEKERKGQRERRRRFVWKFTSKELSVNLELLMSRT

SEQ ID NO: 155228 - protein, 176 aa, Heterodera glycines
QEGGRKGLSFKVVANMNGNTVVYNDRDVPIGTGSVRKVGGRSYEAVISKNLFITRLKDARRGPCCRELTEAVISKNLFITRLKDARRGPCCRELTGEECTEPIKLANPQFSHPSQRDLANPQFSHPSQRDDNGTTRLTWPDCFDMSIDVTLPPDCFDMSIDVTLPPGTANFSLQLN

SEQ ID NO: 155229 - protein, 65 aa, Heterodera glycines
RWANHRSEFVQWRKWGQWDEEKRKRSERRGGKGGATANDCLEKHSRLETAQRHKPIKELINELIN

SEQ ID NO: 155230 - protein, 37 aa, Heterodera glycines
MVIKSATTVIRRGTTEIRRGTTVIRRGTTVTKREILE

SEQ ID NO: 155231 - protein, 21 aa, Heterodera glycines
RDVFFSALSIYCFMSRFLKRC

SEQ ID NO: 155232 - protein, 69 aa, Heterodera glycines
MAGQLLEGSAAKNNGYDSKVYLKFSKASVDSIVGSLLTTMASSAVPLPKCDKLFVNSWFTVTSSLCSFG

SEQ ID NO: 155233 - protein, 28 aa, Heterodera glycines
MNLFELKCGLSKCLVGRVFLIALMQKGN

SEQ ID NO: 155234 - protein, 39 aa, Heterodera glycines
MKKRCKRGALPMVRSSRHNNQNKSASEMYFKNDDIAKFP

SEQ ID NO: 155235 - protein, 69 aa, Heterodera glycines
MLKLTRAQLNDGVPDQEQPPVGEQQSTQNSDISVDELPQRLKIWIVPSGAGDVSAVGYFLVKRIDARIW

SEQ ID NO: 155236 - protein, 41 aa, Heterodera glycines
MIFLKFSSEKISQGFSSGKISVSQMITFFMKFFYFIGEGDP

SEQ ID NO: 155237 - protein, 164 aa, Heterodera glycines
MVTAFHEANRLSDERRTSIQQFVDELQQGFRTETGVDSLQIELFGSVLSGFGSNDCDIDLCLINTGITKQEKVQPNGIISQEKRREWLNKLVQYLRKSELYTVISVADARTPIVKFEYHGEEGFHGEERERPAPLDYTLGASKIQIPGSSLTIEKNVICDYLLV

SEQ ID NO: 155238 - protein, 262 aa, Heterodera glycines
MSENTAEAERRQMQNEIFICADCWLSVFHLLPPSQLGLGIALLSHRFDCLVDEHFKTRKWMMGNIEILYKIGENGQKEMKLHQSANFWEWRKVPIPQNPLPNKFIGFRHILITYIDSNVIAFLQRFRSFFASHQTNLSITTKSGDSHFLEIVVKNIWPMIKDKICAIGFLSPDEFCRFQQLVPSILSDNCCCCCPSLRAMFFYTGVLPNLPANDCANMSADQSVVKWLFSPRADGAPKVLRYSLQMNNKFPRKIDAFKRVII

SEQ ID NO: 155239 - protein, 99 aa, Heterodera glycines
MTAPQKFIMPKTNRIVCYNCNKTGHISRHCRLSFTRKQSNCALKPPQHLNFMKKGADFRKNSEGQSLQRDFKLNRSAAEFTLAAPFNIELVDAVVIFPY

SEQ ID NO: 155240 - protein, 198 aa, Heterodera glycines
MNQTDYGPMVLAHNGTSPSDQDKIRDEETDHWLTLTQTDQTTTDQNSTLSIDWMSNTIMKADHDATLSLGEDHGQTLEAKNDDEPNLENGHYGTTPTDYEPNEEKNAVDNADHNDMAVDGAHDLSSAEDYDGNDSISAKNQQENVEEALDDSKNAVDEKQQKVESDKHLDEYTWEQTLTKKCPLNCSENNLQCWRLSG

SEQ ID NO: 155241 - protein, 229 aa, Heterodera glycines
MNSSSSTASFDDFDRNENEEKDDVIILNDDGQNEQNDHSVADKQLKASISQSKKMQNDQKEKKPNLEKGGELEKEQKKQEEKKNGWLSAFAKCAIPSNNFGIVYFEIKFVHLKKSAAIGFATKAMPFDGRVGLYGNSYGYESNGTLWVNGAYQTGHATFKFFDVVGCGIILENRQLFFTKNGRCLDHTDLFASSSVVPLFPCLSLHDNGDKILTNFGPNFEFDLNTLFC

SEQ ID NO: 155242 - protein, 67 aa, Heterodera glycines
MESDDAEAHAVDNDQNEVNDVVDADGMGNKNGQDRQQEDDHGGGGPIEVSISGMAFRAPKLSESEFE

SEQ ID NO: 155243 - protein, 63 aa, Heterodera glycines
MHWMNFLDRKMISFIKRGLKCCLNDGGGSLIKMVRHTVNTSDACAEAPIAQAKQKAIASKLAT

SEQ ID NO: 155244 - protein, 128 aa, Heterodera glycines
MTRCSVFVLTLLGVGMAHSLLMSGGSDLAPSANRVSRQCGCGGGCGGGGGGCGGGGCGGGGGGGSITLGVSCGGPSGGGGGGGCGGGGGGGCGGGCGGGGGCGGGCGGGCGGGGGCGGGCGGGCGGGC

SEQ ID NO: 155245 - protein, 203 aa, Heterodera glycines
TFFDRWSSNGVKSGAPKNRAGGSVHFPATFCYNPQFAFEISEEDGPAEVMLALCQREEGCAFDGRPKNAKKLMKNECDVFCVFSSSQGSDRCRTFPAKFVPGRPVKFNALFVFHAFASQQWLLNFELIELRKPFQRQNRLLGVGRLALISNNESIEMEMELIRPIEKRKAPIGGEGKGRGKVGEETIGKARIEISAYDDPFYI

SEQ ID NO: 155246 - protein, 111 aa, Heterodera glycines
PPPPPPQPPPHPPPQPPPHPPPPPQPPPHPPPHPPPPPHPPPQPPPPPPPHPPPPPPPLGPPQLTPSVILPPPPPPPHPPPPHPPPPPPHPPPHPPPFGPPFYSAPPPPWP

SEQ ID NO: 155247 - protein, 29 aa, Heterodera glycines
MLSQYFAQQFYLCPHNRQRFDKKLLYCEK

SEQ ID NO: 155248 - protein, 98 aa, Heterodera glycines
MEEEEEDEEEEDEGCDGDNGPVHPMLAMMDAASKGADELAEMTHHQTQQRIPAAERTETAKTHKNFGEKGQLLLIYMPFYFIMSNENEYTSSYSTLRI

SEQ ID NO: 155249 - protein, 43 aa, Heterodera glycines
MAFAIPYIESCKNLSPMGTAARCDGTARNVAAQGQTEQRKDTN

SEQ ID NO: 155250 - protein, 98 aa, Heterodera glycines
MKWAHVGGGTASTTTTTLVTTTDGDDQPLFQLEEMGGDTNEMVVVTSSSSSTNESDDGGGRDEEEEAVFGRHGGRRSGRKMRTNQQQKLDDDDDDDGL

SEQ ID NO: 155251 - protein, 100 aa, Heterodera glycines
MHKISHIFCFSKNSLLLLNQWQNRFSVGKCIATNNHNEINVEDIKQKCLKRLSTSMKPKPKPMMMCHRLIPWDLQKRAKSNRQQTPHNKSVYPNRPFVLD

SEQ ID NO: 155252 - protein, 30 aa, Heterodera glycines
MNQKMIKPYVINCCNEMKKMSPWELDKETN

SEQ ID NO: 155253 - protein, 78 aa, Heterodera glycines
IDFFVFGAVPPNRCAQIYGETESFGNSFPIVCTLILRWIFAPHNCVSTPNGHLKKSIFLFHKYFFRNCSETHQILFTC

SEQ ID NO: 155254 - protein, 190 aa, Heterodera glycines
MRKSIQENTEDKVSSICVMGYLLNIIDDLNEYIRETAADLSRESPENAESARLISNSSLLETLNLRVVGRKIESIANTITLTMEDEIRKLKQSENETETPEGMAADELSRSLPSFSVAPHNYATGVGHGLLSQMSTIGAYGNDRNFVRSIASAASEINSSFNDDEADLWLLTEVSAGSKLAFAASPCLLH

SEQ ID NO: 155255 - protein, 18 aa, Heterodera glycines
NSYNWRLFKGIQPVQEGV

SEQ ID NO: 155256 - protein, 91 aa, Heterodera glycines
LFEYPKRTLEKIDFFVFGAVPPNRCAQIYGETESFRNSFPIACTLILRWIFAPHNCLSTPNGHLKNRFFCFRGSPPEPMRPDLWGDRILRD

SEQ ID NO: 155257 - protein, 266 aa, Heterodera glycines
MVLFALLPVQLMLVVAAVCLVIITQCCGGGQKNTEEPQMPAGPEGAEASAKPTGQSAAPGGTSAAGGTSAVGQQPAEASKKSLAPAGTASAAVPSTYAAPGTGTTLCTASQKTAPAGGTSTLGTASQKTAPAGGTSTLGTASQKTAPAGGTSTLGTASQKTAPAGGTSALGTASQKTAAAPAGGTSALGTASQKSAAAPAGGTSALGTASQKTAAAPAGGTSALGTASQKSAAGGTTLKSAPVGGASALGTASQKSAAGGAASQKA

SEQ ID NO: 155258 - protein, 53 aa, Heterodera glycines
FLLSTSADQPNTYIQYTYIYTNNDHTTVLQMIYVITDNRAIRHRYVGEQYGVF

SEQ ID NO: 155259 - protein, 344 aa, Heterodera glycines
MQFFGGLVFFFVIFHANGNPIVLTTTLAKALKATLTVGAVAAYTGWRALTKTNGILDGFGEQMKEKPHLFAPFFPLIFAIAGGEVLVEQDKFEMDYIFDLFERMTERDQLDKICFDGAEGEKNVIEKAEGNLPLFIFYAAMNDKKLDVYLSYCFCLFSPQSEAPPAVPAPAVGTGGDTFFRLRTIFVLGRPAADDAAQMNALESEAAAHGDLLVGDFMDTYFNNTLKVSLDEFPFAAFPPYIAAGAVLLTGQTIAEFYAAIPHVRLFRLDDIFAGILSHLLAITPQHNANFAFYRQSFADDSLALASSETLTTLIAVHDYLPEEMRETYGKAVKQQNQQKLKLL

SEQ ID NO: 155260 - protein, 106 aa, Heterodera glycines
MVGEKQRSDQQRHHNERHLNEGREKHSNGRKSKTNGSDQKREEKQGKMKADGEKCQEKRKSVSGEERHELVDQKGERTMQSVKDGAVHHVGQEKGRTDVLKKFFEK

SEQ ID NO: 155261 - protein, 662 aa, Heterodera glycines
VSAQGDRTVVQVQQLWRNRHGHRKDGNGANTVRNCRVVRRFQNFGGSWGYSAHCVEAIQFMTNCCEITFCGVGLFGGRGEYTARLKLYRAIDKDEVGTEAQQQCVELLAETDEVLYECGTRETATLQLERPIAIIKDVWHLIWVQIQGPSSDCGTGGRETVRGPSSDCGTGGRETVRACCAEFRFRACCAEFRFRTSELSNNGTNVEVGQIPELYFLPIGRSLLRRRSLLRRESSSRPITMTIGWPSRFVRSSVNSVSGIHQLLLIVEWALDGAFRAGAEETDELINCDALWRQERAAFVAVLSIRLIRHFLCIPSAGKNAEEMVEFHRLLKGILCRKSWTSATFSKHCLIHKISKDRISAFVTAEAALTCTILAREFAPNSALVRMRLVEQLRRNNENGAKAKGKANDWWLFAVLCSMSRLDNVRKELKDLANYWTDLLIPLRTFCQSFEFLFDGISLRLPSVAQRLITSLAHRLISRALPQPKTIGEAAPLQSPSRFRHISAHAQWEVGGNRHASAWDAVAFRVDGPGIALAGVGIFLPIFVSKNPIHQRHSLGPQNEWHSVERVTGQTDTFPTQIVHFAHAFPLRPGACYAVKVRFEGPGKTLFGEGGLLSIQIRDQIRLHFLPCDLSRNGTTVSRGQFPFFLLTVADPKEKLQQKQKS

SEQ ID NO: 155262 - protein, 159 aa, Heterodera glycines
ATGDFDYSAPPNAMHQNHHHHHNHHSPSYNVEHLASFAVGSHFSVLSPADGVRKLKQMEQNSAIWWVPMIFSLFPNRISVSELNGNLVEEFPMDLVSDPTAHTSSDPRDTFNNMLLFIVLFIVLEHVVSDGGTVPTELHIFQCITVSKITDAIKLYKFN

SEQ ID NO: 155263 - protein, 86 aa, Heterodera glycines
MKKRMEEKMNEKRQKEGKRRGEGKRKWKKRREWKKDEGKGRDERKGRDEGKGRDERKRRDEGNGRDEGKETTEGWDAVLYYLLMAQ

SEQ ID NO: 155264 - protein, 92 aa, Heterodera glycines
MSSNANEPIHSGHFMTSNPHSEIPPDDEDEDVEVDVVDVDDANSLSAAQTADKSTAKGSLLKDEDRPVTFYKFGSQKTQSIVIDQSLNNLPQ

SEQ ID NO: 155265 - protein, 98 aa, Heterodera glycines
QISSQCDINSEFNEFLTFERAPINSDPFEWWKKHGPKLPMLSKLAMKYLSAPATSVPSEQTFKVARDVYDYRRSRLKPKTAEMLIFLNKAIPMLDYKY

SEQ ID NO: 155266 - protein, 74 aa, Heterodera glycines; identical to SEQ ID NO: 139487

SEQ ID NO: 155267 - protein, 142 aa, Heterodera glycines
MFLISIALAFSIQFHSSVADPENQLGFKCTNVSNSQNYGCSAEGNVLRFFVIGDIGGEEYTVEGKQQQCTVEGHVEDTWMGTIKCLLKFSMECFCVIVGSVSSIQRPLMHTPFFRCEPWHCQTTIEPRPSGVIVHELLRTLP

SEQ ID NO: 155268 - protein, 113 aa, Heterodera glycines
MPPEFPTVPNGNKSVVIFFIFPIDSKDRCGGQSARIHVGFEIGQWRRALPRNGTPSHFVRKAQRIGARFVGLDTLPSATELLHKYENSLFAFGPDFSLRKALADYLPLAKPIV

SEQ ID NO: 155269 - protein, 26 aa, Heterodera glycines
MAKIGTEGAAEEEKETVKSQGGKKTI

SEQ ID NO: 155270 - protein, 213 aa, Heterodera glycines
PTNTRLVATSAAFPIPVQPQPVFLYGSTPPFGSPPLLISQFTNWTSPMESGGFMSGAGFYNINAFNTANATASSEGKSPQKQSETSFESEEEHSKRTTAEEDDSECHVSFTVATSVLHGHDESEHSFGSVGWNLELPPLPVGQLNIPIPLCPSKFLLLLTSLCSDRLPMSLTPSRVTRQSPIFAQSFDRPTPPMLRLNSSPIQSRHCPLCRNW

SEQ ID NO: 155271 - protein, 85 aa, Heterodera glycines
MRRGTRAIRRGTTAFRRVIRRGSTVIRSGTTAIRRGTTGNRRGTTAFRRVIRRGSTVIRSGTTAIRRGTTGNRRGTTVIKREILE

SEQ ID NO: 155272 - protein, 24 aa, Heterodera glycines
MYLFNFYSLIDHIYMYRMIPTMSD

SEQ ID NO: 155273 - protein, 111 aa, Heterodera glycines
MPVRKSKWTTLGSHEGHGTYCVQAGAPLPEPAAASPPRSAPLPSPAAARSAPLPAPAAASTQHKGAIAAFAGRCQSTSLGSLACAGRCQSTSLGSLACAGRCQSTSLGSLA

SEQ ID NO: 155274 - protein, 207 aa, Heterodera glycines
GGGDTFGYGSGKGAERGGLAADGDGSYGAGKGADSGSGKGAERGGLAAAGAGKGAERGGLAAAGAGKGAERGGLAAAGAGKGAERGGLAAAGEGSDGSLGLSAGSGGSGKGAERGGLAAAGAGKGAERGGLAAAGAGKGAERGGLAAAREGSDGSLVLSAGSGAGKGAGAAAGEGKGAERGGLAAAGSGKGAPACTQYLSHGHYDSE

SEQ ID NO: 155275 - protein, 64 aa, Heterodera glycines
ITGSIVLSSPQHLCLRPHLHKSINSPNFFNTQTSCMFYSFRQLPNAGETEATTKVAPQQQPSPF

SEQ ID NO: 155276 - protein, 490 aa, Heterodera glycines
MRKFRAEFCTMLKEILLIGIALKNDQTNKIKSDRKVNNMVITNDGKMPINRIYHENLIDNQQNHTVTDLSDRKENGKSDEKMHKQSDQKLRKSHRKKKTPLPLITLNYQQQNTVGEQRNDTVTDANDQKTTVPATDQKMNGQSDQIESEPQLIAIRDQLHRNNFARLISGDDETARAAWHNLTDEVQFGVITVLLGRRGGRDGGKKYSNTRAQFLKYLAKWKKLRDQTELDERLFDEYNKQNSEQILDRNYVQNMQQIKYNTQTDIYTNLLIKILRANGFDGIEMHKQKQIEEELEKIRDTVAKWSNGTGALLLGGSSLMGVQTADSDIDTVCIVPAHIHLDAFFGTLHCLSSGEEKEGQKCEDDSLFYMLGQFNNPEGFSSLKSMLHLCFILPVLQLADFGSVRAIANTSVPLIRLISRSGHQFDIVFASVAQMESISMAQLLNGNAETFGQLAQKMATELMEEGDGILEREEEETVKIARMARSLSGD

SEQ ID NO: 155277 - protein, 128 aa, Heterodera glycines
VGLLAVDEAHFISQWGHEFRPGYRQIADIRNVLTGVPVIALTATATDPNYRKNLFIEVQKRTQSLRWRLSSLISNMRSNSNFSFEKCVQNDLERLLEDDPKTGPNFGGPTIIYCQTRELVNQLTQQLR

SEQ ID NO: 155278 - protein, 133 aa, Heterodera glycines
MEMVPFELVNECTKEKLTLAKANENELDKSWIMKRCKIGETAAVNWEDGNWDNNCNNVFFWLFSGTNCIGPLSPPPPARRRRSGTKHHKGRNQRIETWRKKCQFEAELRTVKTGENVHPNVVANPTEMEKQFS

SEQ ID NO: 155279 - protein, 33 aa, Heterodera glycines; identical to SEQ ID NO: 128175

SEQ ID NO: 155280 - protein, 97 aa, Heterodera glycines
MNRRWICNDVWMDILPSFDHAQLGLKLALLSPRFDALVDKHFDGKSELTIWRSIEIRRKDKGPETKLSVRMDDKFVEFPLPDRPLPSKIRFKNLRIG

SEQ ID NO: 155281 - protein, 123 aa, Heterodera glycines
MADQLMLSFKQKINAGKYATAEPFLAKLGIQTTSEEEKRFITENLDDWRVITATWFEMARHIGTVQSLATVDGFAGRHKASLLCSKIHYCREQYNLALEYALSAGNEFKLVPRAEDKKGMTLW

SEQ ID NO: 155282 - protein, 167 aa, Heterodera glycines
MGTDGHPTENGVRTERTKGKGLSAEVLPTGRTVQKGTRAIEILEVILKMSDGWLVTIPLRDEDLADEEIVERAEDFIRIRKDYLASLLQKLIDIYHRSDMPMSVLDTATLIMDPLYCIGQRKAAKTVEIDLPSRRISPLNSVRGEDKENRETTDTAKYGVDYDEMDK

SEQ ID NO: 155283 - protein, 253 aa, Heterodera glycines
MHDFARNRLFFKQTARELVPVDDDRVQKSDQCIWATFGGDLATLLSHALSTEDRLWAYLSCAAEALLDEELLKEHKKKDGELMALATDIQRREGMDLPKDVPAIFAELRNVSELTFVSEQKEVLENAMKIGFDVPNLCRDVYRRFKDKHNFGPNVAREALRKAAEELILAWKWLAFCETETVWDAIIEANFLLRKFFLYGLMSEALQLMQLAPEKLPEIALRTFQTEFPDKEIPTKLKDAQREFDCYQLYFVS

SEQ ID NO: 155284 - protein, 76 aa, Heterodera glycines
MCRKYNEKWAEEHNDLTCEQFAKQKNVKDILDAIKFRDKQKTEEEIKKREYAKCPGCKTHVERIEGCKFVIWEDYF

SEQ ID NO: 155285 - protein, 108 aa, Heterodera glycines
MGALKASFSIASYRVNFIIFVCFCSSSFADDSIFELNNKFTGEKLAMKKINNDGCFLLVRCPISRYENKWTKWEEEAIELNICGQWSKIDIGINEEGIGDGCVIRVHN

SEQ ID NO: 155286 - protein, 243 aa, Heterodera glycines
MAGHVLIVERICATIYVSTYEQYSSWKFTIVWLFIMITTSLAVTICQISVSNSFYKLSYIAIVLYFGATIASLIEIFALSMITKINQKLFNSRVGGGTNQQLSVRYQLNENIRTGRQLAPNFLCHFITVFITFIVTMNSQFGIITNIEPMTMFYQVLFLSHAFNDLALPVAMLCYHPLLNRKAKASLATIKQLLRNSSTVSPQEETAQPLDTDGRPISERIQQENQDNEAYFKQLASAWGDRA

SEQ ID NO: 155287 - protein, 48 aa, Heterodera glycines
KKDERDNYLSLIRCQKLIRSMTSFFKKCSFLRSSARQCSSAQAFLLYP

SEQ ID NO: 155288 - protein, 21 aa, Heterodera glycines
MASASARIRGRTRRPSARKRH

SEQ ID NO: 155289 - protein, 222 aa, Heterodera glycines
MFGITIDPEQMAVNKGKRSIAKLCLNNLWGRFSLRNFGLAQTVITDDPAVLAEYLDNKSIDVMSIDELNETTILISYMQKKEWVEEHEFISLWTTSAARLLLLRAMQMVGRTPECRLLYTDTDSLIFAHLIANCPLQTGPHLGQFTDEYPDHEIVEYCSGGTKQYGLKLKRNGSVEHALVSAAAVVGAGASINASLLPPMAPPPHLPLSMAPPPLQSRHSRP

SEQ ID NO: 155290 - protein, 36 aa, Heterodera glycines
KFRCLTCAWIFELDLDLWKKPALDPSLGRILIYSNV

SEQ ID NO: 155291 - protein, 82 aa, Heterodera glycines
LISSQNSCQFKTAKKAEFSKFFISIFFYSSKFSVIFSRLIEPVKSFRMISRLFDSVNNFKSYIDSKLAQTELARRSWPVPPV

SEQ ID NO: 155292 - protein, 458 aa, Heterodera glycines
YEFIIRPATDFEVNDLSFITNDVSKMERPLEQFLNIATAQKANMDGKKFFGFSSSPVYLLAPFDYGFKTNECPVFDSNHSFLGVGVNKRCRIIEGDQGPGQMTPADQGPGQMTPAIVIQTKKSAFHIPDMCILDKAKTLLFSAFHIPDMCILDKAKTLLFRENQGRFETGGFTQSDYEALCNGLVGIYAEPRYGTSGRFFRISIYAEPRYGTSGRFFRISDITKPNTGNGLNAENTFITHQVSGKISVKQYFEDTYRKTLQYPKAPLLVNYRRIGDPAYYPYPKAPLLVNYRRIGDPAYYPMELCFVLDCQRVKSSQQHPEQLCFVLDCQRVKSSQQHPEQIRKMIKETAVPPTVLQAHKMIKETAVPPTVLQAHNERVKESLQLVDNEYLTNASVHFDTTPLHVDYRVLGPPATLYRNNHRVTPAASNCEWHPGDALVNAQIDTVAYALPAGDVRRL

SEQ ID NO: 155293 - protein, 176 aa, Heterodera glycines
MWSNICQLKTEISVDKYAGEMRNKGIVCKPPVRVSICWFTSVNKVLEVLHKEALNGGVKFCLIGHAKGSEGDDVHATIKAFEQQTEIVTQAITFDVLKDVLDKGSPLTVANCIHKTNVKMGGLNYALHVDDPSVAELFDGQTLFLGFAMNFPDGFAPSESAAPINVGRDNRKTTQG

SEQ ID NO: 155294 - protein, 98 aa, Heterodera glycines
MHDIALDENMAPGNYVYPSYEEGGDRQRQSQQQLQGHHPSYESNETLRQQQQEVGDDWDSLESFSFEMLGFGAGRQMEAPPRQNNASGAVGHSPKPPS

SEQ ID NO: 155295 - protein, 476 aa, Heterodera glycines
LSDTAVIAQQSPPNAEPDSLFAQQSVAGEDIPWWQRNFLLQQPTLVNAWNAVFPTVVVNIFGIVIFLRMGWIVGTAGLFQAGTAGLFQAFVVLALCTLFSSVTVLSAIGICERCQIRSGGIYFLVSHVLGKRIGGAVGLIYTFGQACATALVALGFGESMAKLAGIFSPVAIKTLSVLVLVVLNANFAGLRFIIRLQLLLMCFLAIAIGDFLLGAVLFTPLDSGIFEMSAERLSLNWHSHYGPANCEMSAERLSLNWHSHYGPANCTPNNAMALLGQESFNNAMALLGQESFFSVFGILFANFIGVLAGVNMSGNLVNMSGNLVDPLRNIAEGELSALGASFALASFALCFLIMLILGASVDRHSLLHSLLCDVMISERLSLTKLLFLGGLYIASLFSKDSPSKDPLKATVLVTAVAVLLVLLGNLNQMAILSSMPFLLTYAFVNYSYVSLAMSDDLDSLEHAKVSKTKGGGKEKK

SEQ ID NO: 155296 - protein, 47 aa, Heterodera glycines
MEKVSYYYYYYCEKSNLKELMTLNLGKRGPLSLYNKNTTAYYTIIFD

SEQ ID NO: 155297 - protein, 38 aa, Heterodera glycines
MDKRRNERPKIMGEKNKKKKSTAAREEKDEDRAEEERK

SEQ ID NO: 155298 - protein, 187 aa, Heterodera glycines
MDYFRFSIHFLVLRQRIPLSEIVPMRNLSNKEILTELVELLLLKKSQKNREEQTNGQKEDKKGKKGDKNGEKRNKNGEKGNKNGENSKSGKKKNADKAKESRLLRLMNTMVNNLNGTANLRKGDDQRKRRKKRMPDNLLRFILNLLFVGIIFCLVMMLILMSGEAMVLTGRNLKANFEEQTSNQNEN

SEQ ID NO: 155299 - protein, 55 aa, Heterodera glycines
WGWHDAYVAPKHGSNGHGHDECWQYQFRQFATIQYGSVSKGDRGRHCRGYPGEIF

SEQ ID NO: 155300 - protein, 128 aa, Heterodera glycines
MKFCVLQSPKIHFTFAKKPKKHIHVPKIQTLARSIFIDALYGRAFLLAVLLFGKLERLYWSASEKWPKWQKAPTDKTKELSDAFNDASRLFLLHGPVQLWEISQVYSDAIQKFITEERRKFTKAKSEV

SEQ ID NO: 155301 - protein, 197 aa, Heterodera glycines
MVVLMLLKAMIIIVLICYVISNDKEKDKAHTSIGNSKAHKSDLYSDKSNLQPDDAQINQQHLNANRDSNKFDHNHNNGTNTNYDANQHDQHHHANGVDGDSDDNQLDQLYANHQLVQLHANGNNDHPENDNLDDNNNSDKSKIVDLDDEFWDQLPELTKLPELNGVEFVGNHIKYTNQPKSDTHKDKEINNSKRTLS

SEQ ID NO: 155302 - protein, 395 aa, Heterodera glycines
MAADIVPFHRRPFALTIEDECLLYADRVVIPASLQKDVLQLLHRGHPGMKRMKGLARQYVYWPGMDEQIENFVKMCNECTMEAKAPVKTELHSWPKSDGPWKRVHLDYAGPFMGKMFLIIVDAYSKWPEVFEMRSSNSAATIDKLRSLCASYGLPEILVTDNGTQFASKEFKEFVTENGINHLFSAPYNHMSNGQAERFVDTFKRTCRKIKGEGASEMLTTFLATYRTTPCEALPECKSPAELFLGRKPRTTLDLLRPKPKAPIIRDEAMEKQFNRRHGAKPRSFAVGDKVLARHRLSQPWRPGKVTKCKGVIYDVEFFDGKFGRFHANQLLVRSTDENGTNALNVFNDAFDLPLAPPLVQHGGQAQLPVVAPAAVIAPAVAEEPVVGEADRAPE

SEQ ID NO: 155303 - protein, 263 aa, Heterodera glycines
MKYLAWDEKSEENGGNETDQNGTIGQKDGQNVTKNDQIFDENLEMKEESARNCDQLEQMHFSNAIDKKKREIVKKFHRIKEKIKQIGKKYSKKEWQKIERKIAKKLRVNQRKIYKWKREFGMMKNKNYSVEEKRIMYFSKFDQIYAKLKMKLHEKLEGKREKCKKIIAKHLGIHIKTIFYWKKQLKVGKYFINQKNDDEKTEIVEKYLEIKNKFMKNGKRKDWNEFTAKIKQIFGVHNKTIERWANKIGINQKPLSDPHSLGI

SEQ ID NO: 155304 - protein, 178 aa, Heterodera glycines
MEGFGSADRHRQENKVEEKVEEEQKVEEEQKEKAEEEQKGEQEEEQKEEEEQKVEEKVEQKMEEKVEQKMEEEQKVEEEQKEKAEEEQKGEQEEEQKEEEEQKVEEEQKVEEEVEDEQKVEEKVKVEEKVEEEEKVERNRKWKRNRKWKRKWKRNRKCKRNRKWKRNRKWKRKIKLNS

SEQ ID NO: 155305 - protein, 140 aa, Heterodera glycines
MMAAATQSATVGSTPAPPVQHHVSFITPLMANNNGTKAMIDDNMLVAVVGDHGEGGSGGAVGCFEEPADKRSRHASRDSCGSVNDQEIKQLLTSRQQQQQQQQQLAEKKQLQQHQQLPYASSTVGVVVHHQQQQQPKTFP

SEQ ID NO: 155306 - protein, 195 aa, Heterodera glycines
MAAATAVNCAGAVHQQLLLLDVYAAAEVTVFPTVVVAPLVAGATGAASAAVVQSSPQFRYRSGGTVTGTVVVDHINSENGGCCDDEHATREEKAEEGHRLGSRRRHFGKNGEKEANGQQDADFKDARGNPRHISIIVHDHICGESRVETGVHRIVQQNIGPPNFANGKSDIATRKNAKDWRTRGEWDNRPYVTVL

SEQ ID NO: 155307 - protein, 248 aa, Heterodera glycines
MPYDPRAREESCWHEDSVEDRFGRYPFRKYPNENPAKIMDSVLDAIGHTPMVGQNGKCEFFNAGGSVKDRIALRMLEIAEQSGRLRAGMTVIEPTSGNTGIGLALACAVKGYHCVIVMPERMSREKELTLKALGAKIVRTKDKARYDSEQSHIGMAFKLRKETPNSVVIKKANPNCIIVGVDPIGSILGGEDEHAGHKYNVEGIGYDFVPTVLDMEDIDKWEKVGDLDTFQMARKIHRMEGILSGGSS

SEQ ID NO: 155308 - protein, 154 aa, Heterodera glycines
MCWQQARDSNPERRFQYENRFSWTMDKQHHQQQQQQQPVETVQLVQQQHQQPQQQEKFVMPCFNLRASAGLPIGVPQMQQYHHHQQQQQQQFVAPSQFVLQHQRQAYCTNEHISPAHPIGIAMPSNNVQLPATGPTVAHSHYMLLPAPAAHHHT

SEQ ID NO: 155309 - protein, 217 aa, Heterodera glycines
MTSKVGREEIIQLFSNYGKLLGVTVFKGYAFVQFSYGTEADLSVSALNGYNWHGATLDVKLAMHGQQPTPGVPPPAQALKPIFGAFPIGAPTKSIVGKRNKNEQPQQEAAAKDLKRMKIDTATGGTGGGAAAPAGSVTESVPKNGANKAFAAQMDSAGIGTVVPPHANAEILDTLICGGCRFVTHSLAEFVEHRKRPCKLPSKIGQLGTPEIIEIEI

SEQ ID NO: 155310 - protein, 46 aa, Heterodera glycines
MTTNFVYMLKEHPKITKDKYQQIWELEENPIVIWHDGSVHFNSVRL

SEQ ID NO: 155311 - protein, 199 aa, Heterodera glycines
MDPGLDFSLIKIQTNHFWATWVFPGPGFSWVFVQETPGQAIFWQLGFSWDWISLDFCSRNPVQVDYPQQDDTDDSADDESDKEKYDFLSWQKKLRQPQRSFKLPSESKYNPFQRFDPFQRLGPFQRLGVYGSRKEMENYLDIFGNEPSSSVTAPLIGSIKNAEIDQQNSEDEKGSSTSTKRVNPFLKPDGSSYNKDKDE

SEQ ID NO: 155312 - protein, 309 aa, Heterodera glycines
MSDNRNEAEQKMAKAIFISADCWLCVYDLLPASQLGLGIAMISHRFDFYVDEHFKTRRWNLGSMKIKMKFEADGTKEMDVVNANLESFGIAQKPLPKRVVGFKAISLKYFNDNVITFLGRFRPIFAARPINLTIDTFKDMELILRNIWPMIATNICAIQLSTTFFRYLREFVPSFLDDCPSLRVVNAYSYGFFAEFPCDDSANASNGQTLAKWLFTPRSDNVPKAFANASSPVNFIAIIHFPSPFGFSVVPFDLINELTREQLTMKKMNDINRVLLIRCPIVRDESKWAKWEEEAIGWNFMDQWNRIDI

SEQ ID NO: 155313 - protein, 52 aa, Heterodera glycines
MGYYATEKDANWGGEGSSLNKFDWVVTSVFVQSLEPAEAYANDDGEQQKTEE

SEQ ID NO: 155314 - protein, 338 aa, Heterodera glycines
MASERKKAKITENICGQRQPHPKQPKWDFRSIAYFEQYPTESQMDESVPTQHSAADIRQTGMGQHSISTNADGGQEQKPLYEEITNHIHKMERFSVQRHVTEFVLNAQHEQPDEALRQALHQLVNRAVQNAEKQSGRSVSKLGIMVAGKGLTDPVVLPLRPPAQNNIDVVMAEMDKLGQSEGDEGGVNKKTLLLSEPVEIIVTCLTIPAGSAPRFFPHQNWGYNQTQIIHISNRDNYCLFHALAAGRAYHDYEIFRSSRSPPDNQAPLFAAIKNRTDFCKDYEAYNRLLSNTGRMESVVEDLMKNSGIIIGQDSYGIDHLLPVQQYWVIFVYNFNILC

SEQ ID NO: 155315 - protein, 750 aa, Heterodera glycines
MKEDVKMLIEACEKCQMRKIQPGQAKSAPSVPIEPSNSPFQRIHCDLMGPLKRTERGNLYIFLAIDSFSKWVMAKAIPDQKANTVSEIFVEIVVHQHSTPEIVVTDQGRQFTSGIFNDLAKIYGFEHVTTTPYHQQANGMAEGTMRIMANIISQMVNEKGNNWDEILPHAIFSYNVSIHSATKFSPFFIINLRQPKLPTDRLLKLPSPDELVSDISVYTRIQTEKAAKAWEIVRNEILKAQERNREENDRIRKASEREFEIGDLVLFKKEVLSHKFDQRWLGPMRCVGVEKEKKNVILQSIDGRAKLRKVHQEKVKHFNGPAILPLRQSDEPLNWEKYVDDPNLEQEEIESESGESDCEKTQENENAQPKNKMGLKVSKYGFESSDDENDWNIVAFVRENQNSEDDEGPEVIMDRNPEIEIMPIFTILEVLIEGSFTEVYTGWRDPVTISLISSIPENLVRENWEIYVNGNGSRFVMAWIFGESFEIFIVNEFDQIMLGIDAQIKENLEIGYGPNFVTLRDSEGMISDQDDLEEVNDFSRTDINVINYVKPFKNLLDFSNEIDEDEGNEELVENAGERERNMNNSLEILGRMENEQLNEKGRLNKLDKKQNKRYESHSFFKELDRMTSPAPLHFESLIEDEEESLRRLERRLQEQLNKVRQTLAQEQLEESHVKTREEKCLEQLKQQTVQSTVNQKGTAEKEEKSGELCKKRESEAKKAEPEAKDRKTDEEGLVQAKMEKEKNTVEDVCL

SEQ ID NO: 155316 - protein, 106 aa, Heterodera glycines
MKIRHKSYWKFVKMIKKLKTLCQRDIFQRKMNKSEGFWLRPSRTGSGQKFSGPDRIGIFKNDRIPDPVSHNPVNPVIRSIWIFPKIAGPDCRIQKNPVPDPVRLGL

SEQ ID NO: 155317 - protein, 29 aa, Heterodera glycines
MSSIWQIGLFKKTSKTTAICLECEANYKA

SEQ ID NO: 155318 - protein, 141 aa, Heterodera glycines
AKELHKVSALLRGQSGLMFTNAKANEVQRFFAEHTEAEFAQAGAVASADISLPAGPMPAELHLHGAMEPQLRKLGMPTRLENGAIELLEEFTVCKTGDQLSADQARILKQFGHRLAQFRVRLLARWSKKKGFEQIDGGAEE

SEQ ID NO: 155319 - protein, 97 aa, Heterodera glycines
MAIDRTLNCNNRATNCIRTPSKPWAIAIKTVWACPTCAAAVPWRRASAIPPALARPAAKCPPRRRRPPGQTQPRVFGVAEYEYTLYITPCLTLGPSE

SEQ ID NO: 155320 - protein, 136 aa, Heterodera glycines
MEKRLNPSALPTLMLSNFGGYSVETLCTLGKEFVLELMTRMISIVSTLKMDIKGDNKKDLDIVRIQLDYSRLIFLCLTEVRLRIDLKLAEGIGENQNLKDVRPSDERLLELLSEPNQPEENAKKANLAERFEQNRK

SEQ ID NO: 155321 - protein, 44 aa, Heterodera glycines
INNFPVFFPRVVANNVEQPANRAKRFTSFGSLSTIGGRVGCVVS

SEQ ID NO: 155322 - protein, 92 aa, Heterodera glycines; identical to SEQ ID NO: 125147

SEQ ID NO: 155323 - protein, 92 aa, Heterodera glycines; identical to SEQ ID NO: 125147

SEQ ID NO: 155324 - protein, 453 aa, Heterodera glycines
MADDDLEIKFKNLQGKVRDLEDKLMGHKIINVPSGIKMPKFDGNGDFYKFLREFNMYATAAGWHPPECVRLFPLFLEGEAKEIYQNIPGDEKKNWRNLTEKMADQTKRLDGPMWARRMLAKIKMGKETVTEFANKVRELVEQASPNPDYTNDARENESIHYFLSGLPTNLKRKLFFMEKPDTLVEAIAQTKRVQQVREELENDEKGDELRSQIAELKEQVNAIEINNKPNNEINGGRQFMNSNWRGNMRGRGNFRGLNRENHWRTNQNVRQNFANSRNIGNYSNNYPRNPNYMPLGGNQNWNNNMGNTRPGGFWNQRGNFPNNRGNFTNFRGNLRGQRNDQQRYRINMVGEESESKIQKSRSPTPALTFLTISTIFCLLFGGSMAQYQLCSERVAMTKVSLPNISDCKIPEQQKATERKVTLFLPVRMPKQFPIYNCYQKITKTCTGNFLFIW

SEQ ID NO: 155325 - protein, 118 aa, Heterodera glycines
MRIPSPLLAANYVLATVAICAAIFALGLWFFVLKSNQYNPTLAIVEDDDTTVEEFFDTDGMASKMVASRAENQLIRQMEQPIKLDEYGMAPMDDGTKMVSKKLFRVNDTHLAQSRFES

SEQ ID NO: 155326 - protein, 78 aa, Heterodera glycines
MQFYTIKIASTGSEVCSREDAPYFCQLVRQFGEQFYNESAKSITDKMRIGPFGPVAPIVPAKVNNGQQRKKRRMRLRN

SEQ ID NO: 155327 - protein, 78 aa, Heterodera glycines
FKNNLKSFSQSNGQFGFGCSPSPPRLFLCRGRGGGAGAEGNGHLVRETDEGVHISRFARGRREFVGAVGVTVLIGAKV

SEQ ID NO: 155328 - protein, 87 aa, Heterodera glycines
MADSVGSKLTRKLLFFLKHMLIEPETAAENVVFCVLHDLGTNQYRNADRANKLASSARKARNVDALVRLAHQMTVPFRARPSAAPAA

SEQ ID NO: 155329 - protein, 78 aa, Heterodera glycines; identical to SEQ ID NO: 155327

SEQ ID NO: 155330 - protein, 203 aa, Heterodera glycines
MRNDPFGQRYLRDECAVFDYNAWDDVDWPEEKEAEIHQTIQAQMADAVPESVSLSLLENPKDRWEAFFETHNNKFFMDRKWLSREFSELFVRPKVADGTLDFVLCIFVLSAVRPDRLRAAVSNLVALLRPGGMLLLKDYGRHDLTQLRFKSGRLIQHNLYRRGDDTLVYFFTTEEMDELFREAGLEKIQNFMDKRLVGKEQNA

SEQ ID NO: 155331 - protein, 29 aa, Heterodera glycines
MNFFHAEAAEILNKAAKRRISSQIHYESK

SEQ ID NO: 155332 - protein, 187 aa, Heterodera glycines
MAKIAKYGHKWQKCQNMDINFSKLSAKFLQIYWLKLHMRYISKFFDSTEPRIESPATLSGVTVPLEQDEEEQKKDDEGGDQTAEKKVEEAAAADEQPKEGAAEAAEAEKSATKEKTTEDTEETTETTEGSTTETSELPARDRLQHRALARWRSFVTWGPTHRLVPTIRTSLAQRGVLGLRTPLLKAQ

SEQ ID NO: 155333 - protein, 49 aa, Heterodera glycines
LQIYWLKLHMRYISKFFDSVRRSDKDGFRFAISRSTFGNWSRIFSAITC

SEQ ID NO: 155334 - protein, 276 aa, Heterodera glycines
MAFCSDKPEVSRKSRRYYALRSDHPAELECLLEANPLPTLVKWTKNGRTITEHTEKTIDRMKNWAIKGILLIEGNLLRSAVRIPFVNFRESAGIYKCEAENIIGVTEPNLEIHVVVAEAPKFTRSPAPKYIVKAGERVEIECEGFGEVPIRRVWSRKEDGETAPQCATNFRVQCEGQQRLAVYWMPGYPGGDHSQSFRIFYQQIRNDTPPITANEAWKVTGQRTDQSKLHVDHLELFGEYEFKLEASNRIGTTNCTIPGTHYSRKGRVSQTKKEGA

SEQ ID NO: 155335 - protein, 101 aa, Heterodera glycines
VSYHLLRRLLGVRTEAGKKAAKVSKLAKGEVLMVNIGSLSTGGRVIAVKGDAAKIALTDPICTESNQNIALSRRIEKHWRLIGWGTIRRGTTIAVPQPSIG

SEQ ID NO: 155336 - protein, 477 aa, Heterodera glycines
RVPKVLASDFPHRHFTLRRAAIDQLLKANERRFILSDDHQQSVLRVDVAQVAANRPIEDFYSASKCLHSNAFLFGIFDGHGGAACARHVCTRLFDYICCSALDKHRVVQIPVGEQIQWLGANAPHSLPQEKDDAHLRNVREYHRKLFRSGVSPATTVRSSFRSGVSPATTVRSSLQAAFLALDDDLSKGAMPDQSGRICRMSVNVAASGSCALVVHVRKNNLHVANVGDSSAVLGVCLPNGLIARQLTRPHTSENVNEIHRIRSAHPATENRTILRGDRDRLLGELYPLRAFGDVRYKWPLELQKVVLEPLGMPAPSNLLSPPYLTALPEVFYHQLTNNDSFLVRKSLGLWEFLDPDTVGLWEFLDPDTVINGILDHALGAQTLSDFRPDSQQSLGEILGSLETRKQGYASKPLDENSATHLIRSALGGCSGGTELQYARLEESLMLPPGMARNYRDDITIMVVHDITIMVVHFKTP

SEQ ID NO: 155337 - protein, 17 aa, Heterodera glycines
MSPWGRQKDKNQASSVT

SEQ ID NO: 155338 - protein, 90 aa, Heterodera glycines
MDPISKAKENLRGPEKYKVINAVRKKRKHLLQLNFDHIPIIMALFVSCMAAFEKLKVEQPDLVDRLTDCAGFSIGGICALVAAEVLSFSD

SEQ ID NO: 155339 - protein, 68 aa, Heterodera glycines
MQEKFKQNQFNLMASDRISINRTLPDYRIEKTPTIAGGLFAIDKKFFYEIGSYDQGMQVETSNYSLFV

SEQ ID NO: 155340 - protein, 317 aa, Heterodera glycines
MFPFNTPYNHLLNWSLVCFLIPWFYSYYNEQHRLSSMPVEQAMLKSWDTVISQPSIKFRKIMVGINCNVDVIVSGVSMVNKLNISSPNPIADKEVLNGFEDLYEAFVHFFTRGAPAERCMVNDAAFDRMVHTVEDKHLRAQHYIGGNAALMAQKIASSFPAATAIMQFRPDLIILSGIHGLEAQNQDVRLEKLRLIKRSLMQVNPLIPIHLQLGSMADDQQVHDILERIIPNVDSLAINEQELTYLSKVGDGPYKERYPIIAGTLHAHKAVEMLYWLLTTYGHDRTNPESKRYNQRLQRIHYYSLTYHIMVLFATTK

SEQ ID NO: 155341 - protein, 138 aa, Heterodera glycines
MGGGANGNGRKGKWQNENAKKRHKVRPLPQRTKTPPFDSEFQICHNSAATVPHLPLATVSAAVTVSPLMTPNAKLELCCQKQQLPSTCQQFCNFDTFTQEKLLIALLGSHCPSAQLSKAFDCATSKVDHSECCRQEGM

SEQ ID NO: 155342 - protein, 173 aa, Heterodera glycines
TPAPFGGDRCRETGHIGRDCPNSGGGGGRGGGTNSGRFTSVYLGGDSVCYNCNEPGHFSRECPQGRGGGGGGSRGKTSNGGGGDIVCYNCNESGGGGDIVCYNCNESGHFSRDCTQPRGGGGGGGGGGGGGSRGGGGGGSVCYNCNKGGGGGSVCYNCNKPGHFSRECPDGRR

SEQ ID NO: 155343 - protein, 81 aa, Heterodera glycines
MALLSGHRMSLLSGHRMSLSSRSPNCTLESVIEWNSRVGHRMTLLSGHRMSLLSGHRMSLSSRSPNCTLESVIEWNSRVGH

SEQ ID NO: 155344 - protein, 558 aa, Heterodera glycines
MNYSQIEKEGLALVFAVQKFHKYLFGRHFVLQTDHKPLLTIFDNKKGIKACTANRLQRWALILLAYDFEIEYQNTADFGQADALSRLIAKAPVPEDEFIVATITESSNLATVNAFTAQFPIVHEDIVNATKADNLLQEVKGFIMNQWPNKMDMSDDILQFHRRREALSFENGCIMYADRIVVPASLQTEVLKMLHRGHPGMKRMKSLARQHVYWPGIDHQIEEVVRKCEPCATEAKAPRKTELNSWPKAEGPWKRVHMDYAGPFFGKMYLIIVDAHSKWPEVFEMRSTGSAATIEQLRSLCARFGLPETLVTDNGTQFSSNEFKEFVKENGINHLFSAPYNPMSNGQAERFVDTFKRACRKLKKEGAQNVVNTFLTSYRTTPNDALPDSKSSAELFLLRKPRTTLDLLRAKPSAPLIRDEAMEKQFNRRFGAKPRKFCLGDKVFARHRQSQSWRAGIVSQCQGVIYEVKFPNGTSNRFHANQMTARHMDHQGNDELNIFNDAFGLPLAPPDGPNEAALPADQQAAPAQETDEANASRGHVRVDRPQRNRDPPQRYSPS

SEQ ID NO: 155345 - protein, 126 aa, Heterodera glycines
MVVRLPAAPIAVILVFAAFVIAVHADNDHYPAYPKGPSPHYPPRGKIPSWMHSQPLEPPGYNPSAQNDDKHEQQQNDQQPHQSHARPGRSAAAVGASAALDGRSVAASGRASAPALPIGLASAQKQ

SEQ ID NO: 155346 - protein, 93 aa, Heterodera glycines
RTFGERNYYDLRLSQYHDSVISIHGPGVKQELHRQVPQPKTGATVVTEELELLNRRFAELSSVILERKNIVNVLIQNWRRKQQVGDIIKHINR

SEQ ID NO: 155347 - protein, 157 aa, Heterodera glycines
MTVQSSILCKCSSHINRKVIAFLHRIQRLFATDITLELAIFFRQRQSWDVVTYGIWPALNAAGIVKIRFHNINNVTALQTHISPTILHDCANLRSIDVNHIYRPLTGQIGDEFNGADTPDDQALYEWLSTPRADGRPKLLKTYFSRSDVNWTAQMKT

SEQ ID NO: 155348 - protein, 165 aa, Heterodera glycines
MNRIGSALSKSVFIPRLFCHRFFASGPTDARQNVLVVIVDFNGEQQLLVNGKYSELLGRSPDFPFPGNVKPLAEMQQQQQQKFPFPLDALPTKQLGNGLGAVMPLHKIVEPSFVVSDDRTAIPRALRHHRMWQMGENDGRMTANTTTAKYEWTVAGVDGIRMLCE

SEQ ID NO: 155349 - protein, 53 aa, Heterodera glycines
MWFVGDVGKTIYFVVRQSPAQFWICSCLQARNPQVRETDLASLGIKPNYLMHI

SEQ ID NO: 155350 - protein, 55 aa, Heterodera glycines
MLSSSACCTLLAALISAAFFAAANPPTVKQCLCSEIQPCTQKYMNTWKACMEQCK

SEQ ID NO: 155351 - protein, 235 aa, Heterodera glycines
MKPKQQKLARIEWTSEEEEEDEEKPPSGDEAEAESSEEEEYAQKQQAKEVEVVHRDRDEEEEEEEPEETQFASHPSDEALLKTPEALPSKAGGPTRMSKSRSLQEMIRHYWSLGRNHGTTSATTTTNANGGIGTPNRNEFCYKHSILLMIQSLSQRRRSRHCAATAVGISAAAGSAMPRARSTDERLFAALASHTQQLVVSGENMVCIGVLFIPEISVPILKTLETDINPTTWPH

SEQ ID NO: 155352 - protein, 42 aa, Heterodera glycines
ARHFEKSLDLDSMLDLDLDFLDKNPGKSRLLETWIQAWTWIF

SEQ ID NO: 155353 - protein, 144 aa, Heterodera glycines
MGGGWVSQPASPMIPRDRPSSLLLPPPPLFSAGSCSPLPTTNHYHGNDDDDDDQQDAAAQQRRLRQQHAAAVRSEPNVCGSGKQQQSMLPFLRSLRQLKLFKRRSASELSLVLELLRNVGGGGDDSNGAMVNGCAEDANGLLIF

SEQ ID NO: 155354 - protein, 135 aa, Heterodera glycines
KAFESSEPKRTRDSAAIDPVDLKAKKGGHGRPKATPRGVADNAFESRLTDALDTANRHAKAAANAKYQTVQALQLHTKLMKEAVDSDVKQKGGERGGDSAKWDEVKRAKAEADRRAKLDTEKEGTARDAIKELEK

SEQ ID NO: 155355 - protein, 62 aa, Heterodera glycines
MVIRRVTTVIRRVTTVIRRGTMVIKRGTKVIRRGSTVIRRGTTVIKRGTKVITRGTTVIRRD

SEQ ID NO: 155356 - protein, 69 aa, Heterodera glycines
MRLKKLTDTKVIRRGRTVIRRGTTEMRRGTTVIRRGRTVIRRGTTEMRRGTTVIRRGATVIRRGTTVKK

SEQ ID NO: 155357 - protein, 29 aa, Heterodera glycines
MKNAGKKRLNNVEKVILHAEKESDFYFCL

SEQ ID NO: 155358 - protein, 126 aa, Heterodera glycines
MDMVRTMLKQMVQDGWETQEKKKHCPFDVQKPKPDGLRVRHARAVRQFAGAGGGGAHQRVGGGEAQERHSALSDAAAAGGGQTEAGRGGGARVLPNGHHFLSRRRLLHHFGRQCTPLQVTKSVITV

SEQ ID NO: 155359 - protein, 148 aa, Heterodera glycines
MEQFDSTSKDLFRNGSLMNTETAGTFQGETGRITLDSDGNRQPTFFVTMLNAANVPTVTMTVNISKGVLNLDRLYTSEASLWVNWGGVRPLTTPLCGYNGTQCGQNATVYILIGSALVLLLLFIALLGIGYALRSNCQSTDQTIIGKD

SEQ ID NO: 155360 - protein, 28 aa, Heterodera glycines
TVYALIIAQSLLIPQSPIIPQSTRCFEK

SEQ ID NO: 155361 - protein, 77 aa, Heterodera glycines
MLFYPISVSLILFTFFAGSAEAQNDAGVLGPVEETAGQIGRNLSCSAIHAAVRAIITAHPDWHQWFYEARHESFFVF

SEQ ID NO: 155362 - protein, 38 aa, Heterodera glycines
MRWSVQTFVCLLHGEFALCKAGGAAEVMLLTNEKTVFS

SEQ ID NO: 155363 - protein, 49 aa, Heterodera glycines
MPNLRSCGSMAPCKCNSAGIGPAGSEMSAEATAPAWANSASGQTPGNAE

SEQ ID NO: 155364 - protein, 50 aa, Heterodera glycines
MPSPFSWAGAIELLEAFTLCKTGDQLSADQARLLKQFGHRLAQFRVRLLA

SEQ ID NO: 155365 - protein, 77 aa, Heterodera glycines
MTVVTRSKHIHAPGVLSLAIDQSGSDAQTVFCCSSDETLGLWTCAGAGALEVDIRNTANNCRGVIAVFVSLLLLFAA

SEQ ID NO: 155366 - protein, 52 aa, Heterodera glycines; identical to SEQ ID NO: 139662

SEQ ID NO: 155367 - protein, 53 aa, Heterodera glycines
MPVKWSQSHFCIIRIKWFWPILGRRKKRFAENGSDCSAAVGDGGSNDDGPGME

SEQ ID NO: 155368 - protein, 38 aa, Heterodera glycines
MSTASTFGLQNFLAQTAFAAATATNKEHSSQKSEEEEE

SEQ ID NO: 155369 - protein, 80 aa, Heterodera glycines
MVLTRKKTEKFKEMRNSSTEANRKRKEWRRKRAQKGALKQTEAVPTAEGEGTSTQATESGPSTSTFDLRMSKKHYFRSEN

SEQ ID NO: 155370 - protein, 125 aa, Heterodera glycines
MTTPPGPIVRRMTLGSDHPLYTYAVQPVLMLNASKWQWPHSVRRMQRLLTKATTATNDDKTATETTTTTAPQQQSQDGAATTAATAQPSVTNTDSRMMFTIKKNKCTNGTHAFRRQLFFYDSFFL

SEQ ID NO: 155371 - protein, 112 aa, Heterodera glycines
MELFFALSLLRFFLANCSFILVNGAGSSNKSQGISNTSKAKSSSVKLADLFALDPLRVTLSDLIKEERSGKMGDRTEKKGTLAELIRMEKIKEDEFDQLMEEMRENQHLIEE

SEQ ID NO: 155372 - protein, 32 aa, Heterodera glycines
TVYALIIAQSLLIPQSPIIPHPSLRGVLKNNP

SEQ ID NO: 155373 - protein, 168 aa, Heterodera glycines
MPPNLGKTKNDNRAPKANNSFTSSNEKTPKKLPEDFEKLSQFLQEFINHQDKKSLKKTVQKPLNISKLTAEEARKDDEHREQRPKMEMPKETISLFANSTRGTIIGTVPLSVEIGNDRDEMEEQRKLTDEMSQVEVIKKVKEEGIDKVDEAEHGKVDFSIFNYLKRNF

SEQ ID NO: 155374 - protein, 80 aa, Heterodera glycines
MLCTKLSRHMIDVKQKLWEGVYRERDLFATQMMPSSAHVEDDYWMDSYIRSVSAKCVHIIKMDTQQKTWQSFGDLFIVQC

SEQ ID NO: 155375 - protein, 329 aa, Heterodera glycines
KKRNSEGSNLELAELKTVSTLGVGGFGRVNLVKHIDTERVYALKVLNKRHVKEMNQEHVLNERSILLSCHCDFIVRLHKTFRDSERLYMLMEYCPGGEVWTMLRNWGRFDEATARFYCAAALEAFDYLHRRMIIYRDLKPENMLLDIDGNPKLVDFGFAKKLPTEGSRAWTFCGTAEYVAPEVILNKGQDSAVDLWSLGIEYVAPEVILNKGQDSAVDLWSLGIFMFELLSGSPPFASTDPMHTYNSILRGVQLLAWPRYMGDNARNLICKFCRRDPTQRLGYARIEDVRQDIWFKNFDFASFRNHSMRPPIRPKVKTETDGFCYLRFA

SEQ ID NO: 155376 - protein, 195 aa, Heterodera glycines
SHWSGRCSLTSGPYAICMFNHPSIAERQINIGLFSQKGQQNSAQFDNPSAKKTKSYAEAVRFELADGGNSDEPMMEWEGQQNQREDSTHDDGTLSDNVHSLQPVAPPSLNLELICVQLFLQNKLETILACGMFSSRTKVVATTNQTLDKKKCFASLEIHWTDNSKERCVVKKYQFFMVTDNEQHQMNSAAFATSE

SEQ ID NO: 155377 - protein, 27 aa, Heterodera glycines
MTRASAGCALLSSSAALALLLPDHVFL

SEQ ID NO: 155378 - protein, 90 aa, Heterodera glycines
MAIQKLEQQLRMLSAENEQLRAQSARLSAMFGVVGQGNESEQQQQMQMQLHFLLNELIPKNEELLIIQVEKIHGEMVLNLKKGDHKSMFF

SEQ ID NO: 155379 - protein, 253 aa, Heterodera glycines
ACVLLATTLLNPPKTYGVPHFCQIMDYMLKNVPNVYIAVPNVYIATDFICAFPTETDADFAESVQLLSKYQFPSVFINQFYPRPGTPAARLKKINTIEARRRTAEMTRCFHAYRRYTDERIGEEHFVLICERASDGRHLVGHNKCYDECVSASKKSLLGHWAHVRIVSVSKFYMKSEIVSFPDFEESKSLIHLGEMSLFSCAQCIEVFAVVLRHYHHFKTRFFHCRHFLSDAANFNLARKGNPPRGRDVLLHR

SEQ ID NO: 155380 - protein, 169 aa, Heterodera glycines
MDIEDSIGRLPTEFDEAISADEKENGKRFFNVRIMRRNKMRESEEGEEMTTDGGGRGQRDECRADRSILPWDCTVFLRTWGCSHNNSDSEYMAGLLVQAARGDLRSFSLSSLVAQAHKALSVDGCRELWLTSEDLGAWGRDIGHTIVDLLRALVQVIPDGCMVSPFVLT

SEQ ID NO: 155381 - protein, 300 aa, Heterodera glycines
KNEELLIIQVEKIHGEIFEFKERGSNDCDDSFKQFDELEENPAHKYSKEAQKGFEMEDEEVTIREPSGTKESFKLPINMPPVKFSFCVSCGYRQAYEQFAQILREVSCGYRQAYEQFAQILREKYPGIDIHGENYPPGILRTVGAQVIGMVKIALIVCVVSVIGMVKIALIVCVVSGRSPFPTLRLETPTFFQWMLSNRLSAALMLFLFSNAIEGMMLQSTGAFEIYIESERIWSKLESGRVPSPPELFQAIDSHLAIRGGAIDSHLAIRGGGPGRFGSPSSFGIDGSFGSPSSFGIDGS

SEQ ID NO: 155382 - protein, 73 aa, Heterodera glycines
GPYEEQLQNMVGELPKTLDQAEATPEQQKRTARHSRQKRESSAEENERLATISDESFPAVSAFVQRWPIASQK

SEQ ID NO: 155383 - protein, 848 aa, Heterodera glycines
MVRQKQTFFNNNDLPTTSAALSHGKDGFQAPVQKSGQMNRRVQSSLNKKRLHENNDNELNFELSSKRKNTVEQIINLDEVSNDFFKNNDCEEIKNQKKIGESAIRKELSRMRMSDEKINIVQKYDRNRKMAQKNKHTSLYLIAGEFRVNDLSSYNLGEFDVKCIHCPAIHFQEENNKIKGTQEFYDCCNYGKNSNLEEMIQEYPMDLRVLFQPEIDQNNYTQIGELHNDFKKKLRYLNSSFSCASLGCMRFKFPDKNVPIFKIQGSIYHSYNSVARPNEEELPTNGQLYFIDTDEAINYRLSAYKDQLTKLSNDNTIALIAYIESYLRENYVYSQSYKMMKEVFEKAVEISKNTDCEIPDITMLFDVREGTDLRRYNITKSNEVCAIIFRDANDDIPAANIVVHLKGSKKIETIFPLSPMVEPMCYPIFYPLNYQGWHYNIKNLEGKKISLCDFTKYKLFFRREGKFLPHHYSNKLFQQWLVDQAARIEWSRLNYIKLHQKELCKGTYNEIDNFLYAKAAEIGAQVKKKVILPSTFSGGPRNLHESFMDAMAIVNEVGRPDLFLTFTCNPKDFDIQKCLLNSQQSYDRPDIVARVFHLKAIQFLKEIIDGKIFGKVAGFCYTIEFQKRGLPHIHMLLTLDPENKWKNTNDIDRFISAEIPNEEEDKDLYNLVSVLMIHGPCGPDFTDAVCWCNKKKKCSKKFPKQFREKTEINENGYPLYKRPNNGQTVIKKDWKTGKTKVISNQDVVPYNRYLLKRFKAHINVEKVADIKAVKYIYKYIFKGYDAATVRCVTTEKGSVKELIYDEAGSFLDARYLSPVEACWKIFKFPLQEKSHSVQRLPVHLENEQ

SEQ ID NO: 155384 - protein, 303 aa, Heterodera glycines
MKYIYADGTFASAPTLFSQLYVILAGRGGWVFPVLHCLLTCKSQSTYEKMFDMVRNRWPTFSPTNASMDFEQAMVNALRAKHPQCSINFCLFHLVRNMKSRLTDEQTHRFTTDAAFAQAAKMITSLAFVPLEDLTPALAALEDYLPGELEGVLDWFIINYVGRLRNNGTRTRPLFRPEEWSVYERTMNGSDRTNNFAEAYHRTLQHAIGHGHPPIWKFINILRERQKLIDVDFEHFLAGNAPPLKAKRYREADRRILSILKRYNQEKAQPQINDDHQYGQNQNNPNLFNEMLRGFPAIIKWNE

SEQ ID NO: 155385 - protein, 87 aa, Heterodera glycines
MSHPIWQIGLFKRIKEDSVDCLECKQKNSQSLALNHQCVASFVLLIDVPFRLSVNSNFIEMLRSLLADRTKSNGFCWIPFAYSQMVR

SEQ ID NO: 155386 - protein, 144 aa, Heterodera glycines
MEGVSTSNDLNVGESDDEENCEPVHFQRGKTIRGALCLWHQGFRFLKIRSDGSWFRCERRNCPATAKLEDEGLMTGVLGPKEHHHGLAPSRFHAESKRNQMKQLITENPKQQPSQLRAQIRTNVNDEVFELLGTNEALDQMTNR

SEQ ID NO: 155387 - protein, 214 aa, Heterodera glycines
MADQTDVFGVASSSIGKPIRVELGTGSRKTIISGNLLTTDPESGSIVLVEKRQQNKTSDQGKCSQRFILIPGSSVHSAKLVTINEGTIGTVKKDGQLEEGTKSNAELREKADGIESGDEATIESHGKRRANKTNRIHGLGFITEPCPKLEKPHVLVQNIDNGQTEGQMPSTVISLQSSGIKIYPPYGKNDIIGGGSIVVKELLHKLSTENVFDE

SEQ ID NO: 155388 - protein, 229 aa, Heterodera glycines
MLIDNVWVVQLFSIVALTSFSLYSTYLFPINYFDLLYRCAVHLGHWELIEPISQQNNAIPSQQQRFGIRQQNEQQQQNETYESFSESASVPYQDGTRLLFKGNLYIARSHAHYHTVSAEPDNKLHFRLFKIAKNPVALASYTCVFQCALIAFEFWLLLLTNDWQQIVTLVLLMFANYLLLAKMFKDRIIIDRIYNPSEEDLQLIKQLQEENERSRREIGKRKLERNQKR

SEQ ID NO: 155389 - protein, 104 aa, Heterodera glycines
MTKNMSNLVVPMVWLNESALIDSATRAQISRPVTALWGTFVVGIVFVCAGVVFLVTFVGVFIANKMTNRSCPNDSLNLIADPPTEGDPTEAQPLAAADQLTTDQ

SEQ ID NO: 155390 - protein, 205 aa, Heterodera glycines
VFISVSVDELLFNGYQDPLISEICSNVLFKMMCKLANIPDRIGLFYGQNNTDDGQYAVDTGLNDPDFLDRVYSFKGIEGKLSDDHWYGERARMINGTDAELFGPNLMDAPKLQIFIGQLCRSFDLEVRQPALTAGLPVFRYAQPDSALDIAVQRSQGFCNPNSPLFFNESVQPVGCAPSGLLDMSSCFPGSPPIFFSASHFRNAH

SEQ ID NO: 155391 - protein, 451 aa, Heterodera glycines
MRRKKWRSKLNIPEAMLLISGQHLQVVGAAVESGGGGSTSSAVGVKRRQTSTTKHRLREGDAFPKAEDSADTPPSLSQVASSSGDSSSGVSSSASIQYLGTRRPTAIKIEEEDSLTSAPSSSSSTSARALAAHIGNPSNGRAQRTVAAPSHPKKQQHQTEDKGHGETHKPQQTHQRKDNQRDKGQGIGGKLLFVDPSTSHHPSKASVVQQPLRDIEIAAAAGNGMFGGAILGGGFSVAGNSSSSAAAALYQQQQQQHLSGHGLGAVASNGGGAFLMKNGTGCGGNLRAAAHHHHNNTNSHHNFVQPTTTALLKPMGGGTQIGQTQQPGQSKQHQSGHHKSRQSTEGEYQLIKNEVLSSSYGNQYEVLEFLGKGTFGQVVKAWKKGTNEIVAIKILKKHPSYARQGQIEYDFLKQNKFTPLPLSSIRPIVQQVLTALLKLKQLELIHADLKP

SEQ ID NO: 155392 - protein, 886 aa, Heterodera glycines
MANKFVLVPQEIYRGLTSATDTGDINLDAVRHDLTRARAERTNPSAKNVSYNQQLRRYLQMRREVADKPARVELVKGLSVLMRRGGADDEAEVVDTPPRPPRPPPPPPLPGQHPPRRPPSPPGPGPSPPGSPPPRPQRPPRPPRAAAPPSWRDGRVEEWRKKRNDIQQRQPVVRDLLAEAAAAPLPESDEEDDYMLESDSLCQHHHNIMATCPFCLTTRTQLRRWTLHSTGLQPEESYIMAMTICIAKNTGSIILLPLLAHPRLVHSQKLKHLDLHRVLASRNNHNHCSILGHPHHNKLIANLKGSQSSIWIRDHPHHGKPETVPRHQQPSPAAPQVPPVPPPRRGTKRRHPPENGDESGELRIRKRVRQARRVRVYYSPEPGPSTSAQSDEQQQQQQRELFAIPSNQLTMAQRIELIYIKCNRYANPEKMEMINTTLDKLYNDPSSPAAFAGVSALWKEARKKLKQLRKKDVQHYLEGHRTYTLMRPRRVRFPRAKTVAAGFMTDVQVDLADFQALSRHNRGHRYLLVAVDVLSKRLFVVPLKNKKAEEMLDAFKELVKQMPMVPHRIFSDKGTEFKNKLLKEFFEEQEIEKHEPVHSSVKASVAERAIRNVKQRLYRYFAERETLNWVDVVQQIVDGINSTPSRVHGMRPIDVNFENAQKVWKRIYESPQKRKKPRFRKDEFVRMSREKGQFEKGYLPNYGDEILEIDEVLKAVRPVRYKLRDDRGEKFRGTFYDQELARVRKDADTSYRIEKVYRKRRKPDGTTEMLVKFIGYEKAPAKPLDSPPRYEKAPAKPLDSPPRHEQVPKKPLDSPPLYDESKLQKPQKSPEKPTTSTPTKPSTPPASTPPPLPKPATPAAVSKPSQPIAPATPTAKSVATPTPAKT

SEQ ID NO: 155393 - protein, 247 aa, Heterodera glycines
MLTFTNLSTEADEEVYCCDSSIIFGQKLDNSESTSDQQLMKEISQKLARMEMELRETEQLCIMEDLRIEEATSDDQFTAHLHNDRKAILERISELENRQKEKFSNVKQPNCWDANACHYEIEVTDAQKLTAAIQEWEGDRRIFRSVFAKHPLPYATTTDFHNIFYFEILIIRMRWTILFGFSVKQLMPLNEKIQDYTGTYVFSNCGEFWANGSRKGETAKFSRDDVVGIGVDFGTHQIFFTKNGQRL

SEQ ID NO: 155394 - protein, 87 aa, Heterodera glycines
MLGLGWESNPLVHPFHGQALPLSYRGTSALSFMDYQARFPRFNRPASFFFQSYRMILRMFNLDASRRSFEALKLSFYFVVMFIFMIV

SEQ ID NO: 155395 - protein, 856 aa, Heterodera glycines
MHGFDPRLPSEVTLGKVEDNFSDMAIYVQELTKRMEEVKTTVKENLRKCADQMIKQQKWTKEIPWREGMLVLKRKIDKRNKLEQNYDGPFRIVTVEKPNLTLKEMHADAMGFTVHMDQCNHGEEETEINAISMEMLTEFDDGNNLNKHGLLFLMEIILDGIVITALYPKDSFEFSSIPKSMVQSQWEIHKTREGDEYLTAWIFDENIQLFITEEREDLIIGNEIQAWLNQNGNVICENREATYWETYLDMDGLIYKNKITPEFWITYNEPEMCKEYESRSCSSSTIFLNAEECSNSNLQDKKINILPLSLIMANADSPILISDEELSDDEIHLRKLLLSEQQQQQLREQQFNPDRPYSSTVHSLPTNQVQIVTPAQGQQLKRDQQLALINQKIKEMEAAKRQIEEEETVEEEARIVREKAWKAEEQKKRTKRELDEKMKKREEEKKAEERAKKDKEEVKAAFKKIGMSTEVGGKEDGNKQKKNKSKKNQKGKDTESGNLEAEKLNDGHREAKKDAEEKATREAEAKKDAEEKATREAEAKKDAEEKATREAEAKKDAEEKATREAEAKKDAEEKATREAEAKKDAEEKATREAEAKKDAEEKANREAEAKKDAEEKATREAEAKKDAEEKANREAEAKKDAEEKANREAEEKRDAEERAKREEEEKEAAAETKRDAEATAKIHSEKEKKGKREGNVSINVEGAKKKIMETISEKWIPKIVGSIFDPRGEELGDDWTIKKMPRKPGKRGPTERGKKRRANEGNTLKSAVISANETRAIPPEGMGWKRHVPCFQAAPPGPGFKRRHHDVSPIRRMDSTGQGTSAASGTEEKIVKIRKLLLQAADLLGEMADELFPYKK

SEQ ID NO: 155396 - protein, 35 aa, Heterodera glycines
TGQMRGQFQLEVLPKVGHAVHEDSPELVAKIFVTL

SEQ ID NO: 155397 - protein, 306 aa, Heterodera glycines
TLKIDNVTTFASYFFTASSLLYINKSFSRPYWSQGNGATDRTFITFHNILSKYINPKEPNFDEFLDAATFCYNTSIHESTGESPFFLVFGRDPIFSIDQILDPSVHLPLPHNDLAEFKTLLVLSLRKAWNSAADSIKEAQNKSKVQYDKKFRNPNISIGDRVLLRNYTGKPGTSQKFHNPWKGVFRVINIEELHVTIVSCSSPQSNPFKVHINQLKKLFEISGPPAEATEIPNTIGFAEATEIPNTIGFNHTPDISPKTLPPDTQKSNVPQILPTSIDKEQAVFSQRDLLHKNKYNLRSRPRSNSF

SEQ ID NO: 155398 - protein, 394 aa, Heterodera glycines
KKDNCPLLAELHGMEVLLVWECQFRRTLRTNTRLRKLYKERSVDVGPARLAKHALFGGHVEPFWLLHKCAPDEEIVYIDVSLYPFCMNARPFPIGTVSLYPFCMNARPFPIGTPHVWTGEQLGGQPFRGLLFCRVLPPTGWFEPLLPYRTQADGRLIFGLCARAELRQQRICHHTERERGWTAAYTHVELNCALSIAYRVLSIHEVWHYADNGNGLFTYVTTLLRLKAEASGWPAGCDTEAARAEHIRQFAEQEGIHLRPDNIGHNPGLRQLAKDLLNSLWGKMAERSERDEVVYTNSARDFHELLMRPEQEVVSFTHLNDQLDRCVVRKREPFARTPEHNNLAVACFVTSQARLCLYDWLEEVRRVRGRSLYCDTDSVLYVNSGAEGVREGNA

SEQ ID NO: 155399 - protein, 77 aa, Heterodera glycines
KELVSEFLNKFQTLAAQTADVGAFMGRISLEAYALLKGCYDNVHVPSAHLWQQIDFFWDPNVDKNADDVRRFKQMRW

SEQ ID NO: 155400 - protein, 89 aa, Heterodera glycines
MARRNSKTQLIAFFECFRIIPRMFNLVEKEKSYGRKIRSTTFRLTTFCPTPLFSYSQRLHNRRVAQLLTIFFDELASGGKIKKFDYIFN

SEQ ID NO: 155401 - protein, 54 aa, Heterodera glycines
TFLVLFESIRKMLLACKFSKIFIYAQKNLSKKSSNYWVFEFLLAITFLKLNENF

SEQ ID NO: 155402 - protein, 87 aa, Heterodera glycines
MAFNGMFANITFDGSQSRMDWYLNKVKRRVTDIIDHVQIYVSTELQFIVTLTQLDFLKIQYPVSNGSKRRGKIPVKVFMKIKKERNF

SEQ ID NO: 155403 - protein, 23 aa, Heterodera glycines
MDYGDEQKRNKMNKMVTNRMKGK

SEQ ID NO: 155404 - protein, 137 aa, Heterodera glycines
MQCFLLLFAAPIVLFSLFVTTNGGQMCFSSWTSVQSGRSPAQLSVPLAHGGMEVMLCFHGQPTTTWEQQAWMMPSSSSSAHQMPFQFGGFSADATQPKAGQSVQNVAAPQMVPSAAATGVGGSTLEQQPIVVGRVSH

SEQ ID NO: 155405 - protein, 44 aa, Heterodera glycines
MNRYQTVFAYSQVLAVESILTDLAINQCARVNQQHHNTQWRCVW

SEQ ID NO: 155406 - protein, 494 aa, Heterodera glycines
KVDLNFQYKRNIKHKFKKDGNFFEINKNPIKKYYFQNFIIFKVIFKSSFPICGWITLAKLSIVFPLFKKGDKCNPENYRPISLTCSLCRVMERILSQNIYNFLLKNNKISEYQFGFVRNRSTTSQLITVVAIINGKNVDCIYIDFQKAFDSVPHNLLLKIGKIGIKGKLLLWIKGFLSNRIFRVKIGDSLSSSKKVTSGVPQGSVLGPLLFLIYINDLPDALPSGVKIKYADDVKIYICYKARSDTENMHKALHNLFEWANKWQIKVSIQKTFVLYLGSKNPKETYKFDGNTINAVDTIRDLGVNIDNKLQFSGHVNQITRNAYLRMRSLFRIIKSKSSKIWITLYKTYIRPLLEYAPEVWNPSLQKNIKQIEKCQKYFTKRVFFKCSLPPIPYLNRLEYFQLPTLENRRKLFDICSWHKIVYGRTDLKLFSIFNPSTRFHPLLQILKITGQKIHSLCWEGNKLWNQLDKELIKTNSLNQFKTKLRFTRVIKPE

SEQ ID NO: 155407 - protein, 70 aa, Heterodera glycines
MKTLAGVELMTKVLFMPVYNKYCTYNLYNIIEFFHLLNELVADPNYWTVHYVQRLSVPMQSVAFPLDNKN

SEQ ID NO: 155408 - protein, 402 aa, Heterodera glycines
MSREKGQFEKGYLPNYGDEILEIDEVLKAVRPIRYKLRDEHGSWVCGLHSISYPYSWSTIGTLDEQWIDIHFTDRRATDEDRQRVIRVPVPKASHSRVEQLREFLSVTLRNHSGAKLQPLPREVEENRNRTTTKPLGSPPPLKRQKRDTVFDASRKQIAPPPLHNENDDDEEIIEESPPHHEEEDDEGPIEESPPHYDEEQNDTVTAPVTPKVPVPAPVTSPAKPTTVKTPATPSVTTPAPPTTAKLPVTVPSPTTKPITPTPPPTTTTPTSTTKSTTGPLPTTTTPTPTTKSTTSPPPTTTVPPAITKPSTGPPPTTTVPPPITKPSTGPPSTEKPITTVPPPPQTTTTTSTPAISAVPSPSVKPTIPVPPAQLKSSGLSPKSKTPISTVKPATSSVRFPL

SEQ ID NO: 155409 - protein, 480 aa, Heterodera glycines
FETRPSSHGGAFAFRYDVEMVQLTRNKSLTSGGGDDGKNGLLRGVCFELIKFVHDSTQGFGQAAQFVYDNRKILFTNKRIEQFALEIDTEKVQGIVRDFLRGSPVKIEVRPCQTDKHELDLNGIVSSISHHPDQQSDRSLRTFLEMLSSQPFLNAGTHDIIGAGRLFKRQICKELEDGIVTREGIAKGVRVIDNNGEPKAALVADGLLCILLVECLSFSLVKTCAFFASRNLEEIVMEMVQKRRFNINNASQMDRFWSHFNHLFRGVSGYLTYAPSRVIVIDAISQRKIFDVDGRSMSMVDFFRTKKNIPINGQLPAVRQQQDRETLFPMSCVIILPGQRVTIDKMSEFISRELLSANTQPPARRYAAIEMTMKQIGATSSGFLANFGVRLSAESTVKIGVHQMPKINPAVRFLEPSDILSQWVVAFPGHLEESTVRNFVTQMIRMGQQKGMVLPQPTFVRIEIDHVLMASAVVAFFKYI

SEQ ID NO: 155410 - protein, 57 aa, Heterodera glycines
MAEDNAQNVLVLLCAYLLFEYYYSFSSLLPWILFCRGRTDCSRECAHVEVTRQWPIG

SEQ ID NO: 155411 - protein, 195 aa, Heterodera glycines
MKNNKVMFREAIEAVKRVDKDKLERVWQYFRPFAIIRDQMLLSKTDLQEIDRYIEGADMTMTPYRLELRKQIRQLESSSVAPARPGDTNWDPQDEASDSSSCPQSEDLTDSEKLCAFLGIKLHIVNFVKQYWNDVFINFVDNCSFGRTIVPDVGCNKKIKFNLLRKVAFEELGADALATGHFARTSQGGAFDMSL

SEQ ID NO: 155412 - protein, 242 aa, Heterodera glycines
MMKWARRQEKINMSFKLNSNEVAAESCESQDSLLTVARRNLCVNSADERNVNEKSEAAKRLWDDDDEVEAAPPPDAVLPGRMRGLTNRQARVRIARAELSGGLAAVDDQQQQPTPIGDGAGGQQQKQHTDTDLTSSFDQEKFVDRNKFSCLLCRRQFANSETLDKHIQLSNLHKASETQSELNNMCKELALVHPAQRWTRIYHGKCGIDKRPFSGSETWKKLLDKTDGTRKQIYPHILDGRS

SEQ ID NO: 155413 - protein, 162 aa, Heterodera glycines
MDLVLIVQQYINEMVRLAGPGMKAILMDKETTSCVSCAYAQSEMTSCVSCAYAQSEMMQKEIYLFERLDSVVIREPIKFLKCVVFVRPTQENVQLLSEELQSPKKFLKCVVFVRPTQENVQLLSEELQSPKYSQYYIYFSNRIPKADVKILPESDEQETVRE

SEQ ID NO: 155414 - protein, 66 aa, Heterodera glycines
RTAVRVVFVRPFPYGICSDRDKWRYGSRSQIRTTCSLSVTVYKNSIQRDMLIKNGKYRSVSKLKII

SEQ ID NO: 155415 - protein, 155 aa, Heterodera glycines
YTTNFPHSRQRTVYVGGFGGEVNEKILTLAFIPFGDIVGVSIPLDNETGKHRGFGGVSIPLDNETGKHRGFGFVEFELPRDAAAAIDNMNDTEIYGKTFVEFELPRDAAAAIDNMNDTEIYGKTIRVNFARPPKVNERSQRPIWADDEWLKLYGQ

SEQ ID NO: 155416 - protein, 41 aa, Heterodera glycines
MKSTGGNLEPMPFVRKWGSAVDGENGAEASQPVISDERFEN

SEQ ID NO: 155417 - protein, 222 aa, Heterodera glycines
QQTTYHLMFDTCCEKCEPSEESVKFWSEFIEYMMGIIEDDKNIYTPVLSQFPQELNVGQGQLSAATLWNLYKTDLKDALLEHAKTKHAKTKRCKTPDYMNLYFRVKSFYSKNLYFRVKSFYSKYVAELPQYKESIPEFPEWFVPFVMDWLNENDEHSMDILRNAYNRDKVDNFPQTSEHTKFSNSVVDVFTQLNEALKVLKQVDFKHLNSLAILIFSAAKIY

SEQ ID NO: 155418 - protein, 214 aa, Heterodera glycines
MYVCVFKTLNAYQITDKKLHLILRDDESAMKLATNLLGYNSMQCFAHKIQLAVGDGLKLLGGFFDVKERMKKAIRRIIKSRIIADDFKALQIENDLPLKTLQKDVEVRWNSTYLMVSRFLENKSAIEMMPAQDAKFPCFTSTEWTMMRTLCKILQPIYRATMHIQNRKSGISGVLPLYKVLKQNLTHWTAVDDFPEIRKRIAESLEERMKGLLY

SEQ ID NO: 155419 - protein, 187 aa, Heterodera glycines
MVSKVCFWVKLKMYVCVFKTLNAYQITDKKLHLILRDDESAMKLATNLLGYNSMQCFAHKIQLAVGDGLKLLGGFFDVKERMKKAIRRIIKSRIIADDFKALQIENDLPLKTLQKDVEVRWNSTYLMVSRFLENKSAIEMMPAQDAKFPCFTSTEWTMMRTLCKILQPIYRATMHIQNRKSGISGVL

SEQ ID NO: 155420 - protein, 130 aa, Heterodera glycines
MSNLLKRKMADGQSEENAGRIETVDDQQQQQQKEFCEKCAKMETELRETKQLCKMKDLENRALKSELEKQNLMAERNALQAKIDMMEKEKEKQQNEQQGKYVSAGQMKPILDKINELEEKQNEQSKGEKN

SEQ ID NO: 155421 - protein, 133 aa, Heterodera glycines
MRIYFRIAIGLATEQMPLNEMVGTYNGTYAYGTGLFDCANFWGHSGNRRFMSGDLPSFSAGDVVGCGVNLDTRQIIYTKNGHRLDTSGLFVRTVCNLFPCVSLPFRHAEIVAYFGPNFKYNLANELANDYDRD

SEQ ID NO: 155422 - protein, 380 aa, Heterodera glycines
MAESKSELGDELWTGMEGPPVKEMKLETRAEEEEDEFDEQFLNEPKTIPMDTETLTAADSLRSHFGSLTKGNHAWEPPTSSASILKNPEQQQPSLLSDITEVFSAQQNVLGPSTSIGKITEMTHNVPFQFNAKVTVKELISQSFGETKGEELAKIVQAKGRPITMAKDRSTEQSNKSGETQRQDNLRRKSGLANALLPSPFTDGFAGSTNNRLTSHRIASPACASTSNSLSEPPFEENPQKNYEMVLTSTPSTQSLPCYESLSEESDTETGGEEVTTKKSSSVLCSASVAAAPLNFFSLLDLMDENEQQSQRRMEDDATDATVDTAPSFSTVSPLQNQQQCLSFFATAGQWAEANKRDKNGTERGEAAECVYEPLSEDET

SEQ ID NO: 155423 - protein, 149 aa, Heterodera glycines
MSLALCAAPFFLFALSSASPPFLATFNGCPQLIDGQLLDFVNSGGIRLTKSKTGNCDRLISCDLIGAPVEVSERRKRDETMPIDGTTVQLTKVEWYVNGRKIQRTNEGTEREETAENAQSENERTERSAIGVGEASRTNFEGKGSNLEE

SEQ ID NO: 155424 - protein, 66 aa, Heterodera glycines
MSVPSKNKQFPKNIDDDDDDVDTDPSPEEVEKWTPEQVIEWEKRIFGKMPPEEELWQEIIDSGDKN

SEQ ID NO: 155425 - protein, 111 aa, Heterodera glycines
MAYGRLGRPYNVNVAAHFYVRHRIKLRHPFLHCVIERFPEGQEDRFYPLELCKIEEVDESKWLGQIFTEIDNNNISATNSTNFADTQTSNDDSKSVDGRDEYSQNDCYSLW

SEQ ID NO: 155426 - protein, 351 aa, Heterodera glycines
MRHFRTNHLKPGHLALVPEKGYDSCGDNQSDLAMSFMQWYAEKYAVRIQNAFSAEGEKSCVTDYPVGHPTLHVPCEDVDWRRPEDNPYPLAILKVFVIPPRKIDVPVLPVKVDDRLCFPLCMSCCKKYPNGGVRETYNCQHTDKQRGWISTCTSLELNAALEEGYRVTMLLRVLEYNKSDNQLFRPYMSEFMVQKLHASGFDEEIRGNFEAEERFIKECRENFDIKIDRAKMIPNKGKRALAKLAVNNLWGRFSLRNYGLSQTFITDDPSELGNYLDNRRIEVTGLDMLTPERILISYNQKKDWVQEHPCSNVVISLFTTSAARLHLLKAMQKVARTSGCTILYTDTDSLI

SEQ ID NO: 155427 - protein, 101 aa, Heterodera glycines
MYGRKTKGELIPQLYTMYGRKTKGELIPQLYTMYGRKKKGELIPQLYTMYGRKTKGELIPQLYTMYGRKKKGELIPQLYTMYGRKRRKKGRGSAKTDPYCS

SEQ ID NO: 155428 - protein, 94 aa, Heterodera glycines
RYLSTHICLLIHCCQSCQSMMNNHPVAPLSWRRIVEHLQYIKVHVLEASFARAWVHEVGHPGCHCPYYENAQIVEASAVGGRGAQPIDNAFPAK

SEQ ID NO: 155429 - protein, 533 aa, Heterodera glycines
FSVPPSSSGSLRASRSNPDISANSVHYPFASCSSAVPSVASHRHSSFSTNCGGGAAGTNAAFGGIVQPLQMLKVYRVDQNFRYLPVLAETSAKQLMLMALQEFGLPVGENDGWWALYECSVSRDGVTKQGRLPDSAANLAERVGLNARLYLRDMRRPDESNLLPDELIPELVKQTRLTLYTLNAQCIAAQLTLQMMDPSRNMSRYRQQLAQFAQDPPVIPIYPVLRKDLIFAHEANPTFCNDAQQLVNFEKLRMIAQIVRNIQRYSSVPYDQSVLIGGANVRNLRGNSHKIRIGWQRLCRGLFGLLHFFIGQLLDPGTMRKSGGNVAALGHGSGRFASSSGGAVSRKKLHERTMMQIRVKAYLQNIPIIDSEIDLDRISLDCEPPLSSASGASSSSQQQFHHSNSNVPSRRRLPSPSPSSLSSQSNQSNIVHSHERHRGMINLPKFGVESPQAISKMLSLVQNSKIKSRTQGYGRAIHSSKDELPPSGQLKGMALISRKDLPWPAAERTTTTKGSFCDRWSSHNQQNEEQKTQ

SEQ ID NO: 155430 - protein, 1281 aa, Heterodera glycines
MTTCLSEGQAPPTCEDPQAELRSCVHKAVEEAIQDAQNTLGGANKVGVIISSELLDQGDIILPITPITLNVVDAVFNQFCKVEQSKSKHVNLYGAPFVVTVTVLNTVGLPRRRTTKGSAPPIHSSQSHIFKINNNDNYCLFYALELMRYYSLYKRGIITRDNWRWINNNQTTVLRQKAQQLLREAGIPTTETEYDAEVYIHQVQGLWNVKYPGEYKIFIFNDYQMRPITKSDITDYQFPILLYHNNNHFDGIKTLSKFFNKRYYCISCESAYSHKFEHSSKCSSLCHGCREVGVDYPCEAQQGYFKKCLHCNNYFYNNDCYERHLHKDLCTKFQRCEDCGVIYNVKVHGNVGHQCGERFCRLCKQFHLKEEDGENPCKSCFIQPLKPHKLKPYRIIAYDFEATQDKKVGNKFEHEVNFAAATVICTECINNDNWNKSLQGNPCKICGPYRTITFSPFDYTETTVDQKIVTQQPLSEFVQWLLFDHNKKFPTVAFAHFGGRYDMTMIIKEVLAQGIHNPDIIKQGNRLYELKIKDNEHCPLTILHDSYNLMPIKLSGLIKSFGLHIKDKQHFPHMFNKSSNYDNILSHLPPREEYCPDQMKIPDQQKFDKWYNNNYNQPFNLKEKLPEYCCNDVQILTHALVELRREFKQLTQRNGKHGGIDILWQAMTIASACVKNFALNHLKPNSLAIVPEKGYTPQQNQSALAIKYLDWYSHINNVNIQTAHSRYGEYVFKREGQVYQVDGYIKGTNGKRDKIIEVNGCLWHGCEECFEDLDDETKMPNGKTLGQLREREVRKHEILSRYVDLEVIWEHEINEQLKKDKQMREFFDNWKDHSPIKIRDAFHGGRTGPMKLLHTAKPGQKISYKDFTSLYPWTNFSTDYPLGHPKIISFRLNEQTVNWRAPSDNPYKGLLKVLLLPPNRNINVTVMPIKFDERLLFPLCEKCAKHITNEHPNGLKDDNYSCPHFNPNDRAFVSTCTHLELNAALEAGYTVRKLFHVLQYDQWSDNIFKSYVSEMMALKIHATGFPSWCSSEEEKKEYIEENRHRFGILLNNEKMKAEPGKRYIAKLCLNSLWGRFSMRNLLSKAIINNDESLIRQYTDDKKIELVDLEMIDDDNDVFMLTYKPKEEFVDENKYSNVVISLFTTSAARLYLYEALKKVADTPDCEILYFDTDSVIYVHPEENDPLPTGKGHLGELTDENPDHNILEFISAGCKNYGLKLQRKDTGEIEHDLKIRGFTLDAQTVQKIHYDTVKDQILRYGSEDPPDPIIVNYLHFIRPNPNP

SEQ ID NO: 155431 - protein, 189 aa, Heterodera glycines
VVSDGIGGYSAEKHQFSLIEKKHSSADLICVKWLMILAVLRALPPVLARVVAVVRHAVASSVGAARVPPFHVLHHLAKNDCTSAIWTSRSVVGTLKTFLESMDGSATVGWPGMVRLIVADRRLLRDVITTRRTVTDAVVVRVLARPVVGARPVARAVAHRRAAVVRLAVRRVASARRRRRENAETGRRR

SEQ ID NO: 155432 - protein, 27 aa, Heterodera glycines
MAQPNEFRIQKYKARPTIQISELKHYF

SEQ ID NO: 155433 - protein, 196 aa, Heterodera glycines
MLSFIYTGDLAKLNGYNAMAVLYAAKKYNIPGLVDASLQVPVSSLRNVFLAYAQAAENRRAMLGPALYEIRFPLISTEEFTKKIVPSDVLSKDEVIAVYQFHSLPNYRWISDGLFPMQFPTNRRISNRKTGTILMDIENVSEFAREDVESSRYSEKMTINGLSWKIMAQIKTKNGSTDNNEKWLGIYLLGVAREAQ

SEQ ID NO: 155434 - protein, 32 aa, Heterodera glycines
MAMSKHQNGTLPQILQKCASKSVYVLTKAEED

SEQ ID NO: 155435 - protein, 125 aa, Heterodera glycines
MPTLQAEQHPPPLSPQTNNVQQQQPTVPSPLNERQQSVQPTQGEHPQIRANATLQPNVVQAQQQQQQSHQFLGLDHDNDDQLLNQIFLDLTTSAEMQPIALDNNNNNNNNNNNMVVNDFWFCLFV

SEQ ID NO: 155436 - protein, 19 aa, Heterodera glycines
MPMPMPDVAEEEEEEPDAK

SEQ ID NO: 155437 - protein, 46 aa, Heterodera glycines
KRGYDYIRFGRRSSAVAAIPKLAKQQRKKSADTSGARTAYDYIRFG

SEQ ID NO: 155438 - protein, 91 aa, Heterodera glycines
MHVTEFLPQSPRRDNILMALELLAKLQSFAVADLLSADQIADFRATADQFRVQMLEHFRRHCSTSKFHHLVHHAPEFAENHGFWGLLSEHQ

SEQ ID NO: 155439 - protein, 50 aa, Heterodera glycines; identical to SEQ ID NO: 131515

SEQ ID NO: 155440 - protein, 266 aa, Heterodera glycines
MDAFGLLDDLKRKISNSAINLCENINSSATFTTEAADKFIRELKATFSTTFEEGLGLCTKELAHLQLKDGATPIYRKARPMPHHSKEIVEMELDRLEQLGIIRKAEHLTWAAPILVVKKGDGSARLCIDYSTGLNDALLDFQHPLPIPDDIFATLNGGKFFSQIDLKDAYFQIQLDDDSKKICGISTHKGNYFMERLPFGVKSAPGIFQSIMDKMLAGLNFATAYLDDIIVASRTFDEHTDHLKEVFDRLQSFGFRVKISKCAFFQ

SEQ ID NO: 155441 - protein, 550 aa, Heterodera glycines
MVTKNINATSLLKVGVFVNKKKTKFVADSGTEVNIIDEDAYDKIGRPKIQECEEKGKLFDGTKVAFIGKGVATFQFGDIAIDQEFYVAKRGSLNLLSISTMDAFGLLDDLKRKISNSAINLCANINSSATFTTEAADKFIRELKATFSTTFEEGLGLCTKELAHLQLKDGATPIYRKARPMPHHSKEIVEMELDRLEQLGIIRKAEHLTWAAPILVVKKGDGSARLCIDYSTGLNDALLDFQHPLPIPDDIFATLNGGKLFSQIDLKDAYFQIQLDDDSKKICGISTHKGNYLMERLPFGVKSAPGIFQSIMDKMLAGLNFATAYLDDIIVASRTFNEHTDHLKEVLERLQSFGYRVKISKCAFFQEEIKYLGLIIDKNGRRPDPSKIQAIVDMPAPTNISSLRSFLGMVNHYQQFVRNMRFIRKPLDDLLKHEAKWNWCDNCRKSFQKLKNILTSDLLLTHYDPKLEIIVSADASELGIGAVISHRFANGTIKAIAHASKSFAPAEKNYSQIEKEGLALIFAVQKFHKIIYGRKFILQIDHKPFSPFRK

SEQ ID NO: 155442 - protein, 370 aa, Heterodera glycines
MKRMKQLARQYIFWPKLDKEIEDYVQNCEPCQLAAKAPIKTDLHSWPKPTGPWQRIHIDFAGPFFGKTFLIVVDSFSKYPEVFEMANSTASATIEKLRYLFTRHGIPETIVSDIGTQFSSSEFAKFVAANGITHLFSAPYNPMSNGQVERFVDTFKRAFRKLKGEGKPNKEIIDTFLITYRTTPNDSLPDLKCPAELLLGRRPRTTIDLLRPPPHQPFEIDLEMERQFNKKFGTKNRRFILNEKVFARHRSSQHWKTGVISGTSGVIFEVKFPDGSFGRFHANQLRNRKTADNFDQSLAILNEAFELPLPPALPNQPPDAENANLGPNQLENEVAEPIQDNLAAPIEDVPIQRRYPQRQRRKPNRFSPGP

SEQ ID NO: 155443 - protein, 150 aa, Heterodera glycines
MPYKGEKEFMFVLLPKKRFGLTEVLAQLDGKRLVKLIKKRDKCKVKVQLPKFTLKATHELNEPLTNMGMATAFTDSANFEGISNNKPLLISKVVQKAVIEVNEEGTVAAAVTEEEVECGSSKEERFVANHPFCAFLIRDDTVLFSAIFRK

SEQ ID NO: 155444 - protein, 385 aa, Heterodera glycines
MVNHYQQFVRNMRFIRKPLDDLLKHEAKWNWCDNCRKSFQKLKNILTSDLLLTHYDPKLEIIVAADASELGIGAVISHRFANGTIKAIAHASKSLAPAEKNYSQIEKEGLALIFAVQKFHKMIYAQNSPTFSQGPSRNETDETTRPTIHIWPKLDKEIEEFVQNCEPCQLAAKAPIKTDLHSWPKPTGPWQRIHIDFAGPFFGKIFFIVVDSFSKYPEVFEMTNSSATATIEKLRYLFTRHGIPETIVSDNGTQFSSSEFAKFVAANGITHFFSAPYNPMSNGQVERFVDTFKRAFRKLKGEGKPNKEIIDTFLITYRTTPNTTIDLLRPPPHQPFEIDLEMERQFNKKFGTKNRRFILNEKVFARHRSSQHWKTDNFFERSITL

SEQ ID NO: 155445 - protein, 106 aa, Heterodera glycines
MALTIEQLLQEISQQNQNPSLSGIDVFELCDETTNIEDWLQQFCFALDCSAPNLKDEQKVKLLMTKLSKAAFSEYKKSCLPKDVTDSNFAKTEQQLKALFAKPQSV

SEQ ID NO: 155446 - protein, 16 aa, Heterodera glycines
MQVAGMQYPIKADLGE

SEQ ID NO: 155447 - protein, 77 aa, Heterodera glycines
MIPLFLRISQAVNPMKGAGKSDTGKSDTGKSDTGKSDTSGKSDTAGKSDTSGKSDTSGKSDTAGKSDTRKSDTDFNF

SEQ ID NO: 155448 - protein, 113 aa, Heterodera glycines
MNESTCEKPVNSSKSSATIESGSERKPSGTGKATESVSTKKKGREVKRGTDDQITDQILEGVETDQIRTEQGIITDKLKKAKQQGQNKAIEGTFSFASLKYHNPNEGKRFSGE

SEQ ID NO: 155449 - protein, 117 aa, Heterodera glycines
MDFCASKVWNCFEKISQSTNVQCNLCQKVLNRSDTSTKGMWSHLKSMHLKEYKELQLQEPKRSKNKTIDSFLLKKHDEQKEVEEMLTNFMVQQNCAFSVFENSILKLTQRAYPNFEV

SEQ ID NO: 155450 - protein, 251 aa, Heterodera glycines
MNSFSLLTVFLSLVINCSPIRPLSSDVGIWKTCNGKNGIIMVENGCTKLLLCYQSEMAKNKKIGKRFGVGKGNIGKLKFVECAEEIAEDQWHDAEPLGNELQEALSSAAFLDDFMPFVLAFEFGATFCAENGGTNKLCKEKCLTLAPFVGTTKSHGKTTVTTTSIPTTTERQTFAFAEFVPHFGTNCSKIVFPVEVAKFILNITAVPYRIACNVYEQHYEIGQSVEDYLVNSNKSFFMLAWKCRQPNAQSD

SEQ ID NO: 155451 - protein, 145 aa, Heterodera glycines
MTEHAKVGLGKKHRLTVVDCLRYKISRKWVRFSLGEGRFWIKFGISPDAISLPSNIIFKKRGVSKWRDLNNYVINQSIIINHKGCGLEPENLISRRRKRQFRPFHGTQKGKWTSFPIVISFLEDKLPKDYRAWEAAIKVGADMIM

SEQ ID NO: 155452 - protein, 204 aa, Heterodera glycines
MDTAQNCKNLSDDQQVAAFQVLAEEQGGDLKARIDQILIISGLNLPNNKQANIDNVLMKVNVSDDQFKQNIEEAKQKLSSSKAKETADQLEDLFLDGSLPFIDKVKKSVELVQELPEEIRTECEPVLMVINSITRCPFKEQCTPSEEIGGGNIGNVGQGGGGGIGLQQGQNKQGQQQLQQNQQEQPCFHIKLLKVCTISKNQKE

SEQ ID NO: 155453 - protein, 31 aa, Heterodera glycines
MGKEMHDLKAEAESIRNVAIFGVCICTVASF

SEQ ID NO: 155454 - protein, 49 aa, Heterodera glycines
EGHLHTFAKMSSDGMTKFWRCEFKKSISHYFGVSPGNFSQLSNEPVNFC

SEQ ID NO: 155455 - protein, 237 aa, Heterodera glycines
MLFLLFIFVFLIINNSTDKTLSVNLCKKCRPTFAEIFGEEWQNEIIIGENENETDQNANFHQNDQNESTDQNDQLDFQQKNEIIHKFHAIKEGIKKRGKYSAKVRNKTEQKIAEKLGINRPKIYKWKKEIGIYYYKKKKQEFIDQIDEIKRMPKNGRQKQFAKELGISKETLRKWKKEFGIEMSKSPIRFTEEQKMSKMNDYYEMKKANPSLSDKEIADILKIGTATLKRWKKENNS

SEQ ID NO: 155456 - protein, 242 aa, Heterodera glycines
MVRDYREAWIHFRTHKTPRKAVMDTIEEAEDALDVFNLNIARQQAEFEIDKQTDLVRVEDQPQEGWVGWAKNWWFGGSPKGKEAAAPEDAQIFEKLEKELTPQEKERLFDAIDYQVMFKYHAPAVNKALDVFRPPKSVRLHQLTTLAIARYEDVKAIGLQLANLPNHNSLTNITDQRLRSLVAKAYDNFQLRLSNLRLIFSDSFANCMKARGDKSSDDHLLKPTGMCIDMLRATIDDVQIPM

SEQ ID NO: 155457 - protein, 157 aa, Heterodera glycines
QKKRTKMSVKPSRKNCYDWRRTDEAAKVDKKEPNMPSDDTFTEKLIAQIIKNLQVHIKRVHIRYEDKFSNRERPFATGITLDSLNFQTTDENFKLIVQKETVKIFYKLVSMSSLSIYSNANSNFISDNKGKEKIINSLQRTIAVNEEKPEGYRYGGY

SEQ ID NO: 155458 - protein, 63 aa, Heterodera glycines
MRRQWENKFARLAETSRKTRRSNKAGTASHEVGHSVIIWLLGVRQFLKANKVSQKLSNDNKNI

SEQ ID NO: 155459 - protein, 51 aa, Heterodera glycines
ELLVLFDSSMCLLLICKISKILVKFQKSYGQKELKNPLIRTFFCSDFFVHK

SEQ ID NO: 155460 - protein, 93 aa, Heterodera glycines
MTLSKKFLPRPYVSASANSIFRMLSNNTKNEKQLHCDRAGLISTDPVRMLKKMCFGPFCRHNQIKTKINKCDPNVIKPKNGEKISEIWHLIRK

SEQ ID NO: 155461 - protein, 42 aa, Heterodera glycines
DFQLVTFENFIQQILFHFQKGIRLDQRFRILVNVIQAATREI

SEQ ID NO: 155462 - protein, 66 aa, Heterodera glycines
MALVSFDLFPKRADIQLAIMEMEQDGYANFGRKGKSWVINRDAKKYEHKIVKYVHKICTKNREICA

SEQ ID NO: 155463 - protein, 213 aa, Heterodera glycines
MHRRPKVGRSPKTTERQQRQLVRLVKTDPKKTAGDVRRHSADVLGVQISHSTAQRILRRHNLNARRPARKPLLKECHRMARLAFARAHAHWTVEDWRKVIWSDESKLNLFNSDGAIHVRRPPGKRFDPKYTRGTMKFGGGDGVMVWGCFTGDTLGPLVRIEGNLTSEGYRNILEDQMLPFARDHLAPGWTFQQDGAAIHTSQLLMGPVRRLPG

SEQ ID NO: 155464 - protein, 235 aa, Heterodera glycines
DFKVSSMDSKNVDKLKTFVREHFGSADKFLDSPQPVDWKENPPKLQPQPVDWKENPPKLQNIADPELKTFANQLHELWKKLGKKMPESVKAKENKSTLIYVPNPFVVPAKENKSTLIYVPNPFVVPGGRFREFYYWDAYWIVRGLLASGMTESVKHMCNNYAEMVNKFGFVPNGGRIYYNKRSQPPFLTFMVNDYFAETGDTEYLKTILPVKRSIWRGVMAVRTMAFRVQTHLEG

SEQ ID NO: 155465 - protein, 237 aa, Heterodera glycines
TGLPKPIVECHAELAKLLNDSKIEVSSIDQLTEKFWMVYYKAKDEHVVEHSTSNDTDSIFYDYLTRLGDPLPGGEQLGELADEYPNHTIMEFICAGPKAYGLWLRNNATGEDEYKLKVRGITLDSDACERMTFEKMKDMVLNKLGQADNNVRFNYPSKNFKITKKGEIFTVPLVKQFNPTVNKGVVRDKGLRVVPFGFSNQEWCKWNCPGACTCLFNPDLNVNMFTEEELNDPDIMP

SEQ ID NO: 155466 - protein, 339 aa, Heterodera glycines
MVTDEDEDEEIEVSKFLTPTSQTQGSNRSPRTNKKAAKQQKLIEKKDHLLAIIMSDPQRFGATDRGKIINPKTGREFIDSDLAWSIERLVDPRPENAPSPRGTKELKRKLAQNPLASSLLNRLFVGSGFVGQRNTTYTLFKPKREKFRRLRTVPTGFMTDVQADLADFQALSRKNSGYRYLLLAVDVLSRRMFGAPVKSKRPVDMKRAFEELFEQMPRVPDTMYTDRGLEFVAKPLKEFYAEKGIQKFETSSKKKAAVAERAIRTVKTRLYKYFSANNTSVWVDVLPKFLSAINNSVCRATGLRPNEISDTNAREVWKRVYGEGLAQLDKSPKIRAGET

SEQ ID NO: 155467 - protein, 73 aa, Heterodera glycines
LIKYDHFFAVCCIVANSIHLEQFCDFVDRRIRLQLLHFDQLTDVVSFSHIMTEGVSKFECPNSILMPSLAMNR

SEQ ID NO: 155468 - protein, 372 aa, Heterodera glycines
MGRDNTLPQALFRPLDKLRELFLSGNGLRTVRIEIGGTEIKLANDQGLISLAGPILDRLDLSRNRLCPSRKNSNDTFGIEWPPARQLSLENANVLELNSTHWTFGEVKVEQQQKLANNSIARLPPELFEQYTQLNSLDLSQNAFYHFHFGDSSHQQQTTLIFLNLSQNRLRSVSLPTLSSLTLLDLSYNILTEFASLSSLPSLEHLHLSGNAGIRLTIAAEHPALLRLHLANCSLTKMPDLSRLIALRELDLRTNGLESVPGHLLPSRGVNALDVEGNALRELGWDWRAEQLAALRDLRAVGNPWECACEFAPPVVQQLFTPQTQQTTVRAATEGKAGLIKGHFSVGGNVHAETNTEKLRMSTEKQQNSSKT

SEQ ID NO: 155469 - protein, 177 aa, Heterodera glycines
MLPLDGIKLKDLEAGFMSRQHKFALFYPDGKNIYKDYKELELSAKNLDEVDAWKASFLRAGVYPEKEHQPTSDENGHVEEPSSLDPQLERQVETIRNLVDSYMRIINKTIRDLVPKAIMHLIVNKLGDFLKDELLASLYQHGGDTVAPFGFIFVHIKNAFCCLGTIDGGVAARGSKA

SEQ ID NO: 155470 - protein, 104 aa, Heterodera glycines
LQKVGINPSSISFGNVTMESDKYIVVRETVGDTAQVVIVDVANPTDVTRRPVSAETALMNPVSKILALKCMYSITGLVYDRITFLSREDLTNIRSRTEGQSQDS

SEQ ID NO: 155471 - protein, 381 aa, Heterodera glycines
MITKYGYVHLFDLETGISIYTVRVSTETVFASTEYKVNNGVLGINRSGQVISVGLDETTIIPYVTQQLQNPDLALKLASRCNLPGAEELFVRKFNLLMGNGNYADAAKVAATAPQKILRTPQTLQKFQSAVQPQGKGAAPILIYFTTLLEQGSLNKYESLELCRPVLAQGKKQVVEKWISEGSLDCSEELGDLVKQYDINLALSIYLRGNVPHKVVQCFAELGQFEKIILYAKKVNFEPDYLFQMRQVLRTHPENSSKFALMLLNEGPSGEPLADINQIVDCFAEAGNIQQCTAFLLEALKSDDESQGHFQTRLLEMNLMSNPQVSDAILGNRMFNHYDRASIGQLCEKAGLPQRALEHFSDLYDIKRSRCAHTTFQFRGY

SEQ ID NO: 155472 - protein, 203 aa, Heterodera glycines
MPRLTSRKTQNTRLSMMPRLKPIKTQKTTIKKAAQEKAQKDAEAKAKKDAEEKAKKDAEAKAKKDAEEKAKKDAEAKAKKDAEEKAKKDAEAKAKKDAEEKAKKDAEAKAKKDAEEKAKTDAETKAKKDAEEKAKKDAEAKAKKDAEEKAKKDAEAKAKKDAEEKAKKDAEAKAKKDAEAKKKEEEGRSKERPEEKAEAPAEG

SEQ ID NO: 155473 - protein, 153 aa, Heterodera glycines
MLRSVFLLLLVLLIGWLIASAARNQITDFISFITPLIVNLFIAEPVAHSVMCTNIKSVLIGIITCVPILASASGAPILLLNSSDYRTAYKKAIMRRKGNSSTKNDSSSKFCDLFAKIFVVLFFKHLSFLSMSRMFNLVDSDKSHGKFLFKIFI

SEQ ID NO: 155474 - protein, 54 aa, Heterodera glycines
MIRRGTTVIRRGTTAIRRLIRRGSTVIRSSTTVIRSSTTMIRRGTNVIRREFLE

SEQ ID NO: 155475 - protein, 294 aa, Heterodera glycines
MVGNGNELVETEDDENSVNFMNLFANLELTDSEKLPSHMEIEKIFSDTTPPPADLPPIESSVLGFVFISHPILWALVQPDILGEQNELLDQKNLSLESDQLVFQSTPSYVTTITLDPNNNWPHFTQISLNWNKQSLLGTRLKTIDLKQMTSPPKLGPSVSQIVPSSCCGIIREVIQNKITSEIMAIDVFLYGEETNQRFFPHQLDSSVNLTELEEGTRVQTTGFWAKTSAMEWPTSSDGVRDWWIEQIYVGTNLKIFGADEHEDIHQWLQNEQFRLSYRYLCAAMDLQQSPKRR

SEQ ID NO: 155476 - protein, 61 aa, Heterodera glycines
MPKKLLKKEGIRKMRDFIIKIGNKPQMLFAGVIVLPIFVLQHCVWKCRPVCIMMQGTKEVL

SEQ ID NO: 155477 - protein, 64 aa, Heterodera glycines
MGKEQFREADTTRKVKYMHVQRYHGKQKYLPYIGVDTAELSRIFRNTVNAIQLIRCIKLNGRIN

SEQ ID NO: 155478 - protein, 71 aa, Heterodera glycines
MLPSESLNWYFGCFLALHSTHSASLSFSLLFSNNPIFQIGLENFVAFVRLIKHVMSPKRLRKWRKRRNEEN

SEQ ID NO: 155479 - protein, 41 aa, Heterodera glycines
MTTEWATVTVAKVGLNVLGFRYQSNSMKITKNLAHRRSSAK

SEQ ID NO: 155480 - protein, 84 aa, Heterodera glycines
MVKHWSCPYEIWCDKFLREHNCRREELCKEVFLSALPHFGVFFVVSAYIFLGSLAFRQLDTQMAKLPFHDVLLFAFTTITTIGG

SEQ ID NO: 155481 - protein, 52 aa, Heterodera glycines
ERLAFFVSKNGKLVHPTGNGTVSATQPLSTANDMDRPDGAGHRHQHSPEQYW

SEQ ID NO: 155482 - protein, 125 aa, Heterodera glycines
RGWGGGEIEVRGWGGGEIEVKGWGGGEIEVRGWGGGEIEVRGWGGGEIEVRGWGGGEIEVRGWGGGEIEVRGWGGGEIEVKGWGGGEIEVRGWGGGEIEVKGWGGGEIEVRGWGGGEIEVRGWGG

SEQ ID NO: 155483 - protein, 223 aa, Heterodera glycines
HPPHPLTSISPPPHPLTSISPPPHPLTSISPPPHPLTSISPPPHPLTSISPPPHPLTSISPPPHPLTSISPPPHPLTSISPPPHPLTSISPPPHPLTSISPPPHPLTSISPPPHPLTSISPPPHPLTVNSPPPHPLTSFSPPPQPLSSVSAPPHPLTSVSAPPHPLGSMSPPPHPVTSSSPPPHPLTSVSPPPHPLTASSRPPHPLTAISPPPHALASISPPP

SEQ ID NO: 155484 - protein, 43 aa, Heterodera glycines
MAKNVRKHTNLRFAQNNRQKLRRLIYLNGCIGRVSKFYIEKIA

SEQ ID NO: 155485 - protein, 163 aa, Heterodera glycines
MPTVREILESLQKRVKRPRIATNEDSVLNVERTDAEQQIEGTSPRNNLDVASSDDEENCEPVQFKRGETIRGALCLWYQGVNSFFFLIFGRAERLQKSTKRRQRYIIKEQNVVRILDEADFESQEGLTNALNLIGLVMQGFVEGLHIRGNEDSEEETDDTDGN

SEQ ID NO: 155486 - protein, 336 aa, Heterodera glycines
AADKENIHTLLHIQFQLGHKVAQAARHINEAVGANVCKERTARHWFQQFREGRTSSKTQGRSGRPLMVDKNVLAQRLRRQPDSSSAELSARCHKTTAWRWLRKSGRRPRRTKWVAHHLTDQQKQRRLDLYLSNIARHRRGHVLNRIVTCDESYICYDGTTQKIVWRKKNEDPILVPSQLHQKKRMLCIFWFVHGPLYWELLPPGTILESLYINQLRAVVSYRIQRQQGQFDGPMVFRQDNAPPHCSRLTTQYITNTLNWKVLPQPPYSPDLAPSDYHLFLSLKNFLRDKRFTEDAEVEEAVGQYLTSKIGTDFFRRGIRKLPSRWMLRVRGNYFVE

SEQ ID NO: 155487 - protein, 243 aa, Heterodera glycines
MSVHHHSVIAFLRSNHQIFDKRGTNLYLWIPSPHSTNGQPIWDVLAREIWPIFSANIRCLGFSRGDHLDNLRRRTSPTILTDLNQLTSIDSYGLSPAAFGDDFDGPNATISAGQALSKWLHSPRKDGQPKRLRCEDYNEQGNTNWIDSFKEHFLRANAISSVSYQIHFSFRVPSMPMVPFELVNEWTKEKLTLTKENENDLENWIMKRCKIGEAADVQLQKDENWGNNFNNVAIWLFSTDCIG

SEQ ID NO: 155488 - protein, 68 aa, Heterodera glycines
MNRRWICNDVWMDIFPSFDHAQLGLKLALLSPRFNALVDKHFDGKSELTIWRPIEIRRKDKGPEPKLS

SEQ ID NO: 155489 - protein, 25 aa, Heterodera glycines
MIVGKTRKKNSNWHDNIYEIIPKKN

SEQ ID NO: 155490 - protein, 71 aa, Heterodera glycines
MAWTPDGRVLAVSSMEGFNSFITVDSSKFGTTIELQNAVTPFGDEVAMSPLNKAKKNIHKMFYLAKKPDTF

SEQ ID NO: 155491 - protein, 224 aa, Heterodera glycines
MARMHKIPLDPDSANVPMFVAKCEQWLANLPTHFEQVEMQQNFDQNFNGSSLSEQLTELIKALETSESPLVVFAHNDLLLFNILFDEEGTGDVHFIDYEYAGQNYQLFDIANHFCEYAGCAHRIGCTSFMTTYWFSGVDECPDYGMNSASEDERRHFLRRYFVYFGQPIEEECEMDKMLCKIRHFEAAAHFSGLCGPSIRQQNPRFNLITCVTRSPAIVTALGL

SEQ ID NO: 155492 - protein, 43 aa, Heterodera glycines
SQEGVLQQQGTAQNGNKEEEAKRQAERQEMAKNSILTQAKAEN

SEQ ID NO: 155493 - protein, 187 aa, Heterodera glycines
MRCVRRPVTRRDLDDSRKQFKELTEHILSKRGELSAIAQLAQRIEGEISAYLAELSRRNESPAPGLQRHHCVEAAQRAQDDYEFKCLQIKALLGAKQELSQLLRRVANCSMQYEQKVEEVNGWMAELERAISHANVGTSGATADRLDLLSRLNQKAVEGQPRIEAVEATGQQLDEATAQTDAHQRLQ

SEQ ID NO: 155494 - protein, 105 aa, Heterodera glycines
MIHFKFPRKLSFKTEKIDKVFASPFKRTVHTASLLLDGNPNHHNTYINVEPGFGEFYKLCSAKLGFMDTAKLKEYFPLIDLNYLPVYNKRWVNEVQNNTINNINN

SEQ ID NO: 155495 - protein, 64 aa, Heterodera glycines
FFTKPLSNINFDYIFKKKNSTAPSGTMQKQLMDFANIVPMLRFGGEKFGQKITCNYDILCLVNL

SEQ ID NO: 155496 - protein, 75 aa, Heterodera glycines
MGIYDAVLKNIRYQLKEKEEFCDKCTETDYGISYKYEDFLQSLDLIEHELRNIQITMTDEDTNNVQQYWTIGKLK

SEQ ID NO: 155497 - protein, 253 aa, Heterodera glycines
MDVHDEEVEIIGTRSNERQMDRAHRQEQQQEKFYSQQQMSEESEEALFCISKHDVKEISQVVKAMAFRDHCTLNVSNEGIRLAVDDQHNQQGSAYFRSEHFQDFNFRTQTCSIKIPMRPLMEALNMFSGTMTMVQISWNGEGFPLLVILEDEGSMSILPLQILEFDFDNENVTAKAILNSLPIREIMRDLDDSAETVELPTNCDQLELLNVTTDRVQHRYRMSLFKRLKDSIRLCNKLSFRIDKNGILSSQMM

SEQ ID NO: 155498 - protein, 15 aa, Heterodera glycines
MWSYVSLPMHRQMDC

SEQ ID NO: 155499 - protein, 88 aa, Heterodera glycines
GVTNSSSISHISIRTFAISTSIMTHGALVLMTPIGASVSRTSRVVLERVQRFTDRMILQFRKFNVILFGRSYSIEMLLNGHSLLHKLV

SEQ ID NO: 155500 - protein, 196 aa, Heterodera glycines
MPSRNLSAKKKQQNSLVRDESTSSPSRTPKSVSKASNSNSSQQKLQKKHNSSELSTISSESVEKDLSSSMSTNPHGHPTDKKWTIGEKVLCRYLNSEHIYYEAKVMFLKDLSGGDVGYGIHYPGWSNRHDEVVPQHEALIRFKNYSDEEATKAKEDVKRAQQMLNAKKRKQSELKNRSQAHDESSRSSTPGSADNA

SEQ ID NO: 155501 - protein, 63 aa, Heterodera glycines
MPSTRNTHFASFVGSEGCGKRFHIGFFCKQKSSRPWALNKIHVIFGDFKQQKWPKIPKSVKMK

SEQ ID NO: 155502 - protein, 371 aa, Heterodera glycines
MSDIKQSLYAVLGKRKLGTPNYNIKPENRGAVNGRGVGSNKKVAETSCALSIVRQLYHMGNWLIPHKCNAINSGLGTLPGATGYQLSKKKASPENVRLPATYYENYVVHSLFQLPEIKVSVDPSLVERIDAHLTQNGIESVDNLIDFASDSKPKTLFMEKKVEEFPFSDNEALPSQNIVWAPPQENWNAWNASNIDNQTLAFRSLEWISNDLLTREKIKKIPARLTASRQALPVFQTTLFTNYFGNCPIIEITQRVHPVQYFFMEDVIQMLKYMPPVPEPERKKKKKRKSNSDSKAAGATAKNGENTEEMNETEDSMELSENLMRCGDGYGPEVNKALRRMDEREIPLDIIEVTSHDKSVVNKLGHLATAQ

SEQ ID NO: 155503 - protein, 125 aa, Heterodera glycines
MVWSTFKPILSFKAPIKNGQPFDCLVCHKQNAKLMKLNRHLNPELSALFRSPNDLMHEFGVKLNQVIAFQQAHQQKLEGHLMNEAQRANEWTKSMQKKMQKLSVDRDKMKADLEKSKEEMNKTEG

SEQ ID NO: 155504 - protein, 61 aa, Heterodera glycines
MQQQQQSDQQPMAQPTLFPIGAMPSMSSSSISSTKQPRDVSGIFSIDSLPFDCQNMGVGGW

SEQ ID NO: 155505 - protein, 199 aa, Heterodera glycines
MHYTETFSRNNSNSSIAELNQQQQQQQQQQRLQLQQQQQQQQRARSAAQQQQQLQLQQQATEFEVGIGLNQRRKSGVYMLGNMNGKEHQDIKPTLNGGVLVGGAGSAAGGSGGGGGAAIAGTACPLPVAAAAPNAAALSASNNATATVAATSTPMSTSVMMNFMNNMLTTAKSTLQGQGVSVFYDQNGLPVEEKNICFL

SEQ ID NO: 155506 - protein, 36 aa, Heterodera glycines
VSLFDLFFNATEPCSLSALRIGTTDYEIVRDSAWLD

SEQ ID NO: 155507 - protein, 63 aa, Heterodera glycines
MAEDDKVEALFRRAENSTKEQRLEAIRQRNFIDAKFGYQPYTESTARDAWLINVQQALLLIGK

SEQ ID NO: 155508 - protein, 42 aa, Heterodera glycines
MQQLNYRLLNACRTGNVEQGTSVNNERSSTAKTELAPFSRPI

SEQ ID NO: 155509 - protein, 93 aa, Heterodera glycines
MSGFYESRQLHLKLEIGPVDYFFNYSPFDMSNKLMVLLTQILHPMLNVFYSPAAPSVNLATKTTSYRLIMKKRRMSLIAFVVIYRTISEKDLF

SEQ ID NO: 155510 - protein, 58 aa, Heterodera glycines
DDEEDGDESEEDEEEGGDELEEEEQEGGDESEEDEEEGGDKSEGSDMDIDELSEGMEM

SEQ ID NO: 155511 - protein, 154 aa, Heterodera glycines
MPLQSVAFYMGELPKLPPAFESANDNGNYNANANVPWNGSEALTKWLFSSRPENDLPPKVLRCRVYNSDIESWIARIEQYKTVMVNFGFKFVLQFLLVRSPIARDEKKWIKWISAAIEGQYVLPRNLITIWENDDNAEKAFLSQFAAQLVSKNE

SEQ ID NO: 155512 - protein, 104 aa, Heterodera glycines
SPRGPAQLGKCPHGGARRPKGPQKCENSRRNSADAEAAQHQRRHHALELIHEAEPVEQQQLRYKLLRPAADAVKQVVNCRNILNAYRNSHPHSDRMGYCAFSLL

SEQ ID NO: 155513 - protein, 148 aa, Heterodera glycines
LYFVLGEISYSLLQLFYIFCFFFSFFRVSPLLFSPFSAHCYIALMLIYLGVGLAVTTMCIDLVGIQYIQKIHYFGRKFKGTDILQIHYFGRKFKGTDILQILRRKRMLERRFAMGEGKELIEYVAHAREQTENEKISLRSEQQEMVPT

SEQ ID NO: 155514 - protein, 128 aa, Heterodera glycines
MEPFQFFGRSNGESVEERRIFGCSFFAHRAILSSASDVFEAMFHYDEGQIEVPDIEIGAFKVMLTFAYTKRFNGLNANNLLEVLKAADKYNITGLVKECANVSIQKLPNVFVAFEQALLLKMEVKKEF

SEQ ID NO: 155515 - protein, 74 aa, Heterodera glycines
MPGDVSQAGIDWPSLLGGSRLTRLIPLAGSPLPFKRPSEWEEFIGVSGVNGSFLQPIRGTSNIEITEAQPPIFV

SEQ ID NO: 155516 - protein, 187 aa, Heterodera glycines
MPPASLADLASTASSLLYALQSSQSSAVMAANTILQNFVSGVQPSLVSALNNSSPALNVHHHKVEPAEHQSQQQQQQQHQSVFVTTAATVPPPATVNTVSPTVSTAVPPFPMASKSLSPSSSSRSVTPTVSGPTSAGPLHHHHLMSSNRSESCLEQFGQQHSKHFQAMHGGQSQGKGETIGQLESNI

SEQ ID NO: 155517 - protein, 348 aa, Heterodera glycines
SYTIQQLHPHSKYRIGVAARTQLGAGERVTREVQTDESAPTAPPANFRVDNVGEQNAELSWHAPPCVHTNGDITEYEVHTNGDITEYEYEIAAAYEIAAADRLSAQIPRLTDVTRTTRVHLTGLLPSTAYSARVRAFTARGAGPWSPEVRFQTRPVALSVVQYDPKPRVYSTGPQEAQLVWQTDQQGANYFDKFACKWAPVGTQQYEERVFPAYNPCDVQLVEERVFPAYNPCDVQLVQRYQLPPSTTQVQTHCGQITGLSRDPAVAFQVRAKPREQSWQAFQVRAKPREQSWQPWSPPQRPSLIVECERLSSLHSLIVECERLSSLHKTGGSPIKEHFTWSLLPQLA

SEQ ID NO: 155518 - protein, 74 aa, Heterodera glycines
MMNRKKIENLQKCRKRKFLDNNDSENETLSADHREQNENNNDRDDDFEDRPYGDGAVSPLLCEDVHRNDAATAA

SEQ ID NO: 155519 - protein, 252 aa, Heterodera glycines
RKCTLSSFSPSLPSPPHLHSLPAAVRFRRSIICDPRTDFWCRGHFQHQQIRTKWSRTLCVACRDVCSDGSLQVKWRSEGSGRGVFGYRLLYRAPGAGWNPFGQIVPYVGEGQIVPYVGEGEENSVLLSGLSVGVPYEVKIQALDRNSYVLYTSPEVRSSPTCLVPLLPPSNLAIDTPDPGHVRVTWMPPPQSAWRCANAEVELQASTEVRRSTTVLHSAGGRTKWAFYRSARASLTRISHVLESETDHPWAI

SEQ ID NO: 155520 - protein, 449 aa, Heterodera glycines
PEESGEMRLEYAGNNEIRIDWPHLEDPLLQHYEVVLSEMVTDEQQKKTDEAAKGAGEGERMERSRVGPKQHTAYFAELRPDTQYRVGVVAYADHEPKRIYHMLIRTNTEPMQKLSQKPVIVEMREGRHEVHWKSEPTVPATHFVVEFRLGNDSKWRRAAAEIKPPKENGHQSLAARLTELEDNALSVRVVFVDERSRAVAVTGEQLIAHRADEKSCERMAPAVPKADEVGTESVRFSWEQSKCEGDIQGYEHAHGHSPWSVAIGVTTAEGKDEDELLKLEDQKTDAVQPKASAENLYRLRIVLAPPHSFLVWSPPPEHRENIARFKVSYKPTASASAPWTSLVQSPAELQCPPGLSTYAETDYCLNLQGLDFGRQYEAEVTYELKEPKGRWSQRGSPLFFILVKTSSEEQRIGITSPDDQLPGISVSEVRVEPTEGAKTIVRWKVNGQS

SEQ ID NO: 155521 - protein, 90 aa, Heterodera glycines
MAIEHSFVGGLLFAPFHCFVRPFSTTRAFGTITGIGTIATIGRFSTKCRANANKICAKFHGTKQKQRRRPMPAEKLMKAIRDREREKDHF

SEQ ID NO: 155522 - protein, 102 aa, Heterodera glycines
MAQVRVAYQAVVKRCQFGCRLDCNRHFYIGTDIGGQQQRAVEMEADEEPLNYDRAEEEDEEAINADANNVPKPTENENGANFASMRQKRADQNEDWHQDSRI

SEQ ID NO: 155523 - protein, 178 aa, Heterodera glycines
VHQRSVHNLLGLSARPWWTVEQSECAKQLKTMERQWTAIREEALKVWSKRKSLFVEEALPIGSSGMMGGDKIVRFVGRHANLALLWAHQLCAGGTAWPGGTFGCTNSGGQRDKVHPQKGWRPGRFLVFDTSFEREISFEGAPSNAIRLALTMELWHPQMPMELRGKIRAADGSDEERK

SEQ ID NO: 155524 - protein, 32 aa, Heterodera glycines
MYKSDITRSFQRNRLDIPRAPGLGLLLGDDVF

SEQ ID NO: 155525 - protein, 245 aa, Heterodera glycines
MKQMADEKAFLDTVRNSLVLLIVGIITILLAMNAKNVWHFFAPAIVVKSTKKKRKNSPTASIGTKSKMNSVIKCSNEEMEQKETVLHQLPLPVKKQIIEKAEDFEAQIDEIEHNGVESAQPKIIKGEDNADDSIQILSVKQPKRKMRMTKTRFQDDEETVDQKEVPPHNFSLVLSTQKESEQQKRAESPEVDLDTVVKLMESGLSQADIARQLNVHNIYYIVTKCRKQGLITGSRPITRKKAGKT

SEQ ID NO: 155526 - protein, 44 aa, Heterodera glycines
MWPEMLSLINILSTFSALGKNAILFRNRPFQIQQNKEKIQICEL

SEQ ID NO: 155527 - protein, 25 aa, Heterodera glycines
MKLGQNFIFLSNKLCFCQINSECLD

SEQ ID NO: 155528 - protein, 393 aa, Heterodera glycines
MVLIIILIFFATFNGIFGVGEGGEENDLFSDLWKNYFNAKNVQKANVGRNGGQKVTNRVKMEERDGGVEMGAVGIRMPPKLAQMVIKSEPTAAAAVFDQLLKNVKHEPKEEEFEQLDIGKMGVVGIRMPPKLAHSVIKDEPPFDQQREHQQKQANKEPNHLDYGIERMEETENSLESNGKISQKSAKKLAKKKRQWQKEVDRTPQQFKKEENSKSDIKVLIEQFDQMKKKFRKKIHFVDRKINVNLESKIAKRLGTCRTKLYKMKRENGLLTRNFSNEQKKEIIHRFEIIKEEFMRKFKIKTNAKISDKIARKVGVNLETINRWKRSFGSTAKPIYTSAEQLEFIRKYDALKIQNPLISDQNTAQMIGTNAISIKRWKKKFGIAYPCKRRRIT

SEQ ID NO: 155529 - protein, 33 aa, Heterodera glycines; identical to SEQ ID NO: 150970

SEQ ID NO: 155530 - protein, 181 aa, Heterodera glycines
MRQHTSFSRLPAADSISQQNQHQQQQDINNNNAVVDDNDVEAEDEAAAAEMPGAPAATAQQRWEDSTGGGDDGMEEQRRDGNGGDEEEVAGDEQQQLQQRRQQMFKRKLLLAQDNDGTAAASGANDSGETSPRALARSHVELFTRMRSICGRMNRLKRKRTPRPGSPESLVAFLCDSAKFQ

SEQ ID NO: 155531 - protein, 146 aa, Heterodera glycines
MSNGLIMSHLSAECTDLAQGYTCKCRSGFRDVSPSKEKPGRVCRAMVNECQFAHLNDCHQNAQCLDLEDGYQCKCENGFKDVRPERPGRLCQQMVNECARADTNSCDKNAKCVDEEASSEERHTKLAFVIKKFQPWKRPNTVKPWL

SEQ ID NO: 155532 - protein, 115 aa, Heterodera glycines
SPDGLQGRICVRNSFCRDPKLNNCSRKAVCYEEGQGYRCECARGYVDKSPDGTPKGRVCELPPAPAQPQRHPCQDGSHDCHTKASCRAVGATGFVCECLPGYEDKSPDPKNKGGR

SEQ ID NO: 155533 - protein, 422 aa, Heterodera glycines
FLQLDHGRATASTIAKCTPAKVTNAAPQNAAPANLSNANLASSIDARLSTFHYNPEVGTTFECWFKRYGKLIEDDGSTLPEASKVRLLLGKLGEEEYSKYRDTISPTQPDQVNWNDTISQLKQLFAETRSLFVRRFECFKIRQQQGQDISSLIAQINASCENADLSLTKEQLKCIILVIALNDEHHDLRQKALKMLEDSQKNGTNISLKKIEEELRAIQLVKESALSLVNPPIATNAIRTRPRQWADPAQRQSGGSNQKQTPNANSSGKPTRGQPTHPCGSCGKSDHWRSDCTFRDATCLKCNKKGHISTICRQKKAKAAPNNHRAFHTVKVDANCLHVGTTQGRWWKLCILINGRQTSMNGDTGAQATIISLQTWRELGEPELTPSDIDAKNCNDQPFALLGKFQCTVQIADKPPQTLIAY

SEQ ID NO: 155534 - protein, 188 aa, Heterodera glycines
EYSKYRDTISPTQPDQVNWNDTISQLKQLFAETRSLFVRRFECFKIRQQQGQDISSLIAQINASCENADLSLTKEQLKCIILVIALNDEHHDLRQKALKMLEDSQKNGTNISLKKIEEELRAIQLVKESALSLVNPPIATNAIRTRCQFKRKANAWSTDASMRIMWQIRPLALRLHIQGRHLPQVQQK

SEQ ID NO: 155535 - protein, 143 aa, Heterodera glycines
MRTEIFSQIFFICILSLYSIDTAPPKNESTEKEASSSGSAGTYTIRDYAMDIKKHLAKVEIEKLIQEAKEWAQDLGLVVIHRVATPTPPRPRPPTFLAIFGENPDPEPRRFIPRQPRPLTPIGVGVKYTPLRMAFSWEKMQKS

SEQ ID NO: 155536 - protein, 261 aa, Heterodera glycines
MAETNLDKVVSTRDQEQREKLISKAKEGLVETTTEPDGSKRAPPPVKARVGKQNLDEFIRGRDIIKEWISESYTNMTGVSTTVEEMDSTWALAVGIIAVGGMFGGIMVGTVADKLGRRKSLLYNNILAIIAAALMTLAKYVNVYYLITIGRFIIGLNTGFNSGLSPMYLMEISPNNLRGSIGSLHQLFITIAILASQIIGLPQIFGSANLWPLIFAFTLVPVLFQLCALPFCPESPKYSLIVQGRKDQAEKDLKWLRGGND

SEQ ID NO: 155537 - protein, 92 aa, Heterodera glycines
VEIAIRSLDTAFFDSGSFNSKIAVIVPSKELIWSGSDFRASINSLVQLRPLDKRDSPTPLFSAHVPLKLERVRVELVLGPSVNQDGHLRTGG

SEQ ID NO: 155538 - protein, 82 aa, Heterodera glycines
MWFKYAEDYGLNHLLDWRLWSMHANCADVRPERLDYDSSVELKEWSEVSFDQLLSFDRLQTVGVDRTAYLQAALRLPQSVAK

SEQ ID NO: 155539 - protein, 157 aa, Heterodera glycines
YKTFILVNCASEQIENGEYFCRFVSGRIRLQIVFDIDQKGNGKTETQLYNGIYQEKCTLYESSFSQNALSFRKRQCIARELRGEHLPIDLAILSELTEEAEGLSVVGRGFVEERFEMGGRIGAGKLKQYIAKKGRSNGLNKADRICRERERDTRGRE

SEQ ID NO: 155540 - protein, 82 aa, Heterodera glycines
SIASALLRDVLLQFAGPNPSAHFESLLYKTPSNNTESLRLFRQLTQNGQVDRQVFTPQFSRYALPFPGKRIFSISDQHVSLV

SEQ ID NO: 155541 - protein, 487 aa, Heterodera glycines
MRLAERFGADVFVWMNWLEMDRHNQCTKVQKLMDDLHLYFRLLYDAYCIAAEMEDAMRIFSFALPAIKTFVDESRNKMLNLTEINKEWGKLSRLIKKVADNAQNVVAQTEEERKKYEEPIPIIQKLHFAEFMELLNRKEEEDGSEKEELERMLEDELNKNNQQKMSDFLTENDLKRFYEAIENKKTILNGNEKGQNENNENKKAKKEEKKRRKKEKKKTKKEEENNKLNEKMEKKQINGENEGENGQFGQKEKKEKQNSDEKNCKESGKSLGGKAVEKRRDITEYNARRKLIKHNLAEELAKIHSINDFYNDAFLYAKYEEFVAKPSIEMQRIIDVGAFLNEIGHRLKAMGELERFNHTGNPQKSMGQLRNEWDTFLEQFGKLEVPKLEKMEKKVSKFMQLFLNNLQNTKQFEPDEITKQIKVQIHLKNLSMALLKNNEFNEKWKNYENKTKKEKLFYLLGERFGAERFEKVKFEWKRMAEQTELGK

SEQ ID NO: 155542 - protein, 207 aa, Heterodera glycines
MRVVHVLFTHFHDFLKHVALNGINFTKIIDYDGIGQKELLEFYIKHLIESNNFDEASLEDEDKIAVLIKLLSLCSSRKENKLIEIFAGKSAPIRMLCPLMHFIDFLEKQLTNEHQFWQFPRKCFQMEISEINRKQMKVLGAEHFNYLAAFIENAKEKDEFMQILREKHGALYRMRLLVGGKNAIQRMWEMPKIRNKLLNRNCKQTEK

SEQ ID NO: 155543 - protein, 506 aa, Heterodera glycines
MMQNDEMERFIKLYKKIDINEIDCHKIAENVFQNVPLTDEKNATNIFLNDLRQLHFNAILFLLDRKNEVGKAPEIGQVGQYKLWEFSKFFNDTKIENETNFSYQFRILRIKEDKQSVVLLKKLKWKIKELIGPIYLSILEVLRPIELQIDTIFDEEYATEYAMILSTDRQIAKQAEFRLSIRIYFSKIWNKILDAKISKNEMEKCRIVHFWDGGELVQMTQTFIHYEEKETFEKIFEFSAKIGEKNEKEKGIENKSGKLKKKASKKGKSRICDDILDKVRSNLLDTHSELMANLSGETNAFSKLLKNSLETEKGALAKLCDFYSAKNLIGNDNKKCSPNSVEVMAKMEQKYPKLTQMLRNKLTDEQIKKLQNRNYLKYLNEKSEQIEWTRAKFMMDILAHYQIFKNQLNDPNNLSFQTELIDQNMGTMELSMDSISVINSVKEIEQLQGNLITQLKNSSNLFPELKHSLAKGHVEILKKLCAEKEFQNQLRGKSKFRKESSLSSNA

SEQ ID NO: 155544 - protein, 132 aa, Heterodera glycines
MFANKLFLLLIAAFSLCVFGIDFGGTKQNGAAKGKLLCGGKPYKGAKVKLWDKDTLDPDDLMGETETDEEGKFEVNGSETEECLRRIDIEIGDEFISRLTDSDKAEKMFDAGILNLSGHFPGETRECLQSKK

SEQ ID NO: 155545 - protein, 62 aa, Heterodera glycines
MQGEKLSNFSNSSVTYKAIQAQAIKTQDSSLKSPESEVFLNYSKTDTHQSLEFSYIFPLFKS

SEQ ID NO: 155546 - protein, 131 aa, Heterodera glycines
MPAVKPKFQYDELLEPVLDEIEHLIRISMFYFDENFKRTESYKLKGFSQLETKPILLNEKQLKYFQNNFQKNSEVKIRKLFEVKMSLMFKNTKENAEKEKVEMEEETDEQKWKKYRNKFLGFLNSPFLPIV

SEQ ID NO: 155547 - protein, 50 aa, Heterodera glycines
LQICWLKLHMRYISKFFDSVRRFDKDGFRFAISRSTFGNWSRIFSAITCN

SEQ ID NO: 155548 - protein, 123 aa, Heterodera glycines
ERVEQLCWFEEEAFLAFVKGRPNFDKFYEKTDESIKKKMVQYRSELKNLTFDQLREHLAQKFAARLSAVHLLWQNWNCANVVEEVQGEDRAKCQTFRRHLDIVYEYLFRVYVEGNGREGSAEK

SEQ ID NO: 155549 - protein, 166 aa, Heterodera glycines
LIVSKNKTKSHKIQLHIHKLFSVLTQNYFQRHLLKKNETLRLTYDMLRRPHHIGNHKAWMAWNTQNLKEFEQQPGLTIAQDEIIRRFCRALFFEFLPEIGVQLVIKRRGNCAFVTGFLCWNDRTPFLQLYWLWGFTEEILSNLLKHPLKLELQFVRSLDHLIVANI

SEQ ID NO: 155550 - protein, 112 aa, Heterodera glycines
MEAQKTGNGEINPLFANLVLHETLERIHVDEFYGDIPRGIFLIRGENVVLAGEVDDTKPNPFKKVSMEEILRLQAEKVEQRQKQQRTRQELMHGSGQQQAKSHADALMDEFC

SEQ ID NO: 155551 - protein, 90 aa, Heterodera glycines
MASRGRGVIVNVASAAARCHWYYYGVYSAAKAKFLGAELLFQCIPSPLFNWLMRNESHKRRALALAEQKSEAQNGRREKGEEEEEEEKDG

SEQ ID NO: 155552 - protein, 246 aa, Heterodera glycines
MNNENVNNAMVNDTRVNVNDNCQNPNDTRVHVNDTRSVFASINPLKRRVDEVAKYGSLDEQLDVTHVIQHTPFRNRHQSPLLLDDLTKQHASSLLFGSQVAISLVKSAAQTSASSADAMTMITETPKSSHYSTATRTVPIDFEDERVSESPQLPPPPTVPIPMGHLNDSEFEQWHETEMDEAMEGYCDAVKQYTDKYGRLAAEKKRLLSQIDAVKERIFKFRSDFSEAYQQNEEKRRALCADLTNI

SEQ ID NO: 155553 - protein, 205 aa, Heterodera glycines
MFKVIFVLGPPGSGKGTQCQRIEKNFGFVHNFGFVHLSAGDLLREERQREGSTFGELIDRHIREGSIVPVEITCKLLENAMVARSDTAAGFLVDGFPRNKDNFDGWQREMGTNAKVLFVLSIQAPIEICVQRCLICVQRCLNRGQGRTDDNEESIRKRIVTYNQQTVPIIDHYASLNLVKTVDSTKGPDLVFAEIRAVFEQSGIG

SEQ ID NO: 155554 - protein, 149 aa, Heterodera glycines
ENYGLDELSADARSMKISAGAMTILTETPKSSHHSTATRTVPIDFEDERVSESPQLPPPPTVQIPMGHLNDSEFEQWHETEMDEAMEGYCDAVKQYTDKDGRLAAEKKRLLSRIDAVKERIFKFRSDFSEAYHQNEEKRRALCADLTNI

SEQ ID NO: 155555 - protein, 217 aa, Heterodera glycines
MHVDFDPFKVEWSALTQISPEVVVQYGGYNVFRGVPYPRGSGIGSVFRSLLRYLIPIGKEIGTAIGRQGLESGNRVLSNVLEGRDLKESLVSEGKTGLKNLLEKAANNINAQKGQGFDFKRYTKRNDAREGGAIGKAKKVPPTNVSVVRSYFREVLPLVTITQESPYLFRLYSDNLWTDLSRIYLFLDLSIEKPDVDGNWVSIAATDAQVGTIQGIG

SEQ ID NO: 155556 - protein, 98 aa, Heterodera glycines
MQTLKANDTTKYRVRVHDVKLYAKMIDVQSSLNLSIYKTLEKQPATYAVRKTEIKSCFISEVYAGGMIYPIVPYKLDFAKDIFVRPFVDMYEGGTWHG

SEQ ID NO: 155557 - protein, 112 aa, Heterodera glycines
  unsure (1)..(112): unsure at all Xaa locations
MLADKVVIFIIGNKIDLARHRTVPKEEAKEYSQSIGANFCECSAKTNEGVSELFSKLAIEMLNKXPKRRKTPMESARLLSNGITGRGGALELRTKMKHMRNGNDAENVADDA

SEQ ID NO: 155558 - protein, 444 aa, Heterodera glycines
KYETRNQQNLEILFIFFFFRALLKTKLVESREGCEWTRCGRTDRGVSAFRQVAAVTVRSTDVSSFDSFWSEGNAERKDRITSTVELSYVKMLNGVLPHSVRVLAFAPVRRGFSYVKMLNGVLPHSVRVLAFAPVRRGFSARFNCVARFNCVQREYTYIFPRTAIAIKWLNDACARIKWLNDACARLCGTHDFRNFCHIDRNEKRLATSYVRTIKEARVDQLGSAELSDSFQLLRLTVKANGFLWHQIRCIVSLLWEIACGNEEPELIDDLFDLIDDLFDIEKFPARPQYKMANELPLCLPQYKMANELPLCLFDCTFDEPIDWKFDFIALGSVVNTLQKKWAEHQINSFIRAANIKEMLDGLNFHMANSPNGLDEFVRTEPTPKKFIPIRKRSLCEGLEERRRKAQKKKKKFIPIRKRSLCEGLEERRRKAQKKKKNEERMEKG

SEQ ID NO: 155559 - protein, 102 aa, Heterodera glycines
QLDFVLVRIVQSAQLRTHKYFRVAVPQAITGQALVQHIQEVLSVEDTNEALHFATILLHFGYLFPVIDVHSQAVREDNTLYRIQLPYFWPSHAHQADNVEYG

SEQ ID NO: 155560 - protein, 52 aa, Heterodera glycines
MALSFASREDAINFCEKNRWSYIVEEPPSREIKPKAYGSNFSWNKRTRVSTK

SEQ ID NO: 155561 - protein, 44 aa, Heterodera glycines
MSAINVLEAMNLLKPEQVTVQNLLIENGQLIETVAEYQRMGKIV

SEQ ID NO: 155562 - protein, 470 aa, Heterodera glycines
FALGFGQSESYATEFYYDEKLEIALASEYKQKFFCQNDNESLPTAEVIDQILLLTFSLALRLQFNAIFAIYPMFDIFHSNEIKHWQVRTLLTAYKQLSNAKGITEHGVFPFKLSQLSDDKKYAYWLLTFIEEEQPTNKQYIENFNFIIKISEFSLSPFDVYKVLEAILSNVNEKENTVHKNGSAEVPKLYEFVREYFNAKLNSEKASNSPKSPSLSIDCVLVHLGYQLQMNAYQKFRELTEKHQRNTNGCAKWSKDILEIVDLYEFGEGLGYRKWQFIHVWFRIAPVELELFNEPIQNYANAIEIDTHQCRALTQFANDALDKMVKENIDKNEHFDRLQIVLQILSEMKDTENYEKLKKLLENFEQKIANEKNKSLLKEPTKFLRQLIGEYSCKGYCTQINGRGKRDFGSGLMISVNKIMPIFGQILIEALKKSYGQTVEYNVKEQKLSFPSELGEHLLGRLDEMIKMFE

SEQ ID NO: 155563 - protein, 58 aa, Heterodera glycines
MGELEPYLLIRHICWGESPPGENCALLSRMDLQPTPAAKMLPPIILGMDSQLKTIVMC

SEQ ID NO: 155564 - protein, 108 aa, Heterodera glycines
SRCGQKKRIIRLWPSGPRNTENVSSSHRRFGHLSEKIEDSQYDFHALKERKRLGRMDEEKLFAASEEGREMETKVSEMKSIRIGQEYEMQLAKWLDACDMRPLRKPIT

SEQ ID NO: 155565 - protein, 113 aa, Heterodera glycines
MEGGTEDDKSEKEKVSNCSHREEKVKEYGPIVCAALVCVLEKEKHVFYQQTCKNENSNTQRDCQGYGQNGAIKTFGKGDWKCKCAKSKVNQGKDIDLSALGLPCKLLVQNLLN

SEQ ID NO: 155566 - protein, 58 aa, Heterodera glycines
MIHLLTLTLLLFPTLALSKLNTVNFKSDDIVLLDEIRASWPIGRWKKDAKQFKVWTNI

SEQ ID NO: 155567 - protein, 127 aa, Heterodera glycines
MDAQQLQQILDAALKKSAEVFAAALNTQNQNPNAGSSTTASLAASINARLEKFNYNPEVGQTYDAWLNRYGKIVQQDGASLPEQSKVQLLVGKLDEEEYKRYVDSIAPKATEQFNWLETVANLKKIF

SEQ ID NO: 155568 - protein, 661 aa, Heterodera glycines
MEAIKPIEFSHWAAPILAVKKRNAKTRACIDFSTGLNDALELHRHPLPRPEDIYNAIAGSKHFSRLDLRDAYLQLELSEESKKLCTINTHRGLFQCQRLPFGIKSAPAIFQSLMDKIITPINGAFVYLDDVIIANTTLDQHVKTITKVFDKIKQFGFRIQQEKCSFLQKETISLGHIISENGFRPDPSRAEAIRKMPAPHDKSTLRSFLGALTYYGKFIKQMREIRSPLDELLKKDVPWNWETDQQKSFEKAKEIMLSDLLLTHFDPKLPSLWPLMLQKEELVQQSAINFPTKVNVQIEKEALGLVFAVQKFHRMLYGRKFILLTDHKPLLAIFGSTKGIPIYSASRLQRWALILSNYEFDIKYVNTKAFGNADVLSRLIANYPRPSEDILIANICNDTDCCVNFVFEAKIEQLPITAKIIADETAKDEILQQISAFTKQGWPQKFDNIKLSPFLPKKAQISEIEGCLAYGERIIIPSTLRNNILKSLHFAHPGIVRMKAIARNHVYWPGIDSEIERLPWKAANGVFERIHIDFAGPCADGQTYLVLVDAYSKWPEVWQMERTSSQLTISMLKSFVHRLGIPKEIVSDNGSQFRSAEFAQFCKEFDIKHTFTPPFHPMSNGAAERFVDIFKRSMKKCRQEGKDWLQKVLLAYRTTPNTALN

SEQ ID NO: 155569 - protein, 46 aa, Heterodera glycines; identical to SEQ ID NO: 137992

SEQ ID NO: 155570 - protein, 36 aa, Heterodera glycines; identical to SEQ ID NO: 127729

SEQ ID NO: 155571 - protein, 103 aa, Heterodera glycines
MGHSGEKRNSAQTEANNNQGRSTIVTACDFVFVLAMTIELALKVVAHGLFFTPNAVVRDVGGVMTLFIYASSFWFLIWMPNHVEQNSLAQLLMIFRAMVSGEA

SEQ ID NO: 155572 - protein, 191 aa, Heterodera glycines
MGNAIFDPSPCPCRESTTPDSLSMPVLESLQQRLHALGPGVDNVFTVMDKLEGALGGDSGAETKKHRLALEQLRRDYSALVSECNSALDQARSKETLKARFDADTDSLRSLLEDTAHKLHNDLIGKDALKLGQFPFKLKISRISMPYSRVLLVILLFFKQFKAYLLVRSLPFQNPTCPDHYHKVPFSNFRL

SEQ ID NO: 155573 - protein, 95 aa, Heterodera glycines; identical to SEQ ID NO: 124528

SEQ ID NO: 155574 - protein, 71 aa, Heterodera glycines; identical to SEQ ID NO: 134376

SEQ ID NO: 155575 - protein, 256 aa, Heterodera glycines
MMAQWQEQQKDDVSTNSPHHSAQGDHQQKKGNEFRRGTTKRAVGTMPTAEADGTTTSAEGAAPSGTLAGRRRLFSSDEDLLDIPPNFQYSSARLPPDFYTQTVLVEGPAELYHSVSLPYLINGQATVPHKQWTATEQATAAVSRRTEIQLLSDDRQQLLTSATGGSGVGITPTHTVTAPTRSLDTHSPAEFKIQKFPNDADERVGDRMPTNWPPHGIDDSEQLQQLRTDANNVYFAKILEFDDEEEEDSTGRAAFI

SEQ ID NO: 155576 - protein, 44 aa, Heterodera glycines
MTLWPFVVVLTRAIVAITRLHIWHKEGARMCCNVMNWHTDYSND

SEQ ID NO: 155577 - protein, 160 aa, Heterodera glycines
MRTSQQFDTIIRVPFYRRRVTVFDDQEKEINAELIKSFWQPFPHSSHHDAAPYELVFPVIVPPLGFRTYFVFGDGQKREKNNLRTSKRNNNEQQQNQQQQQNDGGDELTTISNEFFRLTFGTDGLLQSVADLRRNQTVQLRQQFLYYHGMSNNATPRQAF

SEQ ID NO: 155578 - protein, 40 aa, Heterodera glycines
  unsure (1)..(40): unsure at all Xaa locations
DIQFTLTNYSEIFYNSKLKNDKKNLKLNFNIFGPXFLKEL

SEQ ID NO: 155579 - protein, 173 aa, Heterodera glycines
LSPYNSFKKGPKILKINSKIDKNFKHVMLTMGGDFHYTNSNMWFTQLDKLIAAANKQLSNNITVFYSTPACYVKALNEAQPKLPIKSDDFFPYASANHSYWTGYLTSKPGIKGLIWTGYLTSKPGIKGLIRASSAFLQLSRKFASFALLSNASAVGKFGTAQALCTHHDAVTS

SEQ ID NO: 155580 - protein, 405 aa, Heterodera glycines
MDLSPHYLSLEGKLSPLVLDKYFVINDAEDNQNWNTTKFRNALSRAIEQIKNRQEVRQKVSTSQKIPYLLDEPKITIGSDFYNYFDIRPIKHLNSGFWISNSKIGKILSGDGKVTWTNLNDKNVNTKDEYNVSAINSSAIQCETEITDQVELDKNKELIKLVRQHDSLNSVGFGDLSEKEENMREKMIKNISFNGKRYQSKLLWIEEEAEKLPTNFAMAYSQLKSNLKRLRTNPKLLQLYHKTILEQINDQGSVEITNPLVDPNQKGQKIHYLPHHGVVKETSEHTKLRIVYNASAKSEKYNHPIIKQLAQNIYVDNLLVGINHKKDFQMVYELIKKVFAKAGMNVREFVSNELSELQKLPKEDRIEKETVKLLGIWWNVKNDEYFIKMPKFEPNNKQEEKYYLK

SEQ ID NO: 155581 - protein, 19 aa, Heterodera glycines
GPGSRSRVLKSSGPGPGRA

SEQ ID NO: 155582 - protein, 31 aa, Heterodera glycines
MAFQEKLEKNVMAQIDVKVQTKEFRHLSPND

SEQ ID NO: 155583 - protein, 285 aa, Heterodera glycines
MPRIQLKRCRQALLKLAFAHLVKNVSYCTDLETSGTPARIVEIPENVTVVEGELAIIKCVVEGNPAPTIVWKKGGRKMPLTDDRVRCQTDGDTGHVSLIISKCRPQDGGEYTLMVKNAHGKHKVGAKLLVTPAAESNLDFRAKQKKRGTGISNSEQEKQRQRSDAEPKSKAERRKRQVYVVEEPRDTFVVPLNSQHANEKENATFECEVNDKEIDVKWFHDGAEIGMDGRHFKERAGCRRRLLIINVLIEDHGEYKCTAKDDETMAQLIVHPKFVKKAERKPVTF

SEQ ID NO: 155584 - protein, 79 aa, Heterodera glycines
MHFLPPLSYLITLIADSTPSLTFIEQIGRMELVQSIVQFMEKIGLGTGENNKKKKQRIERRSATNKNLKEPWNHPEALN

SEQ ID NO: 155585 - protein, 81 aa, Heterodera glycines
MALLNEHTVVSIFQCLAFLTFIVVMVICPITAHGDEVPIHRKIDFASIERLSGIFGSLHGVTLFLGYPLVPHIPRLLYSFL

SEQ ID NO: 155586 - protein, 266 aa, Heterodera glycines
MARKIGFVTTCGWTILPSFNYAKLGLKMALLSDRFDVLVDAHFDGKSEFTIWRAIEIEKEEGPKPKMFIRIDGSFVDFPLSVRQMPNKICFKNLWIESVLTFVYAKAFLSFFSYIDHSVIKFLRSKKRFFDRRGTKLEVFVHSIYTDVQPIWDVFTREIWPIFAKSIRHLCFPNANHLDNLRRRTSPTLLTDLDQLNFIDSGGLLPDGISDDGPKATAGQALSKWLHTPSKNGKANELYCCAYFCEITWINTFKEVIELLNCSLND

SEQ ID NO: 155587 - protein, 155 aa, Heterodera glycines
MVHKFPLNLAFFSVPKFVRLFLLVVLAFHRSKPNQRCIYSANYSNDLSESTKGSLVSFLQKWGVEEKRRIKPCQEGVACQTYRCKDGKDGHDFFLVTACATPDDLTGLQCSHRDFDPFCLDGKPDCKTCRKRECLDPDRMKLEGPKKELILALCC

SEQ ID NO: 155588 - protein, 56 aa, Heterodera glycines
MIVNVRVVHRPSVLSQEYRTAFDSADFRLLGFRFRYIVKKRVSMLRKGRLKIAFMH

SEQ ID NO: 155589 - protein, 142 aa, Heterodera glycines
MNSEAYWPADQRQIDEHSCSGPYPGKKDDEKAPKWYLVAQIVANGVVAARAQLAEQWSALIWVDNDIAQKTWPLEVGDSVKVVSVEWTQTATGWASAGDWLIMGPFSSAAWEQFEFLREGALEAVELRPMVSTRALRERANF

SEQ ID NO: 155590 - protein, 292 aa, Heterodera glycines
GTAPAINYGINGQNDKRMAQVLCMDWAQDKRHLVSSSQDGKVIVWDGFTTNKEHALTMPTTWVMACAYAPSGQMIACGGLDNKCSVVPLDPQEDILQKKRSVATHTSYMSCCTFIRSDNLWDVESGQMIQNFHGHLGDVFAIDIPKSDTGNIFISGGADRHALVWDIRTGQCVQSFEGHEADINTIRFHPNGDAFATGSDDASVAFCSPVMAIIASAPDGTAICTASWHVTGKQLFLSDKSLNISDLQFIGNAKDENAVEIDQSLFEGDIDFDDDDEDYNPEADVGSEDESK

SEQ ID NO: 155591 - protein, 107 aa, Heterodera glycines
DGVAVGQARFHRSADGQVATEWTIFVDNGTESARPTPYIPTEGTTFEAQVNSIIQIGAQWVRSDSLPYLCEGDLSRAYYVLDDAVFLLNAMLYQTKGEPMIFKCKVS

SEQ ID NO: 155592 - protein, 586 aa, Heterodera glycines
MTGMVRGQQLRQWSSPPFANAPRDNTAVPVEAPTFNQRRFYFHSFDNDGNDPVDQFLDFLTHHGPKKAHTVCVAHNGGKYDFHLILEALHRRNMPPKRLCTTGLKIYSMRLSGRNQRRVTFKDFINYFFCELDALTLCNAKKANALIRDASDEQLLCLVEICLYILKGRVPLRPRHLNKLKAHAQVLRRLARTRCSRSAKKDLLQHGDGLPAIVGLIASIALPLIADHTKRYLLVPEDIYQSLAAPPPSDGTPIGLVRNRIKQIKNDDAINDAERAVKYEQELKRLNKLAKDEDERPVGVKLENLNDVVDAMPKPINIKRPIVVATRRHLKVGRARKENVEQLEEDDDEIPWPSSSIKRQPTQTEILKLIYKNAQSLGVSEEGQVLRAGGRPFITSSVDDIVSHLLNKDKRGQNKEPTEFKEFVERARQNPLLTTQRTYTLHRQAKRRYRRLPTLALGLHTEWQADLAIFDRLGKQNRGYKYLLVCIDTLSRQVFVEPVKTKTSANMIIAFDRIFKRSKYIPWKVLTDQGKEFTARAVQQFFRTKDVEHFCMLTSPQFHAGMADVRIVASKSAFTATLRRGTRTSG

SEQ ID NO: 155593 - protein, 175 aa, Heterodera glycines
MGQKRREEKVIKIELNERNENSQSAAVDQMGEEMGNDRNDQMGNYTDQNLFKSDQNINDQQKREIVKKFNAIKEKLREKGKYKRKDQSKIERKIAKLLGTNRKLIQKWKNELNLNKKKMKKQLYDEKKREFIERFDEFKELYGQGKQKEFAKGLSISEATFLRWKKELGTKLPQK

SEQ ID NO: 155594 - protein, 43 aa, Heterodera glycines
MKWKKEQLKKKYKKSPKTAQECKVCGRVARFKYYKIQSCDEIY

SEQ ID NO: 155595 - protein, 95 aa, Heterodera glycines
MLFGIDDCLGNHLRHGVRPSKRLRLTPLDAVVGGGGRSDGGVVGVTKSMSIPILTLHESFHQFFDPFEDWDKVVLTYLHFSDRMCHFQLPFPKIK

SEQ ID NO: 155596 - protein, 38 aa, Heterodera glycines
MISMANVTLSSFLSPFFAPLIRETIWNDVEQTQLQYGS

SEQ ID NO: 155597 - protein, 89 aa, Heterodera glycines
MSEFTSSDGSGKSVSSKVSESESYDATTLGKLMNLDAKVVEWLEKEPYTDDDPLLVLDFLGPFNNLHGDYNQNKAFLVQKLVCLNSKLT

SEQ ID NO: 155598 - protein, 175 aa, Heterodera glycines
MDARVLHVDYVVVGGGVAGVCVVQELCDLLERDEVAGTSNHRIVFISGAEGFVKRVANQRQSVRKVHVISDVELIGLSDQRPSSFAIDSAVSFCELPSHFLGAQTDWPLWAQLSNGERWLGCDLIVDASGVVPNSDQWKSDCPEVVPLCLSPENVPQFVLSFLLPKIMAFWSTNR

SEQ ID NO: 155599 - protein, 105 aa, Heterodera glycines
LLDPVNTESCKYLYPDPICLTLFPGSKNIEELLVHFIMDARVLHVDYVVVGGGVAGVCVVQELCDLLERDEVAGTSNHRIVFISGAEGFVKRVANQRQVEMSVQA

SEQ ID NO: 155600 - protein, 78 aa, Heterodera glycines
MSVFSSSDSATCSNSEAFFESAEELGEALDLHPDVIKYLKEAPRSDEDPILVLDYTDLFNGLQGTLKDNKTWVANLLV

SEQ ID NO: 155601 - protein, 121 aa, Heterodera glycines
MEQLSEIYAIRALLRHYWKKGTNAEETVRKICAVEGPNVVDIETAHNWFSWFESGHLTLEPKKTIWLPSETWDEVFKFVPFSDLHQHVQMTCQRFWALSEPILNRLCPRVAKPIKICWESE

SEQ ID NO: 155602 - protein, 156 aa, Heterodera glycines
MTFVKTTVEALKQLQTSFTSDQMPIFNTLITTLSSQIDLLNGSISQLRSTALSTEGMPISAEELERQRSVVIIGMPEHNDSSPAKRAEMDRSKINCLFDSLGIECGTIAYRMGRSFNPAQKSPRPLKILLPSRGFQKQALAGARLDCVCWERYFER

SEQ ID NO: 155603 - protein, 58 aa, Heterodera glycines
FRNSFVFVLSFHLHCPTDWKMITDMQLGIMANVLGVSIFILVIFYHYIVANQKKQSPQ

SEQ ID NO: 155604 - protein, 277 aa, Heterodera glycines
MRRRNELERLYNGARQEPIWLCIVSSTGPEKQKQTIDNFLFYLEEYLNYPISNRPTVEEEKELSDRFLLLVKFFYHCEETIAWKYLKTTTSRTVQQFLDELSSFFALAVPTDQTSSADSDLRPLPVVTESVPEESIYDPPWDDRPLRFIKTMAALQSHRSTNVLPTVPSTSADSDPRPLPVVTESVPTSDLTALFAEFLRTNCVGHVPKEFLVNHLEEAIKILNLGGGQSDDNSKMSKFRKVLRSMCLLIIESDRAQCVFTGSPCVTFLDQSPGRDF

SEQ ID NO: 155605 - protein, 93 aa, Heterodera glycines
ETINLDCPPQLVPVPGEGAIPYRYCSPSAPINDGIQMYVRLNQQILFPLNWPVTTVPVIHTPGPVPHRPAQRILHVCTQAKTMALYVAECSCK

SEQ ID NO: 155606 - protein, 179 aa, Heterodera glycines
MQNYFLLPLLPLYHDNGLRIMHEKLRNPILDTLTQLQNAIGKEKKAREQKMNAIQPSSRMNNVEISNKCTNFVVMANKTGRKSQENNSKKENEPNELELNFLENIGVGAQKKVQFLIYWPKICGKKVKLHSFKTQKSVYMREWHDKYLEDMKKVLGQKRTQPRNLLTEQKYKSLMEKVK

SEQ ID NO: 155607 - protein, 191 aa, Heterodera glycines
MPTEDDFFGIKSLDSMPLPQLYQHRAKVPKSTFKRREQSGGRSDEADVFEAHFFPELSEKEEQEKMDGKNGADTDAQTFIEEQFFPRRVQQQQQMMPPLDSPPMTTTEIDTAEADDAAELFELNQSDGTSGIKQLWALIDPIWKFDRAELVDCMAKRVIYETDDLIALDKPFQMAFSSGPDDQPQLDRILQ

SEQ ID NO: 155608 - protein, 153 aa, Heterodera glycines
MQGHEADITIVTTTVTKQQQFSNWQRANFSKDRKSEFWGDAQRVNVALSRGKHGLIVIGDFLELGGSPIWSRFLNKAIEFTVVTSPSVVKSIKSPSSSYVRGLLVDDSGTSIIPSSLFFVQITKISTKEDRLIFVDSIITHHGCTANLGHFCA

SEQ ID NO: 155609 - protein, 60 aa, Heterodera glycines
ALVTSSGDHSPPAVVSANVAKEVPNSQQQNDWDAKVCHKDIEIIGEKQLTINCKGNRFGI

SEQ ID NO: 155610 - protein, 19 aa, Heterodera glycines
GPGSRSRILKSSGPGPGRA

SEQ ID NO: 155611 - protein, 34 aa, Heterodera glycines
MVFRLGLLLVLLICLVHMASSKIAEDDYCGVEDN

SEQ ID NO: 155612 - protein, 117 aa, Heterodera glycines
MSILVPGKILSRFHIAQSLHEVEKWIAPEAIPIGYGGKRVVEGADLPTGCNRPTEYGKGDYLTDGMVWERFGVGKVNYEQSVVGVGDSWTRELRAKAGQMLVYEYFANRNFEITVEN

SEQ ID NO: 155613 - protein, 137 aa, Heterodera glycines
MYIRELESPDEHSLVLFNPLRSCFRPTRDELFSAIACQRRSIARLDTERARFRRLNGAQFRVVVRLSGGFLPNFAAVMPQQQNVVNVAAVLANANPNGQNYNRLHAELSETIARLTVEISQLGYMYEQLTERLEHLT

SEQ ID NO: 155614 - protein, 32 aa, Heterodera glycines
MALMDMTMDPVVMAAVTISIGFSVDMPGQNYY

SEQ ID NO: 155615 - protein, 373 aa, Heterodera glycines
YPLKLLWLFDGLNEEPYGLLPLVNLMGKGGPTSVKSVQRIGSYQWRLEDDEPVILVPGMPLESFYWAGGRLKQDGGVVIYNVNHLKVRDGQLDSAILAAKLFGTKAKKEINFDEFDIITDAINLQKIFAFAQEAINLQKIFAFAQEAGEGLFRIDCERVGKVGKTMLMSRMEASDLMEIGHMTFDQGLKAKMAKPRSKHCTGPFFQLVSFQFGQFQFGQFKILARYEVDCADFAAAKAFKILARYEVDCADFAAAKANREPFQESEELNREPFQESEELPQKQQFEENSSIGYIEFNSSIGYIEFGQVPSNLPLQLVTTYPQGAGFPFFTWGQMFFTSADFFTSADQEVVGFFKGNGDFSKPAFYGLNDISKL

SEQ ID NO: 155616 - protein, 625 aa, Heterodera glycines
MKHFRTNHLPKKHLAIVPERGYDNAQNQSLLALRFFHWYAEEHGVVVQTAHSAGGEKKIGQYSVDGWVEEERRAIEVNGCVWHGCNECFPNDNMLMPNGKTAGEVRERDEKRLEFIESQVSRVDVYWECQIKRMLNRDPDMRESFGDYVDDGPLDIREAFMGGRTGPLKLYHKAGEGEKISYYDFTSLYPYVNFSTTYPIEHPKVLILNENVEWTSARDNPYKLSLLKVWVIPPRKCDVPVLPVKVNKRLCFPLCMQCCLDYPKGGVDFDYQCEHDDQQRGWVTTCTSIELDAALEEGYRVTKVFRVLKYRHGDDKLFRPYIAEFMSQKIEASGFDASIKGNEELEQQFITECAEKFGISIDKDNMKVNKGKRSLAKLCLNNLWGRFSLRNFGLAQTLITDDPSVLTEYVENSSIDIISIDELDEKHQLISYVQKKEWVEEHECSNIVISLWTTSKARLLLLKAMQKVVRTPGCRLLYTDTDSLIFVHPIGMNPLETGPHLGQFTDEYPKHEIVEYCSGGAKQYGLKLRRNGQDEFVLKLRGITLNYDVMQNQSLCYDTFKEEVLRYAQTGEYEPINVMYPNFLRPDIRGGGHVTSGPLQKCYRPYVGKGIVGPNYDVLNFGHTL

SEQ ID NO: 155617 - protein, 42 aa, Heterodera glycines
MFIRNIIFIDHLMSRLLKIITIDGNFTSYREEFMTRVRNLIN

SEQ ID NO: 155618 - protein, 100 aa, Heterodera glycines
MVIVYRPYVSRWRRAWTVIKAKPRFWLKYYPEFSAGWYMLVPSVIICLGTRFYFGGYPNNFGMGWNEKPFYRQFFEVRRPDDPLVLKWRLPEVLHLLFHF

SEQ ID NO: 155619 - protein, 210 aa, Heterodera glycines
MASEKFLKLSWHPLQSLFFAATISVSHFTPSPPLFRELVDDSRAPQPTTDGPRQCVVEAAPERVAAPRTAGQKRGRGRPKTVKKGRARRGKSAAQQQRTTADAATNTDATGAATVTTDAATTATTPATTTTADGATVTNANEPGATTTTTAATTNTEVTAATAPTTTADGAAATNTDATGAATTPTTNAATNTEAPAATTPATTADVALD

SEQ ID NO: 155620 - protein, 82 aa, Heterodera glycines
ISAFRRLMPNTFAFLRYILSPLRFLNYSVSLLLSSVYQSVYNLAEMTVDIVTPGTTQTATRTRTRRTASRRRASTAARSVSR

SEQ ID NO: 155621 - protein, 49 aa, Heterodera glycines
MSDNQKEANKEMEKAIFISADCWLEVFDLLAPSQLGLGIAMISRRFDYF

SEQ ID NO: 155622 - protein, 37 aa, Heterodera glycines
MNRRWICTDVWMDIFPSFDRPKLGLQMALLSYRFDVF

SEQ ID NO: 155623 - protein, 63 aa, Heterodera glycines
MNDNSTNNNTFYLAFKDLHPSWSLIGCALTYGIIATFGIIFNSSVIGVTFLTKCVISVDKFLE

SEQ ID NO: 155624 - protein, 101 aa, Heterodera glycines
MVVLIPLKVRDANELLRQEAASDFPTTSRNIVRETRSNLPIDVRVGSAPSASNMAWNYKYQKRKNQEESCPRGFAQLYTVSTIIDHCSVPCVYVLLPGKSL

SEQ ID NO: 155625 - protein, 72 aa, Heterodera glycines
MNIKGNQRLSTFLRKMIKEDEMWGVSVADFQAAPADDTKLLKCPYLIACKLKSHHPKSELETIENPGKNVFK

SEQ ID NO: 155626 - protein, 215 aa, Heterodera glycines
MFSLLLSIFPIVFLVCCNAMPNFPCCPGSQQVVAVMSNYIGTFTSEDKSTVCSTAKNTVEGIKNELSYRIGCPRGGQAQIVNEIDRQLTNIAKMEINYEDECPYNLGFARAMFDLAAAAAGHAGNDTEWQNMKSKFVQESQAIKAIGQEMNIEVTDVHIGHPSKGISAHQISAHQNVPSPSHVIANPGQHFGWPERKTHRCHRILTFESKEKLNK

SEQ ID NO: 155627 - protein, 101 aa, Heterodera glycines
MFSLMLSIFPIVFLVCCKAMPNFPCCPGSQQVVAVMSNYIGTFTSEDKSTVCSTAKNTVEGIKSELSSRVGCPSGGEAQIVNEIDRQLTSNYNTISRSLEI

SEQ ID NO: 155628 - protein, 105 aa, Heterodera glycines
MLSKVCFPKCLLLLLFGCIIGNKFSLCDQILSPQTTEEKDYSECGIPDFDPFNERSAEDSSEISHSCTEPGILTKTGTGTYGDQKSRDRDLDFRPGLGPTGDFPK

SEQ ID NO: 155629 - protein, 29 aa, Heterodera glycines
MAISFFEKFSMQQTLSNMKRSAKNGYLFF

SEQ ID NO: 155630 - protein, 29 aa, Heterodera glycines
MAISIFEKFSMQQTLSNMKRSAKNGYLYF

SEQ ID NO: 155631 - protein, 179 aa, Heterodera glycines
MKRRVAPLTTATAPAEQHQIIGPESPKPHEETPKNVEPKDELATKKHKVDDRELWKLAKGKFLLTTYLCHDDWNRLYNNQQKVKRLEGDRFAFGFEMCEECVWANCRATDLLAPMKKKMRRVPFGSVQGVRKSAGEEQRKNAYGTTPWAHQHGIWADDQRTAAQYNGSAQPNGSRTSSW

SEQ ID NO: 155632 - protein, 29 aa, Heterodera glycines
MAISIFEKFSMQQTLSNMKRSAKNGYLYF

SEQ ID NO: 155633 - protein, 185 aa, Heterodera glycines
MVLVSTFCAQLLNCPVKSLRDRLNHPEDRALVLKHIIGRKVRTTYNDRNGLTKTFFVTGISAQGAAFLPAYGQLRNPFNINVAAHFYARHRIKLHFPYAPCIIERFSGGGEDRHYPMELLELIDDNMDMDINNNNEHWLGRLFTEIDDKQSSSNLSDTTMRLVFEGDMDEDSGRNECSQSTVPLY

SEQ ID NO: 155634 - protein, 23 aa, Heterodera glycines
LMEREGLLKIIRNTQRYQKPFMQ

SEQ ID NO: 155635 - protein, 33 aa, Heterodera glycines
MMISLINDQWNTNEKNLVIFPFFFFYTKFGLKH

SEQ ID NO: 155636 - protein, 51 aa, Heterodera glycines
MIAFNFTQIVMRRTNWENASFPKNSSILLKESDVHLKVLYDLFYVTFRWDD

SEQ ID NO: 155637 - protein, 109 aa, Heterodera glycines
MRLFNSIALVLSAFFFVLVGFVPENLPFVAILIMTLNLAAVACNTGGFYKCATLVTRQYAHFVVAGIQFEKSVTLFVAPFLYALFISDESSLVQWRAIFIGMAVVLLIV

SEQ ID NO: 155638 - protein, 98 aa, Heterodera glycines
ATRVSVFGQKTGFWYCWVLKRRVRSNAGEVKEKEKKKGLLRTVSSLFTNSKKKSSSSSKENHLQEFVKRHAKLVPPQNLEKTFPNGLCFPALLSSFVQ

SEQ ID NO: 155639 - protein, 351 aa, Heterodera glycines
MAKVANRKRNERRIRAVQDLARHLNHRMNRHRHRQRDGKRDPSEERHIRMTAERYADQLSRLGDDHIHRLQHQFPQLPNPRRRRSEVGGNLKGGKSQPKLASMVVRPPQGELLPSKDVGGAAPGASNSHSRNENEEEGREKAEKERGSRPRVLPPPGDSFGELLEKEAKARAEVAELEARAKKAKMEREEEEQKLKSAKEARLRDLETQADDLRQMLGDASWPWSRGKDGKNGEAVAPRAGKAVAMPAVPMEDDGVSLADSEMEVVPAGGSVARSDEMTKTGGRSAPAKGGSHSWEGFLVFGVDDGKPRELSREEEDYFGGGALDHPVAFPRREKRGKRNKWSNGSTSRRN

SEQ ID NO: 155640 - protein, 90 aa, Heterodera glycines
MSSIKLNEILPSPIQNEGKDEWANVVTRDPWFKGHEVAINHNAASKTVAIKEPPPYGHRKGFVPRTPEDFGDGGAFPEIHIAQFPLGPLK

SEQ ID NO: 155641 - protein, 141 aa, Heterodera glycines
MAKKKLLLKLQGRRGAEQLKKRREERKAQTAKATEARLAKNTAPQPNTDAETPQPSEEEPSTSEAPARDNDGRPPSTPTPMTPQEMDVPSVEMVDTDVQIPSTPADEDQQAEPVPSTSTARCDLMATPSTSKCAGAFGLDD

SEQ ID NO: 155642 - protein, 194 aa, Heterodera glycines
MVFLAFIHPNLKEDKIHVAKFFATVRGTTPGGMEQMGRIGIGRDGRHFRCAAVDSAMHWERCAWAGLDLGLPRGRGRGRMEVRTVAPVLPGAQRTKNHALINAIDYTRHTLDGAASLLNSNRYFPSRATIKESSIAKIGSVCRRLYRIFSHAYFHHRQIFDSFEEETALCNRFTKFVQKYQLIAVDHLIVPIGP

SEQ ID NO: 155643 - protein, 66 aa, Heterodera glycines
LNKFLNFLRNCFSKMKSSIPHFPSVPAAPNSVSFSAIRSGAQNCESQCIRNEIENRDSCPIKLILA

SEQ ID NO: 155644 - protein, 48 aa, Heterodera glycines
MDGTFAVQQWIQQCIGRDAHGLDLILDCPAGVDEGSSIKYQKRAGSER

SEQ ID NO: 155645 - protein, 116 aa, Heterodera glycines
RSAATLLPIIAENIEVGTSIVSDGWAAYGGINNMQQQYNHRFVNHQLHFVDPTNPQIHTQGIEATWRALKQSLKHLHGTNPELLQTYLYQYAFRRYHSNTKIFQNILEEMRHNYPV

SEQ ID NO: 155646 - protein, 384 aa, Heterodera glycines
PAEQPACLIEFSRGRLTAEGACPSLYMGLQNGLSTPNDVNLNGSIGCLLCHGIMNIVELLRNESVTLKRITAYHPVTLCWMYFNLCSPEQNSLLQRINNRVEHHDYQQNGHGLNNSLGVPRQRFTILQPNDGDVMPPGALAALGDLSYETLVREYLGEDGPAVAMKSLSKSNPKQRKFKPIFTQIWFFFQPYASVTTPKPETVLLLGHSSSKHFGCSDERNWQIYAKHGQGGLKRMRSWEGAKYNRGRMLNRAYEWVFGMVERGTNSVRFFPVADRSAATLLPIIAENIEVGTSIVSDGWAAYAMSDKSVYSTSIQIDMTLFTDVTPPDVHYALHHQSELAPAPVLFSLIYLFVMLRIKVNSPTRSQEDIDRWQVTSHRADGPN

SEQ ID NO: 155647 - protein, 77 aa, Heterodera glycines
MVAVGIAVHGTTDGANEFVAISEKRRSMNLDKKNFCQSIFCQNWTFSKSENIPDKSNRWPRRGLNSKNIMNRIKKSI

SEQ ID NO: 155648 - protein, 46 aa, Heterodera glycines
MPAPNASPSTLMDVRIRSLFNGTKITIIWQKIGEKITYIAIFFDYY

SEQ ID NO: 155649 - protein, 105 aa, Heterodera glycines
NMFPENIVQATMQQMETTYVYDANKTDVPLKYKTVYKDGLNILGTWYSPIGICCLIMGHILQVEDMSNTARSLAMDGTALYEAVATIFIAQMNDVHLSFGQVITV

SEQ ID NO: 155650 - protein, 51 aa, Heterodera glycines
MYADDVKLYYAYGNDDHSNQLDKAIEALEKCVSEMLNIVVVFDRNEAFYAK

SEQ ID NO: 155651 - protein, 76 aa, Heterodera glycines
MVRATTARTRASAERARTIKINRRNAKKARAAIGRAGHSGNAMGREKCMMCLSKVSDMTRVTMGCVHQFHRRWRSG

SEQ ID NO: 155652 - protein, 65 aa, Heterodera glycines
MINVWKMWRKNVGQNDQSVKETDQSAGISDHCMLQVDQHDGRSDQTNKCVDLVLLKAVKRSKCAN

SEQ ID NO: 155653 - protein, 50 aa, Heterodera glycines
IFCWSNHQSPFFNHELTSFAIPPTFYHEIFIYIYIYILLLFMENKKSISC

SEQ ID NO: 155654 - protein, 51 aa, Heterodera glycines
MSLFSKQMSEQIATSIKDNYATFFPNSKEAKFAQKSNTAWDDLTNELMQLG

SEQ ID NO: 155655 - protein, 89 aa, Heterodera glycines
MPKTEFGATPSPSFLPKAFRRTVNPVVDLQRDVLELQKDFFKHSAMPLVDKMSAYYDYKIAKMMASNDQQQKSEEKEENKEFDENELDY

SEQ ID NO: 155656 - protein, 136 aa, Heterodera glycines
MFLKRNSVLQNLPFVPRAVEPSPMAPVKHIFMENARLLKNAGLEEICADCSSPCRTHFDVRLLHCRWCLCVLPIGKAKRNCGPKRGECQQIFWERQNITGLIYWPMLIQTLDIIEREKHEMLDQIWALINDPTVPQ

SEQ ID NO: 155657 - protein, 176 aa, Heterodera glycines
LSLRASGKDYDHCLIDLVSILPSSTTPLIDCDVDFRVPWYISVENLSRNLGRVREVRYADLRAENWKPISNLHDMSSSLSQTLCYKRLTISNPISCQILLYRSRSIGRKYQRSTRTHCHHSSPKIYSASAKEPCSLATNLPVEIRTPKQLVNIYSKRMQIEETFRDLKSPAYELGL

SEQ ID NO: 155658 - protein, 73 aa, Heterodera glycines
EMSDRVILAPLNVDVDEINEKVLDLINSEEKIYKSIDTAGNDSSFDCVPEYLNTLYTTSLPRHELRLKNNAIV

SEQ ID NO: 155659 - protein, 90 aa, Heterodera glycines
MFFLNSIPSENGLILLLFAIRFISTLCVVDSPKADENVEDKNNSQPIVPTMNDQLNEYMQKNEDGQSNKNEDSSIRAEHASVQSSSFGGK

SEQ ID NO: 155660 - protein, 89 aa, Heterodera glycines
SNISKIDEEYVAESSDQQNVGKTKNEDLTSSNIGDANIENEIHEEATKLDGIEEIGNKSAKNNGRLEMYEQNAKLIEQLNRDQSEQNAN

SEQ ID NO: 155661 - protein, 64 aa, Heterodera glycines
MPRSKSVNENNEKESHQNSPKNIMERQLDNAESSVAKSADHMPPSSPSPIGWAKGRTVRNKMPN

SEQ ID NO: 155662 - protein, 228 aa, Heterodera glycines
MNKWIALGVLIAIISALDSAVLRQRRIVKAGNAPKSEQKEKPGEANLRKKRQSGGQGDEAEKMPYKFDLTCRFYSSNPFRMENDEVPPRDTFASEAEYEEARRLAVLRVRADEEKARIKKPSEESSLFQNDVKYFHCLDDETYYTKELDPQKIMALHHAILVIKKDRASAAGVYRMTDVFVGDDPIGVPAWEIPAAMAHFCRWLKVAEEELNRGGELARFVATAHLRL

SEQ ID NO: 155663 - protein, 101 aa, Heterodera glycines
MSVNPQNIIVLLKKYFSKYNDETPINSVEINISKNFAATIEKCIKFDEEMLLSEDLVIDEEANFDELDDESDEFDYDSAEEFDGNQSPNGSGPFVYCRFVF

SEQ ID NO: 155664 - protein, 86 aa, Heterodera glycines
MQPKIIKNIFTITETLTPNKFWEVGVLEHDEDFESPPHSSDEEAPEDEVDSDFDKDEEEDEPTPAEEDPEQIERRRKVFFWKEINS

SEQ ID NO: 155665 - protein, 31 aa, Heterodera glycines
VDLVTDRGELAELAHILTEGTVGGQPMKTKP

SEQ ID NO: 155666 - protein, 109 aa, Heterodera glycines
MDKLFCANFAVKTWEKESGAPIECQFDVKSVNAKIDETEQIGTKWVFCMYASANEKLQGKPNIFEQPNKVEEILKPKYFIFNLEIKPTYGNDFVFYMPCILNSIIINKF

SEQ ID NO: 155667 - protein, 205 aa, Heterodera glycines
MDQNAKIWKYGHKSRNMEKYGYRNPSFLSSSLQAFLPPIYRFFYGDNFSCEQIERKWRNSVVICNAGYASNSFVILQQNQDLLQFKQHKMVEEAVQEQERRRSIVVMGLAESAETKPSDRVAADHTAVSSVLDELGIKCPISNYRMGSPQWKNMNIRPSLSPAELDVRRQLQKECAEKRKDGGDWVIYAGTVIERSDIPNFRKIN

SEQ ID NO: 155668 - protein, 51 aa, Heterodera glycines; identical to SEQ ID NO: 124998

SEQ ID NO: 155669 - protein, 29 aa, Heterodera glycines
MYLTCSTERPGWMRSLPLNSTRPRPQSNT

SEQ ID NO: 155670 - protein, 131 aa, Heterodera glycines
NGINSRFLFAGVGPKMSNLALQIAFGKVEGIAVDTHVHRIANRLGWVSTKVHRIANRLGWVSTKSAEETEQRLKELLPKSEWPSINKLLVGFGQTICLPVRPKCDECANRSLCPWSPANGAAPKPKSKKKR

SEQ ID NO: 155671 - protein, 313 aa, Heterodera glycines
MDILPSFDRPQLGLKLAILSPRFNALVGKHFDGKSELTIWRTIIIDKDKGPEPKLYVMDEKFYKFVPFPLPERPLPSKIRFKRLRIDYIDHFVIAFLRSNHQIFNKRGTNLELWIYSAHSSDDQPIWDVFVREMWPIFASNIRHLDFIDGDGLDNLRRRTSPTILTDLNQLNSIYSFGLLPDPISDFDVPNATISAGQALSKWLQTPRKDGQPKRLRCKDFNKHVDIDWVNKFKEQFLRANAISSVCYEIHFSVHGPSMQMVPFELANEQTKEKLTLIKAKENDLEDNCWIMKRCKIGESAAVQLQKDENCNN

SEQ ID NO: 155672 - protein, 211 aa, Heterodera glycines
FSTRANQNGQHGNRSREVRFDNTNGRAYTRRNGSYSSEPSSGRRSSFSRHQDGARTYVPSTAVQRPISPNGCDSGGMFLMVDPFNIPNTLGAQIQVFDLQENANLGIRHIIGYCIPLRCCVGLFKHIQPCRAIKSMESQSMDEQFAHKYKFHPNLPLSVVPLHDTEFHRMMGSPVMPLRDGYQQRNRFFVRPSSPRLAQQQRHEFDDTAMH

SEQ ID NO: 155673 - protein, 99 aa, Heterodera glycines
MEDMGLYLEKKEGEVAVFDATNTTRQRRKWLVDYCQRERINPKFRIFFVESEVKVNSPDYRGKMTEEEAKADFLRRIENYKLQYEPLDNEKDDHLSYIK

SEQ ID NO: 155674 - protein, 176 aa, Heterodera glycines
GICEGLTYEDFQTRYPKQFAERDKDKYHYRYPSGESYEDLVVRLEPVIMELERQSDILVVSHQAVLRCILAYFNNNNRADLPYLNVPLHTVIKLTPKAYSEWAVTARSLLIGNTLGCNVELFKFKVDAVDTYREKPNEPMKKLLAEPIPAPIPEERESSISDDAVEPPPSQIVPLN

SEQ ID NO: 155675 - protein, 259 aa, Heterodera glycines
MPTAEWAMAQQRSTKRLAVEATETPAAKIRARMAQQTSIKRFADEYTEMPEEILERAQQTATKRFADEMEMEIPAAEWAMAQQTDTMQMPAAKIQAMSQQTAPTAQIQAMAQQNVSGSEVAELQSDNAAPEITTKRGRPKLEYDGYLYLFERRSADGKLKFWRCEKFKTKYTKCSARLHTDEHNAMRKTLNEHVCDQSAAHVEAQRLRTAIKRYAAEATEMSAEEIRAIALQNVPGSVVAELPNKDAMEKMVRRMRQRN

SEQ ID NO: 155676 - protein, 255 aa, Heterodera glycines
MELCQTTTAAHHRTSAEEEAAHHHQQQHQTMSDKKKEEPKKEEPKKEEPKKEEEKKEEPKKEEKKDEKGGKDKEEKRRSKKSGKSSKKKDKKKKDGKKSRKDRKKEEKPSTGDAAVATTPAAAATTPATAEAAPTKEQPPAAVVEAATPPAAAEPAADAAKEEPKSAETTTDQPPGDAPAADGAAEPKEEQPSAETKTDQPPVDAPAADGAAEPKEEQPSAETTTDPPTGDAAAADGAAEPKEEQPETDKPAADE

SEQ ID NO: 155677 - protein, 56 aa, Heterodera glycines
GTTLVRRGTTVIKRGTKVNGRGTTLIRRDTTVIRRGTTVIRRGTTVIRRGTTVIRR

SEQ ID NO: 155678 - protein, 63 aa, Heterodera glycines
IKFIENNVKMHKKNNVTPSGFEPAPPPLKMMPQNPQSHRDSEVLTMSKVKSDHVFVISGPNNP

SEQ ID NO: 155679 - protein, 124 aa, Heterodera glycines
MSAEREAQRALEEERMREREERERVAREEAEREAEERRRMDRIEAQREAELLRRAKLFRHILLDGDGQADMKTAREVLKCEPEEEAVLNDVIRQVDKVTNGGKRNRQLREKLEMDDQVGRKLRI

SEQ ID NO: 155680 - protein, 610 aa, Heterodera glycines
MAADIGQILQQLVKNQTEAFQALLRNAQTNPNSVNHSTIYSTINSQLGQFTYNPELDLTFQAWLDRFGPFIQVDGKDLPDAMQVRLLLGKLGQEEYARHAERVLPKLPTDFTLAQTIDKLKILFGETKSIFTRRYECFQLAKSFSQSPLDFASQVNAMCERSKMDLTKDEIKALIFLTGLSDEDRELRERCLRILEEAIKKTPPEVITFEKLTEECRAFLSLRNTSQSLATVSGTNAITLKPQKLKEQQLKKRSISQRPSAKAQSNKNRSPSPFQRQPKPPSPCRFCGQMHWVRDCSQAPTCSKCNRRGHYRSECRSASSARPNSQRYNTTMSVFNITDDDLSEWIMINCRINNTDASLMADSRSRLSVIQIGLWEKLGKPKLISGIKKAKSYSGHFFEILGFFVCSVTYQGCTLQLKCHVAPDGPMNLFGLPWIKAFEMALQRPIATTLNLAQAHAVTVCDDPNTLAKNLKQKFSKVFSSSLGLCTKMRAHLQLKPDAQPIFCRPRPVPHAAKAAVDDELDRLLACGAIKSVDFSKWAAPIVVVKKKCGNVRVCIDFATGLNNSLELNRHPLPRIDDIFASLEGCTVFSQIDFRDAYFQVELDEESKEL

SEQ ID NO: 155681 - protein, 21 aa, Heterodera glycines
NAQFNRTRTKEQQRKNSWLRF

SEQ ID NO: 155682 - protein, 102 aa, Heterodera glycines
MALTRKWPSRENGHAKTATRKRPRENGPHAKMATRKRPSRENGHAKTATRKWPRENGYAKMATRKRPRENGHAKTATRKRPRENGHAKMATRKRPRENVLAR

SEQ ID NO: 155683 - protein, 40 aa, Heterodera glycines
AVFAWQFRVVAHKRIFYFFIVWKIFSLPFYFWCLIQYIFK

SEQ ID NO: 155684 - protein, 62 aa, Heterodera glycines
KISSETLSQYHVKGHMDHFDQPAICYPRYRGPSTRNRLPTGLKLIRRVGEKLIKENYPSTEE

SEQ ID NO: 155685 - protein, 18 aa, Heterodera glycines
MPKGIESRLTKIPKIEQK

SEQ ID NO: 155686 - protein, 112 aa, Heterodera glycines
IPHNTQADDTVVIDIGTGKVTDYVKFDAGNICMITGGHNIGRVGIVGHRERHPGSFDIVHIKDAAGHSFATRMTNVFIIGKGATPLISLPASKGIRLSIAEERDRRLAQKQK

SEQ ID NO: 155687 - protein, 34 aa, Heterodera glycines
YSRTRQQFCRERFLDENGKLKRVNELIPFSVGKW

SEQ ID NO: 155688 - protein, 369 aa, Heterodera glycines
MPQSQPSVVVTDYLIKWHGNVFINWGKFVPIVNGGKLTKYVHTMIGTVDYKKMAMLCSFFQGIVNSYFAKRKWIVDFIEIRCNEKEGKKEFELAETRSNKTIELPKHLPDKIRGFVCISITFLDQKAIEFLRHFHRLFGTCQIKLSIGTSSILAIGFFYCFLWPRIKNQISFIEFRDDQAFSRMRDIAPSIFSELPSLRIFESLEDPFPAFPAIDSTNAVNGQLLAHWLIKALPNEIPKIVRCSIEEPDTAGDLPAKIGAIKSAFSKSSFSANFIIQMTIPDETIIAPFDVFNKKTGRRLLLDDSHDQNLLLISCPIKRDKKAWTKWREEALQGSEIYTWNLIDLTAGDADIGEWNSAQFPDLMANMQK

SEQ ID NO: 155689 - protein, 95 aa, Heterodera glycines
MFDMFDAILFQCKTFPRLSIDHFKWHNITNISPWRKPNSNDEIHGRRSIGKSLNGKKSMTINLYAKIDMFRSTLFSVTITDLMLIIFGLHWCSRI

SEQ ID NO: 155690 - protein, 204 aa, Heterodera glycines
MDRKNVKANYYLGKVYVHQGQFDEAIKVLSRAHEGVLNLKQTYGDEITQLLRFRQEEDKRITQEIELQSYLNQLIDDDIAKKVNQLEDKKENDVEEKAEELKTQGDTFKKQLNNLFAQVDDRRRKRDLPDYLCGKISFELLKDPVITPSGITYDRQDILTHLHRVGHFDPVTRVPLTADQLIPNFSMKEVVDHFVQENEWAIDF

SEQ ID NO: 155691 - protein, 250 aa, Heterodera glycines
FSLTYLIFFLTLILPNAFGESILKINTFPTIFSPSLGLCNKMCAHLHLKSGVQPVFCRPRPVPHAAKSAVDAELDRLVACGAIKQVDYSKWAAPIVAVRKKNGDVRVCIDFATGLNDCLELNRHPLPRIDDIFAALEDSTVFSQIDFRDAYLQIALDEESKELVGINTHRGLFQYQRLPFGVKSAPSIFKLMDELTAGLSGVFCYLDDFIVATPTLEEHHSLLNKFFSRLQDWGLRVHLNKCKFLCSQIK

SEQ ID NO: 155692 - protein, 35 aa, Heterodera glycines
MGRCTNALSVAVAMTYTFTNVSFLKTVHSEAFYGV

SEQ ID NO: 155693 - protein, 50 aa, Heterodera glycines
MDLGFHVGPDFLDKKPQVQEQFPNLFGFQSRMPCLDLSFPDKNQGKCILL

SEQ ID NO: 155694 - protein, 56 aa, Heterodera glycines
MLLNEKQKQNPSGEAASYVVTGANAISERNRRRMEEVKKEEEESEMDNNLNDKNEK

SEQ ID NO: 155695 - protein, 52 aa, Heterodera glycines
MSMAITKCAGQAAVDSTGAVPPAPLCCNKIGWKWFINTVSRIYSNPHDAISY

SEQ ID NO: 155696 - protein, 79 aa, Heterodera glycines
MTFSTNFIIVLGTLVHLRKKIFGNYLKNELFWSRSPHCSIPKLTSVLLYMDVDELDMASKKVAVRTNKNTPNNPKSRRH

SEQ ID NO: 155697 - protein, 165 aa, Heterodera glycines
AFLHDISVGHCKRFTLIGKDSKSGEFDAVFDQDKWHNQLLMSSTNGRPTEEQQHQFMDELAAKLPPAGRLCIPISISPADWFFDVIGMHKNPLKKLTFFYFSDQLFVALCSFYVCYAELIDFLLFSGEEYEVSERNTWPQQIQPDKIASKIAFQSKSDGFVCGSN

SEQ ID NO: 155698 - protein, 171 aa, Heterodera glycines
MEIINANGKALPIPQNPLPNKFIGFRSILINFFDHNVLTFLRRFFTKCETKIHITTENIRISEFFVFTIWPMFKDIIHVMIFNPITFRQNRQFAPSMLNFCPSLRVVAFDDGILPEFPPDDSANASDGQAVAKWLFSPNPDNLPKMLSIENLAVNQWSTLKGQIKAVICQI

SEQ ID NO: 155699 - protein, 64 aa, Heterodera glycines
MTPGGTPFVLAVVAAVGVLRLIAVDHHFVDVVVGRPGDVAVYWLMCLDQQRAIIFIMGKSIKIA

SEQ ID NO: 155700 - protein, 377 aa, Heterodera glycines
STFADTVFEPGRDNAIVVEFYADWCGHCRAFAPFYRQFASLVKRWSDWCGHCRAFAPFYRQFASLVKRWSDIVQVGAVNCADNVGAVNCADNFNGQICRSNSVAYFPMIKYFPRSANSVSDGILMESAHSGTNLRDQLAAKLLNEYNRFGYSNLLNEYNRFGYSNWPNFRHLEVTVNTRFEDLWHGIFNTRFEDLWHGIFPSANFLLIIFEQFDAVGVQSILDLWQSILDLWQNRKQIGVRRTLSNSPLVPMLGIKKFPYVAMFKRDDQQSIFMEQENETERELFGQISGSRHSGRSDAETLSSKRAPNRCVHVDVIDCERFPDRCKQLYFVSETDLLKACKQLYFVSETDLLKAVRMALLDEVRMALLDEVTRMDE

SEQ ID NO: 155701 - protein, 99 aa, Heterodera glycines
MNRRWICNDVWMDIFPSFDRPQLGLKLALLSPRFNALVDKHFNGKSELPIWRSIEIHKGKGPEPKLFVQIGDKYNKFMEFPLPDRPLPSKIRFKWLRIK

SEQ ID NO: 155702 - protein, 33 aa, Heterodera glycines; identical to SEQ ID NO: 154596

SEQ ID NO: 155703 - protein, 28 aa, Heterodera glycines
MSQEELLLSFQDETALDWWKMNQIAEMP

SEQ ID NO: 155704 - protein, 135 aa, Heterodera glycines
MAKDSKNKVAKMKEMISELKEGKDFFLFSADQTDDQPMFLWEDGPSDVSLFRALKICVSEVADEYDQKFVDIKLDALFQLELTQFAKFILCMDKHLKDKRKKDGDEMVAKLHLDKMANLLEGENGDEFGAFLVKN

SEQ ID NO: 155705 - protein, 40 aa, Heterodera glycines
MIRGKAPQKRQRVRKAAPRQQTQIAHWYRRKFSPDHRSLS

SEQ ID NO: 155706 - protein, 162 aa, Heterodera glycines
MPFNGQGKQQQQTIVRDTSVTRPAAGAAPPPPPHVIRTTVRDRLNAGPFLQNGDNGPRIAHVANAAAVLKTTERGEESETGRDLSAEFHKLERRGLLPPAHKSASKAVYGGPKPTPRDFLLNRKNAAAEKWGQRKKWRRILSTANPTKRKRRKKREKGEENE

SEQ ID NO: 155707 - protein, 131 aa, Heterodera glycines
MGLLVFDSGDIDSVGFDKGFEIFQFVMADQNSCGSSKCCGSKSNRGQNEGKMTPNNSQPSSGGCGLVAKTTGPRKGPRAAVQIRPSTPIFRLNNMVTLGGHPRSFGLHTTRHSRNNSWQWGKRTGGAPILA

SEQ ID NO: 155708 - protein, 39 aa, Heterodera glycines
MPLRIGFCIGGLCADKKRPNVQHRVKFAQDELVYYVPAG

SEQ ID NO: 155709 - protein, 72 aa, Heterodera glycines
MELNELSSWYDILQDDEDNILNWFTPVTARDVCQEVLAIAQERCMPFEKIVKWKQILDKICAQIAQKKVIIL

SEQ ID NO: 155710 - protein, 230 aa, Heterodera glycines
MAINICDKKALVNQILGQADITVTTSGITVSGPRLSTPRFIPFDECGRCRACKATEVEMDTMVTKEGITLWCSRVSKSQFVPFDAVYDLPGHCFFRVKNKARVFNVPYGDLPSDTCTTPTTTTQGTQTNMQQDLKRKAKVALDLVEAGLMADTMQDGVRWKKAKTAFSVLGNLLLAESLDNKVTNSPVEEQNYVQEEPRRDEEENKEDLGDIDKTLDEFFASIKASTSNM

SEQ ID NO: 155711 - protein, 51 aa, Heterodera glycines
MSGKLVRCELSDPANQSEIIGYTVYNILIIEVAEFLCYAMLWLISWWNQCQ

SEQ ID NO: 155712 - protein, 170 aa, Heterodera glycines
MFFALDEDRLPMASTSMAVYPKIAHWSMYYVKERYRGHQLGRALTRRAMEMAGDRHIFGYGEKLHFDKFGFACIPLREPALVAEMWAKYAEEYGMCHFLDWQLWSLLAKSADVRPERLDNDSSVVLKDWQEVPFQTLLNFDVQQTAGIDRSMYLREALRLPESVAKVCHH

SEQ ID NO: 155713 - protein, 108 aa, Heterodera glycines
MWRKAFGPNNFGMFFALDEDRVPMASTSMAVYPKIAHWSMYYVKERYRGHQLGRALTRRAMEMAGDRLIFGYGDSRSRLEKTLGFKIYEFLGPAVPIGASSKKLRFLR

SEQ ID NO: 155714 - protein, 127 aa, Heterodera glycines
MFNWFSRSPPLFSVPYCSNLPAPTRPPSSTRCSTKHRRPTPSPAHPPPTHPKWARAAAYTHSAVHAPFSAFPRPAHFFDQRRTRVADLSSKQQQRVDEFSAGQNSGMAQNDGNNANELMDNLKLAAN

SEQ ID NO: 155715 - protein, 265 aa, Heterodera glycines
MWAKYAEEYGMCHFLDWQLWSLLAKSADVRPERLDNDSSVVLKDWQEVPFQKLLNFDVQQTAGIDRSMYLREALRLPESVAKVVISKETGEVIGMCQARHLMRRRIGISLFYAERSVIGRLLSSPCRTAPICRPRPVRQVRLAALQNTVDQRRVLAHPPPTHPKWARAAAYTHSAVHAPFSAFPRPAHFFDQRRTRVADLSSKQQQQQRVDEFSAGQNSGMAQNDGNNANELMDNLKLAANVFKKVPIIFIRIYFLTVMPLYIYV

SEQ ID NO: 155716 - protein, 129 aa, Heterodera glycines
MHILKSLTVIIVFVMFGWTLNGLSTFYMPLLKLSPEDSISFAAGLVQMTLVASASNTPVLYVFSAEYRHCFQKAFPWLAKQQNAVSNVVFVGASASNLTRRRGQQGQAAADQQQQQQQQRSLPIVSRTL

SEQ ID NO: 155717 - protein, 112 aa, Heterodera glycines
MKRTNATNITPPRAKRSMAPAQDLDPNTVALTEQERHRTLVFLGLPESAAALPSERVQEDRKVATKILDHLDVEAEPTAVFRLGRYDPQRTTPRPLKVVMPTPTHGTRRLEA

SEQ ID NO: 155718 - protein, 19 aa, Heterodera glycines
GLLGSWVRFPPGELPFMFY

SEQ ID NO: 155719 - protein, 104 aa, Heterodera glycines
MARLFVRPALTKEQLKKKYEERVRKRQLTPTPMAPASSQTNAPTPVVEDGPNQKEASDDISQPPEVFDKTILVCYETLISLPPTDKIVHQIQSLKKQYPHLFNK

SEQ ID NO: 155720 - protein, 153 aa, Heterodera glycines
MLENQIESLKFSIFFLFISFFIFTMPRGCSANFSSNNKNISNRRVPALQFLETLLKLKDVRVELADFSGDDHNNNLVSFQRADDDDALLIPGRRGGAETHHRHNNFAMAVTKPKAVRTELAATSAAKRMSGAETALMEANLQRALRISNKTIN

SEQ ID NO: 155721 - protein, 33 aa, Heterodera glycines
MPFACSFYVFVTAPLNKQQLMDKCISIIYEIID

SEQ ID NO: 155722 - protein, 31 aa, Heterodera glycines
MMSGQETFDMMMSTSLTFFIIESNFKIRENA

SEQ ID NO: 155723 - protein, 211 aa, Heterodera glycines
MDSDADEAAEFVFFANLESLPVSAEEVALCTADEELLQQVIGYVRSGWPSKCPANDLLSFFQKRNTLSVVGGSLLSGNRVVVPASLRKRVLTALHFAHPGIVRMKALARQHVYWPGLDNDIEMLVKHCTDCQSAAKLPKKAPLCPWPTSNQIFGRVHIDFAGPCPDGKTYLILVDSLSKWPEITEMHSTTALHTITALNRIFHRYGFPYVL

SEQ ID NO: 155724 - protein, 66 aa, Heterodera glycines
MSRPLRCQPCQFNQRLVLRDNAAPQYVIRPLIQQNGSLSAAEFEEALPLGSFIKDFYGMALRIVAL

SEQ ID NO: 155725 - protein, 97 aa, Heterodera glycines
MFQNIGSNNLSIRYQRDLCQFVNRIGKMFGFNHLVYNHRIGDATVRFGTNNTAPSLAAVNGIVQRNLISGKALIDNQTKPEDHFAMLKEAWEKGPMK

SEQ ID NO: 155726 - protein, 221 aa, Heterodera glycines
MYVIRDKLATQKTAGNMFSAWFLSFCHLSVQIFLWDPIGAESMQFFPSLLKMYFIGIYARNFVPFVVVIELILATLFVRTYEKNRGHLFTVLWAPFALTIPIYIAFSPSPQSEQNQLITNLITTVVHLLIGSIELGIFYQLCRYNSKIYSNNLSIRYQLSENIRIGKQLIPPLSLNLGTIFAGTMILLWDFLDLPFYSQIFNLAAIINSIFGLLIELFIIT

SEQ ID NO: 155727 - protein, 28 aa, Heterodera glycines
VKCCCCCLVVPLLLLFLLSFFLPHKMSN

SEQ ID NO: 155728 - protein, 149 aa, Heterodera glycines
MAQLVMLLIDTVERFLRFEPIAVFIDYLLTFTLLCPVVVLLSSHQCSAVVVADDQQKHPPLLLTAAASPPVVPSSAGDAEATGKMPPSTAALPCRPVVFMPSSPRSSPLHPTPPPWVHRYARFLHSAQGRLAALCVAALMYAVGTSGVL

SEQ ID NO: 155729 - protein, 34 aa, Heterodera glycines
MTMHTCAFPAFLLLEGSEAMAGALLHQHGDRVFA

SEQ ID NO: 155730 - protein, 287 aa, Heterodera glycines
PALPPATKLAFVPSDSGTPMVLPTTKNPAQTDQRTTNGQQSNETMKETTGGHGKDFLDRFNTFVEAQVLLFFGVKMPQANCFVKVARQKAESALQATILSTAVQQHGPSGGELATFSSKLVAERLRYNQRLQRDPNDYEARKALARVDKEMNSWAQDSSLPGEFTGHTGARVLSEKELEPSDPRFHAWAKKFEITMCLDLGYLLMSRASQSVGNLFSGKTPEGPIPVQVYVELSSHNKDQFRTAPEINSGIGLKLLQRMGWQPGQGLGRERAGQLEPLALDVKADRK

SEQ ID NO: 155731 - protein, 48 aa, Heterodera glycines
MREKEKTLSWVKTFFIGVFFGIRVPGPTGSGTGYWIFKKTDPGTGLGY

SEQ ID NO: 155732 - protein, 93 aa, Heterodera glycines
MTHPTFFTLKFRSKIWEAFPSFSDSPSNSRQNWTKEFTRVMALMHAQAMAHFGLTDHQKGQMPIILTVLAMLSDAALVWPLGKLFSPKMDVVY

SEQ ID NO: 155733 - protein, 61 aa, Heterodera glycines
MILLFAQSVPIIEGEMSGKRTHQMYLPFLVISCIQLAFTMIGGIVMFFTLGSKKFIYFILL

SEQ ID NO: 155734 - protein, 112 aa, Heterodera glycines
MSGRAREITGEMIGRFRRMPEEMTERVKVPEGMTGRGTNPEEVNGRNTEKPEETRGRIIRAKQRWFIRAHIKVRYQEGTDTVTETVSTKDHYSNRNDGMKANFMVLLFGYRN

SEQ ID NO: 155735 - protein, 222 aa, Heterodera glycines
SSPSSSVSLLAIVAIFCLLCKCCISAPHPCCPGSQKVVSLMANYVGPCCPGSQKVVSLMANYVGTFAHSFSKSSLCSDAQSVAGALKGQLIGCSKGGDATLLADIEASLATHSADECAHSLGFVRAMFAIAASASSHASNNNEWQALSAQFGQQISEIDSKCAEFGIGIAKVPYDGPKGDHSQRNVHGTDSVIAMPGDHSQRNVHGTDSVIAMPGLAGSHKQ

SEQ ID NO: 155736 - protein, 190 aa, Heterodera glycines
MVDNNSKTRLDVVKSMENKVQITPRNVVPLADAHELVALANSIQSARDFVKCQAVGKLEMIAEQMEFLRKVYFLYQQCPVGAGADDGEPPQQKCQEQQCRRRFFSLISPDEWGGECALACRQMHFEGAYRLEFDQSWSRVQQNATDEATTKTKMPNSGSQKMQILERVDRLLQASSFSSLMTASMELDGI

SEQ ID NO: 155737 - protein, 21 aa, Heterodera glycines
QHQLFNLCTATAEGVTRIQHL

SEQ ID NO: 155738 - protein, 433 aa, Heterodera glycines
MDKVLDDIKNVNVYIDDILIHSNTLEEHLESLDLVFNRLQKYGLKLKGDKCNFLQNKCHYLGHILSEAGYQPSLGNKEVIDKFPEPTNVKEVKRFLGMASFFRKFIPGFASIAHPLNKLTRGNGTEFVWGGAEKAVMDELKQHLLKAPCLRPPNYDLAFYLFTDASAIAYGGALMQTKDNNEMHAVSFWSRTLTPTESKLPPTHGELAAIVHAIQNFRAILYGAELIVLTDHRPLTFLFQKASTNPKLNRWLMALQEFEPKGQFVVPKKLKVAILEQIHKAHFGIVRGKSKARRYVWWPGMSEDIENFLKECEEYRSSPCPILKGNSPAQMFLKREMRTSLDKIRISQVERDKGTPTGDPVRDKGAQNQQRQLPKYEPGDSVWMRDQQDKKWTPAILLEPIGERMWRLEMEGGGERTAHVEQIKARRMVAGRA

SEQ ID NO: 155739 - protein, 167 aa, Heterodera glycines
MEPVLSDQSRCIAALTDAIDELSLKGTEQSVNPSTDGGPAELAKEAPMNPQGGGPAPELANEAPLNPQGGGPASELAKGRTSPARSTGRAWHGKQHRQPARKAGRLNYLMRQLEREVGGSQMVRSPHPYWENRRGNGYGGPRGGGRGGYNAYRGDRSERVGPSNNGR

SEQ ID NO: 155740 - protein, 68 aa, Heterodera glycines
PHSELGQIVLISNYQKMNRRWICNDVWMDIFPSFDRPQLGLKLALLSPRFNALVDKHFNGKSELTIWR

SEQ ID NO: 155741 - protein, 219 aa, Heterodera glycines
MGLPIIQIYMIVARQLSKPITGYFMGLGKEHPAFRNRVLIPIGKTITNWSTKLRMKNLDLGSPTSVHPFSSGFRSDPSSGHFRLHCRGVLRLFLFHTQRGEGIGKRRGIERAEQKDEPGDNATECAGYGIAGRNANAAEGGQPSTICNKANHHFQDRNWTFPWSGEGKSALRESAVVNPMMPSVVMTDSQPKEQKKDMTKSISRTEALNRLANATETSS

SEQ ID NO: 155742 - protein, 18 aa, Heterodera glycines
PYRDRDLSFSKPGTGNRD

SEQ ID NO: 155743 - protein, 67 aa, Heterodera glycines
LDLYRQFRFWANAVANFDCPPNCQFFFSVKMFVHQSIVTVRKQCNFEAKFSTFKRWQNIHPNVATNP

SEQ ID NO: 155744 - protein, 218 aa, Heterodera glycines
MESNSYYRINIITFIFFVLPNVFFRCCETTEQLQICVKYEKTVAKRETKIALEEFRINNQIKEIKNLPENFQNGECFGILIEPEDEAKVEKFSLTFAISVKPMENEYQPSANENNENQPDDEDIRTMVRRIRFKLYWTNMAKVYTVNLGKIDPPELYFNRTILVDKKNDLANYHALLYAKIHINRQNMSNVLTYNFLGYAHLIKINEEEASSSSSENK

SEQ ID NO: 155745 - protein, 572 aa, Heterodera glycines
MTVKKIDPKITTDDVNKFLKKQKTYTIHKPIRKRFPRLKTIPSGFHTNWQCDLCIFDQLKKHNDGYKYLLVCIDVLSRMIFSAPAKSKKSEDMIEAFDRVFEKSKIIPMKIYSDSGLEFQAGKMKKYFEEKFIIKNVMYSPDLHAGVVERANRTIKERLYRYFTKKDTLRWVDVIDKIITNINNRISENRWMPYIVLPSNTPGPGNGTSKFTVRLPETLELGTNWSVALSSIIYPYSFTALSINGQEFIKVWENDSSVPTQVYLPDMNFKTAGGLGNKINEAFSHHYKIKKQRGKREAKAEDTKDSKIDVAKRAAERAGRDVERHFNQINNISNSIQTQLNTLRETNPHILEEPDIKIWFDKMVEMGTEIQTSRNELKSFQEEVDKAKNITLEHVEKNDLKKAKKSADVAKGIARQAKTKYTSTLEGYNDKSEKGFSGIVNRLNEALGEHIKRKDIENRQVSEAEKGPQKRERLANEDVQFNYDSIDQKFIVYLSAAVSHIDLSKHLAYVLGFKNTRLFHAEEATYMPDLTGGVRQLYIYAPNLIENTIIGNQMAPLLGIVNVVDDPGSISE

SEQ ID NO: 155746 - protein, 145 aa, Heterodera glycines
RGHSSLGPIPNANRFFDLPEQPTSSTTSTTTAFLSHSASATQFESEAKTTDERRQRKRVKRSLDELTLDGICNYDNERPLLYCEFAEQKSNEKRRKQKAAEPKRTEDAKRRKSGRRRRRKRRRTGKSERRTKGPNEAAEKQNARR

SEQ ID NO: 155747 - protein, 282 aa, Heterodera glycines
MPQILDGIKLDFRDVLLMPKRSQLASRSELLMPKRSQLASRSEVDLNREFVFKNSKATYTGIPIIASFVFKNSKATYTGIPIIASNMDTVNMDTVGTFEMAETLSQSNLFTTVHKHYSVEEHKHYSVEEWKEFANRVRNNSNVLNNIAISSGSRSDDLTKMRDICDAVPEIKFICLDVANGYSETFVDFVRKVREEFRTSTIFDVANGYSETFVDFVRKVREEFRTSTIFAGNVVTKEMVEVTKEMVEQLILSGADVVKVGIGPGSVCTTRKQVQPTAPCPT

SEQ ID NO: 155748 - protein, 21 aa, Heterodera glycines
MIDIEEEEPLLEKMDKDGKNR

SEQ ID NO: 155749 - protein, 188 aa, Heterodera glycines
FQSLALNSPTFQSLGLNPPTFHSTGLNPPAFQSLGLNPPTFQSLALNSPTFQSLGLNPPTFQSLGLNPPAFQSLGLNPPTFQSLGLNPPTFHSTGLNPPAFQSLGLNPPTFQSLALNSPTFQSLGLNPPTFQSPGLNPPAFQSLGLNSPEFKSLDSISSILQQHNYRDSVLRHFNHRNSTSATEYRTI

SEQ ID NO: 155750 - protein, 220 aa, Heterodera glycines
SVAEVGSGDNVGELSPGNCGIDEIESSDLNSGELSPSDNAGGLSPGDWNVGGLSPSDNVGELSASDWNVGGLSPSDWNAGGLSPVEWNVGGLSPNDWNVGGLSPSDWNAGGLSPSDWNVGGLSPSDNVGELSASDWNVGGLSPSDWNAGGLSPVEWNVGGLSPNDWNVGELSASDWNAGGLSPNDWNVGGFSPVDWNVGGLSPGDWNVGGLSPSEILVGV

SEQ ID NO: 155751 - protein, 712 aa, Heterodera glycines
MFGKRPSSHLSPLSDNASKKSTSDYPYTALSDQLAAISQQMDNNSVDPITKQLLKICVELLQQVQQQQTVISEQDLQLQHFKQQKMMEEAIQDHERRRSVVVMGLPESQKQKPSERVAEDRTAISGVLDELGIESPITVYRMGSPDQAKTGQNRPRLMKVIFGCSKHQKQTLAQWNKGRAQINQKLGMSNIRIRPSLSQEELKARRVLQEECSRKRKEDGGEWVVYADKVMLRISALSNEHFSVNEKYNAFNNTLLETLNECIPMKKITKKDLTPKYPTHLLASIKEKARLYRQCKTDPTKKALYDSISLHIKIQTNKFHSQIEKKAISKGRNSIFKYLQKYDVNPFEIPNLVFENKCYHDGDEKCELLANLFANSFNNSDVDPGYLNLGNTFVNQCFISDIDFNIIETQKLLKKLPNKNGTSPDNISYKILKNCHSSLATVITDLFRISLDSGSLPDIWKESIVFPLFKKGDKFNPENYRPISITCSLCRVMERILSQNIYNFLLKNNKISEYQFGFVRNRSTTSQLITVVEDWYEAIINGKNVDCIYIDFQKAFDSVPHNLLLYKLEKIGIKGKLLMWIKGFLSNRTFRVKIGDSLSSSKKVTSGVPQGSVLGPLLFLIYINDLPDALPSGVKIKLYADDVKLYICYKARADTEIMHKALHNLFEWANKWQIKVSMQKTFVLYLGSKNPKETYKFDGNTINAVDTIRDLG

SEQ ID NO: 155752 - protein, 188 aa, Heterodera glycines
MREFCAHLQTLGFRMIPGLFGSGSGKCPKKGAQALLVGIFPKKKEKEKEIKRVEASQPMVKWLLCLLLVAWSLWFESHCDINKYLQVQDKQSGEQVVSMPFFVGVVYRVRFPLILIIKLFNFFFDKTKKYERGTESGRGRGRETKRGTEKEIEEEQKVEEKQKVEEEVEDEQKEEDKVEEKQKVEEEV

SEQ ID NO: 155753 - protein, 285 aa, Heterodera glycines
LRGEIFIRSRKNNQKVKETHLKTKIQTVAGNGINIWILTPFSLQIGLSLLISLLAAAATTLGAFCYIELGTSIRRSGSDFAYLSYVKWRPLAFMFMVSGSVLICPLYSAIQADTFAEYFVQGLGLDHNSAAAFALRKLIALCSVWLIIFLVQGLGLDHNSAAAFALRKLIALCSVWLIIFLNFFSLRSVVAPFQLVTSVAKFLSALLIIGIGFYWLLFKGYTENLRQPFANSSFDVGNLTNALFAGLFNYDGCDVLNYGIEEISNPARRIIIIIIIIIIIIIIIF

SEQ ID NO: 155754 - protein, 41 aa, Heterodera glycines
MHELVPKLFVGYDRNARPISKDGKPIEIQSLLVVDHIEQLV

SEQ ID NO: 155755 - protein, 53 aa, Heterodera glycines
MSPPKRAKVSADDDGETISDDGEPSTSAGAKRKQKASKPRQRKAHEAFILLVD

SEQ ID NO: 155756 - protein, 63 aa, Heterodera glycines
MQKDETHVMQNGRNRTNHDEVHSVDEAHDHVSGAVGDAHHDDVSSVTESVLPLYTFFCICIYA

SEQ ID NO: 155757 - protein, 185 aa, Heterodera glycines
VAESCFQVADDAKRQSAEHLKVTTDGPGVSQATTAALREKPMPTEKPPSDAEEEESSSAASSDEEEEEDESSVGVAVAKETREDLFARVRAKITVRLCETSSPNDELGIARFRSARNWPIPNAVSIRRSNVQEGEAGGITQQMGATRVPGQAIKERSKMVKNFCADSMQIPGFLIIDTPGHESFA

SEQ ID NO: 155758 - protein, 148 aa, Heterodera glycines
VRSLPGLGTTIDVILINGTLRVNDIMVLTGSDGPIATPIRDLLMPQPLKEIRNDYEHYKEIGGAQGVKILAKGLEKAIAGLPLYVATTEEELEVLNSNDAERKRRQFDDEQQQKQQHPLLCHVGEVADVQRVRLVVPTHRSNRNSISM

SEQ ID NO: 155759 - protein, 97 aa, Heterodera glycines
MVKKIPNELLFEIIGAIPFDKKWAQIHVCQVFNHFLFNRMGSWLSQSKNLVAKCMFLFRSIVKMIRSLPDNLLSVNADSRKHFEASKFVNGFNSTKK

SEQ ID NO: 155760 - protein, 77 aa, Heterodera glycines
MKSLLINRNRMDHLQKIWQLCDNLFGRQWHILSSKFLAPDDTLHWAMSPRLLNVVLWADMHVFGGDDWKNIHIGTIR

SEQ ID NO: 155761 - protein, 61 aa, Heterodera glycines
MQPISPIKDLKQSMTKDTESSMRSLKTIILKIGAEKRSAETGAPAKEYEAGRFYEGKKRIK

SEQ ID NO: 155762 - protein, 356 aa, Heterodera glycines
MRTAAGEQSLRDWLQEIGNGMHRVGTDSQGFTNQLRIPPELLVDDLDHTIHFCFPEALFDDPLANADAIAHNAILCPTNNDVQHINEVALGRMSGCGREFLSIDEPLEPNEEMHNFRTDFNMEAVHNEMPSGMPPHKLTIKVGTPVMLIRNLDVTQGLCNGTRLQVMRTSENNLFCRILTGPRAGAQNIIAIPQIQFEYGRARHHRGLRFRRLQFPVRLCFAMTINKAQGQTLQRMALVLNGRQCFSHGQVYVAMSRVTQMDGIRVYAPLCQSGYGTHIENVVYHELLDLEPQQPRTPIRGLIDVDNDMDVAIPDVGTRVPDVDNDPDVERDNGNAAGANDQEPNDLDSSFDDFFD

SEQ ID NO: 155763 - protein, 94 aa, Heterodera glycines
MAAEWLQKIDFVVPVETTKAVGWHQIVGHPVDLEWHAADPSPKEQNYEEKKQPKESIFKNEKGGTIGRAKGEKICQKKHHLLLMNHFYFGIYKH

SEQ ID NO: 155764 - protein, 290 aa, Heterodera glycines
MGMSLPLAPKASPNGSDRSAQTAHSRTTRQSQTPPAHLVVNAEHEPHDNQAGLLIAQRQPNAQQRDWFGRFNAVTSAQKLDDLLAHLVVNAEHEPHDNQAGLLIAQRQPNAQQRDWFGRFNAVTSAQKLDDLLDEFTNAVRQQAQATFTQRPAQQQRRPRQLPNQHGRRRNQMNADDGPPFDTVAAKSCTALHARERTGRLLSRRHHCASSRLKCFMGISQTCSAPARLSPSKCPTPCHFTSRPATTARSQPTNNSEVRLKRCSAATPHRDPTTSATRCGKGLARLPYAH

SEQ ID NO: 155765 - protein, 739 aa, Heterodera glycines
AKTQSKTFSPSINTTKAPELVQPYPPGAFDYGRKRQTKVTIGLDSLFSVPLELNRREPDLRARSLHSLLQLLQVFDAGTMATQPRAILARMHEQLRELRREGNAQVSVVANACMMSLAVASGQPEFLFASVLALLCESKRCVPFNQLANLANSTSPLPRNFHSLALSVHRRIVGTKSGQISRWISEPLEQRPIVCEFDVIYTGTSDGFVRAKSDGFVRAKCDDKKPPFFCLCEGAYVYLLTVYGFFKLGTGLCETRAGEVMVCNESVRFSDGSALYVSNGSLYLRHRHSARLWVLDTETLREIGEILLPSALISHLLFSDGRQFWREIGEILLPSALISHLLFSDGRQFWVASLDDQWHLAFTPLDDSFGPAKKPRGRRNRLMDCEFCAFAKKPRGRRNRLMDCEFCAFGELEETHDQLLRSIPEKLRGVTADLQLGPGVAFLLSRSGKVFFAISSSDSDFGLCSKTPFCWNRLDVPESIVSMALDSNSKTLVLRSGAGNLWLVGEQRTKALGKSPKAQQNKESSLSVASVGGGSLAFVTEMGRVFLLGRHVLNTAQQSQTVTVPGMDNIPLAQVALGKTHLVGIAKNGAVYATGLNNQNQCGRTSSSNSQSVSSSTSSSCCQFCSPSQHLFVDDLAFLCVRCGQCSVRGIACPFSNYKRTAGTACACAKNGPSCCVRCGLCRECAQADKRSHATRGKHQPRSAGVTATTRIFPLERVLLQPQPNIKVATVSVGNFHTV

SEQ ID NO: 155766 - protein, 22 aa, Heterodera glycines
MSWMGLWWLAVVVVFHLLVLCL

SEQ ID NO: 155767 - protein, 34 aa, Heterodera glycines
MPNMDKYGNMDINREIWKVANRESEELSNDNKNF

SEQ ID NO: 155768 - protein, 49 aa, Heterodera glycines
RVYSYSATPKTLKILNYTHFVFINFEKFWTFRGFLLFWTFRGLDTLWGC

SEQ ID NO: 155769 - protein, 99 aa, Heterodera glycines
MKLFISNAFPLLALSLLVWLLRADQGKLEKRNTAEVTMRNGNAMALNEQWEFKAQPQELDRMAVAIMARKTLAFVTKNIHWHLLFFFDGQYTKMRLWAY

SEQ ID NO: 155770 - protein, 201 aa, Heterodera glycines
MKILLTFLLSCIILLHPEVNGNQFNEVVVWDAKCRKHIREVEILAKYENSANLSRALNNLTNEIRQNVRCELSYAIHKNYISDANQKNNKFDASNSHFMYELDKINKISIDQSTNTLPTALIWINQLRTDFATLVPEIGLVDIWQNVDSYTETRKSMEQLYQKIATIQTDVFYSGSNLVNQIISEAKDKLEDFKEKSGGSN

SEQ ID NO: 155771 - protein, 71 aa, Heterodera glycines
MCGRRAISRLASSLSNCWLSFCLASPFFCCSWPFIGVCAGLRHAKSAVQNNSNKQLKKHKKLINKWPKKNR

SEQ ID NO: 155772 - protein, 124 aa, Heterodera glycines
MDEPKAEKFVSDPNKSNGTVSMEIEKLSEFAREIYGSGSKSETVYIKGVPWKILALITKNESTEKWLSFYLWCDFTEKVFFYPKIFQGHAHCQFFILKSFRLSDEKLKLKIVLIVKPFEGRLPE

SEQ ID NO: 155773 - protein, 33 aa, Heterodera glycines; identical to SEQ ID NO: 126272

SEQ ID NO: 155774 - protein, 142 aa, Heterodera glycines
MQNEKNNSDDEHFYPQQQQQQQSLAQLVENRIQLGTAIDEGGEKPPPQQQQQQHSRELAMAIVDPSGGTTTTTPATLTVKEEQQPQQMNMEHQQQTHFVAAPTSSSAAGTAQTMPNAAQPQQQQQQQMNSLESPCGGCRELK

SEQ ID NO: 155775 - protein, 347 aa, Heterodera glycines
MTSKRNGNTEQAGPSTKKWDFRSIGNNFTEEMENYKLIDERSTICEKFGFTKNITEFRINSDVRRPDEAMRDAIDTMIKAAFKTTEERMKRKVRMFGVAITGAGLASPVWVPYRAYPQNNADVIMQEINKLGQSGDGDENKKTLLLSEPIMMKITCVTLPSGEGPRNVHKFDFGFKEHQRIIISNVDKFCLFYALASSMNYLIMDRFAFNRFMNNIMRQRDAATELLRNCGIDINEYSYGVEHLSRVQNYLDEIYPGKYRVVAFEKSADPRKSIRVLWKGPIGRENVVPIFLENGHWDGLKNYVCFFNRGRKFCKAGALELPLSLYNLIVFSSFNNYSFSLILSSLL

SEQ ID NO: 155776 - protein, 231 aa, Heterodera glycines
MKRTNASNITPPRAKRAMPPALDLDQNTATLEEQERQRTLVFIGLPESNAIRPSERVQEDREAATKILDHLEVEAEPTAVFRLGRFDPQRTTPRPLKVVMPTPTHQHVALGGWKYERARLRSQQNLTRLFVRPALSKEQLKEEYEARLRKRQQNPAPMAPATQLPQTNAPTPVVEDGPNQKKTSDDIPKQPEVFDETILVCYEALNSFPPTDKIVHQIQSLKKQYPHLFNK

SEQ ID NO: 155777 - protein, 28 aa, Heterodera glycines
MASVDTEKDRDVCLCPPAPLTLRPIRLG

SEQ ID NO: 155778 - protein, 694 aa, Heterodera glycines
MPPPHDLQTLRSFLGALNYYGRFIKQMRELRAPLDELLKKDVPWHWEEKQQTAFEQAKSIMQSDMLLTHYDPSKPIIVAADASKDGIGCTISHKFPDQSEKVVEHASRSLSPAEQNYSQIEKEALSLIFAVQKFHRMIYGRRFTLLTDHKPLIAIFSSKNGIPIYAASRLQRWALILANYDFEIKYISTNCFGQVDVLSRLVAKQRETVEAEERVIASVDKTSLPISDDSALDESETAAVEYIFMANIDQLPVTADEVAEHTQLDTTLRKVFDFCRNGWPKKSPSDLSAFFTHRHKLSEVNGCLLFGERVVIPAALRQRILAALHFTHPGIVRMRALAQQHVYWPRMDLDIERWVRHCIDCAMAAKTPTKTTLSPWPRTNKVYERIHMDFAGPCSDGNLYLIIVDAFTKWPETFQVKSTSADNVIVQLEWLFSRYGFPREIVTDNGPPFHSKDFSHFCRIKGIKQTFSPPNHPQSNGQAERFVDIFKRQMKKCSHGDKKWITNSLLAYRNTPNAALKGQTPAELFLGRSPRTQLSLLKPDISCSNRNQNDYTNNMPKQFDRKHGARHRTFAIGDDVLIINYRNNKKSWLQGKVVSGSGVIWKIKVPVLGNVIVRRHTNQMRNFFQFPKKVKMEMDPAHSMVLLVLFKSATFVSLMKWIKTVPLLETNNKSPMSPTNKSKSGVPTVNGVQQRNWI

SEQ ID NO: 155779 - protein, 18 aa, Heterodera glycines
MDIGRKVHLENIKQKIFL

SEQ ID NO: 155780 - protein, 91 aa, Heterodera glycines
MAPRYSVGQVLELVEKMRNAIPVDLSKHIVDLHKFAAVRMRFSKGFVFACVQAANEFEEQRTRFFAENEMRDDYMEVLTLSIEKSAIDQRC

SEQ ID NO: 155781 - protein, 73 aa, Heterodera glycines
MEELFFSVDGIEYNTVKRISNCEGQPQFRGPQTEEGVPMPMFWLASSKAGKEERQKMKKKCQKKKKKYSLTFY

SEQ ID NO: 155782 - protein, 140 aa, Heterodera glycines
MTIYTVFTFFGQLIFAIFMVFVYVTATNFVDEQNNRYSYAQKWFNISLEMDDLLFIANFNQYPWVNDLATVAIPACFRNDHFKQKRNPTEEEKHGQILAIYFKNWTVMDSIENTRRTKGNCEKCRRNYSNISSVNCFIHY

SEQ ID NO: 155783 - protein, 35 aa, Heterodera glycines
VVSFNFMMRIIFRNSQLLDSLITLWSTDTDKHLCP

SEQ ID NO: 155784 - protein, 39 aa, Heterodera glycines
MSLRGFSSYICGGIFLGAIDFEFQMINIEFYNYFLSNIV

SEQ ID NO: 155785 - protein, 181 aa, Heterodera glycines
MKKFLFLTIIILLLSNTHSSNKQRHRKQRAVSALARLTVALSRIGTYIKAHPYITASTILMEMGSVSLNIYLLIQEIKACEEKQILKDFFPFVLTLNSYEFSVNVDDYNPGYIFGKINTEIGRPVEEICFAGQPQKINSLKNSFKAPNKVTRKIRNRKDDLGILLLYAIRQQSRLELFECP

SEQ ID NO: 155786 - protein, 84 aa, Heterodera glycines
MATRLLGICNLGTRLLGIPTFGDPTFGDPTLRDPDIWGSRHLGTRLLGIRHLGIPTFGDPTFGDRTTFEQKTLKKTTDIWQPDI

SEQ ID NO: 155787 - protein, 232 aa, Heterodera glycines
MRETQINLTAIRVNSKNEYRNIKENIKIGECFDISIPQQENNKTKKITFQFTIYVKPLENEYQPPADDHDENPSDEGPYENRILDIKMDDIRTMVRRNNFVIHEPNPSMVYTFNLGKIDPPGFLWKRKIFVLPENDLSNYHAFLYAVAYRNQRIQDNLNSKICTKLLGYAPFVKIDKEIAPTFETDDKRVELNNEYQLTIPIDASNLFKHYIFGFNLVIYSYEKVNHYLYKH

SEQ ID NO: 155788 - protein, 185 aa, Heterodera glycines
LLPPEIAGEQLRFIGLVFGQLLFRENPIFDEAKNEFHFSANIEPEIDAFNPTECQLISNQFDRQLNAQLTQLIGQPLDNPEESKNEENFCAFFEFLVRRIANDQMEPGDKEKWAELEQKSLLIAKYGPEFPLIAPIMRAFIVFGTDAPKLIVLYKALLGGFINEAQLDAFLGEYFDSKTLKLETK

SEQ ID NO: 155789 - protein, 224 aa, Heterodera glycines
FRKNKTKTFPFFKSFFNAKQKQNATYCDRCGNEEDITLIDLGLKLRKHQIEGIKTLLSWHKEGHGGILADEMGLGKTCQAIVVGAILADQIGKRMRMLVICPLSVISHWETEVSRAYGSSFVSCYILHRPFNFLVRKSLEKMSHWRKSLEKMSHWNVLLTTFEIFLNDHRNLPFKSWDIVVFDEAHRLKNSESLTHQAHRLKNSESLTHQALSNCKFDWLLMMT

SEQ ID NO: 155790 - protein, 117 aa, Heterodera glycines
MERKCRQSPVPGAAEHGYKFGGMDFVDHIEFNPCSDVGEPFDERQSRRDLHTGPPRRRGDFYGLDYTTMLPDGQWRQPTEWEAEDAQNYHGYQALPPRKNFRLCGRYTADPDAPLNM

SEQ ID NO: 155791 - protein, 181 aa, Heterodera glycines
MNFPLILLLSLAFCALIIEAYPKNDGPIVRREADNEKAAKAQPGKEEKQAVKAEEKEEEKPKDKKEKRGAEAEEQKEGGEKKGEEKPKGKKEKRAAEKEEKKTENKEAEKKENEEQKPAGKKEKRAAEKEEKKSESKEAEKKENEEQKPAGKKEKRAAEKEEKKSESKEAEKKENEEQKPA

SEQ ID NO: 155792 - protein, 229 aa, Heterodera glycines
MRENRALPGLWNFPYIWMFEQIRQRANEFDIIHFNTIEHLVHMKPYIHKALTTLHAQPGGSTVDNELLSQLTAHQQLFDGANVAVSSDQAAKSLKAKKALRFCQLHIVKSYNGTSNQWQQIANEYVKIYRTISRLNELKNVKASLLPAVGSSSIANGSLAEAKNQEQKLMLCENVYDILNKSKPLRIAIVTPPILDALPPTKGGGTERMVYFLTEQLAQRGNKVNTILV

SEQ ID NO: 155793 - protein, 230 aa, Heterodera glycines
MENVTHKFLGIFDLNWIGTVHNGIPLDQLTFRPNPGTSECPYLAWMGRMAPEKGVDIAIEFALRSGIKLKIAAQLVDEHKHSYWHKQIEPLINANQHLVEYVGEIGGDERDSFLGNALAFLFTPKWDEPFGLSMIEAMATGTPAIANRRGAVPEIVQIGRNGYTFDYKDRLGVEQVAKFVHLINQAAKLYRATVRQTVEEKWSLDKMAENYEKVYRRMLNKNFIANCHDH

SEQ ID NO: 155794 - protein, 178 aa, Heterodera glycines
MRENRALPGIWNHPYIWMFEQIRQRANEFDIIHFNTIEHLEHMKPYIHKALTTLHAQPGGSTVDNELLSQLTAHQQLFDGANVAVSSDQAAKSLKAKKALRFCQLHIVKSYNGTSTQWQQIANEYVKIYRTISRLNELKNVKASLLPAVGSSSIANGSLAEAKNQEQKIKVTNVPGEK

SEQ ID NO: 155795 - protein, 104 aa, Heterodera glycines
MNHRKYNSLYNIDCKKDVSAANVGPHMSVALRIKGKLPFIKIVQNRKDKQNNQQKIETIHKFDAIKEKLKQKGKYQWENSSKIETKIGKLLGANCQKYTNGKKN

SEQ ID NO: 155796 - protein, 324 aa, Heterodera glycines
MEVYKSLGVDLVVLHIVSALSAVFKLIKAYEAEGRLAVRMGFKLPILKAMNFDPELQIEYSGQLAMAHECFYEFRESAKFISLLDLDDLLVTTQFTSFGDALNAALLQHPRAPFFYINKLESGILLPRHKKESSRNFVNNFRELIFTKKLYNSEKLVLRPPLIDAFWVHLTRHYKGKDKPVQLSTEYMAILHLSKDIRANATNGYNDKLLTNFDGQLGNGSAFLNDTKIMKIIGHMPKRHYYFDAIRHCSRFINNYPNGIFTIPSPCLSYKLCDLPKAKVECTVTKSKYYRSTIMPIQVYRVHVLKRTLFVKRKGGCFARKLRF

SEQ ID NO: 155797 - protein, 63 aa, Heterodera glycines
MLLRFSLTVQLLLLFFAFEVFGADPPEGTQNEEAQRDNKRLEMARKGLNVHMNVYFFPFIVIM

SEQ ID NO: 155798 - protein, 29 aa, Heterodera glycines
VYAYTNSTLQLAILSTFTELLYRFQDIAI

SEQ ID NO: 155799 - protein, 350 aa, Heterodera glycines
LSGPIPFELNVFTIGANCRLLWSFAFSLPICPPPPELFESRPCVVAIFRLLPAFAQQSVLQLICPAPFSSFSDCAFWKAIRTATFKLVSSFHLNFTIKLPQLDFRMNYVSSLLANPLELSNLKMHHLDEEKARKATKDLMGKSVERWESILCYLALPSEAAEKSVSETTKDLFQFIGLVRGRAKEPAKEPEISSIGFQFLLLGRSEQIWAYLIHYMRFIASKGEEVFPVLDFLLRLTLCINGDDGILELIQLDPNWPEIVQAFVVTLRELGLIQLDPNWPEIVQAFVVTLRELGLIFIRKRKDGWFLLTWFLLTPLMTQLSVAASAEALEENAGQNGVALQFSTYKFTRQ

SEQ ID NO: 155800 - protein, 56 aa, Heterodera glycines
MIPTMFDLVDKEKSYSPKTALAPKRAAPKRVCPLKIDSLSANSFNLLNCLTMSCIL

SEQ ID NO: 155801 - protein, 98 aa, Heterodera glycines
MDPKSKKEEKAGSVAGAREDARESLQLRAEQHIELHSYRDATDVNYQRMVPDQGLGAAQRVHDPHWHTLPDDDAQFRGRKIPGRIAQAEAEEQKTCKR

SEQ ID NO: 155802 - protein, 207 aa, Heterodera glycines
MMCRLGDAVGYSVRFDECISARTHIKFVTDGILLRELMSDPLLQAYSVVIVDEAHERSVNTDLIIGFLRKIVAIRDDLRVIISSATIEAELFRDFFELNDNPQQKPDKNTATIISVEGRMFPVTTFYTKVGVPDYVQTTVETVLRLHDEEPPGDILAFLTGQDEVEKACDLLRHAAKTMSKDKDKLLVVPLYGGAKVSDRSEGQSVK

SEQ ID NO: 155803 - protein, 345 aa, Heterodera glycines
PFLYTARDYQQQVLDILDVCEIEAMPTKDPPVIQYNTLFVSDSTSKAEIFAKIFSENFTVNNYSLDFDTSFSSPTINDVVNIISVGKVLKTLPNRNNTSPDGITFRLLKNCSLSFTPFVTEIFRLSLDTGKLPTIWKQSIIIPLHKQGEKSNPMNYRPIALTCSLCKIMEKFIVWAISDFLLKNNLFSEHQFGFIKGRSTTTQLISTLENWYDGIYNNKNIDCVYIDFRKAFDVIPHNLLLYKVHKIGIRGKILNWISDFLSNRTFRVRVDNTLSSEYKMSSGVPRGSVLGPLLFLIYINDLPELIPKQISIKLYADDVKLYSVRKTKNDRIAMHRALNILLDWS

SEQ ID NO: 155804 - protein, 121 aa, Heterodera glycines
MARRFNKRFGTKLREFPIGNKVFARHRISQNWQQGQVSKRTGVIYDVAFADRRSGRYHANQLRPRKTSDSDDQLSVMFETFDIPRPIAVEDQREIPVEMPLEYPHGEQENFGGQIDHGQQR

SEQ ID NO: 155805 - protein, 814 aa, Heterodera glycines
FKTDVAVDGKDIKFVLDSGAEIIVIDELSHEVIGSPRLRKCTESGCMFDGTQVKFIGKGVANFKFRDICIKSEYYVAKRGSLNLLSVQMMDAFGLLTRGFTKAQKPSQNLTRGFTKAQKPSQNLTVKAHIDHLKASFPEIFKNELGRCMKFKAHLTLKADAAPVYRKVRPVPYNAQEAIDGELERWEKMGVIGKVEYTEWAAPILAVKKADGSARLCIDYSTGLNNALQDHQHPLPLLEDIFATLNGGKYFSQIDLRDAYLQIELDNESRKICSISTHRGNYEVKRLHFGVKAPAIFQSVMDQILAEFEFATAYLDDVIIVSKSAKEHADHLKKVLEKFQEWGFRIKLEKCSFFREEIKYLGQIIDRNGRRPDPEKISAISEMPAPTDVPSLRSYLGMVNHYQQFVKNMRFVRKPRRSAEAGQRMEVEEMQTGIRKIKETDASELGIGAVISHKFPDGTIKAIAHASSALTPAEKNYSQIEKEGLALIFAVQKFHKMIYGRKFTLLTDHKPLLAIFGSKKGVRQCSANRLLRWSLILLAYDFSIEYISTNDFGQADVLSRLIAKGKSDEDRVIASLRSDSEIDDILIGSIEALPIKFKEIVAAAEADKTIQKVKKFRGWPRNVGDESAEIKLFHRIKEQLCITRNCLMYANRVVIPEKLRQKTLHSFHKGHPGIKRMKQLARNYAYWPNMDADIQQMVENCQPCQMEAKAPVKTNQPWPRPSAPWQRVHIDYAGPFFGKEYLIIVDAFSKYPEVFEMATKSTAATIEKLRYLFSRHGIPEILVVRHGTQFTNNEFAKFMAHHGCHHLFSAPYNP

SEQ ID NO: 155806 - protein, 355 aa, Heterodera glycines
SFFAVFDGHAGNNVAFHSAQNLLQTLLNTGPKITEGPKITEKAKSLIQDGIRMGFLELDSSLGELQGGGERERSGTTAICAILTPDYIFFANLGDSRGLLSRRSNTIFSTEDHKPYLEKERERIIKAGGSVMIQRVNGSLAVSRAAGGSVMIQRVNGSLAVSRALGDFEYKSVPGLCVTEQLVSPEPDIYIVPRDKDDEFLVLACDDEFLVLACDGIYDVLANEDLCALVRSRLSVTDDHKMASNQVLDVCLSKGSRDNMTMIVVIFDAAPKIDHSLVEFEQKWLMKIEKRVRGGTRAFNPALIQIKFSLSQRMKLTTPTHRCCSKRKGSTTATPSPAAFTWHDLCSTDFSRKGS

SEQ ID NO: 155807 - protein, 177 aa, Heterodera glycines
MNCSFFLCLFTVQLILLNFAVEGREDDELKRKKRNTDVDVLGLVNIHAPSRKNVNVDVGGEERDRNDKLVNVNVQGHRKNVNVDVGGGHYNEGKVVKYERDGERGREVNVDVRVPKVKVDVDREDGYPKKKRVHLKVLDKLRKYDSEESGERRRHRVVKIERDGGRRHKTVYIEREN

SEQ ID NO: 155808 - protein, 77 aa, Heterodera glycines; identical to SEQ ID NO: 126799

SEQ ID NO: 155809 - protein, 36 aa, Heterodera glycines
MIDQPTTPRAEKIGEGRRATITTHTDFVELRMRMQK

SEQ ID NO: 155810 - protein, 109 aa, Heterodera glycines
APKANSNPILAAPAAVPGHTPYFFSPWHTKGAAVGLPPKGTHKKMNQISPKNVKKCKKKFRFLNLELILRFSFKRATVCLYGKENAKMCGTKTPKLAKMDYFSFKSLKI

SEQ ID NO: 155811 - protein, 40 aa, Heterodera glycines
MRQWTIPIKMYRKECQRGRELQIIGQSLIGWQALNGTNLA

SEQ ID NO: 155812 - protein, 174 aa, Heterodera glycines
MVHLLAVLLFTIIQFESGDSIDQKTSDKNAFNAEELCRPIDGTPFHEQCLLSTVVKQKGFIPRHLRPPWLGSSLFEDNELSEENAKNDGCYGCYKGTKASNGMAPREEYCACTRPTCGNKYFDNLKHCAMVIDTKLLLNSNLFVHLKVHFYDNEPEKEPKKPPNKERKKFKMNF

SEQ ID NO: 155813 - protein, 67 aa, Heterodera glycines
MDLVDYEAKLVATGRRYDSRPLSRNLDGYLSAGGDSLGSSGPRGRPRPPAQLAYDSDEHKYAAPFEG

SEQ ID NO: 155814 - protein, 75 aa, Heterodera glycines
MPEQQQQPSTSNIIVPSDSLQQMDTSSSFSVTASPRKRTSLVPEFGLIGLFCSFGFLNFRCRIATDLILLAAKFD

SEQ ID NO: 155815 - protein, 58 aa, Heterodera glycines
MTKFKKFPPQNLIKQKKQFQICHFLRGNEKIAATDGTKFAVKLKRPANKYLVAPGAAG

SEQ ID NO: 155816 - protein, 51 aa, Heterodera glycines; identical to SEQ ID NO: 124998

SEQ ID NO: 155817 - protein, 89 aa, Heterodera glycines
MVFIFNLDTFDIRIAIIGKLDQLIDKEKTENNKLLKKSLIFATVLDPRFKLKLFEQMKEQIREWMRADLQKMFSGFLNTTLVRQSSTCE

SEQ ID NO: 155818 - protein, 159 aa, Heterodera glycines
EWDPSAHRAKDMEKTIMEYICVDALTAHFITVEKQPAFVVLGAIPIKEKHKTGTAGLNAIGFDESVTLEKVKTIVRKIRKSSVQRTLFVELQEKLDMPVLILQRDTEVRWNSMFQMLNRFLQCKAAVQVFMTSDEAKRNNKGKGIPIISNIEWDQIEQI

SEQ ID NO: 155819 - protein, 290 aa, Heterodera glycines
LRLVHSHPSSLYRNFLLRVTPNAQRVDSSNLNPQEFWNFGFSLVALNYQTPGLMMDLQEGKFLANGGCGGKFLANGGCGYVLKPAIMCSDQNEGRRRVPAQGRRRVPAQPQILHLKVLSAQQLPRPRASTAKGDTGDPFVVLEVFGVPADDPFVVLEVFGVPADCAEERSKTVRNDSFNPSFDESFQFAISVPELALVRFLVLDDDFIGDDFIGQYTIPFIGQYTIPFDCLQSGYRHIPLLNNEGDPLEGSTLFVHIAITNRRGGGKPKKRGLSVKRKMSRVQTGMKSVA

SEQ ID NO: 155820 - protein, 31 aa, Heterodera glycines
MEWEDRVENVKMEINGLTVKINEEKEKGKLL

SEQ ID NO: 155821 - protein, 438 aa, Heterodera glycines
MSSPIQQKLGAALKIINRIRTAAELTILADATASNLENALNFEAQLEKVQKEAKSLEIFIDDVRESLSAWTDLLRKLSAVEREAGETEFSNYSKKEKINEKVDDAALKLRDLRDLIGTLTIKARLFRNKFELEERTAQANHAKAMQQTATMPQQTQPSTMPFYQFQPIQLDKFSGNKRQWPEFYESFKSATGTHALSKAEKFNILRNLLTGEAKQLVAGFRLEDQNYDVALQLLKDTYGAPEEHIRALHFELANLNTCKNLRDTKEFLLHLERLTRELDNAGEDIEGPPTYLMLEKKLTPPFLRTILNKKGEDPEHWNTTKFRGVLSEAVRKESQIQEVMSEYGHHQQRPTKPFNTGPRFRDRAPFNQTRERSFIAATIDDKNKRFGKQPMPLKPATSGQRTTTQPQSQFKPKFNQMDRTAQARPQQKDSKQQSPPSP

SEQ ID NO: 155822 - protein, 34 aa, Heterodera glycines
MTKAIELEMTMGNDADEAFYGSRKILSVTDMSVI

SEQ ID NO: 155823 - protein, 43 aa, Heterodera glycines
MNSKTAENPKVNGWPNGKSKIINRRKKSAIGTENIEPNGGANR

SEQ ID NO: 155824 - protein, 192 aa, Heterodera glycines
MAMERQNQSFPESIIAEETEMDEVPANQTNQGTKKRKLNECQPTTSGAQNNLSMESGIEGLVQANPLLVSQLATVAGQLLGTALKEEQRGTGPMFAMQGRGGYYGRRGTRPNFGFASAKWQEGRQQCHAASIPSTSASASASSSAANASDTVHQLATQLRNSNPELAMLLFGIASGLAEIAYYCKTGNWCKR

SEQ ID NO: 155825 - protein, 82 aa, Heterodera glycines
MAEREIELVVFAAELFNSKPDNVPRMMRDNFRCLKRIRDEVARISERGGRMWSKLCAKNMGNLIKNRWEWEIVMETPMGMAF

SEQ ID NO: 155826 - protein, 105 aa, Heterodera glycines
MRCFACTAFVSVNKEVKNEGIGWIKNQLRSYCRLDPFFSADCYHLLVDTVLYNIKLSLNELKPTAICKQYGLCSEDQGNSTVKLLHASLGPLEAPRSKTHHSVTK

SEQ ID NO: 155827 - protein, 280 aa, Heterodera glycines
MPLKYEQSNALSAKIAKEIGELSEQRKHFGGGEVGEKNIDEKLKKKLRSLSSFEFSSIILKRILATENTENGNGNILQIYRTFLLMIKFWAREHHIYDNKLGFFNGISLSLLVAKVMLLYPMASLPFFIEKFFFTFSTWPWPTPVKLTDLPSLSILRWNASDESDKRGVIYSRRGLMPGLTMPIVTPGHIEQNATFNVNRSTATIIRGNCKTLLKSFEIGRWICKILPNSSLFGTPSQWSRQIDEKALSLISESTHLPLLRFYRPIQAQLAKFFDNVHFN

SEQ ID NO: 155828 - protein, 70 aa, Heterodera glycines
ILSQNLSLFNDLLRMAQSNAIKSFDIDQQLETNSRLHVASKVVKVGQSEGFAINANEMGKLRKIFEILIC

SEQ ID NO: 155829 - protein, 126 aa, Heterodera glycines
MPLKYEQSNALSAKIAKEIGELSEQRKHFGGGEVGEKNIDEKLKKKLRSLSSFEVSSIILKRILATENTENGNGNILQIYRTFLLMIKFWARAIKIIRNWPMDLQNLQEEKWENLLKDKKFEEKVI

SEQ ID NO: 155830 - protein, 177 aa, Heterodera glycines
MALALLSEREKIGKMVKNLQFRRTSLRQLELLCDKAWLIKLNDEEREKLLMTAFFRNEFELEKFNEFFGHFLLMTKQIEQEFLSKNGFGMVENERKLKIDLAIERIERVVKEWQIMPKTSMPFVWDPLFWNFTFLGVKSVKFTGAEGVARTGHFIAGFVWSALLIMATLIIILRSKN

SEQ ID NO: 155831 - protein, 63 aa, Heterodera glycines
MRSGAPLLLLPSPAVVLFLLLRFFRCRVAVVAVAKLNFPWTRVDERGGALEEMVEEPLENGGN

SEQ ID NO: 155832 - protein, 28 aa, Heterodera glycines
LKHAKFGHKPLEYQRMVILYSYEHKSEF

SEQ ID NO: 155833 - protein, 46 aa, Heterodera glycines
NSFPILAGKIHIFSSSNRFLTSVIGGYVTEPRGEVIIKGKGVMETF

SEQ ID NO: 155834 - protein, 77 aa, Heterodera glycines
MESGGTVNDELYYGSAAMPLFTRCYDVIDLGTAERMMARMDHWDNKEHDNTRISTSNQPFANNGKWKNLEENEIDGN

SEQ ID NO: 155835 - protein, 33 aa, Heterodera glycines
MINDSSHQWDFPNVFPPLQMMVIEGLRRSGVKK

SEQ ID NO: 155836 - protein, 26 aa, Heterodera glycines
MIFGLIILEQIKTAQNSTQNQAKFDR

SEQ ID NO: 155837 - protein, 245 aa, Heterodera glycines
MNIRCEFCDALHFVEEKIHGRGNTFKDCCHYGKVFVREITEQDFPEELRDLFMKFDARHVNFFDNIRHLNSSVSFASMNPLRYRYPNNRGPYCFRIYGQIYHRMNLALNPENGDDPAYGQIFIVDTEHAMRALRHANVGIDPQLLTTAYEVIRNVNPFAEAYMMMKEEEDEEVDRARNENREPAEIKLLFETGRQLDRRLGYNVPRANEVAAVYVPGADGEVPNAKIVVRERGKELKILNCTNSM

SEQ ID NO: 155838 - protein, 53 aa, Heterodera glycines
MPSSSPVALLPLLAPLPPLPLLPLKRCRWALLANCFRSVKMSISIVVNFDSKI

SEQ ID NO: 155839 - protein, 41 aa, Heterodera glycines
RWKPLFRKCFEILKSQKISYKVFKIALIMNLTVDLNDNALR

SEQ ID NO: 155840 - protein, 33 aa, Heterodera glycines
YRICSNYSPVSINPAVSNYPPVYEVFPKFEKIN

SEQ ID NO: 155841 - protein, 48 aa, Heterodera glycines
MKSMFALDCMVFVLKVILTEMTKIFRIIQYGLQLESFTLKLFRKTENF

SEQ ID NO: 155842 - protein, 20 aa, Heterodera glycines
MSTASQKVRTREDVIYGGRH

SEQ ID NO: 155843 - protein, 136 aa, Heterodera glycines
MDNRIASIGTEDAKFSSDSRQKTAHSMANNLVSAGSQRKEGITELEGSAAPPKPLRRAPTNSNSSPTMASSLLLGVQFFERLSFHTLKGTLFPLMVGTLHVDEGSANAFILLCIGVTVFSPIVGAAMADAKNGNYG

SEQ ID NO: 155844 - protein, 40 aa, Heterodera glycines
PNCCGCFFSPAPRSAAGRSSIIHLSPKVTGEGNSIFSLQI

SEQ ID NO: 155845 - protein, 139 aa, Heterodera glycines
MTKIIFHCTPSCLNVLSVLILIFLSSVAAFVFFFNSEILAVKTNEEIQRHPKRLSFSDDELPGARDSNTVLREGQIGNFEQIPAVLPPEDPNGEGEDGRAIVTDLNSPEVRRAMSEYAFNTLASDRASLNRSIPDVRME

SEQ ID NO: 155846 - protein, 130 aa, Heterodera glycines
MSSFWNVSAVLMLITLISLLVNSSEAVPLPSKKSSSLWSKLFSNDRESAKKLGSPSSTSAAGGEFSVQSQMFIPYANNGNGDFFLPYPSEMDTVKRSNTEDHFLDPYDGGSSWLSLSDPSRLEWNFNRLR

SEQ ID NO: 155847 - protein, 446 aa, Heterodera glycines
MTMNITGASTFLAEQLEGETGHVIGFTYNVSSSEEKLLVLKNVLDSAILLWVIIHPDMLGTKYATENAALTKIMASILRELDKFSVVFFVVSPLTFFKETLLMDSALTIASNLPKDKIGRMFGRIRAKLETEPTDNVYFAHFVEALAAWDMSKLINIIELALQRLRNAVVAVCDPNCSTPRPLPSSFLSTSSIDSPRAKRARFGEGLVDFFRPLELIQILLACPQSCTCLKNNFGIHLEGFFESLCVIRCKFGELLMNNGWETKFDPRTLICAYETFNIVALITKRIEQPRRNSQGEEIGVNEAERGLSLTDRILYNEMKWFATVLNERTPSFSIIQMFLRCLSLHLCASQLSAVVLNETASLLNELRYRLENVYDARPVMSALKKCVNHLNEALEGCEERDQAERIIEHKVRLMEEYFEAEERGDTTQMAAEGNDAYHEIDDGEL

SEQ ID NO: 155848 - protein, 103 aa, Heterodera glycines
MEGSPGPIGNIGPVGPQGPPGIPGRQFITEGPRGSPGKPGPKGPKGLPGCQGVPGITVQGVKGPPGDAGSRLSFINSLEIKFIYYQKSNRCVSKKDFTNKKQA

SEQ ID NO: 155849 - protein, 364 aa, Heterodera glycines
MDCIDGFDIRLEKDVFYPSETINGVVILDVFYPSETINGVVILETNAPLRLRGIRVFLRGRARVQWKVLKIRVFLRGRARVQWKVLKSGESKTLKDDQYLLDEKLLLWGRDRRDGGDDEETAQILPRGTHEFSFGFRLPATQMPSSLETKAGTVRYYVKAGTVRYYVKVIVDVVIVDVPYASSPQGIKYFTLIGPHIDCMEEKYYFTLIGPHIDCMEEKYLTHLCAQDHQIRCFGCCKRGVTHLCAQDHQIRCFGCCKRGVIALRAVLERSAYCCVLERSAYCCGEVLRLRLQMENRQHFPAIVCVRLIQENHLLIETGFLCFYIFFLRLSYGERSPKIALSSQFRLDAGQELSLKIPVLPPTM

SEQ ID NO: 155850 - protein, 165 aa, Heterodera glycines
SAFGSVKVNIFGNSERYPIVTFHDIGLNAIANFENFFQFQTFSKLTEQFCVYNINAPGQELDARKLPENFHYPTMDFHYPTMDGLANIVGDVVSHFGFKSFIGIGVFKSFIGIGVGAGANVLLRFCCAHQNLLDHQNLLDALLLINATSKGGGIEWAYRKSAFRL

SEQ ID NO: 155851 - protein, 187 aa, Heterodera glycines
MDKSLQKLQNELCDSSKNENFQNTMEIFQTTKIEKKTFDKSQMDTALAKDQTLNYNNKGMFSELVNFSSKLLKINEKLIEAKKLAVFHQKPKDLLGRRTKRADDNAIKGCISSVLLTLISAPYFGYYSFQYAHEGNVQIEYTECYKHLFSYRCYPAHSSVVTEIVEWTIIFAIGLILALLFCSCARG

SEQ ID NO: 155852 - protein, 24 aa, Heterodera glycines
MGGPVGMTRGKYKRNRSEVEPRIY

SEQ ID NO: 155853 - protein, 20 aa, Heterodera glycines
QVSKLEEALRKLDKEKAKAK

SEQ ID NO: 155854 - protein, 488 aa, Heterodera glycines
KMLPTPKMLVIVALVSFCSNWQFGYQITYINTAHWSFYALADEVYQNESLPFSAHLPQSEWNLLWSFILASFSLPFSAHLPQSEWNLLWSFILASFYGGTLLGFLLLSSLPAIFGCAVQLAVRLSASKFCQNSNWLPVPNLSFATLCFLLSVGRLLVGVQAGCSLCLLPLFIIETAPFNHRPFLSSLQVVFQSLATLIGLSVGSDHLLSLGEHKIEWLQIIGLAPTMFFAIFLIIGLAPTMFFAIFLLWLPDTPFRLFVLSSLFYFGQSSSSAPFVPKHLSGGPSRRKGAKDGKWADNWKGLLVGIFAAVSFLLVGIFAAVSFAFTADDLIDSYSADFLRNSKIKSKKVFILIFEFAEFLTAGLGLLLFFTSAEFLTAGLGLLLFFTSILGAFLADRFGRRRLLISGLLGTAADRFGRRRLLISGLLGTAVSNAIAAFGASTNSTVAIGVAIGFALTKTFIGFGAGAPAWFLTSELVSPLFVAQGQAI

SEQ ID NO: 155855 - protein, 78 aa, Heterodera glycines
MSQIHSKIIHTGCHFAAFVPMNPDNAAIPYLTAVGDLLGTTFLFAAFSVLALLKPEELVSIVSSSTASPPTGMPPSPG

SEQ ID NO: 155856 - protein, 68 aa, Heterodera glycines
MALVAIWPQWPPPNCPHFITALHSLAYCQMSGPWAVSAPFRGHFFRPIRYLKERKGEQILPPRNFRKF

SEQ ID NO: 155857 - protein, 55 aa, Heterodera glycines
MPWVWENAAQDRRRQQQHYAMEQFEVGSLGATMTPCHHFFSFWMCQGKWAEPKNQ

SEQ ID NO: 155858 - protein, 26 aa, Heterodera glycines
MDEEGDERDDFWANIGSDDVKNVGYC

SEQ ID NO: 155859 - protein, 146 aa, Heterodera glycines
MTSSQPIIYEKIVQQNGSKNSAEWCLASERRLLQKLIHHKPVGINRHFNLNLLVIYMNNIFDFEEDINFDQPGFFLDIVQEAHVSMSMHEKAGFPGLCYLYVEEKLNEYFDMELIGENESPSEELEKKAVFELPQEYQFKEEMVPR

SEQ ID NO: 155860 - protein, 105 aa, Heterodera glycines
MTIVGKGGSAVNAISRSPFGDDKDSRRSVSPPGTKRVRNGGGGGDDDSARRNDRDSKRSGGRRERTARHDEEERDRSDRDRERDHQERERRRIGLPGKPKSDHVL

SEQ ID NO: 155861 - protein, 178 aa, Heterodera glycines
QRFLAPPPSPNGIRPPAKAPPPPRPPPPPRPPPRPPLPPIGLPPPPPLSQPRPRPPPRKPPPRPRSPPVNGKPPPAPGRKAPPPLPPPPPPPPPRGPPRLRQLPLLGSPNPPVGPPPAATALEKPTLAKPPRPPMASPPAATRLLALALLCPARLVVAGVVVALNERQPKWKATNCAD

SEQ ID NO: 155862 - protein, 154 aa, Heterodera glycines
MFTQAAAAAAAAQMAFAGNLLPFSFPPPNIPPPSVTRQSQQQQQQQQHQTDTAIAQQHQQQQLTTPVSSAIAALMSTPASAPPTSRMNAGRANDGDRDGLALAVLPMSASPMRWQQAAATQLADLATPAEAIGEVVAVHVVVAAASSNDSVGVS

SEQ ID NO: 155863 - protein, 78 aa, Heterodera glycines
MMKIQWITLFVLSTTISAIFCASSVKLPRAIAGPPNSYVKKPNYAQQQAVQKQQQNGMPSSAGRVQTSVEASVQTSER

SEQ ID NO: 155864 - protein, 37 aa, Heterodera glycines
MFNASFRKDFNPKLNGDYQVKRAKLPDIDQCIPKAIF

SEQ ID NO: 155865 - protein, 89 aa, Heterodera glycines
MSSPLVKKEIKCSSRFGRIDTSIQYGGLLGDIANQQLKLCKRVPQMVDEQVNPQIAGVVPKKIAFKSISSVALNSSCLAALTGDGGAVI

SEQ ID NO: 155866 - protein, 176 aa, Heterodera glycines
MLDQLKTLLKQPQEGQRLIRPKLLTNVNILPNEWSIYPAPRNIGAKSGSDRDQKLDQGQQQHQETADEDRSTDQKVSVQTIEIGADNQRGEAKEEKKETKKETEQHHQQNKEEEEEEKRAVKMEANWQTEEQKLMAEMRMAVQKADSAMEKLESQRRKESAQANNKAIWKMIIDTN

SEQ ID NO: 155867 - protein, 34 aa, Heterodera glycines
MQRMEQMKMANRKQAKEIAKAFGMYLKQMVPNRK

SEQ ID NO: 155868 - protein, 333 aa, Heterodera glycines
FKEAKKIDREITTDDVNKFLEKQRPYTIHKPIRKRFPRLKTIPSGFHTDWQCDLCIFDQLKKHNDGYKYLLVCIDVLSRMIFSSPAKSKKSEDMIEAFYRVFEKSKIIPMKIYSDSGLEFQAGKKNILRKNFIKNVMYSPDLHAGVVERANRTIKERLYRYFTKKDTLRWVDVIDKIVSNIKNSVNRTLGIKPSSINFENARALWEKLYKAREFKISKKNKFKIGDIVRITKEKGKFAKGYLPNFTEELFKIVIVNSTTPDSYRIKDLEGNLIKGIFYNQELVKAEETNDSKIDVAKRAAERAGRDVERQLNHINNVSSSIQTKLSTLREVNP

SEQ ID NO: 155869 - protein, 36 aa, Heterodera glycines
GSMKLLLNISLNFFVLFKRELKIFKNFIHLPLLIEK

SEQ ID NO: 155870 - protein, 32 aa, Heterodera glycines
KPKLFGLFKKELKFLKILFISLLIEKASESLI

SEQ ID NO: 155871 - protein, 45 aa, Heterodera glycines; identical to SEQ ID NO: 124814

SEQ ID NO: 155872 - protein, 66 aa, Heterodera glycines
MSHLKNEHKNETKCQNDPPFVLEFVIVVADSLKRIAPHLATDRLTDQVPWVETPKNRVWRSQKYQK

SEQ ID NO: 155873 - protein, 174 aa, Heterodera glycines
YADDTFAYFDSSTLTVANTEFPNTTYCRYQDYRRPPCSLISQPISRQVWGDAFETVCDDNYEFQDKWWIILAFRLVFVLIFELVVLSIKALFAYLIPDMPTKIVIQLQRERFLMRQAILQRRDSPEELKAADLEEKELSQLTTDRRDAPALSPRASFVNELPLSMEEADTNEKM

SEQ ID NO: 155874 - protein, 28 aa, Heterodera glycines
MSHPIWQIGLFKRIKEDSVDCLECTLSI

SEQ ID NO: 155875 - protein, 28 aa, Heterodera glycines
MDPTLVEIEQTPELKSFIKWLYQRRISN

SEQ ID NO: 155876 - protein, 143 aa, Heterodera glycines
MSDFEIGMLKAMRHVFPSCERSGCSFHMAQAVFRKARSMGIFNLLNEDDNEAPRELNHHPSLSDFIAAFTKDINKQLDIGRAEQLQKSTKRRQRYVIKEQNVVRILDEADFESEEGLTNALHLLGIVMQGFAEGLHVRGNSEW

SEQ ID NO: 155877 - protein, 64 aa, Heterodera glycines
ICKIDIKNMSFYVMLSDLKFLSPFILCLLRINKRQWQLSQGQCAPREVGPSAVGLHECFHQYLL

SEQ ID NO: 155878 - protein, 76 aa, Heterodera glycines
MSPQYDLVRTVYSSCATLCFSLGMLFNAFLVWLILTKTPAPMLVYSKLLLTPCMMVKTKFSNFSALWCFEHGVYYE

SEQ ID NO: 155879 - protein, 1293 aa, Heterodera glycines
MDSLKEHNDGYRYILVCIDVLSRQIYVAEAESKKSEHMIEAFEKVFKKAQVLPNKMYSDSGLEFQAKRMNEYWLSKDIIKHVMYSPHLHAVNRTTGMRPVDVNFRNATELRNRLYKDMEQQKRIQKFKIGDIVRITKEKGDFSKGYFPNFTDELFKIVRVNPTNPPSYRISDLEGENIKGPTTVTLKVKIPSIQFHSVEHMQKSLNSIIQSAYDVKFPKEKRVKRAAAASADKELEPETRPEPDKELTREVPSSKTLDKELIREAPLPATHDIELQRGDEPKPSEKELGRETEPAQLSDKQLGELEGEKLQKEQLPPTPIVDHGEISTIDQERMDLAKRVTEQSWKETVKLAANAADIAEKAKTALNRAEQARKRAPNAPHVKKWFDRLSNMENNLRELVEKISQESKKAAEAKRKLDVHYDSKNLNECRKHADMSKQALKNSKNYIAQLTPMYFSTVPEDQLGVNELANRVVTAVNNFLNAELTVPRPVKDPQLSAGQPKQQQEKQMEKLKPTVEKEVGSIIKPPVPKLSDEKETKREPTKPTVEKEMEREPVKPPEKELERESPKKADKELEHMVKQQSTQEDNLLEKAKKEIDQTAQNAALKAEYIRTLVANSKHNRGVAEGRLNTYSGVPQFNEWLDQIVELDKKIDELAKKVGNEPSKVINAKQQFDKPYRMKNLTEARKLIEAAKNAFEVILNYSLEIKQLNNKMHELNDKFTVAVKEKEEEEAKEGAAINIQQEKKLEKEIPQVLKELEREKSQHDINTTAENTETEFPSSEYEIDDSSEKQPERAEQQAEVSYVLKKKEGKLEEEKIETKDDTAINEFPSTEYGIEESETEETEKWSPDQAKQKILKGKEEPFEQPDGQKDEETILVIGTDKKGEEFPSNQYEIEDNYSSSSSSFIAQNEPSVTTKDEEGLLTVQIKKLPMTGDNEQKTIQMVPSDFPSYNDDDSRDTTVNELSEEQHASTVPEDSKSEPYDVDELPDLPDPQALSAKGRGGDKKGVTSVSDRVKMLMGHQKQQRKAVEFLFNEITQRFYINIGSGVQHVDASSHLAYVLGFENTRLYYNHPAKYLPDLSGGVRQLYVYAPKLVEDTIIGDRMAPLLRVVNVSGTVPLDVPEVIYTNEFFKPIQNKRISEIKIEIQTAFGRYIKFNWASQQEGRGEQQYFVGTRYQRGGGLLQNVARFLMPVASNLLSSASKEGIAAGTRVLGDLSQGKALKESLETHAKQGFENLAGKLQQCGKGGNYGADGRRGQRVSKVKKASGISSSDSIIGRIGTVKRRRNKIMDQLSFP

SEQ ID NO: 155880 - protein, 139 aa, Heterodera glycines
MQRAIKYFIDYYAINDITQLYALLKLEIDSHPSNYFPNPLLSVSCVHIVNTEFENQPVIVEGTLDLIDELLFSTCYPKTRQGVGWSEPLYVELTDLMVCPGDLPICLSHFGQRKERRPSLMVDELDWHDSDDDAADEAW

SEQ ID NO: 155881 - protein, 894 aa, Heterodera glycines
MNRHDFCKDYEAFNRLVSNIGRMQTAVEELMNASGIQKDQTSYGIEHIQQVQQYWNRVFPGTYRLVLFEDRPEELPRPIWKGPGGHRFNVTLFLSSDHYDVIKKIHCFFKLGRKYCIECECTYTVDAKHTMHCKSRCPQCAKVGPQHPCPKQDGVQILCTECNRYFFSRFCYDGHRGTTCRLYKRCSSCNRVYRSDTGQKHKCNTRYCKRCKVYHAEKRSCFIKKIRVSPEEQRYRIIVWDTETRLEQLEDEGQRIHRVNFLSARVTCTDCCESTETDDDNCEICCQNDGALERAKEWSEADGEDQPVAAFVEWVLRAWNNEYTTYIWAHNASRFDGHFALNHLCKTARRPDVVMNGLKIFEFRVQHSRKHSMLIWRDSCLIMPIALAELKKTFNLDCDDKPFFPYAFNRKENYSLRMENLPDESEYEPGTMKADKYEKFKKWYNDNKRTPFFLPDELRAYCLNDTEILLKALVKFRQILMNEITDGFDVVPISCTIASACMNIFKAQFMEPEQLAMVPELGYERNDRASVLAIKYLDWRAKSEGIEIQHAGNGREKRWKQFKLDGWIESQQRCIEVLGCYWHGCERCFKPDEQLIDGKTCRELNDTTQDRLRQLREYDDHGRCLQVEEIWECEINDQLKKNERMKAFFDDISNERGPLDPRLAYCGGRTGPLRLFAEPAEDEKISVFDIVSLYPWVNYDTDYPIGIPTIIHPNADEMNVNWTKPEHLQYRGLYRVRVIPPRGLRVPVLPMKIDERLLFSCCHRCAALFRKCVTRCSHKCTHSDQQRAFTGNFTHIELEKALELGYVVDRFWRAWHYAEWSDQIFKGYVRQFIRLKVESSGFPEGVETSEQKQQYIDEYRRIYGVDLDFGRIKKNPGLRFIAKLMLNSLWFAPK

SEQ ID NO: 155882 - protein, 71 aa, Heterodera glycines
MAEVPPTVPSTRPTEADGQSVEEEEELSMAASSLAELTEDDGAETVLKKQGIELLIEAMHLHFRNIFNGRP

SEQ ID NO: 155883 - protein, 178 aa, Heterodera glycines
CKNVMSLRANAIIRRYRTRTNECGLVLKPVHFKNGNTRLRVFPKFISGSFGTFKRSEAQQNANSEEECLPIPPAQMGELRTKNCSGGDGETEQRTVGELGGIPLGQKTLSLRNLTSAGGSKRFSAIEDDEMRPVSSPKRATSHDGNFVELFTSATSAGGDEPSLVPAGLHLLPFALPT

SEQ ID NO: 155884 - protein, 235 aa, Heterodera glycines
MRPVSSPKRATSHDGNFVELFTSATSAGGDEPSLVPAGLHLLPFALPTSSTSSDALAQCQTQSACLFAKTPNRSENAANLEFHQQNILSLNSARTATEGGQTMQFYGNNSTANVPINFAIGATNNGQPQQHQQQNIVSLLGPFSGASTANDGQLGQNATMGNVLTMTTNSMGGLFMCDQQKQQNLWVQQQQQQQQKQQHIQVINSREDMLITDQWGRTERNPRDYPGNFHANSFL

SEQ ID NO: 155885 - protein, 50 aa, Heterodera glycines
MANPIATKKQKVKLSYKDHLCTFAKMSSDGMTKFWRCEFKKSISHMILHF

SEQ ID NO: 155886 - protein, 110 aa, Heterodera glycines
ILINEPLGTDRPEIVHCCDELLARQPPCNSSHLFQFLIDKIADKMRENAVANEQQLTEMAQKSGEYLDVLERIDPIRHNFWKYRRAQLQTLADSVKFNSSNSASAAAASA

SEQ ID NO: 155887 - protein, 75 aa, Heterodera glycines
TVPSDNYQARAMIDIAVHFSWTYLSLVYSADEYGELGADAFKKEARRANICIAIEERVSMKPESLRDSIANLVKK

SEQ ID NO: 155888 - protein, 330 aa, Heterodera glycines
SKYNQLALGQLFHLFVFGFINCFNIFYSKKCFDFCRPPHHLLKMFSLITMTLRTLTHVHMLAKAVDGVGGQPTENMRQLRIPGDLIIGGVFPVHAKGGGTSPCGEIFETRGVHRVGVHRVEAFLYALDMINAQTDFLRGYKLGALILDSCSNPAYALNQSLDFKLGALILDSCSNPAYALNQSLDFVREMIGSSELTDYSCADGRQPTLRHPSPKKSVVAVVGASYSSVTVQIANLLRLFRIVQVSPAIANLLRLFRIVQVSPAALRFFAVPPRAAVPFWSLSLVSAFGVSAFGLGAAFAALCALVSPSLRAKLVAAASKNGTKQSNSKL

SEQ ID NO: 155889 - protein, 287 aa, Heterodera glycines
MPIAHSSAADQAHPPLSEGTTNTNLTSDKSDQTGPETPNSQRKRSRQRKQSSSNIQRTEFLGFASTETEIAVIKQKDQRNDQPRNQRNDQPSDQRNDQPSDQRNDQSSDQRNDQSSDQRNYEFNEQQSYQMLGLYDHDDQNIEPMFVDTNAPQMIDTSDFDQIAQLAGDDLMFPHPMEVYDEPNNAEEQFVMIPVGNSTQQIAAESVGKTKSNSKSGHGKSRQSADQSMRDYASPSIQQKQKAGRPKKPKIDEKMEKAKSKMGVEEALIKPAKHKSKMTMGKTTDEK

SEQ ID NO: 155890 - protein, 72 aa, Heterodera glycines
MLYWSSSFIKILVLYFHPLLPFFAITFKSRNRHFEKCLDLDLDFLDKNPGKSRSRKNPGSSRPGSRPGPGFF

SEQ ID NO: 155891 - protein, 92 aa, Heterodera glycines
KAKQAYQEAFDLAKNKLRPMHPIRLTVALNFAILQFEVQKSPADACQTAQLAYDDATSDAQTTGESICAESVTIMGLLQDNISYWSGNTSKT

SEQ ID NO: 155892 - protein, 336 aa, Heterodera glycines
WICNDVWMDILPSFDRPQLGLKLAILSPRFNALVDKHFDAKSELTIWRTIIIDKDKGHEPKLSVQMDDKSLSFPLPDDRPLPSKIRFKRLQIEYMDHSVIAFLRSNHQIFDKRGTNLYLWIPSPDTTDGQRIWDILIREIWPIFSTNIRHLRFTGGDDLDYLLRRTSPTIFTDLNQLVSINSYDLLPDSIGDDFDGPNATISAGQALSKWLHSPRKDGQPKRLRCANYNEQRNTTDWVNNFNEHFLRANAISSVSYQIHFSVRVQSMQIVPFEFLNEWTKEKLTLTKEKENEWDNSWIMKRCKIIGESAAVHWKDGNWDNNCNNVYFWLFAGTNCI

SEQ ID NO: 155893 - protein, 102 aa, Heterodera glycines
MEVEDAVPPLADCWPIKLFSNIFWPENRWPNVPSLLVPAAAAAAAAMRPAGDGWRNGDGCCCCCCAADGEEKPLEVGVEEEAAVANWPKEWNGKAGTGNAFD

SEQ ID NO: 155894 - protein, 217 aa, Heterodera glycines
MHANLAAGGGIAGPTDLPADDQQQLQQHGGTNFNPFNNANNNSSVQQQQQQQRFVRTPSANFQCVRCKLHQQRVCFAGDEHQQQQNDNSTNGYSNNEPLVSSSALLVDEQKQQQYNSNNNMTTTSSSNSNYNCNTTTTTTTSAATTDATSSAATAATMYAMEQSTQELLRQLVAAHCHQNLGPTPGHGHGHGDDDEHEHGAGDEYHHGDEDDQHHEE

SEQ ID NO: 155895 - protein, 60 aa, Heterodera glycines
MTSFFYLLLVLLSFTQKVNALQCWSGIVFNIFDTINVNATRKDECPRGRNFCSKTDCTAT

SEQ ID NO: 155896 - protein, 90 aa, Heterodera glycines
MTTPANAARARSAKAKLRDAKLRRAAAGRAGNLLKNMRGERCAHEKRERHHADDARLHPSVPSSLLVPLAPRPHQLPRVPLQLRAHHTAQ

SEQ ID NO: 155897 - protein, 66 aa, Heterodera glycines
MVIEKIEPVFGAVSFFTLIIISFVLCGGFFFRFFHYFGPFSRLISLLPFSASSSDTSRPTRASYFL

SEQ ID NO: 155898 - protein, 28 aa, Heterodera glycines
MRLERSEKGRGPEYLVCETWEPEGKRGD

SEQ ID NO: 155899 - protein, 403 aa, Heterodera glycines
IAPPDLPRLNAVELNQQSSGNKNGKTTNGKGQAGDLSHRELSKVVVPSCYNVIGDGDCFYRSVCYSMFRVDKTSNSDELRIAVGNTLQAIVNNKEYFPKNRLKNHEEFVRELEYALLEKPSTEWFNKNLEAYAKFVAIPARNGKGRWAQLEDARLISLFLMRPVVILHPIAEKKVLVELQPKYDDSSIMRRIEVYFPDGETMIAPPDLPRLNAVELNQQSSGNKNGKTTNGKGQAGDLSHRELSKVVVPSCYNVIGDGDCFYRSVCYSMFRVDKTSNSDELRIAVGNTLQAIVNNKDFPKNRLKNHEEFVRELEHALLEKPSTEWFNKNLEAYAKFVAIPARNGKGRWAQLEDARLISLFLKRPVVILHPIAEQKVLVELQPQYDDSSIMRRIEVHFPDGETM

SEQ ID NO: 155900 - protein, 68 aa, Heterodera glycines
MKAMAAHAFIESLELMFGFYCKSTNAYIDGMMKKMENGDELKQLLVQNPCEEAKMKVKKTKMSYQRVF

SEQ ID NO: 155901 - protein, 34 aa, Heterodera glycines
MACQKVTLDEWECAPPMMIYALMQFQVRLKRKKF

SEQ ID NO: 155902 - protein, 132 aa, Heterodera glycines
MARRRRKKETRKVSYKVRFTTKAKCQGNCVNDSPFFPLISVVRSTGAEGSSSGQGNLNACVEHHELLRHRRLGSHCNGGDAHGPLRPAQDRHASRHGVFVPTVPARHHGQTCEPKGFGGDKFMISPICKAHS

SEQ ID NO: 155903 - protein, 555 aa, Heterodera glycines
MLFGRKFTLFTDHKPLLAIFGSKKGIPIYSASRLQRWALIMANYDFDIKYTNTASFGQADVLSRLIANYPKPEEDVLIANICVETDCYINTILQSQTDHLPVTAQEIAESTTKDETLQKIVNFVISGWPTKCREPEIAPFHPKRNEILEIGGCLLYKSRVIVPSQLRGRILKALHFAHPGIVRMKPLARQYVYWPGIDSEIERVVRQCDECQGAQKCPIKAPLAPWTVTDKAFQRVHIDFAGPCQDGYVYFILVDAFSKWPEVYQMSSITAKSTVFTLRSIIHRLGIPEEIVSDNGTQFKSAEFAAFCKEFGIKHTFSPPFHPQSNGQVERFVDTFKRAMKKCSKDDKNWTEKVLLAYRTTPNNAIDGYSPDQLFFGRKLRTKLALVLPQEHKNNSENIDKIQLNKRRKDYSNNMAKQFDGRHGVKEKVFVPADSVLLLNYRNQKTYWLHGTIVERVRNSPTYRVHVPVLGRIVHRHSNQLRRNCVFEENSKHNPGAGQQPIPPANGQTQNLAHQIADPVDQRTDQQAANDPPTLALRRSQRKPKPVIRFSPSGR

SEQ ID NO: 155904 - protein, 155 aa, Heterodera glycines
MCPTFGGVFAVASSNGSVGLYSTLTNSCDCLLNGSSDGSAVTHLQYSSDGNLLFAGLRKKPSIQCFDLRMPGHLLANYQRTVETNQRFFFQLDPFDRYLYSGSSTGELLIFNCKINVQLAEDGKEVEPTFTAKCSKSAVAGLRLDLSGNRREKLD

SEQ ID NO: 155905 - protein, 432 aa, Heterodera glycines
ASMSVKIQILPQKFKKITKKVAKTRKSHKNPKKCKKVTKKHLNKSSNEPKECGKEFTTERVAILDFGAQYGKLIDRRVRLIDRRVRECNVCSDLLPFSTTMNELVHNGKFSAVILSGGPNSVYVDNAPVNGKFSAVILSGGPNSVYVDNAPVYDPELLGGRLPLLGICYGFQLINKHFGGSVSLQPLINKHFGGSVSLQPRREDGRTQIQVSPKSDLFHSLKPDQFVLLTHGDGVTPETSAKNGFQPIGFSGEFVAAIENTERRIENTERRIYGLQFHPEADLTDADLTDQGIQIIDNFLRRICSLKCHYTLRNREQMCEERIRSAVGEKGEVLVLVSGGVDSTVCAALCTKALGAERVHAIHIDNGFMRLNESDRVMNSLHDIGLVSKFQKNLSNSLPYYRLLQSEVHRFNCVSDFLSGSIVQNGMTLEVP

SEQ ID NO: 155906 - protein, 90 aa, Heterodera glycines
DKRRTERKGGADELTERVRLIGRNVIPDGDLSRRIETKKATCICVVLFCCYSNHIVHLCRCFTVLFSFFSLSLSLSFFSFRFWLINSFFS

SEQ ID NO: 155907 - protein, 99 aa, Heterodera glycines
ENKFYNTVSGRLSLLSSTPKYRVTVGEIHRRINRINPPECLNASVLGGILRRAKSKDGGAKSKDGGKSLRDQLKTYGLVLPAGRRKTANVSTLTALVEF

SEQ ID NO: 155908 - protein, 185 aa, Heterodera glycines
MPESDFLYIPGMYIVHSCIHHQQQSPLDYMVALNPVHTLQQQQQQQNATSSQQQQHANNNGTTVFIHQQQQQGTSASGGDVVGAGNGGGAVGGTLLRVLPPFLHHSPREAVEMKMDNSDGEQSSDSDSPSMNGGRGRGVKRHNARRRGGGAGTMTGAEGVIRKGKKHWQQQHKNICLNGLRSKSD

SEQ ID NO: 155909 - protein, 334 aa, Heterodera glycines
MSDNRNEAEEKMAKAIFISGDGWLCVFELLPASQLGLGIAMISHRFDFYVDEHFKTRYWTLRSMKIKMKFEADGTKEMDVVNANWESFGITQKPLPKRVVGFKAISLKYFNNNVITFLHRFRPILAARPIHLTIDTYFDQRTLESILLNIWPMIATNIRGIQLSKESFCRLRQFVPSILDDCPSLRVVNAYSSGFFTKFPCDDSAEASEGQAVAKWLFTPRPDNVPKVFKCWLECGGWHLAPRIEAFKEEFYAASSPVNFIAVIRFRSSFDHLVVPFVLTNELTREQLTLKKMNDIDRVLLIRCPIVRDESKWAKWEKEAIGWNFMDQWNRIDI

SEQ ID NO: 155910 - protein, 40 aa, Heterodera glycines
MENGRNAMYGRNVWLEMMDGTRPGDRDLPGPEKPGPGPGP

SEQ ID NO: 155911 - protein, 40 aa, Heterodera glycines; identical to SEQ ID NO: 155910

SEQ ID NO: 155912 - protein, 68 aa, Heterodera glycines
NQDFHYIILKLILSDEMIGTVFIGILSNVKLTNEMNCPPSIRFVRFFSFRFAFFFFHYVFVSSGAGYC

SEQ ID NO: 155913 - protein, 366 aa, Heterodera glycines
LFIHINFGFLLSIVCLFYPFAYEFRLSFLRRLSAAFSQNVFPLLPYAFAPFCAFAAYKRLSAAFSQNVFPLLPYAFAPFCAFAAYKLIKYLFGGQSQKKLELKNKTVLIVGASSGLGRSLAFEFYAKGSKLILVARSIDRLKAGSKLILVARSIDRLKALCAELIKWGDENGVENANLPVFRYLDISELNGDGMEQIREIDVLVNNAGLSSRGSCDETSMEVYRRLMEIDVLVNNAGLSSRGSCDETSMEVYRRLMEVNFFGFVAITKSLGCIPDDGAILNINSIQGRVALPYRSPYSCSKHAIQAFFDSLRGEERPQLQILTVNAFFDSLRGEERPQLQILTVNGRYINVEFLPFVNDIPSILLS

SEQ ID NO: 155914 - protein, 569 aa, Heterodera glycines
MPKFCTWNSKQGKWLLRKNPEISKTIGRMYPVNPTEGEKYYLRYLLLHVHGKNFDELKVVNGERYNTFAKACLARGLTKNDDEWKYCLKEACQFRFPAALRSLFTSILLFGDPKYPELLWEQFKNNLSEDFLKKNSESVAYKLSLTIINKKLLQESKSLADFKNLPQETTTKEEQENINYEEERKIAEDLYKFMNNDQKKIYDIIKKVLTGEIKQKLIYIDGPGGTGKSFTLNTLYHLIRGYKKQITNMAFSGIAATLLKNGRTIHNRFKFPLNLNAYTVSGVVNGTKASEEILRSDFFVIDEAPMAPRFALDAIEKKLRELTKSNQLFGGKTIILAGDFRQTLPVKKFAVKSEIIDLTIKRSIFWNKFEHMKLIINNRAKDESFSKQVLEIGNGFNQNGFIQLPNECILSENSNLVHEIYGDIFLNNNFNELKNRIILSPYNDLTDYHNAVALEHFPGQLVSYLSIDEVETTNNFPVTTEIMNSFNAPGFPLHELKLKQNCKVMLLRNINIEEGLCNGTMLQVLELKENVLRCVILGGDKNGSEVYIHRISLITESEFPVPLKRHQFP

SEQ ID NO: 155915 - protein, 74 aa, Heterodera glycines; identical to SEQ ID NO: 145501

SEQ ID NO: 155916 - protein, 64 aa, Heterodera glycines
MVQKELIGKFASGDYAKKPISFPTTNVFSFQNMPIFGDPSSPYDEAVEKATAETMTNENWTLML

SEQ ID NO: 155917 - protein, 82 aa, Heterodera glycines
LDSTTNNHCQKKKAIVSNDPNVVSSEQEEADIAKAIALSLQEGGKQQQSSQNFYPSAVVGTAPTRFWHISEPSIEMGQLFKC

SEQ ID NO: 155918 - protein, 50 aa, Heterodera glycines
MKCIELLEKCDPGADPSSDPAELPFLEQMAKAQAPLIDQKLVKIDKVSKD

SEQ ID NO: 155919 - protein, 376 aa, Heterodera glycines
MIYHIKKLPLCHRLWCREWKGRQQQQKAQQQKQQSKQRKMPPKLGQSADGIGRGCERRNGRERNGKGKGKAENGKQISKQMKVIETTGEAKIETITQKGKTAEEEEEKEEKKEHKETKEEPEFSMDEENQTEKEKETTEESTTVTDRVPTLPILIMNEHQGSEGRPKSVGIAVPSETNPTATTATTEGSEEGEEEEEAQKTRENGTTKAADQPISERKVMLKSEEKVQQQEDDVNATTASSSTEETAVTVKVEQQEDDVNATTASSSTEETAVTVKVEQQEDDVNATTASSSTEETAVTAKVELQEDDANATTASSSTEETAVTAKVELQEDDANATKASSSTEETAVTAKVELQEDDANATTGSSSTEETAVTAK

SEQ ID NO: 155920 - protein, 26 aa, Heterodera glycines
MYFSASIFYKRISKRNGYVWGKNERK

SEQ ID NO: 155921 - protein, 131 aa, Heterodera glycines
MPRFVVKDMETLFIDEVRQSINLLISNLESVPVAPRQTMGRKKEKSRGNRSRSIEDLSLFNSLKRRTSSMSLNKTENGDDEVSLTKNDVVLNFNMEVVVMEVQGLKSVQPNRVVYCTMEVDGCSKLQTYAF

SEQ ID NO: 155922 - protein, 96 aa, Heterodera glycines
LGKVVIQPTPNCSRQPEWYKMTVPKSSADKNLRIRLAIRMEKPLNLKICGYLYGIGRIAWKKWKRRFFCLVQVSQYAFAMCTYREKKSDPTEFSQL

SEQ ID NO: 155923 - protein, 223 aa, Heterodera glycines
CRSVLSLQPRPIQGRFALNFTLEVSGCQQGTPVLYLEHVQVITTIRFGKRGDLKLTLFSPMGTRSVLLPPRPQDFNQNGFHKWPFLDFNQNGFHKWPFLTVQMWGEDPRGVWTLLVESISNMWGEDPRGVWTLLVESISNNPNIGGIFSDWALLLYGTEEPAQPIFSDWALLLYGTEEPAQPSDQRYSPYAPSAYRRPGIGQALTSQVGGPSACWWPLCLFKS

SEQ ID NO: 155924 - protein, 201 aa, Heterodera glycines
MCTKVQGFADKASKHGMDELIQADPVQIGHDHLFAKLQSLTLDFRLNEHICSLGWFSPGQVFVLDEYCARYMVRGCHRHVSLLNDLLNKADDGHLVDPTLIHYSFAFCASHVHGNRPDGVGTVTLEEKEKFQDVKERLRGLLEKQITNFRYCFPFGRPEGALKGTLSLLERVLMKDVVSPVPPEEVGDLPKKEKCECRNGG

SEQ ID NO: 155925 - protein, 117 aa, Heterodera glycines
MKRIMADQNKKYKKGIYQLSFCFVCPNVCKSFASSLHESVRSVDDIIWGVLVSCFAGSSFNVSELSRPFPGRLVQNDGRRLLGGQRLEHLLEQRRVLLDQNLPPVRLHHLREVEIEL

SEQ ID NO: 155926 - protein, 86 aa, Heterodera glycines
MAGQMVSDLTATNRELTASNRSYQRQLLIHRIILGVLVALNIVLIILVVFLVGGSGPTHNECVKCSERCGGLLRMEVPVRRVNCKR

SEQ ID NO: 155927 - protein, 82 aa, Heterodera glycines
MDKCLDRKDVLMCRELADEAKGAFEIVKQYRLDAGTAYRNAYTQSDLGIGELADKVKETMKEYLSRPGPSPRPTFKDQFISD

SEQ ID NO: 155928 - protein, 104 aa, Heterodera glycines
MWSDDRYSSPEQMKLCSKKKKKVEEGEEEEHIYPVSSKSDIWAIGMMLIEFLLMTPLFDIDPVACLQIDPYRRPTARGIENFMKGECDFKWLTLKPCDEGAAVN

SEQ ID NO: 155929 - protein, 59 aa, Heterodera glycines
FFNGRPIEPSRKFEFKKEHTELVIYPFLEHDVGSYACEATNLNGRVKSEAAQIGLVGNY

SEQ ID NO: 155930 - protein, 140 aa, Heterodera glycines
MLSFIYTEELSELNGDNAMAVLYAVPSKVLTAEEKIGIYQFYCQQNFRGMYSQLFHPLKFPSHWRIWTFGTISMKIEKVSEFARHPMESYRFSDDTVYIKGLFWKILAQLKAKTKRNDNEPFELSCKRKWRRIPLENSMT

SEQ ID NO: 155931 - protein, 270 aa, Heterodera glycines
MEENKGKFKENNEKWEQIIEKLKEKTKQMEENTEKIKENTEKMEENTEKLEEITKKLLENIEKMKENTREMKENAKKLKLEEKGERLEENAKKLEEDGERLMENANKIEENGERLVENANKIEEDGKRLIEIKKKEKFKETAERLIENNKKLLEIREKLEENGKKLKENNEKISKERSEKLKESIETNKKRQEKWEELKKWKEIAGAEKWLGFFLLYDAPKDDSNLGCVCSATLRIVSQKNEVRDFQHKFNDVTMKASNCWGFSNFISFA

SEQ ID NO: 155932 - protein, 27 aa, Heterodera glycines
MQLLLLRKIALLRIGPRLIGKMAIIKV

SEQ ID NO: 155933 - protein, 105 aa, Heterodera glycines
PQQGNFAEEKQLHPNHNVYRKMERLISLMLNVDDGVPIKTVKSFLSKIPSVFTGIPSVFTGQDLVGWLLQNVDIADLGDALHLAHLLASHGYVFQVEKFLIFIDN

SEQ ID NO: 155934 - protein, 217 aa, Heterodera glycines
LMTPEELTNPNVDEKSVMTYLSQFPRARPLYSASTRAPLEQQDSEGTTLDDSNQSDIPFPNEPSLPTDMENIPQQNHQLYNLMVCESDLNDGIAETAAEPTTDFDAVRMTYRHEELQYEPLVVVSDEETVALGTTAVRPQPGFRSLCRERSTDHIEAAAMVAVEGHGLQSFVPGHAAKFAVDASNTGGVRPMRFRNNHNDDAFLAEMRTDDVNYYRM

SEQ ID NO: 155935 - protein, 130 aa, Heterodera glycines
MRQCSNAGGISLQKKTPRESENSEEKQKQISSNFYGNSFFPQNVQNKAKGSEWRKQSSPTLFAPQNENSESEERKELERMGRQVAEIRSKVETIKSKMNKMANDFKKTMLELKAFMERIFDDENEKSEKK

SEQ ID NO: 155936 - protein, 174 aa, Heterodera glycines
MLVNRVYAFKHRQQRDDDGEGGQNDQGEEEKWAVEEAEEERYEDVDEDGLVGGDDDAAVPPPNQQKQHNGNRWRWHQPTGWLHRRPVRRSGAAASATTVGYDPTVRNPLFAGAEWAVDDELRTLCHHFHPTVSAFTRALVKEEKQKTGFISLDFLNKNLRNDVLSCSHLSTPPP

SEQ ID NO: 155937 - protein, 245 aa, Heterodera glycines
ELQSGTLSATQVLYAYAHFALLVNDRLNCVAEMLPEAFDEAAQLDAKYAAGGTGKNKPPLFGLPFSVKANFFLKGYDCCIGIARWLGHPRSVDCSLVTLLRQLGAVPFCYANVPQTLFSFVCSNPVYGTTGNPHDPKRSPGGSSGGDAALLAAGGTAFATGGDIGGSLRIPAQFCGLATLKPGQNRFEISNAHLGMPGHARFEISNAHLGMPGHARLGLGTGVFAKSVEEVLRTAAGCLTDIDCC

SEQ ID NO: 155938 - protein, 78 aa, Heterodera glycines
MPAGVVPTGTVRREDDEALMDDTQWATDGNILLKWMRSAAANSVGLPVGVQVVAMRWEEEKCLGLMNAIEAMAKAQKK

SEQ ID NO: 155939 - protein, 116 aa, Heterodera glycines
MPFYLYIAGSPMLHFAIMIERVRATLFVHNYERASTKFAVGILALVDYSLSRNYQTNENILTMRIIFPLDFSYTIFFSIFNILSGYIRIKREQFGILVYIRTYETITLVRFSELIN

SEQ ID NO: 155940 - protein, 39 aa, Heterodera glycines
MTTLEARPLCQQPLLRPWARLSGETFWKIWVPEVWMGTK

SEQ ID NO: 155941 - protein, 507 aa, Heterodera glycines
ALYARMFAWLIRRCNASLSEGLQREMFVGVDIAGFEIFDLNSFEQLWINFVNEKLQQFFNQHMFVLEQEFVLEQEEYRREAIRWEFIDFGLDLQSCIELIEKPLGIISMLDEECIVPKAPLGIISMLDEECIVPKATDGTFVQKLYDQHLGKHPNFKKAKPPKGKQAEADFSVQHYAGTVAEADFSVQHYAGTVRYNAKSWLEKNKDPLNDSVVAVLKNKDPLNDSVVAVLKTKQKMALLNAIWADYQTQEDVEDVQEQQMRGKVPKGKKKGKASTFQTVSMMYRDSLNKLVKVLSQTHPHVLSQTHPHFIRCIIPNEQKKSTRIEANLVLNQLTCNGVLEGIRICRKGFPNRVAYADFKQRYAILATKEAMETDPKRAGEAMCLRMERDGTLSRDGFQCGTNKVFFCSGVLASLEELRDEALSAVIVQFQRVCRFHLAQKELKRRLTEKIGVKIVQRNVRRWCSLRSWPWFRLFSRIKPLIKDLKMNEEYGSLQDNEEYGSLQDSR

SEQ ID NO: 155942 - protein, 238 aa, Heterodera glycines
VISFFAVVGGTNTKKRTKSSTEKESSSLEDQIVRTNPVLEAFGNAKTVRNNNSSRFGKFINAKTVRNNNSSRFGKFIRIYFNNGGKLAGGDIEHYLLEKSRVILLEKSRVIKQQPTERSYHIFYQLMSGAIPGLKTKLFLDRPVHSYNFIAQAKLFLDRPVHSYNFIAQAEVAIEGMDDGEEMLTTDESFDIMMFSELEKMDLYALIAAIMHMGEMRFKQRPREEQADISDGGGGEKR

SEQ ID NO: 155943 - protein, 149 aa, Heterodera glycines
MITKFNQKLFDLHHGNGKNLQLSVRYQLNENIRTGRQLAPNFSCHFITVFITFVMTMNFQFGIITKDEYMLLFYGFLFLAHAFNDLALPVVMLCYHPLLNRKAKASLAIIKKLLRNSSAVSPLEETAQPLDTDGRPFGERIQQENQDKD

SEQ ID NO: 155944 - protein, 44 aa, Heterodera glycines
MTEHNFEQNRRTNSSIVHEGNVQFDNENNGTERDENEIRRLLLQ

SEQ ID NO: 155945 - protein, 40 aa, Heterodera glycines
MSSLFVQQPSFSGSTPNLRSLSAAEEAGQQSAKKGHKREK

SEQ ID NO: 155946 - protein, 226 aa, Heterodera glycines
EGSPSLPFKKIIYVFFSLTGHVQRLHFVQNEVIPSSSHFDSTGEFPWPWVRRAHALGLMNTGIPPEHGGIGLPLTVKVGIFETIAYGDIGLGTTLMVSELSQQPLLTTLMVSELSQQPLLYAYAGTLEQKQKFLLPMLGNPFLASFAVTEPEAGSDVSNVSTSAEPSEDGTFYVLNGAKKWITNCGVAQWFFVLARTAADPATPAKDAFTGFIVERDTPGLTVGEK

SEQ ID NO: 155947 - protein, 356 aa, Heterodera glycines
MQNDFVANLHQNGIAFLADYAALWLLGLDMLPMYNKQQQQEMKLFISQSCSCTMEAWFVQSSDSVGPFFPKMPSAGSASSPPKLTDKIFPINLTNNGEQKQIIKIKGLTDANIRSILVELLSAKKGSETKTEARFIIGTDSDLEVTLPRLSKSIRSKGVRLATGIYVLNLDIVLTKRCYLLRMNGTQLGRPICPLEGNLPLEEISGIKVQGQMLLLGDPQVNENDDKIKFTQEEAPEIRFDWWALPKGSAPLDCARLFANDAKYISQMVRRRICREEDPTENDLDMSCTAIQSRNRFWHGAKDDQQGEQNEKEHANYPMAQIRTVYKARNGITVGFKYSNGLNPFGHWFEKDSIFY

SEQ ID NO: 155948 - protein, 96 aa, Heterodera glycines
MTLFLRHTGHPYGLELFGGPATIRTWGYAEGDVVGVGLNRSNFQTFFTLNGTLIEDCACKVTPDMTVPVVSLRGAQTTAKIFRGAPYIFEFENLYI

SEQ ID NO: 155949 - protein, 266 aa, Heterodera glycines
MNSEKSEKANTILVEAAKKETERAWRDVAALAEEVGDFAKSSRETLNRAIKSREKAPYANGVRELYLKMSDSIWEIFKIMDQINLESVKAESAWREFERLKTFDQATKFEELSQNSLVEARRLHFESRRMYAQQNDMQISAQGEDVLQLTAEDFAAMDEAERQWQAEQRRRREQQRRDAEERRQVRGDWHSDMLRRQHVWEQQKEEREIDRERWEQRMEDEGRKCEERSEATRKKEKEEKDKNDVTDHYSFKWGEWRKKEKLFFGK

SEQ ID NO: 155950 - protein, 120 aa, Heterodera glycines
MQTIAEIKNFEIIEGGRVFIVRARIENVVHAEYRACVLCRKGACSCGVEKALTPYFKVSVTDDTGVLENVAFFGVRGKKNGMEELKGLSGAVCTMKIGARVKEFGGKKGIYYSLIDIVSL

SEQ ID NO: 155951 - protein, 229 aa, Heterodera glycines
MSREAEPGWKIEKISVDLYCSALSDPVIIPARPFQHSNPDIVFNEFMHRQQSFGEEALEKEDFFWQKNRAEVEALLIEASNYKIIIHRDYESRYSDYIATYHRTPLFCFCMIERNLRFFYDTGTGTAIGRVTTVLHVTVEASYTGEGFISPMFSFWFYWEGRSQTTNESFTSRLYLYTVSMLRAMGKAWGRELLLNPVEVLIDMFYQQIWSDRGHCSIDSHPHFLTLHA

SEQ ID NO: 155952 - protein, 367 aa, Heterodera glycines
ECDVKEELKKNKEMKKFFESVPDKGPINPRDAYAGGRTMPFCLYAKATEEVEISMFDIISLYPFVNYVSRNFNVNWTTPDDVPYDGLLKVKVIPPKNLLYPLLPVHIDEMLLFPNCWSCARRAKNEFVMTKDVKKCNHRPTQRAFLGTFTSIELRKALELGYRIVGFYRAYHFEQFDSQLFKGYVRMFLKIKVEASGWPAEVKSEDEKRAFIEMYKAKYDIGLDYDKIGFNPGLRMIAKLGLNSLWGKFSMRNTLSSTEIVGSMERWMELGRDNTIEFGRPVKISEEISRVVYRKKEEFIREHKVSNIVLSLWTTSAARLKLYEYMEQVYKKEGCKLLYCDTDVKEKLPRNFKRSPPLEKYQKLFQE

SEQ ID NO: 155953 - protein, 198 aa, Heterodera glycines
MVLTRKKSENLKNMSNSGWLKQTDAAPTADGEGTSTQAAESACPSKNYQLDKQLKEQEQAISFLRLQVRNRDAMIAELRRQLEQQAPKDQPTTSTRRKKNAATLERTSRRNLAEKIADVIDRDRSRSAQPLSPRDLDELETSIDQFRTFLDDQPRMRTLLALKPKVHLVLNHFVPFARQHKFLALLDEQGQGHKAFEI

SEQ ID NO: 155954 - protein, 499 aa, Heterodera glycines
MKCIGEKALGCFISPELAKDANKMAKIAENRDKALTDSPNGPNDRVELFANANLSSRPVADSAKKRDASTSRLNQTINSTVDDPNATKRARSASGRRRSVAVLPNNSMLNDNTDEGNPRAPRRSHFVGSGGLSSAVSYSSNLNTTMTLQSQNVAGKFQLDPKFFQNDFDDNTLLAGNNRGERELTNTTQTLLLDKTFKVSTPKVGDKHNNNTNAAQSMDQASSVDLQPIKPVVRPTSTFSRRSESVSSISSLESAEHIDRTVHNISCLQLNIAEEALAQLLHLMNDQTTRQYIIDRTELILKTMVTQIFHIRSQHLEQLDGVKEGDQKEQELSEFMRSICNFLSTLTNEMTIMQRISTDTLRSFIDSLLSLVSDQRLKILNKQVFRSLNIIVIRLCEFTNPNVCFVALMKLVMKYQASDPGGQLSSLVRKCLTKFTDAIVEPTRIEKVDILTVLHPIHEYYSRFYVADGQTNQISDTVKDTSKLLCIFLQRLVINQKYA

SEQ ID NO: 155955 - protein, 120 aa, Heterodera glycines
MEDIRFEKLNGTLSNWVLERDFDKCIRPGVLSKGGAVSDVVHIAKHLGVRHFSPFGTDCVAPPAVNTSTIKSELTTSLSPAGGGSSPSIKEEGNNGKQQQMTRFECAYLVMNSQPSTLFA

SEQ ID NO: 155956 - protein, 50 aa, Heterodera glycines
MARRFYGVRVQFALERRSRVIPVYKSTLRFQKFNAALVGTAGSFLGHALK

SEQ ID NO: 155957 - protein, 239 aa, Heterodera glycines
MALFLPFVQFFPNGHAFATGSDDATCRLFDIRADQELAMYSHDNIICGGPFLVILFQLISDRSLGVTSVAFSKSGRLLFVGCDDFNCNLWDSMRVERTGIISGHDNRISCLGVPNDGTALCTGSWDSLLKRNVRHQPTQFRAQQVPHRTHFGFAERRPARVNVGAWASGGAGLCKSGKCQSQKYGAENCVRWRGDPTCPAVAPVAIGVRTDAPFVQRVVAGARLAPQAVPAHGEGVPVR

SEQ ID NO: 155958 - protein, 260 aa, Heterodera glycines
PPSHANASPSVNASVLRQFDFVVIPCANPDGYAFSMSRDRLWRKTRSRNDSLHKWCVGADANRNWGYRWAETGASRSPCSNIYPGRAPFSEPEVRAVRDLLSPELSRLVAYISLHSYGQLVLSPWGFSNVKPSNHWEQQKLASLVIDSIQKLASLVIDSIREATGTEYTFGTIADLLYPASGTSIDYWQYRGVPYIYGVELRPEDYRGVPYIYGVELRPEDNGISPELNLPFSFPSTAFSLLIVRTRGVYVRLVPGECLL

SEQ ID NO: 155959 - protein, 29 aa, Heterodera glycines
MVRSMLRPSIFALLLLVCLLSVLPKPGHG

SEQ ID NO: 155960 - protein, 149 aa, Heterodera glycines
GNEELDDSWGWDEQGGGEDQRSDQKEREEHIDRKGYEKQTDHCGNEELDDSWGWDEQGGGEDQRSDQKVREKQTDRKRHEEQTDHFGNEELDDSWGCNEQEGGEDQRSDQKEREEQTEIEQKQEKRFDQYEEAAASEPKKTIFDNLYVR

SEQ ID NO: 155961 - protein, 397 aa, Heterodera glycines
MGKTVEKILSKIYYNLKSPASFAGIQKILIEAKKIDPKITTDDVNKFLEKQRTYTIHKPIRKRFPRLKTIPSGFHTDWQCDLCIFDQLKKHNDGYKYLLVCIDVLSRMIFSAPAKSKKSEDMIEAFDRVFEKSKIIPMKIYSDSGLEFQAGKMKNYFEGKFIIKNVMYSPDLHAGVVERANRTIKERLYRYFTKMDTLRWVDVIDKIITNINNSVNRTLGVKPSSITFENAGNIWDKLFGNLETEKKNKFKIGDLVRITKEKGIFAKGYLPNFTEEIFKIYKIIKSDPIAYRIEDLNGDNIKGIFYDAELKIGHKMDKCLDRKDVLMCRELADEAKGTFEIVKQYRKDVGTAYRNAYTQSDLGIGELADKVKETMKEYLSRPGPSPRPTFKDQFISD

SEQ ID NO: 155962 - protein, 24 aa, Heterodera glycines
LTHRPLRRKNQLNCTWSPKLNRRV

SEQ ID NO: 155963 - protein, 221 aa, Heterodera glycines
RGKWIIPVCHFLLTSKSQASYIRMFELLHQAWPTFAPTSFTIDFELARYCTDSVFAENARMITSVAFVPLCDIRMAVAALDTEFGNLAVFQPLIDWLLINYVGQPRPNGTWSQPTFRPEQWNVYTRTLNADARTNNHSEAEHHRLQGAFNCRHPSIFHFIDVLRPKGTKRRRGIHADQLERLYSAEWPQIICKTMGHLAKINFYKSPATVATGFGRIGNVD

SEQ ID NO: 155964 - protein, 31 aa, Heterodera glycines
VKINRNSRVHSIVARNSPEKLQNNVKLIGIL

SEQ ID NO: 155965 - protein, 123 aa, Heterodera glycines
MYECERPFGRDQLRQIAKFVNLFCFHALWNELIAVYEGICVDVQLAPVLLAAVLGKQLHPFDELATFDPVLYKNLTFLKHYSDSDDVADLELTFCAQDEFLGRGFLHPSDGPPSCRQTDQGPD

SEQ ID NO: 155966 - protein, 57 aa, Heterodera glycines
STFIDARHKGNISRFINHSCEPNLSLQIVRLGRQCPSLAMFASRDIQSGEELSYSYG

SEQ ID NO: 155967 - protein, 115 aa, Heterodera glycines
SEKTVILRNRGGVLLLHDNARPHVAFSTQQKIEKLRWAVLPHPPYSPDISPCDYYLFRSMEHFLRGKEFADQNEVENALDDFFGSKNDQFYKKGIEMLPERWGRIIDQKGEYIID

SEQ ID NO: 155968 - protein, 31 aa, Heterodera glycines
PAVALATPLLPEAKIAKAKPTNRPSNYLLDR

SEQ ID NO: 155969 - protein, 69 aa, Heterodera glycines
KKFSIRHLLMLSFHTQYFIFYIYKPIFFFAFFFVCLSETINFCFDIPSSYIKIYQILSTLGPYKLWPTC

SEQ ID NO: 155970 - protein, 116 aa, Heterodera glycines
MHYNSQVTAGLFLSICRQKPILAAFSLRSLAKSSQPAFFSILQTPVAMFRLAILLLPCPLILCMEWQDFIIDKFGYRRAQPWHCCGICPDNNIYDKGRCVNESSYETETDRYIRIN

SEQ ID NO: 155971 - protein, 109 aa, Heterodera glycines
MGWAITIYILKRPVCRSVEMLVQMIENGMDVARINFSQEDQEYHRVTIKHVREAAVKCDGGREQSYRVRHQRGQGARVHPQRRLCGAYHRMEIGSVSLEFKHSVIIALN

SEQ ID NO: 155972 - protein, 100 aa, Heterodera glycines
MHKNGAFSSTFHRLYHAFCEIDSECERKRSVLSSLPLMGVVAWLEEHTITFKSKNEFEFPFLDVLGRNLRIERRTMPGERADKCVTNSSSSSSTVAIEPV

SEQ ID NO: 155973 - protein, 188 aa, Heterodera glycines
PQALITTLSTEVSYLFGGVSQGWHGIPIPGNFWVSECLPSLVLVIRMVARYNAVAQHQTIQHTIQSPLMRARNEVLRLLEQLSDKQYNFVVDLIIPVGEVLVHCLDLSLLKQRSLFELFPAIAKFYMVAYCPNTRRLAFGGKNGAIIVHELRASKAQTVQAHRAPITALAFSLDGKYLAAYAAQDAKI

SEQ ID NO: 155974 - protein, 774 aa, Heterodera glycines
GLLLLDYELCATESEDGGANFAATVPPPPNIECLSGAGTDSGRALLNTLISRRIAAASSPLHHHPHHQDNGIAADHCHPHFDGGGAFPSGLVFAARNAAACANPRATIGAIVRHGLPLTFCCSLKAHLLSVVALSNTLMTLKSKSNQLAIKKPPLKWQDNCIEIRDAAQALLIRELTRMGGDGRRRLIERWSNFLPTVLDPSISIFGTHFGGAGTTSQLSTITSGAGAAHHSHGNNTNNIGTLQDNHHQHHVAFVEEKPLPVILKTTTGHQHHHLHHHLSATGSFFQMDSSAANSSNSVASSTASSTTTATAVTKLAPPPRPAVPPIPPRTVSSGALPSLLPPSSMVGAECGGGGATTETVVDTSGVGNDMPNNCRSSPRSSLTSNNKHNQHHQHKHFSVSQQQQQQQQLAASSSLASSSVAQCNSSSLSSLDDPYQQCASSTAIANKLQEDQMLLCGGVHQVHRNQATAIVLLGAMGAEFPSDLQRNTDLCRATALSLLELLLVPESPLLPANSPLRRAAIDLLGRGFVLWQPHLDLSKTILGLLNLASAAAGVDEEKSDFCCFTTEADACKTARHALSLIALSRPQALITTLSTEVSYLFGGVSQGWHGIPIPGNFWVSECLPSLVLVIRMVARYNAVAQHQTIQHTIQSPLMRARNEVLRLLEQLSDKQYNFVVDLIIPVGEVLVHCLDLSLLKQRSLFELFPAIAKFYMVAYCPNTRRLAFGGKNGAIIVHELRASKAQTVQAHRAPITALAFSLDGKYLAAYAAQDAKI

SEQ ID NO: 155975 - protein, 74 aa, Heterodera glycines
MGASLDLCVCGIDRKRGDRKCPSANVRPTMSRPQMSVRKCPSANVRKAFEYAFHRMLSQLFHNPMDDLDDHGAH

SEQ ID NO: 155976 - protein, 267 aa, Heterodera glycines
MFDNENGGSGEPQQINENIPAKTSYNVQPWKLFRPKYMLTYRMCELCLSSLWNNTNKYIANERRSLISFELCEKYNVPADQNAQGGNASGDGNVPSFGATIETHMERSRRRLLHDEMVQRSVQQHFQHQQQQIMFQAQQQEQRRVEMQRQFDEAEHLQEEIQAADERQNAQQNDQEQEQEEENVQHAVQQQQFERTVRLQLRESQRFYGGSPSSVLVPPVQLFWETECVICTTSRPHFYSKECGHIYLCSECAVTAVINKLKFVLLP

SEQ ID NO: 155977 - protein, 83 aa, Heterodera glycines
MLLRLALLLWLGIRGALHMGNRLTLKMQCDEMQKAIEAGRGRAKHFRIWEDLDHSPPPHSVPEMRLTGKPGYARFSSTHRPKC

SEQ ID NO: 155978 - protein, 43 aa, Heterodera glycines
SISKQSVGVLKAQRHFLGVQVTARGATTTERQRDEEEQNKAER

SEQ ID NO: 155979 - protein, 121 aa, Heterodera glycines
MSNNKEEAVINNASNNKLIVYLISTINFSKDLTNHWCKGGFLWERSNGGKTEDTVAICKPNEHYCYVANCSVAMAAIIFCFFVGNASRTLTQNRKSEHPSENQTISPSRKQSTKFQKKNLL

SEQ ID NO: 155980 - protein, 70 aa, Heterodera glycines
NIHWKENKRIFFLHLMRFRFGNLLPYITIIFRYRIKIQIATDRPFVLLVVQLLVFLCQPMVRTLQTVQHS

SEQ ID NO: 155981 - protein, 24 aa, Heterodera glycines
RTLSTAVRQRSSKIYSMPQILWAG

SEQ ID NO: 155982 - protein, 76 aa, Heterodera glycines
MRERGKNERKRKKEEEEKMREEERAKDERKRKKEEEGKMREEWEEEKGIRVERGKSKRWGKRKEEERKMKKGKSKR

SEQ ID NO: 155983 - protein, 75 aa, Heterodera glycines
LTECAVPTDCVHRVERALLQRIQVPRCNSTDYFDLLKCLDFIILTRTNLTELNSRAGRVCCEMDKVSLSCQLACR

SEQ ID NO: 155984 - protein, 16 aa, Heterodera glycines
MSLSRASKGIIVKNCL

SEQ ID NO: 155985 - protein, 25 aa, Heterodera glycines
MTSLYKFLPPLINCSIILPSYAEQC

SEQ ID NO: 155986 - protein, 62 aa, Heterodera glycines
MSLLLTFIRPLLPLPPLLSLSLSLPPTLYPRDGYGNEQNGYCNEHNGKLTRWGDYIIVIIKW

SEQ ID NO: 155987 - protein, 266 aa, Heterodera glycines
MQGVQDWLYGAEEHLAMVPQQSKLVEPLSAQLQHHQAFHAELGERVEQMKELSNKGIRIQLSCEKKDAIPMKNRLVSMKHRMDKLGQRSGERLKSLTMALDESRLFFDSRRDLLHWTEDQQRWLRDREAAEPSSTGTGERIREALTEHRTLADALQRKTGVYDEVRRRGSALAEHAPPSEKLQLDEANEEMTRCWEALSRAALRRQRSLEEALIQSGKFDEVLAELLNWLGTVLPPLEAELNIGNFLGNVGRIIKFGVNDSSNNFF

SEQ ID NO: 155988 - protein, 51 aa, Heterodera glycines
MAHDFCFKNFYEIFIYANFIGLNFKKALSKNISFEHINNMPIKFGAFQSPF

SEQ ID NO: 155989 - protein, 87 aa, Heterodera glycines
VILTQSWLRRSWPDGVGPFRGAGSARGTGAPTARLASSAATCCHCETDHPLITDLPLFSHGWPTNGTNTNGLGMKHYWPRMDLDSIF

SEQ ID NO: 155990 - protein, 54 aa, Heterodera glycines
VSLFAFRLSHFLAFRISLFAFRFLARNATFTPLRIGLNSHKIFQNFTYKLANFQ

SEQ ID NO: 155991 - protein, 50 aa, Heterodera glycines
MRWQGGKFVHLGHGFFLSPGPVHFRQPWIFVQEISGLFDALSTNSSFQGR

SEQ ID NO: 155992 - protein, 171 aa, Heterodera glycines
MANSELNTMPSNGDLKHNNAAEKVQQPNDLKKVNEGGGGGAEAGQDGTAPTAAEQAQKKPSPSEYLCDRDLRVQFLSGFTGSNAFVVVTQQDALLWTDGRYFVQIWTDRPPEMPKKLIHLGETECGEKPASKLRRLALLIRKANCDSIVLSQLDEIACNEFVKHLMEKTEN

SEQ ID NO: 155993 - protein, 68 aa, Heterodera glycines
MANFLLSLLLTASPLPLALLPPALPSAGDDGTVEGVVVLVVVVFVGVVGAAFGFTDAVVPLALASTTS

SEQ ID NO: 155994 - protein, 171 aa, Heterodera glycines
YANFAKKKRKFPFSFVLAVNLDGICRAPLWAHGCNFDHGVGHGVGHFLNVHEYPPYIGYRVQSKYNYLHKGVVVTIEPGYYAQGSFGIRFENCYEVVDANASSDSRKFAMFAPLTFVPVQKSLLVRELLDQREIDWLNRYHNQCLEAVGRYLQEKSMQEEYNFLAEACTPF

SEQ ID NO: 155995 - protein, 443 aa, Heterodera glycines
MGKQRKEKNEKAFHEFVTASDESLNPSESENSAEIFFDTNEDQIEELIEKESQNYKMNEIKSDEKEAEKSEEKEKIPKKEVKEEEEEKEIEGHFEFNEEMEEMNRENEHWIQKSQNKKSKGKEKNGKRKKNYSSEKQKNNSENSIKNENNSENGKKSLETNDTLRKGEKLRENVKNSPKNLMERTRDITCIVSLKKMGISKLIDLMDDHFLTILYKNYFEDKFGAECVPFLHISLLGKAIEAKRKFIEKSAKNEIAEKNNWKKFNGKWKEFVGIKLDKFETMQFLMEKLYFVHNELDIYVLDEQNERSLIKTIEYLEAIELMKIEKESAEFKTHSSKQTVSIPQNDKKANGLITTQFGSFKSTEFNQMLDILHTHIFSVLVAKNVQKITASNESDETKCAPNWQRYYSHIINMERLNSLFKSVENLVKSVENIEKMEKQQKIG

SEQ ID NO: 155996 - protein, 270 aa, Heterodera glycines
MLQFYYFFTIFLLFLPLFSSGDECYFHYLRDTKLENLKSRPHYSVVMPQCFADLFSIYIFFIPLPIISFRKLDVKSNAKTNKNLEWVEAKDARAFKGQLYGVETFLDLILARGQGLFDWRTSPSKELIERQQWHIKRLKKLAEKQEEAGKQKQNQHQRQQTQHQQQQPEFGHDTYSYQPFLQAILSQNSYNDRFFNHIDHPIWQIGLFKRINKESVECNECKDTLPLSDGSLNQLKQHLSDKHSETEYESTYNQIYKELNEGTRENLKFY

SEQ ID NO: 155997 - protein, 51 aa, Heterodera glycines
MSAMFKQNKRMERDSKIHLIPHPSDCLLVHPPIPTSHGAEQPLRNSAEVIV

SEQ ID NO: 155998 - protein, 176 aa, Heterodera glycines
GNGEMEAMFRVLAKVYPRTYFIGIGFSMGANVLTNCLASGLDPSISSRILLGISVCQGYCASDASSLLFDWQGGRRFYNYIITESVKRLLRRNYAMVVQPHVKSGLVDERIFINTLDDPLVPEALWEPVRQLCETHPLHAFVLLKHGGHLGFLEGNSLRPRSITWLDRFILQVAAA

SEQ ID NO: 155999 - protein, 140 aa, Heterodera glycines
TMEKIKNNIGDSYVWISVDETTDKMGRAMANLLIGKLDGQKWHNPHLISVKCLEKVDSAAIARFNFLSMAPYHPIWKIGLFERSKENDKIAECVECKAQKQRKFQFKLSDGSVSSLIGHLKSDKHKNSEYKNKFDEIIKT

SEQ ID NO: 156000 - protein, 312 aa, Heterodera glycines
MTRLDKAIINLICCNNLSFNLVNSPQFRVLCKPWSEQLKDESHYRKLLPVASELVKGKIKEELRKCDSFSCTSDIWSGPNQGFISLTIEGVTNKWERVRHTLAIKPFPGTHTGRRVAEILSEIIDQWECRDKIHTFATDGGTNMKKVANCRRIVGRVKHSIKAFTELNEAQIEEGLPQHKLLQEMAVRWNSSLIMIRRLSEQRAAIDRIAFEQRKFELTLQDGEWRLLNSLEMLLAPLEEASLYFCKSPLSTQIPFSRALLSQLKNLDLRKMRSKLLAGLEERFGPFGEMRNYDALSTFLDPRYKYLFANDE

SEQ ID NO: 156001 - protein, 258 aa, Heterodera glycines
MPYLFRPSSDIVKPIFFEYKSANSGKTHHGLLLLPANRNGTAKFPVIHAVYAGPSVQLVRNSWYSVCHNLKYVAFGYAVLMVDGRGSANRGLQFESAIKHRMGSAEIEDQQEGMRMAGERFGDLLDMERVAVIGWSYGGYASLLLLACFPGTYRCACVGGAVSDWHLYDTAYTERYMGMPDENAEAYEKSALSSFVPRLPNEEGRLMIVHGMIDENVHFSHCAKLMSALIAAQKPYRVRFSAAAPPARASPCPPAEAP

SEQ ID NO: 156002 - protein, 79 aa, Heterodera glycines
MFRQHFLLTTMLLCALLYPIIIGVGPPAYLAICQWKDCVGEKPAPGGSHTMICLPATRPAQCPEEAWNQLTELNELEPC

SEQ ID NO: 156003 - protein, 58 aa, Heterodera glycines
MMQVVIRQMIAIKSNAASPISLISLKEVPSGFFESLITNQPILDYGRGVICPDLSDLS

SEQ ID NO: 156004 - protein, 191 aa, Heterodera glycines
MILPELLDIMSHFKVKIKDRMDKQFFGIITGQLLHRLTEKEEQTLKNAFTSFYKTTLDYVAKWFRTERYPDHIQWLSLTDRQLVHENVIELASTFSPDLSDTLFDEARKQINVNSRLKCICGESVFALFGAMDRCAKFVEGRRHSEVAGPNQSQLQFYMLGISQNAYFEQKIAQIDHGRSKIPHLNILNVF

SEQ ID NO: 156005 - protein, 34 aa, Heterodera glycines
LNAQDEVRNTVKANADCEMDPEEISPVPDDYLTK

SEQ ID NO: 156006 - protein, 157 aa, Heterodera glycines
MAIKDQELVQFLKLPQLQVKPFKLTANAVVLAGLSGATSVAFYTIDKISAYWTVPFTLWAIFCAGLTVKANFDAPPAQPLDAPLAQPLDAPPAQPLEAPPANDELILQQMTMLSDTVQNMNDNFEDRMDRMEVRNTISMCASILAIVISGAVFFCKK

SEQ ID NO: 156007 - protein, 90 aa, Heterodera glycines
MYTEILELVNFFARFFHLRVPRLKIGMFCEHFANNCFLRFHLYWNLNQPKQYEELRIIRVSNEYTDELFTNAANAVGLQLDELLACIPGT

SEQ ID NO: 156008 - protein, 156 aa, Heterodera glycines
MYVTPGEVFYCLGDYSPPVPVWVGSVCADLKYNETSNVTFPPPPIPSSILPTHTIQPLIPRAIGGVSATVDFSVVNYRIQLSLVHPRELGYATNPSSDFVMFRYVVPGTPNYTVESFASTRFGSYRKRPDYEFVTHLQRSLLLMNMNIHSCSDEST

SEQ ID NO: 156009 - protein, 176 aa, Heterodera glycines
SIRQANYSAGFWDELTVQFHFQRRYGWYLLQGLIPLLIVSWIPFYLGPKAIPARTMIGVNALLAMIFQFGNALLAMIFQFGAIIRNLPRVNYVAIIRNLPRVNYVKAIDWWILCGMTFIFASLVELAAIGFKVGNKFLKKVIEKNRNKNQNDITSCKSFSKVSGVADHESIIYLNL

SEQ ID NO: 156010 - protein, 50 aa, Heterodera glycines
MAYGMKTINHIWVDDNSQMSRDLNLIIFPLFPFSASAVPSLFGTSVSSAG

SEQ ID NO: 156011 - protein, 320 aa, Heterodera glycines
MYGYNGMGGGAAQYNGYGGGMGGGMPQQWGTMGGAQQQQMPNGRGGRFTEGIKNVANSAMNAIGGGGGAANGQQGGGTWGKLAKTAMNAAGMGGGRTSNGQWNGNGQQNGGRGGGNGRGNGGGRRENGGSGGRGRGNGGGNGEGRAGNGGGGNGGGRRENGGSGGRGRGNGGGNGEGRAGNGGGGNGGGRGRNGGGSMDEQYDDYGSDYGDEGTEDNYYDDADEDGREGRQGSNSGRGRSRGNGRENGNNNGKRKQREREETVYDDDDNEEDEEEEGDYNNDDDEDDEEGGEQRKNGRRSSGTRAKRRKNDQRSSKGEKE

SEQ ID NO: 156012 - protein, 114 aa, Heterodera glycines
DPSKSPQKIVAEAVKEMELYFNALNNALIKHLSLNINLKAYEDLSVTLDNGETHRLVKFARISLKTPKGPIVLNFADNPAAIKPARIAIQNMAENVTPQVDGIVINVQIPKITR

SEQ ID NO: 156013 - protein, 141 aa, Heterodera glycines
MLLLVLLLILLFPSESLQAASFITLHCQGNGLYVSGRWNENGQTADLPLPSELTMQRLARLIKCLFICYICFEGSFHWQILELPQLRLSAVRQPGKGGGALRKVLLGHCDDIGGICHRKSSAEIATLQGTKKTWIKEQKER

SEQ ID NO: 156014 - protein, 273 aa, Heterodera glycines
MQNEQYKVIFLFLLLCSVEIVGKRGGGGGAGGSAARASSASRGGGLFGGSGNSRSGGGSGGSWTAPKPNYGQTGGGGFSNTFSKGTHGGSHTERPGKTGQGWHDISAISPFGSKILFFLKSNCWSGSGVGSQSRGNTFKNMIIGAAAGVIAYEAGKAIIRSVASPMHWGGRWGGRNYYWGSQYYRGMSSGRTMCRMPVDPSDPQFGNVFLRGQSRPKEIVWSCNYNEQCCGYECQCCGYECCPSGGTAVGTRVRGSEWGMPLTLPPLLLLLLF

SEQ ID NO: 156015 - protein, 201 aa, Heterodera glycines
ALYARVLDRQGNFTEAAQRYHELSLKPGLIPSEKRQDERCQQLVGHSLLKNMYLERLVKGPELTEFELSLCPHQRLLDAEGVSILQRSVLEHNILAASRLYANISFDGLGQLLGIPAAKAEKVATQMISGEKVQGAIDQLERTVSFEVPDSSNGGADSQIASICELVASINEKLATRFSEWHTERFNAYKRAHQQPNDPMQ

SEQ ID NO: 156016 - protein, 35 aa, Heterodera glycines
MRTNCLALSSLAIFYSAVFSAIGAPVEPSTKERAK

SEQ ID NO: 156017 - protein, 234 aa, Heterodera glycines
MHRSDTVKNIMEKVHEQQGIPIAEQRLFFRGVLLRAEMPIFKYNSRENDFVLFLVPWISLSRKEYKIKVKNTNGKTIGLKIDASDTVQNVQWIIEAKTGIPNRYQRLFYGGRLLDKRKTLSDYGIINIFYKWQEVRLEVEEPKEARSFEITIILLGQKRIKMRVKEWNTTHYIMKKMQEIEDIPMIEQTLLFKEKRLRDDETLAQHQILKGAVVVLLLSQPPITYGPNLMLMTE

SEQ ID NO: 156018 - protein, 267 aa, Heterodera glycines
MPLIGASSTGSFSSSFSSYFSPRVRSPFVPLRPRARRLPNELLTELATFAHYDFLELSRAANSRLRGLYRPILQRKDAKLCALFFDDVRSLSLWFKNWAVRSDALRKFVNLRATVDSKWCEEAMQTKPDLWAVNRARVTSRGLIADLRELRKLTDELIATTHKVGIQAQMNSLENSIRFSFSDLCRGSSDAKCRRRFRAARLAPRVRPRLLFLRPFPFSEVTSHRQIVGGAQNGGGPVAEQRLAESEGFGARSTPAVSTFSKRATLV

SEQ ID NO: 156019 - protein, 43 aa, Heterodera glycines
MSCHGPKAKVTIVSFAKYALQLLDEGTIVACAVPNFVLHAPNF

SEQ ID NO: 156020 - protein, 149 aa, Heterodera glycines
MIWNYFAFFTISLNSVFGFLSIGDQNHGALDNFQQNANHLIKKSAQKIALSFDMGIMPTVRHSTKIFYKSLPPRVVFPMLQVLVLLAIFSGIIASFLFLALFRALNKGTQFNFRLSFLGRRRSPSSSNGTNSRVPIYSSQSVVEYETLV

SEQ ID NO: 156021 - protein, 122 aa, Heterodera glycines
MIHENVRQNGYEDHEPPPSKQKKFVGGKNLTAISSALFSNCRFLQMTGDHLQLLQSSACERIDELHLELNFTILDITSIESKALTKWLTGKKAKKSSKKLLIRPRSREFATSWIRKLQSCCF

SEQ ID NO: 156022 - protein, 19 aa, Heterodera glycines
FGREILFFETKLKTYITYI

SEQ ID NO: 156023 - protein, 93 aa, Heterodera glycines
MASNSIAASIGVKLKRLNSMAFELIWAYFSAEYSETGKRVSLSFADFLATPMRTDSSWMAFVVVANWANLAAENELVPGVAPAIPSPLACCLV

SEQ ID NO: 156024 - protein, 51 aa, Heterodera glycines
MAKNAKKGTKTVADFIRFKFQECLGNGLVISEDDDDDNDDDGNVAMLASLN

SEQ ID NO: 156025 - protein, 75 aa, Heterodera glycines
MVASVYSSQTTATRPTTISTLAAASATFAAHAVNSAWTCAASRNRARMAAHACHCSRQKATAATTFAAHAFPASQ

SEQ ID NO: 156026 - protein, 25 aa, Heterodera glycines
MTRPTAVKRVALLLACSKKAFLIFE

SEQ ID NO: 156027 - protein, 85 aa, Heterodera glycines
MLFIHRVTVQQDCRNPRRIVWRKDPAGRTNVRKTVVTLLERSRSAVQDCIYSHDATLEDLKTLGLFLRTENSRITRGYKIGIGMA

SEQ ID NO: 156028 - protein, 95 aa, Heterodera glycines; identical to SEQ ID NO: 124528

SEQ ID NO: 156029 - protein, 265 aa, Heterodera glycines
MPKSKRRHDDDLANTSASSSEQQFAAFSHRIDNLEKLLQQLLQAHGKEKVAANSLDQLNLRLEKLEGLVATLVAQTATNPQINGYNNSTPTVTPKIPWGCPPQFGPSQIARMLNSAIVDSELIKEKSKRAVVERLPEHLNEKDVVKQIAEECGLLGEIDLDNVHRHPRTAREENAKPRIVKIPFSSQKSRNLFLYKFRSTLLKMPVIPHNLTARRDMTINELQILYDLRKKAFEANQAAGVYKYIVIDLELKTLSNPKPLRTRVS

SEQ ID NO: 156030 - protein, 39 aa, Heterodera glycines
ASTTGPTASTFPRSASTSAESVSRSASTSEESVPKNAST

SEQ ID NO: 156031 - protein, 112 aa, Heterodera glycines
MIKGFLRAQQLEREIASLHEQNSILMAERVERNRDIEEIRQTVGEMRGFLLELVQQRENELGQLRQAVQQRERELQQREEELGLLRRFFVQVYLVQNSFFTSMRIVFCGKNP

SEQ ID NO: 156032 - protein, 108 aa, Heterodera glycines
MPPLPPSLFPSVPPVPLPPLSPEVPPLRRSPSPKVPPLPPSLFPSVPPVPPVPLPPLSPEVPPLRPSTSPEVPPLRRSPSPKMPPLPPSLFPSVPPVPPVTMPPTFPT

SEQ ID NO: 156033 - protein, 49 aa, Heterodera glycines
EWERIERERRQYEETELEKRRELELERAEALRREQQWLEQGRAERERLE

SEQ ID NO: 156034 - protein, 196 aa, Heterodera glycines
MSKSNKKTKSVKLNFSQCEENQINASADWQQIPTSSGKNCSIQNTKDDGITPFNSDCEKDDANFEMNEEEQLMSMLDLAYNLDGNIINEVMSTIDKTLNGKCAVDELSSTSDPTSINGECAENGNSGMICTSDPTLKGDSFILEVPFSPIRRDKCVDEMDDGEIVGDNQNDSGGDNECDRRAIVSQQQVKEEAYVQ

SEQ ID NO: 156035 - protein, 308 aa, Heterodera glycines
MPAPPPPPPPPPPPSFSTNSQPLTTQKATGERAMLLNEIHKGTRLKKAVTNDRSAPAVEGKVVGEETKPCAGRTATAPSTVSQKSAAPKPGGAMNLGDLFRDGVPRKPSDLKNQKSSSAGQIVASNTLGRNNGQQKPRSSPVKKAPPVAIASENVKTVENNHSPTPPPHDATANKSTRAAAIANLQNFRSVSTTAVPGAPPPLPAKLPKQKTTIALQPSKLPLSQHNQFQTLRPTKTQPNSDEKRTTLRRTGSTEEIQKRPSAPPPPPIMRRPGAPPPPPPPLARPPPPQMAPAVKKVEQPMNNVSIC

SEQ ID NO: 156036 - protein, 72 aa, Heterodera glycines
MDGADELAKCFMRQRGMDASMINDPIQKERFARLLKTDIEEAMHRRNENPEKHTDPMGIREERTNDWLGAVK

SEQ ID NO: 156037 - protein, 2449 aa, Heterodera glycines
MDDNALTSDARSSSVESPAGTIYESFEALSIDSSKVAASPEGSANVGAEIVIEGTESNENPAGSGYDEVRNEGSSVTFKAMEVPLDQVDAEGFANNGFDDEEPEACPPAKDVSKSSLLYLVSQAGDGYVIACKKSPKSKPNWPFFMNIEDKLIESAPGFQRKLEVGDFVAVSSFEWNQKLRYLAEHRQDATQSCKFWFNENSQLLPKQADATGVAQLMYMNIGRKQITGVVYWIKRKVQSIPSSFVHANIACCGLAVSARINRRHLDGINPEDLKLGSLVTVVVANIPQDSLVSMGYILPNSSPYKLGTERRAETPEFFGAVACIRPHLLEWPNLNANMTPKVYPCSAELTKHHVVAMEHVVGAALQIEMEREVDMMIEARFEGRARKFDGADCLIVFGSRSKKEVNELAKVWEPESQVKVFKELGEKHFALGVVKDVEVLHAEYEKLELHVVIFLNNIQERKNVDIARKVDEFIQGGSVVIHPVPATAVEDRLFCFRCNVPSIIADEDSPRGRIMAVLLGRPAMEGIRMEKQSVDDSTDSWMEEEGPLHPAILALNSRQRVTARLMLGGGLVQQQAPPGTGKTKVAAAIIKAMMDSNPGFRIVVMACANIPVAKLVQEAEGTCAEKDLDGARAIALFSGFARCKYTDQIKDVQRHTLPNKVNSEEFVKQLSPNVQKQVKEYLAHCEKNPRLAPERAIGKVFNSCMAPKIVFSTAAMAANLLHGEGNITDADVLLFDESTQAQWAVVVHLVARMPKLKALLLTGDRHQLGVHLQELPDIFHSGYGLESVILQAEASVGTNYTFLTKMYRSHPFLAKLISYASYELHNEQLIPARSAEERSLITGSGFLMPVQECPVGLINAFSSFRVDPKSDSLTDDHQTEVASFLVQALLEHFGNDFSSRIIVLCMYTYQTSEIERKLKHCGVRALTVDAYQAQECDVIIIVTTRSKYSEMGSGRTDNMHFFEDDQRATVALSRARHAVFIIGDLVSISTGQVWKRFIEMAITRTSVVRAEYVLALLGRTLVRSSTCLFDSAKRESVEDEGFLESWALKHGLRLDRTNAFGQQQSQQPRAPSFQFQNRHFPALQATGPSDQAGPSGSGGQQRGAPTLAPQYGRGQGRRGPDNQWMHYGGNPKRQKGGGPPNQSAAASSNAQTDPEGLSNDLPELSVVDKLMFAGKILSTPARLSDVDKLHTDLVRTEDGVNRMTRHLNRKINQTNRDLTELKDDTQTLITQVNTLANGYNAVQVLQNPNQSPRANNPPVLNWATPSPLRNPNNSFGNANTSVVEAIIPLGNNEEDSQDEEFELNPSGFHHVNMLFAESSPSFTIFSGTSPLEFDRWARKFTDLLDCNGRKWDDSEKVARLKACLDGEPRRIFDNLLPAHKATSSEAIQKIKENLDTPQNKELIYQALSMCKQREGESVDEFSARLIPLIEATTADLTTNASEEVLCRAFLEKLNPNLKFLTRTLSGPVRRDFQILRMNAREAEMMHREIPKSIPAPLFPISEQQNPRFNNTEPPNHPEGNFRTWAPTGSNREPISPRQRNRNNWDNNAQASRGSFNRSNNHPQNDRRWNNRTSRNDRRWNNQTPQNDRRWNARPVCNYCGKVGHLAFKCFKRRDEFTQPSKNLNFIRAIDEQNRLINDLSTKVNSLTFRNDQSAEAASQNIKTIQKVSESSTDKTHSSMMNDTLKAPSKISNWETSKMVQPKFFPVLMGLTLISSLSSTLVKDFNTIPSGPMICQTRVQPMTWSLPKFPRCPRMSIDTTKPLTKQRRTIYFPNSLEFSTKAWACRRIIKSIRKYTTISGVSVEQHLDSEQTLMSHDECLQMANNKRCSLGYLKNDSGLWHTDRKIDQTPRPWLLGSFSWKKVQSENCFAFETEVYSHIGATSIITPAGTAQACSYDKGNCVLSDKTVLVWVPQKDKMCKYSPIGVMDGHNLGNVWLSTLGDLGLTSSIVRNISDCGRNITVSDQGPAFTINSQSPRHKRGIFGLDSEGVVTSSQLAAQLSYLHTNISRSVNIAFAQAFNSFCDLMLDTQRWVQSSYLNDPTSLTRFIHQNNFLIAKRVGVSLLRTWPCVPLSQSDFEFRPTHTNSSCFEFLPIIVKLNGKEHIAFLNPTYLTVSLHSKTAPCEDQRNILIQMADRTIEVDQVDGTINNVHVHEIREVELDFGKPTRIPKLSPHAFHHLVILNLTDLATHAFASNLVQVSQFTYRADKTHSSEIKTTLSDEWSALEESIVQKAVGNYSLAWQIWITICLLLCMVDLLTRLFFAYIGIRLQDPVETLGRPMITTIANLFGRKKQNLDCDNKNHPNSPTKTIGHITYSHLRSVAATPINEATGQSIFRDTLNGNSCNFIEAYPQSSNSKEFKKIWFTKETNFSAWLNNYLSKPVNHEIPLLLPRNSGELAQFLDVATHFGKEIPNFNSKIVPLAESREMNILNGTSNESLLIRSFWGIYTC

SEQ ID NO: 156038 - protein, 53 aa, Heterodera glycines
MATMVGNANIKFADSKVEFFKFGGGPFESEAYEIVVVECFGFYHESACVYAPK

SEQ ID NO: 156039 - protein, 1529 aa, Heterodera glycines
MPKPQEALLTHPIIVLKMTEDGTIALPEMIDDGITKPLKMTDAGMLGQFATTVARAIDEQNRLINDLSTKVNSLTIRNGQTAEAASQNINTIQKLSKSSTDKNPSSVMNDTLIAPSKISNWETSKMVQPKFFPVLMILSLISSLSSTLVKDFNTIPSSPMICQTRLQPMTWSLPKFPRCPRMSIDTSKPLTKQRRTIYFPNSLEFSTKAWACRRIIKSIQKYTTISGVSVEQHLDSEQTLMSHDECLQMANNKRCSLGYLKNDSGLWHTDRKIDQTPRPWLLGSFSWKKVQSENCFAFETEVYSHIGATSIITPAGTAQACSYDKGNCVLSDKTVLVWVPQKDKMCKYSPIGVMDGHNLGNVWLSTLGDLGLTSSIVRNISDCGRNITVSDQGPAFTINSQSPRHKRGIFGLDSEGVVTSSQLAAQLSYLHTNISRSVNIAFAQAFNSFCDLMLDTQRWVQSSYLNDPTSLTRFIHQNNFLIAKRVGVSLLRTWPCVPLSQSDFEFRPTHTNSSCFEFLPIIVKLNGKEHIAFLNPTYLTVSLHSKTAPCEDQRNILIQMADRTIEVDQVDGTINNVHVHEIREVELDFGKPTRIPKLSPHAFHHLVILNLTDLATHAFASNLVQVSQLTYRADRTHSSEIKTTLSDEWSALEESIVQKAVGNYSLAWQIGITICLLLCMVDLLTRLFFAYIGIRLQDPIETLGRPMITTIANLLGRKKQNLDCDNKYHPNSPTKTIGHITSSHLRSVAATPINEATGQSFFRDTLNGNSCNFIEAYPQSSNSKEFKKIWFTKETNFSAWLNNYLSKPVNHEIPLLLPRNSGELAQFLDVATHFGKEIPNFNSKIGPISRISGDEHLKWDKQRVAAYQVILGHIHMLIHGRTQNIPQQRFHRPRSVIRELPMFLVLCMILLPATLAAPITSKGPPPNLKNSTFESANFILALPTIVAIIILSALVYSRSRSPISAIIRAKINGLEIRALADTGATISVAPLSLAKKIGCELYESKVEAISVSSHVISICAVGEVIIKLGDISLRSSINFIPDDQAGAMKNYEIIIGCDIFVNLPPITFDFTKKEVMIGKSKLNMESNHSTLSNLKVRALEHHRIPPGTQILVKARIDTIFSIDKDILVENLDPRLSDEHLSTPATVSKPKDNLLNIVICNPTNFPKNIIKNMCIATACELNKSDHPNLEMECTSDEINLLRESQKIIHADPSFKVDFSKSSVSGENLNKLKELCEVFQDIFSKSQYDLGSCTAGEHDIVTTSDTPVSSKPHRTPFKYRDELQKHIDQLLASGVMVESDTPWVSNIVLVQKKDGGLRPCIDFRKLNEVTVPDHYPLPRLETIMERIGNCRYYSSLDLSSGYLQIRLTERASRKCGLITENKIFQMVNLPFGLRNATSAFARCMAHVLTGLDDCVIAYVDDILVYTRDDNFDPKTTRDVKHVVGMASFFRKHVPNFSTIVEPLTRLTKKETNFEWGTEQAAAFNEVKRILSEKPILVFPNYDKPFHIFTDASNVGQGGALMQWNELAEAYE

SEQ ID NO: 156040 - protein, 135 aa, Heterodera glycines
MVVSIHAIEGEQFCAVVCTNSHIFVLKCAKNGSQSVELAFQVDLTFPNAVNNQQKLGKDNECNPSPTTNSSRWQRPQNTSFSLSCNRWEMQLVALGKKRNAKPFPRHRPQYIFPLAVTLFWSALGPVLCCNSASM

SEQ ID NO: 156041 - protein, 108 aa, Heterodera glycines
MGRVRRRSFGLAKRTSKFAVGRTVARIRIILRRTVRRSRAEGWAPLAKCCWAGQAYPMQPYYPPASNNYPAQPQAQAVYPPAPTYPAQPQAQAVYPPNPTSYPQAHGY

SEQ ID NO: 156042 - protein, 68 aa, Heterodera glycines
MVVSIHAIEGDQFCAVVCTNSHIFVLKCAKNGSQSVELAFQVDLFDLTFPNAVNNQQKLGKDNECNPS

SEQ ID NO: 156043 - protein, 182 aa, Heterodera glycines
MKFIRKKFIFSFLFCAIQLHCLNAKKFGGGGGFRGGGAARANPAPAGGHFGGGGAPVGGGQPHFVGGGAGGFHGPTGGGFHPPPAGGGFHGPSMSAGSGPGRILFKGKAIIHSFDRPFQHDGRNYYLDEKYAKKQHGEIQCKVPWDKLVNQSPAATTNQTTNGTSPEQTLANVFTGAFTPKI

SEQ ID NO: 156044 - protein, 119 aa, Heterodera glycines
MPKFGAKLKFKNFYFLTGQRPAELSSAKGAAHQHPMNAWKMRLAMNVTKKWHQQACEKRKKKSKCTKIRSDKYRCKWENDACVPATDEADYEKPKKGDGLLQKVIAKVLSSAKKPSPSE

SEQ ID NO: 156045 - protein, 25 aa, Heterodera glycines
MNLGIFLIFVIELNRIKPVLSKQNV

SEQ ID NO: 156046 - protein, 90 aa, Heterodera glycines
MNEHLARKTLRVEYHAPDAKRAVPDPMKFGRKRPAMVAAKCHTWTMRIVRNKISCHAYQLGCLCHSLALSQIRLIFYDAVFQLIVLLFRF

SEQ ID NO: 156047 - protein, 91 aa, Heterodera glycines
HYRLPLLIVAGHYLTKYWLATTIRSVVEWAQKNRRVRVPLQEQLRWLMPIGFCASLDIGLSNWSLEYVTISLYTMAKSSSILFIVGFSLML

SEQ ID NO: 156048 - protein, 163 aa, Heterodera glycines
MPSQSPQLRLSSCSACSSHERLHFGADDEEVFLMETVENGHDDTRQQSYHTERTLLASQGEEDERNGDDTLQQSLIASHCANVIYAGKQTDIDIDHRTIKLRLQEITAHLANWIAKMLEITWPTISRTRAKSAIGDSDIAESENEYQSVAEKIKDEVDQLGAE

SEQ ID NO: 156049 - protein, 228 aa, Heterodera glycines
MKVQEIQTMSARQNLEQNYAKEEVKRLRTQLGDMRGKLADLEGRNSLLERQAEELAYQVEDDQRAYESALNDKDAQIRKLRDEAQALMLELQMLLDTKQTLDAEIAIYRKMLEGEEDRSGLYQLVEQVVKTQNIRRQDEAESQRILRGEKSSRQSYQRSAKGNVSILETSPEGKYVVLENTHRSKEEPIGEWKLKRRIDGKREIVYSFPQEFVLRPGKSVKVSANANR

SEQ ID NO: 156050 - protein, 104 aa, Heterodera glycines
MANEILEFPLKYDNDIHYLKVRRTDTVRELKFVIEAKLKIPPEEQRLMIGNCVQPDTRLLSSMKGLDLADDTVVIDIHTGKVTDYVKFDAGNICMITGGPNIGR

SEQ ID NO: 156051 - protein, 191 aa, Heterodera glycines
MLDQRARSINRKRGNCKRIFSEHRGQEGSVQKKGHDGELNQKSPDSCGPIGEAAQPLSPRDLDELETSIDQFRTFLNDQPRMRTLLALKPKVHLLLNHFVPFARQHQFLALLDEQGDEALHSVWRRLEQLWKTMPDEEQMRQLLEHHFVSNWLLDTGKIDEMKRDREEQQEEIGGRESDEESDGEEQFDFE

SEQ ID NO: 156052 - protein, 120 aa, Heterodera glycines
MEHHANTSIDDALLVDDNEKQKRLFNRTFRAEARQCDGKVASLLPENLKVRTNRWPKKGRNGDKNIFIGQMGQRGGRGGGAKQRKIMMNEAKKHWAEIIHGQRPQGPSVSSVLIRQSDSP

SEQ ID NO: 156053 - protein, 339 aa, Heterodera glycines
AFLRATTSTSACYTIKFNVHESTLIVPFELVNGQTQEKLTLKKERKNDFYNNYWWLLKRCPISEKVAADQWENDENSANFNIVQFALNSIDKNHHCIGWICTDVWMDMFPFFDRPQLGLKLALLSPRFDVLVDKYFDGKSELPIWRPIEIRKDSVAKVPKLRVLIDANSVEFPLPDHSLHNKIRFEDLYIGFIDHSVITFLRSNQQIWDKGTNLDLWMPTSYHIYVKRCWKVLVNEIWPIFAPNIHNFSNANWLLYELRRLISPTILTDLSPLNSILSGNLLPDSIADDGPNATADQVLSKWLHTPRTDGQLNRLFCGNYPILMMDINKWIINFKEVKK

SEQ ID NO: 156054 - protein, 132 aa, Heterodera glycines
MSAFVNGLHKISSVKWSTYGLAWGLITFNGAGICLFMHYIAQKTYMGSPHFKKAMLIFDGHDEAKSLLGEPVKVGKLNMLDKKRNYMRKTEAGLHIPVCGTHSSGFVDVFSEREPDEKSASNGRKQRKVWRK

SEQ ID NO: 156055 - protein, 332 aa, Heterodera glycines
MDGSKTEGMTAQELRMIDYERDIERLEIQCSKQHEQLIILSERAKHVELLEEQKVDLQTQTDILRRQNAQLIRDHEELKCLFGGGSISRNGLEELVRSAGQLREKNKELETKLKLLDSQQQPRDAPTVGESRRIAQLFKRKYDAELGELRNKLQKYEEPTGSDTTRILRFATANPLDEARDELVIREVAAAAASASTGASAPNPLKRRKLDNSVGDELAADETPVGDEFGEETEDSDDGHVHNLRVQIRALKDRLDQTENVNAELLREFRETVALISGYDVRIGEEGFFEAESVHSKNCVFLFQKHGQQPPTVDLLDNECAQRWKDLIANYL

SEQ ID NO: 156056 - protein, 42 aa, Heterodera glycines
MDRSAECPAATWQRIPCCNSGTKQGVKAEHQRERTQHPMCRH

SEQ ID NO: 156057 - protein, 129 aa, Heterodera glycines
MHFFNQFIIFYLAFKDVHPSWSLIGCGLIYGLIATVGIILNSSVILVTLLTKSFRGTVNYLLALCSLFELLHQSGHFLFVYTAFSGQNFIENRLAAKILFISTIGLGAITPTMFFTGIDRLIGIAFSEM

SEQ ID NO: 156058 - protein, 36 aa, Heterodera glycines
MGVWVRKEKGIAYMHIISGIVAKPSYFHYLSVGSIP

SEQ ID NO: 156059 - protein, 47 aa, Heterodera glycines
MGPFDTAPMFIGIAAIKAQKKALTGEAIGISRNAHCYENCQYSKMYP

SEQ ID NO: 156060 - protein, 190 aa, Heterodera glycines
MDKHLITDFEQSNRLLFNSFSSTPLPMIIQRNQRTQSTQSLTTANQKLPLTNCDRKRTIAEKQQQPVITTQAEQHHNVDDAVDEDGAKVTGEDEELELVTQLLRAQQREEEGEEEAQFGGVEGETDENEAVTEAAQKKQQKQNGTEMADEKGKGKANGGKAKGEAGRNRTAQEEEEEAKAISGGANNRKA

SEQ ID NO: 156061 - protein, 80 aa, Heterodera glycines
MNLKFYNKHTHIFGEMVVREKMWKSAFGEKASPGYLGVSDFLRLECVLDFKNKNISFTKNVVTYFVDFEIDDQPDDENAA

SEQ ID NO: 156062 - protein, 147 aa, Heterodera glycines
MTVEKSVSKAERRRCFFDIHIDGESIYGGVFDDEAFVAKHDQPFMLSMANRGKDTNGSQFFITTKPAPHLDGIHVVFGKLISGQEVVTKIENLKVNAKSRPLADVVIANSGQLVKKRSASAHDTEEEGEEENEDRFFGGGDVNYTFR

SEQ ID NO: 156063 - protein, 20 aa, Heterodera glycines
YCSSINIYLLIVFLKPSDRT

SEQ ID NO: 156064 - protein, 106 aa, Heterodera glycines
MAREAENEMRRQHHKPLAHIYIIESKVWPSVGGQAISTFRKMVDDEWTKSVNVVTALRLKVFLSPINFRSRGITSTFVTTLKDYQQSVTMFCHNFVHFIPNKMPLG

SEQ ID NO: 156065 - protein, 119 aa, Heterodera glycines
MMSKKKVFGNIKAYLAGRISEIMWNGHSTTACSGDVKEANKIDDELDPGPELKNRIDSAAQKIISSCELEVSILLSKKEINEKWKKLVEELFEREFLDGEYVEKYFNEPLKEGKGVQSC

SEQ ID NO: 156066 - protein, 30 aa, Heterodera glycines
NDRWGEKRRKWEFSSSVMRMNVPIGEFDRP

SEQ ID NO: 156067 - protein, 160 aa, Heterodera glycines
MTRLFILPAIFVAATFSLWLLICNAPEWGDESQMVIELPTQFENFTTMAEQFKAYKTRHTSYITTLFICAYLYKQTFAIPGSFFLNIAAGAVFGLWLGFLLCCVLTTLGSTLCYLFSEFFSREYVLYYFGEKITYLQRKVNDWSQMHLLFLFFVRPLTDC

SEQ ID NO: 156068 - protein, 158 aa, Heterodera glycines
MPVKRLRRFTHFVDDWSPSSVAFLNKKGKEDFECFEFCDHCAYLVVGQRDVFRVELTALADHLWHQCTMKSNANPTKAMGEMSSSNVHQLLMFADSGESPSIGSVVCVQAPIGTDVDEDDDGGTDENRQQRRDLLIAAECLFGTKMGRKSAFLATLAR

SEQ ID NO: 156069 - protein, 43 aa, Heterodera glycines
MSNSDIKKTIDIWIGEAEKSELQQREIWFFIGAEEKFVFEEIL

SEQ ID NO: 156070 - protein, 358 aa, Heterodera glycines
MAERPERDEVVYTNSARDFHELLMRPEQEVVSFTHLNDQLDRCVVRKREPFARAPEHNNLAVACFVTSHARLYLYDWLEEVRRVGGRSLYCDTDSVLYVKQRGAEGVREGNALGDMKRELPGRRIIDFFAAGPKNYGFQHVDACTGGDLRAERKVRSFELNYAADQQLQYERMRQLVINHFGVGQHHQQQQQRGPAADAADGSDGQEERTISVPCQRFVRNRQADIFTRRSTRVYRPVYTKGRVLRRGAAECVDEVPPQSIRTRPFGWSCCAGDVGSPDSSVMNEEEEEEEPMQMAPDEADQGEEDRWGEHVWPEEIADDNKKPGPERKRARVEQCVAPPPPSPPQTPLREPHAEPEP

SEQ ID NO: 156071 - protein, 751 aa, Heterodera glycines
MQMAPGQEEEEDAEGPIRAVAVPMETLRQERNNGRKRAREDSTSNGGSSNQSGTATSSVRHPLYGNNGGGGIGAALDLDMLLAPMPQQFRGATSAAGAGVAQVSAANSATASSSAASSGVVPTRFLDSNVGFARPSDGVGGGVGGDGGQLAMAHMQFGPVSCMRGVPAAVATTIWTGSSNAGTFVNSGCAAAAAFGGGGIFGSTTLRSGSASAAEGFGGLSVVGEALPPHIREAIERVHSRQMQRMVTAQPDFTDILPPCADNGMSNTAWLLLDWQPDMLIGRVVGLVVLCGPFTTMGGLNGFDVRLIFDQHNTQQEMAVHCWEDCMPRLANNIQCDQIVEFSRLKVREQGKNAKGFFPFTLLYNNESRHRVLSASGHIGANLASSSTPIIVEAVEQQQPGMNTLSNVVRHNSSSSGANNQHIHGQNSTGVVTADDGQSEGEPDETAAAATNLTNAGARDADVEEGTSETAWLSTTRPPPCTPVGRPCRRRRLRSRCVSPAAVPPSRRSSPPPQRACSITAQRSLHSIVQRMNVVDAQVSRDERNTRVRQRARRQQLQQNHQQQQLSRLRRHVPSSSSSSPTHPLLRRGVPNELRSASAVEAADVITIDDTEPLGVEPQQQLQRGDARYFQDELLTLEDEVGAAHIIMIGNEPLSVADREWLISTGFQMRHLPSSVKGSVEVDNDGNNNISCCICYNWLVSDVDTVVRLACQHFLHRKCFAQEATQRSICPLCRRHFITGEATQQNEGAGN

SEQ ID NO: 156072 - protein, 273 aa, Heterodera glycines
QLSNYQRFIFAESFPTMVKHIRGRPLGQVRIGFGDADPLWDSENEKYKVLCRSIHVSKAALYIGYMRLLVSLVSSLFFAYQYMMAVTGQLSSDHWINQVTARFMSQAMMSICLQVIVVVLMVHGVKAEKKSLLLPFIVYAAIAVLAGSIKVMSDLVYLDTSVYKNNEAESRAAKVQFLTNLLRTVLQAWCLSVVWRCYGYLTEKKVARQIREQLNSTATAFNYPENLMGHPSMPQQPPPYAAVVTAPIAIGPSNDKPQTSATNTSASASHIQQ

SEQ ID NO: 156073 - protein, 41 aa, Heterodera glycines
TMGTRQCQTKLLITPNSAFGVNFCALFQNLHWKMPFLYFLF

SEQ ID NO: 156074 - protein, 71 aa, Heterodera glycines
MGPVRTRRGFFRFLVLSHFFQSFSMEICGLYVKLSTQYQEKKKNSVTSMPDLNLLNLIVTIRVAFAHFRLR

SEQ ID NO: 156075 - protein, 80 aa, Heterodera glycines
MDEEMGTNPNDQQKREIIKFEAIKEKLKENNEDKFKKLKHYFEIKEENPKISDEKIAKKLEIGITTLKTLKKTAALIMEK

SEQ ID NO: 156076 - protein, 74 aa, Heterodera glycines
MNVFIIFFFAYKIETAKIRTNFDEIFGNGWDKNESEQKVIKIEQIEQSEFIHSFVRNGAENGTHSNEMIKEKEN

SEQ ID NO: 156077 - protein, 338 aa, Heterodera glycines
MPTGKTLREIREREEKKHEILSRYVDLEVIWEHEINEKLKKDTAMREFFDNWKDHSPIKIRDAFHGGRTGPMKLLHTAKPGQKISYKDFTSLYPFTNFTTDYPLGHPKIVSIPPNEQTVNWRSPSDNPYKGLLKVLLLPPNNNINVTVMPIKFDQRLLFPLCEKCAKYITAKYPNGLKDNDYSCPHYNPNDRAFVSTCTHLELNAALEAGYTVRKVFHVLQYDQWSDNVFKSYVSEMMALKIHATGFPSWCESEEEKSEYIEECWMKFGIHLEKEKMKAEPGKRYIAKLCLNSLWGRFSMRNLLSKAVINNDPCVLRQYTDDKKIDIMDIELMDEDND

SEQ ID NO: 156078 - protein, 146 aa, Heterodera glycines
MALENGRTMNGTQQNNKTAIRPSEFEDDTENRDFENLSMSVSEASSEVGSVSIQDGAMQNQNERPMLENGITKRNVRLKSDLRISPASSGSWERAIRPVVNKHHNANAASVGRRPAANTQRSSVCWYCGVKGHAAAHCQKKRRKGQ

SEQ ID NO: 156079 - protein, 89 aa, Heterodera glycines
MALPAVEVSQSIPQSSLPLLALPLSRPMGRSLSAGATAQSNNPSVDGGDRSPGLELSRPYPETRHGLTVFYVDCPLKHIFQEDVQRTLI

SEQ ID NO: 156080 - protein, 397 aa, Heterodera glycines
MSGPIQKGIINALKALDNAKSATSLLLHPDPDLSNWENAINLEAQFDRVVKEIRSMEMQMDSLRDSSNAWIELLGRLIGDDKDNGEKEYVKFDKNEKIADRYDAATTKLRDLRDLEATLSAAAKLHRGRADREAKADQLANPQQQAPMLPAMAAPMTVPTFTAPLYQFQPIQLDKFFGQKQKWPEFYESFKSAIGSQSISKAQKLNLLRNLLGGEARELIAGFRLEDANYETVLQPLKDTYGAPEEHIRSLHFELANLKPCRSLRETKDFLLQLERFTRELNNAGEDIEGPQVFLMLEKKLTPPFLRSILTKKGEDPANWTTTKFRDVLTEAVRKEVQEVMGEYGHHYVQPKAEVVSAAPVQAPRTPNQRSRRPNQPMALRDMTFIASSLDEGHKHQ

SEQ ID NO: 156081 - protein, 99 aa, Heterodera glycines
MPSPGNYHKWNWAPGWDRNFRNGANGKITKINDRDREEQNGGYQGVHKTKTNNRGSKNDHEWGLSQLKANGSVFMHNNYKSESFLINFARTIATSHENK

SEQ ID NO: 156082 - protein, 109 aa, Heterodera glycines
MPPSTSAGTDDLDNNAAAASIALPEFLADLKAERITVNMENCRTELAPINVLWLSSMLLALASVPFCLSVLALLITAKCWSTDGDGAGGISLRAYLPGWVQAKNNSLNS

SEQ ID NO: 156083 - protein, 46 aa, Heterodera glycines; identical to SEQ ID NO: 153110

SEQ ID NO: 156084 - protein, 371 aa, Heterodera glycines
NGDDEDDDVIFLAEMNLRKECDGGGNAQRREDDNVEQQQQETAACSNNVAQQPANDGTDGDDEIVFLGKQKDERHNGRRRRQSLTRLITEFYRPRQQRMRTMMMMAKPILCATGNNAVDPAVPAPDPARPFVFQLQRGNELCGVAFASLLWQRTKASSTPLTSAPPAHAPVDPARPFVCHLQRGNQRCGANFGTEHALQTHEGIVHTADERGSLFRCPKLSVPGCLFGTNSERNCDRHVRTVHGGYFPPVICLPGEALCMSAVQDGNPKCLRRGHRVLRAREPENSFFDHNKVVMRTRPGEGCKMGSCGFAAFAAFLSLARVVPLPEKAMSGAIDGVSLRVRAVVHIGLPSWPGCCQLAFTKRSCQPSTAG

SEQ ID NO: 156085 - protein, 106 aa, Heterodera glycines
RSQFLSLFVPKRQPGTLNLLKSCFLIFFITYNISLYIYLIYFFLFDKKINFKKVPIKAYCNHENKNELIFQHNFISFFHMYSIKFDDRKKTLSLKKCVGKSIFFKF

SEQ ID NO: 156086 - protein, 131 aa, Heterodera glycines
MRREFGKRWRNEDIETGHVVRYYVKYFDVNGDGVVQLDEFLRVFRRDLAAMTSSRKKSADTGLNASRTDRNHSGTGQNTSGTLGRVRDPGLAWILDFDNDGIVTAEELDSADRMIRKVPKVLPKFDKKDEL

SEQ ID NO: 156087 - protein, 102 aa, Heterodera glycines
MAYNQQATSSGAICINNTASTFCCCYGDGCNSALSPAVAFAFANSDPILPLGDGDEMTNRRRPEDAIPVIEVRGEGKPMSAAQIRELEEAANGGPLDIKVGN

SEQ ID NO: 156088 - protein, 82 aa, Heterodera glycines
NPRASAVKRVKTRQFRFSLTPPTLPKTVPGLLPGFHFTIAKAKKLFQKNNNFANFHALFPILNQNFMLRATHSQPYIGSSLI

SEQ ID NO: 156089 - protein, 281 aa, Heterodera glycines
IEKFFSKTTNDSEKGGFLEESSAIGKILAAKVSVYGRKLNAMLDGGSQISPISAKFFSQIMDKVSQKNVIARSESRIIDISGTEVKCYGVVCLPIRREALETKINLFVAQSAFGYDLLFGTNALKQLGFKMIDEVSNQIVDFSPASMLENSPMIVFKTFVIDGQNLDKTPGNFGGKRKDASEPKNGTGTKKCNKGRRQEKQSETEKSSVRNAGERRPLLTKTFVPQLKTKEIPIKNSENFGESAANKQRLNSVQMKVGVPNESEEEYLEKEKLWSNSVRDN

SEQ ID NO: 156090 - protein, 70 aa, Heterodera glycines
MGKGKKRERIPSFAHGNLIPGGLEKKESKRTLNKSPFVHSVHVFGMSVFFERQFNYHFQLVDLLCCSKSD

SEQ ID NO: 156091 - protein, 215 aa, Heterodera glycines
MTVPLVGNGAKNGQHFGTKKAPSQRLRSIFSWVSKFNQNGHIMKLYQKLKNTPGGWGQLIRKMYAEMLSAKKLGAGNSKPLRENCHKALQLIGEGRAVQRVDVQKIKPFHDFWTLLKNSALSLVTLFKGTLKTKNGRESDRKMKRENILRALKTFSTEDNSFFLRMVRKNGKTNETHKDQKRRRQKRLAPLIIFGIIIGGLLVIAFLSEWVKAGF

SEQ ID NO: 156092 - protein, 136 aa, Heterodera glycines
MASPPAILPFGCAPVAQSLPFLAAPPPPPILRSPAGFMPAAAVPAYAPSAAFPGIMPAAAFPGLTAAAAVPAFAPAAAFPGLMPTYSPAVALPAAQLLRMPPAMCGFPRKAAAKARAMARIGTRKGRAEMSAKGRN

SEQ ID NO: 156093 - protein, 54 aa, Heterodera glycines
MGGGGGAAKKGSKRLATIFESKSKNSPKTVRQVHTQTILWQKAGKVAKKLLAKY

SEQ ID NO: 156094 - protein, 30 aa, Heterodera glycines
MCVYTFAFALSTKFWGLGQLGQFPPSVRRS

SEQ ID NO: 156095 - protein, 104 aa, Heterodera glycines
MLPIANCILLLILLLFPLRFTAAGGHPEYLSALKNISLLTTNDTQEEAEMAKNRTFDIPFDYFPRDIFPPLQNISFGGRTPETAADEQIGSSAATHKMDALENP

SEQ ID NO: 156096 - protein, 89 aa, Heterodera glycines
FAKCPIDISSLRTFINGQQQQHWHTVASGGVANNTTNSDDGTTQQQQSTEKGWHQQSINEISAPSDVVHRIHVGYDGQKFTGLPPSWLE

SEQ ID NO: 156097 - protein, 32 aa, Heterodera glycines; identical to SEQ ID NO: 127531

SEQ ID NO: 156098 - protein, 23 aa, Heterodera glycines
FVTEQRWGGGLNGERIHKHVNKL

SEQ ID NO: 156099 - protein, 245 aa, Heterodera glycines
MSEFVDWILGFKQFETVAFAHYAGRFDSHFVLKELTERGVETELMMADLKIYQMKARGMYFRDFWLLSQNKLADLPKTLGLKTLAKLYFPHKYNKNVNFGKKLTHLPPLEDYCPDNMKEEECAKLVKWHNENYRMEFELGEQLKVYCENDVEILMEAILKFRQLFLEITDGMDVLKDSVTIAGVVMRIFRTKFLRENHLPIIPEGGYERAENQSKIAVKYFEWLAQSKRVRLRHACNGGEVEIGD

SEQ ID NO: 156100 - protein, 75 aa, Heterodera glycines
MFPCKLWNVVDRVAEGLGRTNNSVEAAPADGIRGPYERRKAKYIRQDNNLQALVADFDQRDPLEYLRACAYHLHF

SEQ ID NO: 156101 - protein, 457 aa, Heterodera glycines
MSSKTKTTKELIDFAAEQLECNKRDLGTVLLSATERRSLKKRITEALNRGSSLWYRLDEGYIENLNGLNLTVTPDRPFLGLRPRVSHRQFAFQILRIKRTQGSALGPMLLAGEFFYPLGGVFFDHYRDEFDDFGDFFAGFMKEKEEKAGNGIESAGERGANDSSGLINRNVSGTEKSFGGTVIGVETVAPKENGTVDQRVGLVKIRGENDSGSAKAVKRSHTDLQPKAKAQTGLPQNGFRFDALKWAQMHQLIPPPTVLYPNPQILRTAVAVPFNQQSCSSSSLNGVQLMPTNGEMIVTPCQQQQPQHQSQPQHQNHQQQPQHQIQQQHHQMHQNQRQRAIEGESRFTPRRFGPNRSHPYGGRTTASLPFIREQQETQLPINWPWNPLPRIQIPVEVRRVLLHRLAQERDHAFGLAGVMRQWNPPMALLLLSMEAFYSTLLAFVVNEGEPGPSLPQL

SEQ ID NO: 156102 - protein, 61 aa, Heterodera glycines
MLCSVRRLFLPLLFLLVLFFQKAIARRRKCPGGHLAEMASAKPLRQIGTDWGINEKHKKGI

SEQ ID NO: 156103 - protein, 62 aa, Heterodera glycines
MKNEFKHQEKNGAKIMTKFVRKLELIEHLKGFRMIPIMFDLDVNENSYSPKTCWGPNVLGPN

SEQ ID NO: 156104 - protein, 31 aa, Heterodera glycines
MNIPQQHVGCSPSWFSEKQRIVKKVIAEFRL

SEQ ID NO: 156105 - protein, 100 aa, Heterodera glycines
MAFPLGGPATCIAKAKASLGFIPYHGRKADRYGCHGREADRHCVMVAKQTDTDGYGRKADQPSHGRPLRDWPLNHNPQKAVHIYLMNSDFLRYFSPVHWS

SEQ ID NO: 156106 - protein, 64 aa, Heterodera glycines
MAQQQAITKKRKAMQDAHNSEASTSTNFLLGLSLRTKTAPNTTPTRPPWTKRSSRSSRPPNEPI

SEQ ID NO: 156107 - protein, 36 aa, Heterodera glycines
MIRRGTTEIRRGETVIRRGATMIRRGTTEIGREILE

SEQ ID NO: 156108 - protein, 21 aa, Heterodera glycines
GRFAPVFKFSWAFSAASRPQT

SEQ ID NO: 156109 - protein, 80 aa, Heterodera glycines
MKHYPLGLLGSVQSGVSSIVRIIVRIRRNGSKWTSYSGSTTPKTHRNDFLLISNQFNKEKNFVDTKPESTRNYNRKLKGE

SEQ ID NO: 156110 - protein, 212 aa, Heterodera glycines
MVIVTNWSCSMSHHVVLDDKIFVLIELSDRVNENDLVKSLSQCLLAKYELLKRTSFKKEFSVSKRGFVRDADIGEMFSDRRERELRANVLKKSEKLLMDVLGYRLDRDEEGKRFYLSTNLCKGIAMAMQTEQFTNCLLEMALMFIFMSKRHISNKTETEKGVDQMLLKSFLGWLRCDIQRDTVTGSEQVLYHWGPRSETVVSKKVNNDYIYN

SEQ ID NO: 156111 - protein, 157 aa, Heterodera glycines
EKKLEIKNVCRSGKWIRNRGKGIPCGNPALFVSEPAPVRDYDHLFKLLIIGDSGVGKSSLLLIIGDSGVGKSSLLLRFSDNTFSTSYITTIGVDFKIRSYITTIGVDFKIRTITVMGKKIKLQIWDTAGQERFRTITSTYYRGTHGVIVVFDVTSIE

SEQ ID NO: 156112 - protein, 33 aa, Heterodera glycines
MGSSALKQKTNGSQPLRNSVFWLFLAFCMVLEG

SEQ ID NO: 156113 - protein, 357 aa, Heterodera glycines
CRSVGEGVRSVHVAFPIPCFTPQCRLCYSCKNPKTNLCQKIRATQGKGATQGKGLMPDGTSRFTCRGQQIAHFMGCSTFSEFTVCAEISLAKVDKSVDKSALLDKVCLLGCGVSTGYGAVLNNCRVEPGSTVAVWGLGTVGLAVVMGAKKAGASKIVGIDLETAKFEKAKHFGATEFVNPKEVKHFGATEFVNPKEVPAEQTLQAFLMDKFDGGFDYTFECCGNVQTMCCGNVQTMRQALEAAHKGWGVSCRQALEAAHKGWGVSCVIGVAGAGEEIKTRPFQLVTGRTWKGSSFGGWKSRDWKSRDQIPSLVKEHLDGKLDLDKFITHKFAFSDINKAFECMTKGERSEMTKKEKA

SEQ ID NO: 156114 - protein, 79 aa, Heterodera glycines
MSPSMVLRGTEYSFHMRVDLPNQIDRKRGAIVRNSTTDGVWQSEERQLGRFPFTLGATSDLKIAAVAQGFKAFISLPFH

SEQ ID NO: 156115 - protein, 251 aa, Heterodera glycines
MVSEYSASTKSDGSGGATAAATENQNGTAQRQQQQQQQQQRRQSVTTLNCSANGGGSANGGNNKMPNGGRQVCQNGTMPKLTDNNHNGIIKNNGNRNSHSSCGTTISALSGLQDTGASKLYSINQQQEMNIGSTVATMKHNGEKQPNGNTIRVGRGPPNAATIETSGGKATTFYFICPFFMYFLNSTNILIFLCGNYCQIWFIFLNLKFFKSLKNCNFLTKKRTIVMTTPLYAEAIEEAKEQQKLTQLPTF

SEQ ID NO: 156116 - protein, 255 aa, Heterodera glycines
ESLSSAENAFGYEFRVWTVSLVNEYNGGTSLTLCWLPAKSVLPVQGYEVEFRDIMQDATHWYRMTDQLVRACKTTVGYLLNGHQYQFRIITKNAAGLSEPSDPSPLITIDVEDSGVRSAEQQMSTLDRQIGVPLADEMVRESPPLPDRDGECRKAFPSDLHMDNSRSDSPPPIYRQTESSLQWRDPTLKEVIDYLKSPDQTLVLDASGYLQHLTFNNDLIKEETRNYALWNISSADELKESVLNQAAETVVTHIV

SEQ ID NO: 156117 - protein, 130 aa, Heterodera glycines
MPIFRSFCSSSAILLTVLDVFLFTAQFANSSAPADDSFVWPMEQYAYDPISDTMLRSLLGYDAKSKQNIRPFRIFLAAQPPKEIRMENEKGGEEGAKERIVMAKRKNAELVNHILKNFASLNRLGDAGKK

SEQ ID NO: 156118 - protein, 98 aa, Heterodera glycines
MRIVGKSVLIPSIVQTRANCNSYKRQFVQKATRRIVNPVQSQKTLCFRMIPKIRVGSNMNKVTVLKPEVLLFDWTHIIFGLIKVDSTHKVQYVEPNVL

SEQ ID NO: 156119 - protein, 19 aa, Heterodera glycines
AQAACRPVCQCQEPSLNCQ

SEQ ID NO: 156120 - protein, 47 aa, Heterodera glycines
MITPEQHQKRLEFIKRKKMNSVGCYGFEFKKFPCRRLSAPPELKKFL

SEQ ID NO: 156121 - protein, 27 aa, Heterodera glycines
MTSGLFCTYLLERIGNATNVPRLLKRL

SEQ ID NO: 156122 - protein, 170 aa, Heterodera glycines
MDPSKRKYDAVLKASAGQVNNSAALATSIDARLSTFEYDPELGHTYDVWLKRYGQTIAQDGHALSDQSKVQLLIGKLGEAEYKRYIDSIAPKSQNDFNWDETTAKLKHLFGETRSLFLRRFDCFQIRQDAHQDVQSLIALINSSCENADLSLSKEELKCMILIIATNSQI

SEQ ID NO: 156123 - protein, 286 aa, Heterodera glycines
MQMPREKERNANAKRERKKCQCQERKKEMPMPREKERNANAKRERKKCQCQERKKEMPREKERNANAKRERKKCPCQGIEKRGRFSKDHFDSIKTLKIATKVHYLFSLLDLERAYVTERGRLVGVVALRDLRMAIQSAQNGISLRHNLYDSADSSSTGTENSLDEFLSIDVEKGMAQKNDEMPQMTLTECDEKRTAQKLANQTDRNFGANAFTVQNSVPLQIIEAENKLHQRNRSQSTRNRWKEGEESEAARAMAYLRRKSVALEDLKALEETPLPTTAAEKEREK

SEQ ID NO: 156124 - protein, 78 aa, Heterodera glycines
FVGLFICDRFYSSILHFLRSRRFPLRPPQFVNVHVDAMRTQVLIQQFSNLSLFDLVKIEPNTRQMNTAGETSREQTNS

SEQ ID NO: 156125 - protein, 245 aa, Heterodera glycines
MGEQRDELVQRAKLAEQAERYDDMARAMKKLVEMDAKLDEEERNLLSIAYRKAVGARRTSRRIITSTQQRPTLTKKQKQIANELKKKVEHDMEQKGREALDLLDKILIPKVDEPVAKVTYLRMKADLHRYMAEIKEAENDDPQKAKQSYEDAWNIAQQKIRPSHPIRLGVALNFAVFLHEFMKMPEEGRKLAQKAHDDGNADLLADTSGGDSYLESIGILEKLDENMRIWASTQERDGSSERGNF

SEQ ID NO: 156126 - protein, 36 aa, Heterodera glycines
IDANSYGITKTVGIFVAEPYTLALAQCETKVFCRLF

SEQ ID NO: 156127 - protein, 254 aa, Heterodera glycines
MSSSSANNCDEANNQQNLHNVPIATPSVAQVTEAEQCLIKTIKIINSDNYCLFYAMQATMVRAVGGLNRQRFHDYLRGVGGRLKKETFEMMNALNVSFGQQNYDAEFYVPRIIDWWNGTNFMGIWKFKAFIFGSTGHYKPLFKYGPEDYVVPIILYFDANHFNGVQRSGNLFGKPYCLSCEKTYDRPKQHSKSCKARCIKWFQKRFKIYSQFFISSQMGPTFSCKPIDGFRQKCSGCNKMFYNNDCYQHHLASD

SEQ ID NO: 156128 - protein, 99 aa, Heterodera glycines
MRRHKKKYVIFCDLNGKWVKNYRLEQPDLDALHIADTNENEEPNPEDAELQQEFVLDEEEVDEDPSVPCCSASLQRQNTAVRRNDNKTGSSTTALSSPM

SEQ ID NO: 156129 - protein, 67 aa, Heterodera glycines
MERLKTNNNGNGQQQPFKLAKGSAEIGKATTTASAQKKKKLKKTKQQEEQKTTAEDEQGKKEEEQVQ

SEQ ID NO: 156130 - protein, 169 aa, Heterodera glycines
MALKLIVTFPIKATILDNVSGPGQFEVEEEDEVDGNDEEMKQYNKEDEGKSTVAESSEFVEPVPTAAAEKSEVPKSSEKRRARGKSGKGGRRRALHDRRGEKPRETYIQLIGMAIEAQESKRATLTEIVGDFLMSQLMGLESIDDFLWLSGEKLGSRGFKSHWVASIFI

SEQ ID NO: 156131 - protein, 61 aa, Heterodera glycines
MVDWLGIIAIIFFYVLILIVGIWAGRKTDSTKTGVGDQTEEVMLAGRNIGTLVGIFTMTGG

SEQ ID NO: 156132 - protein, 31 aa, Heterodera glycines
MPRCASYFCFEYSLNGISWSPFINAIKNRFG

SEQ ID NO: 156133 - protein, 60 aa, Heterodera glycines
MVAILRAKNMSQWNIYGHVPPNGNGKSPACQSNGTLPICYNKQIGQKSCDNKFCEMYGVN

SEQ ID NO: 156134 - protein, 16 aa, Heterodera glycines
MATTLQQKYSCARNTK

SEQ ID NO: 156135 - protein, 231 aa, Heterodera glycines
MDDEGKEICEVLSKIDAYSQQILNMHQKNYEKQIINDQMSKLTQLIEQHFANTKQKIGNDLAPEKRESIEQFVEQLENDGEKMEQQQQNDAVMKKLDEQLKKNLQKIKKLNKKLLKNNGKGPTEKEIPEYYELSYQCLLIYEKMAVHLFPLQTLDTTAGDIPQVGAVSAAQPSAAAVVADGNNRRRRRKRGVHCCGGCCNCCGLEFGAMFRAFFKFMGEMLSVPWKGLYLS

SEQ ID NO: 156136 - protein, 141 aa, Heterodera glycines
MGGRFGEGIPGPGLVDGQSLTAHPFHRIVLDPRSLSMMLAPVRERFRPSVPNPTTCSPAAQFMNRLGLRGLRKSTRVHSVPEWSEETVQKTKCGVGRAVQVIFVNANGSKQNQCAQIETLENFNTKFVHQLYDEICEAEVI

SEQ ID NO: 156137 - protein, 66 aa, Heterodera glycines
MCTGNDKELLTRSPEKIFDFVERSITLSLDVDSLLGIGLRRHPLEAFKEQKSKIEVYLSMNRLFFW

SEQ ID NO: 156138 - protein, 246 aa, Heterodera glycines
MPTMLLDRHDYIHKWLIWVTEYAEGWLAKLISLAIRIGTLNMDNAREPFAYIICRHFDRVKGNSDFDENYTVEDDGLMMAVHKRNEIDEMATKSEQTQQQYLDKIVAQSLALRNILMILAEEANNDFTFESSLKGTSSSSTSYLTTIISKTLHPLLIKNVHSNHQQLVHHLATLILFFHRIFEMVAVPQIWLLNKFSVGTELKQLKRIYETTIKALHNIENEWDKEQKAISDDDHEDDTAISANNR

SEQ ID NO: 156139 - protein, 35 aa, Heterodera glycines
MAQNYQIPQAAYGQHWRLHKNIIEAQIRYGQKIRN

SEQ ID NO: 156140 - protein, 97 aa, Heterodera glycines
GGTVPKFCTTFYCGKSKYLIGQLRVNEHSRLWPVVERKNGNIRWGALFSKNSSFRLTIPPFCALFRFKIESFFLSFEINCEKYTKIIFGFNYAVQCF

SEQ ID NO: 156141 - protein, 101 aa, Heterodera glycines
  unsure (1)..(101): unsure at all Xaa locations
APREGGTVPKFCTTFXCGKSKYLIGQLRVNEHSRLWPVVERKNGNIRWGALFSKNSSFRLTIPPFCALFRFKIESFFLSFEINCEKYTKIIFGFNYAVQCF

SEQ ID NO: 156142 - protein, 139 aa, Heterodera glycines
MTLTFFSFLCPRSQQFLAKQYPGLVLRRRRPRQGGGAGQKRVVVGSTVAPATTAVKLTTPIAAEHRLEGEEEEEEENGDDGGGGIATKLTTADDDNDDEEVEEDIFSEIVIDEFSLLLFRSMDDYNVWGRGKMYYINER

SEQ ID NO: 156143 - protein, 45 aa, Heterodera glycines
MYEHIIQIVLSFYEAAQVLASGTRTNSYSGRLVTIYNVNKEEEES

SEQ ID NO: 156144 - protein, 34 aa, Heterodera glycines
MSDNPKEAERKMEKAISSLPTVGWRVRFGAPRSA

SEQ ID NO: 156145 - protein, 61 aa, Heterodera glycines
MCCSKNNGVLSKDPQTKNPSLLLLADPSTTAQNSIFLKYFQSWSLPSTSADASSRYCQNQH

SEQ ID NO: 156146 - protein, 33 aa, Heterodera glycines
MKKNEKINYKKRIHKIIILLISFYAFVFNCFLS

SEQ ID NO: 156147 - protein, 36 aa, Heterodera glycines
MSGVYVLQFFIFANLALGHIFITFDGNAESFFCIKL

SEQ ID NO: 156148 - protein, 25 aa, Heterodera glycines
MCMKFEYLNYSWRSTIKNLNIFVSK

SEQ ID NO: 156149 - protein, 393 aa, Heterodera glycines
MPKIKKNKSSKKSISAAPSRQMPLAQNYEDLTSSRESATVDKHSPLTPTTNVVVDRIFSDDPEMADEDGKRVSRSENGQHIKKMSVNSALGPSVMIENKSGGDNEPNYEESEVRIEVLDKTTKTALGSPVMHSRANLAINNITIENIEDINSFFTTFENYFARTYQILGTLTDPLLWAMLQPKSLSESENRKSETISTDDKFIVIQTGINWTLASRLTEVSSWPHFLLMKKKSQSDEYFRLGEIIDIKEFVENESNSPKAFSKFATDLTLLPEDGCGSIARILKCERTGKINAVDICFDELVQRFYSHQFGSDVDVSEIVADAYVEVITLGFRIQGFENSLSTLTGLNTLSDEPIQIVSQPNIGTSIDLVIKIVRQIDPVEEDYRQWSFKNLF

SEQ ID NO: 156150 - protein, 350 aa, Heterodera glycines
MEFNYSFTYSFIFFLLIYFVVNRCNSEELLKICIKYEQNHSTDDTQRKITVNLSAIYLNMNLMSKDVQQNVQIGDKLDIPMPTNVREFDEFKFVFCIFVKPLDNEYQSGGFDEDPSDDQPFEGGFGILDQYYQLQMDDIRSMVRSVGFVLYEPNFAKRYTFNLGQIDPRGLFWKRRIFLDTKNGGPGNFYGFLYATVNKNQRNLPMLDEKILLGHAPLTAAKNHRNELTTNREQSAKLNLMLNEYNLSIEIDDVQRFFKHKILNLQLKIYYFDEGNKINDDLIIENSINDKKQKSDRNNDDEEDECPICFESLNGEKQTIKFHEDYNENSKAYFYLIKQFIWKAYGIRSN

SEQ ID NO: 156151 - protein, 27 aa, Heterodera glycines
ARGNIKGIFVFSDPEDPKNPKLDSFVF

SEQ ID NO: 156152 - protein, 265 aa, Heterodera glycines
MPKKKESEKEIKRRQAIRWSSRLDESGYLGKTGSGYFRVQQSRVRVQVFKPGTGGTESGRGTESGRESGRGTKVEEEKKVEEEQKWKRKRKTWKRKWKRNRKWKRRRGTESGRETESGRETESGRGTESGREEEEQKVEEKQKVEEKQKVEEKVEEEQKVEEKVEEEQNVEEKQKVEEKQKVEEKVEEERKWKRKRKWKRTERGRGTESGREEEEQKVEEKQKVEEKQKVEEKVEEEQKVEEKVEEEQNVEKKQKVEEKQKVEEK

SEQ ID NO: 156153 - protein, 217 aa, Heterodera glycines
MAINYYIFFTICLFFTKFAMTINGGPSSTNNQKPRTINRIAHPRNIEGQLAAGDHIPHTNQPTNNATNGHQNDQNANSENSDLLDNSATEQHSSVHEGNNAGRPTENLIIENEHRAHFFDQGKSIDTTSPSGYSNANATKLDETNDHQQLVSEGGNDDDDDERKMNDMEEEDSNNDPVVSECCPICLQPFTEASNKKVLNKCGHQFDVNCIDQWQTI

SEQ ID NO: 156154 - protein, 194 aa, Heterodera glycines
MFLKFVFFPFFSISLAIAQQILPMTNDEIEMIKNIMGSIEQNLIMVEANCCAIDHENFDQFKKAVPKMFEKINQKIMIENETPKFADFQEFFAEIYAFLDKVHIEMEIFVKNLSPYCEQNEQKALTRFEMAMQMEKEFLMDNLVIIEEPNAKIKRFFEKFDSSLFAKLTLTIVDMLTMDSLLKDERNRHFSKLF

SEQ ID NO: 156155 - protein, 79 aa, Heterodera glycines
KCCLSCGCVVMSPWMLFVAIIGTPIGIVCEGANAVRRCANPTPKEMPSKIASKTSGTSKTTSKTASKTNSKNGEKKKNN

SEQ ID NO: 156156 - protein, 36 aa, Heterodera glycines
MVNGFLKWCLYINYHKVIWSICGLMAVWSRIETAKQ

SEQ ID NO: 156157 - protein, 925 aa, Heterodera glycines
MYDFSPYIRENSEFFTKLAATKSDKKKNDLLKGASAEQILGLVEICANILKFNFRLNRRQRRRLALYADYYRAIARSRKSEYLALINLLKGGVGDGADSLQNEKALLDARIQRNLNDHKMDADVKMKRHSWLYKQRHQIKDMIDNKPQKVIVENASGSTPPNIAPYMGIQKAATPNKHLLDEVEDGRKTSPLKKRRRSMKTHNRVVATNTSNGASYCEETDAYTSAPETDLLLSKKREQKFLKLKTDPVHYDKLQSIIERNPAKYGVDKASGEILTNFKKPVVKSNYIDSLMYLTGQRADAPKGHRFFVQKIGNDPEIMTFFHAQQGEGEQVYYDLRSPASYAGIQKVLAEAQRRNPSITLRDVHQFLHKQRTYTLFKPRKNRFRRLKTVPSGLHTDWQCDLCIMDALKEHNDGFRYILVCIDVLSRKIFTAEAESKKSEHMIAAFEKIFKKAGVLPNKLYSDAGLEFQAKKMTDYWKQKDIIKHVMYSPHLHAGVVERANRTLKERLYKYFSEKNTKRWIDVLDSIVRNLNSSANRTTGLKPVDVNFKNADALRNRLYKQVGIDEDDIISIKLVNPSYRFLDDKKFLHIELKIPSMQFSSVEHLRLTLNNLITEAYQQQISSYLDDDAKRTKRQENVTDLFFHENPVDYWEKIGELRAKYEQLEKELTEEESELSANTTDAERRKVLESELPLKRLRTRRKKEELEELERAAERRDQESPEAEQKKIGEFFHHHPEDYNRKLNEARLIFTHHLSGLQAVMRKYIDEKDANKIRQLESEVEKLRLKIKRLQRNLTIFENATLQRDHQKSLSQYEELSHQQNSAYVKEFFQKHPTNYWQIIHNNYRGLTEHFQKIEELRAKAVGLKDNASFQQQIERAKQLIEYRRKRFAALEFEAKKLDESSIRMVVIMIKQMRVPKQQQLREKH

SEQ ID NO: 156158 - protein, 198 aa, Heterodera glycines
MTHGQTLIARLKQSEEQKKEWVAVPQDDDDDDRPALKHGDMLWKLLRSTTPHNQKQTAGDVIHRQFADAEHTRGQVMMELLKNILEEKSDAADAHRQQQQNYPRQKSAQVLRTKSRGEALKELIKKTQNEQLPQSSAKTRGEILKLMLENMKFSREEEVSFEKLVAKQKTEQTAAEFVFNDLAQRFVMKTGAGVLHVD

SEQ ID NO: 156159 - protein, 111 aa, Heterodera glycines
MHFHYKLLKYSFLNLDIQEICNYGRDGTVEKVSIWTAFIQKIKPKPMPYDQIHLEKVIGRLFSIYIQDVQNPMLVKHPNRMKQLLVKDPCDEAKLKVKQIEGVGEDDENDQ

SEQ ID NO: 156160 - protein, 79 aa, Heterodera glycines
MAFITYVLVSGFVFGVQKRFSPEKLGMLTTNALFYLFLENGIVFVMKYALNISQSLNIWHALSYSSYKFTGSDFLAFLK

SEQ ID NO: 156161 - protein, 106 aa, Heterodera glycines
MFCEIRGQQQLTPFATMQRKDGKWNIEKQKKGCGRVEGMGPNFGAGYWALYYSHLGFCPQRITLINPSFLLNEKNHTVDSLHRASFHFVSAPSSLFCCGLSAGRKH

SEQ ID NO: 156162 - protein, 40 aa, Heterodera glycines
FGMSLTCITSKSSLILVILFFVYNVSTNFLHKNLLCDGSK

SEQ ID NO: 156163 - protein, 160 aa, Heterodera glycines
LQKLKFVPDHGSLGFQEKSGETESKEVNSDEMNYLRQVGEILSRGTVRTDRTGTGTISIFGMQTRYSLRGGTIPLLTTKKVFWKGTIPLLTTKKVFWKGIVEELLWFIRAETNAKTLSSRGVKLLWFIRAETNAKTLSSRGVKIWGPKLFLNLFLYYLHL

SEQ ID NO: 156164 - protein, 44 aa, Heterodera glycines
YNTFLSTMRQHFRPLKTREKRSWSAEAFYYIGNIGKLRLVNMLI

SEQ ID NO: 156165 - protein, 69 aa, Heterodera glycines
MDEGQFWSCALGEWVKDCVCGTSAADPWPILDPSQWPIVPSLQLRYAELCDGVALNLVLCYMYAFPSDQ

SEQ ID NO: 156166 - protein, 48 aa, Heterodera glycines
MGGWDKSVSSDKKVWDNSVPYNKKLLFAGFVSREIVLCYSCLIKKSLD

SEQ ID NO: 156167 - protein, 141 aa, Heterodera glycines
MKVFLMISLFVFLIIILININYVGSEKKKMEQKTFDEIFGEKWEEKRNEGQKKREIIGKFNKIKEKIKQKGRKYSAKERSKIEGKIAKKLGTNRKNIQKWIKELKLNKFKSINDQRKFEIVQKFIEMSNEYKQKGTYSKKE

SEQ ID NO: 156168 - protein, 38 aa, Heterodera glycines
MSAKSVGNGEVNATGPGSGSGQLSTIEYQGPGFDRDRD

SEQ ID NO: 156169 - protein, 120 aa, Heterodera glycines
MHFQIVSFLVFCIFHNFPSFARYCGGKAISSFKKKLKYEPDQEGAPLEVKRESRNSFVGGNGKVYIGYVKKSPTYEGCVAIKIFNPNFYAIYENSKDFMQKIQSILPPDERKHLITMVDA

SEQ ID NO: 156170 - protein, 346 aa, Heterodera glycines
MSIPKTTQKPKFINIRRFTPSNVSLLNTVISSRISTLSQGHFSVNEKYNAFNKTLLETLNECIPIKRLTKKELAPKYPTHLLASIKEKAKLYKLCKIDPTKRALYDSISLHIKIQTKKFHSQLEQKAISKGKNSIFKYIQKYDVNPFEISNLVSENKCYHNDQEKCELFANLFVNSFNNSEVDPGFLSLDNTFVNQSFISDIEFNIIETQKLLRKLPNKNGTSPDNISYKTLKNCHPSLATVITDLFRISLDSGSLPDIWKESIVFPLFKKGDKFNPENYRPISLTCSLCRVMERILSQNIYNFLLKNNKISEYQFGFVRNRSTTSQLITVVEDWYDAIINGKNAD

SEQ ID NO: 156171 - protein, 95 aa, Heterodera glycines; identical to SEQ ID NO: 125597

SEQ ID NO: 156172 - protein, 376 aa, Heterodera glycines
MSGFLRTKIAIELKALEKAKTATELYAEPDQTLTSLENAILLESAAERIKSEVEAVNAKIEQIWITASKWHDVIQKMDKDERKSEQTAYEQFQTTEKLNTKMEAANTKLTELKDLEMKVEAGAKLQRSKADRDARVEQREHAKAMSKSNAEADKGNNRARGNEMTAALYQLPTLRIKPFGGDKREWPMFEEAFKVAVDQKPGSKTEKLNLLKSLVEREAALLIGGLRLEEKNYEIAMKLLKDTYGDKGEYVRRLHTELSNLKRCFSVEDTKHFCMELERLARELEAAEEDIEGPPIYLMLEKKLYKPFLREILEEKAKNPDFWDTSSLRKALGSALSKELAIKEVMREYGFEGKEANPEHGFKRQLRRNRFGGSVN

SEQ ID NO: 156173 - protein, 110 aa, Heterodera glycines
MAVTLDRFVDMADPGIREVFPGIVGHIKLRENNETLLNKVLAPFECSGGQIFRVYTRETMPRRYQWEMAQSKDDRCFLSDFRSATPVVDALANWSSTRQWAPNCSKRPRR

SEQ ID NO: 156174 - protein, 23 aa, Heterodera glycines
MPNSFTNIDINPVELSQRRRLSA

SEQ ID NO: 156175 - protein, 87 aa, Heterodera glycines
CVAKEKAISAPYLIGRAVQLSECRKLYRGDRICFRGIASQSGDSGSAVLASNGTDYVQIAVSSYVECISSAPEASYAIYSRIDAKWL

SEQ ID NO: 156176 - protein, 25 aa, Heterodera glycines
MRRNKLTKKSPIINFDNFGEEKAKL

SEQ ID NO: 156177 - protein, 121 aa, Heterodera glycines
MDINLMPWTVYYKIKGGGHCSGSLISSEFVLLAAHCVNEVKDGAKIILGFNSSERIRTGKPYNGIQLHLHKNPSNVFIHPGFVKKENLNTTGWNDLALIKALIKNNNKFNTGFCHSNFITP

SEQ ID NO: 156178 - protein, 265 aa, Heterodera glycines
MFLANFIFCIFLFVFSELFAGLNGKKISLTLIFKTLSTLTLQVSKANPWPIQVFYRSKKCSSFWLCYNRTMTDKGFPWKLKKGFRFDQLFNVSSEPSISDQCGPNARKIHFSIANETLTIGNELITNNAKPNDTNIELKFDSFCGNVVLLNNDGQEQLNDFGKEFFAHSNFGPFLADYAGLWLLPLDIVSKLGGVMSDLISVVPDECKFEWRLIDPPKQCMPFDFEAAQKRRSARRINPLKNIFGILILLPSAGKSSNFQEHGCS

SEQ ID NO: 156179 - protein, 31 aa, Heterodera glycines
MIHHNATINDRMMIIHWENDNTIIISDWTRI

SEQ ID NO: 156180 - protein, 41 aa, Heterodera glycines
MYKMDFAPFKLLLLLCQNAERPRWPVSSMVAIGNRCLFLSI

SEQ ID NO: 156181 - protein, 36 aa, Heterodera glycines
MLQQTANYPAATGTGNAQLNEGYNGNPGLPGMPGPK

SEQ ID NO: 156182 - protein, 111 aa, Heterodera glycines
MTLHTIHSFCCTTLLMILKKDWKFRASSRRISKICPKMIKLCHFEGLKFNYKVEKWENSALLPGYGRGPYNPSVGNPSVVNPLVDNPSVKDNPSVMDNPSVYNSSANFFEQ

SEQ ID NO: 156183 - protein, 82 aa, Heterodera glycines
  unsure (1)..(82): unsure at all Xaa locations
TIDVFRPPKSVRLHQLFWEPEDGKIXIESRSATALQHMVDVRKKLELEVKIDPAIFVVCSGGAFDPTKTTLIAELGQLKLNT

SEQ ID NO: 156184 - protein, 31 aa, Heterodera glycines
TKGGGQVSVFPSNNIFIHFFKCTLTPKIFFF

SEQ ID NO: 156185 - protein, 88 aa, Heterodera glycines; identical to SEQ ID NO: 124691

SEQ ID NO: 156186 - protein, 363 aa, Heterodera glycines
MTLNSLPELKGNFGADGVRSFFRHFDVATEEWPEAKRLSALRSKCLGRAERAFNVAVANNPFRYDSVKRAMINLLEETDARQMSAFDELMSGAYRRNNERIDDLADRISSLVRKAYPGLLEHLYDDYSIRHFIRALQNPELALTLELARRPSMIFDEFVALAARAESTQKASKLAMQKSNNFSRFNSQFQVPQYSPRPMQQHFRQENFPQANDQQQNRPTCYNCGKFGHFARQCSEPQRNQGTQNNNSSTSNFVRQNFIVEQQERPPQPSQNLFVGGISMSPAEVEKLFGKDGTENETTKNLNKVSIGRIMALNVSVCGLTAKAMLDGGAQISLVSFAFFAKLLAEKRIDTDLRPTRHITSGD

SEQ ID NO: 156187 - protein, 133 aa, Heterodera glycines
MTALMVDAKMHFDHRVGWSLVSMRSMGAVRTKCDPFFDWLKNRVARYRYRYRPKSKYRYRYRYRPVITGFFGTGTGTGFSEIKVSVPVCLVPVPPRLFICSGQVAKPSDFIISRLGSIPHWDRIFFIFSLPLF

SEQ ID NO: 156188 - protein, 80 aa, Heterodera glycines
MKNPCCKALRIYEEQFMVFCVMCPYVKSDDSYRTTPTILNLIDSEQSYGSKSLPTTFRPATFWGAPAISYIHTVDMFPCR

SEQ ID NO: 156189 - protein, 71 aa, Heterodera glycines
MSLPTKATTPIRNVQPKTEAEGQSGAMTWNVAIVTIVAIAIFVAVAVSAVAVPTMTTTVAAVTQSVALFCG

SEQ ID NO: 156190 - protein, 107 aa, Heterodera glycines
MKRAKQKAKLAGEEANGFEEEEKCQKEEAKKEEKAEGRRSEFGGGRRSGREWEKGDESHGKGRRMEGQQAVAEAAAAEEEQTEWKKNGRKKHRGKTKEAETYAKWTD

SEQ ID NO: 156191 - protein, 146 aa, Heterodera glycines
TFVSIKMPLFHSFFLILLFLNLFFQFIFLKALKVPRFLVKKILNETMQNEAQTITEKPPPLGASAPSLGGSALSSLFASPLITLAPPITSSASFLLFLLTITFLLLISAFGLLLFKWHMRNGKSENGGSKEKAWNGRTPIISQPLR

SEQ ID NO: 156192 - protein, 71 aa, Heterodera glycines
MRIKQKKDCRDVFFDENFVVPYGSADASNQQHKSGVEAIKYHPKTQHYEIKDKFRKNTRAYLFLNDIVVIK

SEQ ID NO: 156193 - protein, 27 aa, Heterodera glycines
MICSNKARFGVSNCCRTVAIFSRLLIE

SEQ ID NO: 156194 - protein, 296 aa, Heterodera glycines
MALVRFSVGKTNRGRQLITHGGYEYLFEVKVFKKTKKQFSKADSRTEDGWSYWKCPRRPPYCPGRATVQSNLFVADDGSNYRLGRVTAQHNHEPVFGSLTEGDIGLDAMPPTNLLVPNALQNRVIYNQNLQGKKMLIFCSQFGLDALRNYGESVAIDGTFESCPRGFGQLYTMSVIIEHCAVPCAYGLLPNKNSPTYRIFFDSICASVGIGWYPARIMTDFEAGAINAAKIVYPNAIVSGCLFHLGKAFFRKIQSLPHLLDRYNNNEDVRKALRCVQALAFVPLNYVYNYFAIAMS

SEQ ID NO: 156195 - protein, 192 aa, Heterodera glycines
LLSIHLEKEPIVIRGVGHLTMFGLNSHFFGLNSHFSTEFPSALTGKLAPEEFDDTLRRVNYVLQRNVSRNLRWLICGLLFCCCSFGISLWPVVCLNRRTISALEKTLDHENQQLYDKTISALEKTLDHENQQLYDKLGLHWKLARLPVEPSNRLTEYVLLKLARLPVEPSNRLTEYVLLLETLPRIPLSMPD

SEQ ID NO: 156196 - protein, 101 aa, Heterodera glycines
MGTFGIKRTERAIAVKSKQFHVLIRHGKGNSWQRFKQKDIFCQAIGRLNGQPGQLPEIAICSKQIEKLKRKMRIRNLAFDFLFKFTFGISNCQMDAEFRYQ

SEQ ID NO: 156197 - protein, 17 aa, Heterodera glycines
MEFNNYFNKSTLPLAIS

SEQ ID NO: 156198 - protein, 193 aa, Heterodera glycines
MRWQANAARMLMAIPLREPKTVDVPDEPKSSPTDPLSPYDPSHPRPTQPDYPDMRDYDPRSFKPPEPDDDPLRLHPILPAAPYAPPARPRPSQPNAPTRPPPTYPDIGRPYFDPLPHQPTNPYSDWPYGPAAPTGSGGYMGGYDGGVYEPRPDQPGNSNYDPYGRGGSDDGNHGHDGPGSSGGGGGGFFGPYL

SEQ ID NO: 156199 - protein, 122 aa, Heterodera glycines
MEEFEEMVAVLQLDGVLDFDAVRRAVSSGAIRVRECDAETPMVQIGSHLYSGQWSQTLGTDMLLCPSSMSDYHHHEGHQRLELVAVSDTRLCAQKVLLATDESPTNGNGTRNEQSTSNSSKA

SEQ ID NO: 156200 - protein, 63 aa, Heterodera glycines
MWTSKNVQEFKDNIKKEGTEGVLKIGHGETVTTFRRDCHEESFLQQVISSRLIVEIYTVKGND

SEQ ID NO: 156201 - protein, 34 aa, Heterodera glycines
MGLCEKRKKLKTIGRCLSFIWAVIGEKNDINKRK

SEQ ID NO: 156202 - protein, 60 aa, Heterodera glycines
MSEADPNFVKTWEDEIFRAPHFPIPFWNMHSQATSALARTNNGLEATHLHFMVFNFLKAN

SEQ ID NO: 156203 - protein, 136 aa, Heterodera glycines
VVQGILVKLHQPETTPLAPITNEEVDNNQQTDNGKNAVESGGNASSSSSPASTVPLIILALILAVLVLVSIFWILIKRAKAGQEKQTDHANGKAVHLPSPAGDSTTPMLDMRGNAERTTAPDTVGMAPENGTAGRN

SEQ ID NO: 156204 - protein, 71 aa, Heterodera glycines
MPPQDEAGPSSSAASAEEAMETPPPTPAPVPTPEMDEEKFGTRLEDQKENDNFLEHSDGENEDDAVIDVIG

SEQ ID NO: 156205 - protein, 59 aa, Heterodera glycines
MPNQIFSPGFLTILELGEMSLDQELQRGKTKKSKNQLITMVKDIVSTLDVLHKELTILN

SEQ ID NO: 156206 - protein, 82 aa, Heterodera glycines
GQKQRIAIARALVRQPKVLLLDEATSALDARNEQLIRESLSACAKGRTVLMIAHRLSTVRRADRILVMEHGQIVQVRNRKRL

SEQ ID NO: 156207 - protein, 69 aa, Heterodera glycines
MPGSKYQQLLLFIDELGRVILISDPENQRNSALVHFMSPIEFYESNLTFMSPIEFYESQSNIYESYKNL

SEQ ID NO: 156208 - protein, 303 aa, Heterodera glycines
FRTPNPSSNKKSKTQFSTKFNFFFLHKEIQFEFGARNGSKQMPNSVHHTNQKLQQSATSAAEGGGKFSDFEDGSDNELFISTTTINNNDGDNDNDEEEEEGKEAIPWHGGGKYAKCFEQIVRDGTLVAKVRCLICAKELSTKSRTSIREHSKLHQLVAESGIFDHSQEGIFDGMMPEAVGTALVEERTPIVIPFRRRVTTTEMMPSTSAQQKMRSQSVEDDILNDEELQQQQNLAHFDWNKQKIELQILEAELIQKQLSNFQRCTELGIPARVNLKKNITMGSQSATGWNRRFATFSNAHALQ

SEQ ID NO: 156209 - protein, 109 aa, Heterodera glycines
MVGHENDNNQQPNGSDQALNRPSPADRRHPTAQSSQKDGANGGGGRQSRAVGAKADGAGSSSSTSSSTSAVVERGSLFAEMANLWILRAKIEKMPVEINAYLGIFGNFE

SEQ ID NO: 156210 - protein, 38 aa, Heterodera glycines
KTAKFLSILEQFTLCTMSRIFGRFVGTYPIAFLIFSLI

SEQ ID NO: 156211 - protein, 59 aa, Heterodera glycines
MEKRRKRRKRMKIALGKEERRKRKREKGKIRRKKEGEKEEEKDENSIGEGGETEERETN

SEQ ID NO: 156212 - protein, 185 aa, Heterodera glycines
MAQKLCATQPPSVEEVGTSESGSESASDSSYSFSSSDSDESEQPAGHGGGRSQTPREKKQPLKKKAPGPSSRNPGRRVKKPSTKKSPAPRHANTSTKKRGRPAKKAEQAKPSDSGTAADSGRDDSGHSEESASGTKKKPTRKSAAAGHPTKQKASRGGRAGNKKAQEERSESSTESGSDREEDEE

SEQ ID NO: 156213 - protein, 42 aa, Heterodera glycines
VITRWRHPFHRLRHSFTVAIYANELAEHGQRSGQTVDGQQQQ

SEQ ID NO: 156214 - protein, 36 aa, Heterodera glycines
MSTLVCGVPSVNALGHCRHQRKKEKKKRTNESNENY

SEQ ID NO: 156215 - protein, 62 aa, Heterodera glycines
HLHVIVQLPPSQNVLCPNAIADQQQQKGGQPLGQQIDDKTTSNSEHTLTHSVDGRKGKGRHS

SEQ ID NO: 156216 - protein, 181 aa, Heterodera glycines
MEENDLTNLMNANNTLYLLYRNVYPCWPLIIGAIAINLVAIFGMVANFGVIWTTFRTKSLHGTANVLLALCSFFELLHQHGHLLFLYVALSGHNFIPLSLAIKICSISLFAVSGISLIMAFTGLDRLFPRTVKKIPYLGTIIFVCVCISSHNLLLVFESTSKKPLLMVTGTIGDLLIVWPF

SEQ ID NO: 156217 - protein, 108 aa, Heterodera glycines
MHFYDEKKREFIEQFDEFKCLYGQRKQNEFVKKLGINTTTLRKWKKELVPQYVKTPYSNEDKLRKIKEYFKIKERNAKISDVKIAKKLGIGIATLRTWRKKFDSVSEM

SEQ ID NO: 156218 - protein, 70 aa, Heterodera glycines
MNIPLTDAFLGRVKRKSENEIFNLPNEEENLLIEPGDAQMALDEHVRSKDRVTNDQTGENGQILKRAKVQ

SEQ ID NO: 156219 - protein, 115 aa, Heterodera glycines
MKCLHSSKSKTDDFGFNVCEVLNEDGTTQSNHQNNSAIFFYEFLPVMLLIQAALFYLPKWTRDKLLQNSCLLTNAVAQFVVVNALTGRGHRWWGIEVGKALLNGDEIKVEIEGND

SEQ ID NO: 156220 - protein, 82 aa, Heterodera glycines
MKRSNRLRKCNRRRAENFKAKVLPFGNQKFLVQIHYKIIRNHGPKLGVGLIAYLCLCVEIKIASNNGQLSIKDQRFLRPNPT

SEQ ID NO: 156221 - protein, 175 aa, Heterodera glycines
MLNTTKQSEADNWQTEGEGQQNDFLLAQSLENSISSEEEGLPYSRSTIHRRTNYGRRGKRMDRRTGERNPLSLEGNKIKLVDAENRKRQREKQLEKAKKELENVNKSYKEAQKKAKKLIKYLEKEGDGDKKKNTLRKVIEEIEKEKSFENEDQAQRFYVAAFDNWKQETLTTLVD

SEQ ID NO: 156222 - protein, 285 aa, Heterodera glycines
MKLTINQRLGQGQQAYLQMCRQIGLGETGEHFWIPPPFLVKSKEELIDYVYPNFQQLLGNDKELLNRLILAPHIDTCDEVNEIMMANVPGQVREYLSTDKPLDDRPLDIDEIESEVAALNRRTDSGMPPHSLRLKVGCVVVLLINKSDKEGLINGTRIVLEELGDDRLIGRVINSNAIGGQVRFFLERTRNVYEDKSPGGIKYERLQFPIKPAFAMTIQKGQGQTIRTVGIDLEREVFSHGQLYTAFSRATDGNNVRVHAPNREIDAQGRAKVLNIVATNMLKLQ

SEQ ID NO: 156223 - protein, 184 aa, Heterodera glycines
MPTELIEEKSQLKRKDVPNPEDLSYQIDARDEELSKSLPAAQTDGTLTSTECDANTSITTPSISADLWAAAQQLSTSLHNNNKTSAVAYGKTSNLEVNLPALPPIVCGQFVIALLELPERVFPIYVDEHSVPWHWLHAAKNEKQATDGHEKRLIGNESEEVRLFGKISHVLPLLSEETVLRLCH

SEQ ID NO: 156224 - protein, 266 aa, Heterodera glycines
MAGDEALSLLRRGNSFWEKGTAGREMVDASTTMSRRSSSASGSFYFKKKVPRATSTTDLAQMATTNTQKMAKTFNQQKEEGQKREEAQDRAGRAEIEQTIQRIVKEELRKVREVGKERQGETWRGGQGHAESAGNGESAREKEDEEAEEEDREHQQNIMRKQHNVTAKFRAKHSARERTAQTDGQTNGENGKKNSEKELVKKVQHKIEEGGTEGKRIRRRMTPRGTERAEERGEEEVGVTELHILEQGLYPPMPHNQQPIGRMAEF

SEQ ID NO: 156225 - protein, 253 aa, Heterodera glycines
MRVHFVPYSLMKVNPTAWLSQVTRHSAQHSVAKSRDLHWSLMAIGDHSQQIQLKSLRCLLDTGQVIPGGMAVVVKLCGAPRLCRADEVGEICLHAPSAAVCYHGLKGLSQNTFAVLPLGSDDKPIGPLEYVRSGLAGFLGPEGLIFTVGCKQSLLHVSGRVHSADDLIATVLAVEPMKFVYRGRIAVFSVSVLRDERVCIVCEQRAEISEEEAFNWMVRVLQACESIHQLGIYCLALVPPNHLPKAKATRPFK

SEQ ID NO: 156226 - protein, 423 aa, Heterodera glycines
MDKINWKLREIDQQKSKEKQLTEYLESGEFKFALQMSEKFTKLLPMVKRFKEKTMKVDEFMEELANIQQNLEEELQRNEQNEHLFNLITVIARNFGGVFVKIGDIHQIEICFDGAHKMLQKLYDLAIERLVKEKKGANGNDKQFECRGNDRNSFKAAIRELTGGNTAQSAKLLQYMDKFVPKREAPSHLINSFFTFATRLEAFLYGKSSGDANGEGEADRQAEEAKATKMAQPRHRIGAFIAATQCLGISATQMEESIFDSPIKVAKINSIEEKRAPLFGIIIEKPRAETEKQWIKAACKNNFKMLKQLEEHKFSIYDAIKLIRKIDQQIEFHHIKIEIPAEVIALVEQFGSEQKYLIGWHNYSKDVYKKIQKCQNARLLQKILARFIEKLRKIGIDPKAQMVSTDLSIGETIQQTIKFYCEA

SEQ ID NO: 156227 - protein, 32 aa, Heterodera glycines
MQAQSPVLTHFSSQISFKICEIFPAAPIGTAG

SEQ ID NO: 156228 - protein, 220 aa, Heterodera glycines
MSRYFALIIIPFLFDIILVVKSDIQEASFLHLKLCSNIDNSFNYSKSKDWQKLEEYVPNLLPYDKQKEFSEWEMCYESIQKFIIYCNFLQSSKNYYYNRDFYEYEFEFIALKPEFAYSNGDTMPMDDAMRQIVEAYKQLFERKKKNFKLNPFSKKAPPQVNFVNKENCANVIAWSAIHVKAVGKNHLAKENLQKVKNHLIENTPLALDFPPPIVQGINKW

SEQ ID NO: 156229 - protein, 23 aa, Heterodera glycines
MHFKISEDHLIQSWRELVKWRSS

SEQ ID NO: 156230 - protein, 26 aa, Heterodera glycines
TLCRPSCCDDQNDQPPYIIDKYRIFH

SEQ ID NO: 156231 - protein, 159 aa, Heterodera glycines
MSSLTTCSSTAEDEFSSDVFGQGGNAEVNDGGTTSVSADVNSRKTAIGDGGMKRKMTELFILTVVNITVTVALISFIAPIENGRVNAELESLKKFVGKMEQQHGNNDGQQTEFCAKMDTEKDMVKAIETKLNELVEQQKKEAIFIGVLKDRFGNGKNEN

SEQ ID NO: 156232 - protein, 58 aa, Heterodera glycines
MAEVSATDRPGLLHSVGSYQTDLMRFSLSSTAGLHSAIRRLRQHGRRRRCALDPQPLY

SEQ ID NO: 156233 - protein, 818 aa, Heterodera glycines
MVKASELTYRINEQHKKVRVTVSDQWRELTDELEKKVVGDYKLTWLCVLSFTIFSSSDPTAASTTTNVVNKSPRKRLRPSSVLQIGTSTTILILLLMIALVAIPVNAEQASESDLKAGTGIFLTLSDLLALLGIVVSLGAMAGFIAFHMSVLSKSRSFWATASSNHSIMEEIVANHTMTPRLTATVRSLINNRPVSCLADTGASVSLARMSLANELKCKIFPTNHTVRSASGHWINITAAAMVHIEIAGQKIFGEIKLIQDEVMSDRRDYQVILGCDLMAKLPPITFDFVQGLISISGKSVTMGERGDLLYSNVKVVARHHVDIQPGSYSMLTGKLDSQIQLDQVVTHSLDGRLSKMHVGMISTVAKPVEGCIKMILTNPTDAPINICAGMHVALANELKQSVDGPWLEEQSQVKEANVNPEITTNDPSFKINFAKSSATGENLNKLKKLCVEFADVFSKSQYDLGSCLVGEHDIITTTEDPITAKPRRTPFRFREEVRDHMQKWIKAGVMVNSDTPWISNIVLVQKKDGGLRPCIDFRKLNEITVPDHFPLPRLEVVLEKIGNCHWYTSLDLSSGYLQIRLTERASRKCGIITEDDVYQMTHMPFGLRNATSAFARVMAHVLSGLEDSVIAYVDDFLIYSKSPDFDLHLLALRKVFTRLRQFNLKVSPKKCVMASSKMEFLGFIINKDGYTPSLGKVEIIKDITAPTSLKEVRRFVGMASFFRKHIPGFSTITGPLTKLTKKDMPFSWDVEQHEAFNQIKKLLSEDPILRFPDYSKPFHIFTDASTVGQGGALMQKEQDNSAFHAVAYCSRTLSEAE

SEQ ID NO: 156234 - protein, 211 aa, Heterodera glycines
GGRRNRGGRGREEIRQRQNVQRVFGSPFPSNASWQHCAGSSPEFRGYTCGLWTIFHTITVHAYLDAVKGHFVNPLLPLRAIQGWVSTFFGCEHCRKHFMKMTTELFPMNEQRVNRLHDMVMYLWRAHNIVVNRLHDMVMYLWRAHNIVNARLHGDITEDPQFVKYQFPPLFLCSTCHSGGHFSRRQTRNFLLRFYGSIRPYHRTHSMAESR

SEQ ID NO: 156235 - protein, 47 aa, Heterodera glycines
MGDITLDIISMADQHRSWELFAGQIIPLIGTTNITKLHINSSHSRRC

SEQ ID NO: 156236 - protein, 183 aa, Heterodera glycines
GRNGIASAALLHGISSSSRPISVMLRSEDCARTPSGLKCSGSAGTILTLLPSDPVNSFLMRSAQDELLRAVRLRLSSITMVCVPKTENWLRSYTVSTVAVKRCPAAGSCHDDEIFLKPKTPPGRSLRVQKRLSASVFPLETSRALLVVRWPLSLRHTLGVQLFCCRMARQTIPPSDWSEMCHW

SEQ ID NO: 156237 - protein, 37 aa, Heterodera glycines
KLIEIDRLPELINLRGLRIHNSESSASERLSHVQKNE

SEQ ID NO: 156238 - protein, 325 aa, Heterodera glycines
MPKKYKKANKDKVGLALPPVPPPSVEPPAAAIQYEDLTSDEELDSKAAGGTATAHPVDQQMESLLALSPENNGAMLALSPDSVDRLLEDQNAGESVPITAESNEKALGSTVLNEEDEFFQANSGENDQMNVEIAKIVSPLETMGALIGVISQKDDELVEKGPRDSSEKANAGEMEVEGNEKALGSSVLSVDQAENENEKADKSENEQFSKENSRASDEEENFGGGKKMVVCQIREDGVIVIAFGQDERAGFVFVANDLLSEIWETLARSSDTALKLGDIIWVTNWRVLQLNESWDWISNSKRINAEAEATSIAQVTMSLRIRTSA

SEQ ID NO: 156239 - protein, 107 aa, Heterodera glycines
MRNFYPHRALILSHSAISGLSGDGRRTLQHWSDHYADLLMCHLRINHGNMGAAQRFAEMVHLIEALIFSAKREQDFLTYLAMVTEQGPFNVTLPAIFTPMLLYGRPK

SEQ ID NO: 156240 - protein, 230 aa, Heterodera glycines
MKFCLLFSLSVFLIVLININYVGSVDKKLEQKTFDEIFGEKWEEKEEEKRNELKKREIIGKFYKIKEKIKQKGRKFSKKEWNKIENKITKKLLTNRNKIYEWIKEFGLQKQIKKSYKSKTDEEKFEIVQKFIVMKNEFKQKRKYSTKEWEKNYAEIYKKIGVSISVIKKWKKQFGISKKIITKEEKMKIYCEIKKENPKMSDTEIAKMMKIDRTNISKWKKQFGEEINEQ

SEQ ID NO: 156241 - protein, 94 aa, Heterodera glycines
MPIIIYFSLNFQLAFLLFNIDIQGWDWLLYYNKLSPFPIILPSALNPIVSFCTINAYRIKFVSNIKCFGKSIKRLFRMKIGDQNAVSNIQMQQH

SEQ ID NO: 156242 - protein, 80 aa, Heterodera glycines
MFICFFPPADHAILDDKSVAEILGINLDDQIILAAYAINVTDIHLALSLYYLVIISTFAYIIIFGLAYCIKKFLDMKTKW

SEQ ID NO: 156243 - protein, 362 aa, Heterodera glycines
MSDQSVQNRSTDQSPQQEEAVSRPPEFTPSDHTEPTRTERMNGTKHQHCIDQQRLISNVPCLISTTDTDQKGADQQYYYHRNNNPDVVIQQQQHDDQLGNLDGILMKDDDSVECHAKLSTASSAIVFMPSTPSVIAASSLESCSGSGSPVRGGGCRSSPPSPSSPCSSTATIGPRFVRTPTTMSCGTGRMHLLPHQGSSQALLYVPEQRRVSTISGHSVRSCPNDICHTGLKEEEHADSGGQSSAALLARADDHQHAEEEEADEFQSLIRHHHHHRPRHHSPSSSVPECSSGRVAAAASASAAALCSFSRAQAASDAYCRVYGGGSSGVRGTDGTATAGDQMQQPNRLLAVIQDRNRKASPA

SEQ ID NO: 156244 - protein, 35 aa, Heterodera glycines
YCSSINIYLLIVFLKPSDRTIGAVTKIWTLLTSSG

SEQ ID NO: 156245 - protein, 950 aa, Heterodera glycines
MTQPAAVQPNLQQLIDVIAQQQTQINQLINVQRNNQPNPAIIQTIPSMPDVAIFEQCDEKHRITEWLERFTFAIDSCAPNAADDIKVKALMNKLSETAFSEYSKFVLPAKVTDFDFDETISKLEKLFAKPQSIFVDRFACLMATKDDGEEFQQFVNRHKRLLKDFQFDKLNEEQFKGLMLLTALKSSKDAVLRQRILAKLTKDGDAVKYDELIEDCINFLSTIHEAKLIEATSVSSRTVNAVKPNQRRERPKPQSKQGQPNATPTQLQCWRCGKTNHTHRECSHKSAKCPKCHYTGHLENQCEKVQEWRRKNFKVKKVGTLSIGMALKSINSASLIKIKVLLNGRIVKFILDSGAEINVIDEETYRLIGQPKIWECAERGRMFDGTEKSFIGKGEGHFEFQGVKVKENFYVAEKGSMNLLSIQTMDAFGLLDGIKAKINSPINLCSAGEELRGKTHAPIKSNKVAGTPNKDAEKEISQLKQEYTNVFKTELGLCTKVKAHLELNANARPIYRKARPVPYNAKEAVDGELDRWEKMGVIGKVEHTEWAAPILVVKKADGSARLCIDYSTGLNNALKDHQHPLPLPEDIFATLNGGQYFSQIDLRDAYLQVELDEASKKLCAIATHRGNYEVKRLPFGIKTAPGIFQSIMDQMLADFDFATAYLDDIIIVSKGQKEHSEHLKKMFSRFQEWGFRVKREKCSIFQDEIKYLGQIIDKNGRRPDPSKITAINEMPEPMDVSSLRSYLGMVNHYQQFIKNMRFVRKPLDDLLKKDAEWNWSDKCKNAFDKIKKILSSKLLLTHYDPQKEIVVAADASDQGIGAVISHKFPDGTMKAIAHASSALTPAEKNYSQIEKEALAIIFAVQKFHKMIYGRKFTLLTDHKPLLAIFGNKKGVRQCSANRLLRWSLILLAYDFNIEYVNTNDFGQADALSRLIAKGKDAEDRVIKILRSIRR

SEQ ID NO: 156246 - protein, 72 aa, Heterodera glycines
QQLTSENQMESEEAGEIVAGPALAEDDGMSSSESLSEDIRILTNDFFSEAPTSNSNGSAKREKQCATAKTST

SEQ ID NO: 156247 - protein, 72 aa, Heterodera glycines
SSLLFVLSLVRRRRRRFRQRWGTRRTQQPFWRSWKEKVKDEGKTEKVQRNKHLINCSNYYIYSILCILNKFL

SEQ ID NO: 156248 - protein, 108 aa, Heterodera glycines
PPKSVDSPFLLPLLSVSVGTFLCCWVPFFSLNIANALCIEMGADWCQIGFGPFFYSTWLGYMNSFMNPLIYTIFNAEFRRAFNAEFRRAFKSLLLGRRKCFCQTNLKV

SEQ ID NO: 156249 - protein, 163 aa, Heterodera glycines
MRFIILNVPNFENEIVHKKGGMVRRKEKFLGRDAPHLIFTLFCSIRGQRRLCSSTSNCPIKVLGLSTVKCGTNFGTVPPHAKKYAIIGLIEGFADFPIAKLPNVFLAFAQARLLQENALRWADERCRQNGIECSGENRRQMLGPILMAIRFPLMAQDEFLKII

SEQ ID NO: 156250 - protein, 675 aa, Heterodera glycines
MAANPTIDELTKLLAKQQKLVEQLLIAQQTNAAPAQSTQLPALSNVECFDLDDQSGKNIESWIDRFVLALDCSSSNIQDQLKVKLVLTKLSEGAYNEYSKFCLPKKPTEFDFSETSAQLKSLFAKPQSVWIDRYECLRAVKQDDEDFRAFVNRHKRLLRDFDFKKLNEEQFNCLMLLIALKSPKDAELRKRILGKLTADGDKAKYDNVVSDLQMFLSTIAEAKAIERPSHSNVLAINRRPFQKREPNKSPTQPTCWRCGGGHEPRCCPHAKATCRKCSKVGHLQNMCARHREWLSKHSRKPTQGKQMNALQLGGISVNALNQPSRLVEAPVDVNGKPIDFVFDPGAEITVIDEEAHLQIGRPRLIQCSESAKYHDGTECTLLGKGFATFTFGGHTHKGQFYVTKKGSLNLLGIDILDAFGLLDTFRAKVKMAMKVNVVQAEGKDRMKSQILTKKDTTLLDLQSNFPHVFAEGLGHCTKAKAHLELKADAVPVYCRPRPVPFNTRLIVEAELDRLLAQKVIRPIDHTRWAAPIVVVKKANGAARVCADFSTGLNNELLLNQHPLPLPEDIFSKLNGGRIFSQIDLKDAYLQVELDEKSKELCTIATHKGNFQYLRLPFGVKSAPGIFQSIMDSILADCQFAFAYLDDMIVVSRSHEEHRKHLNEVFKRIGNFGIPD

SEQ ID NO: 156251 - protein, 259 aa, Heterodera glycines
MAENLQQKIKDKIGTGYYSITSDGWQQPTKSPSLQSVTIHSVDENFVRSDFVLNVAPIYDAHTGENLAEHIEKCLINNGFSMEKLVMMVRDDAKNMIKTCRILEIESFQCVNHFLHLTICDVLKEPKLSDLIEKVREWVKECRTTKGAALFRKKQNEQGQKTTKLIMFSTETSIASSVIPTLKKIRDFLAFTPFHPSVQFLATSLANAIDRRVSNLAHNTALQIATILDPRFAYDENIWRKSLWADIEEELKNFAKSSP

SEQ ID NO: 156252 - protein, 513 aa, Heterodera glycines
MPSSNSFYVIVPSNTNVEGNRTNSFRVRLPRKLQFNSEWDVGLGVIIYPHSWPSLGTSEDQFVQIEWKIGENVQIPIPSSNVTNPVELWKSLYKLLEEGNKPFAVKVEGVQKKFTEAANTARQLGRAEYINKQQQQQRDKRNVNDDDDDDDKNEEELLNALLAGVDTLLDLYGATSGGLLEREKRAATSKVPLRNWDDTEEEYQKKLDKYFLRLRGRNLEHLEGLITEKLNAEIALMDDEERTILDQTKELGMTAWIKVFQSAYSACFLHFDNQLAYILGFNSTEFTEKETIAKFMPDMSGGVASFHVYAPDLIEPMMIGDVIAPVLRIVTIRGKPDEIIEEQFLSVQYHRVLVKEISEIFIEIRTSGGNLMPFQYAGATTPVPYSMVINVDPSEVVVQYGGYNVFRGVPYQRGSGIGSVFRSLLRYLIPIGKEIGTAIGRQGLESGNRVLSNVLEGRDLKESLVSEGKTGLKNLLEKAANNINAQKGQGFDFKRYTKRNDAREGVAIGKAKK

SEQ ID NO: 156253 - protein, 640 aa, Heterodera glycines
MGRENVVPIFLENGHWDGLKNYVCFFNRGRKFCVECECFYDQDVYHTMDCRARCYYCNRVGGMPCEKESGVKIECPKCRRYFYNWGCYSYHQGHQTCNLWKRCVICEKTYRINPKKDHECGETYCQLCSVSHDPKRGCYIMPIEEKEEKDVYRIVVWDSETSQDSIYKGDQKEHVINYISVRVTCTECCDDKNRTNCKICGEERIKDWSEAEGHEPTKDFVEWILTAFTNYDTYIFAHNAGRFDGHFVFNYLCRTGKNPLPLINGLKIYEFKVQNSKKHSRLIWRDSCLLMPVKLESLKATFNLDCEDKPFFPYYYNKKENYGVRLQHLPTMEDYSPGSMNKEKFIKFEKWYNENKETPFYLDEELKNYCRNDTEILLLSIIEFRRILINDITKGFDPLPRSCTNAGVAMNIFKAMFLLTEQLSIVPEKGYERCDRASVMAIKYLEWRSKRDGIEIRHAGNGREVKVGNYKLDGFIGNNGGRDKCIEVMGCYIHGCLNCYDPAAELIGGRTAQELNDETQERLMELRKTLDVEEVWGCQIEKELKKDEEMRDFFDDRGNEKGPIDPRMAYAGGRTGPMKLFAKSDEKKKISVYDIVSLYPSVNYGTAYPIGLPEIIIPKSDEINVNWTRPEDLKYKGLYK

SEQ ID NO: 156254 - protein, 129 aa, Heterodera glycines
MNPRFSNSRTRADRDLDLASDKTARLALSHPAPILYAMPCLPCIHSSPVRLCHATGAVRGLVQQHTAAGGRLSAGLCPPAGPAVDGRVNAAEPTEAGRVTDTTSPIQTVGNGTDQLRSHVLVQRKVDHL

SEQ ID NO: 156255 - protein, 129 aa, Heterodera glycines
SSENSASIEADHNNSKLRYADAIIPHDLVERHFLQNTWALWYLKGDRNKNWTDCLKKVSTFDTVEDFWALYNHIQPASGLSWNSDYYLFKEGIKPMWEDKGNLEGGRWLVQVNTRNTTQLLQPLLLLLY

SEQ ID NO: 156256 - protein, 87 aa, Heterodera glycines
MYWQEMMMCIIGEQFEKWSDHICGAVVNIRQKGDKVSLWTRDAKDDSANMQIGHILKAKLNIPDTENLRYEVHAEYSARTGSAVKSK

SEQ ID NO: 156257 - protein, 82 aa, Heterodera glycines
MAWHLKKSKAKKEKRRKMQLEKKCQSADEEKGKESAKTNTAKAKPKVGTTTDTQWRVEDVQESEKTDGEQFIAVNCGRGYIQ

SEQ ID NO: 156258 - protein, 110 aa, Heterodera glycines
MPCHLSKVRPFASVTDITHQHPFHAILSPAASSIHSSTNDGRYGRMREFTDEESNLCLLLNRVVDMQNSESNSDKCFTIPPARLRRAAVCNAFLYGLPEVLDSNLLIGNQ

SEQ ID NO: 156259 - protein, 65 aa, Heterodera glycines
QKGRDSGDNKKDSRRQTHFETESAKSIGKKTDGGCEPTFGRTKRHRNSSEETPVEEFGHHVEVQM

SEQ ID NO: 156260 - protein, 266 aa, Heterodera glycines
SYEAASAYITEFSSKTTLFVCPVPPTLDENGLKGYFLTFGDVRSVVVPHNPFTGEHRGFGFVDFANETSAKAAYAKRGLIWDGTPPMKKWVNVFDLPKSTNENSPSFRPSRRSENSSPTIHKQFFPDLVQQKASEFGKGRSQSMCRFLAKEEDDAYNGTSDRDQFEEGKRDNEWQQKGHHSQSEALNRAKVSIGAKRPLTGASSSSEDDSEVLVTREHVPRKGRTLFRAVDAMRCDSVGSAVSAQQHRSRSHKPKPGWNSVSGEGS

SEQ ID NO: 156261 - protein, 137 aa, Heterodera glycines
MPSSVELMRHLLSTGEHSDVHFLVGDGDAKEASLIKNKNFILFFNCNFINYPRFLKVLPAHQLILKSASDVFEAMFRFDAKKERPENVSGNCPDVVEIPDIEAEAFKIMLSFIYTDDLSDLNGDNAMAVLYAGGFNF

SEQ ID NO: 156262 - protein, 79 aa, Heterodera glycines
MLLFEFGFVELETCRNCVRFMIQVHSVGPMKNVVRMALNAPREIVVPYLVLHCSKFVFLISMRRILQNASVKILKSEIK

SEQ ID NO: 156263 - protein, 21 aa, Heterodera glycines
MAQSLVRLFYIVQLKNLHSFK

SEQ ID NO: 156264 - protein, 380 aa, Heterodera glycines
MNRRWICTDVWMDMFPFFDRLQLGLKLALLSPRFEFLVDKHFDGTSELPILKNIVLRKNKVTAVPELRVFIDNANYVPFPVPDHSLPKKIRFKHLRICYIDHSVIAFIRANQQMFDKGTNLEFFYVSWNETFFVQPIWNALIRHILPIFVPNIRQLKFPCADQLYCLLRFTSPKVLSDLNIHSIDAGRLFPNAIDSGDQLLDEICGDSDQPLAYSAGQILSEWLHIPAKDGQPKKLICWSDSSEIADLVNNFKKKFRRATTSSASYQIQFTVHVPTEIVPFQLVNERINEMLTLEKAENNDESMDEEDDDEWDERWIMKRCQIGETTAALNQNSGNLNNVSFTFYGNCIGPLSTPTEDEEAGQSAGKESTYCDMNGLIWK

SEQ ID NO: 156265 - protein, 101 aa, Heterodera glycines
AFLRANTSSTNYIIRLDVYESTPMEPFELINERTNEMLTLEKEEDEDENMDEEHDDDDDDGKYIGFLLKRWQIGKTVQWEDENLENLNNVDIRLYGEFDIG

SEQ ID NO: 156266 - protein, 95 aa, Heterodera glycines
MRCAVTAITSVLERTSAANAQSRAMQLLRALFAAEDNKGFSAKVTCCNCWLNDDDDDVVMDKNANFAGINEATNNDQDDDAFEQFANSQINRRGQ

SEQ ID NO: 156267 - protein, 133 aa, Heterodera glycines
MKNPTKTKRNFSIEMAGVKQEQQQKKQYELRKNMTMLDRAVVAVENARDAAAENDQQQASPEYFNEIAQRHVPGSKECWTRCKKTTSRPAFNYLFITQMEDKERISALEKQMLMVSVGLLICAGAVLFKHLKN

SEQ ID NO: 156268 - protein, 32 aa, Heterodera glycines
MDPSTFVRSQRDQPKRKHIFKIILHENRKFEI

SEQ ID NO: 156269 - protein, 44 aa, Heterodera glycines
MTAKRPRILPGKGLTYTEMSAELAGSKKFSKIKGSESLQILFSC

SEQ ID NO: 156270 - protein, 31 aa, Heterodera glycines
MNVFVLRDSRLENFFLPLIHSFIHSIQLYLY

SEQ ID NO: 156271 - protein, 253 aa, Heterodera glycines
MLNPAKLQQLWTTVFTPQNSNGSETLLTNNSFAQKKQMFPSTPGEAAGSHHHYRHSHHQQNSSLTTTPKQRHKRGEGRKEDEEKRDNKRHNNEEENEQDDEPNEEEDEEEQREGTRNCRGDGDEAAGDCERRRRTPDASPTTPFSEKQQQNVASSTVLEIKEEKQKDEGIEEKQNGGEREGTNGRKNGAKNKGNNGNLTRVQSPTTKDTDGGERRMKRAARNVAGLEQTGGAATDKSQSAQPKSEQRSVGGEG

SEQ ID NO: 156272 - protein, 60 aa, Heterodera glycines
MPLAVQMNVAMHETVLRARALISFHTRTMLREHYLNDPYPNPAKKKQLAEEANLTPMQGN

SEQ ID NO: 156273 - protein, 79 aa, Heterodera glycines
MSRKSRLLPWPRFFCSFDLGFLNKNPGPGKIHVAEKWPRPGSRKNPGLDPGPGRALMVNDSQNCETERDIVQPSVDRVI

SEQ ID NO: 156274 - protein, 194 aa, Heterodera glycines
FIHVNKKALNGVLRQLRTGQLRTVQLRTTIADDNCGPYNCVRQLRTTIADDNCGPYNCGPYNCGRQLRTTIADRTIADDNCGRQLRKTIADDNCGRQLRKTIADDNCGRQLRKTIADDNCGRQLRTTIADDNCVRQLRTTIADDNCGRQLRTTIADDNCVRQLRTTIADRTIADDNCGRQLRTTIADDNCGRQL

SEQ ID NO: 156275 - protein, 195 aa, Heterodera glycines
MLTDSFDDDPSLPTTDFDYLYGHAQQQQQFSTNDELEPDDSAAAQFGCGGTKRKRAFSFSSAPSASATNTMTTSTTTIMGLVNGGGGAGPSSAMVGGGGPTAAVVEKRPATKICRVCGDKAYSYNFNVITCESCKAFFRRNANKEKVLAPNRPNLNFVPKEIRCPFNEQCDINILSRRFCQRCRLQKCFNVGMKK

SEQ ID NO: 156276 - protein, 202 aa, Heterodera glycines
MSLLSAAIDEKLSYFLLMAFFLIIVVGLLQLMIKGIADKILMRFWRNNGKGKEEEKEELVEEKGRGEKGGRHEEEPILEENDWDEEEEEEKEEEEAEGEEFVGEEDEEEELVEENGRGEDEARRQEEALLEELEGERDEEEEEGEGNEREEFVGEENEEEEEKEDGMEAFLEELEGTTDEEEEEEEEFDNDEEEKRKTKNQL

SEQ ID NO: 156277 - protein, 79 aa, Heterodera glycines
MAFLKGVSLTSHRVFILYTFFSNTVRLLWTAICSQLTSEGPSAHSHGEKPFECTECGRRFAQISNLRVHLNRKKKCGKK

SEQ ID NO: 156278 - protein, 180 aa, Heterodera glycines
MPFSLCVTMLLICSNLALQKDQDLPSDDHPLIQHFHRILTATLAEERTVLEQRLRELAQQKQQQSSPSAILPTPTIDGNALKDNLRKELDLKLRVEKEEINKTVNHFEEQIMTKLRTLIEQMHSQKDVLEHEIDEVRKTQLELKKDVEDTGKPLLKKEKITQQLKEDGRTETIKVRNYWD

SEQ ID NO: 156279 - protein, 158 aa, Heterodera glycines
MAKIVGVGGRGGVGVATLKNMGGPALNRRLWLSGPVFYQLNYRSCPLQLPTLIDRIGSIVASTGPLIFLFGKLLLLLYLRRETRAGGNGTAQKMVKCFEPFSLKSKSLAIKLFKNKIVQRRKYVWLPELVLFTCQAILFYCNRFYFIFTSKFYLIMMT

SEQ ID NO: 156280 - protein, 50 aa, Heterodera glycines
LQIYWLKLHMRYISKFFDSVRRFDKDGFRFAISRSTSEIGLEFFRQLRAI

SEQ ID NO: 156281 - protein, 21 aa, Heterodera glycines
MATLICLGVPSFEVGTMNEWL

SEQ ID NO: 156282 - protein, 33 aa, Heterodera glycines
MLRYSAFLFGILFCIMSSICPPIWSNEINRCHF

SEQ ID NO: 156283 - protein, 23 aa, Heterodera glycines
MRHISDQLGNHGNAKRKSNPEMA

SEQ ID NO: 156284 - protein, 102 aa, Heterodera glycines
VLITHRAAITAVPYFLINRLNCVDLFDQHKHQQQEWAGMGSGMIVTRTLMGVAEGADELSTAPPPPSSSSHHLHQQHFKQWLLVGGGGGAGGEEVAEKAINK

SEQ ID NO: 156285 - protein, 181 aa, Heterodera glycines
MVEHDGGTNFEEEEGKQEDEEELDGRPAQKRPRYVAPVEEEEEEAGNGTSAGNCTAEVDELKAVIEGMKTELEAANEEVGELKAEMGKLSAENGTLKADIRSIKAKIGSMAIIIRGNREERNEMHEEMQEMKADMAELRAENANLKADFGTIKAGIGGMRQMCGEMKEEQGKIQRGNARDA

SEQ ID NO: 156286 - protein, 67 aa, Heterodera glycines
KWQKIAPNLPSNDATALQSFHALFRNYRTVALHELKQQWELQKSIANKAGRNVKETAKKVLVANIIN

SEQ ID NO: 156287 - protein, 811 aa, Heterodera glycines
MPKSRVQITEPFQNVGLDYMGPLQIKSFTEKCWIILFTCFSTRGIHLELVTSLSVQHFLNAFRRFISRKGTPKNIWSDNASQLKLASKVLPEVLKLKDILKDDSIKNYFEKENIKWIFSIELAPWQNGAIERLNQNVKSAMKKAIGRKLIEFDSFQTLICEIEALVNSRPITFIYDEINSYQILRPIDFILPHKNLCIPPILEENETNDPTYLPKPTYYDQTIELWKKTTKILDDYWKIWTEEYLPSLRERYKTENKNPKNCVKSFPEPNEVVIIHDETPRAMWKTGIIKNVIKGKDGIIRGANIELPSKHVINRPLKLLYPLEINKNDCEENETITNLIKTTEHKQIGTNRKRKQSVLSSPKLSKVFLNTLTFLLLFMQLLPCLSHLYECPKTNEKWRTKYTTFCVENGFTIRQNKLTMEFCYRKIFCHKQHVIKNHPPYCGPQCKCPDWTIFCSFASYHRIKREITDQENIQNIISFFKPNVCSFNKTEKCSLMDKNIFSSIMLYDNSIHSVKSLNLLHTQANSRIDYRCLGEGNLTIGTQKFCQEHECTDTHGTKFCFYEPHEKTYLVKSDREIIPIKAWGSIERIFYLANDTLMDELKRKKREFDPFENEQISAECTKGGIKINPTHTTTELEILVDKYFILKRSPQSEEFISLPTKITMNEYKPVIKFMKGTSVSEYKNLTCPPSPICELIICRFCMEYIRNPQCIGQMHWALILIMIMLTLYVITLSLKIIKILYRFTIFIFLSVYNCGRKRKLQKIKIIKRKQFIYLIMIRLLLNSPTIFSCDEVTNMVAGTNDCAIDQNGKIE

SEQ ID NO: 156288 - protein, 15 aa, Heterodera glycines
MFERRMVIDIPEFYV

SEQ ID NO: 156289 - protein, 50 aa, Heterodera glycines
MDANENMQTEDNKKGKVTNDERNLVVSFIQFLRHKVSSNQCTDEQIEGLE

SEQ ID NO: 156290 - protein, 55 aa, Heterodera glycines
MLRVGEALARSMQESNPDLVEQLRRQFGGEDGNDGGAGAGGNQNNNNQQPPPGSV

SEQ ID NO: 156291 - protein, 130 aa, Heterodera glycines
MTALRYDAAKVVITEQNQEVVGLSPCFLARLFGFVFSRGVVRLVVVRGVLGPFGALFFLRVPWLSSSEFGLASARRFPGSGCCRCAVRRLRLRFRRVLRPVRVRLSFLAAALALRPFPSARRVRCFSPPR

SEQ ID NO: 156292 - protein, 91 aa, Heterodera glycines
MTEQHFGINCVDLELPMDISQFTVNVSATLFDLSFSITRSFPINIHAVETAKKRIPIFLIDFGNNPDQSALREKSDGIEMLTDMDKKVNQF

SEQ ID NO: 156293 - protein, 299 aa, Heterodera glycines
MSKAAIAGLKLMLSTGEYADVHFLAGDGDAKELVPAHKLILKFASDVLVPAHKLILKFASDVFEAMFRFDVSANCPVVEVPDVEAAAFKVMLSFIYTADLSELNGDNAMAVLYAAKKYNIPDLIDRSLQKKYNIPDLIDRSLQIPFSKLRNVFFALAQARLFDLENYVNNNYVNNCLAYIDNNADILIKSDAFLQIDQKMLCEILERDELKIREVKLFFSALRWTDQKCRENGIECSAENRRQMLGPALFKIRFPLFSKEDFSGKIVTSGILTAEEVVNLLLHMLVGPKISENFVKVQK

SEQ ID NO: 156294 - protein, 19 aa, Heterodera glycines
GPGSRSRVLKSSGPGPGRT

SEQ ID NO: 156295 - protein, 78 aa, Heterodera glycines
MKKSVTFAVPEQKEINQPNAEVEPPKSDTTKKRKVEDRELWKLAKGKFMLATYLCADDWDRLFHNQQKVARLEDGRFA

SEQ ID NO: 156296 - protein, 79 aa, Heterodera glycines
MEKEKVELQTDMLRKEMEKHFRRQMLEMEERLDQKWTSLVDKERQRAQRIATQSSAVIGQLMMTKGDEEKENEKEGRKK

SEQ ID NO: 156297 - protein, 55 aa, Heterodera glycines
LHLVHVKDGLSLQEAVDASDGLAVIGIFYHIGDDGTSMANLESGLKRVAEKGIFF

SEQ ID NO: 156298 - protein, 93 aa, Heterodera glycines
MLKLKCRLQFTDHILASGEEQLKRMVSEADFLKIKLSSEQKLFEIGPNGLHEYQTVNQIQKELENVLYSKENVSAITIKNTVTMFEIMEKFAI

SEQ ID NO: 156299 - protein, 116 aa, Heterodera glycines
MSTIDVEETIKRIQSQKGVTGVIIMDNIGRAIRSTFDDDTTAHHAALLQQLCERSKNVVREMDTSNDLSFMRLRTKKNEIMIAPDKGMRSSFPLFGAFKFANFKFGCVKKKSPTNL

SEQ ID NO: 156300 - protein, 291 aa, Heterodera glycines
HFYHWDSIHQHSNQRDSIHQHSNHWDSTHQHFNRQHLTLQHFYHWDSIHQHSNQRDSIHQHSNHWDSTHQHFNRQHLTLQYFNQRDSIHQHSNQPFLSLGLNPPTFQSTGLNPPTFQSLGLNPPTFQSPTLNPPVFQSLGLNPPTFQLTGLNPPTFQSLGLNPPTFQSPTLNPPAFQSLGLNPPTFQSTHWDSILRHSNQRDSTHHHSNRWNLTSPDSSVSQPPRLNSPAFQSLGLNPPTFQSTGLNPPAFQSLGLNPPTFQSLGLILLHFNHRNSTLQHFNHWDSILRHF

SEQ ID NO: 156301 - protein, 55 aa, Heterodera glycines
MFALSTFIFNYGVRNKLLINTANNHARVRILITLANNELQVVDLKKRKNTSINSN

SEQ ID NO: 156302 - protein, 215 aa, Heterodera glycines
MITAWAQNGEIEWPRVLGENPNLWGKEQKVLADAKATEDKQFQDPKFEQNFKAMNAIGMAHRGAYHYFRGEPGSAGALEQVRHFLNTSIRAGFNVHKDFAVVNVEIYKNEGADKDQFTGKLLNFVKLLKSKVPNLFIHTSVDHWSALINNDHDEFFAQFPLSVIDYDSQQSPALPRPWKVWQRWLHTMTVPVNGISGNVWLSRVNCSVKMMPNIF

SEQ ID NO: 156303 - protein, 58 aa, Heterodera glycines
MALPLTHKVAPFSHMTEYIKNFTMNLKMGQLKNTKFKEKEKNVRKIYLTCPISAKMLS

SEQ ID NO: 156304 - protein, 37 aa, Heterodera glycines
MTFRCAHLAKQARPGLESRPGFFCAWVFLDLLRKSRS

SEQ ID NO: 156305 - protein, 141 aa, Heterodera glycines
MHYPTHVKLPQIDRRIGKVEDAFHEHSASSDCHLGPIAAEAAQLEERLVHQMLANHWQIVESVEVLALSSFITREKICSSTAFFSVTFDEKNLQIGMAPTLRGEKSRSFSGSARPESKSGSGWTKSVRVGVRSFSFLPLLI

SEQ ID NO: 156306 - protein, 111 aa, Heterodera glycines
MIFVVGIFRGIWQCSDGEPSDGDDGEAVQRHSDEAVLDALRHQFAMLRLDELRERLRRRNCIAGPMNAGNRRIYEAKLAHLETRQWHGKGGQQQQQRDPNAIKRNKRGGNF

SEQ ID NO: 156307 - protein, 80 aa, Heterodera glycines
MPSGHWTIWRPSPCAYESTAVFCQCFAVEPFETAQGKAKRRIGDGGLSVALRGVGSSKVGQIVSAPSGSRIFADQSTFPR

SEQ ID NO: 156308 - protein, 18 aa, Heterodera glycines
MAYGNCVKRADEKAKLTC

SEQ ID NO: 156309 - protein, 180 aa, Heterodera glycines
VRLALAMLRPAKRLLTCILVPLLLSPLPLFFRTKASCAYVVMIMACFWLTEALPLAVTALVPVFAFPLLSIDTASRVSSVYLSDSNFVFFGSMIMAVDSNFVFFGSMIMAVAVESSRLHERIALNVLLLTGPNPRWLMLGFQLALMLGFQLATAFLSMWISNTATTIMQVPIVVAVIKEL

SEQ ID NO: 156310 - protein, 78 aa, Heterodera glycines
MYTNKIAINFFFDLKLRDLAKPDRTFKVEKPGKTGKKPEISRSRSKLVKTRTSVLSCPCFGPGPDQHYLKLMLPLRDM

SEQ ID NO: 156311 - protein, 43 aa, Heterodera glycines
MTMRVNINVMLMKDMGEYCSKLLTFSLDNEACTEGNSDIKRRT

SEQ ID NO: 156312 - protein, 85 aa, Heterodera glycines
MVEDRPYIKIISGLETSLFCDFGKKFAFVKHYFVELKRQVNMEYQFITEASEMLKKMEEAYENWMGICGTKCRIGNPKVADDVQM

SEQ ID NO: 156313 - protein, 114 aa, Heterodera glycines
MRWEQNHWHGDWDEQMRTHPETIYPDYDILVNSKPYFLLNATLISRFPKPLNGQQFFVWLDAGYDDFARDDTKIPIRFQHHIRWMVRCLQTFAQSVTVGAAPDEIRYSLNAHCT

SEQ ID NO: 156314 - protein, 59 aa, Heterodera glycines
MSRVRPGPGSRPGFFLDPGPGFDNLDFSWTWIFLDFCPGNPGPDVPKQLIEFFKHFFDF

SEQ ID NO: 156315 - protein, 109 aa, Heterodera glycines
MDCPKKVKIPPELILELANFLHYNFRWFGIRISLFFDHFLAKNQRKIRRNKIKQLFEEIRAQEKAVADAKKLLEDAAVRFGEATARLKDLKQRYKKLVSFLYFDFYYSD

SEQ ID NO: 156316 - protein, 195 aa, Heterodera glycines
VCGLKWSPNKEYLASGGNDNQLLVWSLRRSEPIQTYTEHNAAVKALAWSPHHPSILVSGGGTADRSLRFWNTMTGQAMQCVETGSQVCNVAWSKHSSELVVCNVAWSKHSSELVSTHGYSYNQVILWKYPSMQPITKLSGHQSRVLYLAMSAMSPDGESIVTGAGDETLRFWHVFSKSSNLKTVRSRLNLHSCIR

SEQ ID NO: 156317 - protein, 190 aa, Heterodera glycines
YHFPFCDSQRLLKSPRKPQRKVPKNPYKVLDAPELQDDFYLNLVDWSSQNMLSVGLNTCVYLWSACNSQVVKLCDLSSENNESVTSVHWSERGDLLAVGTQKGFLQIWDTHAQKMLHNLKIHDMRIGCLAWNENVICSGSRDRFILHRDLRDIQRSEKRMSAHRQEVFREHTYILTMNSKQRHHNFWGGG

SEQ ID NO: 156318 - protein, 322 aa, Heterodera glycines
MTRIVTGPTTATHKAWIVLITCLATRAVYLEPVLDLTASSFLLILRRFTCRRGVPTRILTDNGTQFVLASKVSAALEAGRVPTSALDRFLAREAIHWRFIPQLSPWQGGVYERLVALVKSCFKRELGRVMLSWEELVTYTAEVEAVLNQRPLCHVSEEPDGILPLRPIDFLLPRAKLGIAFTADTDLDEFRISSTNQRDALIQRWHSVSSSIDHFWNRWQKEYLLMLRQRLQWKFKKQRNQIAREPMEGEVVLISEEKLPRNCWPMGRIVELQRSHGEIRNAKIRLATGKVLSRPLNRLYPLEVASPAGQDESHQQLDKPAA

SEQ ID NO: 156319 - protein, 97 aa, Heterodera glycines
MTNEYKQKGKYSQKEWNKNYAEICVLFFHIFLNICSTPMAPGGKTYARLKNAKGNAAAPSSSVSVRNPTRRAPSTRKAVAQQPQQRKLEKRKAVNLC

SEQ ID NO: 156320 - protein, 171 aa, Heterodera glycines
MRCTGSSSMAATRTTSPIWSEPVTRHLVHTCAVCAKKYEFVLVRFPDTGVETPWHPVLQKHRNIRDGWTLLDLAMLEPDTIYAFDAAWQQCVAPDEAIGGNENDDGGDDENGRGNNSGGRNKKKGGQRRGGGGGQKDGGGSKDGVRRTKEEAKKKQEREETKRKRKKQEKN

SEQ ID NO: 156321 - protein, 64 aa, Heterodera glycines
MKICLTKIKKAQKFNDYETLKFGQFFLLHFTQNTLNSLKRLCLTLQTKVEFSFSNSAIFCIKML

SEQ ID NO: 156322 - protein, 28 aa, Heterodera glycines
KETPPSAAGDVVAVPSERVVDEQQKEDE

SEQ ID NO: 156323 - protein, 78 aa, Heterodera glycines
MRMAFMFGWMTDVRATKIKLTVDNGMQQNLSTVQWHRRRTKETVQSQLVQLGSMMTYLYSIKNKLKANDDEKRDGIVN

SEQ ID NO: 156324 - protein, 192 aa, Heterodera glycines
MSISREHTKEDEIEIRLLTNSLWVHRLVRTSKPCTLFEFKNELYKVLWTRAEGYESVAEIANELYYRNASFQDLNRKLAGLPTEAELRMSARTAAKRARKSKQICGEIISYEIDVGSDNDDELNEVTEFIGDDGDEWTEGREDGDSSGGSVFAENIAIVEKTNHHNEKRKRDNEKEYALKMGKCFSSDFYEI

SEQ ID NO: 156325 - protein, 53 aa, Heterodera glycines
MFEFIYLFLIFPIFCGGMQHYSPSSFKGGIINKIIRIPYSPARNSETLPTQPY

SEQ ID NO: 156326 - protein, 195 aa, Heterodera glycines
MKLLCRHFSTIAHLFALSFSILAISSLNFRPMTMPRHRMDKRWPNGCSLHTQTMCQRCWLQMHDVNLASKLDAFKAAFSNASSPVNFIAVIWFPSSFAASVVPFDLINELTREQLALKGTEFSRCFLLVRCPIARDASKWSKWEKEAINWRIGDQWNRIDIQINDQDGIEDGSANAFSKIQNKFEKRMLLFQIMF

SEQ ID NO: 156327 - protein, 112 aa, Heterodera glycines
MCKPTSKSLNLPPLSVFLDWVCFDVWMDIFPLFDHAQLGLKLALISPRFNSLVDKHFDGKRELTIWGSVIVSKDSDAAVAKLFVFIGANFVGFPLPDQSLPSKIRFNQLEIE

SEQ ID NO: 156328 - protein, 27 aa, Heterodera glycines
MRGAVQTFVCLLDGEFALCKAGGDREH

SEQ ID NO: 156329 - protein, 69 aa, Heterodera glycines
IDRRSAQLNSRRKPGTVTVLMLLNALTRKKQFRILVSLIMLILSSHQHMTLSNASFFAFINGELDQTGS

SEQ ID NO: 156330 - protein, 301 aa, Heterodera glycines
MDSAADSIRQLQRAVREQQQMIFLLRSQIVDQRAVLLQNMTRIESTEGYLANSRGNQRFSPRYSPMAGVELSLLGRRLEERERRQQSRLESNVAGPSTASNGGDDERENGPVLSAVIEGHMNRSRMRLIRDEMVHRAVQQQLEHQHHLLLQQAQQQQQREERERQQHFDQQMEEAELLHEQLQAAEQENDENIEPQPPQQQPQPQPLIRHPQLQFERNVRLQLRESQRFERGVASLVLVPPAQLYWETECIICTSNRAHFYSRNCGHIYLCSTCAVNAVIHKIATCMLCRVRIDGIYPFVR

SEQ ID NO: 156331 - protein, 119 aa, Heterodera glycines
MLCKCGECFECEDEKRRLKRNRELNTRKEQIKNCTGNHLAPAMMDLKRRNMELFKKAYRPVKGVINKITGGPWNVECEVCHETFTYFMVEWENSRTDFSWGPGRTMVEADNIVKIFEIL

SEQ ID NO: 156332 - protein, 142 aa, Heterodera glycines
MQWIKFNCTLCPIGLHCFYPRKYAKPVLCAHPSVRNITDFLSTGQLDEAATTTTTTTALPTTAEVSAAAECAPPPAHLTAWIAVCTALVALLVIAEAAGQRRADGTDEEPVYDEVPLDSDIAVEMRDGENGEEDEEDDDSDF

SEQ ID NO: 156333 - protein, 192 aa, Heterodera glycines
MVTKEGITLWCTRIEKAQFVPFDVVYELPGHCFFRVKNKARVFSVPYSELSSSDRCAQPLPPPPPPPPMTTAKHQRTPDDEEEKNLRRKAKVALDLVEAGLAADAMMQDGTRWKKAKTAINVLANLLLAESLTDVSPTFDQQQQQQQLSSKEEEKEECTNSSSAAVTTESASDADVMDDFVNSIQAATSNMQ

SEQ ID NO: 156334 - protein, 50 aa, Heterodera glycines
MGKERNANGVFTGQSKGILTTAGMAYKDQLSWRGEELIDQRASKGGSLGI

SEQ ID NO: 156335 - protein, 148 aa, Heterodera glycines
MRLSTSQRRSSPSDDQNRSLAVGFGFAITALFSADISQNFSSGLKTDNGFIAGISTITHCTYDFDKLKLLTDDLQKEQPQLKVLFAYSGKDHLIETEISEEFSRALGGPILISTTNPKEEDSELLAKFNQLTAGEHGQNRLSILFTKE

SEQ ID NO: 156336 - protein, 278 aa, Heterodera glycines
MFNLIVLLTIASQVIAERVTILSDTQLFDDKYLTMPKSSVNERQFGFDRSRLCTINRNLISGWSLSIQEINSIEKSGPTNVKLYQDFRQLKPRACFYYNDHSYLIFQNEKTNETSITRGSQEMVVRNFPGGDLRFDHIDGRLFVIRDDRIDEIDLRTIENLWTKHNETEIISKPIGSMPSAYTDFLINEGQIYLIKEKKIYKDRFDSNEILPKYVSDTDSEFFNFVVFKEFEKIRVSSSNPWVYFLSILDLVVVVICISVLRILKIKRKGKNSSYGGE

SEQ ID NO: 156337 - protein, 141 aa, Heterodera glycines
MTTLKKIDTASEDGLEGGLSLFDIPPTNVAINKSNNQFCDFNKTFLYLSTSIERKDKSNWIPITKDSEADQHVGVESYDSGIYYAFRAYMMNELGFSEDVKKGLCEASCYYVDDVDQDDYTNSGFKNRASRFADGAKCETM

SEQ ID NO: 156338 - protein, 41 aa, Heterodera glycines
MGAELERLAAQSAGGVDLFGGTVLFRISAVWPLDASAKKKT

SEQ ID NO: 156339 - protein, 152 aa, Heterodera glycines
MSGFSAKKELNRFQNQLKMAFPLAIPILLKFTKIWDQARSIIPNKQHQVFIPPYFVKQNASARVEQAVPMSALVTVGICLAVLLALLGLWLLISAITELSSIRRRRRRRRSSDQRQQQQQQQQQQQQQQQQQRTQRQNDEEIIGRGKALEEE

SEQ ID NO: 156340 - protein, 87 aa, Heterodera glycines
MTYALIVENDNVSDYLLNNLLDYLKNSVNNKNKSFSYMTCNDSGYQAISFDKHTHLAKVNEENCTGCTLCHSVCPIPGKTQDSGAAF

SEQ ID NO: 156341 - protein, 226 aa, Heterodera glycines
CRTGKSEINIKYIKLFLGKDLVTNVSPRIVRGTTSGPIFGPGQGSFLNIELISEKSAEYWLTCVKELKRDFSQKIVIASIMASFNQQDWEFLASRSEEAGADALELQDWEFLASRSEEAGADALELNLSCPHGMGERGMGLACGQNPEMVKQISEWVRSAVKIPFFVKMTIPFFVKMTPNITDVRVLAQAARDGGADGVTATNTVSGLMGLGSDGTAWPNVGKAKF

SEQ ID NO: 156342 - protein, 25 aa, Heterodera glycines
MINPSNISNHERTFMSEIRKYQYCF

SEQ ID NO: 156343 - protein, 99 aa, Heterodera glycines
MKKSSDDSEVAESSSNEAIWKQQIAQYVKIADSDENYEYKELLNEALIEKGKEREGNRAKIELARKAFDNLLKSMTETAKMQSGEGFGKNKPVLRWLFL

SEQ ID NO: 156344 - protein, 342 aa, Heterodera glycines
MNANKEHAHKLLHQQFKKGEKAAPAARKVNEFLGADVISPRQAQKWFQQFRAGRNSTKRKLGSGRPSTVDKNVLAQRLRRHPESSCAELSVGCHKTTTWRWLRKSGRRPMRSKWVAHRLTDQQKQRRLNLCLSNIARHRRGYVLNRLVTCDESYICYDGTAQKIVWRKKEEDPILVPRPNLHQKKRMLCIFWSVHGPLYWELLAPGTILDSNRYINQLRAVDIAYRIRRQQGQFDGPLLFHHDNAPPHRSHLTTQYISQTLNWNVLPHPPYSPDLAPSDYHLFLSLKNFLRGRRFTEDAEVEEAVGQYLTSKIGTDFFRRGIRKLPSRWRKVVRVQGNYFVE

SEQ ID NO: 156345 - protein, 67 aa, Heterodera glycines
ANFVTSSTQISKNFSRRRLSAPPDLHFPLFLQVFCLKTAKIWSFLVKKCSCYPAVEKKLLVNSKKKK

SEQ ID NO: 156346 - protein, 386 aa, Heterodera glycines
MLTTKFFISHYKKAPFFMQRPTIYEYYQQKGLRCIALRYFFSLFRFAFVVFFSTFLLQCVDYGVIFNTRNATFDGIPLPEKKQIQVLRSIIGSFRLTLLSDNPLVKIALLLALLFWVGQFARICCRLVHDNPLVKIALLLALLFWVGQFARICCRLVHLCETRNFFATQLQINDSDLQNLSWNDVVHNLCRAQERIHLIVNRDSISSLDIYQRILRHRNYFVALVHKSLLPPQIRLPSLLPPQIRLPFVGSVHYLSSGLRFNIEWLLFWGPWSPWKSSYALKDEFKERDNLERIARNMQMNLLVMSVVNLVRNMQMNLLVMSVVNLVFLPFVVVYQVLFSFFSYSEHFQRDRHILGMRKYSNYGRYNLLFPGEIFKNFHFRGGGGG

SEQ ID NO: 156347 - protein, 102 aa, Heterodera glycines
MVALGRGHRHVLRGRRTEAIGRQNGGGRDSALLQRLFHLVEGRVGRRLEQREGLRVQNGRSVGIGTVAAIFVRPTGDVNLMRNLQTKQWHYQWGEKPNERKD

SEQ ID NO: 156348 - protein, 432 aa, Heterodera glycines
MDSELDARLNRSYEFAVRYTDQFVSTQSKIIAKNIAFVAAAVFVVLCSLTAYDEDTLKIEHVTTLITISGAIVLACRVFIPNEHLVFCQHQLMRQIVANIHYAPKSWLQKAHSMEIYTEFTQIFRLKAELLVEELLSPLFTPFILYFYIRPRMMEIVEFFHKCTVRVDGLGDVCSFAQMDICRDGEIRLMSLNNESVVVHDSSNNAAKQKRSGNSYGKVELSLLNFAVQHPDWTPPKECAEFIDNVKALVSHEIYIASRSYENGGDGANANTSSVLDAQTLALLQASTHASLHQMEQSLQQCAVPSSAILSSDCLRPSPSQNMAMSTAQGDHDEVDELYQNESNFRALEMSMHALLINQMLFANSFASPALRSSRHHPFGYGSIPFGSVSRRGPVDSIVDSNIFGVPAGASQIQLMDELENEFDPLSNNRRV

SEQ ID NO: 156349 - protein, 251 aa, Heterodera glycines
CAIATSDDVEIVRLALLWTVSLFLLRPAFFRSSVCVNEFFCRLAEIYLIGPEVFLYDDQIRNCVSILVNDFLIDARKRGPLALRLRQPIAFLDQFMPFFEDLLQRYENFSAGDDNFALLLLIGTYLNSSRLDGLLMAQTLWSPKRDVVRQMILSEEKAGPFLPFGFANAFSVESQGNGDDTRQKTLINEEIVKLMANYARALKEGAVVKERNEATRAIAIAEIKEFIGRNEANGDNAELLNDLRETISKIS

SEQ ID NO: 156350 - protein, 54 aa, Heterodera glycines
MELINRKLICPYSKDIELAIHGAALFKGGLGKLVASRNVAGRILDHSFLPSQPY

SEQ ID NO: 156351 - protein, 96 aa, Heterodera glycines
MTVTFFSMTVTSFSMTVTFFSMTVAFFSTTATFFSMIGDAFFNRRRLFHGGPLPFQEVAFGSRDFKQSQKRMFFTWLAIRVPWDREFLTKPGLAGT

SEQ ID NO: 156352 - protein, 26 aa, Heterodera glycines
IMSENTGFQKQLLEMVKALREKVAVD

SEQ ID NO: 156353 - protein, 224 aa, Heterodera glycines
MGPNVPPFGGHVYLKGFFFTDHCHLDYTKQPIDQPFYFHIPFRSDCQASVPQITVEKYIYIHHRLFVTNRDKAYAVNCFYHEAKGLFERKLEVGDLSLFDVNGTKEAPLCTYEVLKDGEPIRYANVGDVLVHRWSCDTALFIKNSSNLFFGPAQMCHRFIIVGPTDLHQPTEFLLYTNKPAICELTPLPSEGGAAMPVVEASRDHPPTMARLILLNDPLRVSNC

SEQ ID NO: 156354 - protein, 118 aa, Heterodera glycines
MTKEAAATATDGQIKFLREKLHIIKGRKSLDSTNIKPKYIPNENETEDRSLNLLTASTNAKSKQQIKPNNDGKGSSSSKRWPNNFIKVEKFFKILSKMIAATTRKYQFFDVKVFKIRQ

SEQ ID NO: 156355 - protein, 173 aa, Heterodera glycines
METFEFQSCHKLLLNGSFLVGSELEGSDLDLICVVSNKIIVQNFYGSDDGTLFTILKKKLANAKVNCISGRIQLLRIELESFEIDLSFVPVPEKYLEQNDGGDLSREKIIEEIKYESGIYSLAGEQKIIILNENSKFRLSIGTFSTLNFAGQKCICEFIENRQSLGKKSVKYY

SEQ ID NO: 156356 - protein, 25 aa, Heterodera glycines
MIRLSLDGPKKGYGQSPFKEGTLTQ

SEQ ID NO: 156357 - protein, 84 aa, Heterodera glycines
FLCLLAGIGRNIELRAKALPGVISTLSIPLRTKSLGPGFGQNHPVLPVRVVPVPRIPSCPSRAVARALSSPWAGEGGRDRWMGN

SEQ ID NO: 156358 - protein, 95 aa, Heterodera glycines
MPDGHFENAKQRWERRFLIFKGANLCLFESPPLNADELEKCLSMYKVYETALRTAIKRFDRREHVFMLATVRGVPTNDGIAVPGISYAFLASSWH

SEQ ID NO: 156359 - protein, 22 aa, Heterodera glycines
MSRSHALYDFTVHPCGQVYFMH

SEQ ID NO: 156360 - protein, 94 aa, Heterodera glycines
MAPYRIVAYDLECTTNTILDENSRRKETIHKPNFVSVRFTCSLCDGETKNCEICGTGPRHLKWCSKDGVKPLNCFIKWIINFEKYDTYAYAHFS

SEQ ID NO: 156361 - protein, 55 aa, Heterodera glycines
MAKEAERTVPYFVMGFFFMFGFAVYTLLCGAFIYGVMDWAKPLLALAISKNVCLT

SEQ ID NO: 156362 - protein, 77 aa, Heterodera glycines
ICGIGVNDAFLMAHSWNRLAHQKLAAPKRIGLVFEEVGPSITITTLTNVVTFAIGALTPTPGLSCDCPPKRRRMCEE

SEQ ID NO: 156363 - protein, 74 aa, Heterodera glycines
RRHQEYVCVDGRTHFWSVEYREYVDAYAHIYRITLIYHSHVDNVGIKNKYVLMDVRISGALNIVSKLMRTHAST

SEQ ID NO: 156364 - protein, 112 aa, Heterodera glycines
VPQRLVLVPNDLARFRSSSIYASGSTVARMSCTCCSETWRSAETLSSTCALLSCEPPTCALLFEISRCAVTTSPFSTHTQPRPTAASWELRYFFFGNLVDIIKDFRYECITT

SEQ ID NO: 156365 - protein, 838 aa, Heterodera glycines
MDSFPIIDHVDLQFRHPFTMIVSGSTGSGKSEWVMRLLHNLEKMISTPIERVIYGYGELNTNILNLQRTGKIGNVPVTVHSGVPSAEQSLATLSPSDGSPIGLVRARIKQIKNDDAINEAERAVKYEQEIKRLNKLKKDEDERPVGVKLENLSDVVDAMPKPFNIKRPIVVATRRHLKVGRARKENVEQLEDDDDEDDYETPRASSTNKRPTQMEILNLIYKNAQSLGVSEEGQVLRAGGRPFITSSVDDIVSHLLNKDKRGQKEPTAFKEFIERAKQNRQLTTQRTYTLHRQAKRRYRRLPTLAPGLHTEWQADLAIFDRIAKQNRGYKYLLVCIDTLSRQVFVEPVKTKTSANMINAFEQIFKRSKYIPWKVLTDQGKEFTARAVQQFFRTKDVEHFCMLTSPQFHAGMAERANRSIKERLYRYFTEHNTYKWIGVVQDLVYAINHSQNSSIGMCPADVNFKNAEALRQKLHDAASNVLRHQPKYRVGDRVRIEKYKHVFQKGYLPRFSNELFTVVEIEWQTGNMVRIELPSSNVTNPHELSKNLYRLLADGSDPLAKKVRSTQNSFMLATNKARRWAREEYIRRKTKEKLGVRDEELLLQALMTDTGPLVGLNTVTQGLLAREKHAETSNIALRTPTDDNDSYQKKLDDYFSKLSEKNLSIVDELGMIKLNAEIKNLTEEERVILEATKEMGTEAWIQAYREIRLVCQFNYDISRNRFVLNTDPRYVKKVEISPQLAYILGFNNTEFTQPKKEARFMPDMSGGVSSFHVYTPDLIEPMMIGDVTAPVLRIVTIRGDPDQEVSEILIEIRTNSGSLMPFQYGTCTLTLNFRKMSYF

SEQ ID NO: 156366 - protein, 345 aa, Heterodera glycines
MDLILATDWIHNAYPEMDQQDHNKEPPKRDQQDHNKETPKNDQEDEEETKEPSWISLIDEEQKQDQFTPIYDEPPRASTPKTCACAERPRPIPLVEHLCKRFNCSAHELHVLFRNLEKRRDIVEHLRSAQLRTAHLRPFVRNFPVRCNDLSILDAHSAPAYRGFLGITMKISNCTVIFKINSLNTQQFLTIAQRGINTEYNPRRFHAIIMRIRYGAKTVAALIFQSARVVLTGVPHPDQAQKFAARVLRRIQYTQCRTMTIYELRVVNIVGVLTFDQRIRVEKLQQSLGGIYDPTIFPALRCKLDNGATCLIYISGKVILTGVKDVENLKNSFDYLSKIVPNYFR

SEQ ID NO: 156367 - protein, 272 aa, Heterodera glycines
MDRVVVRKRPEFAKAPLTNCLPVAIFVTSYARLHLYGYMEQVLALNNAEVLYCDTDSIYYVNKIGAPCVPEGEALGQMKRELVDRRIVEFVAGGPKNYGIRHTARDRADERANLKIRSFRLSYATQQLINFDAMKELTLSTYNIDGPIDDVIDNDDLFVYGGGAHRAIRVSFPQIDRNVQADLFTREAHKDYRPFYAKGRVRPGMQTRPFGYVEDAPQPMDVEQQPPPPPPVRRKRTLIEADPTQPGSFAMVLTYFSMYFFFVFFFVSIYLY

SEQ ID NO: 156368 - protein, 136 aa, Heterodera glycines
MRIRYGTKTVAALIFQSARVVLTGVPHPDQAQKFAARVLRRIEYTQCRTMTIYELRVVNIVGVLTFEQRIRVEKLQQSLGGIYDPTIFPALRCKLDNGATCLIYISGKVILTGVKDVENLKNSFDYLSKIVPNYFR

SEQ ID NO: 156369 - protein, 45 aa, Heterodera glycines
MESVCIIPTCRVSSNLEAVITKPFSRLKFSLLCFRCFSLFNFCCF

SEQ ID NO: 156370 - protein, 528 aa, Heterodera glycines
MWGCQWKERLRRDHELKQRYEAVFTPCPLDPRNDALRGGRTEPFKLHHVCADDEEVLCIDIVSLYPYVMKVNPFPVGNPMVLTREVLLHPPTAPLPWTCPENNTFRGLLLVRVLAPRNIRVPLLGYRTKDERFTFPLCGLCADRRQQRPCRHDDDKRSWVCAYTHVELNKALQLGYVVTDLFEASGWPEGCDAEEQRQAFVAEFLRTEGIHLDPTKMALNPGLRLIAKTLANSLWGKLAQRVGHTEIQYTRTPAEFHKLLDDPTYDKLDFVHVSDHMDRVVVRKRPEFAKAPLTNCLPVAIFVTSYARLHLYGYMEQVLALNNAELLYCDTDSIYYVNKIGAPCVPEGEALGQMKRELVDRRIVEFVAGGPKNYGIRHTARDGADERANLKIRSFRLSYATQQLINFDAMKELTLSTYNIDGPIDDVIDNDDLFVYGGGAHRAIRVSFPQIDRNVQADLFTREAHKDYRPFYAKGRVRPGMQTRPFGYVEDAPQPMDVEQHPPPPPPVRRKRTLIEADPTQPGHSRWF

SEQ ID NO: 156371 - protein, 98 aa, Heterodera glycines
MYTDPKHYHYNSTQIHVNCFKAQGGTVSFWGYSNPETREIIRVDEVHCLTDKAAGVPKQFKSLQAEEQPPMKLSPTRPFLANNASSLMHVFVPFGDHP

SEQ ID NO: 156372 - protein, 110 aa, Heterodera glycines
MPSQRNMALVDEDNNGTANYGTHISATDEEEREEEEVEEEERRSGMKKKMKKSHTIKILVSPVFVDLNQIFEIFLKKLITLPRFYQQTIGQRERISFKVTFHLFRLMQRP

SEQ ID NO: 156373 - protein, 56 aa, Heterodera glycines
MVNQLVNNAVLDSEEIIAKSKRAVLEKVPEQIGSVELVRKVATEYGMMDEAGYHPA

SEQ ID NO: 156374 - protein, 56 aa, Heterodera glycines; identical to SEQ ID NO: 156373

SEQ ID NO: 156375 - protein, 93 aa, Heterodera glycines
MPKVSQIFAHFLLIFIPIICRRKLNEISKCLWEKYQSKSLNIDAIRNINLENEEELNFEIKEDKDGINENVQKRRKQINFERTNGQRKTSERI

SEQ ID NO: 156376 - protein, 27 aa, Heterodera glycines
NCFEERSSKNAFLHSLKIFDSNVIIVH

SEQ ID NO: 156377 - protein, 39 aa, Heterodera glycines
MSCHWLRDVVKDFPLMRPITKSLHFYFMEFGYRLAKKIL

SEQ ID NO: 156378 - protein, 126 aa, Heterodera glycines
MTSVVYLIVGFVIKKKTAGLPSAGQINHRAFRALICIVSVNFGGYCIYLFYTVLINPTISSPITAWFLQLIAAIPLNIGAASNGPILYFTSTEYRQAFQAEFSFVLKGISNQNQVEPQPNVVAPNH

SEQ ID NO: 156379 - protein, 55 aa, Heterodera glycines
MRCTQTKNVLVGEAIQKESKAPTEKFKMIPNRAIIPTIEAHPMSDQLGFSFLNVK

SEQ ID NO: 156380 - protein, 112 aa, Heterodera glycines
MIKQKLSSKLLSLDVPPNAFIAADDFDTVEELADYLTKLRNDTERYLKFFEWTKTYQKNHFAIMHSPFCKLCEFAHRQYDEDLKSTVDFSKHWTTRDCIKGFVQKFLIEKKR

SEQ ID NO: 156381 - protein, 78 aa, Heterodera glycines
MANNFISIIERCLKNEEEIEIVEDLAFDENADKKFKFSMWKEFTRKVTQFVIVFVILSVGEFTQFAKRRMHNGEMILL

SEQ ID NO: 156382 - protein, 48 aa, Heterodera glycines
MAIPRDKMVQIKVSYHFPRPGPIQKGKNQRSLTKESVRVMVELPNETL

SEQ ID NO: 156383 - protein, 189 aa, Heterodera glycines
YPSVRSAASSSSSSLSSSLHGPTDKYSAEPRKLSFVLLFLVVAALSNWAALSYVHDFIGRSPLPDIVFTFIDEQPWAHPVGDFMVSLSSASLIFLFVLHKHRVLVIRRTLFITACLYSLRTLMMLITQLPSGYSDNGAKCRAELAPEQRTLRVYIQRTLEQTIHVGFQVKEQRKWGTNAFCRTLLKMPP

SEQ ID NO: 156384 - protein, 88 aa, Heterodera glycines
MGHLLRFCSLLLLPLLLLIPFSVRPHGHQHLRESAPHQQFQLAFVNIEFDRMGEYDGMELGVEQFAKACQPVVVHAAHAATCATVAHL

SEQ ID NO: 156385 - protein, 278 aa, Heterodera glycines
MGQGAYTCEPINVKGRVLATPDCIVRIVSIPAPQTPQPPPPPPPEPQRLACNSQGAYSPYSDARGQCQCKQKLFFADDAQGVELSNVQGQTQPGVQFEFEKYGYLTHTEPHFSQTLYWKLPKRFLGNKVTAYGGDFTVQLQYDGQAQIREEPLVVIQVGSKPYVDQCRSINALIASIKGNGVTLVHKPTDQQAQFVPGQPFTISVNTYEAINHNANASLINAAFVQQNFEHQNGSPASREDLMMALAGLNLVLIRATHTDDQTSTRWEFEKKNQFYIY

SEQ ID NO: 156386 - protein, 205 aa, Heterodera glycines
PSQRQQLHPAATEPSSRCCNNNTQSQQQNAAVAALMGQLFGAATFQQQQQQQQRAAAPPAVQQQQAPPPAHPPSALPSNTAQHIGTAQNGPNVAQQQQQAMMLLEMAAAAAMNPQQLMALMAGSGLDARILDELRGHLLNQQQQQQLTANAAAAQHQQQQQALAAQQQQAVHQQQQQMLAMLATSGALTPEHLQMAVIGQQQQVT

SEQ ID NO: 156387 - protein, 73 aa, Heterodera glycines
MDGNGSQNSAENIWPLAHVDNAELDDGTSSKANSTEFCEETTEEGGEEKGEDNSSDGPNEEPQSEDGSGNEDE

SEQ ID NO: 156388 - protein, 155 aa, Heterodera glycines
MPRALINRQPPVISASTKKTGRKRMSASSSAFVPEDEEDAPAAYRLPSNAMGDARGQKRKSSSSASSHTPLKNAKPNASEHPSKRTPNEREKSNDMSGSGGTTISCSTVDQLALKVTKAEQQEVNAQNVAQMDDESGHKVAQKAEMHLNNKNFSN

SEQ ID NO: 156389 - protein, 449 aa, Heterodera glycines
MKIYKLSQFKAVAAAELQKSAFVLVVSYEELKSNRLSTVTSEGHRWNYLVLDEGHCIRNPNSQLFDFCCSVRAAHRLILSGTPVQNSPADLWALFHFLMPGYLSTRAVFQAKFMRHILACRNARATEQQCKDGEKALQLLHRQCLPFVMRRLKTDVLTELPEKIVQDQQCELSDLQKALYQLVVDNCAVGQQPNSASDRNRWFSPLQALHMLRKIVDHPSLINANLIDQICAGNSEAAEMEKRQRIMEEMKKLLIIHFLDRGAFGAEISWLRLDSTVPAKDRQSVVDRFNTDPSIDLLLLTTHIGGVGLNLTGADVVIFVDHDWNPFRDLQAIDRAHRLGQKRTVNVYRLITRGTVEEKVMRLQRFKSDTANALVGADNRSLAGMATDELLELFSLGDGADDSAGKRRREQPKAKRPRMDADEAIAAAGQWAMEELWTVAGDEDDEKTE

SEQ ID NO: 156390 - protein, 66 aa, Heterodera glycines
MDALRVIFPALRSSVLRRRIIRERIAPHIQNCFVLLSSANPARYSHFLAELADPSDGNSQLANAYA

SEQ ID NO: 156391 - protein, 342 aa, Heterodera glycines
MKILRKNALFVAIFFLFAWVFLWFFLSPQNKANGLSLRPLLLFYNRIPKTGSTTFVNAIAYDLSTVNGFHVAHLNLTKNRYQMNAIDQARLVQNLTNWQRMHPLFLHGHFAFFDFERFGLPPPIWINLLREPFDRFVSYFYFLRYGDNFRVGLRRSKAGNNETFDECFRRGGRECDPSAITFDECFRRGGRECDPSAIWLQIPYFCGTAHFCSIPGNAQALQLAKRNLLDHFLLVGLTERIEETVLLLEQLLPAFFLGAGEHFRLLNGDRKSLRHTLRKFPPTIETLRKFKQHKVYRMEREFYDFGKAEFELAWKRSIGGKGRRKQQKFMSGQFHFEKIKRG

SEQ ID NO: 156392 - protein, 51 aa, Heterodera glycines
MDYGKGYFRSEGRDYCKFICRDGDDPNLEQEEAEESEEEGFEIVLSKEKEM

SEQ ID NO: 156393 - protein, 736 aa, Heterodera glycines
SLVPKTNGKLRLSFDYKVTVNPWLDIHKYQLPRPEELFSILNGGEKFTKIDLKDAYLQLLLDEKAKSCLTICTHKGLFHFARLPFGVASAPAIFQLVMEEVLQGIDGVAVYLDDILITAATDQQHVKRIDQVLKRLSENGLRVKREKCEFLKPEIEYLGHIVDKKGLHASPGKIEAILKMPKPKNLKELQSFLGMVNYYGKFVPSLATLSEPLNELRRNDAKWTWTKSQQKAFDGIKKVLTSTEVLVHYDPQKPLFLAADASDYGVGAVIFHIDEKEKLVIAYASRTLNSSERNYSQIEKEARAIIFGVDKFKQYLYGRKFVLQTDHEPLKKIFGPKGELPIVAAKRLHRWSLTLMNFDFAVVYCSTKNLAADGLSRLPCPEETTIDCVGLELQQVQAENISCLPVTVSAIAKVKTDEILRKVKEFIEKGWPQKVEEGLKSFHVLRNEFALMEGCIMFGNRTIPERPWKRIHIDFCGPFWGMWLIIMDAKSKWPEVVRMRTTTALATIEALRVVFTAHRLPEQIVSDNGPQFSSKEFGDYCQSRGIVHTLIAPYNPKSNGAAERFVQTFKQGMNKLKKEEMKQEIALSQFLLKYRITPHAATELAPSEILFGRRLRTLLDLVKPTAANEVEAAKMQKSSYTERMKRNFDRETKVYARNYRDGSKWIQGQITRQIGTNFDRETKVYARNYRDGSKWIQGQITRQIGTAMFLVRTARGIWRHFDQLKENGPKSLRTIL

SEQ ID NO: 156394 - protein, 101 aa, Heterodera glycines
MPINKFEGEIAKKLGTNRYKIYKLKKKLGQTRNYNEYMDINKDTKSELIGKFDQMRKEKIYGFKYDKKIINVIERRIAKDLEINRDIIYKWKREFGKKRMA

SEQ ID NO: 156395 - protein, 66 aa, Heterodera glycines
MILEQMLSALEILEEQNDNLKIKVPKIEMKQLNEEQFRNEFDEQADQNVSSIDHSNSADDEDYNNK

SEQ ID NO: 156396 - protein, 175 aa, Heterodera glycines
MWRSDKSINVDKKPMVSRAVLREGEKLVITQSQHNPECKAETMVIIKAEQVDRKQKKRKSSSVIRMLRQSGDKVLKKLGKKMLQAQGSEAADPFDVPPRLQLTKFGAIKLIMGKTIAGSEWMIYKNKQIGVTIRFQNSIGSSKKLSEMSPTRHSNSHQKVSDRFGSSMAWYIFII

SEQ ID NO: 156397 - protein, 26 aa, Heterodera glycines
IIAGTPNYDQDVMAVVNDPIKEHNIM

SEQ ID NO: 156398 - protein, 73 aa, Heterodera glycines
MGEKEKKKKEKREKGEKGKGRKDKEKGGKEKKRKGEKGEKEKKEKCKGKERKEKEKEKEKKEQEKSMRKVLTE

SEQ ID NO: 156399 - protein, 59 aa, Heterodera glycines
MRGLTNGLFVLLSTFHFSFIFCACTPGFSKWKFDFPHKIIYTLYQKVGSVKLLIVRAMI

SEQ ID NO: 156400 - protein, 160 aa, Heterodera glycines
MMAAQRILGALGQIGVGLTAAGVLAQAALYNVDAGQRAVIFDRFTGVKPNVTGEGTHFLIPWVQRPIMFDIRSTPRAVNTITGSKDPSKLPQIYLNIGTDYAERVLPSITNEILKAVVAQFDAHEMITQRESVSHRVSVELAERAKQFGFILDDISIVFF

SEQ ID NO: 156401 - protein, 92 aa, Heterodera glycines
MLNGRQLEDMQNVLNTQPNWASKEVAEGSADFPRFAPIAKKAAATGVLNKFGGSGARNCYFSPVSCMLLHDVPKYKKLIESTPNGWAPLHFI

SEQ ID NO: 156402 - protein, 50 aa, Heterodera glycines
NFFIWTSLFVTRNHYFWGFVTKIVKNHYFWRFVTISTFFGKFLNKNAIKP

SEQ ID NO: 156403 - protein, 114 aa, Heterodera glycines
RTGAVVEVHELQQKDAAQQQQQPNECVNVSQPITQYDVHFRKHGTDKHQQEKIKNAHSSSNRIVVDNGVLEKYTDARPIGGQTVAHRFWLSVRAQGPKSVGTDAGHGAAQLDLA

SEQ ID NO: 156404 - protein, 158 aa, Heterodera glycines
DSMFLRWNTLMAGVDVSSSQLVQISIQYRQSGVDASWTDVRNSTFSLTDLPQRFVYVDQLHPATAYDYRYAAEYTTIFDGIGTMPTAGSGAVDGAQQQQQPTVPSGDAKESQQQQQWDGKKSMLAETFYQQSQQARTKAGTPSAPLEVKLNNEQCYSN

SEQ ID NO: 156405 - protein, 98 aa, Heterodera glycines
MASLRNLTLFSSQLSFKYLIATRTDVGGILFYPHAIQHENNISENSIISISNQKLMPPGPLPEALLSLNDFFENRKKMQLDLNLPLDKLFITWRFATP

SEQ ID NO: 156406 - protein, 249 aa, Heterodera glycines
MALDRPPDCPNELYDVMKQAWTVCTEKRPQFADIQPRLETMRGLPAFQSRDPFPPSSLCGDNSFFDASQNSSTSKGEQSSTTTTTNGDGEESYTTACQFDKSGESFSVRRNAKRSRRKMPSRSSVEASTGAAGTAGGGGPSASYSFGTTSTGVDSSEYELPRSGAQLMLTLPGSRPTNHRRSATTGFHQNDAFVADSSVDESANGSTGGDQQRFTRSISLAGTSRAAADEPLTTPFRQFGASSSRISRV

SEQ ID NO: 156407 - protein, 134 aa, Heterodera glycines
MLSWKMAACLAAGNTVVHKPAQVSPLTALKFAELSHRAGFPPGVINGGNTKIEKLISCAKSNVKKVSLELGGKSPLIIFSDVDVDKAARKAMDAVFFNKGENCIAAGRLFVEERIHDEFVRKVVESGLMGKQLK

SEQ ID NO: 156408 - protein, 93 aa, Heterodera glycines
MVISKFDERDTELVVERANRTEFGLAGGVFSSDIPRALRVARQLRCGTVFLNTYQKTDVAAPFGGFKQSGFGKDLGEEALNEYLQTKTITMEY

SEQ ID NO: 156409 - protein, 147 aa, Heterodera glycines
MVANKIAAESAKLTLSSTKFNTLLELGNSIEEGGGARRWENSKKVQKTLDNCWDSEDGAGHVKLTPSDSGDPGFMRIELSSKLRLVGQTSKDAEEKEDEVPRSVSEPKIGTGNEGIANSAAFSCSKFSTLAELANSLAKEDKDGNTH

SEQ ID NO: 156410 - protein, 21 aa, Heterodera glycines
MSGGGMTFDRFGSSFFVRNCS

SEQ ID NO: 156411 - protein, 537 aa, Heterodera glycines
VKQLVKPSEDPLDNDDALALALFNDSVQFGGRYEVGWPWRPGGRDRLSSNFSLAFSRLSALSQRLRANPELREKYQAVITDQIERGIIEPAVRTGAGEHFIPHHAVITKKLRVVFDASAHEKGKASLNELLLPGPNLVPELAGILLRFRASAYPVLGDIEKAFLAVGLREEDREVAKFLWPKDPSQPLNPGNLEIYRFKRIAFGINSSPFLLASVLRHHLSSLGDPLGARNFYVDNLLICSETPSEAAAAIQTARRTMANAGMNLREFVAADPLILSALSIDDVLVGDVQKVLGISWDLPREKLIFGFPNSCDFPPTRRGVLSAVASLFDPLGLCSPCLVKAKLFFQSLWDLGTGWDEPIGEAHKKTWAVITSEWDAPPLTFARLTPCSQAALQLHIFSDAGPNSFAAAVYLRAERNGRAEVSLLFAKSRLRPKKFKNDGLTIPRLELLGLVAAIRAKNFVAANFDLSFEKIIFWADSQIALSWLASNAPQPVFIANRLAEIRREKNAFKYVRSCDNPADLGTRGAPNELRDLSLWH

SEQ ID NO: 156412 - protein, 46 aa, Heterodera glycines
MTEISKFSGPDRTGILKNDRIPDPVSHNPVNPDFHIAGSGTGLVNI

SEQ ID NO: 156413 - protein, 150 aa, Heterodera glycines
MYLQKEISKVRRPNAGLLATVFWSGLTGTDKANELANAMNQFNEINRTQLFVVSLNAKANLTRLKELAGDQWHVFVEGRASQFIGEASQHLLDCVLPPSGAQMHSSNNNDEPELLDTHEPLTSVERVEHLQAAARAFQKHPLGNCKDGNN

SEQ ID NO: 156414 - protein, 169 aa, Heterodera glycines
MVQKDFVKFVSSEKLACILMNNVQQLRVQLEKIYENMGGTNLDADSNKVLNNLQKKLNNVLDKLSAQFVVSLEHGIQEQINKLGILLTKIKGPQLQKSQMAGLLKQLPNAKIGGVTKLMSTHLKEGVKSMSSVKDMMEVARDSERSLTPKQCAVLDAALDAIKEVRAIN

SEQ ID NO: 156415 - protein, 193 aa, Heterodera glycines; identical to SEQ ID NO: 134779

SEQ ID NO: 156416 - protein, 491 aa, Heterodera glycines
MEETFDHTDVQFRHPFTMIVSGSTGSGKSEWIMRLLRNLDKIISVPIERVLYCYGELNPNILNLQRNGRIDNITVTVHNGVPAEDYIKGNAKKEKLLLVLDDLLEMTEAMPKPFNLVRRPVARRRRNIKLGKTRKDEENEVFEDAETFDQGDIINYIYKNSEALGINEDGQIIKTNGHVLRTSNIEDIVAHLLNKDKRANAKEPTALKEFVARAKQNPLLSKRLFSEAFVMDLKKQRLLEFLYKDINSPVAFTSLEPLLREAKKRQRKITRADVQNFLYTQRTYTLHRQAKRRYRHLPTLAPGLHTEWQADLAILDRLAKHNRGFKYLLVCINTLSRQIFVEPVKSKTSINIIKAFDNIFMRSKYIPWKILTDQGKEFTAHSVKKYFDTKDVKHFCMLTSPRFHAGMAERANRSIKERLYRYFTERDTYKWIEIVQDIVKGINQSINSSIGMRPADKKKQNGIEYVLVKWKGYSIKFNSWVPLSSISEKNI

SEQ ID NO: 156417 - protein, 286 aa, Heterodera glycines; identical to SEQ ID NO: 142642

SEQ ID NO: 156418 - protein, 60 aa, Heterodera glycines
MLTLEKEENNDENVDEYDEDDEYTNCDWLFKRWQIGKTIQWEDKKTDNLNNVNISICRFG

SEQ ID NO: 156419 - protein, 78 aa, Heterodera glycines
MSIFGCPIPQIVLGVFILLAEYFLFETFIIPYLLLNLDEISDPLFERDTSFFIGLPILSYISCAIFSGALIKVHPNNA

SEQ ID NO: 156420 - protein, 307 aa, Heterodera glycines
MKNLVVRAGQTAKWVVKFGGKPAPEVTWSKNQQPITDLSGSIQVDTKKNDHTILCIPAAVRADRGAYALLVKNSSGTDTVTADLTVLDKPSKPRGPLEVSDVTEDGCALSWKPPEDDGGLPIDHYEVEKLEGGKWVPCAKVPDCAAQVKGLKKGQQYQFRVKAVNKEGKSEPLSTEQEIVAKNPYDEPGKPGVPDIVDWDANRADLVWEPPKNDGGAPIEDYIIERKSKHDRNWKECARVGGPTTKATVQGLKEGEEYEFRVKAVNKAGPGEASDPSRKLLAKARHQKPKIDRSAMQTVTIKVFREN

SEQ ID NO: 156421 - protein, 168 aa, Heterodera glycines
MPMSFVPLATSANSYERKAKRETNEAKDDANARIEDAIASAINGGGSATVADIALLRNGRLSGASSVVAAGANDDFVRRLVDLVRREPALYDPSHEHYGNRHASAHFRTAIWQRLCKELDYPDDPQALQKQWKSIRDKYIKEKERRKGGTTTMMDHSESMTNGTRNFN

SEQ ID NO: 156422 - protein, 102 aa, Heterodera glycines
KYALEAVKGSSLERMVKRLGQIAHSAHRQLSDLSPNEFHDFAFKLSEALYSAGEFEEMLHVALTFMKKYADFRSSVPTQEIQYNMGPDVPSDGSFRECSQML

SEQ ID NO: 156423 - protein, 55 aa, Heterodera glycines
MCVNENHKKCKAILSLNWSIKVTVCGIFRGENKTGICDIPKHYHLSLIKRRKVMA

SEQ ID NO: 156424 - protein, 71 aa, Heterodera glycines
MLTKGEAAQFLIDLFMIAKNYQSSIGYIPVNFGTQSNALTAFVSSPIETKVIDVSIFADSARIGLILKRLK

SEQ ID NO: 156425 - protein, 213 aa, Heterodera glycines
MSSTVLQNALRLLFITLIVFNCCHGASTRVKHKKPTDETTSTNEFAGLSVKLWIIIGVSVLLVLVVVCAIVVICCLCRKRRAGQQDNDELSTSVPSSYYKSRQGPTDSMDWPPPSAAGHGRGGRSGGGAMTAVPSGMMSKMPTMKTKQPFLFRMLMPESLRSIGPSRPAPSTATMERGGAQTKVKTTTMLGGDQTKVKASSTVPSGGEHYTTW

SEQ ID NO: 156426 - protein, 136 aa, Heterodera glycines
MYEENFEGGREFLRVLNEVIGDFDELLDRADFAHVEKIKTIGPCYMAASGLNPERRRLSLHPYEHLYQLMEFAIALQNALAFFNQGVIGTTKLYYDIWVSSYTRDLLIDRYDFEYRDRIQVKAIITAHFAIKLLLL

SEQ ID NO: 156427 - protein, 63 aa, Heterodera glycines
MLDLDEKEKSIVEKHVLAPNRARPTEEDNLFEQFILSTQISYCYYADSHRILGNTFGMARAAR

SEQ ID NO: 156428 - protein, 45 aa, Heterodera glycines
MIKGFSHARQLESEIASLREQNRMLMAERVEARQRPNPALTTPFF

SEQ ID NO: 156429 - protein, 26 aa, Heterodera glycines
TSRPRSIQWYIAYMHFPTHSSECSLV

SEQ ID NO: 156430 - protein, 46 aa, Heterodera glycines
MYEEDLPRHGHGEPFKVPNIYWMYNPDNPCSNVTKQYTKVGYAWKV

SEQ ID NO: 156431 - protein, 124 aa, Heterodera glycines
MANLPPVVAQQKSAAGGDVSSELARLQQSLADTKPIGPLLHRCRTLCQAKALLRLLDLVTDKMSNSMCAITAARGRGKSAAMGLAVAGAVGCNLTNIFVTSPTPENVRTLFEFVLRGFDAIGYQ

SEQ ID NO: 156432 - protein, 107 aa, Heterodera glycines
MAAQQILSAAAERSKCNSKDQQQKRENDADEHCCSQRHNAVDIDERTMVILHCPLGQMASADLAVYTNCDLSDATTSLCWWTNRSTKRRRRQWKKRTQNTEDECRLT

SEQ ID NO: 156433 - protein, 107 aa, Heterodera glycines
MCKISSFLMIFFAVFLSVAKVDGMSDAFKSTKEWVKKKLSSNSSQPLSSSSFHRPLLDTSDSSSSSFSFNPPIYKNNLEDNSSSSSVFGTHPFRNKIKKEYFQNLLI

SEQ ID NO: 156434 - protein, 64 aa, Heterodera glycines
MLLTVKSDLIGSIAVTIVCMAVVCSLFIYSRLGVGAIALCITSICFTLVGVLSWCGADLDPVTM

SEQ ID NO: 156435 - protein, 18 aa, Heterodera glycines
IDNVAHSRKKLILTGLVL

SEQ ID NO: 156436 - protein, 29 aa, Heterodera glycines
MIDWIGILGCSLIVALLFDTALTRSFRWI

SEQ ID NO: 156437 - protein, 86 aa, Heterodera glycines
MSFMFALGIWTEALFGAATELTIMTHHPLLKRRLIILLKKIFHLNQNQIGDVPTNTMELAPTVANPTNGGDEMAAHFKMLQQLWNK

SEQ ID NO: 156438 - protein, 94 aa, Heterodera glycines
MTRESPNKKAIFVSKKENVIQRLHVRNYFVVNSVKFNQKYLCEFTLMPLNSLIQHNQDPSPIPSPTPQASSSASSNSSGENKLPSIDGNPEEGN

SEQ ID NO: 156439 - protein, 52 aa, Heterodera glycines
LCNIAANYSVFHHWCFFCRLLFIAASSLYNSSIFFLLCLNICLMRVKPTEKQ

SEQ ID NO: 156440 - protein, 375 aa, Heterodera glycines
SVAFATNPRLVLTDVENAPGLVTPFHHAHSQAMVKKDTDQKSSVADATSLVTVTSTEMQMPLARHNLPAKQQPRIWCFHNFRESVEDLPSRKNWTSLNTQKRHQFTLPADISKSAETTFAASHGWLESFMSRHSFSLRKPTTLAQKPPDDYAKAIVNFIVYVQKLWHEKNYSGVFACDETAVWLDPTGANCVSEKGAKSVTVLTTGHEKARVTVMLTARSDGTKLRPFVLLHKKRPVPDIAKRFKNDLVLCWCGRTWMDNELTTKFLEEVLGNFAFGRRLLIWDSFRCHISDDTKQTLRRLSIESAVIPGGTTKYIQPPDVCWNAPFKNKIRQIYDEWMVNGEKETTASGNMKAPPPMETYLHGLSPPGTHSRRN

SEQ ID NO: 156441 - protein, 17 aa, Heterodera glycines
HKHLFDLFYHIHNLIKI

SEQ ID NO: 156442 - protein, 46 aa, Heterodera glycines
NFFIWTSLFVTRNHYFGDFVTKIVKNHYFGVLSLFFHYFDIFWKIL

SEQ ID NO: 156443 - protein, 175 aa, Heterodera glycines
MVLVIEFCAQILGCSPKSLRDKLNHPEDRVKALKELVGKKVRTTYQDRNGMQKTFFVDGISDHGAALTPAYGRLRQPYNINIAAHFYARHRIKLHFPYVPCVVEKYSGCGEDRYYPMELLEIVDEDYTNKERWLGKLFTEIEDDFIPVKRRGRVDENEEIDAGRFECSQPSYVYW

SEQ ID NO: 156444 - protein, 1323 aa, Heterodera glycines
MDNHPRKRFTNFSIDHILSAPKKPRQGFLINELGVFHFHESVQQADGTSNVVKDYVKKLENNIEHMAKFHYVKVKSKFTITDLPSTPEALLAGIFQHCIDEAIVESRERNIEPTHLGCMISSPLLEGGDIPIPIRQMTNNTLDTILNQFKKVAQSKQQKNVSLWGEPFTVTITTLDRNGLPSKRRVNGGARRPVKTAVHHRINDQCLIKIRNNDNHFCLFYALQATMVAKTCNWPRWKFFDYVNDRKGQQGQLYHDAVELMQQVNAPMDLDGYDANTFVPHVVDYWNNAQRQHRFAVFIFGSLGQYKPIYKYIDTTYDTPLLLYFNEDHFDGVQKQGGLFGRPYCLECERPYRRMSEHSKTCKARCVLCSRVGPLFPCQPTDGFIKKCKECNKKFTNNGCYQHHLQSGYCKRSKKCKDCGAVWDVAVNNRNGRKGHVCGERFCKMCNNYHNTERGCYIQPIEPKERDPYRIVAFDLETMQHMPSEKPEKREHLPNFIAARVACPDCIENESWREASGGCEVCGPNRTVAFCQRRFTETTVDKQVVAENPLEALVSWLINDLPLAYDTYAFSHFGGRFDMVLVFRELFKRGYNPDMLRKGNKMYEMRIRRQKKRNPNIVFRDSFNLMPMSLASLVPSFGLDVEDKPFFPHMANHPDNYGKQIHPMPDDYLVSGMMPDKRQKFDEWYEQHRQEPFFLDEALTSYCTNDVEILMAALVAFRHEFLDVTKRNEGIVAERAAFYEHHDGIDVLRECMTIAGACMKHFRTNHLPKKHLAIVPERGYDNAQNQSLLALRFFHWYAEEHGVVVQTAHSAGGEKKIGQYSVDGWVEEERRAIEVNGCVWHGCKECFPSDNMLMPNGKTAGEVRERDQKRLEFIESQVSRVDVYWECQIERMLHRDPDMRESFADYVDDGPLDIREAFMGGRTGPLKLYHKAGEGEKISYFDFTSLYPYVNFSTTYPIEHPKVLILNENVEWTTARDNPYKLSLLKVWVIPPRKCDVPVLPVKVNERLCFPLCMQCALDYPKGGVDFDYQCEHDDQQRGWVTTCTSIELDAALEEGYRVTKVFRLLKYKHGDDKLFRPYIAEFMSQKIEASGFDASIKGNTELEQQFIRECAEKFGISIDKDNMKVNKGKRSLAKLCLNNLWGRFSLRNFGLAQTLITDDPVVLAEYLDNRSVDVTSIDELDADHILISYVQKKEWVEEHECSNTVISLWTTSKARLLLLKAMQKVMRTPGCRLLYTDTDSLIFVHPIGLNPLETGPHLGQFTDEYPNHEIVEYCSGGAKQYGLKLRRNGQEEFVLKLRGITLNYDVMQNQSLCYDTFKEEVL

SEQ ID NO: 156445 - protein, 208 aa, Heterodera glycines
MKRPNPLNLPMSEKKPKLRRRLPAELNNELVSFIPLVCLFANVKRAPIGPKGVIALFDVMFEEKRTPKKKKVGRLLLQEELPHDLSRNELLHYLCYGRLGTNLFETYFVMTHATNSIAIGNLFGLLLDFAMSSPTPWLMKRPICCGIFFRQHLPWILQQPMNVMLSHGFFPEVRSDGFEFFWLFNPHLKKYAGNDDTMTDGIFWAKLS

SEQ ID NO: 156446 - protein, 311 aa, Heterodera glycines
KGRNQFIISKICHPFEIPNLIYEDKCYHNSAEKCEIFAKLFANSFNSQTDPSNTLEIYQCFISDINFNIIETQNLMKKLPNKNGTSPDNISYKIKNCHSSLSTVITDLFRISLDTGSLPDIWKESIVFPLFKKGDKNNPENYRPISLTCSLCRVMERFQADIFTIFYNKKISEYQFGFVRNRSTTSQLNSCGRLVGNYKWKNVDCIYIDFQKAFDSVPHELLLYKLEKIGIRGKLLIWIKDFLSNRTFRVKIEDALSSNKKVLGVPQGSVLGPLLFLVYINDLPDALPSGVRIKLYADDVKLYICYKARAD

SEQ ID NO: 156447 - protein, 80 aa, Heterodera glycines
MTENGTSKQIADLEMHEVEQGSRSLPENQEAYKNQMKSYHAKLWTERKSDVLVALGDCMTVSENFPLALEEFTSALEIRK

SEQ ID NO: 156448 - protein, 123 aa, Heterodera glycines
MIKRGTKVIQRGISVIKKRTKVIRRGAKVIRRGTKVIQKRTKVIQRGTSVIKKRTKVIKGGTKVIKRGTKIIKRGRKVIQRGISVIKGGTKVIKRGIKVIKRGTTVIRRGTPWLGERLEEVQL

SEQ ID NO: 156449 - protein, 94 aa, Heterodera glycines
MQEWHSPWPENGPVDNKYRFKRLDTVVSVWTNSIESNQNKYKKVPLKNHPKPISINLIIFVEIHPSRIRTVKLKIIRVSKDIKLTQNGMSKSKD

SEQ ID NO: 156450 - protein, 236 aa, Heterodera glycines
MQFSETLEVLEQIFEQHKLDNRDIQDFRQTVDECIARQAEVSAEDSYDYCELLKMMESEYQQLRELSAGRMVDLLLHEIELHEKQFNDVHNQGAALINQRHPAGEVIEVYLRTMQNQWDWMLNLSKCLEGHLRDAYNAKAFVEESEQVEQQMQQQLDHLDREYSRTDFSLDDGEQMLRQLDSVREYIQQLHARLLSLTDRCAQISPLWQRGEPISKPLPVMALCEYKSKDKIHIRQ

SEQ ID NO: 156451 - protein, 126 aa, Heterodera glycines
MDDGKDMFHWKATIKGPPESPYEGGTFHLDIVFRRDYPFTPPIVKFETPVYHPNVNKQGGICLDVLKTTHWAPSLTISKVLLSISSLLCDPNPDSALEMDIAIIYRNDREQYNRNAREWTQKHAMK

SEQ ID NO: 156452 - protein, 110 aa, Heterodera glycines
MTIFGHSVTDYSANDLISLMQRIGQQFSKDFDRVDSVLEAQSEQLSRFERHIEQLESAQNGLLSTLSDTIKVAFLLTLLIGGFILLLLANKLLKGYKQKVAHVPLATSAI

SEQ ID NO: 156453 - protein, 48 aa, Heterodera glycines
LTPTPIGVKGRGSGLSGYEASGFGIGVFPENGQKCRGSGSGRGRGCNP

SEQ ID NO: 156454 - protein, 72 aa, Heterodera glycines
MHLYSNIYNIKDENLTPRRLKPKQGAVFKNKTPKRGKAVEKGVKELHVSESAKGPKSDIFRIEIRPEHSEVT

SEQ ID NO: 156455 - protein, 333 aa, Heterodera glycines
MSSFGPVLSSFVNSMLSESSSIVDIPSPSPSNGTQTLGTAVNGIGTSHSSTRHDTSSPLVASETFVDDAPDDSDSSSAVFYVRNNGTDGGKQKANKKQKDTFKCANCNINFKSDEMLELHQNNCRRSVLSAPANFCSSLSFCDICNRKFISPRGVALHKGKAHKGESSSKLVKPKNMAKCPGRHRTKPTNAATAQQQPNGNVQIPKLRRHGHPVKMEVGSSLADQSYNKRRTNGAGGEQRRAPNGDGGDRPNGGGTQMDDDDGFGGEAEEDDIVILEPETKHGIVPRNTFGTVGPQQQQQNCAASGMAVPSSSSSMISHYAGMVISACAQSNM

SEQ ID NO: 156456 - protein, 24 aa, Heterodera glycines
MHSIWSRANTIFAFSLTVLSTVTL

SEQ ID NO: 156457 - protein, 47 aa, Heterodera glycines
MPCKTNSPPRVQCVHVRCGQPTHFAAEVADKNHIPRPVDEHMLQVWY

SEQ ID NO: 156458 - protein, 95 aa, Heterodera glycines
MPFRRTCQVILLIWTVSGLLSLPEPFTLRIYPAEYARNLTTTWGTRCKESWSPEFQQKYQLIQTLALFLAPLTIISALCVHMSIVLRNKAMQVVN

SEQ ID NO: 156459 - protein, 86 aa, Heterodera glycines
MTFRQQFKFKTAGGYSSEEELDRLNDDEYVDFVADFLKPTPIEWVFVAIFAILMAVGVCGNCRDSKFSKIPFFRKFRPRGLRRLKK

SEQ ID NO: 156460 - protein, 137 aa, Heterodera glycines
MELTPTQFLNIVEFGFIFLDLPNKNLSRKPLFEVKMDESLGNKRRRHSTVKEDDSVSLCGSVATTAAGDGSLLDFGLDEETLAVESDTEFERKFFVMKEGSFPGKVFALPHPASRERALYLVSQRKRTRKSQRKANE

SEQ ID NO: 156461 - protein, 95 aa, Heterodera glycines; identical to SEQ ID NO: 124528

SEQ ID NO: 156462 - protein, 55 aa, Heterodera glycines
MDFTKPVITDVIFVKPPADDSPGFVLSAWRCSYHNDETYLCQRPEGSVPIFVAHP

SEQ ID NO: 156463 - protein, 76 aa, Heterodera glycines
MRGTYDEDGYGSLEDKECDKGQQFCYLANCKTDMVSYLSWDCAKDTDCAKISADWTMNRGGGNYSCECTFGAPGLT

SEQ ID NO: 156464 - protein, 115 aa, Heterodera glycines
MFYRIVGHLSLFEWSQRNAHFRRPGRILRASVSERLANGTAHKHTTPFSAAKRTVRGFAVSGSGKGRGADGAYHSRDDGTRGDNGKMKQSAGINENKDIKTKTMTLPKAFIGHPN

SEQ ID NO: 156465 - protein, 307 aa, Heterodera glycines
LAWACGQGKYGPKHSSLGDPFDRGQEDPLISRLLAKRRQFRTLLTSSSTPIFETIDHAFQQRTVFDGPMKIFENFKLRPGIQLDFYDWRARILSVAVWVKSFSELQEIPEIPLSDLQSLIVHCSFALLVFCEAFETPERFSDRLVYPDGLQVTRNFSKGIVSRKGLIRGIVAVINHILAPIRRIQLNAPIRRIQLNEVEYVFIQSLLLFDSDCCLSLGEKTQQIVNEKQQKLLESLQRYLNRKKDDAMESVKRMAELLLRIPNIQKVAAFKRQFFLDENGLRILGPNCAKCSFAIQIASLYLNTSFF

SEQ ID NO: 156466 - protein, 91 aa, Heterodera glycines
MKVDNRFVQQDSTRQMMRNRREWAVQRLFRHYANVGVPNSTVRLGEILLLLPELEVLQYGDSMWELRSNIDPKNPGDRPNQYQSAGINGLF

SEQ ID NO: 156467 - protein, 161 aa, Heterodera glycines
MARNSDFRYFWGRNPTSEIFHKKSEFFGKNLLKIAKFILEFCMIIENTFLGITEQNTQKSNKYFGQKSKTLMNRARKNKHMYIFFPWARNSQKLTKNITEKFLKKSQAATSSQAAEDELSINQNNLEESILNAKGKQNKIEIEPPNSPDNPSQLPFESSVL

SEQ ID NO: 156468 - protein, 233 aa, Heterodera glycines
MFFFHHFFASADCPHVIEVTDVEAEAFKVMLSFIYAEDLSELNGQNAMAVLYAANKYNVSLLVKALLAFPINELSNVFLAFDEARLLNENAIRWADDRCAQMLIECSAENRRAVLGPALSRIRFPLITKREFSLNIVSSCLLTVEEVIGVFQYHCHPNLRGAPGQYPMAFPCHGRFSDQKEGTLSMEIEKLSEFARERVNSSRYSKCIYIKGLPWKIWAQINTKKDSTEKFII

SEQ ID NO: 156469 - protein, 117 aa, Heterodera glycines
MYKNWSKYVHKYVKKIPKYVHIHPYLDGNGRVARLVENWVLIQRVLPMFIPAEEARDEYNANIALAVRGRNEGHATGLDLELNRNGDTDWLKPFINMFYVFLQNATENGAEKAADNE

SEQ ID NO: 156470 - protein, 140 aa, Heterodera glycines
MNIISDRTRSAVATATPGGTRGKRKVMRFDNSEDDPIVQFWDVQDRRYKLIKALYNLISMSVTAEDNDAAVGDEPSRTQSSALRYLWTNRQSEDNLKICILSIVCKFLENPEVCKAGGRTNMFNVFTLLRLICICWDMNK

SEQ ID NO: 156471 - protein, 287 aa, Heterodera glycines
SAEACRRHHQSPTEQWKQSEMGLAVDAITYSGLAGDGPLVAAVMVTNCVNPICASKALAEPYASSNSCFDSSAAAVGLVQPMVLAGPGADKLCASLGIGTVPSNDQLRTRSAVKEHRRAKQMMALAAPDNGDKSAAPAMALGTDNAIRRMDTVGGVAIHVRNAVDNTQFGAAIWAEQCAASSSSAAANSDFGLSVAVSVSGCGEALTRTHFAEALAQQILSMDVDDLAFVQCITHFLDHHFIRSRRLCSFPSDRLLLGGLAVIQQQIQKCPGDESDGNESAKLCHRN

SEQ ID NO: 156472 - protein, 48 aa, Heterodera glycines
MCRIDNVRVHMEEINLTFSHRFAVMPDKSLSMVSKTARKPSISFSQKK

SEQ ID NO: 156473 - protein, 62 aa, Heterodera glycines
AIFLEILSPATFQANLLNPYMLDLLILSPQALVADLLSPQLIQPKILSPQSFSAGVLSPRNY

SEQ ID NO: 156474 - protein, 60 aa, Heterodera glycines
ILSPEIGGGHDESEFETEGENVFIWPKTDEPDEEAYLGENSAHPDTSAHIHPNILHPDGS

SEQ ID NO: 156475 - protein, 418 aa, Heterodera glycines
MRFIYNQIGGSQHILLDRFYKKYFTAENESERKKAAQKIEIYIHIYFLSYKIEQNKEKLANILVAYLEEEEEEKQNKKGTKAMKKGPKPTITAKAFYQRRMLRLMFNNRLQLDFNVMELFDTHFQKPKLFCELLRLKAELLTTINANGTQRVTMARQKEWPNCKNDEEIKETIVANEENIKEWIFSDIFHFLPTRKKLLQYFDEIKLKKGDLRSARIGFINLIGFSRMSILCKKYSDQLSFLANFVAIQFEAMFLSELKYLWQLYTQNFWSNEKIIRIKNESFLKETMKGKALKNASESLSAHQKQLEELAQSINEMDQFLWWDNGPTDTFLLRALAICANGAIDEFGKKFPNSSAKNGELEEFTRECQCNFLICVGKTLRKNTRRDEFLSELHFQKMDNLLNDGRESETFRGDVIDH

SEQ ID NO: 156476 - protein, 26 aa, Heterodera glycines
MLKLSLLIIFVLLLHFALSNDEEINE

SEQ ID NO: 156477 - protein, 276 aa, Heterodera glycines
MVITRSPILTRQRALNLEIAVDRSGHQINVGGNQQNSLQRQNHSAGESFPQNQQIENSPISPTELAGFNGENGDDSSLVLEPNMTEEELRRRLLVVSIERSQPPSNGNAGNGENAEGLRNAIRENDGRPNFGVNGQTFAHQRRPHDTFLSNLMNNGIGNFPQNLVHVPRTSTPTRNVEFEQQIGPFPFVVDRNNRAPTPPLNIRQQIFHPIPLNAHRINQVSVNAQRNIDVQYVPNNCVNVPPNVQRHCDIQYTAPNLVAAPIPVSSIMNLAVTIS

SEQ ID NO: 156478 - protein, 311 aa, Heterodera glycines
MSSARCRMALGPALFRLRQHVTTAENLLDEPVINAETTENLEQERGHITRILSRMEVELDAWGAIMNGLQGPAREAEEALFTAFIRDDRHLTEWLEDAREMLAHIAAELADEHNQPIAAGGQQPAVAVNPPVPAVPFVNNAVFPGGANAQQPAAVANVANQPPPMPINAGGVHYQQPFAVANPANLALPVPINAAPVPLATARLPQLSLPIFSGEPMEWPAFWQSFESAVDRAALEPVDKLNYLHGCLRGKAARAVTAYRGGDNYAHAVAALRRLFGDPRKIAEALQSELINLRPVDDSVGSLQHFLETLQ

SEQ ID NO: 156479 - protein, 50 aa, Heterodera glycines
SFIIFTKMLLFLAFPLLFTLALHCYAFNGANLASGDIEPLLNELRENSRS

SEQ ID NO: 156480 - protein, 286 aa, Heterodera glycines
FRTVRRGGGTRRQSAEYEDGKETKQKEEGDEHRHQSSFSSANFGRSSDSEQILREFNKEFSGFMRQFVMSRDKKPGEFDERMKAFIRDFNKKMPPEFEVERTAESVRFMPNIFLGGIGLAFLGAFIAYRLLSRNAILPEHRAIVAQQHSAVSYDEFVQHFLAAGEVRMIYFYPSKSVAVAVLHPGAVIRGQPYHGSAVLIRLDSYAASGSHFLQGVEDAQNRLGIDPREHVPVAIHFPSVLPAFMLILGWSILFAMFFKYARTSLRQSLFKVKRKDGGSKEGKAGE

SEQ ID NO: 156481 - protein, 40 aa, Heterodera glycines
MDCGVVQLMDPSKKAFYNKNEDKVTLAIDFTVNEVKTDPI

SEQ ID NO: 156482 - protein, 247 aa, Heterodera glycines
MAYTISKHMLKLNGTYWMQQPRVTTVQMAAPMVSAIKEALLTFNVQNGFFPEHIFVFRAGASEGEYKKVAYWEGGAFTTAFDELINERKMPKKPALTLIVCQRNSNYRIIPKNVQPGGRAPDQNCQPGTVLDKRAMHSSLTEFLLVGHRTIQGTAQPLRCTVVVDTAEPRVKLSELEQISYALCYQHGICCSPTAVPGVLYSAGDLATRGRNNWRTSTADGDTIQEFDLPPQGQPEEVRAQAQAQLD

SEQ ID NO: 156483 - protein, 137 aa, Heterodera glycines
MAAQEENEIQLPQKISNDHEVRGIAPVGVLINAFELNLRGSPDKVYQHELRFTAEYPKSSKKGKEGPAEPRELARGPRNENEHFVFGNRMFEKNSVLQLQGDPRICKEGMQKNVRFVGDNPQQSMAIIQLDGPLCRH

SEQ ID NO: 156484 - protein, 38 aa, Heterodera glycines
IRIYPLYYPLPNLRPIRIIKNSNSRLGHFVAWTFCGSA

SEQ ID NO: 156485 - protein, 163 aa, Heterodera glycines
MLTKIDFFSHFKNNFYGIFNNLKNKDQIPNKTTKFIDIQQNLALVFNYVPTDEGVSSGNEQLFLPLHQQIDYVPLLRLAADARLRQQQNGTTLWWTDRCGGGADLVIDPTLWENNSTNWGRIFLMDRSNNEGLFNEQIFSLFGNNNKIIYLSQTPCGPHACLC

SEQ ID NO: 156486 - protein, 206 aa, Heterodera glycines
MWMRVWSSKIAEFREELYDKKFFGTILGYGESMEFQGRGGPHAHIVAQTDLDAVPYVIQEYIWAHIPSLPDKDDDTPIAKMHREIRETMHMQLHRCSDSWCGPSDPIYGRCKKGFPAPYSKCTILRPDRPAMYFRPSPTDGGAQLEVNGLIYDNSHVVPYNPYILLRYRVHHNVLFAYGNKANIKYALKYPFKGPGHCYVECKEES

SEQ ID NO: 156487 - protein, 31 aa, Heterodera glycines; identical to SEQ ID NO: 126976

SEQ ID NO: 156488 - protein, 96 aa, Heterodera glycines
MGIQFTDHAKSLLAVTDFSRQFVDQILGQLLQVPVLQCGDRVPNGHAVLNGVGPVNALEARGDDMLTPIGRVGAGTGTGDDPTPAKKNTMKKHNGQ

SEQ ID NO: 156489 - protein, 316 aa, Heterodera glycines
TQQVRSKLRKKILFASAAPPVIPPLVELAARRVASALSFELIEATYAHLPEHLVLPILRQCFPNSHLPEHLVLPILRQCFPNSADNIRLYSCLTNCSEGPFVIGEQCLTNCSEGPFVIGEQLFQLFQNGAVSELFQIGSFLDQILQKKMPKGYHLSAVVNDHQRVVSCSCSCSNSSYWCQHVVAACLQRIHRPDSVQYRVAIWDSITALKDRDLKKLAQYLINELPREYIPVAQKLIDALRDPYIPVAQKLIDALRDPSAINCTHGAPAPSAGLSHAQPAVWYMDETALRDEVHKILLDFAQVVLTERGLRVPIAA

SEQ ID NO: 156490 - protein, 67 aa, Heterodera glycines
MRQSVTKTTTKRQAGEGAYAGEKVVGYVQQQRVYCKSKGRKKGGKVRPKKGRTVRLPHQLQKVIIHS

SEQ ID NO: 156491 - protein, 46 aa, Heterodera glycines
KIPSKIKGRLRTALPIMLESICMCIKFIKKRDSHFSGIEYKFKNSL

SEQ ID NO: 156492 - protein, 232 aa, Heterodera glycines
MNLEKLEKANSILLEAAKRETERAWRDVVVLSDDVSDFAKSSRETLNRAIKSREKAPYANGVRELYLKMSDSIWEIFKILDQINLESEKAESAWREFERCKTFDQATKLEEQSQNSLTEARRLHFESRRVQSQMLNYENRLQTIVWEHMDILTSLIEENYKNEQGKFRSILKLSFGFESFYCPLRYPNENTAEALFQHVLLKEEQYSLFYPLDGVITLEVTIIPDVYSNSRN

SEQ ID NO: 156493 - protein, 94 aa, Heterodera glycines
MNLEKLEKANSILLEAAKRETERAWRDVVVLSDDVSDFAKSSRETLNRAIKSREKAPYANGVRELYLKMSDSIWEIFKILDQINLESEKAESAW

SEQ ID NO: 156494 - protein, 98 aa, Heterodera glycines
MGNQWKKSDRVNENDLVKSLSQCLLAKYELLKRTSFKKEFSVSKRGFVRDADIGEMFSDRRERELRANVLKKSEKLLMDVLGYRVRGGISDRFLFFFS

SEQ ID NO: 156495 - protein, 118 aa, Heterodera glycines
MKSKTDEEKLEIVQKFIEMTEEYKQKRKHSRKEWNQNYAEICKKIGVGYDTIRKWKKQFGISKKRLMEEEKMEKMKIYWEIKKENPKMNEKEIAKIVKISQTNIHNWKKQFGEEILKD

SEQ ID NO: 156496 - protein, 233 aa, Heterodera glycines
HFNLWDSNLRHFNHWDSILLRFNHWDNPPTFQSLGLNPPAFQSLGLNPPTFQSLALNPPTFQSLGLNPPTFQSPGLNPPTFQSLGLNPTAFQSMGLNPPTFQSLGLNPPAFQSLGLNPTAFQSLGLNPTAFQSMGLNPPAFQSLGLNPPAFQSLGLNSPAFQSLGLNPTAFQSLGLNPPAFQSLGLNSTAFQSLGLNPTAFQSMGLPTNGSITSTPLTKFLRQRYSLGRFAAS

SEQ ID NO: 156497 - protein, 29 aa, Heterodera glycines
MVFFIFKYYLFYVLHIFGIFFIIYYKFSK

SEQ ID NO: 156498 - protein, 184 aa, Heterodera glycines
MSTVHEFPIDEHGEIATKIFKILGKRLVTQILRAMDYCEQACDENKNIRKYRLRQSVDNFGRVANEQYLATLIAKKRTIILGLSTEFNTFLVEVEHEKFANNGWTTEKLTLLIEKMDKFFHKNKIYCANAGFEHAKNEHNRLVRGKKAMENHHQDGQIMDENGKDYRCTYKFAKILSSFKKSLG

SEQ ID NO: 156499 - protein, 119 aa, Heterodera glycines; identical to SEQ ID NO: 152897

SEQ ID NO: 156500 - protein, 339 aa, Heterodera glycines
MHSNHWDSFSCISITGTQPSSSSITGTQSTSIPVTGILFSCIPITGTQFSCISITGTQPSSISITGTQFSCISITGTQHTSISITGTQFSRTSINGTQFLCIPITGTHSPAFQSLGLNTPAFQSPGLNSPGLQSLGLYSILVHFNHWDSTHQHFNHRDSILQDFNHWDSTLFSCVSITGTQFLCIQITGTHSPAFQSLGLNPPAFQSLGLNPPAFQSLGLNTPAFQSPGLNSPGLQSLGLYSPAFQSPGLSFYAFQSPGLILLHFNHWDSTLQHFNHWDSILLHFNHRDSILQDFNHWDSILLHSNHWDLTSPGPSASQSSRLNSAIFQSPGLNSATFQ

SEQ ID NO: 156501 - protein, 29 aa, Heterodera glycines
AEPVDFIKHNLTIQSYYLAGNAPKALTPL

SEQ ID NO: 156502 - protein, 338 aa, Heterodera glycines
MGFQRKFKMPDTTNFRTLESVRLETSPSSKVPIATSPVPSTAVTRLCTTFPATIFYNYQHQWSYYTSWNREHLGRGLSHPVFVQWPSTPQQFFAPKVLARPLRGLVLGPSAPPQFSAPIHHHLIAGTQPTNIPIANTSTGLNPPAFQSLGLNPPTFQLLGLNSPAFQSLGLNSPAFQSLGLTPPTFQSTGLKPPAFQSPTLQRDSIHQHFNRQHFNGTQSTSISITGTQPTNIPITGTQFSCIPITGTQFSCISITGTQPTNIPINGTQSTSISIANTSTGLNPPAFQSLGLNPPAFQLLGLNSPAFQSLGLNPPAFQSTGLNPPAFQSLGLNLSKFL

SEQ ID NO: 156503 - protein, 155 aa, Heterodera glycines
WDSLPQHSNQRDSNHQHFNRQHFNGTQSTSISIANTSTGLNPPAFQSLGLNPPTFQLLGLNSPAFQSLGLNSPAFQSLGLNPPTFQSTGLNPPAFQSPTLQRDSIHQHFNHWDSIHQHSNYWDSILLHFNHWDSTHQHSNQRDSIHQHFNHWDST

SEQ ID NO: 156504 - protein, 381 aa, Heterodera glycines
TSITGTLFSCVSITWTQFLCIPITGTHSPAFQSLGLNPPAVQSLGLNPPAFQSLGFCSPAFQSLGLNSPAFQSLGLNPPAFQSLVLNSLAFQSLGLNTPAFQSPGLNSPGLQSMGFSFYAFQSLGLILLHFNHWDSTLQHFNHWYSILLHFNHWDSTHQHFNHRDSTLQHFNHWYSILVHFNHWDSTHQHFNHRDSILQDFNHWDSTLFSCVSITGTQFLCIQITGTHSPAFQSLGLNPPAFQSLGLNPPAFQSLGLNTPAFQSPGLNSPGLQSLGLYSPAFQSPGLSFYSFQSPGLILLHFNHWDSTLQHFNHWDSILLHFNHRDSILQDFNHWDSILLHSNHWDLTSPGPSASQSSRLNSAIFQSPGLNSATFQKMGLN

SEQ ID NO: 156505 - protein, 30 aa, Heterodera glycines
AEPVDFIKHNLTIQSYYLSGECAEGADPAS

SEQ ID NO: 156506 - protein, 103 aa, Heterodera glycines
MGLLPSNLSISPLCNSFSNCHGFAPFPLALFVKLAAKSQLRYVPTFCQCFENWFPEENWKSKISKISCRISREYTQIDLDQFGIWTNEKRRRKFNFILFVNIS

SEQ ID NO: 156507 - protein, 84 aa, Heterodera glycines
SPSSKNAQISCRRCENSRLLQGYNTINNINPAYQNDQNYHTMLILIISSIFSLNFSKIMKYARSHSSMFCYFFVENTLINMLWC

SEQ ID NO: 156508 - protein, 220 aa, Heterodera glycines
TYDHVTVKPGPHINVVIGPNGTGKSSIICGICLAVGGSPKLLGRSDLIGDFVKHGKCEGSVDLFLWDSRRRRERCFSVHIKLPNSASFFVDNQSMKLTQLRELVKEYNIQAGPTELVQLHESLLEKSEEGNELQAQFDRGKKRMDQLELELKTKKARVDSYKEWSNEYESELDVQRQQLVELDEISTQLKNVEKVEKKRKKAVENIGRTAAELTEELEQM

SEQ ID NO: 156509 - protein, 93 aa, Heterodera glycines
MCFLLFARQGNMASKACPNKIIAKQSDYVQQQNANNSDLGDNKNGNANAILVMRMPRTRSQQRRVWLETLGEENKMSGEEEEEEEEEEDVILL

SEQ ID NO: 156510 - protein, 90 aa, Heterodera glycines
MFYRRIFALFLCIFVILFTLQFLPVIDGMQFDVVQCGHSKRCEFGGCAPGKAQNAASCAYLFSMEPEGPDSVRMGQTKIKNSYKENFSLT

SEQ ID NO: 156511 - protein, 103 aa, Heterodera glycines
MSSDLQSTAEQMMGQFDGAMALMHVIVMGRFGLTEKKKEQMPNIPTVLAIPFNSFLFSTDSSGLFVSPFFADDSFHPFVSLRSFGDKIEANFGANFKFDLDAL

SEQ ID NO: 156512 - protein, 97 aa, Heterodera glycines
MLYLNAHFLITVVPLLITLVPLLISVVPLLISVVPLLITVEPLLITLLISVVPLLITVEPLLITLLISVVPILITVEPLLITLLISVGPLLITVNLF

SEQ ID NO: 156513 - protein, 55 aa, Heterodera glycines
LAYTEWSERSLEAIIRHAQDFVMFLSKNHADFYDVEKDYMLAPAEYHKRVWGNHS

SEQ ID NO: 156514 - protein, 192 aa, Heterodera glycines
MPSRNLSAKKKQQNSLVRDESTSSPSRTPKSVSKASNSSSSQQKLQKKQNSSELSTISSGSVDSSMSTNPHGHPTDKKWTIGEKVLCRYLNSEHIYYEAKVMFLKDLSGGDVGYGIHYPGWSNRHDEVVPQHEALIRFKNYSDEEATKAKEDVKRAQQMLNAKKRKQSELKNRSQAHDESSRSSTPGSADNA

SEQ ID NO: 156515 - protein, 104 aa, Heterodera glycines
MSATKYPDPLWVFMPPPPTAFANASSPVNLIAIIRFPPIFGFYVVPFDLINELTREQLTMKKMNDINRVLLIRCPIVRDESKWAKWVEEAIGWNFMDQWNRIDI

SEQ ID NO: 156516 - protein, 1149 aa, Heterodera glycines
MRTKNLPSKLSNPEVLTSDESSASFESPAGTIYESFEALSIDSSKVASSPEGYTNVGAEIVIEETESNENPEGSGYDEVRNEGSSVTFKAMEVALDQVDAEGFANNGFDDEEPEACPPAKDVSKSSLLYLVSQAGDGYVIACKKSPKSKPNWPFFMNIEDKLIESAPGFQRKLEVGDFVAVSSFEWNQKLRYLAEHRQDATQSCKFWFNENTQLLPKQADATDVVQLMYMNIGRKQITGVVYWIKRKIQSVPSSFVHANIACCGLAVSARINRRHLDGINPEDLKLGSLVTVVVANIPQDSLVSMGYILPDASPYKLGTERRAETPEFFGAVACIRPHLLEWPNLNANMTPKVYPCSADTKHHVVAMEHVVGAALQIEMEREVDMMIEARFEGRARKFDGADCLIVFGSRSKKEVNELAKVWEPESQVKVFKELGEKHFALGVVKDVEVLHAEYEKLELHIVIFLNNIQERKNVDIARKVDEFIQGGSVVIHPVPATAVEDRLFCFRCNVPSIIADEDSPRGRIMAVLLGRPAMEGIRMEKESVDDSTDSWMEEEGPLHPAILALNSRQRVTARLMLGGGLVQQQAPPGTGKTKVAAAIIKAMMDSNPGFRIVVMACANIPVAKLVQEAEGTCAANDLDGARAIALFSGFARCKYTDQIKDVQRHTLPNKVNSEEFVKQLSPNVQKQVKEYLAHCEKNPRLAPERAIGKVFNSCMAPKIVFSTAAMAANLLHGEGNITDADVLLFDESTQAQWAVVVHLVARMPKLKALLLTGDRHQLGVHLQELPDIFHSGYGLESVILQAEASIGTNYTFLTKMYRSHPFLAKLISYASYELHNEQLIPARSAEERSLITGSDFLLPVQECPVGLINAFSSFRVDPKSDSLTDDHQTEVASFLVQALLEHFGNAFSSRIIVLCMYTYQTSEIERKLKHCGVRALTVDAYQAQECDVIIIVTTRSKYSEVGSGRTDNMHFFEDDQRATVALSRARHAVFIIGDLVSISAGQVWKRFIEMAITRTSVVRAEYVLALLGRTLVRSSTCLFDSAKRESVEDEGFLESWALKHGLRLDRTNSFGQQQSQQPRAPSFQFQNRHFPALQTTGPSDQAGPSGSGGQQRGAPTLAPQYGRGQGRRGPDNQWMHYGGNPKRQKGGRR

SEQ ID NO: 156517 - protein, 162 aa, Heterodera glycines; identical to SEQ ID NO: 132939

SEQ ID NO: 156518 - protein, 1826 aa, Heterodera glycines
MFPFSDGDPPNRSAAASNNALTDPEGLSNDLPELSVVDKLMFAGKILSTPARLSDVDKLHTDLVRTEDGVNRMTRHLNRTINQTNRDLTELKDDTQTLITQVNTLANSYGTVQVLQNQNQSPLVNNPPVLNWATPSPLRNPNNSFGNANTSVIEAIHSEEEDEEFELNPSGFHHVNMLFAESSPSFTIFSGNSPLEFDRWARKFMDLLDCNGRKWDDSEKVARLKACLDGEPRRIFDNLMPAHKATSSEAIQRIKENLDTPQNKELTYQALSMCKQREGESVDEFSARLIPLIEATTADLTTNASEEVLCRAFLEKLNPNLKFLTRTLSGPVRRDFQILRMNAREAEMMHREIPKSIPAPLFPISEQQNPRFNNTEPPNHPEGNFRTWAPTGSNREPISPRQRNRNNWDNNAQASRGSFNRSNNHPQNDRRWNNRTSRNDRRWNNQTPQNDRRWNARPVCNYCGKVGHLAFKCFKRREEFTQASKNLNFIRAIDEQNRLINDLSTKVNSLTFRNDQSAEAASQNINTIQKLTKSSTDKSPSMMNDTLKAPSKISNWETSKMVQPKFFPVLMGLTLISSLSSTLVKDFNTIPASPMICQTRVQPMTWSLPKFPRCPRMSIDTSKPLTKQRRTIYFPNSLEFSTKAWACRRIIKSIQKYTTISGVSVEQHLDSEQIVMSHDECLRMANNKHCSLGYLKNDSGLWHTDRKIDQTPRPWLLGSFSWKKVQSENCFAFETEVYSHIGATSIITPAGTAQACPYEKGNCVLFDKTVLVWVPQKDKMCKYSPIGIMDGHNLGNVWLSTLGDLGLTSSIVRNISDCGRNLTVSDQGPAFTINSQTPRHKRGIFGLDSEGVVTSSQLASQLSYLHTNISRSVNIAFAQAFNSFCDLMLDTQRWVQSSYLNDPTSLTRFIHQNNFLIAKRVGVSLLRTWPCVPLSQSDFEFRPTHTNSSCFEFLPIIVKLNGKEHIAFLNPTYLTVSLHSKTAPCEDQRNILIQMADRTIEVDQVDGTINNVHVHEIREVELDFGKPTRIPKLSPHAFHHLVILNLTDLATHAFASNLVQVSQFTYRADKTHSSEIKTTLSDEWSALEESIVQKAMGNYSLAWQIGITICLLLCMVDLLTRLFFAYIGIRLQDPVETLGRPMITTIANLFGRKKQNLDCDNKNHPNSPTKTIGHITSSHLRSVAATPINEATGQSFFRDTLNGNSCNFIEAYPQSSNSKEFKKIWFTKETNFSAWLNNYLSKPVNHEIPLLLPRNSGELAQFLDVATHFGKEIPNFNSKIGPISRISGDEHLKWDKQRVAAYQELCEEFQDIFSKSQYDLGSCTAGEHDIVTTSDTPVSSKPHRTPFKYRDELQKHIDQLLASGVMVESDTPWVSNIVLVQKKDGGLRPCIDFRKLNEVTVPDHYPLPRLETIMERIDPKTIREVKHVVGMASFFRKHVPNFSTIVEPLTRLTKKESNFEWGTEQAAAFNEVKRILTGKQNLLADGLSRYPHERTQEIAIRDLAELEDIANFPVCLALNMKPRMVHEHFLLTITARDIEGKTFAIDVRKEQNDDSESFCSLLYINKCYAIPHWSQGNAVVERSFRTFHNILAKYISSEEPDFDEFLECANFCYNTSIHSSTKETPFFLVFGRDPIFCIEQILNPNTEPENTSEVDNVKQKLVKSLRKAWESAAAVIKEAQLRSKVQYDKLVRNQTVQIGDRVLLRNYAGKVKTSKKFQLPWKGLYRVIEINGVLITIVSCTSPQTNPRIVHINQVKKYFECSGPPCTTKNLQKDEEQALKEVESREQINVPGYSHDSYQKISDNTVLIENTPALTPNPSPPSQSNN

SEQ ID NO: 156519 - protein, 223 aa, Heterodera glycines
MTYAAAFENFNLGEMRMISLPDGHSLMAFQGANDPFSNFHFSPFVHEEEKYCCVEQAFVMKKVRTYELNGVAAEVMQFVHKDDSTPNSPRWPDGHPRELKWFGREAEERASPATKRNWSENAQRSSIAFFVELKFRQNQHLAALLLATNDMWIAEACKDRKWAVGYYKDDPFLHNYPPENGAFGRNWMGNILMSLRMRMLNEQQSVAGPSRQIGKREDSIAYN

SEQ ID NO: 156520 - protein, 241 aa, Heterodera glycines
MEREAEGVPAQVPEVVVLDESIEENACGQNTDNENGVVEVLPLANPSDPLGLATVEPVVPEEVKEMEVDEQNGDQGGDSFGNGGFSGDESSSRHTFLSNKAKRLDQTNASKCSSSSQACLEDGALIDEFQAIGRAKDKLTKTRIQGPYPGKKEDEKAPKWYLVAQTAANGVVAARVQLAEQWPALIWVDNDIVQKTRPLEVGDSVKVVSVEWAQTATGWAGAGDWLIMVNKRLNHRSRAKE

SEQ ID NO: 156521 - protein, 1824 aa, Heterodera glycines
MSPVLLPAKLILQEVQNMNPKWDDELPANISKDWLKLMAQWLDRGEAITIEFPRHIQAIDSVEFHCFCDASKYGMGIAVYQKAKTTIMKDECNLIYAKSLVKPIKVAAHDGTIPKLELQALTLGVKAVKFIQAQIKFADHQVIMWTDSQCSVERLRENKRQDRFVTNRLQKIREANFQVRHVRTDSNPADMASRGADPQCLRSSLLWRFGPVWLSKADKWPKSNVIYRPGDEFKEVEEPPIIELTTPVHVEEQFKPSIHFERFSNWNRLKATAAHAMRFIKKLRTIENGTISEPHQNNKPLTMAQLQQAENWILRETQRLHPPSNDQIRELQLFRQEGIWRCGGRLEEAPDLPYDSKHPIFLPPHAWITKLIIRHYDKQLKHCGPRILLSTLREKFWIPRGRKTVQQLLNSPQHGCLECRRERVKPYTYPEASDLPRGRVSEARPFDKTGVDYFGPLKVKQSNDVVKIYVALFTCLAIRALHLEVAEDYSAEAFLRAFRRFTARRGIPSLIMSDQGTNFVAGAKVIKENWTDTLMPEDMQQQMAQSGIRWIFNTAHAPWKGGIWERLVGITKNALRRTVGRNLLTLDEFGTMLCEIEAIINNRPLTFESDQEPIKVLRPINFLIPYSKANNNFPIINNDTDDPTYEPYPTNRDKMVTTLSHVNARLNKFWEIWKSDYLLSLREHDRPNATTGLQTPNNGDIVIVEDDQMPRSLWNLARVEKVLIGKDGRARSALIKINGKLRDRAINQLYNLELSPEVPEQPIQQVHCLIASIMEDSVSLAGSDDEEQRPRNTEDFKIPKRRSALLRPIGEQQSPLQGQHKRRKQLHDSGLLKLFHAIADQQGSSKATIQAIAENREVRKAPQHEQIEHEQQMVQKAQKEAKRHLRTEQHEREMPQPQKEEQQREAERQQIERQQNDEQRATNQQAHSKAWQELAQQFDYDLMDQPDPTEKHAEETDQSTKSKQQSAKDKELERHRIGRKKTIDMQEKRQRSRDEWPEENETLLSYVQRIYGPENWTSAWQRGRVLRELHELEDQGRWMIHHKTDRLQLSVSRLYGGKRPFAEFRFVDGGYYSHMVPEDVIFLQAVPTEEPEIITLDDTPTTEKTATDNAKQPKQPKTSAPTIEEYRMADPKPNNFNEFNLFEPCDDSHTTCAKTATYGSIAGNRFQVEEFNNCRATNFFQALIFNWLTRNMNLPADEIWAAHDNYTQLNAVTEEIAKKFHQQQVVSKGRQIGRDQHFTEVINVWRNSCDRFGELYNQPAHKQVKFRPIIPEKEQPSDYEEWIERLNNRTAEILTKARAKVQHPTFLNYNCTTILIGDNVAEVFKPLFYDAKWFTHFPADEFRLIPGPKVKHMIFAYQATADNMAAQIAPMLHRFLRSDIEITLIVAKDDNAQWINNKKYLIDITRELKAGFFVFNREMGEARQIANRIRQAIPEPMDLEQELGPSSSTNTSRQGPSTSRQVISSLMLISMFCLLFTGTAQGLPSRQKRITQVKAWHGGHVSNFLNIFTERDRRASTKYSPYVQRYIDKVLALNRSLSQSTNPPRSTTPPWTTIQPTTTTSRPRTTTTTATTTTTRTTNWPTRLTTRPTARTTTTTPMPWSMDHRTTTVSRVRQQQRPRPGIKLIRWPKSTITTEKGRDVFWCSNHGSTLWELKGPENSPFCRPPPALTAQWTPLTITLYTKIHRPEPIATAWHCSIKTTTENYYTNIVGDKFVEINKEFPLVSKRLCQRMAHQQECPLAKTEMHHDDNNRIWATNDQLQVDFPGPITGLFKGKQTSSATNCFAQPATLFVKWHSLQLLSPIHRADHCNYASEYCQLHDNSSLI

SEQ ID NO: 156522 - protein, 34 aa, Heterodera glycines
MVQLDSYDALKTKGYIKGVKGPFDWYIVSKMQKR

SEQ ID NO: 156523 - protein, 227 aa, Heterodera glycines
DESDQCDEDALSQLMLHSELFRQRSSVGVQTDYNEEFPPLKFLRALGEDPTMMGHPPFFFNASGAISEVPSSQQQAHQLSMPNLSASVPATAASAAMNAANAVDATSSASSDGMLQLVIQNFRHMSDTVRGPCKYIQGVPWRIMVMPRQHVVQKKGTQKCLGFFLQCCPDAYSESWSCQASAELRLISQKHGVPNFTRKTNHVYTAKENDWGYSCFMTWADILDEAQ

SEQ ID NO: 156524 - protein, 207 aa, Heterodera glycines
RKRNNDAYSFEDDELLAVSSYSVSEVLQSAKRSTEGFNRIGKEEDQHSKTPKRKYTRQNSSSIEMANAKITERTNSVNSILTERMKRKARSLFASSEIANDDHSVLTDIPIPTCTMRSCSSNENECTPLLPKLIIRFPKKESSSNDEQTAQKHATHKGNKRKKRDKDVDWTETKQWHGARTKDKHHREKGHRKGHHKKRKYSTEADQ

SEQ ID NO: 156525 - protein, 255 aa, Heterodera glycines
MFFFAIFLFFTFFPIAGQNLLKNENKYKFIPRGQYEIIIAKGQYDGPKQFGFLTNRDGTIEWNFLDNFHRNKLINNQFKDLKSQEKFTILVQKENDKRIIRTFKNYAEMHRTMNQKEGTFYARNQIFFNNLPKAPPDLPVDWIGNSSYTFLPPRKYRIIVASGPYDGQKQTEFLTDNDGKIEQNFLGNFLDKRLNDGWNINPPESAEKITILVEKGNDKRIISEYTNYAELKKTMDENDGKLFNSNYIDFEALTV

SEQ ID NO: 156526 - protein, 184 aa, Heterodera glycines
MTIVGEIKVQLGNVICHRLRVVIPIKLSQSDREAGDDQHENEAELGHIDQHAAQGDLQGSQVGIGLEQVDDAGEAEMCRTWPAVPMAQLQPSRTQPEHVADSEQRLTDQHGLKRIPMRADDVAGCELLANVVHHVNRIGRKSVQKKGRRNERRQNRKGRERRRTKCQREEGQTEWKWCTSTDRP

SEQ ID NO: 156527 - protein, 452 aa, Heterodera glycines
SRSNWAIKYEQKTFVAHPHCQQLLTSIWFVAHPHCQQLLTSIWYEGFPLKRHRSSSLRTLLIALLLVLGWPLMALCYIAFPKSRVGEIVRSPFMKFLYYSTSFGCFLALLTMVTFEAHREQTGEVKGGTATRAADRGPTPTLIEWLVFIWVIGMLWSEIKMLWSEIKQMWWRGFTKYIHQWWNWLDFVMVGFTKYIHQWWNWLDFVMVCLYLCTISIRSSFFPLAFRSSPLRHVIRTHWNAFEPVLVSEALFAVGNVFSFARIIYLFQTNFARIIYLFQTNPYLGPLQISLGCMLVDVAKFCFIFVLIISSFSIGLAQLYWYYDSQTPVCLSSDRCKIVPNAPVCLSSDRCKIVPNAFSSIASSYMTLLWSLFSITKVEDTEVVEAHHFTVWVVVEAHHFTVWVGRGLFILYHMLFILYHMTSIIVLLTSIIVLLNMLIGKTVPSVTRKDSL

SEQ ID NO: 156528 - protein, 250 aa, Heterodera glycines
YFLIPNQKRARVRFADDCGQCLETVRVMTEPSDYPPKISPGVLYRIRDEFEAEEERQRKGGPIHRRSWKMAFKQPASEYVHFRDTLDRQRVALENVMLKNELSRMVGTIKVANMAFEKHVFVRHTANGWKTFSDVEAQWQCSPSKAFDTFRFDVPLPRNNECFIRFEFCVRFLAGSSPSVEEHWDSNDGKNFVLLSQDQFPTTMTASSSSPVLASSQPSFWHCRINRRRQRHTDYGRHAKSGGSASSPFL

SEQ ID NO: 156529 - protein, 340 aa, Heterodera glycines
MESTGFQQRYNFRVRRPINYMEQEESSHSRHSRRNGTEQNNGLNLAPQNILDNVQDPNPFPRNFENSIPQQVGVQQNVEEQMQLAVFRPPNQNVAQSFGNPRAHSTPQNVSPHISYNGQQENFEQNQNRNPDANRYGNHRRQNPRIFVNSQMANNHQFSARNSQNFVPNQGIRAQPVRNAHNPGYGELIGEQNRNVHNPNYGREIGMNYPIQNVRDFGNGPNFPNYNPVRNMNQQNYQQQPNPNFEPQPNQFQPFLPDQFPNTQNFEFVPQQNFLQNQIPDIVMELHKVTLSNQYANTLREIPNLYGTEGRDKIKDFFLNVQMCAGEWRPEKQKELLQTK

SEQ ID NO: 156530 - protein, 60 aa, Heterodera glycines
MHIFRPIEFYNCNFISGKCAFSDRILQLYFISVALRCASRAVPNGWNKCTKDLPKLAVHA

SEQ ID NO: 156531 - protein, 138 aa, Heterodera glycines
NFASTTSLLVARRAAEVLEFGGQLFGQLKSQQQDVQLVAEHFEYRRQSAHFNASTRLEKTAFPTAFRLIASIMHEQPILANLLCICSTRSALLGWRNAMQLQLMDCSLWSDFALRSRNPHGAALGPLADAAPSTFQRL

SEQ ID NO: 156532 - protein, 62 aa, Heterodera glycines
MPISDFKMHLWPADFTIMPWTNYQHLGARNYCQFMAVQPTSLVSPLAQGSLDIFMPDKGIIF

SEQ ID NO: 156533 - protein, 68 aa, Heterodera glycines
MERHVFPDMDERYDDIQQDFLKAFLGKQSKSPRWKDCSSSVSQRMSYASGAMYVRKHLTRRAKRPHGN

SEQ ID NO: 156534 - protein, 199 aa, Heterodera glycines
VIGHEITHGFDDQGHDGINLKDWWTRTRSSTCGAKGRCIIDQYSSRCIIDQYSSFEVPDINLHVNGILTQGENIADNGGIKQAYQAYKTYLNKLGREEAYKTYLNKLGREEKRLPGFERYNNEQIFFISFAQTWCGHTKPETLIRQILTDPLIRQILTDPHSPYRYRVNGVVANQPEFTRAFGCPAGARMNPARRCSVW

SEQ ID NO: 156535 - protein, 38 aa, Heterodera glycines
MTIYAAGLVEDPFAFFHSSSLVAKWLFCLPEVVYFILK

SEQ ID NO: 156536 - protein, 62 aa, Heterodera glycines
MRISDKRLISEGLQNRYRSDPAFAETSHMITALAFVPIQHLTAAITALNDVVGQELDQILGW

SEQ ID NO: 156537 - protein, 48 aa, Heterodera glycines
MNIMRIFCFRLIIKTREIIHEITSTLIYNNKKTNVKNQDTQNQFIRPF

SEQ ID NO: 156538 - protein, 146 aa, Heterodera glycines
MLIYIYNCFITSCADGASATNIWQWYYTKGAVSGTNFTTGLGCKPYLINSSEPDESLFCKKECDGQSPFGYREGRIFNLSSQPSRWNGLEKNREADMMMEIYENGPIQVGVTANRALLYYGKSNGRINIYVFLFIFFPFFSKYFIK

SEQ ID NO: 156539 - protein, 140 aa, Heterodera glycines
MNSVSLIATRLCIEALVFTVPYSDLPSDTCITTTTTTLSKQETQTDKDLKRKALVETGLMAYSMQDGARLKKAKTAINVLGNLLLAESLDNKVTNSPVDEENMQDERRQEDDLKIVLSFFYTFWFCSIIYLFMGFYYVIQ

SEQ ID NO: 156540 - protein, 91 aa, Heterodera glycines
MGWKKTVDDYYTGANGKISNAGVRYILNTVVDELQKDQRRRFSYAETGFLTRWVEEMAPDRVEQLRKLVVEKGNFNNKVKIVPQPSLIEKF

SEQ ID NO: 156541 - protein, 286 aa, Heterodera glycines
TCPTVTCPPTRAPLLLPPPPPPPRPRAPPPPPPPPGRRPRHGPSPPAPPPPPTPAGRSFRPPPIPPAPAPYPPSSPPPHPERPPRPSRAAAPSRRDSPSPPRLPLPPRLKTKAELRPPPPPPPPPRRPSVKIEKKEQNLVEMKASTPKQADHPTPAPRANREPMSGLDPRPSTSRQAGYFPPATYKIEPKHEPTKRPMPYRIPKKEPKSKEKPPQTQQQQPPPAAKTPVTPKVPTPPPAISPTPTIVKTPAPPSDTTPSPPTTVKPPVTVPPPITKPITPAPPPAT

SEQ ID NO: 156542 - protein, 80 aa, Heterodera glycines
MDSADRRSPTPDMELCELSSWYDILQDDDDNILNWFTPVTARDVCQEVLAFAQERRMPFEKIVKWKQILDKICAQIAQKK

SEQ ID NO: 156543 - protein, 107 aa, Heterodera glycines
MPGEEPSPRAILTGHDSEISAICVSAEHGIVLSGSTDGALLMHSTQGDLLRSIICSNGNGTDTLAPINNILFSRDCYIAQCDSPIRSLALSTNQRLIFGGLDSGAIV

SEQ ID NO: 156544 - protein, 53 aa, Heterodera glycines
MRTEEKLDILKKAGPGPGFHVGLGPGFPGQKSRSRKNPGSSRPGSRPGPGFFN

SEQ ID NO: 156545 - protein, 76 aa, Heterodera glycines
MRRAFAGSAFRDRIRGIGPMHALGHGAVAAQFVRPSISTDREIILICYLGSLDPSGSNWAYGMSPEIQFQVPNHQE

SEQ ID NO: 156546 - protein, 77 aa, Heterodera glycines
MSPEIQFQVPNHQESKVAEECLEYQKKFDKKINQIASHWHGVRVSAPKAFGGIMIELSIAKEKWKLKMELEWDGVAI

SEQ ID NO: 156547 - protein, 57 aa, Heterodera glycines
MDERDCTIGQLTIRQWNPTVVDNRTMDNPTINYTQRYENAVPKAIDCADLKKIGNKL

SEQ ID NO: 156548 - protein, 22 aa, Heterodera glycines
ASQVPESPGPGFAQNSRSRGTL

SEQ ID NO: 156549 - protein, 108 aa, Heterodera glycines
MADSSAPVDKEEPWVRRFPPYRCSIEVEELNEFYVLHQQVVPNRVVPCCVDCVEITEIAAIAVEKINSDRISEGMKPLNLVRIIHATTQYVSGRSFCLQILFKQTKVN

SEQ ID NO: 156550 - protein, 77 aa, Heterodera glycines
MSDFHGTILSQIIVENYKNFQSLTIYLCLFKKYLKTKASARNVLCGCMDDPDKIQRLHSFTDPIAVYFLNRNCSNFL

SEQ ID NO: 156551 - protein, 86 aa, Heterodera glycines
KNRFIFVFGAVPPNRCAQIYGETESFGNSFPIACTLILRWIFAPHNCLSTPNGHLKKSIFLFSGQSPRTDAPRFMGRPNPSGVASL

SEQ ID NO: 156552 - protein, 343 aa, Heterodera glycines
FISADCWLCVFDLITPSQLGLGIAMISHGFDFYVDEHFKTRKWTFGNIRINNKIGENGQKKMEITNCRWKSMQIPQKPLPKKVVGFEDILIRHINNSAIAFLRHFRPLFAKCQINLAMRTNSRRTLEFILRNIWPMIEKNIHGFELPVGIFHRLRQFTPSLLNECPSLRIVKLYGFDDFFTEFPADDNATASDRQAVAKWLFTPRPDNVPKVLKCSLLMDMGDGVLSPSIEALKTAFFNASSPVNFIVIVYSFDDSVVPFYLTNELTREQLALKRINFSNRVLLIRCPIERDESKWAKWEEEAIGWDCFYQWNQIDIRIDDGEIEDGSVLLDETPGPSDQHQK

SEQ ID NO: 156553 - protein, 41 aa, Heterodera glycines
MAYSKATKRDPEKEKKHAESKYVLRFESSFSLSLYSSNFMH

SEQ ID NO: 156554 - protein, 129 aa, Heterodera glycines
MSCFFSPLALYWSLLLLFPGNAFANLKCQNAMTNEAYEVPNDNVLVKLFQDGKLSIGEEMKQFVCDLSKQSMALEAADTDTSAQLTECQQPMAAQLIPNLRSAIRKLTTAINGGKNGTVYNKTVNPNLF

SEQ ID NO: 156555 - protein, 208 aa, Heterodera glycines
WYRTPSRLATVLLPFHVADITPPTSTSVPIIAAFFSISMVILGSSIIFTLLIINVHFRSPRTHKMSPWVRTIFLEWLPWLLLMNRPGKQFKKPKRKRRRALVARVPLRTAPAQCHQRVFPVQLCTSESTTSRSTLNSFRELSDFLLLSQQIMEEEEEEEEAKADWRFMAMCLSHSSLSFSLSLSFSLSLFLFSISPTLLSLSPSLSLS

SEQ ID NO: 156556 - protein, 200 aa, Heterodera glycines
WARWSDYKMVWDPREYGGIDRIRLPSSTLWKPDVILFNSADENFDARFAVNFVVDHDGADENFDARFAVNFVVDHDGSILQTPPAIIKSSCQIDITWFPFDEQIFPFDEQICHFQFGSWSHTRNSLDLCVNGTSLDMVKDSIADLGYYVHNGEWEVIVDLGYYVHNGEWEVIVVELHFVANFLKFSFPHQFIHIRRKTIY

SEQ ID NO: 156557 - protein, 112 aa, Heterodera glycines
MNFLTLIILLLIIPCVFGHYQWVQVLLRLFRWIVPRTLTLSASVASVRTAASYRTALSTIGRAASHGKLKILASGSAGLGGGAGGTMLLMELLEKNRNDIKGSPELDKSSKH

SEQ ID NO: 156558 - protein, 85 aa, Heterodera glycines
MLVEITERAMAHSGTAEVLIVGGVGCNERLQQMMDTMAQERGAKLFATDERFCIDNGAMIAQAGWEMYRAGLRASLDQAINSLTH

SEQ ID NO: 156559 - protein, 236 aa, Heterodera glycines
MVCILGIEGSANKIGVGIVRDGTVLANPRRTFHAPPGQGFRPTETAVHHRQHIVSLVIEALQEAQIKDPVLELDAIVYTKGPGMGAPVKVGAVVARTLGQLWAKPILPVNHCIGHIEMGRLITGAENPVILYVSGGNTQVISYLNHCYCIFGETLDIAVGNCLDRFARVLCLSNEPSPGHNIEQLAKQGTKFYPLPYAVKGMDLSLSGILSHIEKAAPALIRSGAYTAADLCYSLQ

SEQ ID NO: 156560 - protein, 115 aa, Heterodera glycines
MHEIMYALVKKKYIINKKMIFIHCHFVRPCNNEHSNFYLVCLMSPVRSVVAHRTKVLSIYKHLLRRFCAEFELSDPDYLSQRIRDEFRANKELSNKQAEHKLKKLEQIVKQKLVI

SEQ ID NO: 156561 - protein, 490 aa, Heterodera glycines
FNNGKFVQISHKPQKVHSCPVKCLEWCGPNAFISAAYLSSLSASSSTVRNDIFITDIRTGTKRRVRPEQEEGPVELLRVSHYGCYLAISFRSDPLEIWDLNTFRLLRRMSKKCPVIVDMAWSTKHHQVKLWKSGAALLRCMVWKDDVLAFGDSAGRVGVWDLARSQCRQTGLSQSTRGPVQRVVFSRLTGDYTLAAQHPTSVVVWDTERLQSLFSLQKPGHSIIDIDMCGLNPVYIASDGMFRFAFSDTDEKSRTNNTNLNTSPPLIKSGPDFVTSNFFKYFFLLSDIPLLLRPSYCQALLSLLSTDTPPAAVAEQNNNDDTTTKSNQENAVPFGIDHDGHQLHTFDDPDIDHLINRLSAKCCRTPLDRAIVLHQFVGQQCLADLGRIVQCAATTTISTAGDDAANRPPPPQLRQPMLPPNLMLFWPKKAYQKRVERFTRLLLSTFRTERQLEMAIEKCVIMRKNDLALYYLLNNDQLAFGGGAATAGAW

SEQ ID NO: 156562 - protein, 187 aa, Heterodera glycines
MSFLNVPEILKQKLIEVEGTLKAISPQSSHGESLPAPAQYAEPLSFKKGRFLLWKGVETGFLYLTGHPNPGSLTVYDYKNGTANAVLCFSHQFGPTALIIDAIYFPLSTDHPGILVAVTDRSMDQHGDYLAYFSLLSHTLLNAFYVPQPITSICSILDGSAQRDQFLRLSNSFHKVFLELLDYAIIC

SEQ ID NO: 156563 - protein, 110 aa, Heterodera glycines
MYYSYFLCPTIVVSFVMDGSVPQAFGHLSPGSVTLSVILIQVDEIMEQIMFQMLATHPSDMNRETIGPRVLAVRVLDTSWVFILLDISWLGHFVHFCLYELSSWYSEAIL

SEQ ID NO: 156564 - protein, 63 aa, Heterodera glycines
MNLQFLVFRLAPGNCRPSKFQKNHWPKLFGRPRRRMPRSGHGSARCWDSEWAGWGISNSNLGN

SEQ ID NO: 156565 - protein, 278 aa, Heterodera glycines
MSNLSGSDQQHATPNQPGGQQFGAIQQPLWSQLAPQNQFFGAIPPPSHQFTAPPPSVQHVAAGGGVQPPQQFPGPIAGGGAGSVQPQQPQQHSQFFGGIPPQQFTGPVAGSVQPQQPQQHSQFFGGIPPQQSTGPVAGSVQPQQPQQHSQFFGGIPPQQFTGPQPLPHVAGGVQQQQQFFGGFQPRQFGVHPVRPYPQFGTAQQFVGQHNPKLDHQFFAHSNASGVPQRPFMPPPPQYHHPQYQSGGYLPNIAQFCVDGTTSTAFLNGCVDTFNRVLP

SEQ ID NO: 156566 - protein, 170 aa, Heterodera glycines
MSKHFGHHQPFTFYKAKFLEKASGVKLMHLTSEETKTFDHQKAFDELEKNILAKLEQMDMKLGSNAQGWSSFLMKSVGIGIGAVIFLQIAKRIIHSHTKKGVRRHGQFLFRMTDFKAFSQGNGPKEVKSDTIGYINGMPWQIAIQNNGASIGLFLNCSSLKIRKCDPIGS

SEQ ID NO: 156567 - protein, 19 aa, Heterodera glycines
CHGTRKLLLGRVKCDGTRK

SEQ ID NO: 156568 - protein, 53 aa, Heterodera glycines
ECHGTGNFCQNRDRDLPGPEKPGPGPGPRFFFGTGNREILKIQKNFKNLKKNS

SEQ ID NO: 156569 - protein, 97 aa, Heterodera glycines
MCPKVEKMAVIEKGMEKETGDRPTTHLKECPMTTPAGIFQGFDEGEDGQREAGPRAVDKLLPLVVEFMLENEVGFEGERGMIGSMATRTKGNSYFTK

SEQ ID NO: 156570 - protein, 978 aa, Heterodera glycines
MENRPPKRPFPFTINDILTTPPPPKTLQQGFLINQLLGLTVQEGEGAESSSNKKLPSEFVEKLECSVEHVAKFNYTKVKSSFVIRDVPADPESLLSSIFKHCIDEAKSDSREKSSEPTHLGCLISSALLDGGDVFVPVRQITANTIDAILNLFTKVAQSKQQKGVTLWGEPFTITITTIDRSGLPVKRHIKGGARRRLTHVQHQVHEKCLIKINNQNWDNSDNNYCLFYALQATMVSKTRGWPSWKFFRYINDQFGQRGLLHQETVQLMRQIKVPLDLDAYDADTYVPLVINHWNNAQQRHRFAVFIFGTTGHYKPLYKYGNDDYDTPLVLYFNNTHFDDVHFLSGLFGGKKYCLECEKPYKKPSEHNQTCKAHCLMCSRVGPAFPCPSEPDFFRKCKECHKNFNNAGCYNHHLQSNYCKRSKKCKDCGVIWNVADNNRRGRKGHVCGEKFCQLCNNFHSTERGCFIAPLEPKDEMEAYRFVAFDLETMQHLPADPHLPERRNHEPNFIAAKVSCPMCIENGRWKQGTAGCWICGPHRTVAFCQRPFTDTPVDKQVVTDNPMQAFVGWLINDLPIKANTFAYSHFGGRFDMVITFRELFRRGYNPEMIRRVSMFLHIFYSDKQIKGNKMYEMKLRAQKNRHPNIVFRDSFNLMPCALGQLVPAYGLDVEEKPFFPHMVNRPDNYGREIFPTPDDYLAHGMMPEKRRQFDNWYEQHRSEPFFLDEALASYCTNDVEILMAALVAFRREFLEITRRQEPVDGRETHNGIDVLKQCMTIASACMKHFRTNHLPAGHLAIVPERGYDNAQNQSLLALRFFKWYAEKHGVQLQTAHSAGGEKRVANYSLDAWIEAEKRAIEVNGCVWHGCSKCFPEDNMLLPNGKSAGEVRERDAKRLEFLRNQVGVVDVYWECEIERMLASDPEMRQAFAGYVDDGPLEIRAAFMGGRTGPLKLFHKAREGEKISYYDFTSLYPFIKSFLIS

SEQ ID NO: 156571 - protein, 677 aa, Heterodera glycines
MPEKRRQFNNWYEQHRSEPFFLDEALASYCTNDVEILMAALVAFRREFLQITRRQEPVDGRETHNGIDVLKQCMTIASACMKHFRTNHLPADHLAIVPERGYDNAQNQSLLALRFFKWYAEKHGVQLQTAHSAGGEKRVANYSLDAWIEAEKRAIEVNGCVWHGCSKCFPEDNMLLPNGKSAGEVRERDAKRLEFLRNQVGVVDVYWECEIERMLASDPEMRQAFAGYVDDGPQEIRAAFMGGRTGPLKLFHKAREGEKISYYDFTSLYPFINFTTRYPIGHPKVHVLNEEVEWKCATDNPYDLSLLKVWVIPPRQCDVPVLPVKVDDRLCFPLCYKCAKKYPTGGVDNDYHCRHSDEQRGWVSTCTSLELNAALDEGYRVTKVFRVLQYEQSDDQLFRSYISEFMALKIQASGFDSSIKGNTEMEQEFVRECYENFGITIDPAKMEPNRGKRSIAKLCLNNLWGRFSLRNFGLSQTLVTDDPAVLAEYLDNRSLEVTAIDELDAEHILISYETKKEWVEENSCSNIDTDSIILTHPDDNCPLKTGPHLGQFTDEYPKHEILEFCSGGAKQYGLKLRRKDAPPDAENEYVLKVRGMTLNYDVIQNQGLRYETFKEKVLRFAETGEPQPINVIYPNFLRPSIKDGRVISCPLQKIYKPFVGKGIVGADYKILDFGHTL

SEQ ID NO: 156572 - protein, 38 aa, Heterodera glycines
MPIIREGGGAVLINNLLKQLRLKVGQANKTHGNNDRHN

SEQ ID NO: 156573 - protein, 150 aa, Heterodera glycines
SRQSFTLIYAGWVEFCLKRKSADTENENGYNSVQNASLVTSFCFALSMLGRRALGTAAYNRHSSAAESFLFGMHTLFKGDMRIAHPADEWVFADLDILNSVVSPAIRMALKLHQDHFAAVVDLDEPAELFELIDDYRKRLFISHEHDPEW

SEQ ID NO: 156574 - protein, 101 aa, Heterodera glycines
MVIIFKNGAKNWGLTKRNAINQKLMKKTKEWHQNYAEICKKIGVSYGTIMQWKKQSGLSNKRITEEEKIEKLKIYWQTKRENPKKSERAFAKMLKIDRKNI

SEQ ID NO: 156575 - protein, 327 aa, Heterodera glycines
GPLESWPSGRGTGSLYLRLGTLCFGSSGIVLFCLEVFICFFGSSGIVLFCLEVFICFSDKACFNYQLINWLFAGTFTFIQMHFIFCNSKLIIVDSKNSAKLGTMLIIVDSKNSAKLGTMHLLAVNIWTWLRFVIAKNAALDKPWYQLLQIFRLKRDLTNGVSWYQLLQIFRLKRDLTNGVSSEEMEQSAPTDGRVGVRPSKAPLPSKVYSFNYFGDFATLLTTCIVEYSVIGAAVMVCLWREYSVIGAAVMVCLWRSIGEHRTESEGKSCDETKPQKEHKSGKSGILAGLYLIGHLSRGKQTLVTHLSDSPGAAARGSIPDLVTMTP

SEQ ID NO: 156576 - protein, 124 aa, Heterodera glycines
SYVVSLLVVGCGSILWFFWDYVKKRRRQNKKEIFISADCWLKVFDLLPRSQLGLGIALISRRFDRRVDEHFKTRKWKLDNKLWIHKRKGWNGTTEMKIVNANGGKALPIPQIPLPNKSSYSDAF

SEQ ID NO: 156577 - protein, 19 aa, Heterodera glycines
GPGSRSRVLKSSGPGPGRA

SEQ ID NO: 156578 - protein, 113 aa, Heterodera glycines
MWHSKPATEPILHANGTIPSANCGHFVCFASHKFELFSDIAKDEDAQSAIIDEILWNTEQRSLETSLRERSVSFHQRENHTQTEIIGRHGKMKEQKSERKGKLKLAQLKRRQK

SEQ ID NO: 156579 - protein, 148 aa, Heterodera glycines
MPNLKRKSRFHIVKDGQREAAVFAGKGVQTLNVHHQQQQNIDNETVARPKQTPMFGGPTNAHQRAIREAFRYAWNAYKKYAWGHDQLMPISHSFHEWMECASRSQHTGFIWVFWTRSYNRRLTGYPVDHGFAGRICGRQTMGGDGIAL

SEQ ID NO: 156580 - protein, 352 aa, Heterodera glycines
MEKARKSTPPRSMTLEALLEECRSIQSLKNSAAALSGPGQVHSVQVRPQRVSDGSKKSNRGKMVNQKGNVSVPISKENNFPFNSNRTDQDQNVQQKCKRCGQFHVNDCPYAADVNCYRCGKRGHIRPVCPERTQSNAVTVASTFCVTQKCHDWIWTHPLINGHPVKLAADSCSHLTIIQEPLWISLGSPKLRKQVANTGAPNIMGLDWIVPFEKATQSPIATTLDLSSAPTKVNTIDERPRHFKIGDTVRVLNYGKSGKSNWFEGKVVAGKGLIWKVKIPLLNITVNRHVNQMRSFVPYQSETTFPNDTVDQVPQQKSPCHSTVTTTPPTNLPVQPTQRPQRQRRPPIRYSP

SEQ ID NO: 156581 - protein, 118 aa, Heterodera glycines
MYYKIVSFYGFQATASSTVLKDTKSVRFAQQKVVLFELGRCQIRLPIGSDCWPAQIPLTARLRGAGPEPNGRRMCIMMDPVNGKSRGYGFLIYTDKTHAQEAAKKTNLCHQQTHSHIF

SEQ ID NO: 156582 - protein, 174 aa, Heterodera glycines
MASPSDLDMKMVPQNGDFKHDVSEEVQQQQQQQHQEQKQPNDLVKNDEDGGGAEAGQDGTAPTETEQKPSPELESDTTYDDTDTFKMFMGKSLSKPVAVILMRMFDELGLNTDEFDERAVEMLATFPFEQANFILKELKVLLFVHFFFWFTWVGTRGCYFEKEAEIVIRPASGI

SEQ ID NO: 156583 - protein, 29 aa, Heterodera glycines
MLIIYYYLFCYIIKRIVRFMMWSCKTDKF

SEQ ID NO: 156584 - protein, 104 aa, Heterodera glycines
MVLQFLEAQFLQQQQQEEDEDDEEEDESEEEEKEEEGEKESNEREGGEENGQKGGEQRDVRNEKGEQDEVAKSWGIEPNRKRIKGRRFSQQTTFEFELSKNNVL

SEQ ID NO: 156585 - protein, 340 aa, Heterodera glycines
MEEFAIETTLHILDNNGRTVVATFEHFLDNKRKFVDLVEFWEEDAAIQARLKGVRKTCANGQILEVNKYVQGGMYVFQARILLAYQAAKNHDSDGDFEFICEGHEVVLSPCESATAMVNRMTLFYSNSFSLISSEQSGTGQIWRALLSSSDEQSLPAQITETRHIRHPALKRLEGGQKQSAMLMLDDQPRIVAQQAPPGSGKTFTLAAIVAALLERPDAKFLCMAPLNVAVVKICEELVDALRVEGVAVTPLALFSGNGKGKYRDQLDRISDNLLEAAATSEEFWKKLNEKEQKEVKRYKNMPEKGRELPKRRKLQKLCSQLKAKEFCVAHWVLRNKLAD

SEQ ID NO: 156586 - protein, 174 aa, Heterodera glycines
IMDRNMIVLDESGQAPFVQVCSVLSPLQEVQKLFITGDRYQLAVNMKDIPEQLRVGFGFDTVLLNTDSSPGVDKTTLEVNYRSHPEIVNCVEYAAYTPHGERLRSGPGIFRMLTSFAKMPIAESPIVLIHQDSPMEAEETSFSATNSGQTRTVIDLLRSWRGFPGSVRVISLYS

SEQ ID NO: 156587 - protein, 16 aa, Heterodera glycines
MRERRDPCRLFCGMAW

SEQ ID NO: 156588 - protein, 382 aa, Heterodera glycines
KAKLHLKENSNSVFCRARPVPHGVQEAVDHEILDRLLEIDANRSIDFSQWAAAVRKKNGAVRICIDFTTGLNEALELNRHPLPRTDDIFHSLRGSKIFSQLDLRDAYLQLELDDESKALVGINTHRGLFQYQLPFGVKSAPSFQKVMDQLTSGISGVFVHFGDLIIASPNMAEHLLVQRELKFLGHIVSADGIRPDPSRSAAIREMPPPHDLCTLRSFLGAINYYGRFIKKMRTIRAPLDLLLKKETPWEWGPKQQKLLNRQKAADASQHGIGATAADASQHGIGATISHKFPDGSEKVVEHACRSLTSAERNYSQIEREALGLFFAVRKFHRMVYGRKFVLLTDHKPLLAIFGGKKGIPIYTASRLQRWKMKILNFFTLNF

SEQ ID NO: 156589 - protein, 74 aa, Heterodera glycines
MCAAFFPIETQTAAREIIIPSFYNVANFPGVIGAIDCTHVRIIPPASAHEKDYFNRKGYPSINVQGTIHIKWTE

SEQ ID NO: 156590 - protein, 96 aa, Heterodera glycines
MVARLIAREQEESAEFSSQQVVVEEGKSYAVLGTVPRGEAVKTPKFESSTSRVPFRSRAGTASTVTAADDVLDDVKTFFTEGREFFRGKHSNEKET

SEQ ID NO: 156591 - protein, 66 aa, Heterodera glycines
VIVHLCNSFASDHLQSPHVMEHTLRCPLLKFSRPTFGIAQSIALPLDVSFPSVHTFPPSPPLLLLF

SEQ ID NO: 156592 - protein, 146 aa, Heterodera glycines
  unsure (1)..(146): unsure at all Xaa locations
MQRPIIVNIIALANLGTGIKLNSLTITECEFKYNPRKFNAAVIKCISPIKATALLWESGKMICLGTKSLIDCENAIKIFIEIIKGSGCPGASYTXLNFKRGKSMTALIFWTGKVVITGTKNNSEIEEMYHHILPYLKMAQKNLMRR

SEQ ID NO: 156593 - protein, 44 aa, Heterodera glycines
MAVVRLRMFAHRTALAAAIRLEQTPHIVNRTFFQNTFCQSLAVR

SEQ ID NO: 156594 - protein, 141 aa, Heterodera glycines
MPNKAQLKRNIKTMCTTDNEEEKAEPWKKFCKMFSRVQQMPLNASTPVTPKPPFWLVTDPFWRPVVMTMFYTTLVMCGLLFVFVYAYSYSFIACCLVWQTMEELYCNPVMILNSLKRRRKPSLILLYCLANGKRLDLYVCN

SEQ ID NO: 156595 - protein, 141 aa, Heterodera glycines; identical to SEQ ID NO: 156594

SEQ ID NO: 156596 - protein, 153 aa, Heterodera glycines
NLRINSAGFESRHHQQQQEGIKEESEFSIIKKTTILLPTFLQVLGYDISWTTFNIIEVMSSTRYSEKRIGYLAAVQAFNDETDVLMLTTNLIRKDLQSSNTDDVGVALIVSGLSCFTTTDLVLDTAEELLKTGKCKFSIICKKAIGFLAHVFI

SEQ ID NO: 156597 - protein, 164 aa, Heterodera glycines
MPIQQCHLPYSFTYWPKGGIGFPYPPYSTHGQSILRPKRVGPSVHQRNQQLDPVIPTQHILNAALSCSRVLACLFYRLFAAPLSPYPYELYKCPVWQFQLRLGIILQLNGSTKAEEITMSPGITHHWPLAKLSVTFTPSGLPPLPILGSDFIANRSHAALVPEW

SEQ ID NO: 156598 - protein, 57 aa, Heterodera glycines
SKREFCANLGFGEWLWHLSFVLLYAMMSLPISAVAILFLFSQINCRSSVHLILLGLI

SEQ ID NO: 156599 - protein, 49 aa, Heterodera glycines
MDLHLSLPPFTDFTDLRPEIFVHPSYGSKEDLLNLLNPKHIRQVKKGRN

SEQ ID NO: 156600 - protein, 37 aa, Heterodera glycines
FNFAFALKIKTKKNLFSFGFTLNFSAFLAPDHFWGIS

SEQ ID NO: 156601 - protein, 519 aa, Heterodera glycines
PLVPSPQRCPSDSVVYSSQLIQQPLYQIYYLRPAAADPLRLAASSSPSASISASDPSSSILTTPVRRERLLGGSKYGSQRSLWCELPEVKEAGLLVKEAGLLDQLDDGQKKLQEAYFEVITSEASYVITSEASYLRSLSFLISHFMSSPELLGSKSDRSIITTSERKHLFSTSERKHLFSNIVNIVAIRDCSERLLCDLETRLKDSLVLSELCDILCYYYECHFSPYISYCSNQVYQDRTLKALKVYQDRTLKALKSNSLFLACIQRLETDRQCQGLDMRSFLMLPMQRITRYPLLIFAIRERLHPDKIQHSVATRALTLANQVVHNCNEGARKMAVHNCNEGARKMAQTEQLLEIDAKVVYRGSELRRVPLVSSGRYLVKSGRLSQLVVERRGTSALKTRHLVKRMLFLFSDLLLVTKGRTNGTFVCKDYALRRFVFAEPLEANDARVPLRALHAIGSSSSNLHLILCTLAQNARGKQMELLLNADSESDRERWLTAMRPPTSAKGESAKGEERVPKE

SEQ ID NO: 156602 - protein, 353 aa, Heterodera glycines
YRYFNSQSQECSSYQYNGCDGNSNNFATRDDCESYCGVGSYCGVGGCPNGGTPERNEFGQLIVCGTGVNCPSTHECTSVTTGTCTSVTTGTSVINRCCPTRAYICSLPPQQGATCSYICSLPPQQGATCSSSASSRYYFNIVTKECTQFTTQFTYNGCSGNLNNFGTIEQCNNFCLSAACTPGDVAYVNPNTKLPFECNSALSNSCPNNFVCTYDPLSTNSVCCGATNMGVCPEGEKAYVNALDMSVRECLINVDGSCPSNYLCRFNAPKNRYYCCASISGDLCPIGKALLCPIGKALYRDPSSKYRDPSSKMAVRCAINGPNNPCPPTYSCQSPTYSCQSEVQSAFQGEGRG

SEQ ID NO: 156603 - protein, 208 aa, Heterodera glycines
EGIYRLIHIFRQSGGSFSKIDLLEKKYSDNYGTRLNSTERNRLLGAPAATRIAKDSFSKAAYPGLFRVTERMANYYGPKPADDIPQFTHFCGQKIESVLSAYSDLLESLKEPPLSPPFTVGQFVLFRHDKLGMCHGTVVRQDSQHLVVKHLVTQDAHYVKMEAIFAFPDQLLKECSTNSRQPRSEMASHPGTQLAFAVPISEQFFHHF

SEQ ID NO: 156604 - protein, 114 aa, Heterodera glycines
MTREYADSEILEFVSAGPKQYALKLRRKKDGVIWHKTKIRGMTLDRRNEFKYDLFKEMVLDYKKGVKKVFHYPEKIGPTNDFRVLSKDVQKEYTPVQKKGIIDDHFNVLPFGYY

SEQ ID NO: 156605 - protein, 166 aa, Heterodera glycines
MSKKNFQETSKEIRRSKNTKNYFKNSANLGKCFEEVESHIKENKKFGIKEHVTTFYFKCPENEDPEKMFKKILKKLMGDAMSREDEPGWKIEKISVDLYCSALSDPVIIPARPFQQSNPDIVFNEFMHRQQSFGELKCIRFKNILWRLSKKKIFSGRKTEQKWRHC

SEQ ID NO: 156606 - protein, 194 aa, Heterodera glycines
MNNSCKGHEDKCQNGGYLNPNDCTKCHCPDGYGGQYCKELEENLNCEDLSGIPRELVANQSAVLLKTKAKCNVKLIKSSKCRYAGNLYAEKRNPGSGTLQCYDAVKQKYNDCPCSDGDKKCLTEEKWSHDHFVCPILKKAEGGTVSFWGYSKPNTKEIIRVDEVHCLQAWAVAEVPKQSKSLQVEEQPPAVGKN

SEQ ID NO: 156607 - protein, 320 aa, Heterodera glycines
MKDPEGPPSEKHRYFDACNKVPTEEKCENSEELIGCYKSSKKWPGNSPIAEMCQKHLEGISDGADANANVAGFIVKICAHRNENDLSNGIGTILKDISPQMVNGTLVKIIHFVPPSDDDKMHAFFQIERPIFSKRIINDTDLLPYQDDPNRFNSLDPCDEYGADCVPIRNLLLKIEALANCGKNESKTNAIFKKPDWAPLPPEMPWKKPSETLLCGGDMFCDKRRLQQQYNRLRKICGLQPEEVESQRKKRQYNPFEKWTEFPIKIAFNKDALPKDGYQSWKHAIEIGADLIMEVTCVRFEFVDKMVKGQNGIAVKNGVG

SEQ ID NO: 156608 - protein, 105 aa, Heterodera glycines
MNLIEFMTASTFPCCAPVTSICNPFGCLVWRSVYTFGWHFFKFGTFKNIMPFKKKVCLLCLELALPARQVLVFKKADSTLPNGTYKSSPIQNGKMPKKWRAMAPI

SEQ ID NO: 156609 - protein, 171 aa, Heterodera glycines
MLFAIGNLFLGFTRNNPFGSPGELKNMLIDYSKSEWFEQNTNAMETVLQLWQKFPKTALLVTNMLNVDRKNRLTAKGILNYIKGSCQIGEFREVKSSKDLRIFNSVKFGEFLNKLRIIKLKNKAKCLIEKYRELNGTYKKIKIMVKKVIEEQQMEIEEKKNPEKLDDCETN

SEQ ID NO: 156610 - protein, 60 aa, Heterodera glycines
VLFIVRSLESQLSLALQFRHFFSLKKGKRAPNSIFPTHFEPFYIDSDRFKAFLSLGPMIN

SEQ ID NO: 156611 - protein, 390 aa, Heterodera glycines
MFSAKSQRRAWAPRAALNNGTSKNGTNFGDRRSLPVNTSFRGTYSWGPTNGKAKNAVKGSNGSDTLPIGDNSPKEAYCTVEEIQLGKRHSKSPIMDNGMGTTRQIQWRHKTEEGEGKSEQGQDELEENHYEDGDEGEERNSGGSSSREQAEGGGRHGKGTAQMAKALPPRVPPLPPPLPPPKLFGNGKSEMKPRPKSNLTRFWPALAFLAFCLILLSIAFLSLWVANNNSEKRHKSQINWPLRLVPVLKPSSTTHATTPKGRGKLIAQREEENEDEGTDEDGEEEGAEKGALASEESDQQSKGAAARPMQSETPAPPEGTTALGGDQQQQNAVESCSQILCSSAKENDHQFVAQPEEFVRWIADGQMRKRLRLFEVRERNSCSVWTVPFC

SEQ ID NO: 156612 - protein, 268 aa, Heterodera glycines
MASITHVVFDLDGVLIDTERHYTTANERTLEKFGAKFTREMNLKIMGRKKTENLKIMGRKKTEAVTVLLKDAGIADRVTMDQYIAEYDKHVLQIMRALTELPGATKLIDHLYAHNIPMAICTGSDNEEFASKMLKFDEWLKKIPLRVLCGSDPEVRIGKPNPDAYEVTIVRIGKPNPDAYEVTIGRFAAKPTSPKNVLVFEDSINGVESALGAGFQVVMVPQREFQVVMVPQREFLPNDSEKELRSRPTALLDSLDNFCPKQFGLPDY

SEQ ID NO: 156613 - protein, 418 aa, Heterodera glycines
MNANKEHAHKLLHQQFKKGEKAARKVNEFLGAYVISPRQAQKWFQQFRAGRNSTKRKLGSGRPSTVDKNVLAQRLRRHPESSCAELSVGHCHKTTAWRWLRKSGRRPMRSKWVAHRLTDQQKQRRLNLCLSNIARHRRGYVLNRLVTCDESYICYDGTAQKIVWRKKHIFPPEQSTEEAEKEHSLSDDSETLICKDCMDKYAFLGFYVKVPSTNEEEMSTSQNRNAEEQRDDVCKLEAMKKKGEKETGKSVWMENLYEDLDCSFLLEPEDTLAHFEQQNREKASQKDGAKDIYQMVVEETKEHETALKMMVGFEQMKRHCKEFLHKRADEKSGLITGEDVEQCFAELRAKRMKLEEEPQQNEPNSGGDGPWTQGRHKKTQKFRNKLQKLIKPTDDRIKDEIRVKKPPKEDENALKIKE

SEQ ID NO: 156614 - protein, 142 aa, Heterodera glycines
MSDNRNEAEQKMAKAIFISADCWLCVYDLLPASQLGLGIAMISHRFDFYVDEHFKTRRWNLGSMKIKMKFEADGTKEMDVVNANLESFGITQKPLPKRVVGFKAISLKRDFDTFLFCKTIPSFFTGILHGFISRQFHRCHSH

SEQ ID NO: 156615 - protein, 15 aa, Heterodera glycines
MAEEEQSLKTKIKQK

SEQ ID NO: 156616 - protein, 156 aa, Heterodera glycines
MLFKKIGTGLGFLYIFLTYLGITCYTYFETFLSKKHWCKSLLDNKLLNNKTKLTQLINGKIPLWPKQINEILSRRCDIDDNFKKEVKCPKGLMAATLDPYFTTFVKNSPKKACDNKKLVSILRVNFQVPTPVPAISKLGTAINTYLPPISQCWNIC

SEQ ID NO: 156617 - protein, 148 aa, Heterodera glycines
FFVSANAAAGVALTHDAVLRELGAALTLRKEQCLRRERRALARARGLPDEAAVPAEELDRTPFAAAAAACRDATTIVAPATAAVMMTALNQAALMPSAEAVAAQRVAILSAGGGAALHQRDKMEQFGDDEEDEEENADDDEAGTQKQR

SEQ ID NO: 156618 - protein, 283 aa, Heterodera glycines
MSKSDMISREKSEIKIRSFKFHELAPITANFGNWESMNPKVSGIGMPNKKLSGIATRRFKNVGNWQPNQKMSGNGSPWVQNAGTGISKCREFESMDSKILGIHFQSLWQYHFLVRSEFIRCALLALSRDLRRREHLAFCRNLALILNTVRATTTSVPLCVPNVYGRTSSRTNANNVLISSADLAVASRASMCRAQLEWALERRVKIGIWNCVRVSCQSEFCAFLRLQPSPDDGGADSAWPPPPDVVKCVEQVAVSLRHALEGAVAFRGAPFLQGNGKHLWAPI

SEQ ID NO: 156619 - protein, 109 aa, Heterodera glycines
YCPNCKTHRRAFKKLDLWTLPQILVIHLKRFSYGRYTRDKIETELELPIRGLDFSDKVLNPEHSQEKYDLIGISNHSGGLGSGHYSACALNGGDGPWKFGIFSGLGSPG

SEQ ID NO: 156620 - protein, 84 aa, Heterodera glycines
MSKHQKSAVTPPTTTTTAAESGGEGDGRTETTSGQRKRHSANQTDSANGAAGGQGSNNAVVLSSSESAAKEAKVRKMSTTSQNK

SEQ ID NO: 156621 - protein, 42 aa, Heterodera glycines
LCPNGQRTSMCRNCRHNHHLTASRSGQFVCDQNAAGRALGDG

SEQ ID NO: 156622 - protein, 96 aa, Heterodera glycines
SQQIKGETNEFSFKIIILPLNPNLCSLLPSASNGLNPIWQERFVFHVRHPEMALLRFHVEDGDFVGPKTDPFIGQAVFPLDSVRCGFRSVPLHFEY

SEQ ID NO: 156623 - protein, 190 aa, Heterodera glycines
MKRNGAEAAADGVERKHGLANERIRLRTDEIAVFHMKAQQCHLRKLEVGLPVGVAQPKCQRVEPSGHLEDEALGLEQSQDEEGHPAAKEHRHHHAQRLSGFVLTLTVLRFSKSAAGKDADYGRGGGGIGAQLTEGTKMRSEKRRGIDRDMCTQENRLSLALSRYYFGIASLAIGEPKKGRGKEQALTLPN

SEQ ID NO: 156624 - protein, 52 aa, Heterodera glycines
MRGIFFSALFYAVPTLTRRIRETTMVFITAAQFWAPSTIMLDFSSQWSLSSF

SEQ ID NO: 156625 - protein, 164 aa, Heterodera glycines
MNDKIDWLGRFDLWDSTHQQFNLWGSILRHSKQWDSNLPQSKHWDSTHQLSMTFQSLGLNPPAFQSLRLNPPAFQSLGLKSPAFQTRGLNPPAFQSVGLKSPAFQILGLNPPAFQSLGLNCQAFQTRGLNPPAFQSLGLKSPAFQSLGLKPPAFQTLELKSAAF

SEQ ID NO: 156626 - protein, 106 aa, Heterodera glycines
MTIVSTVIIYALIALIIHCRKVPSNSSAAQFIKRIFRSLFIIVFFNFGGYIISIFAVILLESIDIDHNSIFLWNCKQIMGILLHFSAASCGPILFLTRQKLNLLLI

SEQ ID NO: 156627 - protein, 35 aa, Heterodera glycines
MNLMTTFLTTKRKSWVLISFHFQNCGPEQRLLRQK

SEQ ID NO: 156628 - protein, 184 aa, Heterodera glycines
MPQINFVIILFIFLFVLIDGIDEDLFDDLWKNQKPSTSKNFKKQKFGKNYAIKEEIVDNNEIHEQQNFNKIKMEDIKPKKLQNIKKEQLEDENNNLKIKVPKIELDKLNEDPFEKEFNEQVDQNISYAEQSNSANEEAYNNTNRETRNKMEILNEFNLMKRNLRKKVFIKICPILHWECEIGKK

SEQ ID NO: 156629 - protein, 65 aa, Heterodera glycines
MDISNEFNFMKKELRWNYKIMPIIKFEREIAKKIYSVKEDLGVQNSDGAIIKFSDAQFNLIFYLI

SEQ ID NO: 156630 - protein, 50 aa, Heterodera glycines
MKLPLPVCLVPVPPVKICTDFFNADPEKQYFKNEMGLDHLYFDQIVNMVK

SEQ ID NO: 156631 - protein, 17 aa, Heterodera glycines
HKHLFDLFYHIHNLIKI

SEQ ID NO: 156632 - protein, 178 aa, Heterodera glycines
MSFLFGHCPFSLSLFCFFFFLCFSLLVLADEFAENGQNGALKSQSQPKERRLRNRPRDFLSECVTGYRERIEFHCQFPNMDKPCLRENAEDSVHQLDVLAAECCASPRLCSVDDIESFCCRTMDCLGLCYGDSFLAQIQSRFRYADILLKRHSSKGAEKRGRRTTEEEEEEKRDEEEE

SEQ ID NO: 156633 - protein, 405 aa, Heterodera glycines
LAQLGHSQTESSFLQLIEVELIEGSPIDWLELNERANKLLFRDLRAALHLYSLENGITTHLVGHCSYVQWVPVPRSDVIVAQSNEQICVWYGKILTERVVHFTTERVVHFTVQGEVEQVARVARDLSRTEVIVLESVQRVAYELDSALIEFGTALDELDLGRAVAFLEQSVSGIDVQTMWRRLAQSGIDVQTMWRRLAQVALQHGQLMVAQRCFASLNDIVRVQFLQQTQMRAERLFINKNKNDQMRKVRARLAMMAKQFKMAERIYLENNATAEAIAMWQRMGNWDQALEALELAKAVNWADLDQLQAKHQLWLEETGQMGKVAELKATQGGLLHEALEMFLSANQPGKAADLLENKQMLQMEAERVGKRQKSKRLNVLNSSEEGDEQPMVERIYSSLAQRTAG

SEQ ID NO: 156634 - protein, 131 aa, Heterodera glycines
MTRNRNSFNNKMEGKGRTELPFFRDLFSRCYAQKTGPTFPPLVQTLRRLPISPQIFVVPMEIDGKRQGDTIRKQSQNHCEKIEFIHFFINVALFGNCHINGLLQQLVLIQQFDSRIATQTFGPLVSNLKMQ

SEQ ID NO: 156635 - protein, 245 aa, Heterodera glycines
QNVCLCFILSSMCPKFQVTFTKRKFGLMKKAYELSVLCDCEIALIIFNSSNRLFQYAYASTDMDKVLLKYTEYNEPHESRTNTDIMETLQRKEGKQGVGADSDDDGFSPPASPSLPATVGGGGGVAQLANGALASQMAALSGSAGTAAAFTQSQIATLAATAAQYANGQQGECQNLKKKTIFRHEYVLATSTTAEAATATTTTTAATSCTKNCTPPATATTGGKEGRPGNFSDGDPDQIPLISRS

SEQ ID NO: 156636 - protein, 97 aa, Heterodera glycines
MARTAYYGVVPFYQHGVQLFAVHTALNWTTDFDARNSSEIYLTEWDLKSKFLDFAETYCVPKKWTGNCDPYDPKMRAWFAAKGWTKRLESWLPVTVF

SEQ ID NO: 156637 - protein, 17 aa, Heterodera glycines
MRPKSALKHTKLYLQVN

SEQ ID NO: 156638 - protein, 95 aa, Heterodera glycines; identical to SEQ ID NO: 136988

SEQ ID NO: 156639 - protein, 130 aa, Heterodera glycines
MIVSKKITLDDGTTINGTSAATVDSGTSFLIGPFDEVNNILRHYGVDPENSTMPCDQKFGPIIFTIHGQEYKVEEKTLLFDKGDGTCFVGLRTLNSIPFWLLGDPFCREYCQIHDVEKKQFALPQAMKEK

SEQ ID NO: 156640 - protein, 149 aa, Heterodera glycines
MMLWEDAPNNANRVLLFNALAICIKKVIGEYDAKSMNTNLDKLKEFGEKTSQNMLKCMARLSSKNRQIKDQFLAKLYLDKITKLIEEDAISEQLEKALREKNELLYELMGSEDVDKLEQLYKQNHSYFLPSENFISSDEETFHDAVDDK

SEQ ID NO: 156641 - protein, 436 aa, Heterodera glycines
MNESEGQQSNLNNESEWSSEKNSSKIWEQNLSEENAKKIKDEILGLKTETNLWTQTDQYRKGKSKKLKKIYKMEDKMGKSEEENSSKKDKQNLNSNAETKGQTSKKLEENSNLNPSMLINTEKTHQMLEGKNQSEAKSQKAEKKLKKINKKQPKSGNHEEKGQNISKNDDIYPTDCTMLMGQLGIYKIRDLFNDSLMRKLHISSLENVFYNECEKYLGISAFALAIEANLEFNKFCHENYAQKSEFEQLEKSWAKFITTELDRFEGTQFLLEKLYFVLNELIEFSFDPSNNQFIEKGLAFMEEPQLRLIGKCKENEMDKIGKNSPNSEKETPKRESEVKSSQFGHYSTDKFELMITVLQEDIFNIIKAKNEIEKLEKKENETEKWENEWQEKFGANKTFNKNLFDLYEKAIKQIVAMQKLGIIKQLIIYFIHKLTN

SEQ ID NO: 156642 - protein, 150 aa, Heterodera glycines
MTVGYISVRCFEDFASKHNLSVLIPSSELANFKCRSLVVDFELIIKKYGIDLIVATTGAARDKLARLLVRFCSDSNFASTIRKFMEKNRDKMSQIFADLEKEKEKRKDQMLSEEESLQIPNRWSVSKSQIGLLILEPDYRKAAVIGNING

SEQ ID NO: 156643 - protein, 29 aa, Heterodera glycines
MGNFWACVATVMRSRAVPWCWWHKKCVID

SEQ ID NO: 156644 - protein, 119 aa, Heterodera glycines
QTPPGSPKGGHGNNKSPTTPHSTKRETELIIEKGNQQNHATGKPSPDSPKRETELIIEKGNQQNHAAAASHLVPPTPGNSPTAHDSRHTGPKVAHVAAAANLGQGHQESANVSRVDDVT

SEQ ID NO: 156645 - protein, 52 aa, Heterodera glycines
NRKNVAIKSFKFKTKIKTIFLFRAFHTLPVSREKIMDCCHIINCQPYKSHFF

SEQ ID NO: 156646 - protein, 100 aa, Heterodera glycines
MANSSLMLPIFSLFVVLIVIQFYATEQSSISVDLAQLDRQISEKKQRADQLRQQIASEKNPVIKQSDTRTLQAILEEINKLEAQKKSFQNTDQNARNNLG

SEQ ID NO: 156647 - protein, 89 aa, Heterodera glycines
MAEKQKIGPVLAAIVRGMQREESSVHVRLAAAKALSEIVDWVATRTLEEHVDAIVDATCAFLWVFFSHIFNGCLRQGHTTELGMDEQIC

SEQ ID NO: 156648 - protein, 122 aa, Heterodera glycines
MTFFTALQNIAAILVSFAFLPHFCGALKCAWGSTGVKDDLPFRVQDCPSAKNLYCYKGNCTAADSRFFVMGCEDLNNTDSINERMVQQISTPNFAAKWECHVVVGDTNEPMPFPMPGGVKKG

SEQ ID NO: 156649 - protein, 50 aa, Heterodera glycines; identical to SEQ ID NO: 142711

SEQ ID NO: 156650 - protein, 153 aa, Heterodera glycines
MGLPESQKQKPSKRVAEDRTAISGVLDKLGIESPITVYRMGSPDQTKTGQNRPRLMKVIFGCSKHQKQTLAQWKAQWNKVRAQINQKMGMSNIRIRPSLSQEELKARRVLQEECSRKRKEDGGEWVVYADKVMLTKGGGQVSVGFQNETWLGG

SEQ ID NO: 156651 - protein, 108 aa, Heterodera glycines
MSSQKPNKQDNDVMFVVSEPDWAVYDENERRRAEHKRLRREEQSRFRIHSLYICLLFVCLLAAQWTALWQLIGFTTPTLNINSLEPEAEEETKTTNRATLPLLMASTG

SEQ ID NO: 156652 - protein, 27 aa, Heterodera glycines
NSALVLIWQKIKPFFLRTHWCSIHLTK

SEQ ID NO: 156653 - protein, 154 aa, Heterodera glycines
MTFKAEIIVKNKKKEPTIKFQAEDKLMVNGKVMNVNKYLLAAHSVFFKILFFEFNEKMPKIEIDNDKNAVGNFEKLISFMNSPNAELEVVFCCESLCTFFGPKSKKPFIHKFLLAHQYNFIGMKKKISEEMSWHIFYLTVEDIFPILIISLKNS

SEQ ID NO: 156654 - protein, 76 aa, Heterodera glycines
MSDFSAFIAFVSFLGRIFAHVCLTTAILKKLEWYGTGNFGCKTGTGTCRDPRSQDRDRDLGFCPGPGLETGTNREY

SEQ ID NO: 156655 - protein, 199 aa, Heterodera glycines
MYLLLIKILSNALIMFIFVSALQAPQIFVCFKCRDTCINAFYVVAPLLRRYIDQTVIEFFRLNKQIFDRRGTKLKLHASTGTAIWDVLVREIWPIFAPTIRHLAFYSPANLNNLRSFVSPTILTDLTQLKSINSYRLFPAPIAYDGKNATAGEVLSKWLHTPTTDGQPKHLLCRFTGNYASRGQELVNKFKEVVHLLSP

SEQ ID NO: 156656 - protein, 291 aa, Heterodera glycines
DVSAQKWGNNIKRVNTRVPTFEAHKYLWSLKAETNINIIKAFDNIFMRSKYIPWKILTDQGKEYSSFSKKYFDTKDVEHFCMLTSPQFHAGMAERANRSIKERLYRYFTERDTYKWIEVVQDIVKGINQSINSSIGMRPADVNFENAEELRQKLYNEAKFPKKSPKFKVGDRVRIEKYKHVFQKGYLPRFTDEIFTVAEVHTERSPVVYRLSDDSNEIIKGWFYSNDLCKILKNKESLYDIEQILKKKKQNGIEYVLVKWKGYSIKFNSWVPLSSISEKNYKNFIDDSCFE

SEQ ID NO: 156657 - protein, 70 aa, Heterodera glycines
MGRCLFAAGGQCEKTVLQTKTATVASSVARMATPRATAPTPNWWPNFKSSSFFSNIHCCHGNAEEGGVPL

SEQ ID NO: 156658 - protein, 81 aa, Heterodera glycines
MNNCFLLYLGAPASAAERHHTFITKKVFILIGFPFFAYFWHIEQPSPIFYIFWHLNQSSPNFVHFLPHLINNRAYLMFDRL

SEQ ID NO: 156659 - protein, 67 aa, Heterodera glycines
MKLFTPLYVGPIVLNFLLKLMVCRSSRTRRTRIISGPTGSTKCSYRPLKLCPIVALVPTPLLTNCDQ

SEQ ID NO: 156660 - protein, 81 aa, Heterodera glycines
VDVFSEKMNGTLKAKNAIADANITCGLNSNFYFGWSTCMKIAFYGDDGYEKHAAKYGLEQTEGPEENFKNMTQFDKYGFMH

SEQ ID NO: 156661 - protein, 73 aa, Heterodera glycines
MLDLTNNDNYDRSGQYIDAKLVKMEPKIVSPPKPTEKPDVVEPVEPKSKEEEGEIMFDEKSKSEDDELEEKKK

SEQ ID NO: 156662 - protein, 76 aa, Heterodera glycines
MAFCLINDDDDDPSPKRWGVLLLGIRQNCPNFVLLGWHYEEEMPKMERSKIKLERKKQMTTIFCCLRQSSVSLFIC

SEQ ID NO: 156663 - protein, 39 aa, Heterodera glycines
MALLDTEMNDNDDDDDEAYFNFRHVTQYSDVINLTDLNI

SEQ ID NO: 156664 - protein, 45 aa, Heterodera glycines
TGQDRDPSFFGSDSGIRPVKKQPNRNAENFLIFIPNPVPEAILEE

SEQ ID NO: 156665 - protein, 181 aa, Heterodera glycines
MVQNQLQNDPALLYSLEKLFFIYQMLKSLKIDANRHENYLTASLEHSMTLMANRFGIRFNEISNVVEPRKSAFMLKEITNLLNDQFENDRTGNEHEKEENGQDGYRKNQKWAFRQLSNNSNNLFGKWFNSFHKGLIESDICEKPDSGIAKSRKAEFGTCGIQKSRGSGLAESRTAGGNCGL

SEQ ID NO: 156666 - protein, 160 aa, Heterodera glycines
MGIFDEFVIVDEKAFTNLLIEKGNTCHLHINCLGCANGRTKNVTKFSDVTQFAALEFQFQNANCALEVKDIGNASESDVPLAQIIRQTLNIGGTLFFHQFYASSSIIIRILKKRQKDGPNPTPSFLGSPADDDLTVQIGDKKVKSATVHAIIEFKSAEMN

SEQ ID NO: 156667 - protein, 75 aa, Heterodera glycines
MSENEHSNVGGASHQDEDSSDDGLWNEFETCATSGSESSCLALFEFGLFSVTHLYRNSNWRTLQQAAASATQLYK

SEQ ID NO: 156668 - protein, 61 aa, Heterodera glycines
GSIHTHLFIDLFFFLNDLPHPSRKLFFVPPSVNLCPLHIFPIFVTLVRSIQQQCFLIHNFV

SEQ ID NO: 156669 - protein, 74 aa, Heterodera glycines
HNNANNTVGGPIMQSPANATNPSQDAILNYMDLYSFYDDNNQLNALSFWHYQMKYGNEVTSTLLTKAIDRECVA

SEQ ID NO: 156670 - protein, 66 aa, Heterodera glycines
MNKLVKEIVGLIFIKMKINILLLCLLLIKNTIDQIVSMKIKQPKGFDEIFGQRWDERAEDNEVDQT

SEQ ID NO: 156671 - protein, 116 aa, Heterodera glycines
MPTKMLEKEIAKTLGVHERTIYDWKKKFGVNGKSKIKRYSKEQKFKIVQQFDEIKSRKKGKSIAKSANEMDHQISKELGVSRSMICQWKKDFCMTSTFVNKYVFSSWNKIFLNFRV

SEQ ID NO: 156672 - protein, 251 aa, Heterodera glycines
MWKKAFGPNFSMFFVLDQNRVPMGCISMALYPQVAHWSMFYVKDPYHGHQLGRALARRALEFAGDRPVFGYAVPEMWHKYEEEYAFHHYLDWRLWSFGAKCADVRPERLDHDSSVELKDWREASFDKLLLFDRQQTVGIDRSAYLREALRLPQSAAKVAVCRETGDVVGLCQVRHLLGDRLGISLFYANSESIASALLRAVLLQFAGPDPSAKFDSFIYKTPSTNTESIRLFRQLVQNGPVERRLFYPQFS

SEQ ID NO: 156673 - protein, 210 aa, Heterodera glycines
MHHTLTILLCSLVSTVASIEEAKIKIEPKEEQFTAEIKKEFAPITTVKVELELEQRKAVKKEPKEEANYYGLMESKSNRFREIEEGKNDSSCVDHSDEDSAKSDQSEGASKIYSDEDKRSIVKQFKKLRNEKQKVKEIPKMLGIGVGTFYKWKDEFSDEEDSEKSVQNDSNESDRSILPETDQSEEEQFPELPKDDMILLMMDHHPLIAT

SEQ ID NO: 156674 - protein, 169 aa, Heterodera glycines
MKKERFLCDGKNKTVQKIEEEISEELQVTRKSIYNWIKKFGMKNASKIYSDEDKRSIVKQFKKLRNEKQKVKEIPKMLGIGVGTFYKWKDEFSDEEDSEKSVQNDSNESDRSILPKTDQSEEEKFKKLPRIDYDSADDGPPPFDSKAWAWNFSVAKRKNHLKNGIKIKI

SEQ ID NO: 156675 - protein, 24 aa, Heterodera glycines
DCWGRGFESYRASYLLCSTYDCTE

SEQ ID NO: 156676 - protein, 293 aa, Heterodera glycines
MGGRVANLPELDQVRSYHWLERARIGKRSFRDCIAAQEGQLKARELKCPHMSARAKWCRRCGDPRVETEQHILSGCAWSRTGTMLDRHNGVVRQVHTALCRKYGLPVSSHTVPLHAVLENERAKILYDVALHTPPASVLPQEGGSTGYIGLRSNRPDMVVFDKGSRTIRIVEISVPWRENLRNQELIKWRKYAINSMIEPLELAEVEVPGPNLQNVLGRAYGKDFPIVKVVPIIVGSCGEVLPNITGRLSELGISAREVPNLLESIQRAAIIGSGHVIRTHLSVPRNGSETDL

SEQ ID NO: 156677 - protein, 73 aa, Heterodera glycines
WGALPFYRLSKESMKVVVFHGRLAAPTYATPLMILHKVRLESSSTGSSFPAKFAKPVPLAVVSLDSRGQWESR

SEQ ID NO: 156678 - protein, 173 aa, Heterodera glycines
VRGQHTKTTGRKGRTVGVSKKIYQFKPPFDPYLCDQFFPRSSTEAEETAQTQFLLAKHNDILPSTVEQSAISALVGKVKQTLDKIIVAPETFNSAIEEVREVGSYKKGTMAIEEVREVGSYKKGTMLAKHNVADLVIVLKTLPLIEAVNALGQKIVLDLKAENHAVRMNEERT

SEQ ID NO: 156679 - protein, 267 aa, Heterodera glycines
RLCEEECEQLVGILPSRYLKAENNCANSNGIMARKDPNKMLSERFAQFSLKNAAERKNEKPEELKKQINDLYLETLYTILHKIGKEAVANEDQLAQYAKSAFQVEERTHQTLMEKARSEKPPILLLNVLLLEARDLIAKDIDGFSDPFVMLGLVPRGGSQRSPGADDQNSPTNEISEADSSASAADGGAGGGGNSARKNPLLQRFSGSFRRKARKARGETQTFDAENGIPARIIKASSVQRKTLNPKWNEKFQFVIGDVTDRFHLDI

SEQ ID NO: 156680 - protein, 101 aa, Heterodera glycines
MPAQKSNRCPSVRIGGGHNGCPICRQEILDTDMLSTTTENAQANNNNNNNSNGGTQNEVIIEINDNNYNNGTEQNEQHQQQQTAIENDNNNDRLSENDRRA

SEQ ID NO: 156681 - protein, 120 aa, Heterodera glycines
MVEIAQVAIKIKEKEGQMMKKNSLDLLLELIKSIWTKPHFLMGERVIRKINERRRRRRKRMIFANLLCYLLLAMCVLIILCLSLIACHNAQNIARNINRNNGQTEANGAMSNKRCNKKAL

SEQ ID NO: 156682 - protein, 139 aa, Heterodera glycines
MSAELPICLLLLLFLSFSLSAFATFDGQQNLRDGQFLGCQIKNLKLLQTKFMDRKLMEKFHFELSKKQRIFEALFVGEEKHLLRSDAFPPPLIAADEFECLKTKLNSIHANDPALSQLLNGLFAAEMRAKRKLESLAGK

SEQ ID NO: 156683 - protein, 260 aa, Heterodera glycines
MFVDGCAILWSYWDRFKKPKKKIFISADCWLCVFDLLAPSQLGLGISMISHRFDYYVDEHFKTRRWALKSMEIWSKIEENGTQEAAIVNDRKALPIPKIRMPRKVIGFKNIIIGYMDHNVITFLRHFCQIFAVCPINLSIHTNSNRILEFVLRNIWPLLGKNICAMELSVGVFHHLRQFVPSILNDLPLLRIVNFQVADLFTEFPADDSATASDGQAVTKWLFTARPDNVPKVLQCALLMDMDDGNLVSRVEAFKAVISN

SEQ ID NO: 156684 - protein, 41 aa, Heterodera glycines
FRIFRVFGVAEYEYPLYITPCLTLVHLNNKKLKFETWTFRG

SEQ ID NO: 156685 - protein, 60 aa, Heterodera glycines
MAQQMTNIGTAIRLKNEKEKSRKNAQKEKKSNRETKRNKWRERMKENGRGGKAFIAKLRL

SEQ ID NO: 156686 - protein, 51 aa, Heterodera glycines
MPKVPKHRFQISRVSFFTTTANAKFILLLTDHEIGHLVANIMCPDGFKFLN

SEQ ID NO: 156687 - protein, 80 aa, Heterodera glycines
MAFCQRFDSADQSWSLLVRPHQKKRSGDYARSVVERYTAIPLLTLAPVDLAHPSNVFSVIEMYEANGRRETPDKVYFVRL

SEQ ID NO: 156688 - protein, 136 aa, Heterodera glycines
MGEQMLKKLKEKLKRLFAVKKNDQVMAQIMENLFSFIKKIIKGESPQTVKHYLLFTIEIFALRERISLSENMTKNKIEINHSKLFKMVLEESNEQKEGNSERRKTILTSLYTEVGSLEVPSGIEIKKCKISSLGSD

SEQ ID NO: 156689 - protein, 306 aa, Heterodera glycines
FKFKCSIVSCYKYYQKKVNDQIYRFTVQLQIILRRHSTVVQTMAEGIIELKETGGLEPGSEQGIQYFLDRFYLNRISIRMLQNQHLVMLQNQHLVVFGSVLPESVFGSVLPESPRHVGCIDPMCDVSSVVNDAMCDVSSVVNDAFENARFLCDRFYLTSPALKLDCHNSISPDKKISIVTVPSHLYHIMFELFKNSMRATVENIFKNSMRATVENIGTDEDLPDLHVRVVRGYEDLSIKISDRGGGVPRKILSKLFNYMFSTAPPPPQDGTQTPLVSKGETAYISRCFLLSKFKLIIYSNVVQFHS

SEQ ID NO: 156690 - protein, 29 aa, Heterodera glycines
HKHVKVNTYKTRQWFRECNKQLTIINDLS

SEQ ID NO: 156691 - protein, 79 aa, Heterodera glycines
VLHHYITCVLCCITLTWSGGDCYEHMRPTFVVLVCYVSSVQIIQYKYQTGCLRRLHALGQRHSMDITVEGFSSWMFKGL

SEQ ID NO: 156692 - protein, 100 aa, Heterodera glycines
MFSSLCPSVVRHKCLRCSTRTLAFSGHNLSDYLPAAQPSSRSQKAREILKRHQYALKRRPKKWKGAEFGTFVEQMDSIAAKCYLGNEFGLKKYSDHESEL

SEQ ID NO: 156693 - protein, 25 aa, Heterodera glycines
PPNCLRHKKSEMYVEKSDLCVPNLV

SEQ ID NO: 156694 - protein, 263 aa, Heterodera glycines
MLRSAFSTTKHPKYVVLQGIIGSSFREWEENKQPVSVDKTIKYFDGQLENADEIAQIEGNGPKKRPNMNLNDFTFKLGNWCFDTPGTVNSEQLTVFASNRLRIELMDTARVDGFLRRFNGHPSLGAPIGGPKRMDKFPKLEPCDFVVQNEGAFNEEESGFADVVFSSVGWALLTSSADSVKIRAWTPAGKGLLLRQPPLLPYAAKYRGQRQPGTDIYRMRPLQHCETFSDTQRSERPKRIVGENYKAPPTAGQIMEYVNFDFD

SEQ ID NO: 156695 - protein, 124 aa, Heterodera glycines
TVHQTFRDRDKCQEEKSALDLTVTTDQEGNYYILFLYLGVPNAEVGLQYHQTSEIRCAPRDHRQLFSGSPNITCLQFCFHFPRNGKRINSPCPWTKPSNTSMGNWKMPTKLPKLRAMDRKSGPT

SEQ ID NO: 156696 - protein, 306 aa, Heterodera glycines
MSIGGALFCLFVALWAVGIDVVFPLSLLLSASLGFLSASSLVHNAHLCFGAQIVLAQLLNLLPSADDSVSKGQTADEQQKNGGDEENKGQRHFATFKGSGHANRNYIVPPWERVELDARLNHELEELFETLLESYVSSCSVDLRSLLINELFPLVLAHVERICRLTNAIFGHENHQEIAQLPVSLIEFKVFDQWADDVHWAMRSEANRDAYLRMVADLLIRQFVDDIRIGGCFVDEEHAKIVNRNGEGTDNYAGAGGGAAAMPPATSKVFCHYLRILPLPPMSVVLPQFAALSARVALFLCASPHS

SEQ ID NO: 156697 - protein, 141 aa, Heterodera glycines
FWRSVLSFSPQLSPPPFSPQKCLCVSLDEFVWDIKFRLLRSLPQKLDKEFNFGLFLPPCDGRAGKFLLEDRQIREYPFHDCVPYVELKYKKRVYKMLRLDEKALNVVHSRTNLRKVAEAVQGRNATKVRQESQKNGKFNSK

SEQ ID NO: 156698 - protein, 71 aa, Heterodera glycines
MMSNSAAVAPSSADGLLRKSATSASALYSSSPQHGTTANHFPTIPEDQGLTMSAGRDKMPQTAASASPPKS

SEQ ID NO: 156699 - protein, 84 aa, Heterodera glycines
MTDVGTLNSFFCFVEGGQLGTGASGSVCKYRFRSRPIAVKQMKRTDNVTETKRIFMDLEVISKCKDCPYIVTYYGYIITFVSVL

SEQ ID NO: 156700 - protein, 130 aa, Heterodera glycines
MNRRWICNDVWMDIFPSFDHSQLGLKLALLSPRFILSNDTKKIGWICNDVWMDIFPSFDHAQLGLKLALLSPRFNALVDKHFDGKSELTIWRTIEIRKDKGPEPKLFCTNRLQICGISIARPSVAQQNPF

SEQ ID NO: 156701 - protein, 90 aa, Heterodera glycines
MPIEPFELVNERTNEKLTLTKDENGTGEFNWLLERCPIIGETAAVQKQQQKRDENSDANLNKVFFRLYDDIGPLSPPAEEEEEADQSNGD

SEQ ID NO: 156702 - protein, 251 aa, Heterodera glycines
YSDLLDSVNARHQQLEDALILSQEWAKQKRQLANFLDESERQLHAFEHIPTDAQKMEEQTQLLDQLQQATDQQRADFDRLVELGTELAQMVSLEEGQELDADMHQLITRYDTLGTRLGQIGQLMGTLAEDISQFLQSTEQLLNWLKEVEDEMHKFDDPSTEPEELGRQSDELATLVASIADQGQLVTQVVEISQELCAHTSGAEALSLQFRTDNLRQRYHPAGGRSCEPHHRAGEGAAVGRGPQGGHGRTR

SEQ ID NO: 156703 - protein, 86 aa, Heterodera glycines
KFLFGSVSPANVLPNITVSAERHGMQVRNALGENLIVPHTAQMYQRQLAQSWGQRPSPAATASDNGQVDRSGATSQLQRMASFHFW

SEQ ID NO: 156704 - protein, 39 aa, Heterodera glycines
MTKFKVHSGSLNQIWAKWIKICRLGIQFPIEKGDCSYSR

SEQ ID NO: 156705 - protein, 308 aa, Heterodera glycines
IENGKQMFIIFHMFFGGRYVIFLMGLFSIYTGLIYNDAFSKSFNLFGSSWLNPYPVDILKADPEQILTLDPWESYASSPYASSPYPVGVDPVWNLAETNKLNFLNSMKMKASVIIGISQMTFGVALSYYNHKYFGSDLDIKFTFYFGSDLDIKFTFIPQMVFLSCIFIYLCLQIIAKWIFYDALGHPVFTGHPVFTYEYPGAGCAPSLLIGLINMFMMKSRNKGFIPPGGKEPYPNCHLNYWYPGQSFFESLFIPTAVGCIFVMLFAKPYVLWQQRQQHSRSLSGGGGGVHTQLVFVGTAFTHIYRAR

SEQ ID NO: 156706 - protein, 169 aa, Heterodera glycines
MQEDGAEVLHHEDTSTTHKNHETATGGEKGGGQGQQHGDGSFGDIMVYQAIHTIEFALGCISHTASYLRLWALSLAHAQLSDVLWSMVLRNGFVQSGYLGAVITYLIFIVFGTLTLSILVLMEGLSAFLHALRLHWVEFQSKFYGGMGHPFVPFSFEKILEESRQSEDS

SEQ ID NO: 156707 - protein, 117 aa, Heterodera glycines
PNVVSTLPYPVKLTARHPMRYFRVREEWRVTDVLMNPMMLMMGAAFILVVLMPKLAAQDPNVQKEMQNMQLPKVDMPGKTLTGHMADMLANIWSSGSNKKGSRKQISSGQNTKRVTR

SEQ ID NO: 156708 - protein, 27 aa, Heterodera glycines
FCIKRILQMIEKESFISPRIHFFRIVF

SEQ ID NO: 156709 - protein, 228 aa, Heterodera glycines
NAELTVISALSGECQSNDSQQKARSKKRNLEQKAKSRNSIAGERKRRRTQRNGTVSGTRLEPSASQLLSWRRILLLIMAVTVHNFPEGLAVGVGFGGVGKTPSATFEKAFNLAFGIGLQNFPEGLAVSLPLAGFGYSKWRAFLYGQMSGMVEPIAALLGASLVLMMEFVLPYALSFAAGAMIYVVFGAMIYVVFDSIIPEAYSHGNGKMSSLFAILGFMVMMSMDVGL

SEQ ID NO: 156710 - protein, 98 aa, Heterodera glycines
MPIEPFELVNERTNEKLTLKQKIDEFGVNVYNWLLKRCPIGETATAIKWEDSVNPSANLNNVTFDLWSFDKSIGPLSPPTKEEKEEEDKADKRNGNVV

SEQ ID NO: 156711 - protein, 29 aa, Heterodera glycines
VGSFCGSMSTGLTNFFNLICVSQRAKKNC

SEQ ID NO: 156712 - protein, 403 aa, Heterodera glycines
PIASLAVSDLLLIFVGISFDLFSLWRRHEWMDLSGFCEATSTSISWFTTSISWFTFCSILTIVGLTGERLVAICYPFSLLTGERLVAICYPFSLRPYFYHRSMLWLIAVLWLISFFLWLIAVLWLISFFPSLYIGLQFKTVVRDFCGEFLAFTIYFKTVVRDFCGEFLAFTIYGRCSAHRCSAHSLAMTFVSPLFKAQLLLTFVFPVAFVIYCYIKILQTLNEIYCYIKILQTLNEATSNSHQLTAAQPKRSEKGRFFVWSKHTANSTPRRKLTRNSSGRGSVRSQQAHKTVLKMLVTITILFFICYLPYHLERLVVKYVTITILFFICYLPYHLERLVVKYARGYCARCAILYPITGLLQYISATLNPIIYTVMSRRFRREFLRIFQKMWAEKRQRRTETGI

SEQ ID NO: 156713 - protein, 74 aa, Heterodera glycines
MPVDAAYQVAPSSVSSSLKRRGINTNEWWMNEWEDGEDVKDEAGEGGRGGNLGVCAFLNLLASRKFAIIVCMYI

SEQ ID NO: 156714 - protein, 50 aa, Heterodera glycines
MVLLLNFAFIFFAFLSSIYAEEEDPKVTHKAFFDISIGGVKKGRIVIGLF

SEQ ID NO: 156715 - protein, 30 aa, Heterodera glycines
MPLSETNFVSKIVECRGGDGIPVICMPFDE

SEQ ID NO: 156716 - protein, 333 aa, Heterodera glycines
NIKLLSMVDVCLTLEPGFSTLEDLAFLDLAGGSVHLLGTTYSSKGNIEAIKEFSRSLIWFTYRKNWPAPIGGFDGPTSDRGWGCMIRVGQMVLAQVIEKNVGSKFQFTRPKFQAYLRLLRMFQDKRTAQFSIHQIAQFGVSEGKPIGEWLGPNSMAQVLKKIVVYDEWSNLVVHVAMDNVNKKDFLTHFAKITNKKDFLTHFAKITGFHCFSLISDEVSLPLKTVIYSFLFFFNLFFRHENGQNESAEREQQTNSPTTGQWIRPLLLIVPLRLGLTAINLTAINPCYFNAIAEYFKLPQCVGILGEYFKLPQCVGILGGRTRHAVYFYGTAGK

SEQ ID NO: 156717 - protein, 36 aa, Heterodera glycines
MCYKPKIASTYRNRIEIAGIDRAAMTPLCERRPKLG

SEQ ID NO: 156718 - protein, 51 aa, Heterodera glycines
MMSIEIFFTGISWDRDFIGDPTTIRQFRGSRGIGVIKFFEYFQITYKDPNR

SEQ ID NO: 156719 - protein, 80 aa, Heterodera glycines
MKENRGPNIRGEKQMNIRNVSKQIIASNMNENFFFCFSCPFLTSAALQISSGDVSAVIGVNWLYGTGMVLALWYVMDTLK

SEQ ID NO: 156720 - protein, 141 aa, Heterodera glycines
MSRKKRFALQIVSHCGAPSGRDVLTKQLQELIELDMVGECSGKDCDQKCYEQQMESHFFYLAFENTVCSEYVTEKFWNALRSLTVPVVLCREVVRESGIPDDLYIAADDFDNATALADHLKALQKDKDRYLGSVFNEQKGQ

SEQ ID NO: 156721 - protein, 132 aa, Heterodera glycines
MAPPPTAALGFSAVTSSSIIGGVSNGHQATAVAQMLFSPPNIVPIAADQQQLFIAGNNSFVGHGHHNPSLAAMPTHGAGGSLDLNNYKVPVKAAGDVSLNGLQLAAFLTKATLLLQPVGLAHLRTIKILTEI

SEQ ID NO: 156722 - protein, 33 aa, Heterodera glycines
MAPNQANIWATTSSGAASLPYSNMAMHPLISSS

SEQ ID NO: 156723 - protein, 385 aa, Heterodera glycines
MSQVGAGEMAESNSCRFGGSQYSRVTGGAFGVEEDELGTANDRQLGRRPSQRECRPSAIGAAFPSQFATPSPKWSTFRFCLSLSCASFACPTFSRCSAFTCLLFSSPIWPLPKAFPTPRQLSFCRSSELPTLLVLCANAVLFAVAAYVCLTSIVLADLLGVERLTNSFGLVVVSRGFASLLGTPIAGIVYDLSDSYGASFIYAGLLIFLSGLVSCIIPMVHRHQRSQLKNEGALMYELDEYRKRSQRLDEGYEEETEEQQTEGGGEAHCRGAETETHAAQTEANKAGQEDAEAEKKNTEAENKNTEAEKKNTEAENNDAEAKKKDAEAEKKDAEAEKTTEARNMQMRNAEATDNDPQREQQKGEMAEANISLAGAINGGNAIPLQ

SEQ ID NO: 156724 - protein, 33 aa, Heterodera glycines
MPTPKMGGQTKQKKEFPILSIEFGNAIKEKPMK

SEQ ID NO: 156725 - protein, 299 aa, Heterodera glycines
LPLPLPPSLSLSLFFLFPSLSLFIFPCPFILSFALQEFANKMYGPFAFTMPLFVACSTLGSANGVVVVVSRLFYVGAREEQMPVLLTMINRRTRTPVPAVVFLGLLSLVYLAFGDNALTLINYGLLSLVYLAFGDNALTLINYIAISYWLAIGLAIASLFYFRMKMPNAPRPIKVNLIFPAIVNLIFPAIFLLGCVALVVIPIVGKPKDTAIGIAIMLTSVPVYLVFICWKERAIGIAIMLTSVPVYLVFICWKERPSFFNKASASITIFCQKLFLVSNEASITIFCQKLFLVSNEAEK

SEQ ID NO: 156726 - protein, 141 aa, Heterodera glycines
MRAKILASVKVSWMKVANLTERQLRAVRKTKRKHLQMKAAFESANLSGQPQLFEQNHQGFCNLRRTGAKCIWQNSRPPDDECFDPKSYECQKRTKRLHYVGIVATRLFDESAKFGIAIGTEPNEEAAKEPNEQGKADTSSI

SEQ ID NO: 156727 - protein, 17 aa, Heterodera glycines
MICVHICEFICDLKNIL

SEQ ID NO: 156728 - protein, 161 aa, Heterodera glycines
MALYGVRDDRLYHQRTQTDDTVLVEDRSYKRDGSSQQLIVPTSMSHCLSRTNATKRNNFLWTFICVTNRTKDNISADAEQIDPKMLRQDLVHLASVCPQGFFCQLSGIHKTSHGDSGSPLLRKSGGKWYAIGIVRGHESKKNLFTKISPYCDWLKEKSRGE

SEQ ID NO: 156729 - protein, 133 aa, Heterodera glycines
MKRWIKRSLARFSVLSVVALFGTNLGVNLAERPATEHPECISFGCLTSDASRLIYAVNRFAVALPNFLAGISFLAALFAFRRRLNGINGPITIVQNTNNTRNSTQQNGTVTNLNTKMATVNTDSRKMVNGRKF

SEQ ID NO: 156730 - protein, 399 aa, Heterodera glycines
MSHAFRVPPPHRPHNKSEGERNDADDDDDDQTEIEQFNRELNEICQMLREHYRNEVPKIGRLCAQMSEGTRQALAIQQQIPNPDEVQQQHGENNARDNRSNRSSDETISSNNSSNCDNANVKCESGLHQNAWWQQQFHEIEQALDNDADDEGISSVECSENGTNENDNKSDDDIESDAESDDKPYECDCESADHPMECPLLAARRALRRLKLPTILDICAATEAEVRQYGTKLSDTIKQIAKLRVQNGGALTSEWELRSRQKQAQNLLQQIGNLMPQLVVEEIEVAKILKFVEQSADRFSIGFRDRKQQKQFKKAIRQPKKVETEWTHIVHAMLQMRKLINAAQYLVKEAQPKPLACDRKFSDQKQPSLCSLDRLYAKLYGKPSQIKRVRDFRDLVISL

SEQ ID NO: 156731 - protein, 441 aa, Heterodera glycines
MTIRLSDLHSLTEEAKRETPREMENEGRIATATMRRRELSGQSAALKAAFLEKRPESRWRTRASPGNEEDIREMLLTKRRHSTENRTDHHQQKGAATSTASFLLEEMNNNEEGTEDRNRRGQRKEQMDRNGKGTEGLTGGDSAKQLFEEAENGEEEEEEEEGTDGLMSGERELYENVISEFDGLRQTVNNYITKMKQFASELEQQSAPSSSSSSAVPLLPHSSQQQSPPVVAPESTKEKRRNFFYGKQKQIAQRPATTTGAFSASHFSYSTSVTAASSANSKTPTNCSTISDPKTQRPQSSPAGTMAEGWQNRLENLEVPSKKTEIKNSHVKFIDDDIISGEECPLIRPNSSGKVPTANVPSNFLSNTTMPHKLQTTSTRKDSNCSVTSLLPNAEKEFDKSFAGVALSCGGGKKAHQLNDIKAVVEKASAMPLLPSLVVML

SEQ ID NO: 156732 - protein, 76 aa, Heterodera glycines
MIFGLRKMSAKIRCDIQMNGPSRIDLIKQINVLVASSISILLYGHALEDVEEMDGFLDIKEKMRFLFAMFPWHDRR

SEQ ID NO: 156733 - protein, 30 aa, Heterodera glycines; identical to SEQ ID NO: 126607

SEQ ID NO: 156734 - protein, 93 aa, Heterodera glycines
MFIGLLLLNVFAILFWNFVWKRRKLPPGPSPLPLMGNLHQLANFPDHGGAGTHGLHGVSRTHGEGWLFLRRFTLETLRDLGMGRSRMSQEVKI

SEQ ID NO: 156735 - protein, 98 aa, Heterodera glycines
MISEQRRMKRNIPLSQREQQQNESEGEEEEEEEEERGGGRGGRGGQKRKIKHREEEEEETEEDEEEHNFGTGRGRRMGAKRQRMARQNRQREEREGEG

SEQ ID NO: 156736 - protein, 67 aa, Heterodera glycines
MRAHAKSQSNGTTTALSTEAQRKKKQQRPAEVAEEEDGEEEGQWVLKRMPLAEGRHGRKSRALVEGD

SEQ ID NO: 156737 - protein, 72 aa, Heterodera glycines
MSSRRGGGNNVEGKVYVGGLPEDATSEELDDVFHKFGRIRKIWVARRPPGFAFVEFEDTRDAEDAVRSLDGT

SEQ ID NO: 156738 - protein, 66 aa, Heterodera glycines
MVPFELVNEWTKEKLTLAKANELDNRWIMKRCKIIGETAAVYWEDGNWDNNCNNVFIWLVAGTNCI

SEQ ID NO: 156739 - protein, 93 aa, Heterodera glycines; identical to SEQ ID NO: 154974

SEQ ID NO: 156740 - protein, 165 aa, Heterodera glycines
MQLLLAKRCPNGCTRRHPNGHRKRLFCENSIRTNFPMDHQFQRGVVVVVVLRFSSYLGVSGPIFHTKKFICARTSSVSYKIRFGVFSPPSSIEEPFELVNEWTKEKLTLIKENAYYWLLKRCPISEKAAIKWGNDGNSDNNNTKWNFIHFNLVCCKNSIGGVTKG

SEQ ID NO: 156741 - protein, 80 aa, Heterodera glycines
PPFSIFFLLSGGNTQTHIPHLFFIICSSFLHSLFTKPYSPNSLYEYWKMTISVEIFDAKSPSRPGFTIAEVEPDYKKCVN

SEQ ID NO: 156742 - protein, 132 aa, Heterodera glycines
MIVINVLYAFVLVSFISDQHRIAVTGDSNHVPSPPRNVNVVQINSSSIKVTWEPPADGDAQLLYGYNVYKFQIVNNQFVNNLHRSVAIVDKNALVQFAVEKVRFVVEANCAGQLPKGRSRPDGAKLCVGQSL

SEQ ID NO: 156743 - protein, 99 aa, Heterodera glycines
MGSSTVRSIMFNSRIVDSAIPGLHLHWLHANAALLLGKYSLLGHLPSALLFSLVIVSVLFWWHAAKLAVYLAMLYGDLAGWALLLIAAALFIGFGIFLI

SEQ ID NO: 156744 - protein, 234 aa, Heterodera glycines
MVLIDLSLLLILSQVFAAIAAEYEQITKLRAFLCKDLAKASTYRNREAWRKLGTFTEKVPKNLLDSLAEWQFQYLSIERLFIFCIALENGKHRNIDERLLGKISLKPKFIDEKSGKELTIEEAMRQIVTAHKIIFGGKSKKIIQKCIEYCKIKKQLPQMRFENKVNCFEVIGWAFVLETTNECQMKESALIELESVKQYLLLLSDGKYPQLQITKPPKKPMRKGNGKRRASHRY

SEQ ID NO: 156745 - protein, 213 aa, Heterodera glycines
MPWLEEEHKKRIIMHNEQQISGGDDFDDDERVEAIHKSLESAEEPDEERCQKLVHLLGTANINQRQNLKQKYAAKFGGLNLKDELMKRLPASELITKELLQGLGTNEDMLIEILVTRSNKQLLAIKSAYKAMFNRELEKEVRAETSGTFKALLLDLLEANRDESHTADEGKAKKYEIVAKHPIEKGIQAEFSGDSLRAFLALVEFVRNGPAVQ

SEQ ID NO: 156746 - protein, 21 aa, Heterodera glycines
MAGVEHCMSSLTENELEGSKK

SEQ ID NO: 156747 - protein, 153 aa, Heterodera glycines
KQAVLFNLIDLSSDCCSSRRSGILMGDDDDVLVLNDGGAGGDVEVVGERRRRLARPSVHERGERVEHGHGREQHNTQDRHSRFYVDPTLQISAISCWLFVIMCTDKLRDWFWELFYFMRVLACYNVSTLISTRPSFLCRGMSSKGISWTCLLG

SEQ ID NO: 156748 - protein, 47 aa, Heterodera glycines
PVMCHLGDPAHQPETAYYTDINALISYCAEFVCYALIWLIIWRRTAQ

SEQ ID NO: 156749 - protein, 15 aa, Heterodera glycines
EYEEGVAQLEQEHVK

SEQ ID NO: 156750 - protein, 151 aa, Heterodera glycines
MELTDAAGTAKRRSQTKKSGSPFGFLGFGRTEGAVGGFAGAIGGGPTIGGTSTSSLMLPYLLSESAISEDVHSLGSDSANHCHLAERSSAGCGGLSQDGAIGDGVALSGIACHSTAGEMAEEEGGEKAAGASGRHHRRVLLEQNKLILDGK

SEQ ID NO: 156751 - protein, 72 aa, Heterodera glycines
MGSKRRFLLHFSQAHQTFRRAEFDAICQIKGISVVPNSPSDGIHIQSFEFQNDEFDVFRLLERAVLVKAAYE

SEQ ID NO: 156752 - protein, 107 aa, Heterodera glycines
MPSPSWLGLTRSFCVHNTEKVRIEINIETKRTNRMLPKIWLIMRTVVSNDKTIGTDHESGSRLNPDQSRTFWKNDRDGPRVGIPTESRSIPNILEKRSGRTTSRDPD

SEQ ID NO: 156753 - protein, 174 aa, Heterodera glycines
MLKIIFEIIFFLFIIVLIDGIDEDLFDDLLKNLKPSNSKNIKKPIFGEINTIKEEIVVKNENDEQGNANQIEMEDINPKLLQKIKKEKTLEEQNNNLKIKMPKIEMEQLEEESYENEFDEQADQNVSSTDHNDSVDQAYYNIMCQRAKPGNANEGPGWVMYHNWTEKGTRKRNG

SEQ ID NO: 156754 - protein, 79 aa, Heterodera glycines
MQLIRKFDQMRKEKICGLKYDEKKRSVIEREIANELGINRKKIYKWKKELELEKSLVYYLFVSFFFVMPFWLGLKKALG

SEQ ID NO: 156755 - protein, 134 aa, Heterodera glycines
MAGSEGVGQQKRQNHHLQHHRLTPDVDGFCAPLRQSVDHRGQTDQQDNFGALPSTTSAGGGAASSSASVLRSSIKDSSGGAANKKDPSDSTQALFLLAENLAELIDSVCKSEDKEKLLPALQAVWNNTLPYSVE

SEQ ID NO: 156756 - protein, 22 aa, Heterodera glycines
MAAQNVDNSQPLKIPTLEDSDI

SEQ ID NO: 156757 - protein, 42 aa, Heterodera glycines
VAPVLPCVDHAKWHWTKAATHLQWTKAVILGDGQINEKQIDW

SEQ ID NO: 156758 - protein, 109 aa, Heterodera glycines
MMTGLNNSDVGKEFRTFLRATTSSAAARYTIQFDVNKSLPIVPFELVNERTQERLTLWKGRDYEHVRQWVMKRCPIGETAIIQWEAPPNSSATNLNNVNIYLCCVSCTG

SEQ ID NO: 156759 - protein, 106 aa, Heterodera glycines
MEEAKGLEIVGFGLFHKCTPNQFYCSLLSVSKHIEPLFVNVERVAELKKSETEKEENANKGTGRHILLRMEGVIAIDEQKKQPIGYILAYGGRVLQCYADEEKVAG

SEQ ID NO: 156760 - protein, 35 aa, Heterodera glycines
KNRFFQVSVWGTQTIMGKKNPNAELKVPGYKGRYS

SEQ ID NO: 156761 - protein, 153 aa, Heterodera glycines
MTDIIEFNVGGQIFASTYQTISFDKESLLYTWYFERKGSAHTMLDKKGRFFIDRDPTSFGIILNYLRLHNAKQLWEVCLPKEPDRLALLTQEAEFFRLPSLRDQAVALLRKCTAEEPSPAEIRGRMMSLKTNGGMKNGRRWRTDEDDHDNEDD

SEQ ID NO: 156762 - protein, 467 aa, Heterodera glycines
MEAIKPIEFSHWAAPILVVKKRNGKTRVCIDFSTGLNDALELHRHPLPRPEDIYNAIAGSKYFSRLDLRDAYLQLELSDESKKLCTINTHRGLFQCQRLPFGVKSAPAIFQSLMDKIITPINGAFVYLDDVIIANTTLDQHVKTITKVFDKIKQFGLRIQLEKCSFLQKETVFLGHIISENGIRPDPSRAEAIRKMPAPHDKSTLRSFLGALTYYGKFIKQMREIRSPLDELLKKDVPWNWEDEQQKSFEKAKEIMLSDLLLTHFDPKLPIIVAADASKGGIGATISHQFPDKSERVIEHASCTFTAAQQNYSQIEKEALGLVFAVQKFHRMLYGRKFTLLTDHKPLLAIFGSKKGIPIYSASRLQRWALILSNYEFDIKYVNTKAFGNADVLSRLIANYPRPSEDILIANICNDTDCCVNFVFEAKIEQLPITAKIIAEESAKDEILQQISAFTKQGWPQKLDDIK

SEQ ID NO: 156763 - protein, 34 aa, Heterodera glycines
MFRVRERPRGFVGGGVQLVGAGRRIDATITYVKC

SEQ ID NO: 156764 - protein, 43 aa, Heterodera glycines
MVLLFLQLALILLCSVFAFIVCGIGPDSTASSTVSNTVGATRW

SEQ ID NO: 156765 - protein, 88 aa, Heterodera glycines
MASTNFSINDLNDSDRFDIVSNLSRICAFAREYKKKYVDGLPILKSLWFMKKEAKTQLDLQIAKTNGKGNCHVWEEKLGKMYWDHILL

SEQ ID NO: 156766 - protein, 142 aa, Heterodera glycines
MNGIVNVANGMDYKYEKLKEPLLSNEDTDQQSQFEVIEDDTTEEEDMEKAIKILKRFFWRVIMAMNCKNNTIKKPEEIGFKKSYQELVEICEYWKMLSIAAEAYVKSWKRCKKGPKQENEAEVGTSSTRAQDTLKTEENGTK

SEQ ID NO: 156767 - protein, 82 aa, Heterodera glycines
MLRWRWRLRMLWLLRLWRWRWQQQRRRTVSSNHRSNRFYHGSTSSTTARHILGQYHATFGTCNSDNNGTKPGNQYFFYGQIW

SEQ ID NO: 156768 - protein, 84 aa, Heterodera glycines
MSSGGVPGIRVVQMPGRRRRRRQIASVQTLIARATRSTPSKPVVPSMPRIIICLNTPKSTTEHMPKFLFKMLRKARRMDVGKKH

SEQ ID NO: 156769 - protein, 131 aa, Heterodera glycines
MTNHSDKVPKDSGKMTNHSDKVPKDSGKMTNHSDKVPKDSGKMTNHSDKVPKDSGKMPAEIGGEREYLLLEKYGQKILGKTIKHSEQLRKVIEWIYKKQCLLEPVFDKISKVNFKNFVFWDRRCRKKPGNL

SEQ ID NO: 156770 - protein, 63 aa, Heterodera glycines
MNFSEVKALNLFNNYLFWCKTSVPNSAYFENLFKKVQHFQFFPRRRLSAPPEPRPMFPKGFFG

SEQ ID NO: 156771 - protein, 18 aa, Heterodera glycines
MPIPATDEAGTCCSLRMH

SEQ ID NO: 156772 - protein, 54 aa, Heterodera glycines
TFLVLFESIRKMLLACKFSKIFIYAQKNLSKKSSNYWVFEFLLAITFLKLNEKF

SEQ ID NO: 156773 - protein, 143 aa, Heterodera glycines
MASFLIPNPQHQQVSGAQQLVSLVVGGTVCESHRLRVGRCSRVVVDFSDNSSGGSFCAANAGGRAKMKKMFVTGGDGTEQQQDDTITDELQQQEDEDDDDDDDEDEFRILSAHRKQRKEKQNSHLYNVDTTYCIQLVQGGGVL

SEQ ID NO: 156774 - protein, 86 aa, Heterodera glycines
MAHRNCCWALLILLTVLCCLTVLVPSILACCCDCCCCCGGGGGGGNSANNIATATALATALNGSLLVLPGSSSGNVYCLDFMTKKA

SEQ ID NO: 156775 - protein, 132 aa, Heterodera glycines
MPRNFLLWVNVIEYFVCLALQLPALLLLMAITISVQFRKKNHSQNEKPLCPTLIYYLLFLLISLISAVAYHCYMVSNFVQNGAEKADPYWMFWLALCYECANVAVPVAILGLTIDRYGIGNRVAAESLNRKH

SEQ ID NO: 156776 - protein, 544 aa, Heterodera glycines
INQCVIKLKLIYWVKKIEVSSIPQMLMGFHLDFLSCYFSDQVMSGFVLGGCVHVFFSQIGDLLGFFSQIGDLLGIQHLLPKRSGRGYLYERILDISFNLRILDISFNLSNTHIPTTIISLSSIAFLMFTQQILEPWLGTAFQFPIPYELLLVRPWLGTAFQFPIPYELLLVRNYLPSFPPPSMVRYELFPFVFFDAIGIAVTAVAMHLTVAKIVENRYHYKINSCQELYSLGLSGICSSAFPVFPITSIFARTLIGDADENSTQMTTCFSTLSLLTVIMTTCFSTLSLLTVILYIGPILEYLPKCILASIVCILASIVMVSICASFTKFRELRELWPLFKIDFVIFLVSFLLTVCYDIAEGLTVIFLVSFLLTVCYDIAEGLTFSALFSAFTIVVRDQWPKWHFLPKWHFLTHDEELGEYKEMPKELLQQIADEGHAFIIRYDAPLIFTSVHKFESKWKKMRKLSEFGCAFRCSSNASDGNSELSTKSTRQKRTMRREKAEIGPGANNALIIDCSGFPYVDFLGLKTLKKVLVFRSFEKEQIFV

SEQ ID NO: 156777 - protein, 27 aa, Heterodera glycines
MKKNTLSFSNVQFATYFLNPLQLHIIN

SEQ ID NO: 156778 - protein, 160 aa, Heterodera glycines
MTPIGAEQKNSELLEKFQSVREIGEAKVRVAEYLQLILEKYQERVAKDLAEFKADLEAENPGETELIEKNFMQTMLAMSSSSAGQFADLLDNLNIGSDNLEQQIIHPLRPFVSVSAENLNGDEERVRRHLFRQYRLHTQALRSQKLISMAPNWAQLVAPF

SEQ ID NO: 156779 - protein, 267 aa, Heterodera glycines
METCARDILQKALRKFPTAPRLWLTYFEIEIRFVEFLHQRRMFLLQQHKSNEMKNKWQKKNNSSKRKSNGQQKNEETAQITDEEAEKFKQFNSSSNNNDDEDEVLGLKLATIVYEMAMKSVEEHPAEKTKLLRDFLRVARDCAHFADVLVQKLTDHLHALGEHAEEEEENAVEGQLIPDEQLFAVDTEGDDDQQQKHNAEDDDMEENEAEEGTKQGISGGNKTDNNGIGIATKSTGDGGGGGNNSVLDGFNPDDPELKLVGLLFSQY

SEQ ID NO: 156780 - protein, 231 aa, Heterodera glycines
QLGFDFENHYFKSQRMCILNIIIPQYHPISVVANDRLTDQAHFQDTRLITFNTSIVRAKFGYSPGDVLMVLPENLPQSVRIATDALDQCRHRLDEPLKLFKPVEFAKFPFFSFGCSATLRDCLCFYFDLQSVPKRSFLRALAKCSPSEMERDRLMELCSAEGIDDFLDYCQHPRRTLAELLRDFPNTASRLGPSELFDFFPVIRPRAFSIASSPTAHPGQIQILVARVEYA

SEQ ID NO: 156781 - protein, 46 aa, Heterodera glycines
MQNMDKKYENMDQNFLKIVKMPKYGSKYGNMDKNLKMEKYGNKNAF

SEQ ID NO: 156782 - protein, 169 aa, Heterodera glycines
MIILYGSESGTAQDFAEQTWQTFHRNGTKIVAKCMPFDDFQIAQLSDEKMTIFIVSTSGQGEVPTNMRKNWRYLLSRKLSAQWLSNLHFAVLALGDSSYQKYNFAGKKLYRRLLQLGAKPVMELVLADEQHTLGVDEVFEKWLPELVEIVKKQPVIQQFAILRPFFSSD

SEQ ID NO: 156783 - protein, 118 aa, Heterodera glycines
MGWGQMDDNRKMVANRQMADNGQMVDKIGAKRKSVKIGDAMAHLGSYDKCERAHPNGAGIGPTHRWQFGRIGEGFLAAPSEHRRENSRNFRLKFSKNPVFLKNNIPSPSLLKNVKNEP

SEQ ID NO: 156784 - protein, 69 aa, Heterodera glycines
IRSFIHGNLKKAPIWLRFICKDGTESDTYYFRGGGYESLVNCLQRYVFLTRSAKSDNLILISDSRTDAL

SEQ ID NO: 156785 - protein, 243 aa, Heterodera glycines
MTLASKVTSSLAPLLDPEAVISENQLRVLSQQQPAADEDESSKLRQFCDSGFEHIFQLDLPHRPQILHRDPPVDKTIFDKFRSLSGNDGRILDSHGLKSLIFRGGISPEMRPILWKYMLGFFKWDRSDAENEHHRKKLEEDYYRMKLQWMSIGEDQESRFGAFRDRKALVEKDVARTDRSHPFFSRTNPENLHLLRDLLMTYCMYDFDLGYVQGMSDFLSVLCVVLEREVDIFWCFVGLMEFV

SEQ ID NO: 156786 - protein, 70 aa, Heterodera glycines
LNGSNSATSGSDGEVPSSSASKVMPPNTHSQPPQQHHHVTPSQPMPVPISYAASAADFSTMVGTPEFIQV

SEQ ID NO: 156787 - protein, 55 aa, Heterodera glycines
MFLNNNDNETNYLCFKRFVGDKNDAEIYCPLRHHIEGHPRKIKDHEKLASTVHVL

SEQ ID NO: 156788 - protein, 78 aa, Heterodera glycines
MPNQPKPFWASSAEARRKRKEWRQEHGCRVGSTPKMPKQTEAAPTADGEGTSTQAAESKPSTSAQDLRKSTNGCHIRD

SEQ ID NO: 156789 - protein, 67 aa, Heterodera glycines
VFGVADHESSIYFDQFGIPDPNSNKKSKIQTVLGYSKFEKVNPEMKDYIDEVSAEDESEEEERDDAE

SEQ ID NO: 156790 - protein, 40 aa, Heterodera glycines
MRTNKGTEKRMASKRRKRKESSPTAEKGAISDNCKIVTVL

SEQ ID NO: 156791 - protein, 237 aa, Heterodera glycines
WICSDVWMDILPSFDHAQLGLKMALLSDRFDVLVDKHFDGKATELTFWRIIRIGKENGPNANDNGPKPKLILIICDDGPNATADQVLSKWLHTPGKDGQPKRLFRNNYFGPLNLEWVNDFKETFLRSITSVSYTIRFHLFSNTMPIEPFELVNKRTNEKLTLMKDENDDGKFKDWLLKRCPIIGETMAVQHDQNLDHSNRFFSLCGAIGPMSLPPTDQSDEKVFSTPGPSDQQKKEK

SEQ ID NO: 156792 - protein, 390 aa, Heterodera glycines
MINHYQQFVKNMRFLRQPLDELLKQDVSWVWSTDCQNAFNKMIEVLKSDQLLTHYDPEKDIIVSADASNYGIGAVISHRFPDGSLKAIAHASCSLSPAEMNYSQIEKEGLALVFAVQKFHKYLFGRHFVLQTDHKPLLTIFGNKKGIKACTANRLQRWALILLAYDFEIEYQNTADFGQADALSRLIAKAPVPEDEFIVATITESPNLATVNAFTAQFPIVHEDIVNATKADNLLQEVKGFIMNQWPNKMDMSDDILQFHRRREALSFENGCIMYADRIVVPASLQTEVLKMLHRGHPGMKRMKSLARQHVYWPGIDQQIEEVLRKCEPCVTEAKAPKKTELHSWPKAEGPWKRVLMDYAGPFFGKMYLIIVDAHSKWPEVFEMRCCCCY

SEQ ID NO: 156793 - protein, 50 aa, Heterodera glycines
MATRKRPSRENGHAKTTPTVEWVEAVLMAYNLFPCNHSHNCLIVVGTDDF

SEQ ID NO: 156794 - protein, 79 aa, Heterodera glycines
MGSRTIRPVDNPSVVNPSVMDNPSVDNPSVVNPLDNPSVDNPSIILPAAKWGIALHAVVFLALMVHQRPFAVEVLSTLH

SEQ ID NO: 156795 - protein, 111 aa, Heterodera glycines
MSLNTFIFAECVNWPRILNECPSLRFFNIISDIFPEFPPDDNANATDGQAVVKNSGTKFTFPLEITEPTIFLIPNHSNLNKFRFIFLFQSYRTQLFYETYSNSRKIEVPYT

SEQ ID NO: 156796 - protein, 116 aa, Heterodera glycines
MAEKSDDIAVEVTKIGKSDQKKISMCLHSYVIKISLNPMTLLGTRILWDWQTLPIDIDNFHFIGAIPSLRFQGQAEKAEASSFFDVVPKEPKNGATADQQKRHNVPTENEFGEMNE

SEQ ID NO: 156797 - protein, 29 aa, Heterodera glycines
MAISFFEKFSMQQTLSNMKRSAKNGYLFF

SEQ ID NO: 156798 - protein, 29 aa, Heterodera glycines
MAISFFEKFSMQQTLSNMKRSAKNGYLFF

SEQ ID NO: 156799 - protein, 29 aa, Heterodera glycines
MAISFFEKFSMQQTLSNMKRSAKNGYLFF

SEQ ID NO: 156800 - protein, 29 aa, Heterodera glycines
MAISFFEKFSMQQTLSNMKRSAKNGYLFF

SEQ ID NO: 156801 - protein, 152 aa, Heterodera glycines
GQLWTDLVRAKRQLVPSAAGSIVNYGINGQRKRRQAEPRCDCISTALCPAGPPGPPGIPGADGEPGRAGEAGTVGLPGPLPQIQKTVDAESCRVCPPGPPGQPGYTGPPGPPGAVGPSGERGVFGMPGNPGAMGQPGDSGNPGEAGQEVQAT

SEQ ID NO: 156802 - protein, 208 aa, Heterodera glycines
MLFTVRAEYHFYFVDEQGIAKFSNVNTGDFKVKPSKGSHSWGLRNIPRTKVKSCIRPDLSLHIVCQIELVPDFSKVQSQCFRNRRYDQSQLTKEYLDRIHQMFLSGEGSDCVIECGNEQFHVHKFVLMTHSEVFRAMFSHKETMESVESRVRITDCTPIAVHQMLTYMYSGGLPDKFDNDHAQGLIEISEKYGLEPLKIICQDKLISR

SEQ ID NO: 156803 - protein, 94 aa, Heterodera glycines
MVMCLLSYGAGLDGRRTHKMTALHFAVSKRNLQFTRLLLCMGADPNLANAHGDTPRHLAAKLNEVDLLKSLIKCGARRCPLTKVGCVSGCVNEK

SEQ ID NO: 156804 - protein, 292 aa, Heterodera glycines
MANADSPILISDEELSDDEIHLRKLLLSEQQQQQLREQQFNPDRPYSSTVHSLPINQVQIVTPAQGQQLKRDQQLALINQKIKEMEAAKRQIEEEETAEEEARILREKAWKAEEQKKRTKRELDEKVKKREEEKKAEEKAKKDKEEVKAAFKKIGMSTEVGGKEDENKPKKKKSKNNKGKDTENGNLKAEKLNDGHREAKKDAEEKATREAEAKKDAEEKAREKQKRRKMQKKRREKQKRRRMQKKRREKQKRRRMQKKRRGEKQKQRKMQKKRREKQKRRKMQKKRREKQK

SEQ ID NO: 156805 - protein, 174 aa, Heterodera glycines
METISEKWTPKIVGSIFDPRGEELGDDWTIKKCQENREKEDRLREGKSEERMKAWKEWTQPKNQWESGGTAQGGKRFFENTLKSAVISANETRAIPPEGMGWKRHVPCFQAAPPGPGFKRRHHDVSPIRRMDSTGQGTSAASGTEERIVKIRKLLLQAADLLGEMADELFPYKK

SEQ ID NO: 156806 - protein, 191 aa, Heterodera glycines
MSTVTSEDQPAPVQKQQSRPVPSNRQQPANSVEYDQPLLVNKQQGRPVPSNRQPQNGTAEDHPSPVKLGNRQNQNGTAEDQPDQPSPVKKQQGRSVPSNRPPQNGTAKDKPDHSPPMKKQQGRPVPSIRQAHYEATEDQTRPMTKQQSRPMPSNRQAQNGVEEDQLLPVKKQQGRSFRMAEDQPAFVKKQQ

SEQ ID NO: 156807 - protein, 31 aa, Heterodera glycines
MSFQRAQLQKVAVHCEGTIRSCSNSSSSSSD

SEQ ID NO: 156808 - protein, 117 aa, Heterodera glycines
KPPCQLARPHGFLINKAMICRSRIFHFHFWHYGRWTEVIIDDRLPCRTDGRLLYSRPPDDDVFWSVLLEKAYAKVYGGYQELVGGKIRECLSDLTGGITEEWDLKAMSINQKRTLEL

SEQ ID NO: 156809 - protein, 26 aa, Heterodera glycines
MNGDAIMYDGKWTKDTARRGSTKPQH

SEQ ID NO: 156810 - protein, 77 aa, Heterodera glycines
MSYIIYSQCYRQDLNDREEPFSGTIDDKFDGGWRAHVQKKGNEEEKKEEGEEEEKKEEIEEEENKEEREEEEKKESG

SEQ ID NO: 156811 - protein, 52 aa, Heterodera glycines
MYITDRQGRAHVQKKGNEEEKKEEGEEEEKKEEIEEEENKEEREEEEKKESG

SEQ ID NO: 156812 - protein, 313 aa, Heterodera glycines
MEALHRILREHHKLAVVYESAAETYRQLPIEERVHLRMLLVDTNKIGVERTVEDDAAQAPANLHADDRANVKQIHPGRLGTETVAGSRLVAQFYLDDGSNVIPPSEYDVIFMGRDATKVKHMKWWNRNIDPALYPLLFPYGQYGYEYGIQLKLEKDERFDTTYRQIRDKDNNLLSTADDLGEEEEFLGAEQEQQFHRRDHVSRSQWYRYMAHIRGLNYNWRDGHWLWDWRTLAQHYTISFNNRMEAQKFQFMKQHQGRRRLILPSAIINWLKALRDNKGKNDFVANEMFYYLGYKGDIGRVYMTDEHFRGSRQ

SEQ ID NO: 156813 - protein, 321 aa, Heterodera glycines
MTQRKHLLICMLTTFYLDDGSNVIPPSEYDVIFMGRDATKVKHMKWWNRNIDPALYPLLFPYGQYGYEYGIQLKLEKDERFDTTYRQIRDKDNNLLSTADDLGEEEEFLGAEQEQQFHRRDHVSRSQWYRYMAHIRGLNYNWRDGHWLWDWRTLAQHYTISFNNRMEAQKVQFMKQHQGRRRLILPSAIINWLKALRDNKGKNDFVANEMFYYLGYKGDIGRVYMTDEHFRGSRQYYQKEYANCMTICREVGKPDLLVTFTMDPESPELDECCQWCQRTKGNSGLIGQMWFADFSSTNYVNCTTTSRIKKSWDLFVGGSTH

SEQ ID NO: 156814 - protein, 230 aa, Heterodera glycines
MGLKDDEEDLNAICEAAQAEEERRARGEERVTQLTAYFTFNKDNAPLGLTYAKCYKKLWYDIAKKQWKPYVNRVVPKFCRLKTVSPNNRELLAIRMLLLVVCDPTGWEALRTHNNIVHGSFIEAAQARGLLSDNNLWMNTVMEAFQTKKSIRQRIRWLAVFFATTNLSSPTTILDSILKDADNWLVNTSVAKASAEDQKQYVLRALEWFLLANGITPDSEPREDGTFESA

SEQ ID NO: 156815 - protein, 99 aa, Heterodera glycines
MHFLAMASTGIAAELLYEGQTVHKRICRMKHVDSSTSPNVDYESNFAHMLRNIHGMLIDEISMQNKDVLEFVDRLLRSVAPDELKEIPFAGKHYVPIVN

SEQ ID NO: 156816 - protein, 84 aa, Heterodera glycines
MGRKFGHEMKNGGQNEQMNKMGGKREIWGFIVLWSRFAKLGTAAKSCAAYILPASTGTGTAQLYFLRSDYPFLTRWPPLGRSHQ

SEQ ID NO: 156817 - protein, 596 aa, Heterodera glycines
MSGPIQKGIINALKTLDNAKSATSLLLHPDPDLSNWENAINLEAQFDRVVKEIRTTEMQMDSLRDLSNAWIELLARLTGDDKDNGEKEYIKFDKNEKIAERYDAASTKLRDLRDLEATLSAAAKLHRGRADREAKADQLANPQQQPPMPPAMAAPMTMPTFTAPLYQFQPIQLDKFFGQKRKWPELYESFKSAIGSQSISKAQKLNLLRNLLGGEARELIAGFRLEDANYETVLQLLKDTYGAPEEHIRSLHFELANLKPCRSLRETKDFLLQLERLTRELNNAGEDIEGPQVFLMLEKKLTPAFLRNILNKKGEDPTNWTTTKFRDVLNEAVRKEVQIQEVLGEYGHHHQSLDRPARPATQAQSSRTRNFAANFRNRNATPANRERTFMSSTIEEVHKRVNHNKPQQRKSQPKGLRPTQAPSTVPIRNGTANQAGSRKPPSPCLFCNGNHWNEDCQRYNTVQQRSAFVRDKGLCFKCLKSNHRASECPRPIKCYKCKQLHPAVLCQEGTNAATQTQQAAAVMERHPKQDEQKYTSQTAQLMSNAVKSSDTRALLMTTMATIFNPSRPCHSMMQPSSLTREATGHSFQTRQPSNLN

SEQ ID NO: 156818 - protein, 95 aa, Heterodera glycines
MATIFNPSRPCHSMMATIFIDPGSHRSFNSNTAAKQLELTVLRTEECFLTSFGEREPKRYVSDRVAIGFSCPNGDRLIFNLNALKFLLNNLPVLQ

SEQ ID NO: 156819 - protein, 302 aa, Heterodera glycines
MDDSSTLIDRDEVMKNFKENLSFVNNKYQIALPWNDRVAQLPTNYHQAKARLISLIRKLRTINLVDEYQAILDEQQQNSIIELVNSDHSCGPVHYLPHRAVIRTDKSTTKIRIVMDASAKPKSTPSAPSLNECLHTGPLLLKDLTGILLRFRRMEKVILADIEKAFLQLGVREQDRDATRFLWLANPKEANLEQLRQEDFRIFRFCRVSFGLTVSPFLLNATIREHLALHDTDVAQRISDNLYVDNIMMEVKPSESINQLVTEAKIIFKSAGMRIREFFGSQIDELKELDSSELAKDLENTR

SEQ ID NO: 156820 - protein, 123 aa, Heterodera glycines
MHSSGTNGLALTIEQPFDVHESNDGTLRGQLGGVEKCADEAIMKTLDNKTVYKIADLCQMIVANAPKYESKKEGVEEGAESKSDRFQWPDGICPPLKNVRRKRFRKIKKKKYMDVADVERELK

SEQ ID NO: 156821 - protein, 533 aa, Heterodera glycines
MGNNNCCVRHTPSISKKKSQENHTASEQTLQKSNIQIRLFVNFDDLKPLFRKLPFSGLVNHFFNGRDSSVNFLPHISEREIPDGWEQDPSTHPSVRPTEQDPSTHPSVRPTFVERSRSELKLRDNRRSFYVLDLNNLHAPVTLKKSNSCSTIYLDDSTISQPHLKNTIICVSLAVFYHIINRKNRGKERLMEIFEERLHPITNEPVAAENFTRDPEHEHRQIYRFIRTLFHAAQLTAECAIITLVYIERLLNYAEIDLCPSNWAEIDLCPSNWRRIVLGAIMLASKVWDDQAVWNVDYCQILQDTNVDDMNELERQNELERQFLESLEFNINVPSSIYAKYYYDLRTLAIANDIQLPLQPLYKERAARLEALSRNYEDKVAGEHKMRAWKGKPKQNRHFEFINKERIVVLNESIDGSGKKVFKRWDERMEKENFVESDVDEELLFENFVESDVDEELLFSVPFTGNVKLSGLCFSGRMDGNVKLSGLCFSGRMDGSFPARVRIFKSFPARVRIFKDRVNVSFSNPPSLAEGQR

SEQ ID NO: 156822 - protein, 778 aa, Heterodera glycines
KTNFSSFKENADKFMFTKTGRYVRLGLLAATVCAYPVIKVCSSGPLLSTSFKWRVKIDTVNFFPIFALDYSQIVENVFRLPEHLEKTINEVSEFSTSLDSISLGTSSFSTGAQIALPFYVKFRTADEAKAYAKEHFEVPFKVLGKVACVVWESRVGRQLLSTFVLSDEALAFLVARDLALAFLVARDLFSVKETYMLTRDALTWFCYVIPSFPFKGLLLRSARLFKGSFLSFVLVYPLLAALSVLTAKQWNDLATYANERQADMEAAKMSQLHTRYANERQADMEAAKMSQLHTRGGREFYSKFLLRNRLLRELVDGGDLLRELVDGGDKLFTEVGDYRKAIAEYVLRYDDIGTVRSENEQLSAYVMGVALGLSSCVVSSFCFGSMYVVRFVCLSSGTFIFTAFRLYAKAAIHGMVTFLFTGCPPFQHFAMFGGALWALGNLTAVPIINAIGLGMGNLTAVPIINAIGLGMGILIWGVCGCVVGWAIGRFGLFGVNPNVPNSPILNYAGLVFVVNPNVPNSPILNYAGLVFVIIGGILFALVRPKDNKNNAKNGILFALVRPKDNKNNAKNDDEMPNELMGQQTTTESGAMTEERIGLSLPAFVMEQCDFFVTVNCKFYSFYNLRFTPVIYMQDNSELFDNPPKDAILYVFSHFSGVYLTSTTVLLIYICFTKNRPYMDNRLIFPALLAGVFWAIAMLAWFVANDQLSQAIFVANDQLSQAITFPINSMTFPINSMAPGVIASVWSVLYFKEVDRDLKLLASAMLITVFGAVLVGLSK

SEQ ID NO: 156823 - protein, 67 aa, Heterodera glycines
MPFWRKSSIELGKLLYRLTDGKAPFDANGNCKRHKMKYTDRMKAIESIEKKMAKEGKPKKMQYNSTF

SEQ ID NO: 156824 - protein, 101 aa, Heterodera glycines
MILEYRHFLSFYDLHIFPFIFHHKKMNSKMHRSFFHWTSLLMQGGILCAPIIVNLQRNKLNHDFKLRKMMSADLPNMPDENLLDLVEAEMLAKSNDRLYPI

SEQ ID NO: 156825 - protein, 70 aa, Heterodera glycines
MLKVILRNFTVLVQKSDSATLAFGFIAGAGLELFKINFSCFGISFYKVFNEKQLSQELTKFEEKLANRNS

SEQ ID NO: 156826 - protein, 78 aa, Heterodera glycines
EESTVNHQSPKKKAPPNNARVARRPRDLRGLFPRAHRPISSASEQPTTQLKSNRLFARIDESFRSRWLKLRSKSTSMV

SEQ ID NO: 156827 - protein, 375 aa, Heterodera glycines
MYVDDDDDDDTITHGNNPTANDAAMAQRMQKQLQEQQEEADAELARPYFLFSKKHRPHMAGGTTLQLSSQQACTQRLFGEKKERFVYMQALVFFQCATNLLVAWYVLRRNKQKSLDNVPIHLYSMCSTSYFLAMLFSSYALEWVNYPTQVLGKSCKPIPIMLFGVLFAHKRYGLRKYFYVLLIVTGMAIFLYKPQKGSVGFQFGSGELFLCLSLAMDGFTGAVQDRIRHYHTTDKWTMMFSMNAFSSAFLALILLASGELFQFFRFVAAYPFILQQMLLFSLSGACFIFKTVTDFGPLTCSIITTLRKLFSLVFSIIIFSHPYTNRHVLGIIFVFAALILDAIDSRKSHGKAKGDEKPPAKDGLLQEATAQEKEN

SEQ ID NO: 156828 - protein, 42 aa, Heterodera glycines
FLKPPTHMIMYINIYIYIYILEVYITIKNLKYICISSDGKIK

SEQ ID NO: 156829 - protein, 86 aa, Heterodera glycines
MNTSLILLLFTVCFVFLAHFPQNAQAADTKRVYFVYGNPVEVEARCPGLSIELGATTKGAESKQYLDIATSKWPSWVGDNEEITFH

SEQ ID NO: 156830 - protein, 136 aa, Heterodera glycines
ILVDPWQLVQLLQLGQAEFERVVVGLYVVIRKPWSLERIEGVAWNAVPTYKICGQGPLNVLLCFNGFSYKLCKVDYSRPNSNHEILKNETMVSQPSSTILFLGKINLLFNAKMGSRTKRLRRNVAGHNVKRKTKNI

SEQ ID NO: 156831 - protein, 48 aa, Heterodera glycines
MAGRGHQKIESARVTPTKINSVRAEQGFSHKINPAFANAQIFHVHMLL

SEQ ID NO: 156832 - protein, 61 aa, Heterodera glycines
MPDADQILQQLEHHFVNNWLLDSGKIDELKQRQSDQREEHDEFDQTEEETDEISLINVIDW

SEQ ID NO: 156833 - protein, 111 aa, Heterodera glycines
DNCALAVRNKGAASKDIKWLIATYKIKATEEDDIIDVVDCPGNVFMGYQTFSCLDDDNCALAVRNKGAASKDIKWLIATYKIKATEEDDIIDVVDCPGNVFMGYQTFSCLD

SEQ ID NO: 156834 - protein, 225 aa, Heterodera glycines
LALSTRISSIIKEESLSYSRDGQWQWATNTPWEKQKGAKEMIVHCFIVPFFRQSFHLAYSPHCFTDCAHENVIKKLLARPFTDCAHENVIKKLLARPFRVPIPGYTGPCGNRLLGLRMSGVRNRLLGLRMSGVRLSLHDPYAENALVVFAPPELSAHEQLKIDDTKREVHVVVDPLLCAVLRPHQREGVKFMYDCVKRVEGHNGCIMADEMGLGTLQCIALMWTL

SEQ ID NO: 156835 - protein, 593 aa, Heterodera glycines
TTVAAEAETTVTSEAETTVTPEAETTVTPEAETTVTPEAETTAKNEDETTATKEAEETTVTKEAEATTETREAEETTVTKEQEETTVTKEAEAATETKEAEETTVTKEAEETTVTKETEESTVTPTAVQSSENATSEESKAAENSNAPSSGGEIGAVPAEEEQQTTGATNGQLTNGTTAEAETATTASTAAPPTEQTTLINAPPETNEQSNGTNTANAMNSAPLTDQANAEQTKGDANQTMTDKAPDGTNATSAGQQMAGEKTENATNSTSAAVQRNSDQTKGNADQLTQPSKEDSANSTATDQQAMLTNSSDGIAANTTNPAQNTDQKTAPGTMQNSENPTNQSASPEAEKTNVNQINPQKSDGNATFTTANQTTMTDQGNANFSISAQNAELSNVGPTPEKSGNNSNANSTQNAADMGNATQKTTSTEKSNGNTNLTNADPQKSNAQQKQNTDQKSNADQMAPTAKAETSVANATTVDQKTAPTKAENSSAATANSAQNNASNNGTSVSGAPAEMQNVDDETKLKMMIMSSLASQTAPHSAPNPSNSSAAEQRQGAPKGAGVTNNSTAPESAEKKPSLPAAKLANERPQKA

SEQ ID NO: 156836 - protein, 521 aa, Heterodera glycines
EPVPAEDAYGGEDEQGLDVEEIWECQIREQLKRDDEMRDFFDDLGTDRGPIDPRQTFYGGRTGPLQLIAEPKEDEKISVFDIVSLYPWVNYATDYPTGIPTVIHPTVEEMIVDWTRPEHLQYQGIYRVRVIPPKGLRIPVLPLKIDERLLFCCCHRCAAKFRKLNTRRVHKCPHTDEQRAFTGNFTHIELERALETGYRVDRFWRAWHYDEWSDGIFKDYVRLLIKLKVEASGFPDGANTVEQQQQFADEYRRIYSVNLDLENVRRNPGLRFISKLMLNSLWGKFGMRNELGANKVLTRPQEFFSLIMDHKIEVSAVIPLSDTAVRVMYKSKKNFVSEHTSSNIVISLWTTSRARLKLLDFMTQIDRTEGAKLLYTDTDSVAVLHKRDIVPIQTGEYLGQMSEEYLDYEIKTFVCGGAKQYGFRMLNKRTGEVEYVQKIRGITFDVNNSKALQFDHFLQKVKNYGRNTGDDNDDAPAVFSYDKIMPTRDSRIITRELRKKYMPICQKGIINEQYEVYPFGN

SEQ ID NO: 156837 - protein, 188 aa, Heterodera glycines
MLSEEEVRGNSVERTSICGVEGLEDLPGRLAAVSFTPLRTTEQQQQQHEPDRGRVGSDQLLERQRTRKRDYNLVRVLCRFNNCGPYRLTKQLQKQRTENLAYLSQLDIETVHLRKNVKIIPDALCPIGANQVFAYRGFLGITVQQHLYTRHRVMLKYPTLPCVVQFGGGHHRDIFPIELLRVSKTETH

SEQ ID NO: 156838 - protein, 23 aa, Heterodera glycines
MRQPKGIFKKLCLRILRSHSFKG

SEQ ID NO: 156839 - protein, 35 aa, Heterodera glycines
MALLKMGLSAAECVFIDDLEENCKGAEAVGIRSIW

SEQ ID NO: 156840 - protein, 185 aa, Heterodera glycines
MKIFFISFIFPLILLDYLEGHKSGFEGFVKNPQAISLVKSYEKKEIKTLDELHGQLMHKGIQISVCTLKRYLHKIKIVFAPTKDNVDSSPKLEVEKCFSKKLTNTIYIIGNGSNWRKYIQINDKKNDIYIPCSSCLYLGEKENNTRSIISTAVLRQGVNRVMLRSEHNSECKPEILEKLNHFGGF

SEQ ID NO: 156841 - protein, 85 aa, Heterodera glycines
MAKRTNRKNQKKKSIDKGRKSRNRRQKQETESSDSDDSGNERDFCDGVAAELLQKICRAVRVKGMKRRNDRTPTPIRDYRKKPDS

SEQ ID NO: 156842 - protein, 144 aa, Heterodera glycines
GPALLINNIRFGGNEYRHGANVDTTGMLELLEQLGYNPVHMFEDLSSQQMVAKFEWFSRLTALNFADSTVTVVMSHGHLRSVQGIDGNSVPIATLKSKMNGKNCPQMVDKPIVMLFNSCQGALRDYGVESSESPSLPTTKRHAK

SEQ ID NO: 156843 - protein, 73 aa, Heterodera glycines
MIVGYSTTPNFVSFRNKEFGCCVSYFPIHFGDDYGGTLIFDLLWFENLLVIQISKHISIHCNNMSIFADNWNL

SEQ ID NO: 156844 - protein, 77 aa, Heterodera glycines
MNINGKIGMVLYKFGASADFEKLSAIGLSNYDEPYDYFSIMHYESTEGSKNGNPTITANAPAYTNLMGKSTDFTEAM

SEQ ID NO: 156845 - protein, 17 aa, Heterodera glycines
HKHLFDLFYHIHNLIKI

SEQ ID NO: 156846 - protein, 77 aa, Heterodera glycines
MAGNYRNHTFSILPSTLDHTYRFMFNDITRRCRCRRLACRLARAEHIAHAAPSGRITWPQGADPCADAAGCTACNRA

SEQ ID NO: 156847 - protein, 76 aa, Heterodera glycines
MAPEILLTALGRKDGYSFEVDWWALGLGHRLHSSRGDARPLALRFDLFSPFNDQSGPGPEDRLLRRFPCPSVHVAH

SEQ ID NO: 156848 - protein, 148 aa, Heterodera glycines
MIGGWAKKRKQAIGSHPAENWQFDGQIRSQELIGVDTWPLEKRSLISSCKTAETHATVRELELNQAKYDTFYARGERDSRVEIVMRFGTPRELLGWHRSIFSDQHKYTAPPCGEREQILLNIIHMDLFALLHIFQSVPAFMLLELDDQ

SEQ ID NO: 156849 - protein, 94 aa, Heterodera glycines
FEYPKRTLEKIDFFVFGAVPPNRCAQIYGETESFGNSFPIACTLILRWIFAPHNCLSTPNGHLKKSIFLFSGQSPRTDAPRFMGRPNPSGIASL

SEQ ID NO: 156850 - protein, 763 aa, Heterodera glycines
MSVPERSQVSIQLQQLGLEDADVPIILEQLQKASPTPEATLKALQTVQEHLATKHFAEKEAKMWTELGIDQQQQQSQAMLTLSSALEEVAKLEAKAAREEIMELIASLEGPEKRAEIREMKPTQEEVQREERLLRIERQEHVLALVKHVLSESAQRRAVTLSDSQLAQVSEQFRQFGMTEMGTNVALDRLQQTSDITGIAQTILADWNRLEERLLTKSAIEDEAMVQATMYRIDLVKPEAKIKLKSELNEAAKRDLKEAKEELKTFISSLMGTEQWETVLTLQRAQRIGEATAITARAPIELNTETVAELLQLDEQALAGVIRPIELARKAEEIRLQIEKEEYAEEMTRKLMRDEFREVKLGEKEFEKVAEKFKQFGLKETTATAVIEQLQRISKTEKALKLKQEERAELFIKKLEKEVKEFIRIRKGYGNVQKEKERKHDEQQKVMEIVAKLINEEFKEVKLDEKELLQIAEKFKQLGFEEMTITAVLERLQQLAAPALLKVATGEQQKLEVELFLQKLMEEIREFARLRISYANAQRAKYQAQRLRGAVVQVTVPLRERTMPMVDTARPAAAEAEELFIEEQKWERLVYWFVNVTRRYAEERLRRDLHDARQRAEVAQYIAFEGPVSAVQRALFTPTTTAPILHTEMTMDKVAGTEEIVAEVPSLHVPQQIVIKHAEPVGMAEQQISSPTTWHEELKIKESTAAEWHTKTELYKHEIPRQDEETTRVLTAPHEQKAEMRVPEVGTESAQASDPSEQCGACR

SEQ ID NO: 156851 - protein, 18 aa, Heterodera glycines
MDALWEKDAPGQMDAIRK

SEQ ID NO: 156852 - protein, 55 aa, Heterodera glycines
MQVVYFIRRHVFGWIYEKTIQSLERRRWLPGVNWIMSPWDDKWKFICQGMAFRRI

SEQ ID NO: 156853 - protein, 69 aa, Heterodera glycines
MSFAVEKSFCRKVLCRKGFHKGLRFDFDPHFVSEFTEENDWPKLDVKASGKFGKDFLRDIVTSLNPYSA

SEQ ID NO: 156854 - protein, 80 aa, Heterodera glycines
MTNPTIIRIQDQSSKRERADTGESAGCRGTCPFHQQHRQQVGVRRDRDLPGPEKPGPGPRFFSGPGTGTNREFLKIQKFF

SEQ ID NO: 156855 - protein, 854 aa, Heterodera glycines
MPTTHLDQQIRDKWRWISDRQTTVLRQKVHLLLREAGIPTTETEYDAEIYIHQVQGLWNIKHPGEYKIFIFNDYQNRPIAKSDVTDYQFPILLYHNNYHFDGIKTLSKFFKKRYYCLSCECIYDRKTTHSMNCTSLCHGCREVGVDYPCEPQQMYFKKCEHCNNKFYNINCYERHLKNDICTKFPRCNDCGVIYNIKYHSTMSHQCGEKFCRLCKQFHVKEEDDENPCSSCFIQPLKQQKIKPYRIIAYDFEAIQDKKVGNSFEHEVNFAAATVICTNCINNEEWKNSLEGKQCAICGPNRTITFSPFDYKETTVDQKIVTQQTLREFVQWLLFEQNKKYPTVAFAHFGGRYDMTMIIKEVIAHGVHDPQIIKQGNRLYELKIKDNEHAPLTIFHDSYNLMPIKLSGLIKSFGLKIQDKQHFPHMFNKSSNYENVLTNLPPCEKYCPNQKKKTDLQKFNEWYNTNYDQHFDLKEKLPEYCCTDVKILTHALVELRREFKQLTQREGNHRGIDILWQAMTKASACVKNVALNHLRSNSLAIVPEKGYTPQQNQSALANKFLDWYSHINNVHVQTASSRYGEYMFKREGQVYQVDGYIKGTNGQRDKIIEVNGCLWHGCEECFDDMDEETRMPNGKTLGEIRLRKQRKYEILRRYVDLEVVWEHEINKQMKRDKEMREYFENWKDCSPIKIREAFHGGRTGPMKLIHTAKPGQKISYKDFTSLYPFTNFSTKYPLGHPKIISFTTNEQTVNWLSPTDNPYKGLLKILLQPPDNNVKVTVMPIKFDERLLFPLCEKCAKVISNKYPNGLKDNEYSCPHFNPNDRAFVSTCTHLEIMQHWRPATPPATFSCPTIRPME

SEQ ID NO: 156856 - protein, 78 aa, Heterodera glycines
MFDDEEIEEEKEDDVWAGLEEEEGDDEKEEEEKLDVKEEEEKEEDKKIFININITIRIIVIKIDNNNNNDDDDDDDDG

SEQ ID NO: 156857 - protein, 36 aa, Heterodera glycines
MLDDEEIEEEEKEDDVWAGLEEEEGDDEKEEEEKLD

SEQ ID NO: 156858 - protein, 75 aa, Heterodera glycines
MIIIMVEEYGKLVVGDIRFRTKIFGHKRPNGARCLMRRLQEVDEEDMSEGMRREEKDDAFSTDEPGEFIGFLKRC

SEQ ID NO: 156859 - protein, 18 aa, Heterodera glycines
YREAIPEGFGLPINLGAS

SEQ ID NO: 156860 - protein, 267 aa, Heterodera glycines
PIIAIPLFAQHPSSLSHFLLSTHHRYPTFCSAFIIAIPLFAKHSSSLSHFLLSIHRRYPTFCSAFIVAIPLFAKHSSSLSHFLLSTHHRYPTFCSAPIIAIPLFAQHPSSLSHFLLSTHHRYPTFCSAPIIAIPLFAQHPSSLSHFLLSTHHRYPTFCSAFIIAIPRFAQHSSSLSHVLLSIHHRYPTFCSAVIIVNPVNIQQRTSQLEARPIRLSAPFRAVALLSARVGRAATVVPGECAAHRMHSPVTRPAADRRTERSAMGGRS

SEQ ID NO: 156861 - protein, 349 aa, Heterodera glycines
MLSSSSSSAPEEGELDEDVAEENQPIIQQQRFDLLKSSSQRDILSANGYEYHFEAYSRTEQGIEYWKCVKRRPYCPGRVHVAGAINRDDDGGQYKVGVICNSRDNHPPVHVSVRRGQMELRRFAEAQNPPPTRQAIDDVRTNIPPDIRATQAQSSSAMGRSFRNYVAQARAEVGDDLLDSPGVIIPDRLRQITIFDGHEEGRRLIVFMSEFGRNLIANYGSHIAMDGTFKVQNLPGLNERFLNPHDPDDTKTLIKSLISLAFTPPGEPLYNYLCVLIRQFPQEEEVEEIVKYFVRSWVGCSRVMQIAAVPIEEEDYGGADAWIRHWIENAGLQNTDAIFPQEMWNMCDR

SEQ ID NO: 156862 - protein, 70 aa, Heterodera glycines
MYNTIKNKLANFRTENFWLLLIVLVPPIGLARRQMSWMEVAQPTIKFFTWALRKTAKFTEFLRKISHNFS

SEQ ID NO: 156863 - protein, 212 aa, Heterodera glycines
NISECETDGDDGDHSYCDTELVISADQIDQLQKLPDRNIHKNTVIQINETGQSFHGRKLLQQQPPVCPSGYVLFNYMNACNYPLSVTAASREYPPATTSVAANKQVSVCAQAVMSSGRVWASTDCTVQDSCVAAQPPVSLFEMTFNADGSQFMDVSYVDGISDPIGVRVKNCQQGQDQTVTFDPQAVANLRAMFPQMAETDTETGVCLKKYI

SEQ ID NO: 156864 - protein, 222 aa, Heterodera glycines
MPPGVVPSLASLTLFLPSPPALAPLGPPPLPLAVSSLSVPFSSPRGVVPPFAPFVVFFCPFFLPISSFISFVSFKNCCESCKSLSIVAGVRRFCCFCPPFMPKENAVTSSIVIAAEFFLKFCVCAMLSAEGKKPLIPKFASTNDPFAIRSKRPNKFAVERGEEKGGEEEEERGVVVRGGTIGGGGGRREAFVEEEETQGGGGRVGAGRGGKQEMGKERRGGG

SEQ ID NO: 156865 - protein, 373 aa, Heterodera glycines
CNPNVQDQAGDTPLHIAAERGLGPAAQSLCQLGIPVDVQNAKGLSALHLAARHGHIDIVRCLCLSGASVHLKSNDGMTAEIMALAQEQKQIATLLAKVRPEKARTKFVKQLSTVEGPLKRIKLKVPNFADFVYNQWQFLLNDYGIAFKKRQERKAFGVSNVHPPNNRLCDARELTFGLASKFKVSRGPWANNRIIFIKVVFDLDRLRRVFRVGLLRARALPHLLRPFCGQHGLCAFGCHPMELLYWLNFLKGRVTPSEPIGHCGQISRRSVVAIAGTFMGGECPITKNEAEAMMRTLKMRFETHFDIHGQLFLVDLSAQSDCVGSRELRAFLARQRDSILMRLQHPLRMLDSALAFLEQLREQYAQFPCITWP

SEQ ID NO: 156866 - protein, 169 aa, Heterodera glycines
MEEESETQGKREKWVAVVFVRAQIFVYNFFLCQPNPIILVSFDSPKCPLLACKISNNFLKVCFGSKEAAGLLTLGVDISVSQLQLSARSELAALLDAPNTLGMDWSILAVKLNLTEQIPEVDSSGQSLSRTDQLLTEWALHSPDSASVGKLASILQEMGRNDVKEVAEQ

SEQ ID NO: 156867 - protein, 95 aa, Heterodera glycines; identical to SEQ ID NO: 125597

SEQ ID NO: 156868 - protein, 176 aa, Heterodera glycines
MLCQLFALIGCPLFLLLIADIDKAIANLFQFLLQGFTELTRKICRKRTAKKSPITNGENGVKCVEDGPQQQKGCAGAENGCHLGTTATDERVSALAAVPFLFAFCALTAFAYAHLEVPLFCSILLASNTSETFIELRERRGENVVGENGKRAAEGNGKGRAEAGRNEEQGEPLSNC

SEQ ID NO: 156869 - protein, 114 aa, Heterodera glycines
MSKISRRNWAIRDFVRLGQITGKIGVKNEWKSEKYEEKVTHQKKGEEKGGLGGVEEGNENALFGHCAYECGDHHRLLPIFPRAQKFKDYGIVQKFGAHLCTGDQRRRKTAGMAE

SEQ ID NO: 156870 - protein, 214 aa, Heterodera glycines
MGTAMDTDTGQVLLRVAALCNRAEFKPGQVSVHYTAANEGNLLVMKGAPERVLCRCDRMLIEGEERPIDEDLRAAFEKAYLELGGMGERVLGFCDCALDKDRYTKQFPFNADEPNFPLEGFRFLGLISMIDPPRAAVPDAVAKCRSAGIKVNSQNLLIRTPTALMCEQVVMVTGDHPITAKAIAKSVGIISEGSETMEDIALRKGITVAEVDPK

SEQ ID NO: 156871 - protein, 54 aa, Heterodera glycines
  unsure (1)..(54): unsure at all Xaa locations
TKRAHIGSQFALSFSSSALRVRSGRVATSDLFRLLFLCVFSKCLXGKERLPRVA

SEQ ID NO: 156872 - protein, 150 aa, Heterodera glycines
MSIFTKEMSSALAQKVRDNYEELFPQSKKAAFSRRSQIAWANITSEINAEFGSSISEKQCKEKWHNLKKIAKRENANEQKHPRGTGGGPKRLESKDPALQIITDTMGESASFKGIPGGRSSVKADEAYSDVSTPTSVEKEVGYYCVILVL

SEQ ID NO: 156873 - protein, 25 aa, Heterodera glycines
MLIHKLIAILLNISYRGLISNIFSI

SEQ ID NO: 156874 - protein, 87 aa, Heterodera glycines
MTVIKMLMASYFLFIFFNLATAQNEQLNSSTEEPKAYNNLLLRFCLAVRRAKSCAFAVSAMARAVSRCRFVAFSARWSRAVFVSWTD

SEQ ID NO: 156875 - protein, 162 aa, Heterodera glycines
KVMQKRSAVCVLVGDEDPNVKGKINFIQEKDDSPVTIQGEITGLSPGKHGFHVHAFGDLSSGCMSAGPHFNPTNKTHGGPEDETRHVGDLGNVLAGQDGVAKLDFTDKVISLVGPHNIIGRALVVHKLEDDLGRGEGLKKPESMETGNAGPRLACGVIGIAQ

SEQ ID NO: 156876 - protein, 27 aa, Heterodera glycines
TVNAFRIRFICFCGLSVEGPRKMQENK

SEQ ID NO: 156877 - protein, 70 aa, Heterodera glycines
MGTMGEGSDRTEAVEHGERCDQSSDRHQRLRLSGYSVDILPMVQIICLRNGSDQSLLAQKRPENLGRRPI

SEQ ID NO: 156878 - protein, 22 aa, Heterodera glycines
MPMFKFWYFNGNFRKIAKSFGF

SEQ ID NO: 156879 - protein, 25 aa, Heterodera glycines
MAPPTCGFIEVLPIPPQMLRPSGTI

SEQ ID NO: 156880 - protein, 329 aa, Heterodera glycines
MYQNIAVGTVGGDQNAVEASSSSTMMAPKNESIGKTVVERQMSASVSLLDVGKQSVEEQKKQFEVTTFSSVSSSHNQHNQLPNGTIGNNHNNNGANGRKDDDDFGTEHKKVASFGGSPPPVAPKPKTNFTSFAVNAAPHNHKQNGNSGGCTDTTTTTAMMNGGVATIADGTAPETTIGDFSSRLRLFQQQTQQHQQQQPIMPNRTTSSTSLQQMAGAAQPTAAAAAVLPKLKRPLLSSDDLAKLAEDDQMRTKAAEAAAGDGRRRAAASLGAAAGSSGDASSGGEQPFPSPPPPIAAAAGGGAKTTTLMLSPMSPVVDGGTFEHLLNDW

SEQ ID NO: 156881 - protein, 63 aa, Heterodera glycines
MCTKQQQWAAVPVAGQYNSATRLQKISTSNDEKKDGKCDHIFLAVAAQFAFAPKARPPFFIFR

SEQ ID NO: 156882 - protein, 427 aa, Heterodera glycines
MALLIMLISIVGTFGCQPSIRASGMDPNLPFREGPRVPCTTECAERGVTNVSGREFNKIEIRCDDGCWATMPKSKDVNYGLPAKKLMHGYPCHDKCCAPGQGVALFSSLLFSCFHSPSLHIRSACDQFLQFPRPIAQFDQFVAFIHYSFCFNKFVLKRLGGLGKEGKAPSTLHHIRQILVRGQTEAPIHVLTPSFPGSPRRSPPILPIPVPFPLALENPGVGPERQRISSSSDSRSRSLADRCQSPASRSSRRDGANSRRRRNQVGQRRKEEPSGAKPSTEGQARSSPLIPPAGEARIAGVSLPPAGASTGGDGSRNPCSSSRERTSRSSSSSDSRSRSLAVRSQSPASRSIRRRKRESKPVSSSQERRATPPVRSSSKGRTSPLHNQSCRATPARSELLKGVRQALHQNLVGGAVKQAANRCITSN

SEQ ID NO: 156883 - protein, 169 aa, Heterodera glycines
MLLEDGAGQAQRVQQQQQHQVPSTSGGVVPTVQQQQQQQSAGNKATKNMATASSSSSKSAAAAAALNGGGQRAQKGAAPFFPFLMDFIKKKSFNLLLCNILKVDQPATTARKGSVHQQQQQQQQQNADKSTKTISTTGTSATSNNSGGGNKMPSMAYNEQQAKLKMVLK

SEQ ID NO: 156884 - protein, 59 aa, Heterodera glycines
MPWRRFFYRPSFVWLNSLCDDHCDDSANPKALSLKGFDYSAISLDLIETLHEVSLFLSI

SEQ ID NO: 156885 - protein, 66 aa, Heterodera glycines
MRLIEAMANSREKIMGTKIEENSSKSVSEDDTSAEEEDEENIENFRPNGTTNRKRAHRNPTSDSAQ

SEQ ID NO: 156886 - protein, 962 aa, Heterodera glycines
METFVEIVIHQHSTPEIVVTDQGRQFTSELFNDMAKIYGFEHCTSTAYHQQSNGQIEGSMRIMANIISQMINEKGNNWDEVLSHALFIYNSSIHTVTKHSPFFLLHLRHPKMPTDRLLKLPNQEEMNSDISIYTRNHVSKAVTAWNAVKEAVTKAQIIQKDENDKIRRAEEKVIEIGDLLLLKKEVLKHKFDQRWVGPFRCVGVDKTKKNVIIQQIDGKGKLKKVHQEKIKKFNGPAVLPLREADEPLNWEKYANDPNLEQEEAEESSESDKDSEILECEESKKDGENKKEIKNSFSKFGFESSDDENEMDQKERIVFVRGTDEREMEERPEILDPQIWDIEQPMPCTITEIFVEGEFKWAYTSWPEENLIPLTSLIPSNFVKDYWEIYENASGNRFLTAWLLGNSFELYLNDETDKIVLGIQVQFALNDIWHSRTEREIESYWEPLGEMDGQTLEIQRFPDLTITHKENLEENEQRNNILDQTNINAICYKNNNNDNKIKNNYQNGRMEQSINVIKEGDLFMSIFDLNEEINQEIYEEKSEKYEQETKNDGDKKAEINRENTDFLTKKLNRESMTSPKAPAMEAFNEEHLIAEEKKLKSEIEELKRRLDETNNRKAEAEKRRTERNERRQIDEIVLDVEEEEEEEEEEEELARQAKRGRLDPLETKKLVEKTINEKWEGQELVTIDPRAAGFKEPPEGTDSRGWEDAIRLQMRGEREKGWREFLSTKTSLDQMKEDRLNVMGRAGLTQSGRRMAENSVKSAEKSIMETECILPEGKGKQTKPWNELEMQRESTEDMERRRKFAVRTPPNSEPFANSGWGEMSNNEGTEKILDKIGEMQKKLNEVNNELNWLAKDVQELSQNKGNEIKKGENGQQDNWEKGNTNIPFWRQHDDNRFRGRGTGGNRGRGRQRPFQYGWRGSDGWKKNDQHQQQQHNDEACTSSSVTTTRYTGEEFTRMAGYRD

SEQ ID NO: 156887 - protein, 26 aa, Heterodera glycines
MEEKKRSKQFFAQKKKIEPPQYTSKA

SEQ ID NO: 156888 - protein, 46 aa, Heterodera glycines
MPCSPPCTARPCGRQRGTCPSVQSARPTYESSKHIRNSEILVFSNT

SEQ ID NO: 156889 - protein, 138 aa, Heterodera glycines
MPTEETEHELGVEVVVDTQQQHQQVVARRTFTDTTATATEMPTTMTTVVTETAPTTTPSSSGRTTTLVEEQQQQKQSVDGGGDNDEEESTIFPDELDDEPFGTTTDILPALSAVPPNSSEARRAPTAAPLVPLSSSSV

SEQ ID NO: 156890 - protein, 133 aa, Heterodera glycines
MERHASAYKVNRIYEWLFSTSTNQQGVEPLDDDDLLIAFVTRDSANFGQYCMEMEEHNLLMQVGLLLRRKGKGKYDIDETVRYLEQQYEAYLGAMYLLRKKWNCDGIKDDFLTWAECDRFRSYLISLYQFIFR

SEQ ID NO: 156891 - protein, 48 aa, Heterodera glycines
MHAVSADVHQEDLMTQLDLLKKDLDFLDINTGLGKMQVAENGMGLIPG

SEQ ID NO: 156892 - protein, 75 aa, Heterodera glycines
MKAITALREEKLKMREEQLEQKILKDKEERQNAFAAAAEERRLQAEQELEDQRKEWKKLSMEKDSNNNDGKIDDK

SEQ ID NO: 156893 - protein, 506 aa, Heterodera glycines
GTDEAMETEQQTGKANIEEDTISVLGEDEAETPKVISWSTCCTGDQHKDCADLLMADLDAVLDRSGMGLLKIDNPLKALLANFLLKSEAVKSGSAGKKLILQILEAEVSWELATYCSLREDDVKSGAFPSESDVEKTLEVWAEQCQIVNEELKMTGMGPISMEVPEGLSLLPENEREGLKKAMESAGFQLEKIRAASIHRKRLITEERVILGDSGAFQLMKIWPKSEFVGAEAGSVAEVIRNFDEVILSSKVKWLVVMVGKDSILAGEAIDSVMERVKRLRQLCSKFGHVKTFWLLPPFIFSKKNESEEFCGRMRSIFRKKDEIELIAVNEEGRSLLEVFRFGKSFNNETVNHHGWMTEKGLKVMKAWLTAVVPGFPGDRELGIHTIKSQIIVPERGAKVRGGGPADPPQIGHNWSEKNGKRGGPGDLSPSLSDSASEHAQNSVRSVNVRSYGEKSHFGRVGAGHRPGPSFRGQSSSQFHPYQRMRGGPFHHSTPIQRRSEFVPRR

SEQ ID NO: 156894 - protein, 59 aa, Heterodera glycines
MIMVLRKGINNRKYKICEYEMNYDELSIVKEGAVIMINDESLTDQQQLKVEKIKTNKMK

SEQ ID NO: 156895 - protein, 166 aa, Heterodera glycines
MNYDELSIVKEGAVIMIDESLTDQQQLKKMSENFEKLELVLKNTKLELKNKGLQEKLKQQKTNALLAKIEAENGKMKNEIEKMQAKMKMDEKEEQLEKKKEQYMNKLEQLHKNAEAENRKLKNEIEKMQEKFDKKEEQLEKNLEELQKKLVEMEHQQNEQQKSIEM

SEQ ID NO: 156896 - protein, 41 aa, Heterodera glycines
MRRCKNNLTDEEYERLFPKSADKYVFPTNTNGICVGLGNQM

SEQ ID NO: 156897 - protein, 439 aa, Heterodera glycines
MTEGILLRELLHNCRLNAYSAVIVDEVHERSVFNSPDLNLDDNDYLFNAISTVLDLNDSEPVESGFLVFLTGQEEIDTAMNILRKLKQSKSDHAADCIHAVALYAAVPTAVTQRAFEPPPKGHRKVIFATNIAETSVTIPGIDVVIDSGKVKRRSFAASNRMDLLRVENISKAQAIQRAGRAGREGPGKCYRLYSLEDYGTLADEQVPELQRCRLTTVVLELLQLGVQKVTSFAHLLSPPDIGQVHAAVEELLALRAITLSPKGQLEITDEGTKLTAFPVEPAHAKILLSASELGCLEEACTVVSFLSADPVFQFSGHDLFCLNEKQKYGQESTGLSSNYSDMKFRTNEGILRFQQFESAPHGTGVQHQETVARRMCQAEIALQHLHEQLGDVEKGNLPGTVHEPVPFRHLCPVLRFGPGPQSACAHPSLLLSPQPTAR

SEQ ID NO: 156898 - protein, 159 aa, Heterodera glycines
MVGKQKVANSPKQNDGKEKEKQLRDKNAPKIPINAYQRYVTHRLKVSPSKKFGTSREAMANFAAEWGAMEPQNKKVKGHKNGEETIVFAFSLFLTNISRREANTAKRWRIINAEVGKKAEIDEGFAFFVFKHFFFGIGSLDDRWAPSSVAFATECQANF

SEQ ID NO: 156899 - protein, 42 aa, Heterodera glycines
MVATVDIKYNISFLNNDLNWLTDTKAADKCTKQLNPVAHPSQ

SEQ ID NO: 156900 - protein, 155 aa, Heterodera glycines
FEAKKRASPVHCVRGDFDDDTAFPDVKVIPVGHFRIGITHGHQFIPWGMPAMELAARQMNVDPAMELAARQMNVDVLISGHTHECKVYEKEGVFYANPGSATGAFSIVKDDVIPSFIDVIPSFIVMDVQQDLIVSYIYRLLNDEVKVERVQFRKN

SEQ ID NO: 156901 - protein, 47 aa, Heterodera glycines
MRSIRAFAAPPAVATTCACPTCNSPCSDELAKWVCMTKFGDGGWIIA

SEQ ID NO: 156902 - protein, 424 aa, Heterodera glycines
MHSARKRPADKEQYEQQLIHYAMRKLFNIFPLLEMDDIGNVLANPTVTLREHFLQELVVSLMYHHYPKEEQTEQALRCFCDAINNIVTRNLQTDQSNIDRSPSYSSNSSRDSLHLNPMAKLDDPIRIRCMSIFTAMLRSGRFMRSSVELDGLYEALVGRIMECFSHCQCLTWRCLFSETEAVTFMPIIWHALQLHQGRGLLSYLDMIGDLVRFYGYAKMANWYVKSLDEVREVDDTFMVEEEQERAVAEGRSVTQMTRSNTSEEDTDADMEEGDGLAADERKMEMLDKYIHCARQAQMVVANWMDCSNLLTLPFSLLQEPQVAFRATEHICGWLLCGGLRIGSAESVKALAHLLLVMFNTESRDRAPEAHTMSLALQEEARQIDTVKMAISVQQFTALSMLAERAVDRHLGTVHSEFAQKVLEM

SEQ ID NO: 156903 - protein, 56 aa, Heterodera glycines
MTKTREQGRKRKQPKSEDADGDEKKVKNDEQQNNEQQEEGREKEEAIVDPERMKIL

SEQ ID NO: 156904 - protein, 142 aa, Heterodera glycines
MSKIGRIWNSAFTSAVAKWLFSLFLPSHGRHNANWQSTNSHRTVQQSCCCLSYISHFNSNNKDPDIFVFLLTTKVGGLGINLTGANRVLIFDPDWNPSTDAQVDLLNFNKLIFPFWVLGPKVHYKGVGGKVAGKMWFAYYFC

SEQ ID NO: 156905 - protein, 90 aa, Heterodera glycines
MGLGIREPEFNPIRSDSRSRPGKHRPKSKLTRTQSFYLPIQSDTATLQQMALQIKPITMRTDQGCRNADFRLAVSDILGSEFPFPMAGFF

SEQ ID NO: 156906 - protein, 149 aa, Heterodera glycines
STFYGFSDLLFLKRTFYEKVMDFNIIKFRQSELRCSEKSPLLLQNRTIQKMDKIRLNVAFSTQQKIEQLRWAVLPHPPYSPGISPCDYYLFRSMEHFLRGKEFADQNEVENALDDFFVSKNDQFYKKGIEMLPERWGRIIDQNGEYIIN

SEQ ID NO: 156907 - protein, 159 aa, Heterodera glycines
RYRPSSDRKRCHAWPFLVRGAICLVYSDNERDSSLLNSWLIASGHNFLEGFSVFSRTKLSNNRSVMPLDVRGCTRATLAKSACLPSPKGVGKPVKICRDWDRTLQLLSVNEEFLVGASHQLALNTSLPFVHTARRCPGLSHFEKFGDGCSGRSVCRLEP

SEQ ID NO: 156908 - protein, 379 aa, Heterodera glycines
MPNEAVFKTPTPSTRAQHPKTTPIELNNTVSKQHLDKLTVVKGDITKQQIWMIVNAANSDLVKGGGVDDAIHRACSPRQKELEQLLNIKILSNGGPIADGGVVDTPAFGDLANNVQYILHAVGPKVSAALNEHHRRSLAKCYTNALDHLVSMHMDIANPQSRSIAFPSISTGAFNFPRVDAAHIAIRAILNWLADQPADAPAIDEVRLVAFSDEDFKLYKEIRERVINKQSCSFLFFSAIVFAIVGRDDVNIAFNLRQQMFTLLRQFLDDPNCFPRGFYANRARFMQFIEALLLGDENTNFDAYIASRVGATAWADASDALLAAVLLGQTIVVVSPVDPDNVRRATSFFDDTVRHTIGVFFPDGNHMVTNNFKAYLILV

SEQ ID NO: 156909 - protein, 71 aa, Heterodera glycines
LFLGPAANKIEKSNGQFDGLVTNGVLILSPNDNDDEGASVYLSASSSNNDDDENESDSEISPNCWKEELLK

SEQ ID NO: 156910 - protein, 37 aa, Heterodera glycines
MPILLRWVRIGIGTEILVTERILKIHDFNGETLTIIE

SEQ ID NO: 156911 - protein, 537 aa, Heterodera glycines
MPYLKLTFLLLSLPFGCPLSFVNHRLDQPQSAVTSADRTCPLNMFLCRATQRCIPRSWVCDQENDCSDGQDEKNCETPQKRCSESEYECKNTQSMQQNANDNSWLNHLARTGFTHTCIPKKWVCDGEADCVEKDDELNCEGKLKCDEKHFECKGFDLHSATSCIPIEWVCDGQADCLDMKDEANCTAKETKPECEKDSEFRCDSGQCIYKSWRCDGDSDCMDGSDENNCKVDTCGSVDKFKVITRRVHLKMQTDSFSANHRLSAFPTNGNAMANRRSVNDIRTKNVFGFVKDCPDHSDETDCEGVTAQQEVHCKDHEFACASRSQCISSFWQCDGDEDCFDGSDEHNCTRIQCKPKEKACADGKSCIDEELWCDRSEDCADGSDEANCPNNDKGTEEKCKLDEFTCPGEKSRCIKYLDLCNGHSSNECAKKGLCNQEIKSCKLTGDQNDPCISRKMATHGMLYYCAKGYNASVIADNQPGFCEDINECEQPGACDQICTNLPGSYHCSCYPGYQLVNSDSDKPVMHKCRAIGPDPLL

SEQ ID NO: 156912 - protein, 104 aa, Heterodera glycines
MANPIATKKQKAPPPQIHNLRPEDFMDVTLLLLKCKYREQLFMKIGLNKLLFGYDAIYVLDDDEEPNAGNEVSYGVAAIELTSNGNSQQMNMSQQEQTPMAAVN

SEQ ID NO: 156913 - protein, 62 aa, Heterodera glycines
FHLQLDIFNYLKNWGHNTVLKIGVYGETNLGAFENKANLTSENLASYVIPVSGGEVAPTPFK

SEQ ID NO: 156914 - protein, 432 aa, Heterodera glycines
INKLESAVALDYRHNQSTLVWSDVSKEQVALISRCNVSVFLISLMAKKSPNLTVIKDNVTTPDGLAVDWVHGLLFWTDTGLDTINVYDLRRNKRKVLFDKGLINVYDLRRNKRKVLFDKGLDEPRAIAVDPSAGLIFWTDWGSDARIERAGMNGDDRQIIVQGIIVQGNAIKWPNGLALDILDKRVYWADAKTKQINTCDYWGEHVRVILHSHQHVRHPFSLAVFEERLYWTDWDHEGVLSVNKFHGKDFRQVLRGVSGPMVLRGVSGPMTVRVYHKQAQPVLQNKCEGRDCDHLCLPRALYQKPTKPTKNAEIRLKGLPYSCACDIGFRVDLNNSSMCVSTTAVLSESTVFCQMSHCLVHKAYTFYRRQPRQFSALHFENPIYRRTVEADMDAELEYRRQFPGPNLHFARRWHSQSEWSPFERTVASAGRA

SEQ ID NO: 156915 - protein, 49 aa, Heterodera glycines
ERHLYTFAKMSSDGMTKFWRCEFKKSISHYFGVSPGNFSQLSNEPVNFC

SEQ ID NO: 156916 - protein, 107 aa, Heterodera glycines
MTGFYTENAQLRARAGPNWLLVRVARDRHRPPARVNTDPKPLHNSPRVNSTPPIRVPDPERLASRPSSRSYSEHLSALRLQMPHSPLNRRTANPSLEASSPTYSNKR

SEQ ID NO: 156917 - protein, 169 aa, Heterodera glycines
MHPLALIRSANPPLEDDQQQQLMANNIVHRRRSTPNRCEALRFRSSRVRPAIDEEEEGNFEPIEQDEADLDDEFGSDMHSDDTENGQSSMATDADELDSEVGTEQRMETDGGEDSDDEMAEFMADNGQMEAEEEEEEEDEWGEDSTEEDLFMLAKLRQHPEIPFKVGSE

SEQ ID NO: 156918 - protein, 157 aa, Heterodera glycines
MHLSLLKCHRLVVVSALYWSVTACFCSVAQCSSRFARFFYPISLCPQAKRRAEKRTVRPWRFVRFGLRAVVGHAVLPNCAQIWAPPACRQYFAHNYHEGVALSEHSQSDLQIARAIVGQYDPRLIPTHSSLCFRSYAAFDTLERHLISPSFSPSLLI

SEQ ID NO: 156919 - protein, 274 aa, Heterodera glycines
MFSFCILSHSIVLPRILNSHTVGNQQQKRQAHVKEHFPKEQNFLVKGFSHQYPSIIIGRTLVIPGNSNNVTIQILNAGNTNVKIYEGSHIADLEQIYINALPGDEIHPKDYMPPETKWHENLPKLPTQIVNPPPSEKINLEGTRLSKKGQNDLKKLADKYSEAFVGEDGKIGRYKGQIVHRIDLIPGSLPFHFRPYRYPPETQKEIERQIKLMLDQNIIRESESEFSSPIVMVPKADKISWRFAVDYRALNKMTKKRVFHLPNIQELLDLMGAK

SEQ ID NO: 156920 - protein, 66 aa, Heterodera glycines
DADVPVTSTAISSPKISVPSTHSKFLYAKILHRNQGAGSPACDTVASELSLSPIRMNTGRAHEYPP

SEQ ID NO: 156921 - protein, 81 aa, Heterodera glycines
MLSSRQLGMSRNDANGCPQLSAKCTTRPAPNAAFFGISNFLAFRKIDDNLCLLNFMADVIVVVADDDNENEDASSSLLLLS

SEQ ID NO: 156922 - protein, 130 aa, Heterodera glycines
INSISKIFGFFFLIFLQFVHIFHCSTEMLSSRQLGMSRNDANGCPQLSAKCTTRPAPNAAFFGISNFLAFRKIDDNLCLLNFMADVIVVVADDDNENEDASSSLLLLSESELINFICRFCAILDKSLPSL

SEQ ID NO: 156923 - protein, 158 aa, Heterodera glycines
MSLAEQIAPELNDNELFDEITALNETLEKISDEKFREMNAEQKWMKLFEAKLPNLLLLVSKILSIPVSNACVERVFSLCSAQWTDVRNSLKIETVKSLAQIKLNYDLTCPEMYDLLISSPKLLKMIMGVFYFGLYALKIRASLFWCLSFLALKFFNKT

SEQ ID NO: 156924 - protein, 40 aa, Heterodera glycines
MPNPLESAQPGTIYRHMKKFGGFMEKQPVVIAAHFFSFDP

SEQ ID NO: 156925 - protein, 79 aa, Heterodera glycines
MSLFGITKSKTGDEFAHCIPCNFDISLLSIGKAAIPHHLKTEKHKKAAKAANSALAITAFMPSKSARTNLDRQTAAVEG

SEQ ID NO: 156926 - protein, 103 aa, Heterodera glycines
MCGFMSTKCLFSVHFYFFILIQLFFQLSSAHVYLRLLQDCCQLVKANSIEGCKLAFTDVVYTMWGNLKKTGDMVTGQVGFHSDKAVKKVMRFIVRRYFKNGPF

SEQ ID NO: 156927 - protein, 80 aa, Heterodera glycines
MPTFANKCLPLELLYEIVPFIPAENAAPNALSSCSLLHKLLLPRVIKWKEVCRAIGIGLEKQFRWSSTLRTQYGTIVQWA

SEQ ID NO: 156928 - protein, 157 aa, Heterodera glycines
MCAFQVKQAINRRIQSMGFMQLYSSKEPNGLEFQRLVRKIGALQFCPPNYLARSLQLMRHLITRACNYMDIKSRNMAIKYGPKIAKYGHKMAKIAKYGHKWQKCQNMDINFSKLNVKFLQIYWLKLHMRYISKFFDSRKINNKSEIFAFLLIFDIIY

SEQ ID NO: 156929 - protein, 39 aa, Heterodera glycines
LQIYWLKLHMRYISKFFDSVRRFDKDGFRFAISRSTFGN

SEQ ID NO: 156930 - protein, 201 aa, Heterodera glycines
MTSPELRQFEPLEMSNSEPDDDERSEDGASLGAATARGTRSRSGSAARRRRGSSRHDGHSLARSKSTRHENGMDKFVNSRLLSTRKKILKFKICFDLKGELSLNIKIDRLALINAYQSEQIPFRIKLSFIDLIHNDLCFLDVPMCLSSTLFESLPQFDPTLLKRPFVAKCQFFSHHSDQSISISMYQPLITSFHQKPLQIA

SEQ ID NO: 156931 - protein, 51 aa, Heterodera glycines; identical to SEQ ID NO: 124998

SEQ ID NO: 156932 - protein, 677 aa, Heterodera glycines
MVKKHPLIIDSEKEEHLLINDEDRGVLPPGNDALCIANNAQQQHVRYYAEIDGRKYPTQGLSYDIDVCGTGLLVDGKFYKNAVPTGHINEINRIEERIPVLGSPSKDIPLIAAGDVQRNTARLHTNVVGQQILGSVSFPKIPIGGNTDYINAGHNKHDGKSTFGDTKREEKQKNKQKQQKRGKPMGGNIIHINNQNNENIGGTQDIGRIQIGGMPPGGALHFNTGGNRNVGGTQKIGGIQIGRMPTGGTFGLNIGGNRNVGGTQNIGGIKIGGMPAEGSFHFHTGGNRNVGDTQNVGGIQIEDMPAGTTTEDNHNLDSAHEIGDLVASLRNQLRKNKISINGQNYAVDGPNVNVGVEGHDLSVNGRVYQNRATEQYLEIIQDKNIRNVIVSVPLALFSRENITVGQINAECDGNLYIGQSTGGCLRILCVDIKKRAYTNGPKTRGNLQIKNTTIECVSIGGGDENVIESDGVLQITESPMGNVAMKSGGNLKIKNSGMERVHFESGGQLQIEESPMHNVWVKSGGNLNIKNSGMKRVIIESRGALQIDNIDKLPMGSVWLKSGGAISIDNSKIESYAKMNSGGSFTITNSEIVNDAEMHSGGHFTITNSEIENNAVMTTSGGSFTIMRSEIKNGKFECNGSMTIKESKMESGSIVYSGSFTDWNSQIASKVRKEKKH

SEQ ID NO: 156933 - protein, 66 aa, Heterodera glycines
RASMAFPRPFIYPWPTFWLIPPFPQIRSPVFSPSLQLYLSWTSAASLLSANGIYHFLKKSQSLGFP

SEQ ID NO: 156934 - protein, 54 aa, Heterodera glycines
TSSGPKAWKICFLVIVKQLFELLALILSFLFSLNPKKFNKTYFDLFCVLLKIYE

SEQ ID NO: 156935 - protein, 99 aa, Heterodera glycines
MEADINAENNDGYSPFMLAVMNQDTQIVRYFVSKGARVDRTNKDGISRFTSVPAVTTDLSCANCWWRTGPMPTKPMALVVALRLCILPAATALYKMVRK

SEQ ID NO: 156936 - protein, 55 aa, Heterodera glycines
MKIFTPFLLAFIGTHFAVFATLHSLDEWKETCRTIINEIEDTETNLAADPEVSKI

SEQ ID NO: 156937 - protein, 674 aa, Heterodera glycines
MANKFLSDGNNMAISDEIQSDLQCPSRANAKRLNCTLRWGSCPMCLPDHDSAKINCQCRDVKLEPALADPEKRLPIQLKNLLLRNERRDIFAEITYAPIQLSIQFEGLRIATEEDLTKCHAMSKGLFGCYSCHTGAHLHLQCHTDFGSALGYVRCSDGTEFTALCHKTPEILNVSLSFNRAEVDINCTIECSGGRNPFVINGHLRYVPKHFQAPNEGSSFASKAKPSNSCLIWCPDWNFDFSDVFWYFFGLQNALRTVGIITLALFIIYVLLRCNPALRSWRAISRVVLLFLALWPTTDSSAAGELSHLLSIQNSAPKLQFEGHSSVSRRVTETLDIFDAQIGTIHLAKNQKSPMDFAIKAVSVPVHSPFLQIPESAFHIQTQAQFPPFPMATLISFLANTMNIEVERFGLAVTTSLSRWNEARTIVEGLHERGYELKTRHLHPRERNVRLHGSELSRSGANRLGAYNGSACGPTVSELYRSRHGITLRHPSAPCLMEPGGNGHHDFFPIEMIRVVAPDQVSTPRGLSTRSLPRPRPSHFELWDRTDHPPRSRELVISVMPHGDSTTRGAAEEYRIGVGRELTISGPLVLRIYAGALLLALFSVALVDGQSSIAGPCPALSFALCSPRPLKISCPCSSLFGPSPSDFVQIVNNLLRWLVHRFPAANTLLKAMPN

SEQ ID NO: 156938 - protein, 95 aa, Heterodera glycines
MPAIDCVFYGAAGGAIANNGTERHFLEELFLSVREKHQLASKCVESLRKKAQAEQLKLPQLMEEMLGKGAAGDEAAEAVNGEESGAGGALNFYVH

SEQ ID NO: 156939 - protein, 110 aa, Heterodera glycines
MPVPDSDGQWATKPLQGKEDRLQLRSEFDRTVPNAAQMLLAAREREKQMAIASPRNVGMRLPPLQLPNGPKRIEMEECKKGEDGGQGMIATVATRPLPQLQPLRQYQVGE

SEQ ID NO: 156940 - protein, 94 aa, Heterodera glycines
MCRRTLIQRLVQTIRQRNNNNFNATEKTLEKASVTIEHFYIFLSKIKMDFIAQNANGFDQKNEYLEILLLDGLKRKAMKEFVSTVIEVESSNSG

SEQ ID NO: 156941 - protein, 156 aa, Heterodera glycines
MANYLLIFILFTIISLVKSQTPINKNGSSTETIHKMKVQHEQGLEFLKLLTEIVDEQFSSNKFNRMNYDEQISSVLKYIKIKLEEKIKEIGVQLSEIGHFFLNFCCEQFGFINTTDEPNKSNALSSNLSSKGSKICIFGTFIALAECIKEKLMKNM

SEQ ID NO: 156942 - protein, 47 aa, Heterodera glycines
KSLARHNSALVLISQKIKPLFLRTHGCSMHPPNFIPKLHGHLQTFLC

SEQ ID NO: 156943 - protein, 251 aa, Heterodera glycines
QAIDPYIPPETSLFSRGAKDIFPDLKAFATRKYQGIFYGLRRIRKKDGFQNFNLKVRSSTFPFPWFLFWHQDFTKLAEQIYANAYNALALRDKTKLHELITEAAFSKMWPDVEKGTLHWKLVQFSEPSKVLTVRCLDNPTKSGNDIAQIIVRMHSTQILALYDKDGHLLLGSEEEPRQCLEYVVFENHVASVDGMWRLHCRIYPNWLKPKQSPHRQGLIDEEEMEKLPKEPLKISSGNQVKQSKKRSSTAG

SEQ ID NO: 156944 - protein, 113 aa, Heterodera glycines
MTSTKNNSKLNELLQAGGYDASDGIDSLIPSHLKQLSRPVIRRVRMLKKIQAQSLEIESQFYKELHELEMKYQPLYDAVNAKRTAIVRGEMELTDADGELPPLVSELEPQTLE

SEQ ID NO: 156945 - protein, 70 aa, Heterodera glycines
MPFLTLNAMRSLCRLPPSLFSTGIMQLRFVHHHKELEEPGGFERFMGWRRSNPAKANRNTHINERYMRRV

SEQ ID NO: 156946 - protein, 323 aa, Heterodera glycines
MVTAGQNPTDSGGDKSAFFPKALAVLSSGVLAFSDQAIAAIRQIEHSPRIQFDAVAKVYRVNSTETGELLEFDEWGRHLSTLATDRSGGGTERRILLRRSISYGEEAENGQTMLSILEEKEGQKSTEVKVIKGQGGGRGGAEGTDKQRLWTIETEGGQTVVEEEEGEEEKGGATTEAEVGAGRAGDNIVRQNISVTSSADPIRLQFTRDGLLKRVSNGTDRTFFSYDDETRLPIWAKFPDGTEFEMAANEWKAKGEKRRGKSERRSRALWTLGKYSDDRAARVFMGDGEGRSIQSETDHPPKALNPEFVTFWSNLYIEKNGIW

SEQ ID NO: 156947 - protein, 731 aa, Heterodera glycines
PPLSQNSRLLINLTVSPKARIVLLARHSVRPTPGAHDWQKIVSGDRMHPLTTDRNGRDTVGTFLRHTMISHFLTAGRWHFGFLNDREQVLALSLALSSSSSSSSDDAPCQFDCFGKGLCRAGRCVCYPGYGGVFCEETACPVLCSGNGMFSNGKCQCYAGFKGVECQMPIGETMGGNSRERGQSISGPSDCKLGPKTIGRGTADKIGIFKDSKNTPGNNKSHLIGKGSIQQILRRCEDPSCAGHGKCDSSDGKCHCREGWTGPNCAERQCPGRNDCAGRGICHGGKCFCALGWTGEGCERKACPHGCTEHGTCTADGQCQCQAGWNGENCQIETCARNCSNGGQCELFSDGWRCQCDTAHFGDHCQFAKGERSCDDGHDNDGDGLTDCEDSVECCAHPFCASDSLCLAMPFPSEAVDRRSLSISDRLASPFFDRVKFLLGRTFGAAIRGHSPFGQKRISVLRGRRISVLRGRVFSSRGGPLTGVRISDSENPHHGFSLTTTAGTFELALNGGGMVSVQHHGFSLTTTAGTFELALNGGGMVSVQFVRQPFGRVPLTFYLPPNRIVSIGTVWMDRPFSTSTRSGFSPLLRPRRIALRLSPIGTFVRPSPARSPPLPDSRAISLSVLIPDSRAISLSVLIPGTDQFLFYSSNCADGARSVLRVQLLGDRLPAGLLRVELALQIDGVRHQRTFAPRESLSHEFVWDRQNAFGQHEYGLSDAVVLVSLFRPSASS

SEQ ID NO: 156948 - protein, 27 aa, Heterodera glycines
TSRPRSIQWYIAYMHFPTHSSECSLVS

SEQ ID NO: 156949 - protein, 172 aa, Heterodera glycines
FINKGVHWNRRRKNFGFALWSALQGNITWQETGIFPRVTWCDFDVREMGQTVNHTVQCVLTLNVFMEKVFLILWAWYAVLAALTLANITAWLYGYLSVASADHFIFNHLEMCSFIFFVAQICNSVRRFVAEYLRSDGMFILRLIGQHADVVFTTDLVHRLWTSHYEIEKQRA

SEQ ID NO: 156950 - protein, 97 aa, Heterodera glycines
MHLLIIVLVFFFIKNSIDKTLSVNLYEKNGKLRPTFAEIFGQKWDNEKMECENETDQNANYLQNDQNELNSVDSISSDQNNQLDDQQKFEIVHKFTQ

SEQ ID NO: 156951 - protein, 97 aa, Heterodera glycines
MNLDDLTSWPAVKEAFCSGMENPKKLERCHKMAEKLHFIEEEDNEADHDEEEDDEDKNEVGLSTRSNFVDSQFGNNEQIHPIMSGDAEDGEAESRES

SEQ ID NO: 156952 - protein, 184 aa, Heterodera glycines
MIFFLIIVIITLIISDSFAAIEEFRFSRRQSAGDVLRRAMSARNYTFNEPLIVINHMVNDGQESNEQTNSSFSLSTLIVAKELSDEERRIKSAKEIQQELLANLRKIRENIPRPKGVKHFFKRFIESRKTKSFEKKLAKNPDLETEISETVLDETKGGPCEKLLPARDENGKLFTDYELRMKAR

SEQ ID NO: 156953 - protein, 189 aa, Heterodera glycines
MANGKTAQRIREDDARRMAFITSQVQQVLVFWECEINAEKRNNNEMKRSFAQYKDSGPIRLKDCYHGGRVGPQRLHYEVPEGWRMKYYDVRSLYPHTNAVTAYPVGHPTRVNIIGEAEQAVDWRRADQVPVRGILKVFVVPAHHVDVPVLPVKFDQRLLFPLCRTCALQHPHGAVNEDYECTHREDDER

SEQ ID NO: 156954 - protein, 280 aa, Heterodera glycines
MLFAHFGGRFDNIMLFRQFFLNGFCPQMIRRGNKLYEMKIARGEKNPEIIVRDSWNLMPVPLGALPGAFGLNVQDKEFFPHLAIVAANYGHILQSLPPKADYLYGGMTPDRQRRFDQWYAEHHHQHFDLCEQLAAYCTNDTRILIEALVAFRTEFLTISDPLERHGCLDDDNDDEEEEEEEEEDNAFEVIGGGIDITWEPMTIASASMRHFRLNHLKRDQLAIVPECGYDTTNTQSLVALKFMDWYAKKNGVSIQTAHSPGGEKKLASTLWTDTSRRPTP

SEQ ID NO: 156955 - protein, 175 aa, Heterodera glycines
MEKVVKFEEHRHNRWRRAPAVWGEPAPDYSAVSLGIPSTAFFLYALLFVDLKTSDHYRREHEVVKREVMRLRNEANTYFFQINIRLLVVDILETFRDDLSASLYSFEQYRNQRVAQLPFHNVAVLISHRHAGGLAFIGGLCSGRNVMMAGFYPHNPEAMASIFFHEVAHLIGPSQ

SEQ ID NO: 156956 - protein, 211 aa, Heterodera glycines
NRQLISLHLACNEIGQIWLESGVSENAVSGHVQLMEPGKTACFACLPPLVVASQIDERTLKKDGCLPPLVVASQIDERTLKKDGVCAASLPTTMLPTTMAIIAGLLVQNALKFLLSFGEVTPFFLLSFGEVTPFLGYSALVDFFPKHEIRPNPQCDDCFLVDFFPKHEIRPNPQCDDCFCRKRQREHRVKLARDDLMGWRMTHGESILGGG

SEQ ID NO: 156957 - protein, 248 aa, Heterodera glycines
RMSFEVKAGQTVALVGYSGCGKSTVMALLERFYLPTRGSILILIDGIPIEEINIHRLRNQIAMVSQEPTLFDCTIRENITYGNRERITHEQIVRAAEQANVHNFVLGLPEGYETRVGERGAQLSGGQKQRIAIARALIREPTVLLLDEATSALDTENEKAVKKALENARKAVKKALENARKGRTCLVIAHRLSTIQNSDIIFVIKDGRVVEQGGHDELMSRGGGHDELMSRGGIYTTLCETQILKEEA

SEQ ID NO: 156958 - protein, 296 aa, Heterodera glycines
MRNFAFIFIWFLIQLGNHLLKNVRAFPTAENGSGMVSGVFVEEELAVEIEKPNEANQNVNPEHDQTKREGAVSEGNMNSNHGHAETVYEGNMNANHEHAETVHEGNMNANHEHAETVHEGNMNANHEHAETLHEGNMNANHEHAETVHEGNMNSNHQHVESAHEGNMNANHEHAETVHEGNMNANHEHAETLHEGNMNANHEHAETVHEGNMNSNHEHAETLHEGNMNANHEHAETLHEGNMNANHEHAEIVHEGNMNSNHQHAETVHEGNMNANHEHAETLHEGNMNANHRHAET

SEQ ID NO: 156959 - protein, 142 aa, Heterodera glycines
MFMIGIHVPLVYGLSMFMIGIHVPLVCSLNMLMIGIHVSLVNYLSMFMIGIHVPLVYGLSMLMIGIHVSLVNNLSMFMIGIHVPLVYGLSMFMIGIHVLLVMFMIGIHVPLVYGLSMLMIGIHVSLVNNLSMFMIGIHVPLV

SEQ ID NO: 156960 - protein, 152 aa, Heterodera glycines
MYSIWKHLRENSCYRLLFFIGITDLSILWILGFLRAWFNLHGYVFCSFPTLIYFVGIATTSLWMAESTADLVGIINIQLLNNEQILKKELLIFSLTHLPTGVAHFPQHYGGSAKPEHLSGLYHKTVVRHTNKSQTAECCCHRIERCAEKGGI

SEQ ID NO: 156961 - protein, 191 aa, Heterodera glycines
IRVRRDRDIISKFFLFTPILFTNISLRPSFLVLSPLVFSPAILSPSILGPLIMFNWTIIFWIISPRIMAPIVLSPLVFSSIILSPILMEPFILSPGIFIFLSQILSPAILTPLIMSPQLLHPAILSPLVLTPAILHPTVMSPTVLSPFVLTPQIFSPKFLGGLFLSPYALSPVFKSPLFVYSIVLSPSWLS

SEQ ID NO: 156962 - protein, 428 aa, Heterodera glycines
MSDDGSCETESIDASDAESVASTESLIDRIDKTRKFISLRDYCKYHLAIRDENLEWQYHHILSCGGGLGQRWVLDQAAKIDWQIATFLRRPDMDLRISTPKNLLHYLVNQYNKQQARQNPNAQQKSVDDIGSVVRLSEKNVNSLQYWKKRYEDCNTIFARCHNPKKARLFITFTNNREWPEFKENIYKNGQMFTDRFDMWMRVWSSKIAVFHQELYEKSFFGTILGSGESMEFQGRGGPHAHIVAQTDLDAVPEVIQEYIWAHIPPLPDKGDDSPIAQMHREIRELMHMQLHRCSDSWCGPRDPNFGRCKKGFPAPYSKCTILHPDRPALYYRPSPTDGGAQIEVNGLIYDNSQVVPYNPYILLRYRVHHNVLFAYGNKANIKYALKYPFKGPGHCYVECKEESGSKIGIDEPAHMPNELPWSYGSFC

SEQ ID NO: 156963 - protein, 113 aa, Heterodera glycines
MDKRLIPTKDLWTKDSYRQKTYGQKTHTDKRPTDKRTTPTKNHSRLRLPDRVRPGYPDFPRPGPDLFKIQYVVPDPAGPDPKKCTAKNGSRVKFEGKKNLEKLIYYINTFTFF

SEQ ID NO: 156964 - protein, 119 aa, Heterodera glycines
MLRCGVSSESDSYINASPLHLPFAHRNYILTQGPLPNTTCDFWQMIFEQEGVTLISLQKMRKKLHLTIGNANLSMRNQSRITSFAVFDSLGWKIRGKSSATHLQRNKRQTMREKSEIAE

SEQ ID NO: 156965 - protein, 57 aa, Heterodera glycines
MAWAYQHTRALFVQKLFRVRRTIAKGTDKNKPRKTERSSSAAASWACAVALLTVRSI

SEQ ID NO: 156966 - protein, 100 aa, Heterodera glycines
MVQAVVQARMGKMLSHPCTPNPEQADYFNIVIDEIGEISAYLKSTVGKNYPPNSTVMTLEFILYTDDGDTLPLEAWFCNLNDSFCIMKMSFGDCCAARGQ

SEQ ID NO: 156967 - protein, 69 aa, Heterodera glycines
RNCNHHLRASPPLPPPIHRHFFVLPLAASKAAEPIGRHGQSAEQWQHQPTLVDLAAQPHKCAVVIDIRK

SEQ ID NO: 156968 - protein, 134 aa, Heterodera glycines
MSHQPFANFEIVRLEAMIIGLEIDKDQLQRDVYHLKNRKTQIHNKKIELLQQKEQLIREISVLRETKATLVNETKDLREEILELRDMDGSNDDDPLCARNYACIPCGHRALCNRCAETVSIDGRCPFCREELIG

SEQ ID NO: 156969 - protein, 664 aa, Heterodera glycines
MFIAPFTLILSGATGSGKTQWLMKLLRNYKELIDPPPAKILYCYSEMNESVLDLMKRGIETHNGLPDQALIQSQPKPLLLVLDDLMLNVGSDFLDLLFTRGSHNWNVSVIFVTQSLYGRNIRTARANSHYLVLTRNPSGQLQVRTVGSQLFPKRLNYFMEAYNEATSQPFSYLVINMHPNAPENERLTSKIFPGESRELNSWSRKLLQLHQHNNNKMKHTKKMLLVPESEYLALINLLKGGAGGTDSLQAEKAAIDASIQKNLNDNKTGADVKMKRHSWLYKQRHQIKDMIENKPQKLKTGPEHYDKLHEMIERNPEKYGVDKSSGEILTNFKKPEAKKRNPSITLRDVDHFLHKQRTYTLFKPRKNRFRRLKTVPSGLHTDWQCDLCIMDALKEHNDGFRYILVCIDVLSRKIFTAEVESKKSEHMIAAFEKIFNKAGVLPNKLYSDAGLEFQAKKMMDYWKQKEIIKHVMYSPHLHAGVVERANRTLKERLYKYFSEKNTKRWVDVLDSIVRNLNSSANRTTGVRPMDVNFKNAAALRNRLYKQGESSPKTPKFKVGDIVRISKEKGDFSKGYFPNFTDELFRISKVNPTDPPSYRIRDQDGEDIKGIFYEQELVKTVAETAHRAEVLKTRRRNGVKEHFVRWIGYSDKHNRWIRDEDIVQN

SEQ ID NO: 156970 - protein, 379 aa, Heterodera glycines
MSFFYFLLIAFILFHFLHLSAGEWINVELSVDPPNSFDRSFRTISKNSPAQHWFGYNRDTACHVELERNINRLYTNPDTWNIALTDVDNLMSLGRTTIEIPSTALPWACFGHGGHSFVIFNLQNAAGEVTVLRGHQQKIARQLSAYGRILFDHIAARLYIVDKSERRINELLIADLERWWTLNNTDDALNRTSAHVLRSNFVGFLPEQKTDYFIAADHVYLIWRRRVYKFRIGHYFNDPSSQLQFLTNSSDIRFNFLLFEAGAERLGEGGDRRNSRSAVVVPAVSSNGIERLLLALTYLFDLVVILIAICAFRQFRRLGGGAAARNGDDAIELNEYDLFHSLSLQNNNNGGGAYDVSAAYNPTNTAPRTAHQLRSCATI

SEQ ID NO: 156971 - protein, 101 aa, Heterodera glycines
MSTAELQSSEKPIEKAGKADKKSSKPTLLDQQRFFWKLARPKFAVINFLCPGCRRLNYKHKDQFKLMGDSEFHFTQVMCPGCVKYNMMQTDIYNKHTKNPH

SEQ ID NO: 156972 - protein, 137 aa, Heterodera glycines
MSMDNWARTWATSQTEYPGHELLEFVSGGCKQYALRMRSKRTGAEDTVLKVRGITLSADACRLLHFNTFKQAVLRYATAEEEEDAFEEIIIDYPNQLRPNIREGAVQSVSISKRYRPVVTKGIVSENFIVRDFGFKL

SEQ ID NO: 156973 - protein, 327 aa, Heterodera glycines
MTSEKQRRFDGWYNEHCNAPFNLCEQLASYCTNDTRILIEALIAFRAEFLAVTDPIENHNAEEDAEEEDEEDAIDLAGNNGIDIVNGPMTIASASMQHFQMNHLKKEQLAIVPERGYDSANNQSLLALKFMECYIAETDTVIEVNGCVWHACSAPHHRFDPQAVMPNGKTAQKIREDDAQRLQFISGRCREVKVFWECEISEMLKRDQRMRESFNSYVDKGPINLKDCYHGGRVAPLRLRYKVPEGWKIKYYDVRSLYPYTTAVTSYPIGHPTAVHIMQGDDSIVDWRRPTDVPILGILKVFVVPPRRVDVPVLPAKFDQRLLFPLC

SEQ ID NO: 156974 - protein, 204 aa, Heterodera glycines
MDNTAPKKFLTSLDQLQIPPEIDNDSAIPDYAKLLIKQLHSLLATASSLVQSQVAATDAIEEDRRQRTVVITNVPEFQSGKASERGEADSALVNLILDTVDLDQTPMVFRVGMRTPNRARPLKMEFPTKHAARQVLRMKGKALSLNALHGARIRESMTKEQLAERRKLIEECAKKRKEDAGDWIVYANQVILRSEIDTIRKKNF

SEQ ID NO: 156975 - protein, 933 aa, Heterodera glycines
MSELKYNKLWWNGPKWLKLEKENWPPHSFYSPDQEEAPYLDNTEEIINTQINLIKNEYNGIIEWDKFSSWLKITRICQTLLKFIFFKLQNSKKFKEKFICSKFKNALQLKIMAQKILIRIIQKEMEPNKEEERQLRIYLDNDMILKCEGRLKNAQIQGVNPIFLPRKHYGTHLLIMDYHTRNLHAGTMTTLSEIRKTYWIPKGRRIVDQIRKQCYHCRRYNTKPFQQPQMPPLPKSRVEITEPFQNIGLDYMGPIQIKNFNEKCWIILFTCLTTRGIHLELVTSLSVQHFLNAFRRFISRRGTPKHVWSDNAAQIKLASKILPEVLKLREILKDESIKSYFLNENINWTFSIELAPWQNGAIERLNQNVKTAMRKVIGKRFIEFDSFQTLTCEIEALVNSRPITFIYDEINSYQILRPIDFILPHKNLCIPPILENQETKDPTYYPKKTSYEQTIELWKKTTKLLDDYWKIWTDEYIPSLRERYKIENKNPRNCMKSFPELNEIVIIHDQTPRAMWKTGIVKNVITGSDGIVRGANIELPNKTVLNRPLKLIYPLEINSNDDKEQETLSNLIINQKPNYFNRKRKMDNPLVPIKMNRLFQNSLTIISLLTLISLCSSYSYECPKEPKIWKTRYTTLCIENGFTIRQNKITKEFCYKQLVCKDKHIIKRRPPYCGKKCNCPEGFKFCSFASYNKIKNESVGRINYQKIISFYKPNICSLNKTEKCPNMQRKLFNSIVLHDNSIHMVKTLNLLFSQIDSINNFRCFGEGNLTIGTPIYCREHDCFKNNSFKQIYGTKFCFYDPYEKIYLVKSDEELIQIKAWGTIEKIFYLPNNLNQPFIENRRNKREENSSITEESTIECLKGGIIIKAINDIQELQISIENYTIIKKNPQKEEIIYLPPKLTSFEYKPVIKFISNPDKTNEKQITCQSSPQPR

SEQ ID NO: 156976 - protein, 343 aa, Heterodera glycines
EHTCCEYVSALSSIEHEAPSPGGVPGEGFEVTICRPRCSNLEEAETVKREKGWGKTRANRLISARRKEEEEKESKIQKEKEQKREEETNKKRGKDRRERKKEEANVREIHIKIINENEEKENNGTEKGGKGEKEEKTKGLKTGRNTEGEGKDKSHTGRNTVEEGKDNSGKNTAEEGKDKIGTGRNTTEEGKDKIGIGKNTAELGKDQIGNGRNTAEEGKGNSGRNTTEEGKDKIGTGRNTIEEEKDKIGTRRNTAEERKDKIGTGRNTAEEGKDNSERNTTEEGKDKIGTGRNTTEEGKDKIGIGKNTAELGKDQIGNGRNTAEEGKGNSGRNTTEEGKDKIG

SEQ ID NO: 156977 - protein, 67 aa, Heterodera glycines
MSIEVFKFYYYQKKIFVEGTKALLKGKQQAFLHDLIAGNTSLKYELDLIAGNTSLKYELINVNIKAM

SEQ ID NO: 156978 - protein, 48 aa, Heterodera glycines
MIFAFIFSFISSKFNTFAFALFWCFLVNKEFFGNFCYMYHNLLSWIYI

SEQ ID NO: 156979 - protein, 48 aa, Heterodera glycines
MPKLQFDFLKVARLDFLVALLFLEQCDDHLPLPFPHFTIPLDHFPSDG

SEQ ID NO: 156980 - protein, 139 aa, Heterodera glycines
MIIFVIIIIVPPIINGMNDHHLLSRIENKRDQEHMQNLNKLIKADQDKFNAVQSQSKRKDKHSIECDQSKNITQNDGQELISEETREWAKQLIKFIDKLIAKGRIDLEENDQSDQKSYAIDFRETKKELVKKLRNPKTE

SEQ ID NO: 156981 - protein, 341 aa, Heterodera glycines
MVSELLLTHYDPTLAIVVAADASKDGIGATISHIFPDKKEKVIEHASTVLTNAQQNYSQIEKEALALVFAVQKFHRMLFGRKFTLLTDHKPLLAIFGSKKCIPIYAASRLQRWALIMANYDFEIRYINTASFGQADVLSRLIANYPRPEEDILIANICTETECYISTILQTKTEQLPVTADEIAEATPKDEILKKILAFTQSNWPKKCSDPDIAPYFPKRENILEIEGCLLYQNRVVVPQSLRNRMLKSLHMAHPGIVRMKALARQHVYWPGMDSEIERIVRQCEECQKAQKAPIKAPLTPWTPTDKVFQRVHIDFADHAKTVTSISFWWTHSPNGRRSTK

SEQ ID NO: 156982 - protein, 689 aa, Heterodera glycines
MDKILRGIANVPVYIDDILIHTETLEEHLESLSSVFVRLQKNGLKLKAEKCKLFQRKCVYLGHILSEIGYQPSLNNREVIEKFPQPKNVKEVKRFLGMVSFFRKFIPNFATIAHPLNSLTRGNQLKIEWGQAEESAMSELKKHLLKSPCLRAPNYNLAFYLFTDASAVAYGAALMQSVDGKELYAIAYWSRTLSATESKLPATHGELAAIVNAIQNFRPILYGAELIILTDHRPLTFLFQKASINPKINRWLMALQEFEPKVVYLEGRANKVADALSRVPIKWESIEIKFKEEIPYFLTLEEFNLDREKVEKETKNDKTLSKIMAKIKDNWVEPIENELEPFFKNRDSLYLEGNLIRKHPQGQIVIPDVLKVPILKLVHKAHFGMVKGKAKARRFVWWPKISEDIEEFTGECEICQRNAPAPPRSCPEYKWPEAKYPFERVHVDLAGPIWGTNFLITVDAYSKFPFVHQMNSTNSSALITAYREIFAVFGSPRTLVSDNGPQFVSAEFNIFLSEEGINHLTSPPYHPPSNGEAERFVRTFKEGIKKLLDSGKTLQLAQFILLQEYRSTPCQMLGGETPAQKFLKREMRTEMDKIKIMPPMGKNRKGSLSENPKALEPMAHVPTKEVQSRNEFYPGDAVWVRDQATKKWIPSILLQPMGERLWKAEMEGGGERVAHSDLIKRRKLVSRHI

SEQ ID NO: 156983 - protein, 40 aa, Heterodera glycines
MSHTLPMVPLLFLCWFTLRNGSVSPVIFPDSVRRSNRTNE

SEQ ID NO: 156984 - protein, 39 aa, Heterodera glycines
SCSHYRNSPSTSANTPCAHPVTRAVPKCCPLETHSRQRP

SEQ ID NO: 156985 - protein, 30 aa, Heterodera glycines
RGLGEKEDESKKTGNAGARLACGIIGLAKP

SEQ ID NO: 156986 - protein, 148 aa, Heterodera glycines
MSASNTTSTTDFETFLLFLCGVVELLIHFVGIPLSIVNLILVARTSVIHPNMKFILLFQSFAVLLRGFCRFVICLFKFILWDPISAEMGLFFPAILKIGYFGIYSRNYVPHILIIERILATVFVRTYEQHRGFLFTIIWLPFAVKFKF

SEQ ID NO: 156987 - protein, 79 aa, Heterodera glycines
MSSKSVNVKVVMMDAELEFAIPPSTVGKQLFDQVVKTINLREIWYFGLQYTDTKGISSWLKLNKRHGQKMENLPATFIV

SEQ ID NO: 156988 - protein, 182 aa, Heterodera glycines
MTTSDEKQLQVVVASNEKKQIKKSEVDFPVVLKRGVQGRVKWYSPEDAYGFIHRYDVDEDIFVHGSSIVRFNIRNKNQHPVLSIQQEVLTLNQQIVILKDHHFPILYRFDLFIWLTVSLTSSVVQVEFDVIKVRKGLEARCVSGPGGRLVGRFFNIPRRSVSGAKKQVSKKNIKRVPRNTAD

SEQ ID NO: 156989 - protein, 30 aa, Heterodera glycines
MGSWENLMIEEKIDKKIKSTVVKRENFVMD

SEQ ID NO: 156990 - protein, 24 aa, Heterodera glycines
MARCHLMLCCLPFVPAACSAPRTL

SEQ ID NO: 156991 - protein, 49 aa, Heterodera glycines
MTALTAPLCLVAPCLIESWGRRPLFLLITALSTLELTLLTVAQLLYDVL

SEQ ID NO: 156992 - protein, 92 aa, Heterodera glycines
MDSNLRNSKHWDSTHQLSMTFQSLKINPTAFQSLGLNYQTFQSLGLNPPAFQSLGLKSPAFQTMDSNLRHSKHWDSTHQLSMTFQSLGLNPP

SEQ ID NO: 156993 - protein, 68 aa, Heterodera glycines; identical to SEQ ID NO: 127362

SEQ ID NO: 156994 - protein, 423 aa, Heterodera glycines
EKKRQEEEKEKRKKEEHEEHKKRREQEKKREEEDELKKREEEEKEKRRKEELEEQKKRREQEKKREEEDEQKKREEEEKEKRRKEELEEQKKRREQEEEKQRKEEEEEKKKREEREANELPTEEDDEEEMEAELLRRMEERNEEEAAVASLGLQTKADLRQPQDTNQPQIDAIGHDIGWKVLERPSEKEVKLEKVTEMVEEEKEKNMEEKVEECAVEKQIKREQVEEETVSREKDKTANEEPPVDKSVGFKFETVERRASNESVDSHMAGVGNGFVEVDAEHLRQQKREQDALERLAEERRRTEETVKRMDETVDAVATNSALLQHQNQESTALIMQQIASPNLAQQQLTIDLFQRANQQQNAHQITTTTNGTFPQQREGVVVECDYYYPTNMAMSGQAQNQQQPQREAVVQTVPVNAPITIQ

SEQ ID NO: 156995 - protein, 490 aa, Heterodera glycines
MFNGIDMREQKRMMKMIKSGIGFGLSMYDRVKRRSSQRPDDEQKKKTALEVLNTKHAKKRKEFSRVRLSSTSTDSEGNEYAQATTTQLKMAERSPKPKSAEEDESDTSDEENGEQNAEENDDAMTRTEKPKTHLDTSGDMSTKSSADEKLEKTTAILTIRRPEIAPRKPFMDDRPTKEEGANSSPSSVEEESANGSESESEAEDGELDAGDRAIKKVTNTSNEKPINQNKLTKVISIATEGCQTRSSDSHSEKSDSSSDSSSSSESVTDSEPKKERPKLSAGMSKKLPSQKKVKHLSMEDVFGADSSEESSGERAIPLPPPPLRQNKVELSSSITKHKGVVNETIKKGIVVPKIKVGNKHEEAIKIRTEKAQNKSLLTTNEQGKRTRVSSVSSVSSVEQKRFKKVKSKPNTEKETVTSPPATTTTTTTSVRDRSKSDATALKTAHFQQKQMTSNKSGTIDTVERVVEKTAELDKKMKQQKPSKTTVGTTK

SEQ ID NO: 156996 - protein, 445 aa, Heterodera glycines
MDEAKNMALLFFVDHLMQKGGQRTIHDLSCQFGARGFTDEMRQAVGTTQEGLYEFLSQYPSLFTLQDGDKVQLKGYGDGDEGRTPHIPPSGRQRDYVAEAVQFFVAKLEKFGPEMQVKSLLGHRSQVKSLLGHRSQAAPEVRLVSGRHLKEFADFLANQTNHFTVEGDRVKLKHMPEPNGTDAKQFLDEEGRPLVGHRAKLAAVDFMRGVLEQNEEMPINEEMPIPLDIFYRRFCDRFPHSIRQEVATNPKELLLFLKLNRHVFFIRSNKVQLVRNRPGDEHGSESGRSTGEDGGSNNALFPLNRDNLHRVQIVQTLQQAQEAVRCLRVDLDSVPSSVLALDFKLLSFGSVPSADLPLVVLAVVASPLRLVVFDLAQSDKVLSESGLRTLLEDDSVLKVTHDVQRIAPLLANRWDIRIGRLFDTQIAHSVIQHDKFSKPLGDLRA

SEQ ID NO: 156997 - protein, 173 aa, Heterodera glycines
MSQALTDALIAGPVNLKQKTLVSKVERSETTGKLTVHMTDESKLEDVDKLIWAIGRDPLTAELNLADVGVKLIAGDYIKVDDYQNTTKEGIYAVGDVCTPKFELTPEEAVERFGRDQVKTYNAGFTNMYFAMTQHKEKTHMVVSTIEFIRIIILAFFPFRKSCATERMRRNVY

SEQ ID NO: 156998 - protein, 70 aa, Heterodera glycines
MSIQRQMKEDWDNRELNSIISDNIRQISEFLSHFDETCKAKLATLNDTITSMERKVEFLESTVTRGETLN

SEQ ID NO: 156999 - protein, 269 aa, Heterodera glycines
MSFNNLAQYSRCDSAQILLEHGCAPDQIVNPQSSLRNLLNEPFTDGTEEGEHTVQLRPQEVEIRIRPKSKARFNVRFRQPHDYPVDLYYLMDLSYSMKDDKEKLSQLGDLLEVDRTRLSVHCTAPSENQREKGNKNKEIKGFPIPRICQVNVIFAVTRSNQRLYQQLTDALPDVSTAVGVLANDSSNIVTLIEEEYGKIAEKIIMIVYNAPECNGHGNLVCGICQCAEGYVGTHCECESGGESAVALEAKCKKDNDRWALDLRFKAFYA

SEQ ID NO: 157000 - protein, 80 aa, Heterodera glycines
MGAGFEDGRVGSARKKTPEELAAEMAAEEDSIIGQLGLTEQVEVSLPWKFFEICRKWNKVRSTQRKAKGEGRENRLRSIG

SEQ ID NO: 157001 - protein, 57 aa, Heterodera glycines
MSAARRNRQPAAGQRRADGAIEKGEEPVYDEVPLDTVVQMRDEENGEEDEEEDDSYF

SEQ ID NO: 157002 - protein, 111 aa, Heterodera glycines
MVTKDGITLWCTRIEKAQFVPFDVVYALPGHCFFRVKNKARVFSVPYSKLPSSDKCAQPPPPPSSKHQRTPDDEEEKNLRPTTTTLTASAIVKRGGEEGGMHKQQQCWSNN

SEQ ID NO: 157003 - protein, 57 aa, Heterodera glycines
MERYKRKQQQQQQQAKVSQLIKENANWLCALSKAKCVKRCGRLIRKANTDKLLSLRE

SEQ ID NO: 157004 - protein, 67 aa, Heterodera glycines
KPSKKLSLHNANTWTNKETKSSTKSTNPQVSFIRRKMSVKKNAFLRFNQFAQEAWNLIVNLALDLDR

SEQ ID NO: 157005 - protein, 101 aa, Heterodera glycines
NIPMVTHILSSIEESAQHRDKKAEKQRHFEGKEQLLSLIYNLGGQERFVDLLELRKLYEHNYFKELNKAALKEFFPTGQLKGIMDKYLYQDIELATDQNKN

SEQ ID NO: 157006 - protein, 88 aa, Heterodera glycines
MKKHLTQKFEAHLGVMYLMQKNWHCDKIADQLTEYKLGLSGTGTGTGRLSGDIKANMDQLFLAPSTEPDAEEKELEIDYLEINDDDFC

SEQ ID NO: 157007 - protein, 110 aa, Heterodera glycines
MSEKFCAYGLTFVRRRFSTANCARLRWHANFREDIDGQNDHFGGGELGHCGQCEDEDPRQGGRSAGSATADLRRQTARGRTNVGRLQHTEGVHAPLGPPSPGRKWEEKHG

SEQ ID NO: 157008 - protein, 61 aa, Heterodera glycines
MFDGHFPSFVHAHLDLKLALLSLRFDALIEFEFKNRKMETFFLELKKIFIYEIVYFKQEIN

SEQ ID NO: 157009 - protein, 62 aa, Heterodera glycines
SLIGQLAVPLAFLSSSSSKSIISCSIPMHAWRLRRVELKLRKNLDTRRPNSSESSSSCVGPS

SEQ ID NO: 157010 - protein, 74 aa, Heterodera glycines
MKVRFNCPWHRSGYTPNFFGFKVKRKLKMRTVERLSQTEGSRHILMRRVLSEKHFVAWNWPSKKPRNDRLNYPL

SEQ ID NO: 157011 - protein, 42 aa, Heterodera glycines
MLVISGWQTLVQGRQDGEESVWSTDRCPPPRSGSSQATRDQP

SEQ ID NO: 157012 - protein, 44 aa, Heterodera glycines; identical to SEQ ID NO: 136949

SEQ ID NO: 157013 - protein, 34 aa, Heterodera glycines
VGIKHHSPACLLFVPISILPKFLPGRICICLVPT

SEQ ID NO: 157014 - protein, 238 aa, Heterodera glycines
QRQKLSEVYKKIFEKEMIAMLHREFTGDFRELIFYLMQTPIVFYLMQTPIVYDTNQMHNALSGFNMPVLAEILITRTNGQIAELIDTYNHVFDGLENDIKAKKRPISKFVALIAQTSRDETELVDEQLAKEDAMKLIKEGEGQKSINESVFNEVIATRNLVQLRLTFDFYHEVADQLRLTFDFYHEVADQDIETGIKQEFGGDDEAGFLALIKCVRNSSEYFADLLQKSIKGICTSKY

SEQ ID NO: 157015 - protein, 35 aa, Heterodera glycines
MSISSPFTMGIFGPSFAVPKCAAKPSSTTSQLDWL

SEQ ID NO: 157016 - protein, 32 aa, Heterodera glycines
SSPFTMGIFGPSFAVPKCAAKPSSTTSQLDWL

SEQ ID NO: 157017 - protein, 74 aa, Heterodera glycines
MPFRTGEWPSPGNWFWPNPTEDGGGGQGHLFVLSFYGHSILIISIGPTTAKTLAQQPNQIFVPPPQRVPLKGKT

SEQ ID NO: 157018 - protein, 270 aa, Heterodera glycines
MTTIKTISTTTPKPKVAETKAKKALPNKNAILSKISKKNSKNSGREPMKTETIEIKNESGEKDSQFQKLSEVDEKESDEVIFQKAKDNLENAIKSDEEKTAQKAGLKIEPLETDKTNLAAANDSKILILGKTKANIRIEDPLTGKSGEWEATLLVSVDKHCPGPLLIGLPILTELKGVIAFGERKVKIGEIWTNIISVIGTESEKPMRVTMKNTEILEPRTETILTANVNGNFKNDQNFLVEGIAHQYPGVIVGRTLVSPGTAKMLQFKF

SEQ ID NO: 157019 - protein, 328 aa, Heterodera glycines
MNLFKVIFIIPLFLFIISVFYKNAKAEKLKLRVIYGQLDANWKVQLDLMIVSHYHEYGNYHTKEMVHRNIENGKNFEVNLENGEQTEKLTLGFGFSIQLSSSRRSQFETLGNASDTESSDDASPFHQPTSIGTQLNAERFRKVVRVDLYRPNFAKRHRIELGNVEVPMPPNGTALFWNRRVIFEANKDTGNYHAFLYANVGKNGRSNRNSTKMFMGYAPLLRIGQHGEGGEAPTIAAAEQQHGTSEYQVTIPVKFGEFFKHKLWNLKVFIYQFKELPSAGQNRNATENDQNEEETCPICLDSLQLENRQIIKLHGKRTNYEANFFAIF

SEQ ID NO: 157020 - protein, 81 aa, Heterodera glycines
MYVNPTAQLFKMANSEGNDRFSHGQALHAFANIRRKMEQAERAVKRSLATMEVPLLMDKLFGETFFEVGFNGFGEKQSIEN

SEQ ID NO: 157021 - protein, 263 aa, Heterodera glycines
MGSGENVASAKVRIDVRVVQNYMNISEEERNKIRNEACGNAKATKKVGVKITTKNHFTYYRRFIERKQSASFMNVRTLQGLAQNDCRALWITLRARSAAPESPFYDELLMRYLDDDLAIFASPRQLQLLKKSAVIVSDGTFKQAPKGIYQEVNHAEEESAVSIEEGRQPPSQQLAVTAEIDASIAREKADILAFLDSDYEDEQFTETMSRYYGRIGHLIGFNVPPRLEIEEQMEEAAAMEEAEASLNESGIYVVPNDENLDPC

SEQ ID NO: 157022 - protein, 60 aa, Heterodera glycines
MVKMTASASRMAFSSDAARHTKATMSARPGDPNTAEHLSRVLKFAMVIMSILVIENCKRN

SEQ ID NO: 157023 - protein, 136 aa, Heterodera glycines
MAGNGNESMRTEVDENSVNFMNLFENLELTDSEKLASLREIEKIFADTSPPPAGPSPIESSVLGFVFISHPILWALVQPDILGEQNELLDRKNLSLESDQLVFQSTPSYVTTITLDPNNNWPHFTQISLIGINNLY

SEQ ID NO: 157024 - protein, 41 aa, Heterodera glycines
MTGDDFLTILINLASVSSPNTFVNKFISLAHHFQLKVNHSF

SEQ ID NO: 157025 - protein, 75 aa, Heterodera glycines
MNSEPWLMPEKSALFGSNALLSPMAYSWNKGQKIYTILRQNLCTLCQKELNQGDTLTKDPSPRKATPAHGARTLK

SEQ ID NO: 157026 - protein, 19 aa, Heterodera glycines
GLLGSWVRVPPGELPFMVY

SEQ ID NO: 157027 - protein, 132 aa, Heterodera glycines
MLGPALFNIHFPLLSNVEFAKDIVPTNVLSKDEVLAVYQFKSIPNCHGISDGFFPMQFPTNERFMNTGTLLLDIEKVSEFGQEPEDSSRCSKKMYINGLSWKIRAEIRTKMESDDRKVGIYLLCDAPKEGAN

SEQ ID NO: 157028 - protein, 310 aa, Heterodera glycines
MDFHGKLKQKLRKALMRRNIWDFTYGGPWNCVISATYRIVSEKTEAENSIGTLCDRVINRSNIGRGFGFFITFAELMDSNKSFYNKAEDKLALAIDVITVDEPKMEKFISDPNKSNGTLSMEIEKVSEFAREIIGSQRKSETVHIKGLPWKIWTQINPKIGSTDKNEKWLSIYLWCDAPKEAETWSCKCSATLRIVSLKSGVSDFGMEFDDHVIDNKENSWGFPNFISFAELMDQSNGFYNREEDRVTLAIDVTVKDDKKEKCISDPDKSNGIISMEIEKLSEFAREIDRSERKSESFTYINGLPWKILA

SEQ ID NO: 157029 - protein, 94 aa, Heterodera glycines
MVIFVVFLKFHPLKLVPAHKLILKHASDVFEAMFRFDAKKEKAEFASADCPVEVPDVEAAAFKVMLSFIYTEELNELNGENAMAVLYAGGFNFM

SEQ ID NO: 157030 - protein, 19 aa, Heterodera glycines
MKICLIKNKSCEKKQGAKL

SEQ ID NO: 157031 - protein, 19 aa, Heterodera glycines
MKICLIKNKSCEKKQGAKL

SEQ ID NO: 157032 - protein, 150 aa, Heterodera glycines
MPFPSLLAFCFASFVVVFAKVANPNNSSNFSLNEAAEAFGVQSSKNAPTRKSFMDILHSEVIKNGKHGEQQQQKQELEEMLSDVSEYEKVIETALGDNSAQVIAPNRRPAMSQEYEAIKALNENDKPMANLLHKLYNEITELKNSIDKGN

SEQ ID NO: 157033 - protein, 592 aa, Heterodera glycines
MKKQKAKPEEKPEAPAEGVAVVPEAKKAEETKEKLKQEEKPMEVPPSPAEKKRKEAEEKKDQKCAEAKAKKDAEEKAKKDAEAKAKKDAEEKAQKDAEAKAKKDAEEKAKKDAEAKAKKDAEAKKKEEEMKKQKAKPEEKPEAPAEGVAVVPEAKKAEETKERLKQEEKPVEVPPSPAEKKRKEAEEKKAQKDAEAKAKKDAEEKAQKDAEAKAKKDAEEKAKKDAEAKAKKDAEEKAKKDAEAKAKKDAEAKPKKDAEAQAKKVAEDKAKKDAETKAKKDAEEKSKKDAEVKAMKDAEAKKNEEEMKKQKAKPEEKPEAPAEGVAVVPEAKKAEETKERLKQEEKPVEVPPSPAEKKRKEAEEKKAQKDAEAKAKKDAEAKKKEEEMKKQKAKPEEKPEAPAEGVAVVPEAKKAEETKERLKQEEKLDAEAKAKKDAEEKAKKDAEVKAKKDAEAKKKEEEMKKQKAKPEEKPEAPAEGVAVVPEAKKAEETKERLKQEEKPVEVPPSPAEKKRKEAEEKKAQKDAEAKAKKDAEEKAKKDAEAKAKKKDAEAKAKKDAEEKAKTDAEAKAKKDAEEKAKTDAEVKEMPRI

SEQ ID NO: 157034 - protein, 101 aa, Heterodera glycines
MKNEFKQKRKYSSKEWEQNYVEICKKIGVSDFTIMKWKKQFGICCKITEDEKMEKMKIYWEIKRENPKMSDNQIAKTLRISLNSIYNWKKQFGEEMAEEEE

SEQ ID NO: 157035 - protein, 93 aa, Heterodera glycines
MIELLISGSTSGSAATTAATGNNKSKQYTNSSWTMIKPDEKRIDRRASDRSSTRPNGCCLATTPIGYDVFLSCSSSSELDWITQKAVPELQYA

SEQ ID NO: 157036 - protein, 155 aa, Heterodera glycines
NLLEAILQRHSVLMLTSISQALDFVDAKIIGGKRWLHALLTPAQRVPFIKLQTQRCAMRCSERWHSVARLCRLRLLTHLKRFALLLMFEALIVMSFGFLLSTNTLPLAVPMWAIVLPLLALNYLLLLGLIIYCRFKVYCIILLEYCTGTGNTVIS

SEQ ID NO: 157037 - protein, 25 aa, Heterodera glycines
MVFGKNPNPVHARSGPKLWDPDQEP

SEQ ID NO: 157038 - protein, 36 aa, Heterodera glycines
MSSSRTNWQLLMVEEEEQEIAQTFTLISNNMMRTVT

SEQ ID NO: 157039 - protein, 42 aa, Heterodera glycines
AWIYLQIIRKLKMQFFVGSKLPLAFLLLLLLSFVFSNAKNQK

SEQ ID NO: 157040 - protein, 55 aa, Heterodera glycines
MAKAEKRAKPTQRGKFATAKCVGIRKGTRPKIDNLQKNAKIIQKENEEFGRRRTI

SEQ ID NO: 157041 - protein, 182 aa, Heterodera glycines
MQKLIIVNIIAFANLGTGIKLNSLTITECEFKYNPRKFNAAVIKCTTPIKAPALLWESGKMICLGTKSLIDCENAIKKFIEIIKGSGCPGASYTGHTVENIVSTFKFGHEIELNEFRKNRRAFYEPEIFCGLNFKRGKSMTALIFWTGKVVITGTKNNSGIDEMYHYILPYLKMAQKKLGRR

SEQ ID NO: 157042 - protein, 267 aa, Heterodera glycines
MKFAKKMLMIPEAEYLALRSAMNSGDYLQNEKASLDAKISQNLQEPGISEDLKAKRHDWLYKERRTVKGILENRPQKVVIENHVPGPNVAPYLGLNTQSKPQETDEPRKIIIPRKRLEEQTPDPESDNDTINELTPEPQTTSTLKTPIPIKTIIHPTLLNGLFRYVKENKDLFKITAAGKVQSNMNLPIENSNYRDVLLYLAGKKDETPRGAKFLKDRLLKDPTVKDMVDKSKVIWGRGRKKAIKSIKTPGIVREKKPFKPLIWARL

SEQ ID NO: 157043 - protein, 409 aa, Heterodera glycines
MSPVLLPAKLILQEVQNLNPKWDDELPANINKDWLKLMAQWLDRGEAITIEFPRHIQAIDSVEFHCFCDASKYGMGIAVYQKAKTIIRKDECNLIYAKSLVKPIKVAAHDALTLGVKAVKFIQAQIKFADHQVIMWTDSQCSVERLRENKRQDRFVANRLQKIREANFQVRHVRTDSNPADMASRGADPQCLRTSLLWRFGPIWLSKADKWPESNVIYRPRDEFKEVEKPPIVDIPEQPIQAVHSFIASVMDDSVSLAGSNDESQQPRPKKFKIPKRRSALLRPIGQQQSPLQGQHKRRKQLQDSGLRKLFQAISDQQGSSKATTKAIEESREMQKAPRHEQIEHEQRMVKKSQQEANRHLQPEKRQQKIQEVPHSTTEEQQRETKRQQIERQQNDEQHAINQQTRSKA

SEQ ID NO: 157044 - protein, 162 aa, Heterodera glycines
EDNKVLGIRWKPKHNRLIFKLPIFEGKITKRTILSQIAKVYDPLGLMSPVLLPAKLILQEVQNLNPKWDDELPANINKDWLKLMAQWLDRGEAITIEFPRHIQAIDSVEFHCFCDASKYGMGIAVYQKAKTIIRKDECNLIYAKSLVKPIKVAAHDGTIPKL

SEQ ID NO: 157045 - protein, 137 aa, Heterodera glycines
SAQGQPIRQKKFAEVKTWHGGYISNFLNLFTERDKRTATKHSPYVQRYIDKVLALNRSLSQTTTPPAPTNPPQTTPPAPTNPPWTTTTNPTTATITKTRSTIWSTKTTTRPNAWTTTTTPMSRIMDYRTTTAAHSGN

SEQ ID NO: 157046 - protein, 805 aa, Heterodera glycines
MLISLLCLLFTSSAQGQPIRQKKFAEVKTWHGGYISNFLNLFTERDKRTATKHSPYVQRYIDKVLALNRSLSQTTTPPAPTNPPQTTPPAPTNPPWTTTTNPTTATITKTRSTIWSTKTTTRPNAWTTTTTPMSRIMDYRTTTVYRSRPQQQPRPGIKLIRWPKSPITTEEGRDVFWCSNHGSTLWELKGPENSPFCRPPPALTAQWTPLTITLYTKIHRPEPIATAWHCFIKTTTENYYTNIVGDKFVEINKEFPLVSKRLCQRMAHQQECPLAKTEMHHVGNHIWATNDQLQVDFPGPITGLFKGKQTSSVTNCFAQPATLFVKWHSLQLLSPIHRADHCNYASEYCQLQDNSSLIWTSACPNDNCFMCDFQEAEEIHGEFTKLNGQTTAFWISDDRQKALTFTETHAVQACDGRQIVLSEQNFGIPKEQFDIIMSDHTRAKRNVQPEQLASQLSAAQLATTMALSQLYLKECQRNVSVSNPTLQARKLLKRENLQARWISETTIEVFPCVPISLSNISYRKTKDCYKFIPVTIHLPNTTQDAFLDPEMRILSLISRSASCSQFRYHHLQVQQKPNLWVRIDSKNGNVQRLAQTAIHELYETILNKTDNDLDLHPLIFHQWQLDNDTDFATFPHIDEFEDSEEFKNKLEQHTTQRAEALGALPGGIEGWTVRWLQERLQEIIQWWIRLASAYSTFLLCRDVILPCLIAYFLNPIRITLMTLIGFRPKKQPTPQIQAQHEDMPLKEMPSTPIRRKRRQLPEQSTPPIRLDTTTATASFRTRARAHSATEDTPFGRLRPMKLADD

SEQ ID NO: 157047 - protein, 502 aa, Heterodera glycines
MANGKTAQRIREDDARRMAFITSQAQQVLVFWECEINAEKRDNDEMKRAFAQYKDSGPIRLKDCYHGGRVGPQRLHYEVPEGWRMKYYDVRSLYPHTNAVTAYPVGHPTRVNIIGEAEQAVDWRRADQLPVRGILKVFVVPPHHVDVPVLPVKFNQRLLFPLCRMCALQHPHGAVNEDYECTHREDDERGWVSTVTSIELEEALRNGYRCTAYYRSVEWDDTRWSDRVFRGYVAEFMAMKTHASGFPDEIGTTEEDQQQFIEECEEKFGIRIEREKMVHNKAKRTIAKLCNNSLWGRFSLRNGLSKTIVTDSPAELRALLDNPAVEVSSVDPLTDECVLVTYAAGNEWVEEHECSNIVLSLWTTSVARLHLLRLMQKVACAPNSVLIYTDTDSVCFAHREADGCPLETGPHLGDLSDEWPDHELVEFVSGGCKQYALRMRHRHSGEEKTVLKVRGITLSADACQLLHFATSRGVSYATQCVIQMRMMMMMMMMMMTKTFVQF

SEQ ID NO: 157048 - protein, 317 aa, Heterodera glycines
ISDKASPGSSPSRHQTPSSPTPPPTAETTQKAIAGSSASTSPAAPSAVDTTTVTAARPAARRRGFGGFAAGSTVPPPTIVQALPAPPATTDPTPHATTTAPAAVFAAASNAVQQNVLTPPGIFQPLPPPSLAPSLVMPKLHQQTSASMAQQSPGNTVALPLPASAPAADTTATVASPTTAITSMAPAEVPEKPVIAPQPPKKAKKEKRNILDRIGDKAHIGTFDASKPATFAPLDPHVAPRDPNAVDSDDEQGDTLAIGGPDSWYALALRDTGTVLKKDTGGTGKGKKQGKERDPNAPKRRRTKKPKLSSGPKARDK

SEQ ID NO: 157049 - protein, 87 aa, Heterodera glycines
MRRCAVNNCLMGIAICDICTMSTYLVYILYFEVYAKVYETNIRKRKENGIGSDDGWATTGRTNWPNDGHPSVKVKKHQGKETYYCKN

SEQ ID NO: 157050 - protein, 76 aa, Heterodera glycines
MPKLSSFGLCCLSNKNETDNVKFLTHGGDKSCGGEDIYKLSIKTEFFGISKTDSGFSGMENEEKKQQQNEKQMEHP

SEQ ID NO: 157051 - protein, 301 aa, Heterodera glycines
HFEVAIDSNTIFERLFVWEAENDSVGYFSFHEGITDQQKYEADSMGVNGESGTAARPKTAAIRKIESEQSRFRMPNHLPGNHFWDQMDPRLLICEANSVGTGDKKKRLTIFVTAEHGLQMHDLHKKPPKADSLLFVSVPHLFFLRNIEVEEEDDPQERCLSRLILERCLSRLILRRTMREFVGIDPREEKAVRAMLDFAFFLCIGQMDSAFKAIKFIKSESVWEHMARMCIKTRRVDVARVCLGQMGNARAARAIRRTVESGEGTEEQIAHLAVELGMAEEAIGLFQKKEGWDEVNRLLQA

SEQ ID NO: 157052 - protein, 246 aa, Heterodera glycines
NQGLFVELCNSIRDTVIPEIPDTPTPDQWNYNGNLANTTDRCYSNQGLFVELCNSIRDTVIPEIPDTPTPDKWNYDGNLANTTDRCYSNQGLFVELCNSIRDTVIPEIPDTPTPNQWNYNGNLANTTDRCYSNQGLFVELCNSIRDTVIPEIPDTPTPDKWNYDGNLANTTDRCYSNQGLFVELCNSIRDTVIPEIPDTPTPDQWNYNGNLANTTDRCYSNQGLFVELCNSIRDTVIPRDTGHSNA

SEQ ID NO: 157053 - protein, 176 aa, Heterodera glycines
YDSVICANQYGVSAAHYSNQTTLDGTLNFRYSTELNFRYSTEKLWFQRVNFTHNSEAVIWVHSPDHAVLDGTQFAEIGWHIDNCSIVENQGPILDTHRDLFASANVFHWNFWSNTFANNSNGGVQVHLPDPWDLQNRRHHSFWMTENRFERNYDFMVQLSGYFTFANISSNNFTDN

SEQ ID NO: 157054 - protein, 24 aa, Heterodera glycines
MRNNKIISASYKYITHQKSDHKST

SEQ ID NO: 157055 - protein, 20 aa, Heterodera glycines
MLKDKFAISLNLFLQNFNIY

SEQ ID NO: 157056 - protein, 66 aa, Heterodera glycines
MKARKIVAFADLESICINLCKIHFSDFVRVHYESTFNSIRDDMAMLVREQQNRETKLMGHLRNVRK

SEQ ID NO: 157057 - protein, 185 aa, Heterodera glycines
MQLIILISTTAERSAAVDGFYWPTTTKTTAAENSNNNFWANNYNNNNNNNNDFNVGDQQQQQQFGAVQQPASGGGGGKENGDKEGDRETGLCYSSFNTLSSLLFASAGLGTVPAASAVVAPGAPIGIVPLSRGVGGGTDLSPIFGNFDRNGRNNFNFGGATGAEETTDDTGEQFTPFPTLIPADK

SEQ ID NO: 157058 - protein, 129 aa, Heterodera glycines
MSSASMVGGAGSFYVGDGDGGAYEYPLVDETDAFGGAPGRRHQQGQTFGGYMRGSAEMRGGQMPSPSYPNFGGFGGGGGRGGAYGGGGREESPEEWEDEMVGGGEGGTEMGQIERGGGMPFWMGGTMAA

SEQ ID NO: 157059 - protein, 167 aa, Heterodera glycines
MCTHLLLKDQLKVSACVADIAYSLKRDANPPQIVTVATGLFCELSKKHNALYNNVPAIIDRLLTNEEALEPDGEAQVEEILQFLLQLVDNDQQKREKLVDKLVERHGDRLAGWRCVTQVLKAKEAAAEREQQQIQLQQQQQAAAQKAGSSRAGGSRGRPTGKTPKRC

SEQ ID NO: 157060 - protein, 51 aa, Heterodera glycines
PSLNRIQNDFERTCNFVGRLIFSKRLPFGQQMNSLVKMLASLKQPFGINYF

SEQ ID NO: 157061 - protein, 39 aa, Heterodera glycines
MLRNSVLFVFTEILLHCFDCQQLDQTMSDQRDMLFAHLL

SEQ ID NO: 157062 - protein, 85 aa, Heterodera glycines
MRFTSVFCLFFAMALGLIQLDRANGMDVDVCEKKEDCQTMKITKNKLEEDADNLDNYLNSSQSGQLAAKIKEAISAINGILDEYG

SEQ ID NO: 157063 - protein, 78 aa, Heterodera glycines
MHLFAKAFKNLGSESEETLCQQYHEYAPPDPAPPTSGQYVNLAGGDGPTKRRRPMAQKPMAKCGNKLMKSVFYFPIVK

SEQ ID NO: 157064 - protein, 493 aa, Heterodera glycines
IMFSWLGKNTTKKKDQDVLETVSEGLKKIYKQKLYPLEDFYRFHEFHSPALDDPDFNAKPMILLDPDFNAKPMILLVGQYSTGKTTFIRYLLEQNFPGIRIGFIRYLLEQNFPGIRIGPEPTTDRFIVVMYGEEEAVIPGNALVVDSTKQFRALTKFGNAFLNRFQCSMLKFGNAFLNRFQCSMLKNEVLNGVTIIDTPGILSGEKQRIDRGYDFSGVLEWFAERQRIDRGYDFSGVLEWFAERVDRIILLFVDRIILLFDAHKLDISDEFKRCIEALSGNEDKINEDKIRIVLNKSDMVDHQQLMRVYGALMWSLGKVFKTPEVARVYIGTFWDHPVFKTPEVARVYIGTFWDHPLHYDINRRLFQDEQHDLFVDLQSLPRNAVLRKLNDLIKRARLAKVHLQSLPRNAVLRKLNDLIKRARLAKVHAFIIAELRKQMPMIGKEKKKEMPMIGKEKKKELIQKLDKIFEQLQVVGRLIYFNINLLPLKSKPL

SEQ ID NO: 157065 - protein, 42 aa, Heterodera glycines
DITFVFHQKSHDGETNRSNSPPADNGKGRRDGAEEEDRESEG

SEQ ID NO: 157066 - protein, 346 aa, Heterodera glycines
MALLRSHLKNHHQPKLKELEEKDKAAESLKNKEANPRQPTLKRIFATSSPVIKKIARAESANSSQLTIEKTFSQWTPDGEMTKKIDKAINDLTLNAYQITDKKLHLILRDDEGAMKLATNLLGYNSMQCFAHKIQLAVGDGLKLLGGIFDVKERMKKAIRRIRKSRIIADDFKALQIENDLPLKTLQKYRVDNDENVMQNTPTNLTRNNAHSESEKRIDWERNKDLLLATILDPAYKVQYFDHIYMEIFKDMLLQEVERVAISGIDEQQETTDGTTNLEFTEENDDPFKAFLIEQSTSNFVFRSIPSPTPSLIDTKAKAAGQVADYLNSALFEGTSAVFWRQPTIW

SEQ ID NO: 157067 - protein, 135 aa, Heterodera glycines
MVSKVNFWVKLKMYVCVFKTLNAYQITDKKLHLILRDDEGAMKLATNLLGYNSMQCFAHKIQLVNKIHLILCIFGYFKAVGDGLKLLGGIFDVKERMKKAIRRIRKSRIIADDFKALQIENDLPLKTLQKVIKFK

SEQ ID NO: 157068 - protein, 308 aa, Heterodera glycines
LTSFIDGSAIYGSTQCEAAALRAFEGGRLNTTNLGSSEALPQGDQEQDCRGKVGKGSEALPQGDQEQDCRGKVGKGLFPCFLAGDERNSHQPGLTSMHNVFLREHNRIARQLQKMNSAWNDEKLYQETRRIIGAIFQHIVFREYLPKLIGQREVDRHDLAPLSAGYFARYDPTCDASISHPFATAAFRFGHTLIRQMFPRLNPAFRFGHTLIRQMFPRLNPSNFANFTDPVDLVEHFNNMESVYDQRRGGIDTILMGLLGARAGIDTILMGLLGARAMAFDRHITDAVRNHLFGFRGQPLSGLDLIAL

SEQ ID NO: 157069 - protein, 58 aa, Heterodera glycines
MRLEQLEEIRKNVKSLSKIQPDVFSVPDLLANSQIPCADFPRMNLAKWMERRLAPFEL

SEQ ID NO: 157070 - protein, 81 aa, Heterodera glycines
MEAQNVRIKLEAELRTAQLGMVQQSRRIMNLYEGLVGQLKILLRKLQTPGESTETKRQQANDLIKRIEGTKLVSAEAPMIN

SEQ ID NO: 157071 - protein, 75 aa, Heterodera glycines
MTNKLIRNKCRFNHGLNPIVVDDSERFKVPATVNPNPPPPGMEEKAKTTSFVDLLLTPAVGRETVTDRPMFVPFY

SEQ ID NO: 157072 - protein, 37 aa, Heterodera glycines
MQIDRYYEDYASITVNQAVNDINAMDQDGRFAESEDC

SEQ ID NO: 157073 - protein, 150 aa, Heterodera glycines
MHPDHKQQQDEKKTAAATGDSNSRYHQGWAALPEYNPPFICVDASFQRHLHRHSNKILNRIQQLHFLHTIIVTSTPTSATPTESKEAGAELSHKDDKKESAKVAANNSSSSSGYELKVELPDALDKWQIMPNWDRDCDRDLLIGVHKHGK

SEQ ID NO: 157074 - protein, 54 aa, Heterodera glycines; identical to SEQ ID NO: 127631

SEQ ID NO: 157075 - protein, 188 aa, Heterodera glycines
GNKFILKSFAKFHELDQIMTIPVWLKQSWTDRKLAWDPDDYGGVSVLYVPYEMIWVPDIVLINVPDIVLINNAKGTFNITIDTKATLHPNGRVVWEPPAIYKSLCQAKTFWFPFDEQNCLLKFGSWTYPSGLLHLSLMDAVNETQMEVTNERGELEQLALVEDGIDLDDYYPSVEWDIMYGILFWHSD

SEQ ID NO: 157076 - protein, 269 aa, Heterodera glycines
MAIHPHFWPGVVVRPLGGRLDGKLSEWQGRRNALIINGFVNVFAALLEYLSKSMASPDEHAKAMEDLKKLVDEDEAEFMYESLQSEAALMQDGSCCTFRQIFFERQFRLPLLITIVVMVTQQFTGCSAVFAYSTDMFIDAGLDPRTARFSTLAVGVAYFLFACSAPILIEQVGRRILLIGQLAMCSVSLFFLSIFVALQHAVWQNFASYATIAALIVYMCAYGVGCAIPWLISSEIFPTKFRAAAVTVAVTVAWSLSFVVSTCYLPFQQ

SEQ ID NO: 157077 - protein, 48 aa, Heterodera glycines
MAPMAMLETTKDQYRFISVRFSPGPPPFLRIIKDQQTISQNIWGEKRK

SEQ ID NO: 157078 - protein, 34 aa, Heterodera glycines
MTYENGKVSKVRFDSFVLFNSQKSVVVFCIIFIY

SEQ ID NO: 157079 - protein, 113 aa, Heterodera glycines
MVCPSFALRPPIFFSPLLPTQNGTWKQANCWALHSRHSTASTDLIANTLADQLRAFMSDFGCPNGLAKMGFDRRDTDSLANAALNSFRSNPISPRETNFDSIASIYEQSLNVY

SEQ ID NO: 157080 - protein, 108 aa, Heterodera glycines
MTYWHFGLIILPGAAIIDIPEKQCKAGIRLRCIKPFLAIIDPLNVKSMPRNVAVYSGFDVLCHALESYTAKPYKMRSPRPLRPDARPLYQGSNPVSDVWVREALRVIE

SEQ ID NO: 157081 - protein, 111 aa, Heterodera glycines
MASIANSTKLTIGSFKTVPLMISPFVTRFGVGGFCAPNLAIANLTVRKSFASCAFPPAECEDVDYAFEMMSSTLRCGNGVTSEIGFDVQNLGSKNALIVTDKNVTKTRAFK

SEQ ID NO: 157082 - protein, 22 aa, Heterodera glycines
MNFLCFYFCVLFTFLVFMVFYE

SEQ ID NO: 157083 - protein, 325 aa, Heterodera glycines
MLRKIFVYFLILIITFLGQIAMKNEAFSITYAGEVTPPGNYKIVIWDEISKNTAAKCYFILKNITTKAYKFNYITQRYAVKEIKVPFFKYENGIVLENLSDCFVHFYTIQTNGDGEFEIKMSSNVQDLINVHIFPLDKQVNLISSTNESGTILQNKMKREKWKHLYGHKEVLFMFHFLEYQQRVNEWLDNWLIQNAVPTEEEAFFIKAFFRYVTEIFVERFTKLSTIYRNQLNVLGYYGTTLLNYLLTNGEMNLAQKLAQINGMPNLVKYFCQFLGYGLMKDADPSENDIKIELPAEWKIFCKKYMDKNVRAKSLFISEFRAETE

SEQ ID NO: 157084 - protein, 197 aa, Heterodera glycines
IRRGTTVIRRGTTVIRRGTTVIRIGTKVIKRGTTVIKRGTKVIRRSTKAIRKGTTVIKRGTKVIRRGTTVIRRGTKVIKRGTTVIKRVIRRGTKVIRRGTTVIRRGTKVIRRSTKAIRKGTTVIKRSTKAIRKGTTVIRRGTKVIKRGTTVIRKGTTVIKRGTKVIRRGTTVIRRGTKVIKRGTTVIKRGTKVIRKN

SEQ ID NO: 157085 - protein, 276 aa, Heterodera glycines
MPKKKESEKEIKRRQATRWSSGLDESGYLGKTGSGYFRVQQSRVRVQVFKPGTGGTESGRGTESGKEQKVEEKVEEEQKWKRNRTWKRNRTWKRKCKRNRKWKRKWKRNRKRKRRRGTESRKRRRGTESGRETESGRETESGRGTESGRESGRGTESGRGTESGRGPESGRETERGRESVSGTESGRESGRGTESGRESGRGTENGRESVRGTESGRESGRGTESGREEEEQKVEEKQKVEEKQKVEEKVEEEQKVEEKVEEEQNVEEKQNVEEKV

SEQ ID NO: 157086 - protein, 43 aa, Heterodera glycines
VKHPISALLCREPVCNGWLSICKKLDWQYVVVKNFWVMNYFLK

SEQ ID NO: 157087 - protein, 22 aa, Heterodera glycines
MVLVLEKHFGILLLCRRRELQN

SEQ ID NO: 157088 - protein, 225 aa, Heterodera glycines
MEEGQMETGENAAVKLVDQKKSAKKKADRAKDNELLVLRLSNLHANEKTLENAKKMAQGKGDESESSSSEDDEEEEETEGGAKSARMHAACQTIGASNVCAVWNDQQKVQLWNLDPAIETVKSIGTESPSKVQKMEKDAVKQNLLFTFAGHSAEGFALAWSPIRLGTLASGDLRNKIFLWRMSEGGQWLVDQRPLAEHQSSVEDLGNSPSVAKQKNSFIPLFLLI

SEQ ID NO: 157089 - protein, 29 aa, Heterodera glycines
EVKEVHWHKQCPGLAFSTALDGFHVFKTI

SEQ ID NO: 157090 - protein, 132 aa, Heterodera glycines
MSWLKIIEEEEERARELQNDQMELEQVKDNIELPKHPQPQNKCSCNEKQKSVPLIDFLCKHYKCSMNELHVLLQTLSKRREISEMLRSNLHLRTNHLRPAWKNIRVHCNELTIHPAQTAYAMRGYLGITVCL

SEQ ID NO: 157091 - protein, 229 aa, Heterodera glycines
MADNFQKFDEKHLQLRHPFTLTISGSTGSGKSEWVLRMLRNVNALVSEPISEIFYCYGELNPNIIQLQKSGHIGGCRVIVHAGSPTEEQVNRRAKECDGKLLMVLDDLMVGLGQQFLDTVFTRGSHNWGVSVVLVTQHLFAKELRVARNNSHYLVLMRNPAGALQVRTLASQLFPTKSNYFTEAYRDATEKQFGYLLIDMQPESPELLRLKTNIYGEQGGLPPLVYVAK

SEQ ID NO: 157092 - protein, 302 aa, Heterodera glycines
MRHAMRMFLVPEDVFQSVFVQPQAAAAESDGADGTPIGLLRSRIQQIERSRELNEEQKAAQYHQEFKRLNKLVREQEEQPINVRLQHEKEKEKNSATPPPPPPQTIDHSTPKRLEKNIVPSAFGLRRQRHHYTQKAGALSNRRPAQKQQRKAAAAAETPNSSGNGETEKEEGDVDDGEQWDDAQSSSSTASTGGAAAKRVLRARDGEAGKGGGGETADRLQTKHNYQMTKNALITHIRKKGHSLGVSDQGKVLRADGSEFKTSNVEAIVSHLLNRDKRSEFKGPPVGYKEFAEKAREDPLLK

SEQ ID NO: 157093 - protein, 255 aa, Heterodera glycines
MSDNPKEANKEMEKAIFIAADCWLEVFDLLPPSQLGLGIAMISHRFDYFVDEHFKTRKWKLGKMKIRRKIGQNGANEMKIVNSDGKELPIPQNPLPNKVIGFGSIFILFIDQNVLTFLGHFHRFFAICATSLTIGTENVRISEFLLLTIWPMLKHTIRDMILNPITLRQIRQLVPSMLNDCPALRIVGLAGVGILPEFPPDDSANASDGQAVAKWLFSPRPDNLMKVLYVRIENSAVDQWLSMVERIKAVLLIDY

SEQ ID NO: 157094 - protein, 193 aa, Heterodera glycines
MTLYSSVIFLLPVQFLLVVIGAVFIILSQCCGGGSKKKKVPVFDPSLFTNETLPFFQKAGAAPTPTPSISASVGSEAPSSLKTQEKSASASSKTAPPAKKGAVAQKKGPTEAKAGKATDEKTVTTKKKEKSSKSAKGKPTSKPKPERTEPSVKEDSKPVAAEKGVEVPHSMMSKGDSVVDEEDEVGYTTTTDV

SEQ ID NO: 157095 - protein, 250 aa, Heterodera glycines
MPKKYKKAKKDKVGPALPPAPPPSVEPPAAAIQYEDLTSDEDLDSKDAGGTATSHLVDQQMESLLALSPENSGVLLALSPDSVDRLLEDQNAGEVKQNPEKIMKIIVKSVPITAESNEKALESTVLNEEDEFVQANSGENDKTNLEIVKIVSPLETMGALIGVISQKDDESVEKGPQGSSEKANAGEMEVEGNEKALGSSVLSVEVQMDPKPMANSDQVENENEKADKGENEQFSKENSRESDEEENFGG

SEQ ID NO: 157096 - protein, 157 aa, Heterodera glycines
MAKEKISTKKRTLRLTTPLAKERLQRLRFEPFPDQYDLIGLSKKIYDALRGAFFTDLPHVKVVTFKLLDASAPASKEIWALSSWDKIPIVIEIHPEQGDCEQLVAMLAHEMCHGVTSKESRENRPYSAKEKAERFDQWAKLVHQTLGIDPWRKCDKP

SEQ ID NO: 157097 - protein, 706 aa, Heterodera glycines
MNFLGFTLTNAGYKPSLSRIEIVQNEPIPRNVKEVKRFLGKAGFYRRHIENFSTIAEPLLSLSRQSVKFECRTLSAPERRWPAVQIEMCAIIYDLREFRPFIFMSDIELHTDHKPLAFLLKKSETHPHLARWLIELQNYQIKIVHVAGKQNSLADALSRAAEDSPIQEIENLSEMEDIIEFPVCLSLRAHPRLVLDEFVNTMTLRHEDGNSYQIDLSKEQKNDPEILAFIEFLTNGNMPPDFSENEKDRFSALCLNLVYESEVLYFKTPSSSTRIFVPISLRALIFESFHTSPLGGGHMNIKKTLRKCKKYFWPKMHSDIVSWTRQCITCQLRHNPTPAYRAEMQLAPSNTLFAKVGLDLAGPFPTTSRGNKHILNIICWFSKYVISVPIPDAKAKTIAKAFLSNCYLKFGGCTELISDNATAFTSEFFKEFCSMLYINKTYAIPHWSQGNATLHPFVITLLVIHPHPNPRFFLVFGRDPIFCVDQILDARIHSQVQQAEETDFKQKLVSSLRKAWKSAADANEAAQQKIKEQYDRTVRQPQICVGDRVLLRNYAGKVGTSKKFHLPWKGIFRVIEIDGIYATIVSCISPQQNPKRVHLNQIKKCFENFGPNCTLPKLPIDEEESLDKMHATNLDNFPGHNHFPRTNRQPSKNPEQENDSQNLAEKTDCQEEDGNNSLDESIKPKKRPEYALRDRKRLNLPSRFRE

SEQ ID NO: 157098 - protein, 893 aa, Heterodera glycines
MAGEVNTNMGVLNAKIDTLAEIVKPKITPNQTSHVRFNSCNNANLSQDNEEYLDPFAEDSFELGRVNTLTGMIGHLEVFGEDSVIAFDEWAEWFTDYVGAVGRNWNEDEKVARFKMSLIGTPRQLFKQLIQAEAAALNSAITGIRQKLDSPQRRQLTKRTLALCKQRENETVSEFLKRLTPLVEMTNPTLNDNQRKERTCEEFLDRIKPNIGFLLRLVGLNSTKDLDRIKAQAEELEALLLTEKGQISDNLAHTVHALSGQRFGNRQTEQNRESNYRGPPFVSEANATPLNDRFAPRNFDNNNRNNNGNNNNRTQFRRNQRPNDRRPNSQQIQSQRRWSNRPICNFCGKLGHIANFCRNRRSQFINNRPDPQPNRGRNGRNANYGTVNSVDAIPSNVSVLDSDQLYQQPLGNSVKREDANALNAITTVKSKPKIEPKGVMNDSENCEIPVIDSKNIKPPSPQLKASSWEGIGPKLTKFLMLLFFIVIIKCVPVSVEASFDVPIPKNPMMCQTQIEGTVWSLPSPTQCPTPLFNQPKGSRKQTIWLYKPNAFQYEVEAWACRKVRKNIQKHTSLTNIPIIEKLDSEMLSMDREECQQMINHQKCSFGTLKQEGELFHTDNKIDMSPRVWLFGSFSWMKASSENCYLFKTRIINKFGSPSIQNSIGDSNHCSFEKGQCFLEDKTLLLWNSSISKKCEYLPLGPFKGQMLGTIFIADNDPILLTFEEKPKIIKACNTNLTLSHQGYAFINKTTKRKRTRRAQESIVTDSQLQTELSYLSWQMTEALRFSFVQAFFAICEHIHEMKLWALSSALSEPTILARILFNTSLVYAKNLGPGIIKVWPCVELKKDDFNFVPLGDASQENKCFENVPIAFKSDGVEHMAFIAARNMEVVAHS

SEQ ID NO: 157099 - protein, 214 aa, Heterodera glycines
PTQCPTPLFNQPKGSRKQTIWLYKPNAFQYEVEAWACRKVRKNIQKHTSLTNIPIIEKLDSEMLSMDREECQQMINHQKCSFGTLKQEGELFHTDNKIDMSPRVWLFGSFSWMKASSENCYLFKTRIINKFGSPSIQNSIGDSNHCSFEKGQCFLEDKTLLLWNSSISKKCEYLPLGPFKGQMLGTIFIADNDPILLTFEEKPKIIKACNTNLT

SEQ ID NO: 157100 - protein, 203 aa, Heterodera glycines
SNQCTFSWLMSHSKKTGSRATSQERDEEINITIIDRNFWNGKTSVKVPDLERAHIEVLRLEEAVNRSFRIVNRRAYANTRALNKMAGEVNTNMGVLNAKIDTLAEIVKPKITPNQTSHVRFNSCNNANLSQDNEEYLDPFAEDSFELGRVNTLTGMIGHLEVFGEDSVIAFDEWAEWFTDYVGAVGRNWNEDEKVARFKMSLI

SEQ ID NO: 157101 - protein, 48 aa, Heterodera glycines
MDKSVPCNERAKGYGKDQKQQQQQNAKKGKNSKRKQKGAKKEHRRTRI

SEQ ID NO: 157102 - protein, 43 aa, Heterodera glycines
MWLFVCKELDKKAVGDFLGILRRMDKIRSIIGIERADWLPQYV

SEQ ID NO: 157103 - protein, 47 aa, Heterodera glycines
MMILVKKKFSSEKIAIFRELEEEQILAEERGARVFCRMIRITNDFDM

SEQ ID NO: 157104 - protein, 28 aa, Heterodera glycines
MVFKGITLICEVVAQSVTGQSDKKYPKE

SEQ ID NO: 157105 - protein, 167 aa, Heterodera glycines
MAEFRAADNFDGLRVGNGRFLDNYMGRMRFNVPMAAPLFHPHEWNVHQRTLDGAVRTNNFAEAFHRKLQRQFSCTHPTIWRFIDTIRCEQKAIDADISRCVMGESAPQKKKKYREADARILRLVHRYNEINNIHLPQNDHNYANANVNPENIINFLTGVSRNYEMRP

SEQ ID NO: 157106 - protein, 44 aa, Heterodera glycines
MPEALFGPHRPLPTRSPSKLSAARNSAIVPKEAVTYAYKLRHTS

SEQ ID NO: 157107 - protein, 33 aa, Heterodera glycines
LDFLIFLFLAASIFYNNLSVWSDVHQTEKIIKI

SEQ ID NO: 157108 - protein, 18 aa, Heterodera glycines
IVLKKGAQKTHFCVKIFS

SEQ ID NO: 157109 - protein, 37 aa, Heterodera glycines
MAHWQRHRSARKHHRFAEGPIEFCPKCRNAFSDMPFK

SEQ ID NO: 157110 - protein, 44 aa, Heterodera glycines
MLAMFDLINAIDNQQAIQKNERNNSRQNPKRKNKELGHTLTIKL

SEQ ID NO: 157111 - protein, 68 aa, Heterodera glycines
MSSPSPRFHILLLLVICCFSAFLCLALAHVVGESQIDTTGIRARRQYYDQWGNYWSGGNTNWWNWRKK

SEQ ID NO: 157112 - protein, 82 aa, Heterodera glycines
MEEVADKLRQSALQSSNAKRRHLSLAEQAMENEAEMEMNEQPSSDDSLSQSVVFECQSCDNGKGRDEDEMGIPPPSKHGRTE

SEQ ID NO: 157113 - protein, 187 aa, Heterodera glycines
MTVVDHVQLRAKHLLDPNGGGHSPGGLFPAQPTDWILSMGTVFLPSGDSTPKLFGQLSLLNHILGSRDFTYGFTLLRDIVNEIEWEKTGMFPRVTLCDFEVRVLGNIHRHTVQCVLMINMFNEKIFLFLWFWFLTVGSVTVTNCLYWVYVMLYPKKVLLWASDDLNACRRTDDFGTDFSTLERLQQH

SEQ ID NO: 157114 - protein, 795 aa, Heterodera glycines
MGSKKFYTAMDMQSGFMQIPMAPEDIEKTAFISHLGINEFITMPFGLTAAPDTFQRVMNSLRRRLTAAMLIYLDDIIIGSENEEIHLIDIENFLKLLKEVGLKLKIEKCHWGMAEIRYLGFLLSEKGIRMDPKQVQAVQNFRPPKSLTELKSLLGALTYFRRFIKNFAHIARPLQTLTQDKFEGKIEENWGNEQEEALETLKKMLTSAPVLQSPRFGKPFIIECDASKKAIGAVLLQANGPVAYASRALNRHETNYPSIEREALALVYAVKEFSPYIVGSGVTKTITDCSALTSMMKAKELKGRLEKYQITLQSFDLEIVYRPGSKNKAADFLSRYNIPGNESEDTNKKGKKENKIKISSTENKPNSDKNSTRNGQTDESRISLMQIIDAQRKVKELVKIFYILKTGQYPKEIFKWKGVMTDYCLLNGAIYFQKGKENAENPKLVIPYELRQKIFNEIHNEGHFGFEKTWFEIKNRFHWIGMKEDIKLLIDTCEACQKRKIQPGNVKSAPSVPIKIAKGPFQRIHCDLMGPLKKSENGNSYIFLAIDSFTKWIMGKAIPNQKAETIVETFVEIMVHQHSTPEIVVTDQGRLFTSELFSDLSKIYGFEHQTSTAYHQQSNGQIEGCMRIMANIISQLVNEKGNDWDKALPHAIFVYNSSIHTVTKYSPFFLLYLRHPKMPTDRLLKLPSQNEVTSDISIYTRKHAENASRAWETARENILKSQITQKEENDKSRKAEEKEFEIGELLLLKKEVLKHKFDQRWSGPLRCVGIDKDRKNVILQQIEGKGKLKKVHHEK

SEQ ID NO: 157115 - protein, 158 aa, Heterodera glycines
MKMDLRKLIWDVTVMMKEHPLLRMAHIAILCQRVDIFTDDGLAYLQRFNYSVTDLVKVTCSPEGFYPLMLAVQTNQDSIVRFLLKHGADLTAHDHVGNNALHYAARVSTQMLETLLEKEAGKALINSRNNAGETPSMVALRAASPLCMKTLFNHGASC

SEQ ID NO: 157116 - protein, 85 aa, Heterodera glycines
IPKNPTYSRRAALVGLDEFDEWVFVRRFVQQLAPWLNSVFMHNGLAARSATIDGVSPALFRELINALPASFSSSVSNIWVDTRAA

SEQ ID NO: 157117 - protein, 80 aa, Heterodera glycines
MAQLATAPKGVLFTALCRPLRTTVFTTVRDAAAAAVRITVVDERSTDPDTFRLWFSPALQIVQQCTKLIFYADYESDVYF

SEQ ID NO: 157118 - protein, 131 aa, Heterodera glycines
MALCCVWIRKHHALNGTSMHLAKLAKMKFYFLFFCKVLPSLKPKVPSVVNHHLAALLADLLHDRFLLVTTDHGKLITLSDNFHSDPTFSTDEFVAQGDSLYDLVDPRDHQTLSHTLIEAQNAKPAVAFVRN

SEQ ID NO: 157119 - protein, 152 aa, Heterodera glycines
MYHTVILLIICHLLHTVISLASVLVSSPFDNFRIECPQSSGAQRLSIRMVESQGQKRQDTVFVLSCQHIVELYPWLDLPQEIADQEREDCRYTKQFDILLEQKFDLTCKEHEYLAGIARLADTRSIQQRDLLIDFVQIMTKFCDYEFFFKES

SEQ ID NO: 157120 - protein, 28 aa, Heterodera glycines
MAKTTTRLTTTAQTTTFGWWLNKNDEDL

SEQ ID NO: 157121 - protein, 102 aa, Heterodera glycines
MSVLLLSSQFSVAVLLIAFASSMGLSNARTIIAADGSFGDENGQFSTPNSLIDSYERNIPSLVALMREFTESKERTKQKAIGKAQEKEEKRMEEGKVKAGDE

SEQ ID NO: 157122 - protein, 84 aa, Heterodera glycines
MFNYFLLFLLLSIAFISLISFSEQKSFFTKVGDGFKKTANKIGKGSHKTWNKAKGTVKRGPKKAWEKAKGTMKKGWRNVKRKVG

SEQ ID NO: 157123 - protein, 61 aa, Heterodera glycines
MSDLSPNVRNSIFQFNTVTICAIPRALWCIFWPAREALLGQNSDPTHLKCKKLITKFTIFS

SEQ ID NO: 157124 - protein, 228 aa, Heterodera glycines
CIFELDPKTVYAEKFKLEDCLTESQKALEDLDKVQTELDTLNETASDEILKVEQKYNQMRKPFFEKRTHFIKQIPNFWVTVFINHPQISNILEEEEEECLHYLTKVFINHPQISNILEEEEEECLHYLTKVEIEENEDIKAGYKLKVEIEENEDIKAGYKLKFSFDPNPFFFSFDPNPFFENSEIVKEFNTAAEPNSVTTEIKWKQGKNKVSIKLAKNNKCSFLDKTS

SEQ ID NO: 157125 - protein, 224 aa, Heterodera glycines
MDSDSMDISTSSSSYSPSPSHLSDVPFSSLAVKTISTTNKISKNSFQDINGKSPRLQFTASPPHYHKENQSSVPSTAPNPLAVSRTMISTSCKKDITERHSPSVNANRQNQMQKEHSVAAEMFLATDPILMDLQKANKKSEKRKLNDEEQDNTRQMKKLKKSGTKKTDCDQNAMSGKKMEHSVLTGHKSDNSNAQRPNGNTSNCNKSDKKSDATSNSVHPQVIN

SEQ ID NO: 157126 - protein, 364 aa, Heterodera glycines
MSSNFIGSPNCFFRPTADQAAAEEVDKYEVFSWHGDLSDQLAAQFLVSDQQLLKECREKLASAELRETKLLCKNGELNAENKALKAELEKQKLMSENSELKAKVDKMDQEKQQQLDKKYVSVDVFNSLVERIKQLENRQNKEEGRKAEEKQQKESVGQQNKNTEQKLDGKYAVVDKNNVLVALVTSSGDHSPPAVVSAKVAKEVPNSQQQNDWDAKVCHKDIEIIGEKQLTINCKGNRFVLLRLEVPLDGSIGQILNSYGYRSDGSFGCNGINRPCKMPMSLFGSSFSPVAMQSADVEMAYKSSEFSTGDVVGCGIFLDTRLIFLTKNGQRMESADVHLLLLQFVISFSFVHSFTNSNVTIDGA

SEQ ID NO: 157127 - protein, 82 aa, Heterodera glycines
MSEMITHNQHQLIKWVKKWGQTQMINKKEKSFENLKDRHFEKSLDLDSMLDLDFLDKNLGKSRSRKNPGSSGPGSRPGPGFF

SEQ ID NO: 157128 - protein, 105 aa, Heterodera glycines
LRISNFIFENFAVDNCCYNHDVCYINKYQKRYDCDIKFCNCLNEYPNCFLTKVCSPTHILNILFFRIYYAGQFILLENVLKKDKNNYFILPSIDMHMYFKFFIVM

SEQ ID NO: 157129 - protein, 180 aa, Heterodera glycines
MSGGPRYEYLWQDGAQYKKPTRLPAKDYMHLLMDWIEERINDEKIFPTATDVPFPNDFRQTCKKILSRLFRIFVHVYIHHFDRLVQIGAEPHANMLYKHFYYFVTEHNMVSQRELDALKDLTARLITSQHNQQHTAIDAKNVMCASSASLSDDDDAMNSSDAGDGRSVCRRVVVVGVDEK

SEQ ID NO: 157130 - protein, 356 aa, Heterodera glycines
MTSSQNSIMDGANLLGNLEFLNSLNEGRNLLHTQLAQKQQQQHHSSTFCQSPFPLKQPKMEHKLDIFAQLQQLVSSSSSSSTNGCSNSTDHQHLASSFPKQHIASMHNKMLSREKKKFSSDVSDFLVLEVLKRKELLVENNTSRDLSFSECKRNAWNDVRELLVSRFPGFDLNIEAIKSHWRYRKRKVTDAFSEMCKGSEAEQKLKLRLAAVDFEIYSQLKDSNLLERTRLEKDASPDQCDDGHFESISSSNSPATRAINAESSAAASTMSLAPTLPMISQAPFFLGQLGPQQQQHIGTTNPTMLLERLTASLLEQQLKQQQQQQHFTKKDVEEEENDQQQQEQRGRETVQHRIND

SEQ ID NO: 157131 - protein, 18 aa, Heterodera glycines
PYRDRDLSFSKSGTGNRD

SEQ ID NO: 157132 - protein, 100 aa, Heterodera glycines
MSNLSSTIMPTAAEYHHVGNAAKENGGGTGAGPEPPAPKRLRLGSAENEEEREMALLKREAYMAQASAFDEIRSLVTEVRSTLLPQMLTALQNYNSQFNS

SEQ ID NO: 157133 - protein, 56 aa, Heterodera glycines
MSASFDDELQLEMQSIEAIFPNEIHIESARQISVQCASNVQLNLNIPADYPRSYDA

SEQ ID NO: 157134 - protein, 72 aa, Heterodera glycines
MNKYITNSSTHWQQQPYLHLVNKVAHLVRRNAGLHCILKNCLNCLNGGGHFHQPNGTKSVDESKKKSWRRIN

SEQ ID NO: 157135 - protein, 199 aa, Heterodera glycines
PSEVQLQSKRTSSKNRAGLTGSARGAIQPPSKESAESSPAPSSLATHHQSVASMTLSISANNLLNFNINSPRSSSSRASPMANVSKLRFHSTKGVNVYLQHDETVAVRKHGEYYQGYVFTERPIKVGEKLVILVSQIEDSFSGSLAFGLTSCDPSKVLASRLPVDSDELLERTEYWVCIKDVAATPQVGDTLSFQVDAE

SEQ ID NO: 157136 - protein, 121 aa, Heterodera glycines
MANLSLFFALLTPPPLFSFRLSPPSAAHLPPTARFAGRPLELSVPSNAIFTASEKQIIVVRREKANWRRKCWETDKQRAENAIDRSTKVKTTANAIGIFFAQRIVGRMALIRQTITTLMPQ

SEQ ID NO: 157137 - protein, 67 aa, Heterodera glycines; identical to SEQ ID NO: 138863

SEQ ID NO: 157138 - protein, 22 aa, Heterodera glycines
MLDSSMPYSLAAKRIRKNDKLK

SEQ ID NO: 157139 - protein, 164 aa, Heterodera glycines
MSSAAVRIGIIYTEFRILAKNLLILIGLSTKEVPLDHWVGNGRVSYGYANFGEIISTNANGNEISIRDNVPSFRTGDVVGCGLNWATRCVFHEEWTTLEFVFMMAIHINKLANCLIKTSPICTLTRERLTFTRPLHCLITWPRSRPTLVPTSNTNCQRNLRLCK

SEQ ID NO: 157140 - protein, 41 aa, Heterodera glycines
KQKMGKIIKLIAWLKFNQINISGYHSIALIVLFQNIIFLYF

SEQ ID NO: 157141 - protein, 26 aa, Heterodera glycines
MECPKSIGSEPTLAPNRRHRIVLFGN

SEQ ID NO: 157142 - protein, 32 aa, Heterodera glycines
KPKKFFTLLNKLTYFAMELIRGVTDRMSAMFS

SEQ ID NO: 157143 - protein, 36 aa, Heterodera glycines
MDGAVVRSIKDLPIDELTPWNSCYYCKHPIFNLVKK

SEQ ID NO: 157144 - protein, 138 aa, Heterodera glycines
MGFSTKPIIIDGKDHLLGRLAAVTSKQLLLGQKIVIVRCESINISGNFHRSKLKFLAFLRKRCNVKPSRGPFHYRAPSRIFWRTVRGMLPHKTARGMEALKKLKCFDGCPQPYDTKKKFVLPNSLRHIALKPRRKYCT

SEQ ID NO: 157145 - protein, 133 aa, Heterodera glycines
MKRRVPYYKQFFLDLIANDWSPNAPTIDDKPLQKEATSLLLNNIILTAVFNKTFYSCVNCPNAETLTLPSGFSPIFLGTFNVAIRVFCESIKCFKEINLSMEEFVLLRGMILLQHGHNSFKNNIIFISNFSTI

SEQ ID NO: 157146 - protein, 39 aa, Heterodera glycines
MEDFKQKMRKQIDEFKSEKKISLIIIMGLCKYTCITIIT

SEQ ID NO: 157147 - protein, 74 aa, Heterodera glycines
MTNQLQERKKLLDAEIEQLQKELNEIEADNAEKQKQLSDEQNLLTEVRTEEGIQQHKLRQLKESLECHEKALEE

SEQ ID NO: 157148 - protein, 25 aa, Heterodera glycines
HLVFEKRYAPRRWIVCYCQRKRQCL

SEQ ID NO: 157149 - protein, 60 aa, Heterodera glycines
MAPEIPEDLYHLIKKAVSDLNFALKKRLNIPDTPAMAMSPEMFAAAGMFGAQAGGAAGAQ

SEQ ID NO: 157150 - protein, 55 aa, Heterodera glycines
FNDVGHSADAKKMADDYLVGELKEDEGQTTAGVSLPEEAKRDEPTESWRQILSSP

SEQ ID NO: 157151 - protein, 239 aa, Heterodera glycines
MQAVREQLEKDLASSNRTIEALRNELASKEMEFLEQAKTLSETVNKSEDERSKYEQQQMTLEKTGHEAQLKVAQCQAEIEKLQLDCEQQILEQEKLRLNDEIKEFMKRDEENVQKQGVYLDEIQKLVQQNSFMERLNQTIASPTSSSSLNASFIAGTPNTSRLSTTVNQGSYMAEQQQQQHSDRMNVIIGYMRAEKQKETEMRMNAELELQRIRTQANIDQHKIVHMEAEVAKLRKEAE

SEQ ID NO: 157152 - protein, 40 aa, Heterodera glycines
MQKRRESIDTLQSELYMWRSKAERLQETLSYVNDDRQTNE

SEQ ID NO: 157153 - protein, 437 aa, Heterodera glycines
MAVILNGEFHRRISSMQAGTTQIPGFGQLYILDPVEAMEQRRNNPRFTGEKITNEDEFVQGHQLNEQTLEILEQMIQVHHPAAQAYKQAREQLSELLQQQTPEELRFFRMTLLNERRAPAGLKDPKLHPHQIITPSTGEGMFAIHADPTGAPPPKGIWVENKQGQLNEIAPFSPWTDSLTYPLIKPMGDDGYTTGIKYAKPPSRKRKGAQNASGLFHSEAESDNESCETQSIASSDAGSVANSDAESVASVSSQHRRIDKSKQFISLRDYCKYYLAIRDENMELQYHHILSCGGGLGQRWILDQAAKIDWQIATFLRRPDMDLRISTPKNLLQYLVNQYNRQQARQNPNAQQKTVDDIGSVVRLSEHNVNSLQYWKKMYEDCNTVFARCHDAKKARLFITFTNNREWPEFKENIYKNGQVFTDRFDMWMRVWTSKNR

SEQ ID NO: 157154 - protein, 337 aa, Heterodera glycines
MSSKNVFALKKKHKTRKNSESSKGSSESSASQKSHRSQPKCWRCGKWHSPKRCSHGKSTCRKCNETGHLERMCDQHKAWLKRNREKKDGKAVNTFRLGGLFLPDSESRRKLIEVLLKMNGTEVEFIADFGTERTVVTKDAHRQIGSPWLSRCTERAKYHDGSTRPLLGKGQAKFSIGDRSCDGQFYVAKGTKNLLGIDMLHSLGLLDSFRKSLEGNVQVAEANTKSDSTDAQSENPKKKHHGNKPKFALGAKVIASLGLQPWRAGYVVNRQGTMYEIRFPDGTTGKFPEKGVEACVLDSDEEIFDGLDLREAPSDGKTSKGLVGIDCDQRKRENVIA

SEQ ID NO: 157155 - protein, 85 aa, Heterodera glycines
MANKVYVKKGIRVKNAFKKKIEENYGGRMETVDFEDIEGTAEKCPGICLDLTVTTKTVPFNTMPTNATKYTATAGTIKSADGPAK

SEQ ID NO: 157156 - protein, 161 aa, Heterodera glycines
MIFAVNCGLMAMFCAAFDRLFAVALPFKHSSIFTKYKFSYLLGHLLICVIYGAFTLNYVLAFAFENAGNPTTGVVAETLLGPVGYKFFAGTFIISLGSTCCYVSIFVIIRCKNAVTQQTNTRVLRSLIIILSINIGGYLTNLAIYQLLYAFGSILGYFKLI

SEQ ID NO: 157157 - protein, 69 aa, Heterodera glycines
ATHHFQLEAGNYVIIPSTFGRNEEGEFLLRIFTTGTIGMYNPNSGQKTLEILNSLPSLLVSVTKYEMGY

SEQ ID NO: 157158 - protein, 254 aa, Heterodera glycines
LTTIFSEPPDYRTNLIRLPFTFLPVFVIALFGNLLVIAVLIRNQCIKNQCIKKRRVNTILFHMTIAQLLVTLVYIPKEIVHNLTIAWLWGDFLCRFCKFFDVFGVTLSLCRFCKFFDVFGVTLSAGILICLSMDRFYSILFYSILFPLYVINAKRSVQWMLSVAWCVRFFSSSLSDFLSAAHHPCFVHFTQCVSADVIGMVSPSVVYWFSVLNIVQVYFIPLVYFIPLLVIVVCYGSILVSISLKKQFDGDGEN

SEQ ID NO: 157159 - protein, 24 aa, Heterodera glycines
MEKACKIWRDYIDFSALELLELAS

SEQ ID NO: 157160 - protein, 159 aa, Heterodera glycines
MDAEDGLLLLAQLGIQKAYKRMKAILRPLFVHHCCRPSMLSRCCWLRSMSSKASENALIKELEAGENAEVAQKFFRRIGPRREAFRKRDMTGNSIRKILVHADQMEALFETEWGKTICQTMAHLGKIQIFTKAQLLSPGDLDGLEQQLSSSRHFSTNNQ

SEQ ID NO: 157161 - protein, 25 aa, Heterodera glycines
NTPSEKTRCVPINRECQRKTLLFFS

SEQ ID NO: 157162 - protein, 173 aa, Heterodera glycines
MKKREKKKKLMKPYKRRGMTKRKKEERKKEPTKRKEKKRHPGGKRKEKEKEVRDTEPELSGEETPKKQTDRGGRGVERKRERRPMIVQQKKEEEEREEEEEGEAYQPLKHGGDKELLGMSPKSILKGSKRKKGMEEAADPKPQQWRRRDKWKKPTEEDGEGHSRGNNGTGRDG

SEQ ID NO: 157163 - protein, 592 aa, Heterodera glycines
LSVISQLAHFDDVSPLGQFLHKAATQTERSNSFGFIKIVPKTTFSLKLGHPKVRDIILQQLPMNNATHFIMSACYGSIVAGIVTFNERSAIGKTDISNAKRIVRKFLAGPGLSPSDKSFISHLNKSISCSVFVDPSIGNCLTDLVRFKRIVFILKQFQSDFVQDFVKGLNSFADKWAAAKDTKHPTPISFSLVPLSSIGDKTRFNPVSTHMIADEHQFEWFCGHVKTVNEYDWLLRKVRQSLNECSAMLTNNELDDAQEFFEQLEERKNIFYDSLKDFIVDLRMCKAESQKEAIVQRAVDDYVHFCQRIVGHYEELVKEKKEMVNELKQKGKFFGKISHPITFLNSSVPPVQNQHTSFLLCLGKLYELVSRGKCTFVDLDVLRDGEEAQADEGLPEDIRSLNGYPSFGMRLIKMRGNKLLSNDYMAEEERKLQYPIAREQAQITHFFCACGKTPVDGFSFRCSDVAKHGTEFKHFCSKVSLEKELDRLNNKGMLTFLLLDGHKVRIIDAPGIGDTNGINEDNINFDKTLNFISTLPELHAVCILLRPNSPRATPAIRYCIEGLLTYLHKNATNNIVFVFTNARGSSYDMGKF

SEQ ID NO: 157164 - protein, 127 aa, Heterodera glycines
MLVTVLHVQRDITSKCTMDGSATGLNEHEHILKCNSNEKQSDKCQRFGQIDDRSTRFVDRHGFPRAVRFQIGHMFEQSPKFLLCMGPTPRKIVLLFLVVFNAALFDQTQCLIRFVVHTVNSVPMEWN

SEQ ID NO: 157165 - protein, 207 aa, Heterodera glycines
MDGFGGTASGAIGSPNSDAGSIYWMSPDPNSPDLQAWTGASGGSAVGAGAPVPQQQQQPTGGAASVPGQAVGGGASSPMMNAAAVAYGIQQQQLQQAQQSLSAPQMPSQQAQASAQQQQQPIGMALAQPQQQQVQQQQQQPMSMMPYQPQLKDCIFPKGGGAGVYGYGGQQGGYGMGGGYGSSSAGGGQMPVSPYSSYLEKQISTYP

SEQ ID NO: 157166 - protein, 485 aa, Heterodera glycines
IEKLKNIIRQNESAFVKPGEVGLFRQTIHRIDLIDGARPVQQRPYRYPVALQPEIERQVKELLRQNVIRPSTSAWSSPIVLVRKPDASYRFCVDYRKLNQLTKRSTYYLPRIQSILDEVSGKKYFSVADCSSGFFHIKLAKGHEERSAFICHMGLFEWLRCPFGLAGAPTTFQRAMEEVQMCSATFLVYLDDCIIGSMTEDEHLRDINTFLRTMTEVGFRLKPEKRFALIEIRYLGHLISANGVRIDPKDLEPIHKLRKPKNITELRSLIGMLSYFRKFVYGFAEILQPIYELTKNESTTEWGPPHEKALEELKTKLMTAPVLAPPKFGQPFVVETDASIKAIAGCLLQENREGEVHPICYFSRVLTKHEKRYSVVELEALAICASLKNFRPYLEGAESTVITDNSALTSLFRRKDLEGRLSRYQLAIMAFDVEIIHRPGKRNQFCDHLSRYLDDNDTQINWLKIEPKISQSEVMKEYHSDPFPR

SEQ ID NO: 157167 - protein, 539 aa, Heterodera glycines
MAIVLKVSKYWLKKIGKVAISSHIRNISEEQFINPQDFEKAEILVIKQGQMNWQNYAGKDQIRTFIDNDDLIRLDSRIKNCEMQYSFKFPIVFPKGAAILELLAWRSHIKVKHGKVDATLNEFMSEFWAPNIRATIKKVIKMCVNCKKLSGPAFSLPIMPSHPQERVKISQPFNSVAIDYLGPSLVKNEGKTIKFWIVLITCLVTRAVYLEPVLDLSAYSFLQILRRFASRRGTPKRIISDNAQTFRLSAKVAGAYEARGGKGKDELEKYLVKNKIIWRFIALAPWANSLAERLVKVCKDAFKASLGKMVLNLDELRTFITEVEWTMNNRPITHVSIEPEGERALRPIDFINPGLELGINLQNADDDKNDEEFTLEPEKLENKLKIQWNKTNKVLECFWKRWQKEYLTILRDRTQWHHKGPKSQEKREPKEGEIVLIEDEFHPRNTWKMGKIICLNGQKGSIRSAQIKLASKGNETKGRIIERPVNKLYSLEVNKAINEETKPSQNSKSEKSLEENKIIQNKNTHPMVTRAKTQKTFTL

SEQ ID NO: 157168 - protein, 124 aa, Heterodera glycines
MPTGEWTLRGMCWTSPAATFIFVPQLKMEAAKTGGNSKKSRAMSSSTDPAEAGGKKRRNMHPQIVDITQQQQQNVAEFCPVSTGSVHQQQQQSDPRAIMNQIVDTPQQQQQQQQNVAQFRPAST

SEQ ID NO: 157169 - protein, 154 aa, Heterodera glycines
MLENESRLVNSPLTKLQTNNSNNNNGQQLHQTKTTFPSILLLPDRNNEQIINMESHYHSQIERLSSLTEVEMAELVSSNTNLNNVQALEILDGLFCAFLIESQNSSKHLSEPDSGTMRAEIIRHIWAHLKQEEQSADCCEARAWLIGWLLRSSK

SEQ ID NO: 157170 - protein, 250 aa, Heterodera glycines
MNRRWICNDVWMDIFPCFDHAQLGLKLALLSPRFNALVDKHFNGKSELTIWRSIEIRRKNSVTTAAPESSVFINFDNSVPFPLPDYRPLPSKIRFKRLQIDYIDHSVINFLRLNRQIFDKRGTNLQLFWISSPHTTDGQLILDIFVREIWPIFASNIRHLRFLGGYHLDNLRRLISPTFLTDLNQLNSIDSVDLLPDAIGDFDRPNATISAGQALSKWLHSPRKDGQPKQLHCTLLNQQAYFDWVNNFKE

SEQ ID NO: 157171 - protein, 255 aa, Heterodera glycines
IPITGTQFPPAFQSLGLNPPAFQSLGLNPTAFQSLGLNSPAFQSLGLNPPAFQSLGLNPTAFQSLGLNPPAFQSLGLNPPAFQSLGLNPTAFQSLGLNPTAFQSLGLNPPAFQSLGLNPTAFQSLGLNPPAFQSLGLNPPAFQSLGLNPPAFQSLGLNPTAFQSLGLNPTAFQSLGLNPPAFQSLGLNPPAFQSLGLNPPAFQSLGLNPTAFQSLGLNPPAFQSLGLNPTAFQSLGLNPPAFQSLGLNPTAFQSL

SEQ ID NO: 157172 - protein, 36 aa, Heterodera glycines; identical to SEQ ID NO: 151070

SEQ ID NO: 157173 - protein, 79 aa, Heterodera glycines
MLHCHSVALRVGDRIVAVDGMSVIGYAWEQVVTEMICGGPEKTELELTVERTLPDGSDQAEEQTLTVTLDKTQNGAIAH

SEQ ID NO: 157174 - protein, 157 aa, Heterodera glycines
FIALHSFLSESVHFDLLPRIIPTDFPSALGWWDEQQPTEVANFLPPYLFSRYNTPSKFMLRGDVERVKKPTEIGHGKSLRIERKLRIERKALTITVNANDPFPEAPSEKAVHDVNLRCKNPEMHQMLVELFAERPLWSRIAISYRTRLTENALKSVN

SEQ ID NO: 157175 - protein, 137 aa, Heterodera glycines
MLPSLRQMWYCVCDVQLPIAQKICRKDFLETLKECDPANGWLPAGRIDAIRSAIKKDVEKSSARMGDDEFDEDVGGPMGAGGGAAEDESVALGDEDREDMMLLDELAMEEEETEEDETVDTGEEDELMLFEGAKKYR

SEQ ID NO: 157176 - protein, 77 aa, Heterodera glycines
MTLTMDELRNKVQNGQISTVVVGSVDLHGRLIGKRLTARHFVEMAQKKDKMSMCYYFLAMTIEGHVAEGFEVARWEK

SEQ ID NO: 157177 - protein, 248 aa, Heterodera glycines
MHSFSVRLRNSLFHALISLVRFLQRQMIARFFASLEIFYGHRGVRLEQAEAAHLFYAGRAEFIAEPIRPISNRIKHFGCAKCQSETRKMGQSKGRGIGTKKSEQSEKGQKLSWPNPTTKAAAWRGEAAFGCKNATNSDGQRAKLDRNLVSVSPNIRQQFPRIDWEEIERSPFVLVSFGSIAKGDQPSNLQRLVDLGMAVQLDIGQVWAGQLNAKMALIEHNYVAFSRRAQQISAMVRTYRNGIGAVQQ

SEQ ID NO: 157178 - protein, 183 aa, Heterodera glycines
NSYKRLQPNSWAPTKICWTWAPTKICWTVDNRTSSFRLCGHSSNVHIECRIGGADLNPYLAFAALIAAGIAGIEEGLELPKAVACNVYASLELPKAVACNVYASADAIPELPKSLRIAAELMANSEMLKRALGENVLRHYKNSARIELEENVLRHYKNSARIELEDFEKEVTDWELRRAFDRC

SEQ ID NO: 157179 - protein, 609 aa, Heterodera glycines
LSHCFAFRFFMLYPFSAKGNRRSEDQLYEDLLYFYNKNVRPVKNSTQILEVKFGADLLYFYNKNVRPVKNSTQILEVKFGASLIRIIDVDEVNQVLTTSLWLEMDEVNQVLTTSLWLEMQWFDYKLVWNPAKFNGIKNPAKFNGIKKLYIPSDQIWTPDILLYNNADGADGEPHISIVSDAIVYYTGLVVWKPPSIYKSFCAIEIEYFPFIEIEYFPFDTQECMMKFGGWTYNGFLMNISQIPVTSWTCPPITRTFWHSHEKSLDFERSLEWDLMSVTSRRHEQLYPGCCGQDKYIDITFALDKYIDITFALGLRRKTLFYAVNLVTPCMLIAILTVFVFYIPACEHKMTILTVFVFYIPACEHKMTYSISVLVTLTVFYLILIELIPSVLVTLTVFYLILIELIPPTSMVIPLIGRYLLFTMFLVSFSIAISVVTLNFHRRDGTLHTMPRWIYRVFIRFLPKLLLMTPPVDDDAQSDNDESTSISGPFLPKQRPFPFVSLSTKHSRRGHPSVAKVKGMSAEVLRRMADNVYFVAEYFRAKQQRDKVSENWSYVAMVLDRLLLIVFSTSLFIGTLLILSSSPPAKSEWGEPLSTMPTTKPLSGDTFEFE

SEQ ID NO: 157180 - protein, 81 aa, Heterodera glycines
MDCFRPESPNLPNICSDGNLILDDQLTQHHSSPFKTDAVNIIRESFELAQQMDTPNPITFDCVESETLAEEGIQQRIAVKE

SEQ ID NO: 157181 - protein, 148 aa, Heterodera glycines
MQQKNAKTCRAAEDEPKKAAIGGTGDELDLLSLLIKGDRSKTIGEDGFDLELFDQDDNNNNDGEEQGVNKGKTTTAPQKAKRTPSQPKESSLSKAMKEVFTGNFEFFKISLETPRASKNEPKNSRLRLFKNRDPKNPRLSRVETLEQH

SEQ ID NO: 157182 - protein, 117 aa, Heterodera glycines
MEIDKEIAELEQEISKSINEVAKDLELKYRDFVPSYIGLADCQDKIQMALQNGKENVIKMEEKLTNAEKEIVKLKVCFITWKSIFAANFRKMRHTKSWELSRIWWTVWPSSTKWSSV

SEQ ID NO: 157183 - protein, 38 aa, Heterodera glycines
MRIIILKQQNGKNTIMNKYKVNNMIKWKKDHQNLNGEY

SEQ ID NO: 157184 - protein, 73 aa, Heterodera glycines
MDDAKMNEKCLKTRVERDRDQNTDGQLSTEIPSFHAALHPWAFIETNHFLAPNRQFSYLNNGFLIFCHLDCCW

SEQ ID NO: 157185 - protein, 28 aa, Heterodera glycines
MSLQIFSKRIFEQDKKILQNFFEKSGVP

SEQ ID NO: 157186 - protein, 93 aa, Heterodera glycines
MLLIIRVTTIICFLIPPNLSIEICVRPNTVLNYIGELMCIDKNGMSYYLDKDTPKRSNNDLYSCIRLDMNFTKCDQNDPGATIKISDANTKKG

SEQ ID NO: 157187 - protein, 30 aa, Heterodera glycines
MTFLRAIFGENTDQDQDYGLGIHTDYRLMD

SEQ ID NO: 157188 - protein, 267 aa, Heterodera glycines
MSKECETAKNIGAFGLRRQSERIENQWFSALLTTRQSTRRTVKSLNLDERRSRKRHCTIAVFLCEMSGQQKAEGLFPVDECFGTNIGRPIAELVDENGFGRESREELVSFEEFVRGGDKKRGKKEKDEGEKGTMGVEAAKRQLIVEGFGFRPIDNRRGGEDDDRFFDIALNSGGTVPEDPMSSADRMPKGRGRSELYAVKQHEDDDNGTIHQFNSQNLASLKMVKTNGAVWTIGRAKGTTTQCSQAQRPRRNCVIRCVRPSGKAADG

SEQ ID NO: 157189 - protein, 141 aa, Heterodera glycines
MSTSKKGLRIARLATAKKLDGLRCRVWVFQCDNGKVNDSIFEQSFGLIHFICLSPKLVQGSQFRAGQTPPDRDILRKILVFFKCFAKIFYENITVFAFSEWNFDTAALFVRLIGTHNCPWMAMDIPRIQMFSDSAFVMENF

SEQ ID NO: 157190 - protein, 52 aa, Heterodera glycines
NLTKIFEILQINNKHIDYRTTPTILNLIDSEQSYGSKSLPTTFRPTTFWGAP

SEQ ID NO: 157191 - protein, 44 aa, Heterodera glycines
MINEYEMDEDKMYEACEQLGEMHANYAQYGLKPHFMDLFQQQLL

SEQ ID NO: 157192 - protein, 83 aa, Heterodera glycines
MPFLETTFSLGSPIIQFLIFLCWRNDIATSRRDLFHKTMLKCIQSSPKMNEVIACGYYCYRDLTKWPKLNRIWSERKLMGLIR

SEQ ID NO: 157193 - protein, 79 aa, Heterodera glycines
SSRRKDPMPSCTSAAAPLSLCRHRPFLCHFRAAVSAPLVSASNGCKSDVRNFLLLLNGTQKRPCSAGRSRKWPTFGCPA

SEQ ID NO: 157194 - protein, 72 aa, Heterodera glycines
MIFCIWEFFGHSNHCFLKELPFTLKKMALEKVVPTPLMLTEFDLCMQFKKEISAGHHEDFAVFFSVSIFLSA

SEQ ID NO: 157195 - protein, 536 aa, Heterodera glycines
MWSVAFNRVSSSQKGFMPVDGCAEHNFVLQSIIQDAKRAKKRCSIAWLDLTNAFGSIPHQTIFTALKWSGLSDQSISVVRQLYATNSTQIRHSNGLTPEIPIRAGVKQGCPLSPIIFNLGIEPILRTIGQLRTGYKLQEKRIDVLAYADDLVLVAESPEELQKMLDATSTIATWAGLSFNARKCATLDIDGRRKTALNTKFSIQNAHPPILTIYQFYDHLGVPTGYGSAQSATKILEKMNDHVQKIDASLLTPWQKFDAINTFVLPCIGFHLKNGVVQKNPLNALDKKIRNYGKKWLNLPQRASTEPLYLSHAMGGMGMIPLNLLADISQIVHAYRLITSRDLSSLSMDLIKTVVNKRIRQQPTHQQIAEYLNGSMKGLFRQFESTDISSNWTRVRQATARLNSKLKIEWKWSTNEERLALELNNDPLNPKTAEYCLRAAIRDFFRRRLLSKPDQGKVFSITSATTASNHFMKAGNFTRFADWRFVHRARLDCVPLNATRRFGHGDKHCPPLSRWTIGNPPTCPLPLLATSWKGNH

SEQ ID NO: 157196 - protein, 45 aa, Heterodera glycines
MIRPELGKQSEGLNVLIFKIRPKLDKVNPRDQVYANFSFINILTS

SEQ ID NO: 157197 - protein, 83 aa, Heterodera glycines
MVETVANELALSTSQTHALLNKAIRRLSEYFDSICREALEQQQHNTNDRQQHIATEAEGKLGAKTKSDECPAIKKLKISHFVK

SEQ ID NO: 157198 - protein, 114 aa, Heterodera glycines
MAIKYGPKIAKYGHKMAKMSKYGHKFFKIEYFLTRKFKFIQLKNFSGFGLKKANLAAGGRSNRGFFEKCQNMDIKYGPKCQNMEKYGNMDINREIWKNMENMDIEILPRSFKPS

SEQ ID NO: 157199 - protein, 50 aa, Heterodera glycines
LQIYWLKLHMRYISRFFDSVRRFDKDGFRFAISRSTFGNWSRIFSAITCN

SEQ ID NO: 157200 - protein, 105 aa, Heterodera glycines
MTPPSFYGCANNKNPRKEGKFESENRCFCPEAELYAVECKKVVCNKMNRRNLLIEKCWMAIGFIVRKVLPTNLLLLVAPLYPFFARLVCGHGKLWPYWITNLALV

SEQ ID NO: 157201 - protein, 37 aa, Heterodera glycines
INRAPIFRQKPIFFLSSPWPETHEKHVFFGLLLSYFL

SEQ ID NO: 157202 - protein, 138 aa, Heterodera glycines
MTKIFIENAKMTTKTQIVRVLWDIILHDDEQLDIINRGSFFGHLTNIVVPFVHRSFVRYFPYVSSTDALHQFVGPHSAVMEHMYVALAHGAEFFLNVVVIGLLEHHFRLAQICVASPFAESVAKAPAELFLNGKQNIK

SEQ ID NO: 157203 - protein, 47 aa, Heterodera glycines
KIEFFFQKMIYQKLICKIFKCDSKPILVIFMAFCAYFTFYEEFFSKK

SEQ ID NO: 157204 - protein, 219 aa, Heterodera glycines
ISMFRKPKSKKVGADIRNIRRRADDSEGEENNSGPRRSPSTWADEMDDYQQQQQQPNIGAESQQHGEGQMTTTAARPVKQEVLPSSEWEKPKQGKMEDSQQQQDGKQQPKFREPTGEKTDDNGATVRAAFPATMTDIPDAKAVYEARKKREMMRQGGLPASQDYIPLDDTISLKSGRQSGERARLVREDENDMSDEEEMGRLKRNGIWRIFLLHHFCIF

SEQ ID NO: 157205 - protein, 145 aa, Heterodera glycines
MEQGSSEEDEAMEEGAKSKSRMGETVRGRYNGKAAAGRQHKLVQYNNGNGEDEEEDDDALQRWEREQIRKGVSSHKVMQMQEQLNATSLNYRGRPLNMLDSGEADMDIEVDILAMDQQQNARGANALPPGVKQKRKQKQTNQMTL

SEQ ID NO: 157206 - protein, 107 aa, Heterodera glycines
PLHSRLRLLATKTKDLPHQFECCKYEEPSFGCIHLSSPPLFNVRKSLTTSFLSELRTYDVWRCEDGNECASGCCECELGRHWGQWERRVIGGKGNRLAKWRRIYTKL

SEQ ID NO: 157207 - protein, 133 aa, Heterodera glycines
MNFSYWRAKILSTSIEWAKSFEEIERMDDSDKEAMVVNSAFSILVFSEAFHTPERFTDRIMFPDGLSGFRNFSANIIKERSGLIPTVVAVINNILKVAAFKRETLCTIETFNLMSPHPLTMEISKKYADVSFF

SEQ ID NO: 157208 - protein, 131 aa, Heterodera glycines
MPKAAKSNAVLNRHWISKFPEGTYSTDGKINPGLYKLIDIAKIFIGELGNRARDRINSAGILNRSRDQYHYFGTGPGKDYRCRDFEHQIRIRIWEIFKDVLFSGNPSFTGNLKTILGCGIGANEIVVIPLS

SEQ ID NO: 157209 - protein, 93 aa, Heterodera glycines
MENAEIKSQRKNKKLEHEGCLYVFHLFNADGDLVKRVRHEIELPPPVPLTLQELELPEQYRIYKRTEEAQELFLLADSGTYTENGRDGQQRCV

SEQ ID NO: 157210 - protein, 62 aa, Heterodera glycines
AELNIASLKRFEDMELERRKRHQKPTKRLALDGPRVRELWTRDGKHFITFVPEPPPAEQCFP

SEQ ID NO: 157211 - protein, 28 aa, Heterodera glycines
MTNLIICRRLLPLMFMRSMLNMVKVKAS

SEQ ID NO: 157212 - protein, 172 aa, Heterodera glycines
MDCFQAVLPHIAGFMDGISQKSNAPLEGIKKHSTDDRLVQLVVRGLLYEYALTFCQEQAMEGRNAATHCERHFNDLLSHKEKLSSADLSLISWLEMLGSEQFALPFKQKELFLRVNPHKPRFAFQYSFFNLAVQADAIPPKPVAANRCLRALCRPSVPFPSIRHQVDPTWTV

SEQ ID NO: 157213 - protein, 76 aa, Heterodera glycines
MHVCECNLHRFPQVAAFVRSEMKDQWGGKLKVKQVRGVLPTILLKSGDGQTHKTLSIEKWDTDTMTEFLNGALSLG

SEQ ID NO: 157214 - protein, 47 aa, Heterodera glycines; identical to SEQ ID NO: 127360

SEQ ID NO: 157215 - protein, 159 aa, Heterodera glycines
  unsure (1)..(159): unsure at all Xaa locations
PKSSSIILPGNIQAKRLFEALLFVHSKLASPPTPTGKGQRRGKTGRKANQTSNTHSVHRTASTDPTTSFLTASIILCILRAGITAAAGTRLALSXYSLKGLNCTHSDDRPHKRSXLVISRHYLLALRVVAISQAPSPESNPYPPLPVITMVVRYTTIES

SEQ ID NO: 157216 - protein, 44 aa, Heterodera glycines
MPKLIILAQNFNNSTKTRGNKFTYISHAPLTPIRFLSFGITQPL

SEQ ID NO: 157217 - protein, 425 aa, Heterodera glycines
MSTARPFYKIEEETGKIVKVSHPLFPTSARHFPSLRSKFLAPTKPHQPHKQLAPPALLHNALPADATHALLIPLIVQAPQQQQQQQVAATAGAVEKASFESSTTTTSSSIIMGRERNVEKPQHERSKCECEEEFVPSKISDEEKFGKNCCERKRDLCDKLTRSMNAKNSMEHFLRNFMAKHGNPAGSDLIDDHLVKHPADRDSFDNLMDRLAEISAKLDNWKHTMRAKFNFHDEPLVVSKNQPSSPQPLPLQQQQQQFPMVSFSSYKKNQNANARNSGAKFEHEISANGTMNINNSTLVDQIIPENNTATTVTTTIGAIITTTVMEETTTSTTKPQIEKIISIQERLKNEFATLLGIVEENDRKNANSYEKNAAKQRALPNVQTEEFGAFKNMNDSQVSKLPDEKNVFSRWLKCKDRSKVLSLCL

SEQ ID NO: 157218 - protein, 162 aa, Heterodera glycines
QKAIANMKFMLLLLLLVFCALAHMGDAFGFGGMQMCCPPPCPPPCPPPCGGGGGGGGGCGGGGGGGPPIIINCGGGGQSGGGGCGGRAIHNFSGIPIFKLYLNYLGGCGGGGGGCGGGGGGCGGGGGGCNGGCGGGGGGCNGGGGGCGGCGNSNDCTRRRMH

SEQ ID NO: 157219 - protein, 44 aa, Heterodera glycines
KIRPNFDEIFGEEWDKNENEENAIKIEQKEENSEENGTESIKQT

SEQ ID NO: 157220 - protein, 128 aa, Heterodera glycines; identical to SEQ ID NO: 129962

SEQ ID NO: 157221 - protein, 93 aa, Heterodera glycines
MHSNFRIGEKWDKNETEEKRIEIEKNNTSLSPVDSGEEMGTDPIDQTSKYSNQNVIKTQIQYSNENKIKKMKHKINFYDSFMKELLNMFFSNY

SEQ ID NO: 157222 - protein, 100 aa, Heterodera glycines
MFIVPNLFHEDPIKCWTITMFVAILTVNVSAASNGPVLYVTSTEYRKAFVHEFGLIRRFFCFPNNASSSANQLQANHLPINVVKVTPILSPKTKVVTTAF

SEQ ID NO: 157223 - protein, 207 aa, Heterodera glycines
MDIKYWTQEYWKFLSDLDQLQIPKEIDSDNSIPDYAKLLIKQLHSLLSTASVLIHSQAAAVDAVEEERRLRTVVVTNVPESKSDKATERAREDRAVVDEILNATDVDQAPIVFRVGKRIDGRPRPLKMEFPSKHAARHVIRMRGKVQALNGLHNVRVRESMTKDQLSERRKLIEECGKKRQADNGDWVIYANQVVLRQDIDHIRKNF

SEQ ID NO: 157224 - protein, 179 aa, Heterodera glycines
MALEKAAGVAIAMAVCTVLLCVAGIGFVQREVQSIWAELDTEMDRFKLDTDDLWHDMLAMGAGTAANRQRRNAYGGASYQAAGQQAAVGGYGVLVKTVCSKRGQRGSPGMPGRDGIPGLPGEQGHPGENGKEGGTGVTGEKGIDAEKRIGRKGFRGVPGEHGPEGPLGEPGKPGPVGPK

SEQ ID NO: 157225 - protein, 177 aa, Heterodera glycines
RHAEIDELLEHLESGEDIKESVFIVFGEDIKESVFIVFYNGERLRHIIDKVCEGFKAKQFNQCPKTSADRQTALQQVHTNIHDMRMVMSQTREVMSQTREHRMRVLNEVAANHRKWLKQVRIHKSIYHTLNTFTFDGIGKFFVAECWVPLSDVNDVRMALETGVWINPAGSRPVKNF

SEQ ID NO: 157226 - protein, 128 aa, Heterodera glycines
MGSLYRSEEMRFCQLIVERDAAFSCVAELGKHPFVQFKDVQIRKENQPIVDNTWGEAVDVMSHGEINEVEQKLIDKERDIISMNDSDQQLKKNFLELKEWQYVLSKTDEFFQGGITDAAVQEMRDKLS

SEQ ID NO: 157227 - protein, 170 aa, Heterodera glycines
VERLGRRTLHITGLVGLLLSSAFIAISMLISKSVQWFSYFSILFVLLFVISAAIGPGSIPWFFVNEIFPLNARGNANSIAVLSNWGSNAIVGFFFPMLNSVLDEYVFFVFTALSVLFIAFAAKFMPETKNKSLEDIQAEIDRRRGKMPISRMNNAKAKRAKNGKENCEKV

SEQ ID NO: 157228 - protein, 452 aa, Heterodera glycines
DGTNGFWQPWNASDDYSEIKKRLLRPPNDFSELREIIRKDIERMAQIKEENVKKRKGTTKGKKQMTDEQKEAREEEGQEEDEVSNVHLKVSRGPERRISKKALVTVMPGARWPDGKMLPRMFFVNVPDIGRVEQEIRKAEVDAGLAPEHWSNIQWMQPGPIINGTEFVEMIGGLGASRIRQLFKAAKSRAPCIMHGNDEQEHTLNQLLVEMDGMDTAKGIVVIGSTNRPDMLDKVLHLSRADIANVINEAAIHAATIQKKMVDIDDVDYALQKILAGPEKRSKVLVKEEREIVAYHESGHALVGWLLEHTEALLKVTIIPRTSAALGFAQYSPKDRKLFTREELIDRICMMLGGRAAENVTFGRITTGAQNDLEKVTKQAQAMVKMYGMSDVLGPISFTPEPGVDPQSVQFQPKPYSKKLGNIIDQEVSRLVSDAYFVTEKLLRENRNMLEM

SEQ ID NO: 157229 - protein, 104 aa, Heterodera glycines
MGIFKKSEIFYNFFVHYRLLFVSLANLSIALSQVGNDQRNDLQVDNGTVCNLPFLNHPSMPKSPDRFVSLVLMVVSVFVSHKLFVVAFLGFSSVGVKSMGGLNH

SEQ ID NO: 157230 - protein, 19 aa, Heterodera glycines
MIAVCLLLLIADIILNKYL

SEQ ID NO: 157231 - protein, 157 aa, Heterodera glycines
MPLDKFKTVIQGLGMCEKEVIWKYAKQEDHGRMSLLQKHAPNVHLVEHYDQATVIGNKKTELVISECDIRIVMDALSSGKALLCLPMFAEQFYVSEKLRRMGAAVVLDPRSGSFTPEGISKSIGEALTKRYDVSFPSNESLKQTILNAFKELGLFKN

SEQ ID NO: 157232 - protein, 172 aa, Heterodera glycines
MPPKKKLSEVLPKPVMVTRSATKRETEVPKRQMAIRGAGPPKHPLFPPPAAAASTFSTFTPPTPPPFSTPFHKHVSFLTPSPPPPADDLEYGPAPPPPPATVDLDQIPLPPTPPPATFSVEFWLQPAPPPPAAATVHLDMNPTSSSKAAAADEIEREKKRKKRRGNRWSKTK

SEQ ID NO: 157233 - protein, 257 aa, Heterodera glycines
KLSEVLPKPVMVTRSAAKRATEMPKKQMAIRSGGPPKHPLFPPPVAAAVQLDVGLETPPPPPPPAAAAAASTFTPPTPPPFPTPFHRHFSFLTPSPPPPATVDLDQIPLPPTPPATFSLDFWLPPAPPPPPPAATVHLDMNPTSSSKAAAADEIEREKRGKSGEAIGGAAQRGQESWILSTCNDALEITGEHLEDSAVDAAYDAVYGEPVADHLARKIVMRPKYHDLRRRMVGVNAAPICRQHFAFHTCVTKDQFDK

SEQ ID NO: 157234 - protein, 73 aa, Heterodera glycines
MAKLTAVNSAKGKFCDGYCYHKHKMTKNKTWWKCELYQQGCKGRGFESNVEFFGIRMHNHPPDQILLQIEIEQ

SEQ ID NO: 157235 - protein, 138 aa, Heterodera glycines
MNDKTTTGTEIFGIPNTGTQSSSIPVTWTQISGIPNTGTQSSSILIAGTQPSGIPISGTQPSSILITGTQPCGITITGTQPSGIPSTGTQPQQISSAFFTFECFAILNRWGGLGRFAASLPNIYFYARSFAAVPADFV

SEQ ID NO: 157236 - protein, 197 aa, Heterodera glycines
MDLYFTNVQPFLDFPVVEQEIERERQIKKENRVNFIGGITMPKGVVPKLNGDTKQIFKSANSENENGGVVLLSFGSVVEMNDGEAHAVALKNIVVEVFKQYPQMNMIIKWGKRAPIGTGEQYKKLADNVYAKSWLEQSAILDIRSKTLKNDFADAFNEMLTNYTEYKQKMDELSTKMNAVEPEKEFIEKFRQLRKSI

SEQ ID NO: 157237 - protein, 111 aa, Heterodera glycines; identical to SEQ ID NO: 126899

SEQ ID NO: 157238 - protein, 76 aa, Heterodera glycines
PTNSLLTLAEPRPNMAIVVATLDALRSAASAGGRSLGLSLPMALLLLTLLFWHWHRGRRAHRHTFPPGPTPLPLIG

SEQ ID NO: 157239 - protein, 197 aa, Heterodera glycines
MPGGVEFSIIPASSEQPQQQQQLPFFVRRDTGELIAFAEIDREEQAQYQFRVMAFDPAKNRSAETHVTVHILDVNDNFPQFVEPLPRVIALGRLSPPGTLLARFSAVDMDDGAHGTVRFQISSVAAAATDRVDGDQQHQRHDQQENNEQDDAGPGADGHRLFSMEPDGRLMFRGLPSLLAAEQHHQDGAVQQQQQQQ

SEQ ID NO: 157240 - protein, 37 aa, Heterodera glycines
MDRDGTRDRDSRFKRDSRPGGLSKKTGPGPIFIDVNY

SEQ ID NO: 157241 - protein, 53 aa, Heterodera glycines
MPICRCHHYLYAKKRIRVCSSVEEADLKKREAYISGEHIEKKNDVKILQLLLS

SEQ ID NO: 157242 - protein, 286 aa, Heterodera glycines
MSDNRKEAEEKMAKSIFISGDGWLSVFDLLEPSQLGLGIALISHRFNFYVDEHLKTRKWTFGIIRIGSKIRENGTNEMEIVNCYRNPLPIAQKPVPKKVVGFKAISIEYIDNNSIAFLHRFCPLFASFCPINLAICTTKHRILAFILRNIWPMIAKNICGMFLFENVFSPLHKFVPSFLNECPSLRIVSFIFDDIFAEFPFDDSAITSDGQAVVKWLFTPLQNAVPKVLICTLDMADENLASKIEAFKAAFASASSPVNFIVVICFIPSSFADPVVPFVLTNGIDP

SEQ ID NO: 157243 - protein, 44 aa, Heterodera glycines
MKELNDEIKEREKEEKDDRKLAYKLAKMSLSVTKNHYFGASSLK

SEQ ID NO: 157244 - protein, 361 aa, Heterodera glycines
MRTSSTNLHPLRYESYEVLKKHANDIDNRLHYSLQRLDNFTRLNFLVEVERKGKTKMQEGNEEDAYILYSRAMTIYLMMSESIDDKFKRSCGGQLFYETSQRLCVAFDKVAVSLQQRFMEGQGDEPEFCDPVELRWVEIVEKPIPENLHCSKDSNSSDDQDKIRSLSPANATELVATEKFSTKIKADKENHILHIKDKTDRGIGMIRHAVTNNLATVGQSGTSEFISKLFDSSISSKQNQDLVTQSLHLNEEARNFLELDRLKKSEKMEKPVKVSKENKKGEEKSKEVNNEENEYNEFCKSTTKNIDEPLVHVQFFAEFESSFKSIFYVPETLTTDEFQNQNLAFSSGTMKNSREAKKLAA

SEQ ID NO: 157245 - protein, 120 aa, Heterodera glycines
MQQMLGSTTGGGSGGSGGTTTTAALDLNIAGGAAGLIDATAMPTFHFSHTHGHHQHVSTPAMLSIVEGLKSSNEIRQSEAASELADILLLGNEVGQTDTLIKRRQIFLAIINGVSTKKNV

SEQ ID NO: 157246 - protein, 34 aa, Heterodera glycines
MRFLNIAIFLPFRHCGYKSDFGIGSEADWELKPE

SEQ ID NO: 157247 - protein, 113 aa, Heterodera glycines
MVVPLAMVHAAVAPTPQDAVGARVAKAGTAQVGAALATHGQLQRVLTAQCQNGTLSVHAAGEHTPFFAARVADIYSEKCKMLTARGEKVAAAGEEGEGGEEGLLSRSVGNGWL

SEQ ID NO: 157248 - protein, 27 aa, Heterodera glycines
MPKVNVTNSRHPNHIRNCFSLKKAIIF

SEQ ID NO: 157249 - protein, 61 aa, Heterodera glycines
MCTLRAYDYAKFIVCTFARLRCECHFDGAQCGHHCADQDDGPRVLDDKACPLGVQGVDEAD

SEQ ID NO: 157250 - protein, 213 aa, Heterodera glycines
DPSSSSSTTGSLSLRSVPSSATAHKQPPPLIRFVHSLYTKWACFIVKNAWAVILVCTVVTTLCTVKVALTPQKNDITGYTPYGARSRHELAIQEGFQLQWDMLVANETLNDAIHLNYPISSILGQKFNIQVGDRHIGTRDVSGIQISSASNFVLPPLPQQQQQQIQQQAVPATQQQHSAAAAVCPSPTCAAWKWWCSLIRRNASARGQTTKSR

SEQ ID NO: 157251 - protein, 115 aa, Heterodera glycines
HSDQQHLANCNQFCHFSKEHFFNAQGLGHPFGVFVLLLPRRADDNFLRPQMLAEAARVDELVSTRFPLFNHRTNRTENFAQFCRDFCQLNEPMRRFAVREIKIIKLNLKIKIFFI

SEQ ID NO: 157252 - protein, 114 aa, Heterodera glycines
MSGFGIQDSYRDDPNFLAGIPGPKKCRDSAFEIWTQAGMPFQIFLSGMRDSKMWRFLTHSRNIPGANMPVTDLDVEFLAQNAADWIVEMNGIVQCLIGNQHIPLQLKAFLKCGK

SEQ ID NO: 157253 - protein, 137 aa, Heterodera glycines
MVGNRGPNSTFSRRRDSREKQKYAMSNVFLDLMDLSARLLRPGGRLAFWFPVCRSEYSERILPRMDCMRLVCNCEQTLAKDSSRRLLVYEKLRRPLTDGQTKPSERAFFELDCYAEKTFHQKVFGSIEKNEAKECAD

SEQ ID NO: 157254 - protein, 228 aa, Heterodera glycines
MSQGSLSSAPSSQDQLLVKLGRHQLLHWMISNIPDECDGVQTGDELMPSDSLVARSFSTNAFYKQFEDKMSPSALRFCQIKWDKSCDQTLHRLGLKTPRYWYEWNEQMGPEQKEFPMKPMPFHQYLNMFRNPETVRREVQRKRLEKLVKLKPDEKLEPEYPDINYQANWLKKPLFEHQRLMKENSGEGVWAAMYYDYENPMEQHEMEKYQRKMDERRDEESAEEAIGI

SEQ ID NO: 157255 - protein, 84 aa, Heterodera glycines
MTSADGSNMSEAIMQMVRPAIERMDEQVKNTRKSQLFLANHIDQTSEKLKNLVDEQLLPYDLDAYVRKLDESRKRINGISQKLQ

SEQ ID NO: 157256 - protein, 257 aa, Heterodera glycines
WHLLFLSVPNFLPFSTYIFSSLITPGTIFPLQLGRLFPFRIDDRFPAICLLVKHWAKVKGISDASGGYLNSYSLILMVLHFLQCGYSLILMVLHFLQCGVDPPVLPNLQQLYPDLFSLRRPFTDLVYFEDLPTPLPEIQQNDIQQNDRTVGELLIAFFDYFNRFDFNRFAISVRRGCVFPRTELPPNTERFTELPPNTERFRLFIEEPFDHQNTARCVTNDDQWMIILDTIGKAAKALSPNSKQAPDLLKLGIRIKP

SEQ ID NO: 157257 - protein, 135 aa, Heterodera glycines
PIQLFVSSLDFREAQLTPNGPMRVCNAILINGEGKTVEVSAWRLQADVLASAMRGYLYIFVNCRAKPPRERTNCWFRLNIDAMSSYMVQVQSNPLAHDQNLVPSGANSHHTDEIVEVFFIQIIIIIIMAFKTILD

SEQ ID NO: 157258 - protein, 245 aa, Heterodera glycines
MPLEEADRPDLVLEALIQHLLDRVLTGHPRPLMVGLQLHPPGFDRPYIIRLRPPEQNNAAALAAAIERLNEQSAAGIDLLSGTMVTKVLAVWPLDPIRADPQRGGGCDLNDEHNVSHNVQSIVRVENPDDRLCLARAVLIGLRDSESRMPNGGGLDALRAYVGHQNQHGPEAVSLLRRTVNPHNKDMYTLRDVEQLQRWLNNAHGIGQTRLVVFEKEHNTGSSSRERREPWFLQLEIFCIKCGTV

SEQ ID NO: 157259 - protein, 46 aa, Heterodera glycines
MCMGRRVDSQKQVYAGLLSYAETVTDSGLRHRYEKDGICQLATDLK

SEQ ID NO: 157260 - protein, 44 aa, Heterodera glycines
MNDYLCIALKNKDRNQGFAIYQLPRLNFKISYLQNYMIILKIKK

SEQ ID NO: 157261 - protein, 397 aa, Heterodera glycines
MAIYKKCEFGVLSGEIGQIHTNKKLIIEQSWWKIGFQKTESENCFLSKISLFGTPGSEIIHSPVDDTKNCKYSDGQCQLENGVYLLWEIKKNIKNLFDEKTCVYKKETKINGTYVPGIWMSNDNNRALVFDQNSKRVESCGEKLRVSAQGFAIIEEQFKELMKNEQNSLDKNTRNGIKRFKRWNTAFSSEIENAPLDGEVRASQLAMQLQAGAFYQNKEIKNSFHKLIEMVCKTLDDNIFNGYSHLNPSLFIRQKTGQAFLEGRWISDEILEFWGCSAINFSFVPSLDGKCYEFIPLNFSLDHTEKLLIGFLDPMTMIVKENSEIQTCNEGQFKTLLLNNKLIKINQLTGKYTFIGEPTIYKIDQKIWAFAFAITLFIYGKVVGDKKKKSDREFHRV

SEQ ID NO: 157262 - protein, 99 aa, Heterodera glycines
MPINPTNVIRLLQEHYLNKAPPPTPLTAEEKLLAEDFLKTLEFGAKQGVELEISDELVFDEFSTVHQREDLHIQTKNLTLTLNVKLKVMTVANFSHRQQ

SEQ ID NO: 157263 - protein, 65 aa, Heterodera glycines
MSWQTMEGTERQIRDLLTTCTIVHVSEFGIAADDDRRQCCDSAETELAKAYDAYMQVCCILQVFF

SEQ ID NO: 157264 - protein, 92 aa, Heterodera glycines
RANWALHSTCQLWQQLVDDAKEEARQRSIGADCREIGVLAQSEVVRVLHELHTAMKTYQCTDLGMDWWLSLLLQNMITARKSACQVEMNGTM

SEQ ID NO: 157265 - protein, 26 aa, Heterodera glycines
MDAVKIFGEFFREDKFLCQSIWICAI

SEQ ID NO: 157266 - protein, 108 aa, Heterodera glycines
MANWKGVLIAAFSIRILLLQNFICDAATEKWVVNHNEKGSIIKLKMVLSDLSNAVNNGGTLSLQELRRRRRTAIVVLAPDLAARQRQLWRERHRSSNAIEQQDVIELD

SEQ ID NO: 157267 - protein, 170 aa, Heterodera glycines
MFYFIFTRLIARESEYSYKVLKPLDKFPVLMRRFSSEGLPFTTIDPYTANLYFKLDETSEGPGSPNRLLKFQVLVLLAKSSIPDKARHKVLLCQRLNSKGAKSVMLEDYGVDHFRAVSDPANEYVMIEVGFVRNFADPPFYELGAVCATMKNLLGFLTSYVDSKFPCPLK

SEQ ID NO: 157268 - protein, 170 aa, Heterodera glycines
MFYFIFTRLIARESEYSYKVLKPLDKFPVLMRRFSSEGLPFTTIDPYIANSYFKLDETSEGPGSPNRLLKFQVLVLLDKSSIPDKARHKVLLCQRLNSKGAKSVMLEDYGVDHFRAVSDPANEYVMIEVGFVRNFADPPFYELGAVCATMKNLLGFLTSYVDSKFPCPLK

SEQ ID NO: 157269 - protein, 504 aa, Heterodera glycines
MVRNKQKFLSDIPCSSSALQCNDGLKAPEKSGKVVIEPVQSSGNQKRNETFFKRTKKNDSDMLINLDEIDDFIDISYNTNILSKSYMAERKLKQRKMMSITENRIEEEREANRKRISQKRAQLTEEEVESERKANRISYTLKKIHMINEELEYARESHSQNVEISRKRSKMDYDQLYGIAAKPKKAIFYELGPFKIFCSKCSSLHFPEESLRQNQNDENSFANCCKGGKLLNLDEKIEQYPEELKILFDTEHPYYKNFITNIRRYNSAFACASISCFKFKFPTPGPPCYKIQGQIYHRFNSNAIPLSEHEIPTNGQLYFIDSDEATDIRCGMNEGCNVNIMKYIDAFIRKNNKFAQSYKLMKTVYEQEKEKCQNEGNKIPQIKLLFSLKENCDQRRYNLPHINEVCAIMVCDANDDIPPAKIVVYPKGEKKLKEIYPLDKCVEPMCYPLLYPVSNEGFNYEVKDLNGKKISLCDYTKFLLFIKENGKFMPHFHAKKLFQQWVVD

SEQ ID NO: 157270 - protein, 35 aa, Heterodera glycines
MECQFRAQYPPWLVTVNRGQIGLSNDSKITLFCSF

SEQ ID NO: 157271 - protein, 40 aa, Heterodera glycines
MAEWSKALDSSDDWLARYAGSSSGRMPANLRELLIIGYIN

SEQ ID NO: 157272 - protein, 118 aa, Heterodera glycines
MENYDQKTSQFGDQQHFDADAYVSALAVLSLPVLLDTSLLFYTDLLSLTLLALALSLSDRPFPMFSVFALALFVRQTNIVWLFFSAFPIVWHSLRSFLQGQMSLYQTAIFLVNIHIHG

SEQ ID NO: 157273 - protein, 149 aa, Heterodera glycines
MNNPPCKAIVLLDPEMIMCCRIKLDQLRAVFVAASRNSVRILLHQMITDKLIEVGVKAKPYMTLLDEFVAAGAVERMEPHQCDKSGLVLRELLACSIEMAARERRNHGNPKLRVLFLSAMIGPKSDDATKLGNSQIELVNAGQFVEQFK

SEQ ID NO: 157274 - protein, 72 aa, Heterodera glycines
MSGFRTFIFGIRSNPWPIQAFLNAHSPVSYTKNGWTLLLAVEEGPIWWDKSNWTESERAVRGLSRNYLNETN

SEQ ID NO: 157275 - protein, 85 aa, Heterodera glycines
MPKILFTIIAFVNISQILFATAMYNGEDICGKTKEDCQAALIAFMNGRGNNQNYHPSENGPRKVDNEWCIWVQSYVTSGAPRSKW

SEQ ID NO: 157276 - protein, 317 aa, Heterodera glycines
MDAMEISSQSAVSSGELSFSNGLLPPPPAPPPILDGTDCEASSFIVPPPPPPPPLHEENASFLLQSSSLNQNHFKSSPPSQIMAKVSPPNIQSSPHPNPIRSSENLNTYAFITDQEHFPAVVRQFKRHSRRSKINRGKQFPLRFPKPTKASSRKGNVGERIGPHQKMVATTSTMDTTRPVPLLSLNLTEPTPETALRKTDEMPNNTVGTSVPRQQQTNCVKKVNDNDSQQPKPSREVPIMVDLEFIRNTPPPPIPDIIKRRTTSDNRVAAMRMIPPQILITSQPPKIPPQPLLRMDLPTPPIFLKGRPPPTFRQPNF

SEQ ID NO: 157277 - protein, 300 aa, Heterodera glycines
MISRKSFTQKQIQVTTQKTKKETAETQQQNGNETARKKTDTEGQNDGKRQKKPTSLLKRKTNTTDELEQTNERKQKLMPKGQIEKMVQNQSKTEEKKFNNKPATIEQQTINGVNPLDTILDEIEAFDTANKKKKVESEEDEADNAPCSSRQLPPTPMPGSYRSLNRMELARQDQDHGMVHTFLERNDLMQRILAYKMLKGRVESYSTIRIKIDLDNCTIPDYELSPTEFDMDFPAMPSAATIDDVAVGTKPEVNSSETPEQSALKRGPMTPPGSPGTNLSSAPEAEAKPTGSILPNRNIV

SEQ ID NO: 157278 - protein, 66 aa, Heterodera glycines
MSGYVVSFAYSVENYGPRELCEILIEDVEGMKHDLRAMVNCSKGGGERIVDGIDAKLDRKTAIAED

SEQ ID NO: 157279 - protein, 27 aa, Heterodera glycines
MNNVRTKSLVEHAEAKGIDTNTIILAI

SEQ ID NO: 157280 - protein, 117 aa, Heterodera glycines
MAASDVFEAMFRFDSANATTSTSKPPLDLASSSNPVVVSDVDADVFRAMLGFIYADDLSGMNGDNLFDVLYAAKKYNIAGLVKACAEFPISELGNVFHTLDEARLFGEKVTFSRNTN

SEQ ID NO: 157281 - protein, 65 aa, Heterodera glycines
MDGDGFGSFQKRALDSLEGDDFMGLKKKKALTTADGDGFTDLGKRALDVLDGDDFVGFKKRSEMQ

SEQ ID NO: 157282 - protein, 35 aa, Heterodera glycines
MFYLFWCEHATFDQVGNLDSHPWAKAKSPTLMELS

SEQ ID NO: 157283 - protein, 36 aa, Heterodera glycines
RNVPKFGIAHAFSLGLGPWMAVEIPDLIERGVLTPK

SEQ ID NO: 157284 - protein, 154 aa, Heterodera glycines
RVIAEVDLTISTGGITLSGPRLSVPRFIPFEENGRCRACKGTEAEVDTMVTKEGITLWCTRIEKAQFVPFDVVYELPGHCFFRVKNKARVFSVPYSELSSSDKCVQPLPPPPPPPKPQRTPDDEEEKNLRRKAKVALDLVEAGLMADAMMQDGT

SEQ ID NO: 157285 - protein, 68 aa, Heterodera glycines
MNKQKNAGGWVKNDEPGNFKFADPAAGLVLKILCGTGSRGINPANPAFKICGIPRGIAGFWKIRKNFN

SEQ ID NO: 157286 - protein, 20 aa, Heterodera glycines
MPITLKKRKNGEENSFFKSE

SEQ ID NO: 157287 - protein, 301 aa, Heterodera glycines
IRRIGTFAHKLLHQQFKKGEKAAPAARKVNEFLGADVISPRQAQKWFQQFRAGRNSTTQRHPESSCAELSVGCHKTTTWRWLRKSGRRPMRSKWVAHRPTDQQKQRRLNLCLSNIARHRRGYVLNRLVTCDESYICYDGTAQKIVWRKKEEDPILVPRLNLHQKKRMLCIFWSVHGPLYWELLAPGTILDSNRYINQLRAVDIAYRSGARANTQYISQTLNWNLLPHPPYSPDLAPSDYHLFLSLKNFLRGRRFTEDAEVEEAVGQYLTSKIGTDFFRRGIRKLPSRWRKVVRVQGNYFVE

SEQ ID NO: 157288 - protein, 183 aa, Heterodera glycines
EKLTKTKDDDNSWSSSSLYSSSSSPSASKSSSSEAMEETKKEKSKTKRKKKNGRKRKHKQKTKKESAVEKKEKRGNNDDDDDGSAASSGSSSSSSSSSADSDELDDKKKNKQLAKVKEEQKQGSKGKNKAKRKQKKGEKKGKKDYEDKGEEEESHSSSSSSSSSSEEPKREEKKKRRKRKRSH

SEQ ID NO: 157289 - protein, 174 aa, Heterodera glycines
MSEFKKCDCENKCEILSFVTKRGFFSLPQKISSFSYKNGAAPLHIKIQSPTAGEKVFVGYFTAADGAIRCVAVKLVNRTEAASSLFKNSIRLMDKIYEKFEKEQRKHLVEIIDTGYTTPYMEGIVIMELGDESLRQRLKSGRHPALGANDRDLMSAVEKLAQPLVEFHESPALI

SEQ ID NO: 157290 - protein, 272 aa, Heterodera glycines
MDVNPRNYLYVSENGNLLLKLIDFEGSQLLRNKLDKNECVPIGEHAFTPEYTGPEYYGEHGREISTKFDIWSVGIIVFEILLGHLRAEQGKGPMEEDEQKSMLFAIGNLFLGFTRNNLFRSPGEFKNMPIDYSKREWFEQNTNAMETVLQLWQKFPKTALLVTNMLNVDRKTRLTAKGILNYIKGSCQIGEFREVKSSKDLRIFNSVKFGEFLNKLRIIKLKNKAKCLIEKYRELNGTYKKIKIMVKKVIEEQQMEIEEKKNPEKLDDCETN

SEQ ID NO: 157291 - protein, 150 aa, Heterodera glycines
MASHSDEYEIDEFWLDNIAYDDGEPRPKSKKCEIIAGIDLQSPRQRREWAESRIFRQYYDIILDGNGNLTNYVICKSCVPPAKPVTFNYAGFHNLRRHLENWHGIKFGTNDKYDKMELALVEFCVADGRPFSIIKGEGFKHFMDAYAELM

SEQ ID NO: 157292 - protein, 244 aa, Heterodera glycines
MHVDFDPLGVDWTPMFTCAQNDAIVHSGPADAGHGLNSITTPMGTAEAAAAAHNYLMIGGGHTTYPVFSGLPYQRGAGLGSMFRSFLRFLLPIGRQAGAAIGRQGLESGARVLSNVLDGQNLKESLVSEGRTGLKNLLDKAADTVAKSRQNGGGNFDFKRYRQNAAELKEGIKSGKKGLFSTMGPPTAPAKQHKKELQTLERILRRQQPGSTPRKRSRTVKTPANSDDKKRPRRAPRFDTLGAY

SEQ ID NO: 157293 - protein, 222 aa, Heterodera glycines
MREKLTLQQREYEAQQQLRQHIQEFIDKFRYNAKRASMTGAATRRVRLGRGVPLQRLRQVGQPGAAAGRSGLPLLQGNAVHFPEGLHRFSLRLAHLHCGRKRGRQNDAAQTVAGRPQPHQWHTECQPSAEHWLLHAAPRGPIGLGRLTAGTARPTLSRPWPGGQKSRLAFTCLSLQQPNYLVMDEPTNHLDIETVDALGKALNDFKVRYFTSLKFFNQNLTI

SEQ ID NO: 157294 - protein, 96 aa, Heterodera glycines
MFLKFNSIICAFAFIIRNYGFFVHGGSMGFNSMCESTIYSKQFENLKAQSYTFFIGNYFNGALVTAPNTINGLYSGVNKNGIYCIGNASSKTENLF

SEQ ID NO: 157295 - protein, 134 aa, Heterodera glycines
EHKLCHKDDSSNINEYNPWPLYQFSGTLRPAPQSARRAVPEHIPRPDYALHPEGVSLEERNARNSGQIRVLNEEEQLGMRLAAKLGREVLDEAARAIEPGVTTDEIDRVVHEACIERECYPNPLGYYKFPKSCC

SEQ ID NO: 157296 - protein, 121 aa, Heterodera glycines
MPTVPPPTDTFKKETFEAIIPEKSVNDRPLQLFNPGSAAQLISEISALPSEGRPREPTPFVVATTPSFFRPNQQFQRFGQNSGGLQRIIAFHRSKHVQLAVTRLRLAIAYNGSNFVRQIRG

SEQ ID NO: 157297 - protein, 29 aa, Heterodera glycines
MNRPLWVSDSLSLSPPPTLQSLFPFSLSL

SEQ ID NO: 157298 - protein, 45 aa, Heterodera glycines; identical to SEQ ID NO: 124814

SEQ ID NO: 157299 - protein, 1934 aa, Heterodera glycines
MPSKKKKERAARRGRNDFAAETTPINQMSILAISTPQSCLSTFSQLSSASPIVRPRKRLYNATATPSSNSTLIHTNSCSETPKRNRGRPKKRTRIAGPGRGHRSSSSSCHNTPAPVSNLQALPPNEEMPHTESNSEPLMIEEGPLMSSDGHVAQPELFASRNELLNLWNNQNEMCDDRVIYAYMRYLASINNDKRVAVVAPSYTDPNVHYGPGAIHLELNDHCYNHSVDYDVLLVPVVFPGHFTLMIFDRSNREELRCWFIDSLPPTRNLTADFNNRLNDSRFPGFDQNRIILLNQIICQLTQGLEPSAFEIQILPPNQYTYQLDGINCGFFTILYAESYLMNNRCLFLPNLDINTERKRIISQLAKLLLSDTVEYFPRNTNGQQNLGQRNIFLRGAQIPHQRCSTPIMETHFNSREPSTNSVSSSRRSSRIASHQSSRESSIVDESTTISINQLTRRCHVRHKGIPCADIRANHYQPYYDSGNIGDKICAFCKAKLFNSEATAKHGKTSSAICCNFGKICLPKLSDLPAELYALSTENSAEAKEFRKNQNAYNSLLAFASVSVGYKENSVGGDVCFMLNGMFVRRISSLFSGQMAPNFAQLFVLDPEQALEHRKKNTRYGGDRVNPNTLKKLDAILRQHHPLANQLMNFHQQYQSKLAEGGPDAVHNFRLTLLEARMAPTGIRDPNLHPRQTNLPTEGTLFAVWTESDRPPMERGIWITTEQGQLQQFPPYHPSTDTLCYPLVFPSGDDGYHKKLYKSTLHIEERHNEQREGETILDIDVDVESNYESTNDTESQSDRTSLASHESDGEVRPFRKMSLREYVRYRLAIRVDETYHHIWIVAGGLSQKIVLDYAARIDADVAEYLRRPEFDLRGTMPEHLLRWFARNAGLTSPEEIGSIVLFRKTQPGTLAYFQNKYYDATTIMARIRKPDRACFMLTWTCNPRWPEIKRNFMRADQKMVDRFDILCRVYEDKRRHLHHLLEDKKILGTQIGYGEGREFQKRIGGPHLHRLFQSDILAIPECVENLIWAHIPAEPNAQDQSSWANFIRKVRNLLPKYQFHDCGIHCQNARGRCSKGFPKPFSKFTILFDDKPAVYKRLQPTDGGETLTVKRGLSEITYDNSRVIPYNPFILVLYETHHNLEFAYGKSTNMKYPLKYPLKGPSYSYIRSEHTNKTNIDEPASYARVLYRSPVEAFSRIMSYRYTFMSHTVMALSIHLPGQQKMYLRPGQNAQELAQQILAGQMELPVTPLSAYWQQWRNDPALKNILFENMPEKYYFDKQKKVWKPRIRNAQRKQILGRIYPILPRSHEKFALFILTKHFAGDPEHLKLVNGHQCESFLEAARLRGLIKDSNVWIRTLQEGANYLNPAQMRQLFASILLFGNTEDCLIDALALWNQFLPHMYDIRCSDAERPIRIDQALALLERLLVRQGKTCEDFGLPAPMNSIVNDPTRGVNDFFFPGHLADDDVDETVDTRQFDSARMNPEQEKFFQMVRKIASTRPTTAENRLFFLSGDGGTGKTFLLNYLLYQLRRIGKKVIATASTGMASTRFYAGGTTVHSAFRLGIQVEAGKIPSIPMESYFGRRIIEAEVIIIDEITMLEKTVLENVDLLCRQMVPRFGQLPFAGKVVILSGDWKQSLPVVTEAYGTEPQVAACIQSSPLYQLFTKIRLVQNMRVNSQDIEFIEWLKKVGTGAFGDTVPIPKEWVVYSRDEVVSSVFDQGFLQPANEMLKRLMLATTNRIVDMNNDAILRNINSDYTDYFSDDRPIDANPMALNAADQDVAHLNLLNPAGIPAHHLRLKVGSIIVLLINLNTAKSLCNGTRLIVKKLTDYLIVAEAITGATAQSGIEVAIPKVAATYKDKQPNGVNFERFQFPVRVAFTMTVTKAQGQTCERLGIDFTEEAFAHGQTYTAFSRATSSDSIRVYAPNKPVDADGNVL

SEQ ID NO: 157300 - protein, 99 aa, Heterodera glycines
MMTGRDLINGTAFLRATTSVSYNMRITFYKKTRPIPFELVNERTNEKLTLTKEKECGDEICDFLMKRCPIIEETAALQWENDENLDHLNGVFFRHTIIR

SEQ ID NO: 157301 - protein, 518 aa, Heterodera glycines
MALHFTQWHSITANGTSFLSMALHFTQWHSILASGTLLHSIALHFCQWHFTSLNGTQFQRVALYFTQWHFISVNGTSFHSMALNYSEWHFTSLNDTSFQSVALHFTQWHFISLNGTSFLSMVLHFTQWHFTSLNGTSFLSMALHFTQWHSMSASGTLLHSMALHFCQWHFTSWNGTSLHSMALHFCQWHFTSLNGTSLHSMALHFCQWHFFTQWHSISASGTLLHSMTLHFCQWHFTSWNGTSLHSMALHFTKWHFISLNGTSFHSMALNYSEWHFISLNGTQLQRMALHFTQWHSITANGTSFLSMALHFTQWHSILASGTLLHSIALHFCQWHFTSLNGTQFQRVALYFTQWHFISVNGTSLHGMALHFTQLHFISVNGTSLHSMALHFTQWHFISVNALHFTQWHFISVNGTSFHSMALNYSEWHFTSLNGTSFQSMALHFTQCHFISLNGTSSLSMALHFTQWHSISASGTLLHSMALHFCQWHFTSLNDTSFLSMALHFMEWHFTSLNVTSLH

SEQ ID NO: 157302 - protein, 102 aa, Heterodera glycines
MKGHRPHQTDYLAGPSDRCDTRRAQEGTWFHPSRPQPWIPAQKDQWKANAHAHPTGKKTQYQAGLHGFHGWPPGHKQEKTAHVMSEHLFLQGNKWKNTNAHV

SEQ ID NO: 157303 - protein, 52 aa, Heterodera glycines
NAQKNNVTPSGSEPAPSPLKMMPQNPQSHRDSEVLSMLKVKSDHVFVISVIK

SEQ ID NO: 157304 - protein, 2758 aa, Heterodera glycines
MSELLRISIAPMVVRLKMYIETAQENLGKELADQSVRADLIAERQNLCKTISLLEKYNGKWEAIFLRVKGQALQDEEQNYRDFKPEGKAFMHWVDQARGLVDTIEGALGLSELGDAIPQPNQPAQVVQQAPVVHQRHDVTLPPITLPKFSGEPREWPLFWKLFETSVESLQIEDFKKHIYLLGCLPEKSVARRAIDLYPPSDENYPRVVEILKKRFGDEKTMVESLQAELLHLAKPAESVQSLRQFSESIERICHQLLDYGENEQNKFMASTIKSKLPYHLLTQVVEKEMRAGGAFNCTELRRAITSIVEVKEEVQRCTQVFRGEEKPRNFPPHPNGGRANQGRGTPFRFSQPFRQERQWRPMERNEPVRRMSPQPNRSFSAINKPQTPISDRGSKRLCSLCETKGHAPSRCTKYTTPGARRKRLTDQDRCINCLMMGHNTKNCTSPRRCSHCGERHHFMVCFGEKSREGTSRGQPNNQMKREARKSSQSHLTMSKHAHKSVPSSECSPITTNVMTSVMAKKPHAFLMTRKILVRSKNNRRVWMEVPFLFDPGSQTSYASDPLIERLKPPKVTSEEMEVYGFGGERNGPMRFHSPVYSIQIRRTDGKWEEILLNRTERISTPFKMAEWNSEEFPLKGMDMADAMSFSREEPEILIGARHFWQFFQGKEEVSPGLFVIQTTLGPLVNGESDFGPELPNPGLSMMAIDESNQGQMPTVKEIEYFFNLESLGIKDDPNENDDQTAMSLFNKSIRREKDGRYSVKWPWKEEVPDLPSNYRMAFSRLMSTFGKLRNSPDLMEQYDATIRDQLEKGIIEEARKAPGTLEHYIPHQGVLAKGKKLRVVYDASAHTRGTNSLNACLYRGPVILPDLIGMLMRFRCPRFPLLSDIQAAFLQIALEPEDREVTKFLWVKDVSKPLTPANLITYRFCRVAFGVISSPFILAATLQHHLKGYHSPVANELAQSLYVDNTLLECESAEEALHKYAESKAILKEGLFNLREFVTNSPEVMKAIPEEDRLNKPKVKVLGLIWDTDKDEIVFEFPTHGLEKLATRRLVLSFLASLFDPLGLMGPCIQPLKLFFQTLWEEKKGWDDVLSEKEQIQWASFQENWKDQTLKIPRRAMLQGNPSLELHAFVDASIHTFAAAIYLRAVKDNQISVWLIFSKNRLKPKNASKALTIPRMELMAILIGIRGLKFVADQIRRPISELHLWGDSQIALSWIASKEAQPKFIERRVKEIRTLNECAFHFVRTAENPADIATRGAKPGELKDKSLWWNGPSWLKEDHDQWPKEMEFQIKDPPENLEEGSLDNEEKVFFVNTRTEELIDSPLIDPKRFSSWTKIVQVTLFVLRFLRLKLIQRGNPHQLFESHRKEIAKVSEKGPFSAEDVLLAENLLIRMDQMKKAEDSLSYPSLKDSEGILRLKTRLGRCDQPFGFSHPIILGGQSSIRDLIILKCHQKRHHFGVEGTLTEFLLEYWTPRARTKVKKALKGCLRCKRMQAYQFALPKMPPLPDERVCRQAPFKAIGIDFLGPTETRLAGEKVKAWILLMTCLVTRAVHLEAMLDTTAESFLNVLRRFISRRGKPDLIWSDNATSFKLAQKTIEHLTTPGVDQNTQEFFALNKIKWRFIPQISPWAGGVYERLVQLCKNCFKRTLGRKVLSYDQLITFVAEVEATLNHRPITSVSEGMDEILPLRPVDFLQPEVQIHWDTNGEEFDPSDRNLSSHQKLVALFQATKESHEFFWEMWQKEYLLLLRERGKWDHKSPRLQDKTEPKEGMIVLIHEEFTPRNQWSLGKIIELNGRPGAIRSVQLELPIHGIKSKRYGTMPRKIIITRPVNKIFPLEVGLDNHTENEEKFEESSNGTPQITNEKEISHLEAPMDEKETETLQLVDQPIDQNRHGMITRSKAKMGTVLNCLSILFAMFALVGAYPTNHCNECKLLCFNKGVKAKIPKEINKVELCCAENCYIHENVKKLTYELPKEILLNDFKCEGHFWMDSKHMFKKDILCPAVDECELIECYFCIEQLANPTCYPLISSMLAGGLCLSFISISFVAFSILKVLFSGLYMVIWLIIQFIRPIIYLAGPNRPPKDRRPRATASQNWTSRRVYRTMAFVVLMANSLQNLTGAETIAVMAKSEKCIKNATSMKCIVESSATLTLLPVGQTNTLLLKTEEGVLLGSINVVLKALALECQSFTKAWQRSYAINVLAGKRCPKMGSCEGKYCGEVRHNTSIPELKDANEFPGNSFCLDSTAFWGNKCLLGGSACLFYRWYAQEKSKTVYEIMGCNSWEFIVYAIIRLETLGEKPKSTQVFLYPGRTLKWNNISLTPIGVTFPPAPVLNSDFVFDGNNMALTREPLTIDFNCKSRQEAIDFNCSLGVQACTDCIPDHSSGLVNCNCRSHNLEKLMESPERRLPLNIKNYQLRNTGRKVIALTGFSPVQLNLQIEGLQMALELHQSLCTILPLNISGCYRCSTGAQFRYVCSTNFGNSLAEINCADGTHFSTKCDSNASIYQTILAFDKARIDTKCQTKCLAGSTSFVLSGTLHYVQPEQIEDYSPNHSGKVMDSQSSWHNWNFDWKATLWSLIGLQSSLAFIMIICRTPFSDITNRSSRNEHGGEPRRLAPSGRENIDPEDFLFTEEVDPLTTEEEIPLEHPWNWEQVSELGSDPPGSDSSLEREVSPISADSDWSWTPPRSIWPQGNRERLSSWFPRILGNHWYQRGRRSAEALLRDFLRSGAFLRTNHLSTNRELTIDGLTRGGAERTLIYPGMS

SEQ ID NO: 157305 - protein, 211 aa, Heterodera glycines
CLLGGSACLFYRWYAQEKSKTVYEIMGCNSWEFIVYAIIRLETLGEKPKSTQVFLYPGRTLKWNNISLTPIGVTFPPAPVLNSDFVFDGNNMALTREPLTIDFNCKSRQEAIDFNCSLGVQACTDCIPDHSSGLVNCNCRSHNLEKLMESPERRLPLNIKNYQLRNTGRKVIALTGFSPVQLNLQIEGLQMALELHQSLCTILPLNISGCY

SEQ ID NO: 157306 - protein, 194 aa, Heterodera glycines
VEQRPVCQLICDFEEIFAFEDQELTQTDLVMHHVETGTAPPLRMRVRPVLYAFREKVATMLQDYLDRGLIRPSWSPYASPIVLVPKKDGTIRFCVDYRGLNAITVKDAFPLPNIDNTLMMLGNKKVFSTMDFMSGYWQIKMHPDSVSKSAFTTEFGLYEYLVMPFGMSNAVATFQRFMTRLFDGILNDFVFIYI

SEQ ID NO: 157307 - protein, 57 aa, Heterodera glycines
MAMLMKQFKKGQSAKRLCLRKDMTDFSRKFCKLAVLRNANVGSFYGTTQHESILWRV

SEQ ID NO: 157308 - protein, 48 aa, Heterodera glycines
MHSFLVLTILFANLASNAFGQQWPKATSEETDEATIKVSGGVKDLKSS

SEQ ID NO: 157309 - protein, 34 aa, Heterodera glycines
QKIDSGELAKPEQTQLDKLARRGELERDIEQLNE

SEQ ID NO: 157310 - protein, 123 aa, Heterodera glycines
MSKTSQPQQQRRLSHGGDGTETTPNGGDVRVKTVSGETFIAATQRADGSWRKPRRVKAGYVPQDEQPRFECRAQAELRQRSGGAEDSGAKVPLGWDPVAMVKGTPTKQEQMPSKQQQKQPQQR

SEQ ID NO: 157311 - protein, 301 aa, Heterodera glycines
MFMYFWAFDHAQLGLKLALISPRFNALVDKHFDGKSELALSSHFTIGRMRTRAKLFVKKSNATTETVPFLLHDRLRCTTKFALRTFGLSKSNNQRIINGFPFRHIDHSVSTFLRSNQQIFDKGTNLDLHVSLSKDVQLIWNAFAREIWPIFAPNIRHLNFMYGHDLQNLCRHTTPTILSELDIISIHSHDLLPGLIADDGPNATAAQALSKWLHIPTKDGRLKQLICSGATSKLNALVNNFKEAFPRATTSSASYKIRLETFESTEIGPFELLNERTNEKLVLEKEETNYKYYNIIDLLLK

SEQ ID NO: 157312 - protein, 17 aa, Heterodera glycines
MVDQFPFIMIDLSFISQ

SEQ ID NO: 157313 - protein, 73 aa, Heterodera glycines
MAMVGGTVCPRGRHLWRWWQQILLYGINHWAAACADRGTLLHVFQRRTARKYARKETALKRDPKFIYKLNKAL

SEQ ID NO: 157314 - protein, 39 aa, Heterodera glycines
ASRHSTGASRPFFKCCFALTGASRPFFKFVKLRRALRAR

SEQ ID NO: 157315 - protein, 205 aa, Heterodera glycines
MSLAQDLLSPASMSYSNVEQFSVPLSDECVRSDIGAVNSAISALNPWKSPAEIMAQISSQLSIAQAALLVKMNWECLETNQNRMEATAPEQFDLALFVEALEATVEMDDVGKEVKLRRDKLNEWATKTGGKADKEGDKVEQEEDNAEKGDKVEEMRDKAEKEGDKAEKARNKAEKEAQKDGKETETFRKAEDHGDKEEKKDPGGE

SEQ ID NO: 157316 - protein, 65 aa, Heterodera glycines
MSPEMLTNNNDVFFLIKTIHYDQYLPFPRERESAKGNRKFAILNHMTCVNVNAMEMCAYGEEIMG

SEQ ID NO: 157317 - protein, 218 aa, Heterodera glycines
PHDNRTFEEWYERFGPFVEQEGKPMSEQSKVRLIVSKLGTDVYKRYTESIQPQTPDVNAMAEKAKLDLTKDQIKSLIFITGLGEHNAELRHRCLKLLDGNAKTHSVQIKGTECTPTQLKEELQAQFPNVMIELGVLQKVDYSKWAAPIVAVRKANGKVRLCFDFSTGLNNALEPHHHPLPRPDELFAKLSGAKFFSQIDFKDAYLQICVDEQSRSFWA

SEQ ID NO: 157318 - protein, 121 aa, Heterodera glycines
MDMMDRLGLSDTIRNDLKDNFQTETAKLNGASPKKDKKFFRKDGRGKKQNFFAVGANVIASLGDEPWRAGRVISQKRGLYNVQFSDGTTGEFPAKSVQPYMPDEDENLNFLDGFGLKRSSS

SEQ ID NO: 157319 - protein, 121 aa, Heterodera glycines
MFQNLGGMAGLFGGMANAASQAQPPTSAGATEAGPQPSAPPGQNIPSGFAELLGSLMNLSTTVNSSQPPEERFRAQLEQLTAMGFTDQQANIQALLASFGDLSGAIERLLGGGGQGNADTF

SEQ ID NO: 157320 - protein, 81 aa, Heterodera glycines
MVLLLGLVLVLCHWLWVLLLLHHGEICCDEEDDDDVDHHQQQYYWAEVEDNSSQHVADGCDAGVGRCHMSTVAAAVAGGGG

SEQ ID NO: 157321 - protein, 156 aa, Heterodera glycines
SLGQMHQFLDICALGKSRATAEPSTVVGAIAATSIGEPSTQMTLKTFHFAGVASMNITQGVPRIKEIIIINAVRSISTPIITVALADERDEKLARRVKARIEKTTLGDIIDYVEQVFLPDGLYVLVKLNTRRIREMELEVFYKNKFISSTVKMCGT

SEQ ID NO: 157322 - protein, 133 aa, Heterodera glycines
IIPLGRREWETFRNFKFFYLIMDYYVGGDLLTLLSKFEEEHGHVPEHMAKFYVAEMILAIDSVHRLGYVHRDIKPDNVLLDITGHIKLGDFGSCLRRQPDGTARTTAVGTPDYISPETLRAVEDGRGRYGAEC

SEQ ID NO: 157323 - protein, 63 aa, Heterodera glycines
MPTFGNNAQHRPSTVGAAMALDKLPPSPSARIASSPPCKPKAIDHQLKQQRQHQISAIDDLLG

SEQ ID NO: 157324 - protein, 40 aa, Heterodera glycines
FALILTYYIEKTAILINFTSTFETFSPLFSPLFREFFAPI

SEQ ID NO: 157325 - protein, 134 aa, Heterodera glycines
KADICAPFLADHFYPIHLPCHLIHCVFLPGKSNGRHNTSKVNVQNFHCNQTKIISGHHRNGDTMSDYTKLAAGITENDERLWKINDKKNEGTIQKHFVLCVGYGILLIMIRCKHRRRKKKIKNERQKEEKKEIL

SEQ ID NO: 157326 - protein, 76 aa, Heterodera glycines
MYEAEFETMDTADSPIVSKTMLIPPMEYSCCGLNEEEMEMKWGRHLTRVYRDGEVPITAERAKMICVMKGADQRKK

SEQ ID NO: 157327 - protein, 86 aa, Heterodera glycines
MKVLCEIVAVMLSKSFLDELFEPREMYTRQGLRQHFEQIAHSSVMRLNEASQIPIFAVQRAVRNCTGDNEPFGRDEDNFQGPPGHH

SEQ ID NO: 157328 - protein, 109 aa, Heterodera glycines
MANVSAIKDGLCSGPTNSSPSSSSSADDGMHYSLEGSWSDLFKLDEFGGMLCIKKGLHLEQHGQKIQLKAIAKHNGDNNIRSFNTTFFAYGKKILLRKIFKNTSDFVGS

SEQ ID NO: 157329 - protein, 89 aa, Heterodera glycines
MALILGSVVTSPLPIMCQILLTVQLKLNKLRFLVLDEADKLIFDSIFFKSVLKIKDLMLTHHKMQREFDKSAVSLPPRTLMLSATYGDS

SEQ ID NO: 157330 - protein, 84 aa, Heterodera glycines
MHLTQKLQKIAKPLQPRKYPFVELVPLMGKNHLDTVSERVRGIHPCVEERHNLFACLKKWDYDDMKCTKFSDSLFVCLANFESI

SEQ ID NO: 157331 - protein, 49 aa, Heterodera glycines
MPEGTHLLATVSCAKEFNRCEYSTNFIDDVQGLLSLNSLLIVCSDNFFV

SEQ ID NO: 157332 - protein, 152 aa, Heterodera glycines
MASVQSLGAEAEDLGGDLVANGARMEGTDASKRFAKGRTEETRQSNRTRQEQSIGQSDFHLKAISGQCDFQWQPIGWDDVFQREIARGNSFVTSFGRIDEERAEKPQQSVRGRGGGRGRSANGGRGRRGNGAGRGWSRGASRNFDQGGRTDH

SEQ ID NO: 157333 - protein, 57 aa, Heterodera glycines
MRRIKITVFSDRDFEKTTSYGPEGIFRVDVPGTERLAKESFEFWAKTEKDELAHKTG

SEQ ID NO: 157334 - protein, 80 aa, Heterodera glycines
MGKRAFDRLDASSLGLSGYNAYWPEEEPLNRLAFGQRQFADAETEQEKPTGSKKHRRWSRPLAGTKRRVNGFGLFGQLRL

SEQ ID NO: 157335 - protein, 54 aa, Heterodera glycines
MPIMFTFIIITQLLFVQQFFVVVARNVNGHYPETYSSQNLLFDDGDSMPTEIKT

SEQ ID NO: 157336 - protein, 20 aa, Heterodera glycines
MTITLYGHIHQSIKRDTPKK

SEQ ID NO: 157337 - protein, 147 aa, Heterodera glycines
MPSFFAIFSFSLLFILCHHCSFAAFLITNYPNPLNNASLWKCGISSPGPLCDPDSLLNETARHEALELLKQFQDQTDIDDNGDGSCKGKGVIVGLALTKQPIIARVLIFNLMTKLPWKSILIQSSDLFGPFRFITPLHCRTKSKSIF

SEQ ID NO: 157338 - protein, 39 aa, Heterodera glycines
MKPKPIYDRLIELLFILKHIFMLISRVIFYLHVLDLRFV

SEQ ID NO: 157339 - protein, 49 aa, Heterodera glycines
MGVHGMRQLFNPAPTPPVLYVFRGPARNGVAIFNPTIPPPPPVLRAPGT

SEQ ID NO: 157340 - protein, 206 aa, Heterodera glycines
MSVNLYCKGITDPVVIPIRPKEQISADTILNEFIKLQQSYSEINLLDQEISVIFTTYSTPAGSGRKSNKLMEKNDLSRIRISNADNFCLFYALELTRHYQLINNGITYKKYLCVINNQKKQKTIVRDLMNEADINQKEKSYGLDHIKIIQNFWDQKYSKLYRIVAFDYKCGLKPIFKAEGGRRFEVAVLLQNGHWCGLKRIRRFFN

SEQ ID NO: 157341 - protein, 67 aa, Heterodera glycines
MPIRFPKGFRSLAKWTSERFFSKIRPSLSPLPFSHQTFVLPPNFDGNLLYNIFVWHSLEMFKKKKPF

SEQ ID NO: 157342 - protein, 102 aa, Heterodera glycines
LNPGFDKRSFDSFTGPGFTGLDKRAAFDTGFTNYDKRAFDSFTGPGFTGLDKRFEPFDGYGFNGFEKRSFDSFMGPGFTGMDKKKRAFDSFTGPGFTGMDRK

SEQ ID NO: 157343 - protein, 304 aa, Heterodera glycines
MGSAHFLGPILLVAFAALILGQRSSPNHSSGSPSQREKSHGLSQQGKGHGAKEAPGQQIKNKDNSMPTIKKGTSTKSQKKGKGRHAKNNDGIGTLGKSKRQKRFLTEIFGNSLDKSKNNAEESERKREGFGIVPEKVKGKAEKTNERAAEKAGEKNGNGGRQKRFDERILGNNSFEPPVLNLGPNWPPPQYRHISFSDASNKRGQQKDEAEKRNKRSTSQENEAEKRKKRSISQENEAEKRKKRSISQEDEAEKRKKRSISQEDEAEKRKKQSISQEDEAEKRKKRNIAATGKSGRPRGPILPE

SEQ ID NO: 157344 - protein, 234 aa, Heterodera glycines
MARLLLRLFGLAFVFAVLAFGTAQPPPPFQGSGGHYGNGNGYGNGNGYGNGGFGGGGAEGGQGMDIDVDVQQSSEEGKRRRKRHSGFGQLIDKIKNFVGGKESMERGSMYGSPYQSNSAYGNNQQFGYPNNQQNQFGYSNDQQNSNYQMRYQQQQGFNPQLLQQNSNDPNDFYQQQQQYNSNQQYGANLAQQYDPNQQQQQQRMMMAMMGQQQQQQPFQQMMAPQQQQQNYGMY

SEQ ID NO: 157345 - protein, 70 aa, Heterodera glycines
MIKKSAVIPSLLLCAILVAQFIEQVNFLVSKWNMTEGELTNPDKRHWFTEIDVNRNEKLEPEEIDEAMTK

SEQ ID NO: 157346 - protein, 55 aa, Heterodera glycines
MGNVQSYSTAECNFNCDPEAAHIVLKEMQCPVTIVPWETFMAKSDRKEIKCICKK

SEQ ID NO: 157347 - protein, 78 aa, Heterodera glycines
MSVFTFFPSDPSLEKLYQQLVVDQDLDGWQNVRGPRDEEDNAEFEVVKARRKAEMDAKREQNISSREWEFPGLGKMEI

SEQ ID NO: 157348 - protein, 373 aa, Heterodera glycines
SLFSSLSLFRLFYFNAKVHLRSIANWASAVAIWCVIAVCTDCVIAVCTDRLIGIRNPLFARGHVPRRKMALLMGFILAVPALLTAHQHFSHKCLIRAFCNGTQIHSICLPVTQEEWPKKANPYSVAFRRFIVSPPVTQEEWPKKANPYSVAFRRFIVSPPRERTWQIVIFPIILLTVLNVLLLCALRRRQRELAIKSTSSEGLSQQMVHSKTEQRVTWTVTLIVSMFTFTNGPSIVSMFTFTNGPSAVINLILILINYHHKLAYLLSTLVILGKVSNFILFCLSSKHFRRRLFALAQKRANGRLGESPAGIPSLNSPSSACSASFPNRHRSSYTAMDNTTRRGTPKMFNERLRGRAYRFENACANGTLRKGDV

SEQ ID NO: 157349 - protein, 58 aa, Heterodera glycines
MERMVTFPSTCVATYRLEERPMRLVRNCNLVDQKIRLYRDQVEKEINFICFSANSEKW

SEQ ID NO: 157350 - protein, 33 aa, Heterodera glycines
SVVVLTQSWGAIIHRRIKVQTIGKLFRKDSVSP

SEQ ID NO: 157351 - protein, 61 aa, Heterodera glycines
MVDQFLEEIYQEICQENEQKKCQEINGTDNWPTQEDNPPTEDSVPHVPKLIHGSAIPKPMD

SEQ ID NO: 157352 - protein, 315 aa, Heterodera glycines
HAQNHPAPCKESTSTNAGPFFGKEYVIIVDAFSKYPEVFEMATKSTAATIEKLRYLFSRHGIPEILVSDNGTQFTSNEFAKFMAINGVNHLFSAPYNPMSNGQAERFVDTFKRTFRKLKGEGAPSKEIIETFLVSYRTTPNDSLPNSKTPAEMFLGRKPRTTLDLLRPPPAQPIERDVEMARRFNKRFGTKLREFSIGNKVFARHRISQNWQQGKISKRTGVIYDVTFADGKSGRYHANQLRPRNTSDSDEQLSVMLEVFDIPRPVAVEEQRAIPVEMPLEDPLGEQENLGGQIDQGQQRRYPQRNRRPPQRFSP

SEQ ID NO: 157353 - protein, 106 aa, Heterodera glycines
MSSWYPILKIKDIGNASSKPNVPVIPLAQIVRWDWDTNGAQQINRCVRPLAVVRFPGDQSHAQRGDEGEAAANDHFGRIGRGHGPIHGVFGGHQLSVNERNFSAKP

SEQ ID NO: 157354 - protein, 75 aa, Heterodera glycines
MTARQKWMANATETERGMEENVTKIVENEKDWHYWLGIGGRMPLIRGREAAELIEHVKSFRMIPRLLVWMPKKKA

SEQ ID NO: 157355 - protein, 165 aa, Heterodera glycines
CAEQCLFGFQKIYKQLFPQGDPIDFSNVVFKTYDDDQDGAIEFDQFVHGLLITGRGTLEQKLAWVFRLYDQDKDGAITRQETECLIRHIYKLSGDDSETADTKMVPNRVAMIWTKLNKESDAKINSAEFVENESDAKINSAEFVENVKTDKAIVNVLSLYEGLGK

SEQ ID NO: 157356 - protein, 362 aa, Heterodera glycines
KIKIANSINFYCSSFPFVLFPVSPLFSFLSGFASFPSHPFRFCPSLSLSPSLSLPFLSLSLFLLFHLLKERSFAEARARFYTTEVTRALAYLNAKDIIYRDLDLKPENLLLDRNGHVVLTDFGLCKEHVKMRQTTSTFCGTPEYLAPEVIQKKPYDRTVDWWCLGCVLAPEVIQKKPYDRTVDWWCLGCVLFEMLFGLPPFYSKNQNEMYHKTLPPFYSKNQNEMYHKTLTQPLCVPSSASTLVRKLLVEILHKDRSERLGAKSDFEEIEIRSHPFFAPIDWEKLLNKEVKAPFVPKVRAETDTLNIAREFTDIEPNPASLVPLQTFVRETEFAGSLVPLQTFVRETEFAGFTYNQKPNLHI

SEQ ID NO: 157357 - protein, 58 aa, Heterodera glycines
MSYSWSATLKTPETCFKNCHAFVTGEHSLDDLALHYTLSPVELQRLLAENGNFRFIAR

SEQ ID NO: 157358 - protein, 99 aa, Heterodera glycines
MGSDSPAARNYAYTYIINQRLKLPKIEVIPLPPADQIHPADLNAMNVLLQNLYIEVKTELGKCRMLWKGMRLKNRLIIKKTMSGTEVTAVIGNIRRPKG

SEQ ID NO: 157359 - protein, 15 aa, Heterodera glycines
MFLIKTDVIFMVSDP

SEQ ID NO: 157360 - protein, 215 aa, Heterodera glycines
MGSDSPAARNYAYTYIINQRLKLPKIEVIPLPPADQIHPADLNAMNVLLQNLYIEVKTELGKCRILWKGMRLKNRLIIKKTMSGTEQRTVTYNGQSKIRLKTLMEDLFKHDKLKYLSFDRRRRTRRNSLCHKNTCKKNTAGREVKRNVPLSEVLSLGIVRQAPLPNLRHPQLCLKFLKNGASSGFFVDFLAYYGTFSRSSIKNSEVKKAHILSEF

SEQ ID NO: 157361 - protein, 316 aa, Heterodera glycines
MMKINFVIIVFFFLIILIDAVNEALFDDLWDNLKPPTSKNFKKQKFGENIAINEEIVDKNENYEQQNANKKMIKYENCNEKEMEDTKPKILQKTLEEQNDNLMSKIKVPKIEFDKLSEDSFENKFNKLTTSNDSDYNNMAERRNEMETLNRFNMMKKELRKENFYKNLTNFLFECEIAKKLGTNRTKICKLKRKLKQERKRAEESEEIKMELIRKFDQMRKEKIYGFNYAEKKRSKIEIAIGNELGISRNKIYKWKREFRKIRNYTNAEKLEYVKTSEEMRKRNSMMSEAKIAEKLGIPITNLRRWTKELGTKLNS

SEQ ID NO: 157362 - protein, 119 aa, Heterodera glycines
MDENRITTTSGKSVNKQQKLIRQGMGFLLQQNTASEEITSKEQIVSLPNKNLIHSAVVEKRENKELPNDSSFFANLKPAQVISNCFNEGTTPDFGLHIHRFIGENNYVRSCRWSDLLKG

SEQ ID NO: 157363 - protein, 95 aa, Heterodera glycines
MSKKKAIVEKELAPKRERRNAFILFGFAVKQQTQLNGTFQYENGTFAYEGDGELWTDGKQKGANAQHSYGNGDTVGIGVNSATRQIIFTKNGLRL

SEQ ID NO: 157364 - protein, 589 aa, Heterodera glycines
MQEQNPENDTEIINQLLTESEEINENEENEESTEDFEESENSADFFEADRKKRTTVTTPDARWLKKIGKSKSRKGGQENKNLNTRVNYALYKLNEERKRQYDHIFTQACLNSNFQLQLAKAILQINPNEGVRKIFNRDDLVARWNGEEMEVGFCVPIIPEKVIWDKRIGEECYEWTPIFAENTTFFIKPGTRELSILGKTIECESLQNENIFNATQKEIIDKLTKNLENLRPKYRNMQNPLILKAGTLFESDNVRIEDAMLEYRKKINNLPSSTLRIVHKTNVSEVIRLIKEEANETLSAILGKTGNWIDIMKNIPKKAQEAVNYLKGLSILLIIIPLILLIAIIIFILTKYWTIISGGFRAGTLAARVVRRIIGMKKRGTRVAAVPTAPERESIDQEAYLLEYLPPRRVAIITNDPRRLPSIRVHINGLHTSALVDSCASVSYCRETTAKKAGLQIQELDGGNPNLTAANDSFIQILGKAQGKIRIYDNSTGKFGEWSVTLLVSPDKHCPGPLLLGLPILTELKGIIAFGEKKVRLDEIWTNIISVIEVEMPKSTKVIMGKTEIIEPRTENIISAHVKEHFPKEQNFL

SEQ ID NO: 157365 - protein, 179 aa, Heterodera glycines
LFFCQECPQDAVILRDIHRTFPAHEYYKESNEVGQKSLYRISKAYSLYDEEVGYCQGLSFLAASLLLHMPEERAFCVLVRIMFDYGLRELFKTGFDALHLRFHQLQRLVEDYVHDLFSHFYQMGIETHMYASQWFLTLFTAKFPLQMVFFIVDLFLTEGINTIFHISLALLQDSKKVII

SEQ ID NO: 157366 - protein, 28 aa, Heterodera glycines
VGMDSDEVTKELNELHMLISGEEEKFRN

SEQ ID NO: 157367 - protein, 391 aa, Heterodera glycines
MPKALRMDTHKTQFQFRTNSENAIAELRRIIFRKLLADPKLAEDEQDIGQSAQNGSEIGQHIINKAKVVKMEALESDRIGTAGGIWVSILKSIDKWWPSECEQREEAQSVVETQRIYMTKGNRELYSDFMIVWGQLATLRGGPTRLHKFLCMNEAEIEFEIANNERYTDPGVFRSADLLQKHYLDAFTTISPEPRQALKLATDIFCWVLWLENDVLKLWDDKKKEKGKVMPRFTMAWKQNRWYYEMVYDQMFDIEEANGKVEVPKKKRQIGILLQMSKHLVEQKLKMPDEKLRVELRNKKLERLKKGRQYGTASPPPNGTVDREWHEIRRKSEEGKEDEKQSSAIEEWLKQRHFATIKGFLCNSEKFNREFEQSALLIMPFIASFCHKYGY

SEQ ID NO: 157368 - protein, 207 aa, Heterodera glycines
MNLWHLLFIIFFFIFLIKSGKIQPNFEEIFGQRWDKNESEEIVIIKIEQNDQNEQNETTGIDQIGGENGTDPNDQQKRQIILKFEAIKEKLKEKIIYKRKDYGKIERKIAKLLGANRQLIQKWKNELNLNKNKIKKEFMRRKSANSLNDLMNLKNYMAKANRKNLRRNWAFVKETFRKWKKELLPKYNKTLIKPSNYDKLKKDEAIF

SEQ ID NO: 157369 - protein, 104 aa, Heterodera glycines
MRRKSAKFIEQFDEFKELYGQGKQKEFAKELGISERTFWKWKKELVPKYHKSQKQYTNEAKLRKMRKYYEIKEKNQKLSDVLIARKLEIGSSTLKNLKTNLLQH

SEQ ID NO: 157370 - protein, 207 aa, Heterodera glycines
MHKKFDTFEEAKHYLEKYYEGKADEKKSPRKSRTSTDAKMKEEKSKQTTDEETDEATAEKERDEQTKGEDETGAKPVARKRTYGTKLNDEHDGDEETKLGSSEGHKALREEDIPRGEENADAEMREGDEANRTEGQPKKEGDSMESEATADNDDEQQIAKEAAKAEEKMEQGGEEEAQKKAETTEDEGVAKKAKLDDSDSTEKSSQK

SEQ ID NO: 157371 - protein, 27 aa, Heterodera glycines
MPTTRPRATAKNFVKESSTDTENEVSE

SEQ ID NO: 157372 - protein, 54 aa, Heterodera glycines
KYPFILSLKMSDHQPKAPSTPSVFYAVAWGHQRGVFGSYQEAQAATKGFPSPTM

SEQ ID NO: 157373 - protein, 158 aa, Heterodera glycines
MDKLNLEESVQEIGRRTELAKVPNWRCLIRPKFASVAFASPSLYPLDECPQTLQRPVANARQKVTALEQKAKRDALLCQKARHIAEAGGGHFHLPLGVADSCVEAAGHEDKSGTPLVDDWKDNAVEESGVFGVPTTDGIQWHIYGVRIFRKNIAVGLT

SEQ ID NO: 157374 - protein, 359 aa, Heterodera glycines
KGAKCSYPFPSILFSEAPNAFVAIRPPGHHASQNDPCGFCLLNNVAICARKARSLGVERVLIVDWDVHAAQGTQYCVEGDPEGILLLSIHRFERGTFWPELPESAIVHQYPNTINVPLNSVGCGDPNTINVPLNSVGCGDAEYAAFFHCIVLPIIHQWRPGLVLVSCGFDAGIGDPQGQMEVSPAGFGYMTGLLAQQGVPLCLLLEGGYFLPSVCHGALQSLRALLPNSICPSSQMAILRALASNSERFEGKKKVAANRRKKGEQYESKGFHLTETDQVPQSEYFGQRQKPLAVPQPTRGQYPPREKEEERKFELRIQTMLNKYENRESEEARKRGGRERRIERVPDSERGRKIEGRGG

SEQ ID NO: 157375 - protein, 98 aa, Heterodera glycines
MGQNLEKSNLYQMVKIGKDLYEGFAKLGEMKEQVDEISDHAKGRQQNLDRIDFHEKLKMGGKGERFKEETRESSKMGLTICTADRKDFVNAPYLCQCL

SEQ ID NO: 157376 - protein, 59 aa, Heterodera glycines
MKPSGRKFAPCPSEISWIFDGFQVFFPITFVSVYGLIPSADHLALERACHLDQQEGISK

SEQ ID NO: 157377 - protein, 68 aa, Heterodera glycines
MGEKFSEEEVDEIIKEFDKDGDEQIDYEEFVNAVAPIVNDGAKEDAPWVQEASSTALPTVNGNGTKKQ

SEQ ID NO: 157378 - protein, 15 aa, Heterodera glycines
MPKKSWQKECGALTR

SEQ ID NO: 157379 - protein, 40 aa, Heterodera glycines
MLSPIRVPFSEHHSTNCKVGQPCGGKMPMLFGGKQNANAE

SEQ ID NO: 157380 - protein, 239 aa, Heterodera glycines
MEIEKKTGEKAPKFIQSRANPRIVPTRVFENFGDSSENRPGVGPAPTHCTEAWQFPCDDGIHCIARYDECDGIEQCPDASDEKHCQANERASMSQERGRHYTQQQQHGREDNQQHKQQQAQKQQQQQQTKSAVPKIFGIPYSLLMHWLRYYRSFQDRHFFKDKRRGRGQARAAGTVAGGCCCLRARLGARARGDEGDAAAPVGAAARPPAGANRRGAGFRKGESLVDEEDDLLIAQMYG

SEQ ID NO: 157381 - protein, 92 aa, Heterodera glycines
LSFFIFNFSFFVFLVPFSASFSISVHSFSKRAMFSPSGSSELNEHHQDLKVYITTVTGNSEVNIFKAAIIQQSVPSVNPKMPKKLGKNVLLE

SEQ ID NO: 157382 - protein, 27 aa, Heterodera glycines
MPHKGTTRTICAYFLCLKNFKKFTVIP

SEQ ID NO: 157383 - protein, 308 aa, Heterodera glycines
MLGNIALSLFVKTVFVISYFNRTCIQGPFQPHFDLLVMGQKFLDSVTQIMVNGIQRGNFDEELTTKFDNESFLGILCFNANFECEMNDNFGKFLSNFCHEFKTGKNLEEAIETVKNSLIILARSITIEQIITKESIFQKIAKNEFFGAKNAENIAKFFEHANSAFRLNLSAQLHHFNNLMSASENVPSTKKRIRRMIRRGFSRAMDQFQNSLDNSRYRLRNDRKKCAFFLALSVVLLVGIVFTMANLAKISANASHGQWAFFILFFTIIVTYFIMHTVSFVLLCVQNPHHQQEEQPEQQGQELGEIGN

SEQ ID NO: 157384 - protein, 31 aa, Heterodera glycines
MAQYVVMPVDGKQWNGLADHGTIIFKDGEGK

SEQ ID NO: 157385 - protein, 76 aa, Heterodera glycines
MDIVHPYQAWGERGTSLLWLRAGAAGPQTYRTHKTDHPFRSIKFQPYTNRPTDQSTVCQYHHSNTSYHKSSFSVCQ

SEQ ID NO: 157386 - protein, 213 aa, Heterodera glycines
MIDKYEKLMEKLIDQIYDNYEKLNVPVYSLHTEVTSFKPVAKPIAGNELFKYVPYKDASRVEHVGYRVNHVLLYYYPDVVHFVLHAMMDVAGISSAVRLQRSFAYFYRRVLDNTKLRDKREQLVHAMKQTAGGPKMSAEKRERVADALVLFAAAFICAGKIEADQCEVVHRNEAGNKLKAIIGESESIELEKHVKVFVHQFIVSYNELIAEEE

SEQ ID NO: 157387 - protein, 93 aa, Heterodera glycines
MLIFAGIRFSVKQTASQWTMQNENGKALLFFYVCLCRKLVGFLGMPYAENAKFGKEINELSSFINNFPFVIMQELKKKIGKIENAEKDEFERK

SEQ ID NO: 157388 - protein, 126 aa, Heterodera glycines
MARIIGRTNRRRAFIVSVEAAFALKSSYYEITIIFCFLTPNEFMKRPWCWYISGMGNVQKKKIRKQEIGSRYGTQTAEKFFGIANRNSNGPKILAIGNRRNSELRNVENRHFLPSLYIWHNKITYL

SEQ ID NO: 157389 - protein, 240 aa, Heterodera glycines
MESFCCVCKAIYGGSHSCYVCKLPCHTFCGDSGGVENERFGGKVVCNFANEEGNAPIAEGSENDDYEPQNKENEGTPAKEKRRHRNNDAAKKLEAVEWARKNSINAAAKKFKMYRKTIRDCIAHEDKLRKQIMSPNGGKRMRLDGAGRPVHRPDIDTELAEWVTKKRKNKQPVSRNIIRQRAAALFTDTDTKASLGWLQKFLRRHNFVLRKKTSVCQKPPSNYAEAVAKFISFVAKGARR

SEQ ID NO: 157390 - protein, 629 aa, Heterodera glycines
MYEMKIRAQKKRNPNIIFRDSFNLMPCALGQLVPAYGLDVEEKPFFPHMANRPDNYGREIFPTPDDYLAQGMMPEKRRQFDDWYQQHREEPFVLDEALASYCSNDVEILMAALVAFRREFIEISRRQEYVDGVDDRENHDGIDVLRECMTIASACMKHFRTNHLPAEHLAIVPERGYDNAQNQSLLAIRFFKRYEERHGVQLQAAHSAGGERKVGNYSLDAWVEAEQRAIEVNGCVWHGCQKCFPDDNMLLPNGKSAGEVRERDAKRLEFLRNQIGRVDVYWECEIERMLAGDREMRQMFKKYVDYGPLEIRAAFMGGRTGPLKLFRKARDGEKISYYDFTSLYPFINFTTRYPIGHPRVHVLNEEVEWTTSADNPYDLSLLKVWVIPPRNCDVPVLPVRVGERLCFPLCMKCASDHPTGGVNENYHCTHNDSQRGWVSTCTSLELNAALDEGYRVTKLFRVLEYQSSDDQLFKSYIAEFMALKIQASGFDTSIKGNPELEEAFVRECYEKFGITIDPTKMEPNKGKRSIAKLCLNNLWGRFSLRNFGLSQTLITDDPVVLAEYLDNRSLEVTAIDEFDAEHILISYEKKKEWVEEHAWSNIGIIIYEHKYKNNLVISLWTTSGARLDY

SEQ ID NO: 157391 - protein, 63 aa, Heterodera glycines
MPGKLIVGDGDADKPTGKWRRFGGRGNGFSMGLATKDEHDQSEKPSQNIFCNYTPLDTLQIVL

SEQ ID NO: 157392 - protein, 44 aa, Heterodera glycines
MCPNQMSVPSQNSFKTFSRKQNGMIQTDQASGPFLIIQNGLICH

SEQ ID NO: 157393 - protein, 102 aa, Heterodera glycines
MSKQPTKTFHYPEWVLTKSLLRPTSRAATARECARKRKRKDTSLTLTKVWTESRDKKSTFLTTPTKELSEEEPSSVTREMLSDNLADEDFGREETQLAPHAK

SEQ ID NO: 157394 - protein, 542 aa, Heterodera glycines
EQSLLLNGGLAIYENYIICSASNSEFPDGEKERIYVFHAEKQLDLYEANSIQTNRILQMALNRSHLLTFDVNSLIAIYSLSLSLENDQSADSLSLECLAEIRIAEFLPHPNCLVSMDLTRLNFYSDAVPFCDDLDSLLVNISGHLLLLSPMQSQQPNEDGHSGKTQGENSVNDDYLACGASCVSSLPKSSSAKLSDNISLVTDDGSSSLSSFVGVVKNVDFLSRLSVHTLVRVSEVFIHKLLKQLLKRNLGAFAFDLATACRSLPYFGHILELLLHDLLDEEATSSEPIPDPLLPTAVAFLREFPAEYLRTIVFCARKTEPAFWSLLFSDIICFMHKISHAVDQEIGVSSEDSLLEGGGQKDHYSRSKVEKLIDEAFREKIQVFLDNSHYDWELEQSSGVASEYITDLITFLNTTFVSFANLPPVLARHVRMQTCKFLADRMSSMLLSSEHRSVSIGALEQFSLDVMQCELFTAQRPVPGFEDNALAITFAHLRQLLDLVMGPDWTTFFAERDEGNSHRKGGSSGTKYARVKASSAAALMEK

SEQ ID NO: 157395 - protein, 39 aa, Heterodera glycines
FGERNGKSISDFGKCPKCRHFWGILCARANPRQIQCLTH

SEQ ID NO: 157396 - protein, 37 aa, Heterodera glycines
MDRCLWGRLHLAAAARLFVCSAQPDAESGNTNQEEGP

SEQ ID NO: 157397 - protein, 288 aa, Heterodera glycines
FHKGDPLIREIPLRHDAGCKVWQKMGGEHGIEWSNFVVGKALVGHNANECGGLPLCEGIKSEGLSCGQDMPCEGRKSDLSDRNAQGDSGSGMEWKRRRTVGIGTAPPRQNATRQRAKIEPQLPPAAALSSAPFSRSASDQLTNVHLVGNGSKANGSLTQRIVTMPITEKRVPLRMKRRKSKIHSRNVLRTPLIIPELELMKKWRNSRRNDEKPSRELPSQGEDEAVKLLLLNDIGQSAEERREEVIGRTDRSEVITELIGVTSREKVVDDSPHLSVGPIHSDCALCEE

SEQ ID NO: 157398 - protein, 92 aa, Heterodera glycines
PAIGGNPRIPRPPPVRGGRGENGRNAVSGSNRSGGRLGASKKHRRRGPDGRTEENCVMMGDDERGGLDDDDDDDDDDEEKLRLSLPSNLISV

SEQ ID NO: 157399 - protein, 350 aa, Heterodera glycines
MPVKLESLKATFNLDCEDKPFFPYYYNKKENYGIRLEHLPPMEDYSPGSMNKDKFIKFEKWYNENKGAPFYLDDELKNYCRNDTEILLLSIIEFRRILINDITKGFDPLPRSCTNAGVAMNIFKAMFLLTEQLSIVPEKGYERCDRASVMAIKYLEWRSQRDGIEIRHAGNGREVKVGKYKLDGFIANNGARDKCIEVMGCYIHGCLNCYDPAAELIGGRTAQELNDETQERLAELQKTLDVEEVWGCQIEKELKKDEEMRGFFDDRGNEKGPIDPRMAYAGGRTGPMKLFAKSDEKKKISVYDIVSLYPSVNYGTAYPIGLPEIIIPKSDEINVNWTRPEDLKFNGLYK

SEQ ID NO: 157400 - protein, 15 aa, Heterodera glycines
MNFGSRAICQVMEEK

SEQ ID NO: 157401 - protein, 49 aa, Heterodera glycines
VEVNSVWPTPSQQCSKSYNFFLCWPNFTIMVSLESPRCLEDIYKLFLSD

SEQ ID NO: 157402 - protein, 222 aa, Heterodera glycines
MDLNNGFYDREEDKVKLTIDLTTVDEPKVDKFNLDQSNSKGTLFMEIEKVSEFAREIFKSERKSETVHIKGLPWKIWAQIEKKDESTDKNEKWFAIFLLCDAPKEAETWSCKCSANFRIVSLKSGVADFRRKLDDHVFDNKENNRGYNYISFAELMNPSKGFYDQSEDKVTLAIDVSVKEANIEDFINTQYDLAKISSLNYHPMDLLFLASFLLFIFWVLQY

SEQ ID NO: 157403 - protein, 212 aa, Heterodera glycines
MATIDARDYEVFLDPELRILSTTAQTANCEGFRYHYFAMNEEAKEWVKIDSRTGTIGRMERTSIHEWKDGTLGKEGPAEMPIGFHNWILRNDSRSSSSISPRERDIRELAAARRRIRDEKSDGAWSTTRRTRGSGQNMAQRAPDPLESSRIDRNTAQTTTSKRQSRGYPDGGRNADGRSDPRIDTGEHEEKAHHGMMQRMRKFAREPHRKYE

SEQ ID NO: 157404 - protein, 221 aa, Heterodera glycines
MKISIIDLVFFGMLFAFLGNGASTFPLNSAVMEVEKDEADNSTTVEAEDNSTTVDAETEEADNSTTVEDVTEDADNSTTVEDVTNDADSTTVEAETEEADNSTTVEAVTEDADNSTTVEAVTEDADNSTTADDVTEEADSSTTLEDVTEDADNSTTVEVVTEDADNSTTAEDVTEDSDNSTTVEAVTEDADNSTTADDVTEEADSSTTLEDVTEDADNSTT

SEQ ID NO: 157405 - protein, 203 aa, Heterodera glycines
VVELSASSVTASTVVELSASSVTSSKVVELSASSVTSSAVVELSASSVTASTVVELSESSVTSSAVVELSASSVTTSTVVELSASSVTSSKVVELSASSVTSSAVVELSASSVTASTVVELSASSVTASTVVELSASSVSASTVVESASFVTSSTVVELSASSVTSSTVVELSASSVSASTVVELSSASTVVELSASSFSTSN

SEQ ID NO: 157406 - protein, 32 aa, Heterodera glycines
MNKKLKNGPKYGLKTVKIYSNEQGKASDRKKG

SEQ ID NO: 157407 - protein, 95 aa, Heterodera glycines
MGSDACETLRDALHRFTIEGIPKESVDNELDLTEDGEMICSARTGSDDLLSALEENIQQLKPIEMPVRVTRKDIPGVRMQLQREFNRMNFTIGNC

SEQ ID NO: 157408 - protein, 184 aa, Heterodera glycines
MQMKFEMIDLPLSRKKFHMRQKLRRAVKSAHFLHSLIDDNPLVFTVGLLLMLIFFVFQVHEVTRVETVSYVSFIFGSLELELKNWKRAIETFDRARAIKRCREVENLLILCRAQTGDANVLLSTVSSVNLNASEDDRKPSPEQLIGKAITESTKQQKKKARMMKEPKPIKPFFFDLAANFTEVC

SEQ ID NO: 157409 - protein, 284 aa, Heterodera glycines
DHELIVCYKTKKVKHVVNNEIAEVCQKHLGNVGQQQAHGFRIRFCAKRNATEQLISVESILDFSFSDKIYKREHSYSYKPGGHIAMKEKMPFFFIEFGNAKQHSMLRGTGDSSELSAELFLCLFERLTIGTILPSIASEPSSSSPNNDGGAQHRTKLLHFVPPANEELKIFFQTRLPFSRLITRKTDLLPYENNPNILYPDKCEQLGDDCEPTRELLLKIQDVLQCCSPANPWNKCLCDGSNSVDKVLKFKDPIWEVYIVLVPKRNCGLGSRKIPRGIPSRAGL

SEQ ID NO: 157410 - protein, 120 aa, Heterodera glycines
MCCSAVRLKTRGINAFVMDRTTEFAAPPGKKDSSPDTTPNNSSSRWGHLGDPLNADDIFYDREMAQRRYDDIMEAIFAFLMSIFKMQLGDLIKIVPNVYNRQRLLKSRQKIGGNDRLMHI

SEQ ID NO: 157411 - protein, 170 aa, Heterodera glycines
MISSPFVLNLKKNNLATLAYYWMVLTSSIAHEILHTLALYHEMHRDDAFYFLKLNPFDRNTFWVNNYVPLKKTNNFGFTYDFASLLQYPASIKNGYFNMITMSRFYQRTIGHGGILSFKDSAIINHIYCRGYCKEKKNECQNGGYPNPKQCNECFCPGGYGGAHCDDVEQ

SEQ ID NO: 157412 - protein, 137 aa, Heterodera glycines
TIHRPYAVTTPTTARCPRARGTPNSAAKCPPTPPAAAGIAVVFRFSAPSAAFAGRDRAKFQRLRRAQRCPRGRFAIRLDAIVCRNGRLLPAAARTSTSPAAAPARRRCRRCQRKRKCSRNTGSGHAAATIQHSTSLG

SEQ ID NO: 157413 - protein, 262 aa, Heterodera glycines
MLNPATATLYAYQSYLQQHQQQPQTPAPAAASLQLLAQLLAGGGVSTGTAGNCGVSAVGSGLQSVLSAFPGGGQQQNLLAALAVQQAAQPQQQQQQPTQQEETRILLEQLIRQQQQGRDQQQQQQREREQQLKQQQMLQQQLGRFNAAAVGAISSEPQAPQLEQSPTMTATAVAAFASAQEQMQQQQQQTATAIAVEQQQQQQQNEQFHQQQQQSQQTNGNALREQQQTTGNAAGAQPQQQQRQATPNERLLTSEALQDRIS

SEQ ID NO: 157414 - protein, 103 aa, Heterodera glycines
MAKATKARWAKKTAPQLNPNAKIPPQDEAGPRIGARREQFRKRDLTGNSIRKILAQILSPNDLDGLERSIDDFKVFLAEQDRMSAFLSKKPKAHLLLFHLVLK

SEQ ID NO: 157415 - protein, 231 aa, Heterodera glycines
MSNGTAERFVGIFKRSMKKCRQEGKDWLQKVLLAYRTTPNTALNGHSPDELFLGRRMRTRMTLVHPEKQKLQPTNLENFQQFQGQYIKKMENQFNTKHGAKSTIFQNEEPIYFWNLKNNKAIWLPGKIIEKFGTSPTYRILEPTLGRAIHRHANQIRRRFPIELEDNDQVVENDQTQAQNPQQSPIAHKPQTNRQQSPAQPVLLRRSGRAKQAPQRLVLDPTKPKYGLIRS

SEQ ID NO: 157416 - protein, 18 aa, Heterodera glycines
MGGVYRSSKYAKIKKDQE

SEQ ID NO: 157417 - protein, 109 aa, Heterodera glycines
MDQILSKVYFNLKSPASYAGILKVLEEARKVDKNITLEDVNTFLEKQRTYTIHKPIKKIFPRLKTIPSGLHTDWQCDLCIFDQLKKDNDGYKYLLVCIDVLSRMIFSAP

SEQ ID NO: 157418 - protein, 153 aa, Heterodera glycines
MGCPYAFSCKFLLIIFTLCQFVAPNFSFFGTFGDCFDLFNIFHNNWCKEKVAVESRSLDQMYTSALTEGGKLVVYAGGTMRGQQVMKRRNCLIKKLNGTHAFRRWRFDADVSALAFRRQLVFPLKLFSLASKSNNLGIIRKLLSCSISLTKSG

SEQ ID NO: 157419 - protein, 63 aa, Heterodera glycines
QLMSLFGFFFKQFSVIAHQLLGVQQRRHLHPMQLFTGSLNLFLFFFYLFSEWSYNNFSQQFCI

SEQ ID NO: 157420 - protein, 229 aa, Heterodera glycines
MTSRKEKKNNLKNENNLPNNDKMQNDGTELLEEFKAILKSDTYMTKGAKVGLRSFGRFGNENVPNATQYMANDFKAFLDEMPETEGKSAIIALLASNPSSPILPSDLIERLLITKPTTNSKNLETPIVHRRHARNGFKISASDMEKIIKTIIEIRVILTLLTLYFWYCENNFILVIIILIFIWFVVDLRDDLEQGGSDLKIFKKIRTFCKIAPSNQDICNKSGQITSLT

SEQ ID NO: 157421 - protein, 268 aa, Heterodera glycines
MLSTFSIATIILINVVHFNAFIINEAPTNLANEHKKPINETPFLTELKGIIKSDKFKTKGNKPLVEWALEIGCKIIIKNLNENAKICEQNEEKCPAQITNFYKIMTKICIKNGDKNLILDEHREQLTQLKDILGTQTLAQMKKYEQNFQQNGPNAKQYSALLQFGDDLKAFLNEMPEMEGKSAIIALLSSNPSSHILPSDLIQLMLITNKINPKNLITTNRRGRRDMRDSFAIAFIIWFIIYLWWFGYSFLAGLVTGFLLAVWLGRKF

SEQ ID NO: 157422 - protein, 270 aa, Heterodera glycines
AYTANNRSKFGVGTIQELYFPADSSLNDSSKVGDGILRENGANLFDPNVQIGTQISKITLTKREANPIEQIDKMIMVDEGEGVRKERKASAKTAPKKNKEDAKKQKSDAKATSTAAPPTSTTTVASAAAAKPKEDGKEGQAGGTSNSEAKSQVKTIPQGPPMPPPKSAPPAPPQPPASPSAPPASPPPQQPVPPKLVNQSSAGMALPMPIGVGGKLPNFKLIYFDARGICEPIRLIFHYSKVPFDDVRISRKQWLALKDNTVYGKVPILE

SEQ ID NO: 157423 - protein, 35 aa, Heterodera glycines
METNTVRLKEYMECDNGTTERPLDVLVLQRDAGGG

SEQ ID NO: 157424 - protein, 109 aa, Heterodera glycines
MLKLYYSFGFSNSIEQNVQTIGGDPSEWSRTANTATKRRTVAFVSAWQMAIGHRFFLDSVANAFVEELFSSLLEDVRTAEETTEAMEFEEMMRQMETLMEFREGFMRKC

SEQ ID NO: 157425 - protein, 25 aa, Heterodera glycines
MSHYGTSARETLVFAVRIGMERDIW

SEQ ID NO: 157426 - protein, 57 aa, Heterodera glycines
MPTVPLALLLTSAVCLATVLLPPTPLSPLLLTLLAALRVAGAPAYAARSASSVAMGN

SEQ ID NO: 157427 - protein, 32 aa, Heterodera glycines
WSRFPNKNRGPGPDFSGPGKSRSRFCPKFPVP

SEQ ID NO: 157428 - protein, 19 aa, Heterodera glycines
MSSKTNGTKVCSAVADSKF

SEQ ID NO: 157429 - protein, 350 aa, Heterodera glycines
PSNSLFTCISPFTHFTVQKYAQQIAAAEKRRSMSLTPIFMMMKRGKSPLLLLHHQSLSLSSSSSSSLSSRLLPPLFFIHRRDHFNNLRRHIFTAEPSQNRLITSIRHRQITTISGYHSAAPITLFNGSGNFRQHKTATSNNKMGSITQLSSVEQHKCALLHTNGGPAVAPAAPLTLEPLAGPDTGILVARISVPSTRNAFSRALAQAFRDMVDQLRYGLETRALILTSSVPQAFCSGVDLKERRKMTSNEVTTFVDGLRRTINDLSELPFPVIACIDGCALGGGLELALACDMRIATPRSELGLPETRLAIIPGCGGTQRLPRVVGVAKAKELILTGRKVRGDEAAQIGL

SEQ ID NO: 157430 - protein, 68 aa, Heterodera glycines
CLGSIKLFFKIQIGVQYYSFGIYESVVEKMLKLARFCGSAVANVGTILRRTKKKKIKIPEFSEECCRI

SEQ ID NO: 157431 - protein, 304 aa, Heterodera glycines
MGTAGKDDDGEKPSVEGGKQAEDVHGSGEGPRVLAGRGEFHQKNVETLLASEDYGRDLASIENLLKKHQLLEADIVAHADRVEEMNRQADALLESEQFDQAQIDGRRRNINERYEQVKDSTDVRREKLNKAITVHQFLRDIDEEESWIKEKKLLVSSDDYGRDLAGVQNLRRKHRRFGRKMQKSKNLKRCPMLGLRTGKTEFFLGVDSRPGTKNVPPKIASFSYTFFFKNSELDTHQPQVEVVRSKGKELAKSSEIGGPEIERRIKALDQSWTQMVELADDRQKKLQERWEKGEKALKISKLYE

SEQ ID NO: 157432 - protein, 17 aa, Heterodera glycines
LFFTANAYDLIFKNISV

SEQ ID NO: 157433 - protein, 113 aa, Heterodera glycines
MGDPIQLNPPLNYFFEERTVEMRGWTFGNETDIGQFPVLATLSCAVEICADPCEQSCLDKISLDKCSLNDFIGDKNATDICHEGNAAAVQGTISFCLMTLLMFLCSSTVLMFQ

SEQ ID NO: 157434 - protein, 16 aa, Heterodera glycines
MAEGKKDEIWIYQRRN

SEQ ID NO: 157435 - protein, 430 aa, Heterodera glycines
MIKTALFDLLDGHTAQNLPFLRENGRIAVPKMLFCFYRNPLRIDLSNSKKKELLEKMEKCIESQVSHFMRQHGIIDNRFPENALGQITISSGAPFVYIFNHDELPKDANNEFVLSLYPEESCEDFSAERIQKLIETVLELHPKNKKCTRSDYNFDYFLHTAILNIRNKIVEDIGTTLSLNDFVQAAKFLKRMFVDGAADGYSMAFSRHSLQEVDTLNSIIDSSVGFGMNLYKSQLNQQPNVTGGGDIAFSQLEHDFTEANFTFYQKSDLTFASCCADLDRYDFHLFNVHDAATNRASKSDEDLDTTMVFDDQNPKGPSPSGTKRENEAHFEVDDEENVVIDPHEYNIRFFDDDDDGAAQIPSDEGEGLEMSDQPKGNEAPIEPMTQDDVPMSKAFSGDDIEEDEEVEEQRRKERIESTEEDEELDEEAEE

SEQ ID NO: 157436 - protein, 138 aa, Heterodera glycines
FIVNSKFQEANFTFYQKSDLTFASCCADLDRYDFHLFNVHDAATNRASKSDEDLDTTMVFDDQNPKGPSPSGTKRENEAHFEVDDEENVVIDPHEYNIRFFDDDDDGAAQIPSDEGEGLEMSDQPKGNEAPIEPMTQD

SEQ ID NO: 157437 - protein, 433 aa, Heterodera glycines
MLEQRDKMQEQLVRMQKCVEETEEKCRETERERDVLRRQIHQQTKDMPLEVQNLTHELVQCREQLYEKEEEIVEMKAERNNTRLLLEHLECLVEHLECLVSKHEKSLRMTVVKRHAQSNRGVSSEVEVLKALKSLFEHHKALDEKVRERLRVSIEVRERLRVSIERVHNLEMTLSATMEDNAALKAQLNSAKNSSSRQHCNTRQNNARGGAQSAAVVELQKQLDRLSQEYSTSIKQTNELSSRNSELQTELSNAEKEARQAKEKMHSIEQQIQELQAQRDEQDTRVSVLEGRMMGAQRETACIRDLNDKLIFQIANKDAAIRISEEKVQQLKERLELAEAQLAQSLKKAESLPSVEAAELFQRMEALSAAEKKQLSAEERIHKQLSAEERIHRMETLLEEKNAELERTLQRERINEGHNERKGSGVANRRRRG

SEQ ID NO: 157438 - protein, 362 aa, Heterodera glycines
KDAAIRISEEKVQQLKDALLAEAQLAQSLKKAESLPSVEAELFAELFQRMEALSAAEKKQLSAEERIHRMEKQLSAEERIHRMETLLEEKNAELERTLQRERINEGHNNRLSATVDKLLSESNERLQIHLKERMQAQIDKNKLMQQLDQAKKMFDQTERFKERLLRENDTERFKERLLRENDDLHKEMDMLRNSLYTQRTAQFYSRGAAVGVPHHPLYQQAPMPPSYPTQSVCAMQRGQRSARVKRRMQKGRVTALQDDPGKVQTLGEQEWDRIQQANVLANIQQVGTPTATRNNNQQLKISPQMDPQILLNFQKKNSPQGFSMFDLRRFTIQSQSTTDPHTLAYFIQDRLDAINNEIRLIQ

SEQ ID NO: 157439 - protein, 47 aa, Heterodera glycines
MLSNLTSQKKVMRVKFLSGYNSTPKLLFSTKMRKTNHFLLILNVQSR

SEQ ID NO: 157440 - protein, 25 aa, Heterodera glycines
TCTCGVVVKLSTFHNFSPGFNSPLG

SEQ ID NO: 157441 - protein, 60 aa, Heterodera glycines
MHKLDNVLAKNASVHPSNHCEAFWRNGGDGGHRAIGGKHEAGGDECVKQKEGTVDSMKRW

SEQ ID NO: 157442 - protein, 37 aa, Heterodera glycines
MDLKMSERKNDGEKVFTGDCACPKTEQVEMDRGWSKC

SEQ ID NO: 157443 - protein, 46 aa, Heterodera glycines
MSLPGKPFNCWNSSACHSDLEITDDKCLAVHYKENEYGQLFWLFTQ

SEQ ID NO: 157444 - protein, 97 aa, Heterodera glycines
MMEKKSKGQFYTESVAYGTARPRGSTQNATAGSFRKTVNCQEHFLKTALKMATLIRRGVDLGRERTAELEETHAMLNVGQAATANQQRKERVLGREK

SEQ ID NO: 157445 - protein, 58 aa, Heterodera glycines
MRRPAEFGAFRSQEATDKAKSSGQREKSAICQQTAIGHEHCCEEIVPSTDEPNEFVRL

SEQ ID NO: 157446 - protein, 103 aa, Heterodera glycines
MTTDTAANRQRRGRGERRTRVQLRDSAKKITKASILRLARRAGVARINARVYDEVRAALRSYLETIIRDAAIYCQHERRKTMKSRDVVHALKRQGNLMYGFEQ

SEQ ID NO: 157447 - protein, 72 aa, Heterodera glycines
MNIASGNSARHEDASGSGTEKACRNFGVGGHLRGGKEPSGGREAGANSALRSTNARAGVSIKDLIPKLEEQK

SEQ ID NO: 157448 - protein, 119 aa, Heterodera glycines
MAIGLAKSAESEKESRVILAEAEEQEQVIVSRGLACAIETEAEARAKALERMAQGIEKMGGTNAAAFVTADNYVKAFANLAKSSNTVIIPSNSMDISGMVTQAMGIYGTIANANTANKH

SEQ ID NO: 157449 - protein, 73 aa, Heterodera glycines
MICLALHSPNNKMSATLKISKSKWKTRAILTFQKTSLDCVLSNDIKKIGFVRTWKKLLYENPGLSIDWTHKVH

SEQ ID NO: 157450 - protein, 272 aa, Heterodera glycines
MNESQLQNVSLTGEMSQELALELFENGGVLIFKDFPKGCEFGMDYRSWIVGPNFLGMKMIPPGIHFIYFRCRLCVPGAPRIAFFHNFRQKEVILRRWDTKKEDLVTDEKSDEVELDRLRENLRNIDRFLGVYPFADYRNWLSLSSYITPNSVRRLSPSNSLGRISSQNEMVTQEAKLEKKLGDPFGLSIVDREHRGRIRFTDEGGLPLMSEGEEAKLNFTRISQITLADTNLRRAGIDSSDRLFQCFEAMGGDYREVLAEFQFAFVVFLVGQ

SEQ ID NO: 157451 - protein, 284 aa, Heterodera glycines
MPTYPRRNNSFAANAVANDRRNNVLVYLGKLGEKGAMEMGEEVTVLTSAERREENGGDPFAMRRKIGRHHKNPSGTTVAQRDSVYMSKGTVTLAKAKNCSGLLEGNEHKKEKYQWKLMNDANGEGKEEEERARKLDNDNAGGEAETAVDGRGRDEAGREPRKRKNETQMLVNDEDKLEPWTKSEEKQLNGPNLKMDDDGKEARKADERKRKMRIHGQQKSAKLEANEDGTEEPFETTFITPKLHIEGEGLVEAEKAIEYHNRGGMSDSECGRRMGDALRRHRVQ

SEQ ID NO: 157452 - protein, 339 aa, Heterodera glycines
MNNRLNQNHAGSAASALPSQQSHGQKMRQKLTFEIISKEHRQIYRASGLPWKLPDNFVYMLGKRISEVESAMADDATAPASALKLRKFKHTGFVVESFHRPTIQCYLDSIEYLTTTQKSAVMASFNKEGLSAIQGPPGNGKTELIAHISILAALSYVCNYSKEEDEECRNRMQNMKPQILIVCATNSAADHVAEQISRLKDQLISDDDLFQISEGLQKSLPTSGKCMTLGQIRIMRKYAASYSADQVPHRLWYCSNKNGIPYHPKEASMTNFFEMFGVLCRPINQEARENMVESAHQRRKGIYPLMMLTLAKPFKQTMVCRSAQNINIKGKMMMMAVLD

SEQ ID NO: 157453 - protein, 98 aa, Heterodera glycines
MAIGYTLLAFITPSNPLLIQSMYVLIMSLVGLCTIGLVKQARWVDAENAQAINSTNTAIIYIIVIGYCFPFYCCFANIERSNFAHFDYEEEIKKDQKR

SEQ ID NO: 157454 - protein, 80 aa, Heterodera glycines
MPVIVPKWLSCVESGISSGFRTDLRELAAILVSCLKKGFKFDLICNFAIFLQFFIGFSSLFLATFNFNHQYDKTSFKLPA

SEQ ID NO: 157455 - protein, 527 aa, Heterodera glycines
NLADVQQSVTSFSPIQTSSFITTDKKAQVSNIRIEPEQGAGGFVGYADKGVSIVEPDMDVRVVLFGIHLDEIDLVGFTSTDNCSDAAVLIDRNEFVIQSERRVVVIYHFASNSLYKLCVRQKPHPDYSHELPIHLTDEAHCWVSTNIPPRKYYFSMPLQIVIIAVLLVLSGLFSGLNLGLMSLTPQELTLIKNSGSRKERKYAQTILPVRKSGNRLLCSLLIGNVCVNSAISILFDDLTSGTVALIVSSTGIVVFGEIFPQALCVKKGLAVGACTIWVTRFFMMLTFIVSYPISLILDKLLGEQVESYDRKRLIELIKLNMKNAAQAEELKIAIGAFEMNDKIVKDVMTGIKDVFMQPQDTILNAKNIAEIVRSGYTRIPIFDGSRGNVVSLLFVKDLILLDPDANLFVKTVCEYYQHPVRHVPENTPLRTMLEEFKKGDYHMALVDRVVAPSTEDKESKYELVGLVTLEDIVEEILQAEIVDETDVVTDNVTKIKRRRQQHRDLELFIDDGEACQISMQMQLVTIQ

SEQ ID NO: 157456 - protein, 50 aa, Heterodera glycines
MCAFAANCGRKQFLRWKSDFFLPKSMSTLVTQETCLYDFLIWIPTNVIQW

SEQ ID NO: 157457 - protein, 17 aa, Heterodera glycines
MANWNGAQQSAEKPSLC

SEQ ID NO: 157458 - protein, 52 aa, Heterodera glycines
MAVPPQAPSDACQGQLTAKSISEKVWAPNAMPMPTPNKESTCQFASFEKRKY

SEQ ID NO: 157459 - protein, 98 aa, Heterodera glycines; identical to SEQ ID NO: 157453

SEQ ID NO: 157460 - protein, 80 aa, Heterodera glycines
MPVIVPKWLSCVESGISSGFRTDLRELAAILVSCLKKGFKFDLICNFAIFLQFFIGFSSLFLATFNFNHQYDKTSIKLPA

SEQ ID NO: 157461 - protein, 211 aa, Heterodera glycines
MHFLCNFWLHNWGGNFKFCSQNVEYPRTTAEVQRIVRRAQKLRVFGTRHSFSKIADSCGTLLSTLGMNSIIAISGSRSTVTVQPGITYTDLAPTLCQLKGVLANIVIMLHMLETDANNFALPTLAAIADISVAGATQTCAHGSGLTNSNLATQVRSMRIVLANGTEASFGPESAELRAVACGLGAFGVITEVELNLVPTFDTISYNFVSAP

SEQ ID NO: 157462 - protein, 169 aa, Heterodera glycines
MTQNAIPEREHAPKSLMRNILTVLRDDDWRRVRNRITPAFTTGKLKKLIPILCESTEKLCKVLETENALKGKEVPLKDLFGRFLLDVIGRCGFSLDLDTFDEENIFVKQARTIFDFTRKGQKLRMILGADDAEIIHSELRSNEQQQKQQGKHLTRIELFAQSFIILIAG

SEQ ID NO: 157463 - protein, 86 aa, Heterodera glycines
MLLFIFAIFGGNAILCQCANLMAITGQELTYTRKQQQPEKTECYRRNRTETWKFNCVDSAAGLDFIFAGWDPARFILLSSAPISRT

SEQ ID NO: 157464 - protein, 299 aa, Heterodera glycines
MTKIFFSFRNLKEFDFESKKVANLERKRKTNLGNLEMSKHYEELRTKIEQKIDNLGMVELCELWDFAQIVQTVKCQFEGQRTAQGNVKVLKSITVERNYDCAELRQIGKGNEPNWISDFKKEIALNHFAYIGSKLAFDHHIKCDFSAWFGDAKIAGESELSHRFRTSSTQANFEQIQFTKTMLQKHLLNVADLDKLLQIAHPITLAADVFTESSFAFLVTGMFGDEPNNAIWLEYFSFLGRILAFFRHFKNDEAKRAELNKFWGKTAAIFGRENAMIDESYGEMNLILIKEFKLILTEL

SEQ ID NO: 157465 - protein, 256 aa, Heterodera glycines
MSAEFSICLLLLLFLSFSLSAFATFDGQQNLTTDGQFLGCQIKNLKLLQTKFMDRKLMEKFHFELSKKQRILEALFVGEKKLNKYGEKKQFDLSKESVKYLMEELIGFSDKVKSCDSFNNNGRKGRQNDDEKLLRFAFRANQIDLDEAALFNGRKDEKRRRRRKRMINAYVVYFMILAMFFLIIICLCFIGCHDTQNDWRNIHRNNGQTEANGAMTRVANSAELSADFWEKILKMAIFSLSEPPTPKFAKIFTNLI

SEQ ID NO: 157466 - protein, 23 aa, Heterodera glycines
MVVQFVDKKYWTRTCCQQQQQMH

SEQ ID NO: 157467 - protein, 45 aa, Heterodera glycines
MYVKSISGGNAAPVKQSILLRTCAPISPRWPWTRPRLLLKDAFLG

SEQ ID NO: 157468 - protein, 433 aa, Heterodera glycines
MPEPKTIKELESFLEMVNYYSKFVKDLAECVEPLNRLRRKDVEWEWRDEQTKAFNLVKEKLTSDKVLVHYDPKNNLFLATDASDYGIGAVLFQRDNKSGKEGVVAYASKTLSSAERRYAQIEKEARSIIFGIEKFKQYLYGRKFVLQTDHEPLKKIYGPKGEMPVVAARRLHRWGLILMNFDYEIEYRSTKKFGNADGLSRLPCVETDEDDDDNGQEVNLIQVQAIESLPVTVEMIAKETEKDPLLKLVKKFVKEGWPNKVDKEFRPFYIARNSLEIQSGCIMLGIRTVIPATFRPEILQLIHSAHPGIVRMKSLARQKVWWPGLDKAIEEIRKSCRPCQINASEECKVPLHPWEEPERPWQRLHVDFCGPFWGFMWFVMVDAKTKWPEVIKMKTTNTSTTISEMRRIFATHGLPEQIVSDNGPQFTSGEWHE

SEQ ID NO: 157469 - protein, 109 aa, Heterodera glycines
MGIVPEATRTTTASTIVALLLILLLMSDGGTIAGGNGEEIANLSSLSASASTALSTNVVVPHRFDCRLSGMECFHDGICSRDGSHCEWVFQLLIFVFLSFIQFSFHFFS

SEQ ID NO: 157470 - protein, 180 aa, Heterodera glycines
MPPQDEAGPSTSAASAEEAMEPPPPTPAPVPTPEMDEEILEFGFSLPSTSVTPIGDLVPFSTTPTASMDTGETTPPPLAIDERSERIEQLEKQLNDLDDTIKFLRKQVRNREALISDLRRQLDEHMVPPMAPPTTSKTPPNRGRPKKRLDELQRSARRDIVDQIVGVIDHRRPNCGRHRS

SEQ ID NO: 157471 - protein, 46 aa, Heterodera glycines
NHRNTSIACTGNRTWDPPPLGDLLTDHFATHTNLFWYSSSVSGRRV

SEQ ID NO: 157472 - protein, 111 aa, Heterodera glycines
MEKQQQQQPKSDQKPKNDQKLKNDQKLKNDQKPKNDQKLKNDQKLKNDQKLKNDQKLKNDQKLKNDQPSNDGEPSLASDFDFKNLKKVQNGTEERHASANHLIGHPERRNP

SEQ ID NO: 157473 - protein, 62 aa, Heterodera glycines
MIAEEKKGSLSSHFPWQPFAQNLAKFYRHGDGPSTFGNPLWSLCCVWVLISHLQEQSVDLDQ

SEQ ID NO: 157474 - protein, 69 aa, Heterodera glycines
MWMTRHSTSNRATLVRQWASSSSKTEESDGVSGSGTVFSLIFFYWPMEGFVSQTLPSPPGLKECKSSAE

SEQ ID NO: 157475 - protein, 138 aa, Heterodera glycines
MTKSATTDGGGGTAAASSVHRLQSPQKVPHPPPKKRPAPETVPQPAVAEVPALPGAPPPAKFRKRQSSFYAHVNVRDPLNLGNVRPDNPDDPNFAKPIQLIPTNVNDPLNLQNLSSAPADAEDEALPTAADAQQRRKR

SEQ ID NO: 157476 - protein, 280 aa, Heterodera glycines
ALTEVQDAYEVIKQENAVFLRGICETIPNFNRLFQQIENSFTYLNEENLALAIPPVPPNSVETSATSSGHSEPTYDQPPDGPDVNAQRELLKVADRSSETDHYLKVAVDAPGSVVPSRTVHPTEKAEQTRPTVSIDNSGTESRIRQPTESGKQQNRIPSPPKCRPPPPPAQSAAKKGEEITFGLAGSSPNRLLPSGQFVCDASTAGTSSQPSLPAIEAVEEDDYAEIVEPEEQKSPQKKEYISRLRMPTIFTRRNTRKNPCACIFQKLGPPPKNRPYYSS

SEQ ID NO: 157477 - protein, 134 aa, Heterodera glycines
MDLDLDPEKSRTGSRIGATNNLLNIFIAVIQADHDERQGQKWPMAIQNAKIYLKIYKFAAIYLHVDPSNKAVIKSMTNGPQVWEVIKNFIDQSVTQLEALINQWNVAKVHPFCDEQLEMQAINKYIKEHCPKTD

SEQ ID NO: 157478 - protein, 67 aa, Heterodera glycines
MDTNILLTILLCSCFKFLNCIDFEEFISNETAKNLVDQYLRNAIKTRGDLLEKLGDIGVDLSFCIHL

SEQ ID NO: 157479 - protein, 106 aa, Heterodera glycines
MTNNEGYDCFRLAAGASSYESLKVLLDSCQFGPDNKSGNVNETLQSLHSEEDEMEIALGRPRGRPRSISEERRKMVQKFKQANPNSSLAEIAKATQTTSGSISRIL

SEQ ID NO: 157480 - protein, 112 aa, Heterodera glycines
MTDSQSPSRSPRGQSPSPSSPCHARPNLYAPGGKLQFENVAAANPGTKVPTAKQIGHQLIGKARKGKLARVIVHDATAGEFGGPQTNPKAALAIQTEQTEQPNERSQKTEAK

SEQ ID NO: 157481 - protein, 93 aa, Heterodera glycines
MRQLDNATVGQCDSWTMRQLDNATVGQCDSWTMRQLDNATVGQCDSWTIRQLDNATVGQSDSWTIRQLDNPTVGQSDSWTIRQLDNATVGQCD

SEQ ID NO: 157482 - protein, 75 aa, Heterodera glycines
MMCFVRMLFSPIVLYGFNVPVVARPLITVVAQFQSYSLVSMRLHMVAMAANRAHAVLFPFHYAQKVTKNSGSNPT

SEQ ID NO: 157483 - protein, 95 aa, Heterodera glycines; identical to SEQ ID NO: 125597

SEQ ID NO: 157484 - protein, 163 aa, Heterodera glycines
MASMNKRLPAELLLEIVASIPIMYLFGGIAKKPDQSCSKFREALRNKEVTVWRIVHPVRVHPVRPIKIGELFGAILIYVLGSANPLTMKKRTAGGYLLRQHFPRLLQFPATEMASHGLGQLVRADGMELYRLMNPHHKGDVGYLMIIETTQHPGSYYFNFSIE

SEQ ID NO: 157485 - protein, 203 aa, Heterodera glycines
MENRFPQRPSNFSIDYILSIPAKKPRRGVQAGAGPSSAKPAKEYVKKLESSVEHVPRFQYVKAKSKFSIEDVPTNPEGLIAGIFQCCIDEAVMESQQRGVKPTHLGCVISSPLLTGGDIPIPIRQITDNTVHTIMNQFTKVAQSKQQQNITLWGEPFTVTVTTVDRIGLPNKRSLKGGARRALAPVHHRVKENCLIKVRPAGK

SEQ ID NO: 157486 - protein, 136 aa, Heterodera glycines
MASMNKRLPAELLLEIVASIPIMYLFGGIAKKPDQSCSKFREALRTKEVTVWRIVHPVRPIKIGELFGAILIYVLGSANPLTMKKRTAGGYLMRQHFPRLLHWPVNRMASHGLGQLVRADGMELYRLMNPHHKGEC

SEQ ID NO: 157487 - protein, 1341 aa, Heterodera glycines
MENRFPQRPSNFSIDYILSIPAKKPRRGVQAGAGPSSAKSAKEYVKKLESSVEHVPRFQYVKAKSKFSIEDVPTNPEGLLAGIFQCCIDEAVMESQQRGVKPTHLGCVISSGLLTGGDIPIPIRQITDNTVDTILNQFTKVAQSKQQQNITLWGEPFTVTVTTVDRIGLPNKRSLKGGARRTLAPVHHRVKENCLIKINNPDERNYCLFYALQATMVAKTRGWPRWLFYNYVHSRYGQQGCLRRDALQLVQQIGARPGLNAYDAEIFVPRVVDYWNNNQQQQQQQHRFAVFIFGSSGQYKPLYKYINDHYDTPIVLYFNNDHFDGVQKIHGLFGQNYCLECEKPYERPSRHLNACKARCMLCSRVGPRFPCAPLNGFFRECPGCKKVFRNNDCHQHHMTSNFCTRSKRCKECGVIWDTCANNLNGPRVHKCDERYCQTCNNFHNMERGCFIQPIEPKEYDPYRIVSFDLETMQHQAMDPDQPEKREHQPNFIAARVSCPCCIDNDRWRRGTGGCQICGLHRTVAFCQRRFVNTNVDHQVVADNPLEAFVNWLVFQLPKKYDTYAYSHFGGRFDMVLVFRELFRIGFNPEMLRRGNKMYEMKVRKQKRQNPNVVFRDSFNLMPCSLAALIPSYGLDVEDKPFFPHLANRPENYGRAIHPTPEDYLANGMMPGKRRQFDMCYCTNDVEILMAALVAFRREFFEITRRQEYVEGIDDRENHDGIDALRECMTIAGACMRHFRTNHLPAEHLAIVPERGYDNAQNQSLLALRFFYWYSEEYDVEVQTAHSAGGEKRIGPYSLDGWIEAEGRAIEVNGCTWHGCKKCYPNDNMVLPSGKTAGQIRERDGKRMEYLSARVNRIDVFWECKIDEMLARSKAMRKCFANYVDDGPLVIRDAFMGGRTGPLKLYHKAARGEKISYYDFTSLYPYVNFTTRYPIGHPKVHVFNQQVVWTSSADNPYPLALLKVWVVPPRRIDVPVLPVKVDDRLCFPLCLKCAKKYPTGGVDDDYHCQHNDQQRGWVSTCTSIELNAALDEGYRVIRLFRVLEYEDSDDQLFRPYIAEFMAQKIQASGFDNEIKGNAAMEEQFVRECAEIFGINGGRFSLRNFGLCQTLITDSPVVLTEYLDNKSVEVASIDQLDEKHILISYQHKKDWVDEHACSNIVISLWTTSTARLVLLKAMQKVVRSERCELLYTDTDSLVLVHPEGRCPLKTGPHLGQFTDEYPDHDIVEYCSGGSKQYGLCLRRKGAGPDVEPEYVLKVRGMTLNYDVINNQGLRYERFKEEVINYATRGDYEPIIVTYPNFLRPNIREGGRVVSMPMQKCYRPFVGKGIVGPNYRVLNFGHTL

SEQ ID NO: 157488 - protein, 56 aa, Heterodera glycines
MKKSVTISVPEQKEINQQNTEMEPTKSDTTKKRKADDRELWKLAKGKFMLATYLCP

SEQ ID NO: 157489 - protein, 220 aa, Heterodera glycines
MGICLCRVSAAAHNTVTTITTSRTPTTPNGTATKNWSESLADAVGGKTTLVLIIVGALIAIIVLLVVVVCCCCCKKRKRRRRHTSADDDKEDNKKRKRRHHTSADDKKEEDHHHIDQHNKEEEQHGKEDNKSPIQSELKVSTISAVPSDYNSNKRLGATDLDVEAEEVPKTKPVPKKPKSEGGTKRKLSNFFWSTGTTEKRPSAAEHGVEVPETIRDDED

SEQ ID NO: 157490 - protein, 208 aa, Heterodera glycines
SFALDRRFVRLFWLWGFLVHRFRWPLFLAPFLTTAFLAFGFLWINDQETRDPLFVFSPENARWKFERAALSEHWPLDEQHFWPGKSYDYFGYVDVIAVGYDYFGYVDVIAVGRRNSDEGGERPNILSRDYLNELERINKFILHNLTVPVLLPNSSTREVGFTDLCMTYAWKCYLNDHIIMLQPKGRWIGGLQAEVIELAKEIIEQEVS

SEQ ID NO: 157491 - protein, 314 aa, Heterodera glycines
MKFAKKMLMIPEAEYLALLSAMNSGDYLQNEKASLDAKISQNLQDPGISEDLKAKRHDWLYKERRTVKGILENRPQKVVIENHVPGPNVAPYLGLNNQSKPQETEEPRKIIIPRKRLKERTPDPESDNDTLEALTPEPQTPSTLKTPVPTKTIIHPTLLNEKQRTYTIHKPIRKKFPRLKTVPSGFHTDWQCDLCIFDQLKKHNDGYKYLLVCIDVLSRMIFSAPAKSKKSEDMIEVFDRVFEKSKIIPMKIYSDSGLEFQAGKMKKYFEEKFIIKNVMYSPDLHAGVVERANRTIKERLYRYFTKKDTLRWVD

SEQ ID NO: 157492 - protein, 370 aa, Heterodera glycines
VHSPSALSNCPPPFTVSPKRFFSVLRLRIENESQLRFLMDLLRNSTRLDFWKEPSSVGEDAHVMVARGPMLNDFSERLREHVMVARGPMLNDFSERLREQNISSRVMIEDVSELIRRRARETTEREAKQRKTDSSGGFARFSMSKYHSFSDVIHHLNALAVNFPSRVQVQNALAVNFPSRVQVQPIGTTHEGRQIPLIKIGTSAGTKPAVWMDGGIHAREWISPAAVLYMIDQLVTGYDSQPAIRQFLVTGYDSQPAIRQFVDHLDWFIVPMLNPDGYEYSRSSADYEYSRSSADPEVRLWRKNRSPVQCTQISTGKRRNDRLRVREQFTDWRMNFTKDIFVRSSPANYFPCHVRPSGANCPSPSLAFVD

SEQ ID NO: 157493 - protein, 207 aa, Heterodera glycines
MHLKLCLLFCSILFLIIRTDQIGSENKKLEQKSFDEIFGEKWEEKRNEEQKKREIIGKFYKIKEKIKQKGRKYSKKEWNKIEGKIAKKLGTNRKYIYEWIKELGLNQKNCYKTMTEEEKLDTVQKFIEMINEYKEKGRKYSKKEWNKNYEQICKKIGVGLFILRKWMKQFGISRKIIAEKEKMEKMKMYWQIKGEKPKMSDKEMEKC

SEQ ID NO: 157494 - protein, 35 aa, Heterodera glycines
MEKMKIYWQIKKEKPKMNDREIGKIQKLKLETFNR

SEQ ID NO: 157495 - protein, 204 aa, Heterodera glycines
MELTRILFCLILFLITLTDQIGSEKKKMKQKTFDEIFGEKWEEKRNEEQKRREIIGKYYKIKEKIKQKGKKYSKKEWGKINGKIAKKLGTNRKYIQKWIKELGLNQKINHSKLKTDEEKLEIVLKFIEMTDKYKEKRKYSRKEWNKNCAEICKGIGVSYGTITKWKKQFGISRKITEKEKMEKMKIYWQIKREKPKMSNKEMEK

SEQ ID NO: 157496 - protein, 55 aa, Heterodera glycines
MELSSGYFGGQFRGFLFPEEQINDEAAKILPGIRTLAEKVRDDAQMDEERRKLGK

SEQ ID NO: 157497 - protein, 269 aa, Heterodera glycines
MTTTSCPFDSNSALRPQVPLRARHLQAKRPASKDHPQTRIRLLPADRRYVSVGDQFMFTATFYDHNEGFIVCGIQLLDEEDEEQFVGLDSIKLGGDDILFVQKLKTHMRQWAAEGHDSPNFGPVADPKELVTDYICREEIQWPENIEVLVCFNPEWMQGADTLMKVHSLVIDGEFEQGVKERIESMNNDETSIASPATLSLRQEDNDGAHVPARTHLEEEEEECNCLEVWGILRELLEDERATSELEPEMIQGMVELRKAFHIDNRANN

SEQ ID NO: 157498 - protein, 43 aa, Heterodera glycines; identical to SEQ ID NO: 144666

SEQ ID NO: 157499 - protein, 40 aa, Heterodera glycines
TSILPRRFPHVSSLWSSAVFAAVAEMGAVEGSVPPRSAAV

SEQ ID NO: 157500 - protein, 169 aa, Heterodera glycines
HCPPNRFSRLSIRPSSSAANGPSSQFVPLPADLADPGTECQMIAEDFLTEEKVFRLHLNGVAEPPTDDPFHHYRSRVYKDGHTACYDDSGAPLFCKLSSSDKGHVQLGLFQSLTVPLDVLSKGMDKGKEQCRKAREMRFTLLTEDQKLAEAIQRYGKIDEGFHNCDKEK

SEQ ID NO: 157501 - protein, 204 aa, Heterodera glycines
MTAHLRSLVSIDKIVHAISNYTSVEKREEPNYTSVEKREEPLDCMDALLFWINKVCLLVRDDVCLLVRDDIERVDKLPTIPEMEDLYEDLCDGTCICALISFYRPDALPLREICFKDPMSVHDCICFKDPMSVHDCRFNLELLCKFCSSSLPWDPFHFETKFCSSSLPWDPFHFETEDILFLHESLQPNINVFLADLFQFFEIP

SEQ ID NO: 157502 - protein, 144 aa, Heterodera glycines
MTFFYIFVATCIIYLFVGIVIKFKSAGLPSSETINHRVFRSLCCILTVNVGGYLITMLYGGLIKPSISSPITAWFWHIITAIPLNFGGASNGPILYLTSTEYRRAFQTEFPFVFKRILNQNRMAPQQNVQITRMFPVMNTSSQR

SEQ ID NO: 157503 - protein, 280 aa, Heterodera glycines
MADSNNISFYLSFKDVNPNWPLISCSFVNGSIAVFGIIFNLSVIWVTVQTKSFRGTVNYLLALCSFFELLHQLGNFLFVYTAFSGQNFIAYRLAVQIVFISMFGLGGIYPAMLFIGIDRLIGIFFEEIHNKHKMRLYLTMITLICIAFCVDFCVTLYQSIDLYGDQLITGCLIDFFKGPNPSIFRTSLVPLTITVYLLVGFVVKVKSSGFPSADEVNQRVFRALFCIIVINVGGYLINAFYLNLIKPSIASPITAWFVHFITGIVVNIGAASNAPILYFT

SEQ ID NO: 157504 - protein, 55 aa, Heterodera glycines
MRYTQKENCQVDEAIQKRSKEPKDKLKMIPNTAMLPLTNEQLISGQLGFTSLNDK

SEQ ID NO: 157505 - protein, 62 aa, Heterodera glycines
MNAQNRKVYRCGEPEENCDCPDLIRDFEEKEKQREASKKKARSSTSSAAGGPAKKRKTSKSM

SEQ ID NO: 157506 - protein, 297 aa, Heterodera glycines
ATDQSTVYNSPSTANCAGSIASQNALVQQQWAQSVQQQTQRIHQQNQFMGQQNLAGIKNQQFPINYHGQNLQPQSVQNPSQMPSTGNQKIQWQQTKEGHTGNMHSTSSSNFIMPSSTGSSNFIMPSSSGSSNLIMPSSTSSSNFIMPSSTGSSNFIMPSSTGSSSFVMPSSTGSASFTMLPAAENIYQSGGSKSFTMNTTGNLTHIGPTRFNAQQKGKMTEQIGSTSLTNYHGPNVQSGQSVHLTPHMQTESQMSQIGPEMGQMGNIGPTNFNSPSRQLQNQQKLQYQQQPLLSMPI

SEQ ID NO: 157507 - protein, 188 aa, Heterodera glycines
MSEILGLRQANGLPQGYANAGGVGPSSFVPLGQPPMQARQQSVDHIQFPPQFSVVQYQNFGQQPPPMQQTLAVPMANLSLEQATSKKKSDRKPKKATDQEAQNQTVQHHHAQNNQFVGQNSLVQQAFAQSMQQQIQPLSSQQYMFDQNQNVQFQQSLQQMVQYQGQQPPLMQPTLADPMANLSFEQTK

SEQ ID NO: 157508 - protein, 177 aa, Heterodera glycines
WPNYYPGWKGFARQIQSSIIDWKAWRTGVQTLHLQCRSKFGKIFLIVVDAFSKYPEVFEMTNSSATVTIEKLRYLFTRHGIQETIVSDNGTQFSSSEFAKFVAANGITHAPYNNSTGQVERFVDTFKRAFRLGEKPNKEIIDIFLITYRTTPNDTLPLKCPAELLLGRRRTTIDLLR

SEQ ID NO: 157509 - protein, 95 aa, Heterodera glycines
SPQSSCSNGGNNNNMNSNGGTNGNSAAGDGGDAEGVWSPDIDQAFHEALQIYPPCGRRKIILSDEGKMYGRNELIARYIKIRCGKTRSEYHLSSI

SEQ ID NO: 157510 - protein, 117 aa, Heterodera glycines
MSTSSNKNYLPKNQCPNCDDDEVDTDPPPEEVEKWTPKQVIEWDQRCYGKMPAEEELWQEFLDKGEANVRREFFGGKGALEVEKSLREYAKKKERRDAILIEKRNEYKKNDGKKDEN

SEQ ID NO: 157511 - protein, 47 aa, Heterodera glycines
NFGDFFRKKHHFENLEATILEKLTKGRVQFIEEKCNINEMKTTKCKN

SEQ ID NO: 157512 - protein, 107 aa, Heterodera glycines
MRKHFSLAALLTLCLRLISLFMLSLITPVEDIHLQPGYYYSFVLDVILFDTPQNRQLSIVLASVMLKDERMKLLFQFHKTVPIFNAFSARSVLSRLYTLVRKYLCTV

SEQ ID NO: 157513 - protein, 19 aa, Heterodera glycines
MPEDSFGRDPISPPPKQLQ

SEQ ID NO: 157514 - protein, 201 aa, Heterodera glycines
MAFANGAASGQQQQLQQHQQPNRFTMVPSPMPRNHLRRVPTRLVLERSVSDSVLDDAAIPDDQFSALQHSAAAAFNASILRRLSSSSSTMSPGGGLLGSFDEQLEDNIVDNKTEQFMHQQQQGSNGNGGNNSSSSSSCPSSCSSETIDTDGSAQSAAPAPIVKKRVSFSECVHARYFRRCVVWAHGIQMQKGDLLLKTKCH

SEQ ID NO: 157515 - protein, 219 aa, Heterodera glycines
MDNGWSPEEFGNCDWGGNNRTEEFGNCDWGDNNRTEEFGNCDWGNNNNNRSEEFGNRNCGNNRSEEFGNRNCGNNNRTEEFGNRNWGNNNRTEEFGNRNCGNNNRSEGFGNRNCGNNNRSEGFGNRNWGNNNRTEEFGNRNSGNGTAQRRDANGRNNGGGPFRVPSPPPQQVPVPPPVTPLDFCCPGTEPSPPVRSNIVYVDGIEDYKHSLPLMRIEEV

SEQ ID NO: 157516 - protein, 72 aa, Heterodera glycines
MDFFIVTLLYHLTLNLDVNAAPTKPTNLRNLNLSEWQNVVQVFGIDTDASALMGSRKESFLNFLCMIKLIHY

SEQ ID NO: 157517 - protein, 36 aa, Heterodera glycines
MSEYARLLEARCPALHEAGHAAAARFNRHGPRVQFA

SEQ ID NO: 157518 - protein, 121 aa, Heterodera glycines
MNNNGKNSNNCDSADEARRSRKRDRADLLHEVEMDKIREEQRRRRQRRKNEEVQRQRALLRLRTDYRNARCAVSTGQYRMSCTGTTTFVAIPQIGQSRGQPAMPFTLAFSYEPALPIGARS

SEQ ID NO: 157519 - protein, 131 aa, Heterodera glycines; identical to SEQ ID NO: 144707

SEQ ID NO: 157520 - protein, 33 aa, Heterodera glycines
LPALLLPWNLYLAHVWTKVRVKVVNGSLSDPTK

SEQ ID NO: 157521 - protein, 139 aa, Heterodera glycines
RFENAVQHFKVLRDTNGQYYLWAKRFNSLNELINYHRANSISKTHNILLRSMDSAFSNIQALFDFTPQEAGELGFQRGDIITVTKREDENWWEGTTKREDENWWEGTLNNRTGVFPATYVCPYNSGRSNQNLPSPSLSS

SEQ ID NO: 157522 - protein, 98 aa, Heterodera glycines
MHKLPSGKEGQLLSANRKPLVEQSERGGKIGKTAKIGHYVQRMEVHASVLTVGPKLEVGQLSADGNDCRIPIESAENWHRSKIWQRLPEFPEMNCCND

SEQ ID NO: 157523 - protein, 365 aa, Heterodera glycines
VSVPSSFIIPLVVFLGGGLVISLISLPPPVSAYLISLPPPVSAYLCVNGLSLPRYNPLQLFRSSSVHEYFDQNAERLFPFVSDKIASINAERLFPFVSDKIASIPLADRLVWGIRAISAKFYFDANSLGIRAISAKFYFDANSLPTQLESDNHFHLRTVGQLRALAQQLEQMRALPFVEHSARFWPERFFLDWSVRLSCASRPSAESVCCNVQSPHFVDAQLDSCIRHSTSVLFTNYNDTLIWDNSTHRLIGYTALLPTHLRYSHRFANLSAAFALLPTHLRYSHRFANLSAAFALFDQWRTQQLSFLPGWFMSQMSQWFDLQRAIISDCLPSLFPSLFLFLSFPPFLRWKAFCATFTIFCIVLT

SEQ ID NO: 157524 - protein, 30 aa, Heterodera glycines
MSTEFEEKFRKILNRVYRTLQQFEIREEEN

SEQ ID NO: 157525 - protein, 392 aa, Heterodera glycines
MGFFKNVHRGNQRGRIKKQTNFRKNSKPKNLVEKNRKLKKLRKMMKFLPHEEESIGDEQVGHDEDEDNEYEEDNQTVAYREAKRLLESLKDQQGIGDSVAQQLRQEALAKQAKLHRAVAAHVRFGAQAQQRMVAHRGHRLAPICVCFSTSGAVLVSCSKDGAVVKCKQQKRTIAKIGRNFSRTMAQQRPMICHGIVAISPDDQFLVTGSIDGLVRVWRLDTLSPVRTFSGHRGRVTALRFRRQCVALELFSASADKSIKVWNLDEMGIVNTLYGHQDSVLHLDILQWPRLVSCGAMDKTCRLFKVLEDKTCRLFKVLEDSHLVFNGLAECVSIDCVAMVNEEHFVSGSVDGLALQFGLSHHRHPRLTPPPPSVHFLSIQRRQWWATWENITI

SEQ ID NO: 157526 - protein, 27 aa, Heterodera glycines
MPKQVWECSAESFEGPKEQKENVEDKK

SEQ ID NO: 157527 - protein, 222 aa, Heterodera glycines
MSIKQEIDLLPKDETQEEPPLDSLVHCTEKLKKVVFSFSEVRHLRKHATIRQCLVGCLAACKRKLTETVIVDEVIFVDQTYVMFKHSETRYLFDNLDYVHITDKVFRQWIDELVMRDEPLPLYAHYFDRKINLLKMWKELKEIGFFDKTEQPKNDGGTNLQMELEKQFGIGTQHIMVTPWHLVQLLQLSRREFEHVVVGLYVCCVVSSSFSAKTALIKMPIH

SEQ ID NO: 157528 - protein, 121 aa, Heterodera glycines
MPNVGADVGGFFKNPDAQLYTLFYEHTKTGVPPMRPVWSEFPEDEASYDEEREWLVGPGLLGFTYKKVSDHTYSILAKSLDSRGTFDPDVWIERIVIRGLRYYPRNVHMYYEGQLFSSLMR

SEQ ID NO: 157529 - protein, 80 aa, Heterodera glycines
VYILLRASGALSELAPIDVHTAVKTQGTDVFVGGAYDGINNSKRISDEQNGIEKEEEEEYNDEEGEEAEGEKEDRKFATI

SEQ ID NO: 157530 - protein, 32 aa, Heterodera glycines
SVADPQNVQPTKCPSLEFEFFIIQMGLRLGKG

SEQ ID NO: 157531 - protein, 117 aa, Heterodera glycines
MTRPNTAKEWNKIDGKIAKKMGTNRTYIQHWNKEFGLQKLKSYKSKSDEQKLEIVQKFIKMKNEIKQQNRKYSLKEWRQNYAGICKKIGVGYGTICRWKNQFGISCKITEKEKTGKN

SEQ ID NO: 157532 - protein, 300 aa, Heterodera glycines
WICNDVWMDIFPSFDHAQLGLKLALLSPRFNALVDKHFDGKSELTIWKTIEIRKDKGPEPKLYVKMDDKFVPFPLPDDRLLRSKIRFKCLHIDYIDHSVIAFLRSNHQIFDKRGTNLDLWIPSPHTTDGQRIWDIFVREIWPIFSENIHHLGFSHGDHLDNLRLRTSPTILTDLNQLNSIDSFVLLPAAIGDDFDGPNATISAGQSLSKWLHSPRKDGQPKQLRCGGINEQANTDWVNNFKEHFLRATISSVSYQIHFYVHVSSMQMVPFELVNEWTKEKLTLAKAIKNGFEDLLRFTRP

SEQ ID NO: 157533 - protein, 61 aa, Heterodera glycines
MTAMKTLEKNMPSSNSNSEKLKREAIVFGPKCVKAEPLSCGFCPREDQQWSRSNPPPFLSI

SEQ ID NO: 157534 - protein, 46 aa, Heterodera glycines
MEELQLNMPYRVQPHFGDTQELLGRGMHPVPKSVDTAEPLRAEMMY

SEQ ID NO: 157535 - protein, 37 aa, Heterodera glycines
MPNAVFCSLLAGVACVIEIHYNFDYTDIEWTKNGQWW

SEQ ID NO: 157536 - protein, 337 aa, Heterodera glycines
QRRVKWETSNGEHGNRGGLNGGQAMGNGAGTEEGKWGTFNGERGNRGGLNGGQPMGNGTGTGGLNGGQPMGNGTGTEEGMGDNGEWHGNRGGLNGGQGEWHGSRGGLNGGPMGNGTGTEEGMGDNNGEWHGSRGGLNGGQPMGNGTGTGGLNGGQPMGNGTGTEEGKWGTTNGEWHGSRGGLNGGQPMGNGTGTGGLNGGQPMGNGTGTEEGNGTTNGEWHGSRGGLNGGQPMGNGGNRGGLNGGQGEWHGSRGGLNGGQPMGNGGNRGGLNGGQPMGNGTGTEEGMGDKGNGTGAEEAMGDKGNGHGRRGGVKWGPPIGDGTGRKGGNGGQPMGNG

SEQ ID NO: 157537 - protein, 420 aa, Heterodera glycines
QVDVLSRLLPVTADEVAEHTQLDTTLRKVFDFCRNGWPKKSPTDSSAFFTHRHKLSEVNGCLLFGERVVIPAALRQRILSALHFTHPGIVRMRALAQQHVYWPLMDLDIERWVRHCVDCAMAAKAPTKTTLSPWPRTNKVYERIRMDFAGPCSDGNLYLIIVDAFSKPEIFVKSTSADNVIVQLEWLFSRYGFPREIVTDNGPPFHSKDFSHFCRIKGIKQRFSPPNHPQSNGAERFVDIFKRQMKKCSHGDKWITNSLFAYRNTPNAALKGQTPAELFLGRSPRTQLSLLKPDISCSNRNQNDYTNNMSKQFDRKHGARHRTFAIGDDMLIITRNNKKSLLQGKVVSGSGVIWEIKIPVLGNVIVRRHTNQMRNFFIPQKSQNGNGPGTQHGSPASGFGSGLTRKMAKNVGVRGRGGVG

SEQ ID NO: 157538 - protein, 172 aa, Heterodera glycines
EFSKPLITNREIHFDISNPDPEFRQESDIQFRISHIQSYNAFWLIFDYCLNSDSGFELVRNEYIRVQCSETPKTFSIFLPETPSAQLAFFDRKMYFTSSNSSSNDEVEEHFTHFAPDQSIFPNLSLSEELRIIRARMARILEKKRTKTMGTSSRGTSDDVTEQNTGNKNMFH

SEQ ID NO: 157539 - protein, 211 aa, Heterodera glycines
MDDDDDDNCDDVSSSFHEDTKQQQQYEKRKTTNIGKANEKKKLKINYEYGTKIYIYAFDVQFKAILKRITELEKKQHKQNEKVTKALVGQMKQLQNDQQKQLERISELEKQQTAIVDQLHTAQKQIDDRISQPQTDQQPMELCAKISELESNTNLLFGKILDEFSEFGNFVGILKDRFGRAWVSVFAKYSVPSSEIGGLFYFEVKIINLRK

SEQ ID NO: 157540 - protein, 158 aa, Heterodera glycines
MAFCEKAEGLNCYVYRNEGEFWTHCTSKKGKPKYSRDDVIGCGVNLASGRIIFTKNGQPLDTADLFVCPSSPSANDAVDHRLFPCVSLADSGDLIEANFGPNFKFDPANAEEFSNTKQRNCWDLAVCHNEITISGPHNLIVRHKGSGNGMLLLYLQEI

SEQ ID NO: 157541 - protein, 266 aa, Heterodera glycines
MASADEYLHIFHFLHPKLLGVDLALRCNLFDAIVDAHFLSRIRTLGTMEIRQATGENGADDMQILNGTGELLPIADRPVPHRVVGFESIMISYISPTVATFLQNLGHLFASCDSYLLLEIVNGHVLEFVIHVLLPLIKQKVYRIEFDPTGQNGDAFHKLRQYVPGFLNECPSLRVDFESGASSAVNFIVLMTLTRGSVKPFTITNDVTREELKLEYRKDHGLLLVRCPISRDKAKWKAYEDGALEGAMNRNTIYVLKNCTGGWSVL

SEQ ID NO: 157542 - protein, 238 aa, Heterodera glycines
MPSSKIHGRQAVSGTNDRTTIQMIRDHQILTATFQTAHIVEDMDKDVVAAFSTKDKEAEEIGEDQTTWLTAAGINDRTVLFRKNQFSPNSGPNLNAIHDSSEFHQDANRQTSNVTLDINELLRAFSVMNTQGPSSRGGNESASMNVISTMPADHPRIAEDAYQGTGGTQGNPSESNDQHKISQWEGIGPKLSKYFMILTAFMLLITGLINTTTANAPKHPMKCLNQFRLKLVQMNAGK

SEQ ID NO: 157543 - protein, 161 aa, Heterodera glycines
MADMDKEDFVNLEIEPTAETPSGREFTYKTFLKNPLTNSPLKYCSQSATTINYPYTFVRMLFGDECCTSSTDQCKQPEATEEIFVSMAKTTATQPQAGRGGQPRTTDSTTNAPKMFSSKLTKKADHYKWPRGQTDNGCDQRKKLIGKSSIKNGWKNVKAAP

SEQ ID NO: 157544 - protein, 172 aa, Heterodera glycines
MPKYVQNMCQTPKYVRYVFMCENAKISKYKKRGGETAVAKARGEKSADGQGDTSSPGQEKRSTFDEQMPQQDEAGPSNSAASAEEAMEPPPPTPGPVPTPEMDEEILEFGFSLPSTSVTPIGDCLQEMRHCIPCGGDLSNFGRRCRTVYKCANSWSIISSRIGCWTPGDLTN

SEQ ID NO: 157545 - protein, 539 aa, Heterodera glycines
MDKTLADILEKLTQAIKQQSAPTSTATQPAQNITLPDIHPFSTENAEEFEEWLERFQFALDCAVANMADEAKVKLLMTKLNPSAFGEYKRYCLPEEITKFDFADTKLRLIKLFSHPPSLAIDRYECLRVCREDGEQFEIFVNRLKAALRKFRFSELNEEEFKCLVLLTSLKSPSDAKLRQHILARLTAEGTKTTKTSKLFDKVVEDLNTQLKTEAEAKILEQPKPKINAIQHGKSSPNKHQNRGNGRPNQKFTGKSKAKIPPSNCYRCGELHWAQDCSKKENFCRKCNRRGHIDRQCDKIRAFHQNKGTNFKTNTVILPAAYINSVHSSNLLKAPINVNGTAIGFTLDSCAEIIIINEDDYNAMGRPPIHICSEEARFFDGKRCKFIGRGTATFPIHGIQTIQPFYVAKSGSLNLLGTPAMEAFGFLEEIRRMISPAQINQISSNDAAKIQQFVEILPQKYEQIFSDGLGFCSKMKANLMLKEGANPTFKRARPVPYSTLPIINAELDRLEKMNVITPVEHTDWSAPILVVKKANGTAR

SEQ ID NO: 157546 - protein, 203 aa, Heterodera glycines
MAKILGNIENDGQILVLRSDSQIFHFILKYLANSTAEESANQTKFVIKYSFCFLAQFVEELLKKAMKVNELKELLNIELIGEAIESFADKKEQKCANKKLNQKEMLEWKLIEIELINEEKMGKWEAIESARKEWKENFDRTVFNENGRENGKIEEKMEQLMEELKHLQIEKGIGQNKNKNKQKEEEKEGKEGKKEKGKGKVEN

SEQ ID NO: 157547 - protein, 97 aa, Heterodera glycines
MSMFELLQRRFNCICMLTRDGVLEILRVVHHVMCVQLRQFVNTPVRGPTVAHNCCTCVNVLLNQWEVKPLKLAQFEDDCEDWSAGGSRGRKKKKVLC

SEQ ID NO: 157548 - protein, 45 aa, Heterodera glycines
MHEKLRNPILDTLTQLQNAIGKEKEASRMAELKTWNQAKNVVIWS

SEQ ID NO: 157549 - protein, 397 aa, Heterodera glycines
MYKYFDKQSLKFSLFFFACFILCYDCFWVDIRKQGKIYEKFRKNEIEKLKQKKKRKEMDSEEVKKHNEEKEKVKKLMAEYKRKVNKQMEKHVEEMEKDEKLKEVLREIEEAQAKHPGEKRKAAKSITEINEKHWDELYQGDIELSVEQAQYLLDTVTKPENRALMRAKRGAASNARKFPNHKWPILVPFSFDGSISSEMKAHIYEAVKLWNDNTCLNIVEDDEVSPRIQFTNIKGMGCLSKVGMQSSDTYQEVKLEYPNCYQLGTIAHEIGHALGFFHEHERYDRDSFVTFYADNVDPKNYYAFEKETIEMTDNYQVPYDLGSVMHYNAKACHVTMNCDNDGFQNPDTCTTCICPQGYIGAKCQDVDIGGYAPASIANTCEGNILFATSNWQYVSIY

SEQ ID NO: 157550 - protein, 24 aa, Heterodera glycines
MGAFGETQRLEQQQTEAPLEYEIN

SEQ ID NO: 157551 - protein, 21 aa, Heterodera glycines
MKCLRLQLEDLVKSNYTKKII

SEQ ID NO: 157552 - protein, 74 aa, Heterodera glycines
MAINFGSGILPNPKCEICETEIKPTEKLIVEKHTMHISCFKCAFCDVKLSIGACAMEPNLLERFGPLFFCADHM

SEQ ID NO: 157553 - protein, 28 aa, Heterodera glycines
RRVGSDFQRLAGRPIENGQTDEGINHFI

SEQ ID NO: 157554 - protein, 19 aa, Heterodera glycines
MTNSNLASNEHSAFNFEGK

SEQ ID NO: 157555 - protein, 59 aa, Heterodera glycines
FPVGQPLDRFCFQKSPEDQFPFPGETIFSTKFSPTVTFKQCPGDKYLLRCENSKLINNF

SEQ ID NO: 157556 - protein, 401 aa, Heterodera glycines
MRFFSRANVFTKREIAKQYVSALRRQDASIQQMRIIYQEKHRRTLHQIMELRGKSHLTKLNPNRDSQKIKRILAMRQYLLKRHNWDRILERKLADQTAMAAASFRHKKWMEQLASPPDDEQRDVEMAVAEMVNLVDECANSSRNLNIEEMHTARRNNFMSSDAFCPPLPKSVVDILEQLRKHSDEAGPLRKSTSRAIVQQNNNLTDPHGYLSNCGTFSMPKPSTSKALVDNNSVEAKTVVPVSIDDDLNPDLFLRISYPTLMDGQNQQFSPQNSKVRRWRKVDEKEDASQTCARINRPWDGTRHKGTKFAGGDLENNNNTNSTNISNNNTSGKYPLKMRTNAGIIHMLHPQTGKRSRRENNGQNNVHADNNMSYGTYQQYLSLQRLIPGPRYSLAKTISRT

SEQ ID NO: 157557 - protein, 102 aa, Heterodera glycines
MENAHFLKISSGFHIVICFSSMCVGKLRSLIFEYPAELGRHLAVRLLCGVPATLRLFAWHFVQRVQSPLGVQSDVHGQCQHHRLLRAAAAGRTAGRKCFLKI

SEQ ID NO: 157558 - protein, 51 aa, Heterodera glycines
MSPPTQACTPLWMNSSTLSGFGVGCVQAPLRALDVNAKTFSIWGCPIRLAT

SEQ ID NO: 157559 - protein, 167 aa, Heterodera glycines
KNFGDTENAKKCREGVGFHFLAFHSFIWEQWRLLHQNRQIWEQWRLLHQNRQQRETQFPPDSQICAGSQCAGSQNYLLSATMPFSRPRRAPGLSNSYTDSLYTYAPRPTCRAAGDCRSRYLFCDTTSGRPLCTSRIKPGGNCASFVQNPCFASTCVNGFCQAAGGAA

SEQ ID NO: 157560 - protein, 165 aa, Heterodera glycines
MCDRLAKIKRRTEELAEEYHVELAIRERQKKLFEEKGDSVEAQLMNAVDVHLGLRDLKKPLQNPENFYQIMLQEMKNLLDGQVDASKFEDTLRSMFDTRAYVLFTMDKLVNTLVRQLQNFVGDSASGQCVEQFEKYFDQRVNGCESGQPAARVDKDYSEAMEKVR

SEQ ID NO: 157561 - protein, 172 aa, Heterodera glycines
MAELDKLGQSDGEDGGVGVGENSGEALDKRSLLLSEPVQITVTCLTPPTGAGRPRFYPYQHWGYNEAHRIRIRDWEDNYCMFHALIGARAYHDPVLFNEWMLADQQPQQQNLARLMLMQDFCETKEAFRRLIINRELMCSSVHRLMHAAGVPEGQHAYGMDHLQTVQHYWVQ

SEQ ID NO: 157562 - protein, 200 aa, Heterodera glycines
ESKGHFEGQDFDWIIMSMCADNKDVEKEEEEKAKKKVEKEDGELKEESEDDDGDEIQLVGETKSTSTEAQPSPPEQSSALSTPQQQLTDDDNDDEHQQGEGRGTRAEGGSQSTGNDLFQQVSHSVHRLERFSVSRHITEFVLNANVEEPDEVLRGAFQILMERAIQNAEQQSGRKVLKIGVTLQGRGLIGRLVALLFLTY

SEQ ID NO: 157563 - protein, 112 aa, Heterodera glycines
MPSSSSASSSAASSSATTATTTASVFFDTINNNNRKQLAQQWIRLSSNGSKHREDELVQALWTLRDQLIEGTVGVARHAELPPGEPPTTTAAAAAVPSSTSGSNKLNLIIYK

SEQ ID NO: 157564 - protein, 17 aa, Heterodera glycines
MPLVFILGLFSRIYIKI

SEQ ID NO: 157565 - protein, 63 aa, Heterodera glycines
MVLTSLKLLVQFFGALSILQCNRLGWPSFRGVCNHLDNAWPAVAFGPSSAIASGNRLPECIEF

SEQ ID NO: 157566 - protein, 29 aa, Heterodera glycines
MVYKLPKSCFKPSKNNLSFLPKFSLQINI

SEQ ID NO: 157567 - protein, 21 aa, Heterodera glycines
MIYVGIRLTKLQNRAHEVYMI

SEQ ID NO: 157568 - protein, 48 aa, Heterodera glycines
MMFGWKFCPVLTMLNSASNWHCFCPVLICWWTNISMMHIYIKLWQSVH

SEQ ID NO: 157569 - protein, 1440 aa, Heterodera glycines
MPSKQKNLRKKMKDVYRRQAERSVSRDNSPVSDGSADGNGEASASLRGTTTPSLSALQISTPASSIGSKKRGRPSKAGAKPILATQERVSLIDTPRTAVTQSDQGSPCKKRGKVAECGQPMFSNEAIALTPVSTQSRGGRPAKKIGGPGRGRLTDSMSKSSEMDINLENAPIPAPSHIVSEKIDFSTVPINFATSRNMACKIWRWAAIGLYERDGETALGPRSGPRLIETCWNRPNEWLNDSFIVAYLAYIASISQRKTVVVDSLASRTDVSRFSNVKNYTFGYDPNAVPEVVLMPLHFPNHWTLIVYDVAHGAYFLDSLHMSSLSDERMALIQSIIAEIVPGNASFAVEYVQQLTKQNDGNSCGYFVCLYAESWLMNNRTFVLPDLNINYEKKRILWHINELYGSDIVPFHPREGVSTSFAVVSHHNGDVAQTSSKVIMPMEVDDSAVLPSSEDTAVLAQAPVIGENQADTHGVVADTIVQQEPIAQADDVIFIRPKTPPRRSMRVQKRLSASVSRSPSPAPKRPPPANSMGVATPITRRCSAFHKGWQCAAAAAKHFPEYCDSGKLGDKKCADCGAHLFSHEDSTICCRKGRVVLPMLNPHPDELKQLIVGNKQSREGKEFVRHMSRYNNLFQFASVSTGNKPSPAGGPMAVILNGEFHRRISSMQAGTTQIPGFGQLYILDPVEAMEQRRNNPRFTGEKITNEDEFVQGHQLNEQTLEILEQMIQVYHPAAQAYKQAREQLTELLQQQTPEELRFFRMTLLNERRAPAGLKDPKLHPHQIITPSTGEGMFAIHADPTGAPPPKGIWVENKQGQLNEIAPFSPWTDSLTYPLIKPMGDDGYTTGIKYAKPPSRKRKGAQNASGLFDSEAESDNESCETQSIASSDAGSVANSDAESVASVSSQHRRIDKSKQFISLRDYCKYYLAIRDENVELQYHHILSCGGGLGQRWILDQAAKIDWQIATFLRRPDMDLRISTPKNLLQYLVNQYNRQQARQNPNAQQKTVDDIGSVVRLSEHNVNSLQYWKKMYEDCNTVFARCHDAKKARLFITFTNNREWPEFKENIYKNGQVFTDRFDMWMRVWTSKIAEFREELYEKKFFGTILGYGESMEFQGRGGPHAHIVAQTDLDAVPYVIQEYIWAHIPSLPDKDDDTPIAKMHREIRETIHMQLHRCSDSWCGPSDPIYGRCKKGFPAPYSKCTILRPDRPAMYFRPSPTDGGAQLEVNGLIYDNSHVVPYNPYILLRYRVHHNVLFAYGNKANIKYALKYPFKGPGHCYVECKQESGNKIGIDEPAQYAKMNFRGATEAYAIVHSLPFAKLSHQVVKLSIHMPNQQPIVYRAFQLVSKAQQIQQGKLPETQCSAYWKQWQNEWKHDPKLKDMLFEKVPEHFIWAKDKWNKRKYNLTKRPPIGRIVPVPPKDPERFALYSLMRHFPGDPDHLKM

SEQ ID NO: 157570 - protein, 161 aa, Heterodera glycines
MGDSYTAKYDFRNPLCYHKRCICPPQFDPQFVLPPAPGFNTRLPMKCDKRELQVVFAATPSNFVNLGGAAYLFCCVNLDPRTFIPKDGVVFVQNDTIQHQPTSTPYESFSHDIDTYFSPTNARYRVINATMEFSVKALSVNHHNRRVPRSAQGKRRRLFND

SEQ ID NO: 157571 - protein, 225 aa, Heterodera glycines
MVENMAINLFNSLKLEHIKSEEEKTNENILENERKIAEMKRWRSAEKAMKERLKVLVNDASKKCQKMRKRLDRFLNKIGIKFDKMFGKNKKNEFDGEENDSRREDFVGCIYYYLYSFSLNLIRNIGTKKANAADNCDNYDTKQCQNGEKDTEMEIKNLRKIYENLREKMWQQIKIVYAKDDLKKMNDQLNGDQNADDDDEFKKCANIVDEDGEEPIFNEGDSIKE

SEQ ID NO: 157572 - protein, 24 aa, Heterodera glycines
ITGVSIIAVLFLVFLMLSQNLVRF

SEQ ID NO: 157573 - protein, 95 aa, Heterodera glycines; identical to SEQ ID NO: 124813

SEQ ID NO: 157574 - protein, 58 aa, Heterodera glycines
NFLLIFKLHYFIFLAKLIHKYFFTNCSETHQFYLQVILGTQMLSLSKREMNKNLKIFN

SEQ ID NO: 157575 - protein, 24 aa, Heterodera glycines
LYKRSAGSVGIHCSVINALEFRIF

SEQ ID NO: 157576 - protein, 26 aa, Heterodera glycines
MGAIFENIALHDFVVKEVINSFPDKK

SEQ ID NO: 157577 - protein, 47 aa, Heterodera glycines
MGRNGCRIRDHRPRKTINRSILRCSFVEGLLNDLLKKGALSGEYENM

SEQ ID NO: 157578 - protein, 57 aa, Heterodera glycines
MFSYSPLSAPFFSKSFSSPSTNEQRKIDLKFTDLCEYFFISHPFSGRKEGSEHRRHI

SEQ ID NO: 157579 - protein, 196 aa, Heterodera glycines
MSHSLLKRPLNSNSLNQIPQKRHFLNEVTSTNLAIDTLDDDPSISPAARVIISQLSNLLKIAVSLVNNSVSDIDFLDQLGVETHSIVSYRMGWYSKDRARNAHMPSPMEQKIIGNSLNIRELLTQEQLKSRRELQAQCAEKRKETSADWIIYNGMLVLRSEIKGRRMNGENLSGPFPHIDSLLTRYRKNSFMTAMF

SEQ ID NO: 157580 - protein, 298 aa, Heterodera glycines
IFQIKIHNTSPDNISFKFLKTFHLILARHLTDLFNLSLCSGNLPKIWKTSLVLPLFKNGDKNLVNNYRPISITCSCCRIFERLIAKKLTEFLLKNNLISEHQFGFLKRRSTTLQLISSLEDWYNAILRNQKIDIIYLDLQKAFDQVPHDLLIYKLKKPGITGNLLNWLRDFLLGRTFKVRINQKFSNEFPVKSGVPQGSVLGPILFLIFINDLPEEIPKEISIKLFADDTKIYHCYSNESQRKVLETALISVFNWAETWGLNFSVKKSSVLYLGKNNKKIPYTIKNSTFPESKIISDL

SEQ ID NO: 157581 - protein, 40 aa, Heterodera glycines
MSEVDKAQLAPMIPTTVVILGIFNCRKILSNMDLNDNDTT

SEQ ID NO: 157582 - protein, 143 aa, Heterodera glycines
MSVRKCPSANVRPQMSVRKCPSAKVRPQMSVRKCLVAILVPSDVLTVGEIDAILYHFLPNQPMPSIQNNELQFPTNRRSTYDDPNKAHGMLAMKIKMSDLLLNNSKHVSRAVYIQALPWRLAVHKSKYSLRFYAQYDTTKMKM

SEQ ID NO: 157583 - protein, 86 aa, Heterodera glycines; identical to SEQ ID NO: 143181

SEQ ID NO: 157584 - protein, 310 aa, Heterodera glycines
MSDNRNEAEQKMAKAIFISADCWLCVYDLLPASQLGLGIAMISHRFDFYVDEHFKTRRWTLRSMAIKFKSKSDGTVGMDIVNYAGKALPIPQNPLPKKIIGFKAISMKYFNNNAIAFPGNFRQLFAKCPINLTIDTFKDRILEFFLHNIWPMIARNICAIQLSDEVFRRLRLLVPSILDDCPSLRIINAYYDGFFAEFPANDNDNASNGQAVAKWLFTCRPDNVPKAFTNASSPVNFIVFIRFPPTFTEFVLLFDLINELTREQLTLRMTDIGHFLLIRCPIVRDESKWTKWEKEAIEWNFIDQWNRIDI

SEQ ID NO: 157585 - protein, 250 aa, Heterodera glycines
MIKNVMNRRHGSAHSPMEIANEKPIKAIEKNIIRPKIEINLENEFGGQNTIITNISPNFKCPLNEYLSAVVDYNGFYFNVPAKTIEKIAMNLIFAVLSSQKWSIKHQQNSDQPIFDGILTFDHFSVIRQNEFEFGAEELAGNLKIEFNGTKNIQDPRERTLPPEQRPKEQMIWLKDVVFMSPEQIKDNRNTTTGKDLVWFVGLLLYRMLFDNKHPMDNCGAKRRLDMDFMPKMCISKLKQFNCMYKTTIL

SEQ ID NO: 157586 - protein, 202 aa, Heterodera glycines
MHSQAASALARTNNGLEATHLHFMKGLCHHPALSDFICGVNENIDRQVDAARSARHFIHKRHKRYILQDAVIMRILADASYNNNGEIRDLMTALGLQIEGYAAKLKDFVNFDDSIAWTFRGLDISWLGHFVAWSALVSGRESQGDSKRVNSVWPTPSRQLRLANSVLGPTPSGQLRLANSVLGPTPSEPTPSRQLRLANSVL

SEQ ID NO: 157587 - protein, 53 aa, Heterodera glycines
PSGQLRLANSVLGPTPSEPTPSRQLRLANSVLVPKEPTPSQIKKIYKKFFNEF

SEQ ID NO: 157588 - protein, 236 aa, Heterodera glycines
MTSDNRTLTLTLTNESIVHFWIHPVTPGDIAKVFLCPSANDGLQQQQQQVAECAKYSSDRWYEFFEINGAAAGEYLLRWTEHTKLSLVYVYEPKTVLEEGIRIIFVNENAKLPSLGGSYHFRAPFGWTSDPSGFVRSKDGLFHLFYQHYPHAKQYYLIHWGHAVSKDLVNWVHLPIFMIPPNVLHLDFEVGYFVGSVVNLPSDDFGIFWTQRIPLVLRGTESENPWRENQNFVSTK

SEQ ID NO: 157589 - protein, 97 aa, Heterodera glycines
MGEKRSGNGNIETAGHFVGGQPGQNVRIANANCLGRPARLKHEMAAVVHAGQGVVHNVRERRRRKELVLSENEQFLLVKPLPELNSLRMAKKPQNLK

SEQ ID NO: 157590 - protein, 23 aa, Heterodera glycines
MARLSVNFKCQICVKMVEISKTT

SEQ ID NO: 157591 - protein, 110 aa, Heterodera glycines
MDRLLLETDAPYMYPNLEDKKLRKDIDIRQRISTEALALHKHSDFKRNEPSSLAAICELVAAFMDCPAHELANATTANAQRVFGLELEDNHHQQQQQGQQQCNQRQRKRK

SEQ ID NO: 157592 - protein, 42 aa, Heterodera glycines
MLVISGWQTLVQGRQDGDESVWSTDRCPPPRSGSSQATRDQP

SEQ ID NO: 157593 - protein, 44 aa, Heterodera glycines; identical to SEQ ID NO: 147826

SEQ ID NO: 157594 - protein, 34 aa, Heterodera glycines; identical to SEQ ID NO: 124987

SEQ ID NO: 157595 - protein, 34 aa, Heterodera glycines
YKNKSDFGIRDQRGVTMIFEWKIFFTKNLSKTCH

SEQ ID NO: 157596 - protein, 127 aa, Heterodera glycines
MAYGRLGRPFNVNVAAHFYVRHRIKLRHPFLHCAVESFPEGQEDRFYPLELCEMEDGSSEPDWLGRIFTEIRNDNYTETMSSANREVLTPEDTSMSREGRDECSQNISYTLCQKVLFPILNFFENVF

SEQ ID NO: 157597 - protein, 240 aa, Heterodera glycines
MTDKEAGLLNAALEEGYRVTELLRVLEYHKSDNKLFRPYMSEFVVEKLHASGFDEQIKGNFEAEEQFIAECWDQFGIKIDRTKMVPNKGKRSLAKLAVNNLWGRFSLRNYGLSQTLITDDPSELGNYLDNKKIEISGLDMLTPERILISYQLKKDWIKEHPCSNVVISLFTTSAARLHLLKSMQKVVRSPGCTLLYTDTDSLFLVHPEDSNPLQTGVHLGQLTDEFPKHFRVLDFGHISP

SEQ ID NO: 157598 - protein, 225 aa, Heterodera glycines
MSQQYQPQNFQPQNFQQPQNFQQPQHVQQPQMLIPQHYGYIPVAPQPQQQPQSVQNVLPAANGQAYQPAQPLMQMVVPPNAAPPMQQPSGGGHVPRPVRPNVEQNANGNQQQQRRGAAPYRRNNRNRGQQPANGTNAHQPGAKAVPARAPTPRVEQLLTELLGEVHNFTGQFAHFAGQFSRFFAHVKKNTIPPPLPNGDDEEEEEEEESDQEEGEVEKENGQKDD

SEQ ID NO: 157599 - protein, 120 aa, Heterodera glycines
MLFFGLSRHRRAYNRRKKQMNKDDSSDPFNVPEKLQMTKRGAIKLILRKKLTSNDMWLRFRENEIGVMLFITPTQKNAASHCKVLVSDGTFELAPLSFQQIWTIHGLVSFDYGLVLLNLI

SEQ ID NO: 157600 - protein, 69 aa, Heterodera glycines
MGRRNFNGFTRIHSDYETAEVNALTKIFGANKVYGCIVHFIRAVVHHIKSSFQNLFREFNERKDVWKWK

SEQ ID NO: 157601 - protein, 66 aa, Heterodera glycines
MIDELDKKSGTECKNKEVYCFCVPLHFDQIIRGMCCDSNKKCECCKTDPEIKKRPQVKIVVVFLLI

SEQ ID NO: 157602 - protein, 43 aa, Heterodera glycines
MRRSVCVLSEGWEASACCPKNYQLVDLDDRYDERLIPLGLWVF

SEQ ID NO: 157603 - protein, 170 aa, Heterodera glycines
MVADQRTVVVVENTTTEPNTDMDTVNDLKEKRKVPTSKDKLVDRKRFTMSDLVRWKPKTENTLKRKWAERRRQLKEDTVDGEATGQPEHQDQQQALPAVNDGGTSGSGQHDCVVPTAAQPQKQGPSSAPTAAAGPRVMINERGEMVVDEQSLVVIENPEQNTAGMETVND

SEQ ID NO: 157604 - protein, 39 aa, Heterodera glycines
LHRAVLVPAAVAGVGQQLRPHRVDGQQQSARHCPARTAP

SEQ ID NO: 157605 - protein, 97 aa, Heterodera glycines
MAFCSYPKYLLIILLWQLIYVAISNPTTEELSKNEGGNADDIQMLVEEAIDMAQNLSMIVSPKALVGRGDTAEIVAFSLFPSPFPRQLFEQAKSVQM

SEQ ID NO: 157606 - protein, 49 aa, Heterodera glycines
MGELNFRRRKKKWKHLFWVYRLLRRRHLRRDICASTLAPPYKIHLHRSK

SEQ ID NO: 157607 - protein, 360 aa, Heterodera glycines
MINNHQQQQQRSTTTQSFCSSMAADGSGAAAAATASVSAAMAATSSTASTEVSTDLGHVFAKKTFGKPTYCHHCCDKIWGMLSQGFACEDATSAVCAVKGQRTADCPRSVRCATVMCTSTDLALADCREASTYVPSLDLVTHKQQHHMREGNLARDAKCAVCRKGCYTAECFSGFRCQWCNLSVHSTCFRQLRSQCDFGVLRKIMLPPNSVTIPRAELPMDMLLNIHTGSIGNEGSRKVSSPSRMTADEREGWPGAGGPGREEDKESEDYLLLRIYDGNSSLRNQISRTASVPKTASVEQIRDIALRRFHICDNRDNYYITQAPHESGDEEEMLEDPIPLRNVKKPEGKCAQGGQGQSQP

SEQ ID NO: 157608 - protein, 75 aa, Heterodera glycines
MAQEDAKQTEGTQKAAMGGGTGGKSDGEELKGRGTARRRSDGTGGGDGVGEEKGTVEEKRRGRSEDEQIWEWSGK

SEQ ID NO: 157609 - protein, 80 aa, Heterodera glycines
  unsure (1)..(80): unsure at all Xaa locations
PFFGLFLSLYLSPKAENAAPSARIVRLLRSISCLNYVRFGHPRLLFLRDQFLLHHRSGRLDSVXRNLVPFAPLFGPHSMS

SEQ ID NO: 157610 - protein, 94 aa, Heterodera glycines
MAALGDAERDEHPILPKVGHAEHWHQEKEEGEAQNSQQPLSDCIGLNNEKNGETDHNEKVRHEEEVILGQISEECHGGNGTKDDAEANEGQTEK

SEQ ID NO: 157611 - protein, 42 aa, Heterodera glycines
WCPFAPLFGPPFDVRHLPRGTTGLSAAPRNGQGDEQLKSQTI

SEQ ID NO: 157612 - protein, 116 aa, Heterodera glycines
MEEAPKNGRHQQKNKNEQQLTASELRHYEADFDESDPKWKCWPERKHVQKVAFHASVATVVLAVLLLLLALLLLRPLFLRLSFVSLGVVLCAVSAMAFFANLAQNDFLFVPYLFVV

SEQ ID NO: 157613 - protein, 188 aa, Heterodera glycines
MKTCVVCTCLVSIVYSIYMNWFPERRPFHCLIQLGYFEPMTSITKYITATLPDAGLYDAVQIAELASICIPFFLYGITVIKMVHDHKKNPSTSIIQVATVMPRGSQSNGEERAKFVNLMQERTRLFSMCLLSQVPYYLSHALYQSSRIFELSEDTVQILAILWQLLGTIFHVQQPILMLLLSKDLRSS

SEQ ID NO: 157614 - protein, 201 aa, Heterodera glycines
SDGLNVFELGSENDFDGWRRKSQGTEFIQFPLGQIAFSKPNSPSWSNSTPIDVVLVVLFVYVVYKLFFARRHIPPPPDVPQVEPLEKQDMTVEQLRRYDGVQDEHICMAICGKIYDVTKGRDYYGPEGAYGALAGHDATRALGTMDVKQIKDEFDDHAGIDPSDLEEAKEWQQRLSLKYPFVGRLLAPGEQHTEYETVAEN

SEQ ID NO: 157615 - protein, 94 aa, Heterodera glycines
MALPNRPPYLPDNWDNDVEMSGLMSFLKCRTRSIEGGTRKAESGLAAVEHLFAEAEQLASGPRESNGRRKKAPIRIGAHPHTKRNFLDFQTDQL

SEQ ID NO: 157616 - protein, 261 aa, Heterodera glycines
NGNGKPIEAGPSGNCARENLIRLNSLNPYITCPLCNGYLVEATTVIDCLHTFCKSCLLKYFEDNNDCPKCHNQIHQSHPSHYVAFDRTMQDIVYKLVPGMQAEEQRRREQCKKRHQQMKEAREMNGRAAEKHNHQNISSSSSATAVIPPPNTNDENSAECAEQRKSANLATAAPKTEKMDENGDTNGLSVYLAAQDEPVLIRLVPGSTLSPLDRPFVRLSAFSTVNTVKRLLAFLLLNDITKYNDFDVFCNRELMGRDFSM

SEQ ID NO: 157617 - protein, 19 aa, Heterodera glycines
MPKKKGCKKYARKMAKIYA

SEQ ID NO: 157618 - protein, 222 aa, Heterodera glycines
MAYRAMGQHAKSFTSAILNIMTGQLGSEGTRVGIPTESRFPINPEDFGKTIGTEPAEHDMRRPKKFTRSSFLAFAIVASMYVPISFFGYYVYGDSLHDSIISSIQTPSIQQFANLFIALHCILTLTVVINPLNQEIEHLLDIPHQFGWQRILVRTFVMFSVVFVGLTVPSFGPILNLIGGTTVALTSAILPCLFDLYLHSSDNKKGVQKLGGDQQQNTTNFK

SEQ ID NO: 157619 - protein, 309 aa, Heterodera glycines
SMNIVSPTAAGPKLPKHKPKLGKFIYLLAFIAVIGGFLFGYDTGIVSAAMLYVPKNSDLKPMSNAWIGLIVSITPGMAGVGALLAGKASDIFGRLIVSITPGMAGVGALLAGKASDIFGRRKMIIMIILSTIIFTFGAIVCAIGLSKWILLAGRILLGIAIGFASMIVPIYVSFASMIVPIYVSESSPAHIRGRLITSFQLMITFGLVAANIFAFAFSYIDPLNWGWRLLMVGFAAIPSVVQFVGFWFLPESPRWLYENKSHKECEEVLSKIYNGDTAWIQFELSEIQTAHDQQRQNISGSGSIIWRIL

SEQ ID NO: 157620 - protein, 95 aa, Heterodera glycines
MALKMGQVKAEFDFEAQPGSGELTIKTGEILTILKEGIEGGWVEGRNSKGKVGLFPASYVKKFQAENASIYPQLSISKRFEHSKFAMSLVSHFIP

SEQ ID NO: 157621 - protein, 38 aa, Heterodera glycines
MMKKFTVEEEKLNIEMTSGAIVAWQKFDALRGGKQGNE

SEQ ID NO: 157622 - protein, 161 aa, Heterodera glycines
MYHFLFLICLAALFAPHGVLCRHKHFHHRVPIIDLDGAEQLVGTIREDDRTVNVSPKLRICKEQVIAFGAAGAECQAEADLELEQIGSEHQVKADALAECGLSSADAVELLPEEEGIRKLQPDGMKKKKKDEAEKEDAEAEEEEEEADRDTEGKAALDGKT

SEQ ID NO: 157623 - protein, 167 aa, Heterodera glycines
MDEQNSSEPLKKIFLLKMCCYCKNVCSGAHQCRKCSKPCHAIAPCSFLAEDDEGFGAKVTCCSCWLDDDGIMDQNANAIVINEATNKDKDDDAFKQFVNTQTIAEDNDNTDALASPSTRKRRGYTMTKNRHFGLRQDVVHSRRQPTLQSGRNTVRDWKKQETALRKT

SEQ ID NO: 157624 - protein, 111 aa, Heterodera glycines
DLTSEQAMLEFVRLLDVVCPSFRAQLEIERKAKTNEPNQKATIDNPSKDSNGQSKNDCHLNVLVDSASIRAQEVLEQFEQQKRQIQEALNKQTYHQFLAYAQQTHPGEPTK

SEQ ID NO: 157625 - protein, 39 aa, Heterodera glycines
MDVIEYESPREQTEISANLLSDFGVTAQQAYKIAVTFYK

SEQ ID NO: 157626 - protein, 64 aa, Heterodera glycines
MGAPGIRGQSNTLETCNMTYKCQIFDDRLTPATAQCACLFVRHPTVNATPSGKDPEQMLKAKMS

SEQ ID NO: 157627 - protein, 49 aa, Heterodera glycines
MDHARTQSLPSQQRLSVTGRKGSDVQRKRSLVEHAEAAGFDKNTIILTV

SEQ ID NO: 157628 - protein, 263 aa, Heterodera glycines
GRESGKGIESLSESGTGTGSGRESGTGIESGRESGKGIESLRESGKGTGSGRESGKGIESLRESGKGIESLRESGKGTGSGRESGKGIESLRESGKGIESLRESGKGIESLRESGKGTGSGRESGKGIESLRESGKGIESLRESGKGIESLRESGRGTGSGRESGRGTGSGRERGRGTEEEEQKVEEEQKVEEKVEEEQKVDEKEKVEETVVENVEEQQKVEEKMEETESGRESGRGTESGRENGRDRKWKRKWKRNRKWKRK

SEQ ID NO: 157629 - protein, 92 aa, Heterodera glycines
MAREDFISHSDKKKAVQFYRSSEKGHRSLSYHEVHFNVLVPVLRPGEQSLLLVDSWNGWNDFRLPDNVKLKVKQIPKHATGICQPLDVYIFR

SEQ ID NO: 157630 - protein, 116 aa, Heterodera glycines
MAREKQQQQQKKQNELRKDMTMLDRAIVAVENARDAAAENGKINPSHENVLLETDYGLTISHVCKDNNTRRAWLRRSPSLFCCLSLPADCDRRTESGAPRRDLTEHGDDGQQKHLQ

SEQ ID NO: 157631 - protein, 552 aa, Heterodera glycines
MAMLTMSTTTTTGGDAEPNRRRRPLRFLFWDVECAQVADENEEGDEGVPARVLKHVPLLVCAEVICERCVAAGVDLEREPDRRAPGCCCGGAAWRDGQHRQWLMRAREDAFSDDDDDNADGGRRWRRPNPRRLRFFHDAANGRTPMAQFADFVLHDGPVNVRTVMLANNGGRYDVHLLMEELQRRGVRPRRLVATGLRVYTLELGGRNQRSVVAKDSLNFFGCALSKLPAMFGLDGVPDKPFFPYNYIRAENMDVAHVGLPPAADYDPDRMRPAERDAFQRWHAEEQQRRPNRLFVLRRELLRYCANYVRILRRACLRFRHVVGELSGGVEPFLAASTIAGLALAIYRQQHLPRDLMVHTPEGGFLRGRRASAASRHFFALLERLRPQWRGRLRTARWSIGEACVEDDGYRLDALLYRPVPLRPLVIEFNGCFFHGKDGGGGAPFPFASSKVAPSATRGAIKCWRAAKPPSRCVPGHGSVPGSWSSTTASRCARCGSAPSSGGCAASPPECGACTRMCAGRCPARWTCAGTRCSAAEWSRSRSTTRAQSERK

SEQ ID NO: 157632 - protein, 61 aa, Heterodera glycines
MEALQAETEKLKLIMENIVLQAKVDKMEEEKGQYEKELMGNYKIFECTTPIESLGFECLSQ

SEQ ID NO: 157633 - protein, 108 aa, Heterodera glycines
MFFYKKKTTQSKTNSDQQKMWEQKFKEGQAKLTEAEAQNQKLKNDIEKMQAKFDGKVAQLEKNLEELQKNQKELVTEHNELKAKVDKIEQQEQQKQQQEDSSKTQTND

SEQ ID NO: 157634 - protein, 95 aa, Heterodera glycines; identical to SEQ ID NO: 133575

SEQ ID NO: 157635 - protein, 104 aa, Heterodera glycines
MPIEPFELVNERTNEKLTLTEDEDYDGEFIGGGEVIKDWLLKRCPIVGETAAVQQKKKDENLDHLCGLYFNLHGNCIGPLSPPDQSDEKVFSFPGPSDQRKKKK

SEQ ID NO: 157636 - protein, 247 aa, Heterodera glycines
VNSVFFFPSKRKMTANESFALDAKVELVPISPVILRVSFIMSLAILGNVLLVFVIRRGNAVARQRLSPVQLLLLHTCTADLLFALLLLLHTCTADLLFALLSLGTLSLGTQIAILATYPYFHGPDLLCRFVRYLQALLCRFVRYLQALPMYASPFLLVAISIDRYQLLVAISIDRYQAICRPLAHYRAICRPLAHYRSDRYRRPNCLGIFAWLLALLCSVPQLFFWRKDSLSNECHTIYSIYSQCHF

SEQ ID NO: 157637 - protein, 196 aa, Heterodera glycines
LMPHRAYLRMVVLCPSPWELSPGRHKFGLRVTIPDSVPSSFESQFGSIRYSIKVQLVGNAEHCSAVECSAVEVFPFLVLAKSYFDDIPHAIKHFDYQDEIDFTVCTLPFGTVCLQISLPRTGFCLGEVIRAHLHVRNGTRKTLKDCRLQLVLKTQFLVLKTQFEARSRYEQASDQKLVENVMDSYPLGKVKGRTDL

SEQ ID NO: 157638 - protein, 294 aa, Heterodera glycines
MAGNGNELMRTEDDENSDDFLNLFENLELTTSEKLASLREIEKIFADTAPPPAGQTPIENSVLGFVFISHPILWALVQPDILGEQNELLDRKSLSLKSDQLVFQSTSSYVTTITLDPNNNWPHFTQISLNWNKQSLLGTRVKTIDLKQMTSPPKLGQSVNQIVPSSCCGIIREVIQNKITSDIMAIDVFLYGEETNQRFFPHQIDSSVNLTELEEGTRVQTTGFWAKTSAMEWPTSSDGIRDWWTEQIYIGTNLKIFGADEHEDIHQWLQNEQFRLSYRYLCAAMDLQQSPKRR

SEQ ID NO: 157639 - protein, 92 aa, Heterodera glycines
INPNNSPIPLACGQETENMAGNGNELMRTEDDENSDDFLNLFENLELTTSEKLASLREIEKIFADTAPPPAGQTPIENSVLGFVFISHPILW

SEQ ID NO: 157640 - protein, 101 aa, Heterodera glycines
MQKPIPSNRPNSSVSKTLACGLEKIVNLSGNEPLSVPVLADRSDPLGLKSVQPDPVPMESAEAGTKEMEVMEVDEMSGEKGKKGEMGKEKVKSGGIEEEEE

SEQ ID NO: 157641 - protein, 265 aa, Heterodera glycines
MKIVNSNGKTLPTPQNPLPNKVMAFRSISIYFIDQNVFTFLHRFHRFLATCATELAIATENVRISAFFVLNIWPMFNNTTILMHLNTMNFHQMRMFAPSMLNDCPCLRVVTFYDGISTEFPPDDSANATDGQAVAKWLFTPRADNLPKMLRIEKTTVDQWLASVEQIKTAFFIASSPVNFVISIDVPPLSSLSSAVVPFKLTNAFTGEKLTLSQENAEDGNCFLLIRCPLSACDEEKWEKEMEAEFDARQNKIGIFIGYGGIDNG

SEQ ID NO: 157642 - protein, 49 aa, Heterodera glycines
MANKFNAAMSAPIRLSTAVKLTLNVQCRLQFASPPSFLMLHVYAPLSLA

SEQ ID NO: 157643 - protein, 62 aa, Heterodera glycines
MVAFASNTFPDLNNKFELVHIPVELRDTLICCILGDLVCCLFLDRMLNYLFGDQRVRKMLMY

SEQ ID NO: 157644 - protein, 83 aa, Heterodera glycines
MVTIRGNNHFKGIEFSFLSASGKTKYTNRITALRQINATNGFGFLESGDRINVMVQSKDGTMPKSAVKVFFLSEALAFNEISE

SEQ ID NO: 157645 - protein, 81 aa, Heterodera glycines
MYKFEFIVVNSTAFNVSVNEVQNCAYSTPLPLWTIQYISVDYAKWSFHPPIITCNPSIRCFEPTSNNSNMFMAFPEKKGNN

SEQ ID NO: 157646 - protein, 67 aa, Heterodera glycines
MQKVVRSPGSDLLYTDTDSLILVHPEERCPLKTGPHLGQFTDEYSDHDIVEFCSGGAKQVNFRLILR

SEQ ID NO: 157647 - protein, 603 aa, Heterodera glycines
MQNQPPKHPFLFSIDQILSVPSKKPRRGFLINELLGEVLQEGGGSSSSSSKSAKEYVKKLDSTVEHVPRFQYSKVKSRFSIEDVPAANPEGLLAGIFQYCLDAAMEESRGRGIEPTHLGCMISSPLLTGGDIPIPVRQITDNTVNTILNQFTKVAQSKQQQNVTLWGEPFTVVVTTVDRTGLPGRRVLKGGARRSLASVHHRVTETCLIKICNPDGHCLFYALQATMVAKTCGWPRCRFYDYLHSRRGQQGCLRRDALQLMQQIGVRTGRNTYDAEICVPRVVDHWNNTQQQHRFAVFIFGSSGQYKPLYKYINDHYDTPIVLYLNNQHFDGVQKLHGLFGQHYCLDCEKPYERPSRHLNSCKARCMLCSRVGPAFPCVPSGGFFHQCAGCNKMFRNNGCLQHHLASNFCAQSKQCKDCGVIWATRVHNRDGRKGHKCHETYCQLCNTFHNPERGCFIQPIEPKEHDPYRIVAFDLETMQHQPVDPQQPEKREHQPNFIAARVACPKCIESGNWRRATAGCRFCGPHRTVAFCQRPFEDTRVDKRVVADNPLQAFVDWLIFQLPAKYDTYAYSHFGGRFDMVLVFRELFRIGFNPEMLRRVLN

SEQ ID NO: 157648 - protein, 344 aa, Heterodera glycines
SVKSTAKAPPPASVSAELAPRAPLADSPPRFEETEQQKPTTPAKPSVKTTITAPPAQLKSSATPHQQKQQVPVKPPAPVSIPAKPSGSPQRFEGTEQQKPTTPAKPSVKTTITAPPAQLKSSATPHQQKQQVPVKPPAPVSIPAKPSGSPQRFEGTEQKQQPPPPPTSAALTLADLNLPENTLSVQIDPLSYVPNSVSIQYLENMERFKLVFNEAIVSHVSFSPQLGYVLGFENPQHVVSNELSKYPVDLRGGISSFAVYSKGLTENMIIGNSLSSLLRVVSISGAIPWEYNEKIYDSPIFARVLPREINEIEIELRTMDKGRLVPFAYGTTMVVLIFKKVINF

SEQ ID NO: 157649 - protein, 40 aa, Heterodera glycines
LINNFESRLIDGPPNGQFDEDKVPETAGEESAAVNAAATG

SEQ ID NO: 157650 - protein, 225 aa, Heterodera glycines
KFVEHFQFIWLSSFAPLFLPLPVNAETTNSTELKRLERTLTSEHGMAKALALTLSRLLPFIETMDEWLGFGKLLYRIDKQQIDLDSPDEQHTTRAVPTKFLQFISNFWTNYRSKIVGKSPKVSTMKEYTMLVIPPVPSREQMRAVLNEHDLFLYMGHGSGGRYFGRSLIRESECRAVSVLMGCSSVRVVDEGPGLDGRSSVYEYMIARAPCVIGCLWMVTDGEID

SEQ ID NO: 157651 - protein, 68 aa, Heterodera glycines
MHAFCARAIYHRACQSKAKQQRWCFERIKGIESVNRLLGKYICNLSTILRSELEMINFTIQTNFRCSN

SEQ ID NO: 157652 - protein, 39 aa, Heterodera glycines
MRKSVNRLLEKYICNLSTILRSELEMINFTIQTNFRCSN

SEQ ID NO: 157653 - protein, 78 aa, Heterodera glycines
  unsure (1)..(78): unsure at all Xaa locations
GGDRPSSADFASPVPHVRNGASLVDFYIGLGLAISSSLFIGSSFIIKKKALIKTCXGRQNTTKERRKGGYGYLKEWLW

SEQ ID NO: 157654 - protein, 97 aa, Heterodera glycines
FILYVALVLLFTFVLVVYVAPRYGHTNILVYIAVCSLIGSLSVISVKGLGLAIKESITTEEQFTNWLTWFWLLAVLGCISEAIGLSHQIIGHLQKID

SEQ ID NO: 157655 - protein, 30 aa, Heterodera glycines; identical to SEQ ID NO: 141344

SEQ ID NO: 157656 - protein, 45 aa, Heterodera glycines
MLRVVSKELVSKDMTGKFHKIQGQLKILSFFEEQEVIAFSMLPGF

SEQ ID NO: 157657 - protein, 77 aa, Heterodera glycines
MAGLDQSFLSKGLVYDVMGTQNCNYDYNVKGVANIKSLNKMCVTALCTVQTMHRMKNIAKSEQRQKQCAKWEQGQCQ

SEQ ID NO: 157658 - protein, 365 aa, Heterodera glycines
MINDDEHQRVANIKSLSKMCVTALCTVQTMHRMKNIAKSEQRQKQCAKWEQGQCQANDGHQQRDESTDGGNAKATKADGKQKHANENGGQQRGKDFGGGPLPSGRLERKRTPSAAPAEQPLRGRMVSATAEQWHRRKAISTANRAKQFDPRGRRPIRNENGKKWLTFGGQLPQPQPVVITRQQQIEQRRAIKEEMGGEDRKGGAEGANTAGTDRTAQPQQTAGEEQKAAESGSAGLTATETTNEGGDQQRVTGVPLITVGLTKAEEGAKEMNKREKCVHCQQNEQQQIERDGGTERQTEKKEENDGTKANPTGEEQQLNSQLTALKGIGEMGGQRVELNTGDDSEEQEQQAILRRLYSKYGSNAR

SEQ ID NO: 157659 - protein, 314 aa, Heterodera glycines
MKDIATEESIAQRRLNLKANFMRQLQIRRGVLPSEIPPVGVATNAVPTMGRKFRKVCCENKKTFGEKSLIFPQPLESRFPPAKPRFGLGMTAADFEDKTDNCSSLAKGPSLTETNAPKGRNVRPKAINCYINPSQSVSTWPTSNDTDSDGQSPSPTVFTHHHFCAFISVFRQSSASVTSFGSSLTTATDPLVAQHVDQNGTIFFPTSSTPSDHGQSYDETPASSVLTFDLSSHTSSDRTLTNNSPLSMNNETPRPVFSLFHEVQFLHSLGRRLSLHCNSRQDEGSFIFKHQMLNKMIVLTRSEALGEEGIRISQ

SEQ ID NO: 157660 - protein, 474 aa, Heterodera glycines
MEAAIHQLTAAIQQLLSNQNGAPAANAHASPTLPPIDCFEPSDDRSISDWLERFNFALDCAAPQLADEAKVKLLMTKLSEVAFSQYSKSCLPKKVIDFDYSQTEERLKIAFSRPQSIWIDRYECLRASKSEDESFRPFINRHKRLLRDFQFEKLNEEQFSCLMLLTALKSPKDAELRKRILSKLAADGYLVEYDGVVEDLQMYQSTIAEAKVLEQQPMGSRNLMATKLKAKKKRTNSDLSSNASSISTGTRSSNRSQRVCWRCGLSHSSRNCRHETTVCRKCKKSGHLERMCAKHQAWLKKNGGKNEKAANNVRVGGVFLVKSENQRKNGIIDVPIDVNGTKVDFIADLGTEGTVLCEDTVRQIRALKLSRCQERAQYHDGTTRPFVGKGKTTFSFGDRSCYGHFFVSKDGSKNLLGLDMMDRLGLSDSIRNGLKDKFRTEASKENGASQKKKKKSSEKTDVAKRRISSLWERM

SEQ ID NO: 157661 - protein, 252 aa, Heterodera glycines
ERFNFALDCAAPQLADEAKVKLLMTKLSEVAFSQYSKSCLPKKVIDFDYSQTEERLKIAFSRPQSIWIDRYECLRASKSEDESFRPFINRHKRLLRDFQFEKLNEEQFSCLMLLTALKSPKDAELRKRILSKLAADGYLVEYDGVVEDLQMYQSTIAEAKVLEQQPMGSRNLMATKLKAKKKRTNSDLSSNASSISTGTRSSNRSQRVCWRCGLSHSSRNCRHETTVCRKCKKSGHLERMCAKHQAWLKKNG

SEQ ID NO: 157662 - protein, 28 aa, Heterodera glycines
MPVVAAVDLILENQMNFVKKRRKRTHIN

SEQ ID NO: 157663 - protein, 161 aa, Heterodera glycines
MMDVARDNFEKVLIEMVQNAENKTALKGIQWMGKSILCYFSKDTAIFECSVCFTESYVSTAFRCTAIQPLKDDSEKRHLFCLDCVRGQAEASVNEALLSEEALGLRCMASECRNPILFSIFNANYHGSPKGSGQSLQLPEMRIFILQVLKIPNKIVLFQTL

SEQ ID NO: 157664 - protein, 570 aa, Heterodera glycines
MYEDCNTVFARCHDAKKARLFITFTNNREWPEFKENLHKNGQVFTDRFDMWMRVWSSKIAEFREELYDKKFFGTILGYGESMEFQGRGGPHAHIVAQTDLDAVPYVIQEYIWAHIPSLPDKDDDTPIAKMHREIRETMHMQLHRCSDSWCGPSDPIYGRCKKGFPAPYSKCTILRPDRPAMYFRPSPSDGGAQLEVNGLIYDNSHVVPYNPYILLRYRVHHNVLFAYGNKANIKYALKYPFKGPGHCYVECKEESGNKIGIDEPAQYAKMNFRGATEAYAIVHSMPFARLSHHVVKLAIHLPNQQPIVYRAFQLVSKAQQIQQGELPETQCSAYWKQWQNEWKNDPKFKDILFEKVPERFRWAKDKWVLYKRQQIKRPPIGRIVPVPPSDPERFALYSLMRHFPGDPDHLKMVNGLLCTSFTEAAIMHGLLEDDKIWDKTLAEAALSRWPDQMRWLFVSILVYGQPSNAIELWNKYKDQMYNPQGIITLAQHKVAELEALADIDWRLHSCFNLSCVHFSLPDPPTSIAKNTDAAIEKFFFGDDDLNLPPGQPNPRPQPNTPPPLNSDQQK

SEQ ID NO: 157665 - protein, 282 aa, Heterodera glycines
MSVRKSRSAKVGPQMSVRKSRSANVGPQKSVRKCRSAKVGPQKSVRKCRSAKVGLQMSVRKSRSANVGPQKSVRKCRSAKVGPQMSVRKSRSANVGPQKSVRKSRSANVGPQMSVRKCRSANVGPQMSVRKSRSAKVGPQMSVRKSRSANVGPQKSVRKCRSANIGPQKSVRKCRSAKVGPQMSVRKCRSAKVGPQKFGPQMSVRKSWSAKVGPQMSVRKSRSANVGPQKSVRKCRSAKVGPQKSVRKCRSAKVGLQMSVRKSRSANVGPQMSVRKCRTTVP

SEQ ID NO: 157666 - protein, 47 aa, Heterodera glycines
KFSILMSLSVTRNHYFGDFVTKIVKNHYFGVLSLFRHFLENSLTKMQ

SEQ ID NO: 157667 - protein, 81 aa, Heterodera glycines
MIVKTDYSKTLKITDIGNAYTPNEEPLAQIVHWHWDEKGAQRIVDTHTLNKGSEHNCGIYTNASSFVVRIHKKREKKSNET

SEQ ID NO: 157668 - protein, 98 aa, Heterodera glycines; identical to SEQ ID NO: 152313

SEQ ID NO: 157669 - protein, 70 aa, Heterodera glycines
MTTNNGAKKGETHKYGRLAIKDITPLITRLDTHWRCDTEHERKEVLRECLAATAVVSLFNWLNGQAHCLG

SEQ ID NO: 157670 - protein, 141 aa, Heterodera glycines
SYPYTFQFCVLCQKNVHSSKLPCHIRQKLPCHIRQCHVGKPMFQCPVCDFTSTYSKNNVKSHMVSLHGLAGDPISYMDQGDPISYMDQYATQVEEFMKQCFPNVRGRGRPLHGRQSPKRIASSATVSGRMSEFESNFRRVK

SEQ ID NO: 157671 - protein, 91 aa, Heterodera glycines
MERTFRKGRNGTDGGERKQRRQGFDEEDEDTTTKQQNNNKHKQRKMEEEGEEKDERKKEEKGGAGRGKRKKKRREEEKEKEEKGGEESKQE

SEQ ID NO: 157672 - protein, 272 aa, Heterodera glycines
MALFSPLFCSSFLLLSFCFSICAFLPQISEVENEIAEFIHRNPLAIDHRIALVQLIFEHQTELILANEQISFPKNISLDDLAFPYEMLVSKITSENFEELAQNLRKNALKLAKESTGKFHFLTENHFYGQFINYLAKIAQLKVEEALKKRRENDNLDELSEKETNDFSEGWKSLQMFVEMYSFGSELFMQLAANYGGKFPKKTRKTMKQLVVKKIPQMDELCQQFVDYFQAKFMKSIPQKLSIEPMNAQKIIDQNDTATAWANWFREIGDIT

SEQ ID NO: 157673 - protein, 61 aa, Heterodera glycines
MPRHIAIVMDGNRRFARTQNCATPMEGHSAGFVQLTKVLDWCNELGVEEVGISILQFMETN

SEQ ID NO: 157674 - protein, 69 aa, Heterodera glycines
MSNNENENVMNGEAVGGVEIKVEAKEEVNTEPQEDAEEAKIPQFSKEQMERSVMCCTNEGEIVNVHLGF

SEQ ID NO: 157675 - protein, 232 aa, Heterodera glycines
TLHRSVCFSLLIAMPLQLHTSAGFFACELAAVRSASQFRQQLETHSLLPPAPSSLQLITDASSSPSSSLSFASATEEAEAEEQFICQICNKDFRRPDILSRHVRRHTGEKPFGCDWCGRFFSRSDHLRTHQRTHTNEKPYQCTECHYSARRRDVLTRHMGTRHEQKTNPYSARRRDVLTRHMGTRHEQKTNPSVFATAAAMAQCRDDGVEDRMRRLLRANVLRRKSRTSAEE

SEQ ID NO: 157676 - protein, 196 aa, Heterodera glycines
TNVGENPRAEQVDAHILPQIRRSARFPHVARFSVCPMDKYQMASPQGNNFLLHRFVRVQARPTVGHGQLRAGDERTELSQLRTLNGRGRAEEQQTSVRSTRDQLFATVLLLLLFYGLSVTMSAHFKRMDWRLFALFLRFFHHKFCRFVPFMRTVQAFFDQYNLHVQTILTANACKSAQTEENRADASLAHWTTARG

SEQ ID NO: 157677 - protein, 1533 aa, Heterodera glycines
MDLKGVIALGEKKVRLGEIWTSIVSVIGTEPPKLPRVILPKNDTFEPRTENILNARIDEIFPTGQNFLVRGIQHQYPGIIIGRTLVAPGATKEVIIRLMNAGNAPIKIYGNSHLADLEPLQINALPGDEIAAKDFIPPETRWSENLPKLPVNDMNRPPSERIDLEETRLSEKAQRELKQIVDKYSDAFVGDDGKIGRYNGPIVHKIDLTPGALPFHFRPYRYPPETQKEIERQIKMMLDQNIIRESESEFASPIVMVPKADKKSWRFAVDYRALNKMTKKRVFHLPNIQELLDLMGAKKYYTCMDMQQGFMQIPMAKEDIEKTAFISHLGIYEFITMPFGLTAAPDTFQRVMNSLRRRLTAAMLIYLDDIIIGSETEEIHLVDIENFLRLLKEVGLKLKIEKCHWGKAEIRYLGFLLSEKGVRMDPRQTLTQDKFEGKIEENWGPEQENALKILKEMLTTAPVLQSPRFGRPFTIECDASKKAIGAVLLQEKGPVAFVSRALNRHETNYPSIEREALAVVYSVKEFSPYIVGSGINFLSRYNVPGIDSGGEEEINSQNKKILSTEDKAEKQTKENEQIGVQEEAISLKEIIEAQRKVKELAKIYYILKTGKFPENVLKWKRVIQDYDLVNGAIYYKRGKSNSEKPKLVIPYSLREKIFHLIHDQGHFGFDKTWPEIKSRFYWVGMKDDVSLLTETCEGCQKRKVQPGQAKAAPNIPIKPTEGPFQRVHCDIMGPLKKTKNENSYILLAIDSFSKWIMTKAISDQKAETIANSFVEMVIHQHGTPEIVVTDQGRQFTSQLFENLSKIYGFEHNMSTAYHQQSNGLAEGSMRIVANIISQSINEGGDNWDEILQGAIFAYNTSINTATKNSPFFVIHLRNPRLPTDQLLKLPSSDELLSDVSVYTRTHVEKAAKAWEIVRTEIVKAQERNKEGNDAIRRATEREFEIGDLVLVKKEVMKHKFDQKWMGPLRCVGIETERKNLILQTLDGKGKFKRVHQEKVKKFHGPATLPLREADEPINWEKYVDDPNLEQEEAEESEEEGFEIVLSKEKAMSEEMIGKSKKFSKFSFESSEEEENGSTIAFVQNQEDISDDEGPEIFFENRNFVFENDETPTLLDIVLNGTIVTACTGWLNPTIIPLTSSVPENQVDENWEIYRNQEGERYVMCWIFGENFEMHISSITDRIVLGMEVQFLFAEKWSLKTENERESYWEIISGINGVMYEINRIPEIFISEKENYDDQNEFRMGINIINSGRNEEMGEMENNDKQFLDKVENMNKKGRLNESSKLNGVTYESHSFFKTIDHTEMELLTKDEEHVLKSLEKSLQSQLLAVRKSLAESEGSKMPVEDEDQVAPLMDEWREKEEKEEKKEKKEEKGMKENKKEEKKEKREVPRKKAEEEKRSASAVTVGEEVVSIVDSTEEREQEREQELFLNPKVTSERMAFWESTLYNQAKKDVAEMREMNRKTGQVGVTVSSKKRVWSELEPPALPDEPSSKFGEKMRRCAEMDQNTKEARVVMDTLLVIREKERELSDQAQK

SEQ ID NO: 157678 - protein, 76 aa, Heterodera glycines
MSPRTESPFGFTSFQIWAAICAYLALLQTYVAFVEQIGAGIEFVLVTLEALLQLFTMITFSTNRSTASAAVQAHNS

SEQ ID NO: 157679 - protein, 101 aa, Heterodera glycines
MVVQSDKILSSVPLELLLRVNSKFSILFCLLTYALFIYKIFSLPYPLHVLLSEAFIVILFGPIEAFRISSGCFIGGERNNLATEIFKKILKNGKTENSKSI

SEQ ID NO: 157680 - protein, 972 aa, Heterodera glycines
MTCNPLWEEISENLFHEQVSSDRPDLVVRVFNLKVKALMNEINKVKIFGEVIAWMYPVENQGRGLPHIHLLLTLAEQDKLVNGEDVEKKGISARIPDKELEVELFALVKRFMIHGPCGDLNPNCPCMEDFVDKNGIRGRKCSKGYPKAFQEETIVLENGLALYARPNDGRTVEVFANGRRHGLDNRWVVPHNLYLLKMFKCHINLEKVNSVNSVKYLHKYVHKPPDRARLELEEKNDHDEVKEFIDARYVCPQEAVWRILELPMYDRSHCIMSLTVHLQGEQICYFDENMEEEEIRERISNGSELMAYFELNKESELAKTLFYHQIPEKFCFKKGKWTARKTYFNTIGRMVKVSPAEPERYHLRLLLLNVKGACSYDDLKSVIDMNGIVKVCETFSASCLERGLIRNDEEWKKALEEAESFEMPWKLREFFALILVHCNPAKPEELWNMFKDSLSEDFCRSFRKELAYAKAYKEITLSIMKAGKTLADFPTMEQINVDDDVEQVFDLAEELDLGQREYALMYAEQREICDEILHRIWNPVNEPAFYFLSGPGGTGKTHVNKTIVHMLRGQKKKVCTMAFTGIAATLLPAGRTLHNRFGLTLDMSNSSISPRSKAWQELKTTDLFICDEAPMINKRAMRTLDEKLKEIMNNGIAFGGKVMLWTGDFRQTLPIQKHATRAEVVNSTLKRSEYWRLAKRYKLTKNMRALETEQEFAKDLLEIGSGKWNSENDEIILSENCISYGDLAEEIFANCIASENWNEMAKSAILAPKNVDVSEMNNRVLEMLPGEEVVYTSIDLAQDENRQRADDYLDEYLNALNPSGFPRHKLRLKKNAIVLLMRNLNIEMGLCNGSRMKVEEMHPNLIMCKILTGDKAGQTVYIPRITLCCSEDYPFDLHRHQFPLVLAFAMTINKAQGQTLEQVGIDLRKDVFSHGQLYVALSRARAWNKLRIRLDDGNLERKVKNVVYRELLDNSD

SEQ ID NO: 157681 - protein, 36 aa, Heterodera glycines
MSLLPPVVALMRSRKNPGTSGPGSRPGPGGFLKFVF

SEQ ID NO: 157682 - protein, 69 aa, Heterodera glycines
LNQVCSMNEHLRAENARLIQQQVNNVSSSSATSSAAGGSGGGIALPSANHPFVSPTSLVPQLEAANSFW

SEQ ID NO: 157683 - protein, 214 aa, Heterodera glycines
MKKCAKDGKFWAEKMLLAYRTTPNSALNGLSPDQLFFGRRLRTQLSLVHPKEEQAEVIDPAKIRKSQADYARKMARQFDQHHGSKSVEFLPKDPVLLLNFNSGKRFWLNGTIIERLEKSPTYRVHVPALGRNVHRHANQLRRRYPLEEDGNDTVRIPPQAQEEQDRDPSPIREPPPQPAPIRRTQAKRRSPSPPLAPRRSQRQRKAPIRFSPNP

SEQ ID NO: 157684 - protein, 64 aa, Heterodera glycines
MFLDYNFFLCHPNQRLLVSFESPSNALLACKNPKNSVNFEQIMAKKANRRHLGLSNDTNNVGFG

SEQ ID NO: 157685 - protein, 182 aa, Heterodera glycines
MGKVDESTREALEEQFQSFYTSVLAYLDKWHRIDRFPEKLQWVALAYRKIPHDDALALARQIAPELTNDLFDDVNEANQILNSFPNDEFQKLTPEQKWKKLFEADLQICLICSSWSASYFPCLSRMHLWRGYSLCADRNGLINEIFCKSKQSRRWSKPKSITIFLAHKCTKCSFPITNCQRK

SEQ ID NO: 157686 - protein, 36 aa, Heterodera glycines
HCGGRRVGSVGAASLLLPLDVVVARGPDRKAAQQAH

SEQ ID NO: 157687 - protein, 345 aa, Heterodera glycines
MDLILATDWINNAYPEMDQQDHNKETTKKDQQDHNNETPKKDQEDEEETKEPSWISLIDEEQKQDPFTPIYDEPPRASTPKTCACAERPRPIPLVEHLCKRFNCSAHELHVLFRNLEKRRDIVEHLRSAQLRTAHLRPFVRNFPVRCNDLSILDAHSVPAYRGFLGITMKISNCTVIFKINSLNTQQFLAIAQRGINTEYNPRRFHAIIMRIRYGAKTVAALIFQSARVVLTGVPHPDQAQKFAARVLRRIEYTQCRTMTIYELRVVNIVGVLTFDQRIRVEKLQQSLGGIYDPTIFPALRCKLDNGATCLIYISGKVILTGVKNVENLKNSFDYLSKIVPNYFR

SEQ ID NO: 157688 - protein, 112 aa, Heterodera glycines; identical to SEQ ID NO: 127606

SEQ ID NO: 157689 - protein, 532 aa, Heterodera glycines
MQHTKRYLLVPEEIYQSLATLSPSDGSPIGLVRARIKQIKNDDAINEAERAVKYEQEIKRLNKLKKDEDERPVGVKLENLSDVVDAMPKPFNIKRPIVVATRRHLKVGRARKENVEQLEDDDDDEDDYETPRASSTNKRQPTQMEILNLIYKNAQSLGVSEEGQVLRAGGRPFITSSVDDIVSHLLNKDKRGQKEPTAFKEFIERAKQNRQLTTQRTYTLHRQAKRRYRRLPTLAPGLHTEWQADLAIFDRITKQNRGYKYLLVCIDTLSRQVFVEPVKTKTSANMINAFEHIFKRSKYIPWKVLTDQGKEFTARAVQQFFRTKDVEHFCMLTSPQFHAGMAERANRSIKERLYRYFTEHNTYKWIGVVQDLVYAINHSQNSSIGMCPADVNFKNAEALRQKLHDAAANVLRHQPKYRVGDRVRIEKYKHVFQKGYLPRFSNELFTVVEVHSERSPVVYRLRDDNNEIISGWFYANDLCKTLENKQQKMYEIEKILKKKRQNGVKYALVKWKGYDTRFNSWIPAHSISEKSI

SEQ ID NO: 157690 - protein, 54 aa, Heterodera glycines
VDAYARIYRKTLIYHSHVDNVGIKNKYVLMDVRISGALNIVSMWMRTHASTVKH

SEQ ID NO: 157691 - protein, 224 aa, Heterodera glycines
MATYVYFSLSSFLSFFPEKKKLQQKSFGEIFGEKWQKKKEEKRNELKKREIIGKYYKIKEKIKQKGRKYSTKEWDKINLKIAKKLGTNRTKIYKWIKEFCLQKNKCHKSKSDEEKLEIVQKFIEMTKEYRQKRKYSRKEWNQNYAEICKKIGVSQFIIDKWKKQFGISKKRITEKEKMEKMNIYWQTKIENPKMSDNAIAKTVNTSHQNIFNWKKQFGEEINEE

SEQ ID NO: 157692 - protein, 129 aa, Heterodera glycines
MKPNLIFNPVCPCLVVVETVLVEVDDVGVVLLEVLVVLLDSVVELGVVLVVVLVVELGVVLVLVLVLVLVDVDVDVDVDVLLVVELVELVDVVSSDDESHKIFEDILATKKIITRIAIGSGIEETIFIK

SEQ ID NO: 157693 - protein, 429 aa, Heterodera glycines
MGPLGPGGMGPGGAMGPMGPGGMGPGGAMGPMGPGGMGPGGAMGQLSPGGMGPGGAMGPMGPGGMGPGGAMGQLSPGGAMGPMGPGGAMGQLSPGGAMGPIQTCICSPNACCMESQRAPQIGAEARALQALTISCICTPVQRSDCCPPPPPMGQQFNPPMGQQFSPPTPPMGQQFNPPMGQQFSPPTPPMGQQFNPPMGQQFSPPTPPMGQQFNPPMGQQFSPPTPPPPPMGQQFNPPPFPPPPSGNQPVCVCTPAASVQQDACCALPQQLQAAPLLPLPPIPQQNFPRSSPPVGGFATGGPFTPQLQAFAVETNYRNSNSTRLSAPPISGIGFGASSADGSQSPPIGYAGKTQPCLCVPTQLGGGGQMPLCCQQKSKQKRDRRFRERGEERERMGKEEEQTDERESSAAKREGGEREEAEKQTTKRPI

SEQ ID NO: 157694 - protein, 28 aa, Heterodera glycines
AIEFAQFATAGIVLSAFALPFVLAHAGV

SEQ ID NO: 157695 - protein, 45 aa, Heterodera glycines
MVIGQNTYKAKRNASNLKRNFILAHCLLKPSISSKLPTPHLSASF

SEQ ID NO: 157696 - protein, 78 aa, Heterodera glycines
VQIYCFKFCFYIMDGNNLFPLVKRKQTNAELEALKKLKLNSPRMKFRFRLEAFRFALYVFWPITIVWIFNSPFFQQKS

SEQ ID NO: 157697 - protein, 95 aa, Heterodera glycines; identical to SEQ ID NO: 125597

SEQ ID NO: 157698 - protein, 93 aa, Heterodera glycines
MVHNPKVMEKIQEELDQTVEKEQQICWEDRLKLPYTSAAVNEVLRVGNVVAQDFPHRMMRDTLVDNWTLPRGQPIVAQISVVLMDPEVINRNE

SEQ ID NO: 157699 - protein, 123 aa, Heterodera glycines
MLKTDELIPFALGKRQCLGESLARMEMFLFFANILNRYKTFGIYTPHDYFMLVGAHYSRIGIFNTHYSAFVSSPLGTKCHRWSVGWAFPCCAQSSRVALRSDARNRNKQFENVFNYPMLIDSF

SEQ ID NO: 157700 - protein, 65 aa, Heterodera glycines
MRPFSICLLLLPLILLLLQRSTAIRPYPIDQHGRIGENDGYGRYGYGNSAVMPRDATKLFFKLSI

SEQ ID NO: 157701 - protein, 19 aa, Heterodera glycines
VDLVKNLANYALFVLRLTT

SEQ ID NO: 157702 - protein, 56 aa, Heterodera glycines
MEKCEKLTDGKTDEDEARRKADAKMKQFEAKMEMIGKIFSSGFIEHYSILKAQNFS

SEQ ID NO: 157703 - protein, 63 aa, Heterodera glycines
MCSLMHSKMREIQPPVLWPPTLAYALAIGTRAGTAPTMRDPRSRQNGRAKNCWTESLGLQRLD

SEQ ID NO: 157704 - protein, 124 aa, Heterodera glycines
MSSNGIITIVALFLVLFGTHITTQIGAMNRHRQQRSLGHPFTVDKQQHTAQNENLVGAYLSRGMFSCGAKYVGTLQRLKRIIEEVHADYSECQKSMKQMDEDEQMAFGKGHGTERFAVIDELIN

SEQ ID NO: 157705 - protein, 160 aa, Heterodera glycines
MRQYSAHINAFFFGSLFLFILPSVVRTLADENERFASSKIMRRGPTIAMVLQRQKQQKSEAEEMAPADVDDDENGAGGRGGGEGRGRHVPIEEEDDGAAESGQQIQCQFHANEELHGEKMGRGQVDTKVDNWKLPYICAPDICDYVQNRIQTSVFQSLIA

SEQ ID NO: 157706 - protein, 166 aa, Heterodera glycines
MCAKHQAWLKKNGGKNEKAANNVRVGGVFLGKSENQRKNGIIDVPIDVNGHKVDFIADLGTEGTVLCEDTVRQIGALKLSRCQERAQYHDGTIRPFVGKGKTTFSFGDRSCYGHFFVSKDGSKNLLGLDMMDRLGLSDSIRDGLKDKFRTEASSYTSLFHRIAVAK

SEQ ID NO: 157707 - protein, 246 aa, Heterodera glycines
  unsure (1)..(246): unsure at all Xaa locations
ERFNFALDCAAPQLADEAKVKLLMTKLSEVAFSQYSKSCLPKKVIDFDYSQTEERLKIAFSRPQSIWIDRYECLRASKSEDESFRPFINRHKRFEKLNEEQFSCLMLLTALKSPKDAELRKRILSKLAADGDLVEYDGVVEDLQMYQSTIAEAKVLEQQPMGSRNLMATKLKAKKKRTNSDHSSNXEQHFDRNTQQQSIATRMWRCGLSHSSRNCRHETTVCRKCKKSGHLERMCAKHQAWLKKNG

SEQ ID NO: 157708 - protein, 258 aa, Heterodera glycines
MGDAIQQLTAAIQQLLANQNGAPAANAHALPTLPTIDCFEPSDDRSISDWLERFNFALDCAAPQLADEAKVKLLMTKLSEVAFSQYSKSCLPKKVIDFDYSQTEERLKIAFSRPQSIWIDRYECLRASKSEDESFRPFINRHKRFEKLNEEQFSCLMLLTALKSPKDAELRKRILSKLAADGDLVEYDGVVEDLQMYQSTIAEAKVLEQQPMGSRNLMATKLKAKKKRTNSDHSSNESSISTGTRSSNRSQRVCGDAV

SEQ ID NO: 157709 - protein, 45 aa, Heterodera glycines
MNFLYLGIAGNAQFFNTQQKEEEEEADQKEDEENGDGKESITQGI

SEQ ID NO: 157710 - protein, 42 aa, Heterodera glycines
MSDQIRCLIQSGVGSDHYAITSDVSLFIGLIKVSLATMPYFC

SEQ ID NO: 157711 - protein, 100 aa, Heterodera glycines
MSFVLHNSPVITSFFQFVPSNSLRAVPFFIFQKHPSHFGRPIGMIGVAPECFRSLLPNPPMSAGRPPLWSGRCPAEFAGEVGLHVAEALGVAVRFAKLTK

SEQ ID NO: 157712 - protein, 329 aa, Heterodera glycines
NGKQIIEHLRKNEKEQKISTISGFNGTLAEFLAQKSGSETEAQKLFLSVKNLFRVMSHQLDAEGKAEEGKDGIRYGEEAEERTEGKGCDKKHGDNGKGQIKEENANANNRERKAYANDGDKDGVLRRRKVRKVKDEVQTREINKERSVRVGDKKQNKAKLGKEKTKTKKVDDNGMEKGENEAANVQKIIKKTLATNAVPMPSDLLQLLMQLWPNVLLLGAEGGPADTSAANDGKTSPRGHRRRKRSQQAEIEKTADVLLAILSLAVAFVLLNIFTITLGFFESWPSIFALTIAGICCYKLMKTDFYHGRVYKALIWLNNRNRIGGYQFH

SEQ ID NO: 157713 - protein, 239 aa, Heterodera glycines
LLKLHADGHKVLIFSQMVRVLDLLEEYLSIKGYPFERIDGNIRYPFERIDGNIRGNDRQAAIDRFSRPQSYDRFVFLLCTRAGGLGINLTSADTVVLFDSDWNPQNDLQAQARCHRIGQTKPVKIYRLITANSYEREMFDKASLKLGLDKAVLQSMLHNNKGESTQQMSRQEVEDLLRKGAYGAIMDDNEGTKFSEEDIDTILLRRTQTIRLEPGVKGSTFAKASFTSSHNREDINIQD

SEQ ID NO: 157714 - protein, 151 aa, Heterodera glycines
EAYALSQEANISLEQIIKRYTKCRNQFLERVADQISDQLQQDHSDSTDDISTNKHERKKRPIVFISPQLRKRVKIQQQLAEADSANDGDDDSEQKQQKEKSPFTIPGGAEDDEMTDVHSQLEQKQQQQKQQQETEAKKSDGTTKTEDIPSS

SEQ ID NO: 157715 - protein, 52 aa, Heterodera glycines
MVFSHDEWFVQCVPALGEQLDKLLLLSQHQREEEGNSCLQQRRNTDDDGECH

SEQ ID NO: 157716 - protein, 258 aa, Heterodera glycines
MKQLQKCPPQINNLTNSQVSTNSPSIAKGGGTTSKGDSKTDKPKDKKEATSKGGSSTTNNAPNAMVSTNAPSIAKGGGTTSKGDSKTDKPKDKKEATSKGGSSTTNNAPNAMVDEATSKMRQSINNLTNSQVSTNAPSIAKGGGTTSKGDSKTDKPKDKKEATSKGGSSTTNNAPNAMVSTNAPSIAKGGGTTSKGGSKTDKSNAQEEGPASEGGSSTKNAPNAQVTANAPAQGEGPSSEGGSTKKPIKDKSEYMSQP

SEQ ID NO: 157717 - protein, 139 aa, Heterodera glycines
MTALGLQVEGYAGKLKDYENTEDSIPDPDAEMPQQTKEGPSTSVESVEDTSEQLPTTPTPMTPQELDVPSVEMVDTDVPFPSTPADADQQAEPVPSASTARCELMATPSTLCLPQIHSGTDEAPRIDGDIHLSALRSSE

SEQ ID NO: 157718 - protein, 231 aa, Heterodera glycines
MLFLFPLPLILLLLVAIVLVSQCCGGCVKKKGDSKTDKPKAQEEGTSKGGSINTKNAPNAQMDKLKAQEEGTSKGGSSSTKNAPNAMVSTNAPSIAKGGGTTSKGDSKTDKPKDKKEATSKGGSSTTNNAPNAMVDEATSKMRQSINNLTNSQVSTNAPAQRGAMTSKGGSKTDKSNAQEEGPASEGGSSTKNAPNAQVTANAPAQGEGPSSEGGSTKKPITDKSDYMRQP

SEQ ID NO: 157719 - protein, 231 aa, Heterodera glycines
MAERSGGGGGRKAGQATDGHAGQDHHSVESIVGKGRHKNGGERHGQGHDVSVSLQVVREHNVTISASCCFGGVAEKKFPPLFATTTAHRGMPLSFCRNEKGSKSVNRTPMGAEVRANGAAGDVVRKLELRMVDIELEEGEDEEDGMEEEKRKWRRREWHDGMSGKRSRQEEEDKGGAAPTAAQPKQTTTGWTQFKRNREQQQRERREDGGEKKGRWFGHALISYARESRVN

SEQ ID NO: 157720 - protein, 114 aa, Heterodera glycines
MDRTIGEFDNCTDTIKAKKTTTGEYAAASFTNAKTVVRENRNYDLQSVDCWRRWSSLRRMPTTANAAKGGGGGTLPAKKREAKRTEESQNDGEEEDEALRRDEWGRLIVMGSRM

SEQ ID NO: 157721 - protein, 99 aa, Heterodera glycines
MQITIRGWRDSTQLGEEVRRREERKYTKKCTKNKQPIHLGFCAKKKCENQGQSTTCPRKCAKKQPIPLGFCGKKGENRGPSRCENPATVEKLALIYSSD

SEQ ID NO: 157722 - protein, 53 aa, Heterodera glycines
MPEKRQGKTKKDPRSPNKKMRKHIITASNKNSPTFDLVDSFGNIFIVLNYSMH

SEQ ID NO: 157723 - protein, 92 aa, Heterodera glycines
MTDKCINREFDNVMFDGVWNDTTAGGSIRFGAENFTRNPQYWIKVAGDNPNKSVILIISLMQKYQREERRPNYAAGFNIFKMVVNIKMGLDN

SEQ ID NO: 157724 - protein, 58 aa, Heterodera glycines
MTNFYIILFKFIFFRQMNISNKENIQEKNGAKNMPKFARKSELAVEQLTNKVLQVAAN

SEQ ID NO: 157725 - protein, 94 aa, Heterodera glycines
MPIIIYFSLNFQLVFLLFNIDIQGWDWLLYYNKLSPFPIILPSALNPIVSFCTINAYRIKFVSNIKCFGKSMKRLFRMKIGDQNAVSNIQMQQH

SEQ ID NO: 157726 - protein, 80 aa, Heterodera glycines
MFICFFPPADHAILDDKSVAEILGINLDDQIILAAYAINVTDIHLALSLYYLVIISTFAYIIMFGLAYCIKKFLDMKTKW

SEQ ID NO: 157727 - protein, 64 aa, Heterodera glycines
MRPIIWPSPLDHCPPPIALSGRTFAKRIVLAEDDFDAGKECVKNLSGGIYVQFVGQEETLTHRK

SEQ ID NO: 157728 - protein, 389 aa, Heterodera glycines
HSVTTQLLEVVDDFSALENRKSIDVIFFDLAKAFDTVPHNRLISKLQNIGINNSLLKWIQNYLENRKFFVKIGSDFSDEYPCLSGVPQGSILGPLLFLIYIYDLPKFCETDVKIKLFADDLKAYHVLSNISFSPLQNFINKFNQYCKFNGLKIASNKCLTLHLGHKNQKINYFIDDFQIPKNPGNEPVRDLGIYFTNDLKWAQHIDIISKKALRSAFAILKSIKTRDTKILVNLFNIYCRPILEFGSPIFNPYLKKDIEKLENVQKTFLRVIFRRNNYAAANYAELLNIYDQKSLESRRLKIDLKLFHEIILGKINLQNNESFSFSKNIVKNEYTIRTAYCSTNARYNSFFIRTSRLYRLLPKETRLLNPNEFAKLLERSDLNLLISLP

SEQ ID NO: 157729 - protein, 161 aa, Heterodera glycines
MHHQIHRRQRQNGTNEAANLLINAVQANECLRLTDTNEAETILLIDAIKENGTVPLKPPAQPAKAMHFVVISAVYSTKSKLYSDNQIVLLVDAQFDDAIVQQIFVAKTSNGTNEQQTNFTLHKASRRTDVCLWSSYMSVFDSVDQPEMLQVGQAENMAQIE

SEQ ID NO: 157730 - protein, 122 aa, Heterodera glycines
MVSKQCKVKRSYDKKRFEVGTCFSPLFFAEHWQLVVLTIEIYRHFGSALQIIYLMSAIEGIFDILKLYQAADVVQIEHWYSIQIEGEKYKGLAQTINTNQDWRNQISAHTDCLIKYGVNLTN

SEQ ID NO: 157731 - protein, 53 aa, Heterodera glycines
MRLVQVHLCRHDNVEQREALRVPSLRAMICDAGTGWVTTGYRHEDAGNEIGLI

SEQ ID NO: 157732 - protein, 161 aa, Heterodera glycines
MRNLKVWIFDLLYKLGSGFSNWSKCTPEIISLNKIYILHLNCSLMQILNVTDDWVVGVIRRLIEVTHRIITHEKMQRFYTDFIHWLCFALRWMNAKNSVLNKKLKFSTLIGTFFCVYVVQQLLPIIFPIRPPPAPVFKPITRDVIIYATFSYKNSTRYISL

SEQ ID NO: 157733 - protein, 118 aa, Heterodera glycines
MHSNFQIFFQKISLGKIPGWSQSRTKIEVPVPTFLVPFRKFRFSHFAFYFSIWPIPGVYNFCCVFNLYCLKIKIRLYLAIVTFISALHGCIVSLGLLNSGNLHGDLMITCCFIDFFMV

SEQ ID NO: 157734 - protein, 335 aa, Heterodera glycines
WICNDVWMDILPSFDHAQLGLKLALLSPRFDALVDKHFDGKSELTIWRSIEIRRKDKGPEPKLSVRMDDKFVPFPLPDRPLPSKIRFKCLQIDYIDHSVIAFLRSNHQIFDKRGTNLHLRIQSSHTTEGQRIWDIFGREIWPIFSANIRHLCFSRGDHLDYLLRQISPTILIDLNQLVSIHSFGLLPSAFGGDFDGPNATITAGQALSKWLHSPRKDGQPKQLRCDNYYEQTNTDWIDNFKEHFLRANAISYVSYEIHFSVRAPSMPMVPFELVNEWTKEKLTLAKAKKNEWGIGWIMKRCKIIGETAAVNWEDGNWDNNCNNVLIWLNSDTNCI

SEQ ID NO: 157735 - protein, 38 aa, Heterodera glycines
NKRGDPFVLQNFFKIKNHDNFLSGVLKVANHESDMYFY

SEQ ID NO: 157736 - protein, 77 aa, Heterodera glycines
MSFSPNSNWDNDFFTGQQQRNNNNSNNGATANSSNSSSLGWCVRANLSSPPAHAFGQHGPFSDDVHRAAEQTLIQGR

SEQ ID NO: 157737 - protein, 429 aa, Heterodera glycines
VFPFYYALIGLGSPLLDISANVGSELLDKYGLKENGISANVGSELLDKYGLKENGAVLIDQQNMDKFDEILNLDSDEILNLDSVIFLPGGSALNTIRVFQWVLNGADRAIFFGSVGDDSEAEADRAIFFGSVGDDSEAEMLLEKTVETGVEAKFQRIEGVRTGKCFSLINATNRSLCACLGASLCACLGAASLFSLDFLHLPENAKLIDTAKFFYSSAHFFTVCPEAIKHLATKAAHFFTVCPEAIKHLATKANELERPFLFNLSADYIPGKFKKELNEIMPFVDILFGNEMEAFAYAKEMNYPTDHLHQIALLLTEIKRNKGKRGKRGRIVLITRGEKPLIGHKMGQKEFPVIFVDKIVDTNGAGDAFCGGFLAAFACDFSLEKFLAAFACDFSLEKCVKFALSAAAIIVQNCGCTFPEEWVGECRER

SEQ ID NO: 157738 - protein, 89 aa, Heterodera glycines
MPIKHCVISLSLFVPLQMQNSEVQIGIKSHQSDCFVRANVHQNAKLFTFDSNITRKDVENGEENGVGEVQRENDTHGQNVFICLIVSAQ

SEQ ID NO: 157739 - protein, 121 aa, Heterodera glycines
MSTPKQENKFPKKPEFCKTEQDDDEVDTDPSPEEVEKWTPEQVIEWDQRCYGKMPAEEEIWQEFLDNGEANVIREFFGGKGAMEVEKSLREYAKKKEKRDEILMRKRKEYEQKMGNKKDEN

SEQ ID NO: 157740 - protein, 88 aa, Heterodera glycines
MLQNEDSCMNEPKEIPPNVPITQSWKLFRPKYMLTYRLCDFCLSALWNNKNKFKTNEERSVISFELCEKCTIDNCRATDILAPFKPKK

SEQ ID NO: 157741 - protein, 691 aa, Heterodera glycines
MRLELSVADTEAPSIMGLDWIIPFERATQQPIATTLEQQSPIVNSVQPTNDPVKLEGQIKASFPKVFQPGLGHCVKTKATLHLKQNVKPVFCRARPVPHGVQAAVDEELDRLLDSGVLKPIDFSRWAAPVLAVRKKSGNVRICIDFSTGLNDALELNRHPLPRTEDIFHALRGAKVFSQLDLRDAYLQVELDESSKQLVGINTHHGLFQYQRLPFGIKSAPSIFQKAMDQLTSGIPGVFAYLDDIIIASADHSQHVAALIELFSRIQDYGFRVQLDKCHFLKAELKFLGHVVSSDGLKPDPARSDAIRNMPSPHDIGTLRSFLGALNYYGRFDKEMRNLRTPLDLLLKKDTPWFWGPDQQKAFDQAKQVLQLDLLLTQYDPSLPIIVAADASQCGIGATISHVFPNGVERVIEHASRTLTPAERNYAQIEREALSLIFAVQKFHRMIYGRNFTLLTDHKPLLAIFGNKNGIPIYTASRLQRWALILSNYDFTIKYVKSANFGQADVLSRLISEHRTDEEVIVAHTSDNDVDSTEEVEYALLVNLEQLPVDAKEVSELTTSDDLLQQVAQFVRSGWPNKCPANELMPFYSRRDTLTLVGGSILTGNRVIVPAPLRQRVLKTLHFAHPGIVRMKALARNHVFWPGLDSDIEAMVKHCAECQFAAKMPPKAPLRPWPIPGEVFGRVHIEIAGMR

SEQ ID NO: 157742 - protein, 249 aa, Heterodera glycines
MPFLTDRCPTKYIDHTVISFLRSNQKVFDKPTDLCLRIVEVMPIVWNVLVHEIWPIFAPNICRLTFFGGAHLTNLRHHISPTILCDLKRLISINSGDLFPAVIGDDVPNTTAGQALSKWLHTPTKNGQPKQLCCKDYNSLRNSGWVNDFKEEFLRATTTTRASYAIRFVLRVATPIVPFEVVNELTREKLTLETENDGHYNANWLLKRCPINGDETVPGAVQRAKRKTNENLARFVRCPLLVVLCRVAL

SEQ ID NO: 157743 - protein, 124 aa, Heterodera glycines
MRRKKCHFEAKSKTVKKWHNVQPNISTKPTEIIENYLRFISADCWLEVFALLPPSQLGLGIALISRRFDRRVDEHFKTRKWILDKELRIQEKKRWFGEEANGNCRCQRRKADCRIPQIPLPNEV

SEQ ID NO: 157744 - protein, 63 aa, Heterodera glycines
MRIMRKAKCEKRNLGPSLVNTYFSSTPLLPGRVVSSRNELINQLIDVICDRNDFGTLEFHIGN

SEQ ID NO: 157745 - protein, 25 aa, Heterodera glycines
MIFSALFFLKAPIVPAVGVAPEYKI

SEQ ID NO: 157746 - protein, 246 aa, Heterodera glycines
EESFKINRELENYRGSIVHGTSVQQFNDIIDQLLNELSRAADDRDKLIASHREYVGHLQLTHSAAQEMKDRRIKQLEQSLDQIQQKLMASFKHEQLHLVKNNVEGNGHAKGGEGEQKHPMEHHHQQEGIGSAAGDSAGGVATVAHPSNLSSASSQMENLRPAGTVVRHIYPIGQNPSQSQRVRGAVSSMTEGGDGTGQMPHATQYGLNSPYDDEYDDELEDDEEDFEYDEGDSADIDDDLGAQVTI

SEQ ID NO: 157747 - protein, 54 aa, Heterodera glycines
LSPSFVPFLPLHLPPRPQFTCTYLSRKIGPKDNASGILCRLFAHFPTQLPQHRP

SEQ ID NO: 157748 - protein, 221 aa, Heterodera glycines
HWRNHSLANSLTGEFTHWRIHSLAKSLTGEITHWRNHSLAKTHWRNHSLAKSLTGEITHWRNHSLAKSLTGEFTHWRIHSLANSLTGEITHWRNHSLAKSLTGEITHWRNHSLAKSLTGEITHWRNHSLAKSLTGEFTHWRIHSLANSLTGEITHWRNHSLAKSLTGEITHWRIHSLANSLTGEFTHWRIHSLANSLTGEFTHWRIHSLANSLTGEITWAK

SEQ ID NO: 157749 - protein, 414 aa, Heterodera glycines
MHLLFTYANYNESPPEMINSQVIRVILKHIHGPNGREASKILKIVTDQWNSISYNYLIQNEKNATALRKPEFELHFERTFAKESAEMGTAKNERLTKNRVKQFKTVPVSLYSELLKVRDRLISVLSASGHRARSPKHSSMLFSHSSSDIHQRVRETTVLAAKSSAICQNGASMLPSPDSADTAHPSAWSQQQPSDEMGVSGGIGFDRMSSPNSLMSAVVGGNNSGANSGGELASLRTTDSFPRVFKEFDFLEAEHDSVSESTESCFNWLSTMRTARCGVCREDTDGQNGTNQDQEEDVPDEDDFYIDEEEDEMDHQSALAANRACIGNFGSSPRTMTGSRHSMGSNNGKSCRNGVAMGGGEKKGTANAGGTVIKRPPSKMSDSNDVSSDTTPVQLSRHSDEEEEEDEDEEAERD

SEQ ID NO: 157750 - protein, 249 aa, Heterodera glycines
IKMYLWSSKTLLGWRGTPPFCQFPSPFSQLPLSYFHSASTNAQFGLSHGEAAQRMHTYGPNLIEVKLKPLAVLLFREAITPFYIFQVFSVTVWYMDNYAYFASIIVLMSVMSISLDVYQMRKQERKLRSMVHTHEPVHVLRSMVHTHEPVHVLRDGGQVLELSIQLVPGDILLIPPRGCVLQCDAVLLNGTVIVNEAMLTGESMPITKVNRRDDDHQTEFSFKEHSKHVLLGTQVLQVFVVYRFGPAAC

SEQ ID NO: 157751 - protein, 104 aa, Heterodera glycines
MEFLQRSGLTKAAAESVKGAEEEKKKPNCDQKKEQSRKRKGEFSGQLTQAKTIKRDTDEPTECQRTEIKKAKVEEPTTAKMNPTAQLPRPKPMVNEAKHQPKWH

SEQ ID NO: 157752 - protein, 336 aa, Heterodera glycines
HQHSNHWGLNPPTFQSTGLNPPTFQSLGLNPPAFQSLGLNPPAFQSLGLNPSTFQLLGLNPPTFQSTGTQSTSISITGTQSTNISITGTQPTNISITGTQPTSISINGTQSTSISITGTQFTCISITGTQSTNIPINGTQSTSISITGTQSTNISITGTQPTNISITGTQPTSISINGTQSTSIQSLGLNSSAFQLLGLNPPTFQSLGLNPPTFQSLGLNPPTFQSTGLNPPAFQSLGLNPPTFQSLGLNPPTFQSLGLNPPTFQSTGLNPPAFQSLGLNPPTFQSLGLNPPTFQSLGLNPPAFQSTGLNPPAFNHWDSILLHFNYWDSIHQHFNH

SEQ ID NO: 157753 - protein, 278 aa, Heterodera glycines
MIHHPNAAYPDTAIITKHKFISEPIAMQFQRDISDFLFHEENFFNHSIVTYGVGGSIELEDGQRVNVFSMHLDWKSYGPYAANNKQVKSEKQIMSGERNKEGYGDFNSPSHLDWIEETKENHGGWTFEWPATKLLTDKGFVDSYRSVNPDLVKNPGIFNNPRVGFKMKRTGETWSTVQKSAGPEWDWTIPEPQDRIDFIFFKPNKFFRPIRSEIYAGKNSLRPIPDQWENDWPSDHYAVITEFEISERNGTTQNESKQRNDINGKIVLNGRCCGNNGK

SEQ ID NO: 157754 - protein, 58 aa, Heterodera glycines
MAASERMMDGDEKSVGEGRSTDRACRGNNVCIAYCLTKQRDKMKIIGVNQLPKSERRL

SEQ ID NO: 157755 - protein, 69 aa, Heterodera glycines
MPLDTFAKPHHNSYGYHNYGTFYGPIDENDSFNVFVELSPSLFGIGDVIGCGMNLETRQIIFTLNGKRL

SEQ ID NO: 157756 - protein, 108 aa, Heterodera glycines
MSANHKVHYYYLWLDQYSQVSLGLSTRDFPLTRKWLPTYGQTYAYVFRKKLAGFWGHNVEGSVPDQGNRRIAVANASFYTGDVVGCGVNLATRQIIYTLNGKRLSLSV

SEQ ID NO: 157757 - protein, 98 aa, Heterodera glycines
DTCGDDTCGADTCGDDTCGADTCGDDTCGADTCGDDTCGADTCGADTCGDDTCGADTCGADTCGDDTCGADTCGADTCGDDTCGAQSKGHCGGAKFND

SEQ ID NO: 157758 - protein, 30 aa, Heterodera glycines
MHLQVKRRFSRKKIWKSGPRQYGLFRLKSN

SEQ ID NO: 157759 - protein, 85 aa, Heterodera glycines
MPFFIFSIFLLFNGGLAINTSKNRALIYFGGYEYRQKGTSVDGQTQFWQCTQKNCPGRAHGPIGTLDITRIVSEHNHPQVSSQNT

SEQ ID NO: 157760 - protein, 30 aa, Heterodera glycines
MPTSYHSSYNIPKIYYFKLINIKRIEFVFD

SEQ ID NO: 157761 - protein, 360 aa, Heterodera glycines
MLERFYNDPKSPAAFAGVDRLWLEAKKELGNKIRKNDVKHYLEGHRTYTLMRPRRINFPRARTTAAGFMTDCQVDLADFQTLSRHNRGNRYLMVVIDVLSKRIFVTPLRTKKADDMVDGFKEVFSTMPMKPHRIFSDKGTEFRNQKLKKLFDEEEVEKYESTHSEKKAALAERAIRQIKNRVYRYFAQTKTLNWVDVIDQIVNGINKSPSRVHGMRPIDVNFKNSQQIWEKMFGDDQHMALFGKPRKRARFVPGQTVRMSIAKGQFEKGYIPNYGDEILEVDAVKRHMKPMRYKLRDSKGEKFKGFFYPEELAPVRKDAETTYRIERVFRKRKMPDGTTEVLVKFIGYPEREWIHETQLV

SEQ ID NO: 157762 - protein, 65 aa, Heterodera glycines
MKIFKFSPREVKKQRMRLSGIIWCHRILSEQQFYINMQKNGFHNDAFKNLSIFGHFTHISSFLFI

SEQ ID NO: 157763 - protein, 77 aa, Heterodera glycines
MACTCTKVQEKYRLPKICLYLYLDPGKIQAWIQHDQQHLDRKALFCPSLSLFSSTEFELFGAGGIRQPLIILKTEAT

SEQ ID NO: 157764 - protein, 79 aa, Heterodera glycines
MIYAAIAITAITVIFGVPFMIFIACVACRSSRNSRRLVESLEQRAQQRREAERIDGTAALRNVLEMRAYSRKIFFEMKI

SEQ ID NO: 157765 - protein, 67 aa, Heterodera glycines
AKNFFYFRKKIEIFSKKIPFDRARKTMFWKWSSFSRENSLKILKIQKPKNRFLGLARKILKIFEVLK

SEQ ID NO: 157766 - protein, 117 aa, Heterodera glycines
MHQSDTGSSTPGDSPVDRIEITGPMSLAEFVETIEAEFPEQILLKVVTFSFIYNSHFNMKLYADFRGHNLKMPVEVDEPDDPQFDRFDGQGHLLVEDIVFDMIHKTKRDHHHDIPFK

SEQ ID NO: 157767 - protein, 71 aa, Heterodera glycines
NYYTYFGFVSSVEPPVDVLLAETDCQAEVAKLVEERGGLAVSSEWVIQAIVTGSLPDLGEPGGEKFRYDFV

SEQ ID NO: 157768 - protein, 19 aa, Heterodera glycines
MGILGLRICTLFASIIFNS

SEQ ID NO: 157769 - protein, 92 aa, Heterodera glycines
MELIREFDEMKKEKIYGFNYDGRKRAKIEKEIMHNLGISRREIKQWKNEFATHTIQRVWTIGQFVLLFRPMGWQKSIRRSAGRKKQNAKHKI

SEQ ID NO: 157770 - protein, 92 aa, Heterodera glycines
MAWYIENWCDESRYTTNVRCGCMEDKTCNVLTDLLLKRKKLLNVWAFEFCHSIRRTETFLYKQWAQNLIECHKTNLMQGDHQVSFGQNLAIN

SEQ ID NO: 157771 - protein, 33 aa, Heterodera glycines
THFVFINFEKFWTFRGFLLFWTFRGLDTLWGRR

SEQ ID NO: 157772 - protein, 133 aa, Heterodera glycines
MCHKILLFILVISLNIGYGGGWEFLDSIGSFIANTAKSIWDNGHVVVETLEKVVNVVAAMSSVVYVHTMPLGMIMHLVEQIQYPNATNEPFACGAAGASEAIFKFIRTFLTEFPSFPSLIPKFFGSSPRWVVS

SEQ ID NO: 157773 - protein, 19 aa, Heterodera glycines
MSRLIDRKPSNFQQKDKSE

SEQ ID NO: 157774 - protein, 146 aa, Heterodera glycines
MSDHTQEEEMPKLKKRCFLCNDVLFNVFTLVSNKFILGTRLALVNGQFNTIVDKLLLRKSREWSLGILELRCAEQQQGEGKVPQIYKEFVWNLMNHMPPCREYAQILKEVPIATVPVHQSVTGFQGLTIRLETLAFLAKMDLLIKQ

SEQ ID NO: 157775 - protein, 97 aa, Heterodera glycines
VDECPDYGMNSASDDERRHFLRRYFVHFGQPIGEECEMDKMLCKIRHFEAAAHFFWTLWAIHQAAKSAIQFDYMLYAITRHRYCTQLMTSLGIAKNN

SEQ ID NO: 157776 - protein, 288 aa, Heterodera glycines
HSITGTQLSSIQSLGLNPPTFQSTGLNSPAFNHWDSTLQHSITGTQLSSIQSLGLNPPTFQSTGLNSPAFNHWDSTHQHSNQRDSTLQHFNHWDSTLQHSITGTQLSSIQSLGLNPPTFQSTGLNSPAFNHWDSTHQHSNQRDSTLQHFNHWDSTLQHSITGTQLSSIQSLGLNPPTFQSTGLNSPAFQSLGLNPPTFQSTGLNPPAFNHWDSTLQHSITGTQPSNIPITGTQPTSISINGTQPTNIPINRTQPSSIQSLGLNPPAFQSHYFTGTQWDSTHQHSNHWH

SEQ ID NO: 157777 - protein, 54 aa, Heterodera glycines
KYSVLYSFSIFQFPEGLNLIGKMKCQKGFLNLFIQEIKAEKLILKKFFALTIFK

SEQ ID NO: 157778 - protein, 55 aa, Heterodera glycines; identical to SEQ ID NO: 130282

SEQ ID NO: 157779 - protein, 143 aa, Heterodera glycines
MSISVGGGCHWFQGGGWRCRWHTATAEPKRRRCGHCIRRTPVPHYNWNFAAAVPTSTTGTRHWAAITQPAEVAPSVVGISKLTRTPDDVGHAHTGEQNEQRVIWGTPNKFNPYSNSNCHSDGLGSSGGGGGLNACAPTSFCSF

SEQ ID NO: 157780 - protein, 242 aa, Heterodera glycines
SSSTMNIPPKSFNLAPIAEQEGCDLDQSVSSSSFTNHQQIGQARRPHPRGMPRMIRLRRKRRDDPFGTLIQSTKKMRLNDQWNSSEGQASGVEGTTTIAKNFAMIGERAPSGSHNISKMDGVLFTEDEEDELLFYYGGQDEEDDSDADGYDDESDSNAEEYYKNDYPDEENGKFISFADGVRTNEYENDSTKMNDLQTDHYGDEATKYGHFCYEDDKEEDEDPFSFGKMISAQKKGSEDDSD

SEQ ID NO: 157781 - protein, 60 aa, Heterodera glycines
SLSSIYIVKKNIDNNRRFAVSTSFDVFFCPVSSLSQITAADTARAVPRPAPSALRRRCCR

SEQ ID NO: 157782 - protein, 120 aa, Heterodera glycines
AGNHEDLFEMLNGGGMPSFMGGGGGLFQQMFSGGRQRSRKGETTVQPLQVSLEDLYKGKNTKLQLTKKVLCKTCNGIGGKQGSVRKCDRCQGSGKVFRTRQIGPGMIQQMAARCDQCSGE

SEQ ID NO: 157783 - protein, 429 aa, Heterodera glycines
MVGFVSGTSNTADIASRGAKATELLDNNLWQFGPNWLTLKEEEWPMDQIIFDPEVERHTVIDELPIMEMTLPTMEHPPQKALIDENRFSSFIKLKRTMALVLRFLQPRKAEPKKGNLKEKLEAIPPTTAEELLKAEQILIKNAQQRHPADPQLVQNLQLYEDERGILRSKGRIQKGDIAETAKDPIFLPCKAELTALLIRHIHDKLHAGANNVLSEIRQNFWVSQARRTIRHVLQNGRSRHFCHTCHKFKTKPFGQVTMPPLPQFRVDGHTSRPFLNIGLDYFGPMLTKSNGKKMKVWGCIFTCAVTRGIHIELVNDLTAEAFLNALSRFCARRKVPKLIVSDNAKTFKLGSKAAQQICQTPNAAQLFNQPTVQKSVADKGIKWRFNIERAPWTGGFFEKMVHLVKEPLRKTLGKKLVDYEQLMTTLIE

SEQ ID NO: 157784 - protein, 35 aa, Heterodera glycines
MNGQRKDNQTENELKESVARVEKMEEFANKFNFDE

SEQ ID NO: 157785 - protein, 914 aa, Heterodera glycines
MARLLKTRLQTATDQLEELLSHDHPAATQQMNIGELTLRIHLIDDDLDKISKVVAEIKSISAEWTQIISKIPQKDQDAAINDYDNHVALLQVADKVKSSGTRARQFKTSQISLASAKATLEAAQLQQQNAGGAPAAQAAGAQTTGRVQYQVEIAKIRPQIFSGGKCEWQSWWPVYNLAIHTDPSKPKFLKMADLMSLLKGEAKDIVYGLQLTDADYDLAIKALAEKYDDNSHMIRELHRQLISLKASQSFEDDRKLLIDVQRITRMLKNNAQDINAPTIWLTLEQKVTKPVLRQLQEAKAKAGVDWDTEKFLSSFKDLVIAEEAIEEIYNQSHQRREIGKKPRMVEKTPFKKFQTTIQTTVEQKAKIAPKNGTFGQQKKGVKKPQRDDKAKATPSCRLCSQSHWTSGCSCFRDAKSREEKAKELKFKNQKLLVLQQMGAQPSVLSTTIWGEEAISSHGATCINPAVQRNRKGKQQQYKTNGIRDVYNPENPKLSKKVLVFFDSGSERSYVEKALASFLKLEAKNPAEITLTGFAGVDLGTYTMHMTKLCMKTAMGEKTIEPEITTRVLREMAHVEFADLYDSDFEATQLQRQTESLQPLVLIGTDYFADFDIKTEKRLPSGFWVGNSKVGRLIFGKGNLSKPKMAKKVTSTAISQEAVEVQLQNDDDGLNSMVKQFFDLEAAGMADAAHPTENEQWLDHFNKELHFNMEEKRYEVALPWNNRAEELQPNYGLARGRLDNNLKKLDKEKFQLYDQIIQEQLSKGIVEMVPDPKAWTGKLHYLPHQAVIKDDHQTTKLRIVYDGSAHTKDTPSLNQCLDKGPQLLNDLIGIVMRCRMSEILICADIEKAFLQILIKEEDCDALRFLWVNTDGQVRTYRFRRVPFGLISSPAHLSVTLKPSAKRIIQWPRTSRKTCM

SEQ ID NO: 157786 - protein, 90 aa, Heterodera glycines
MVPLFSIFISLLLSHFGIAAPIIGIRESIFDANLNAEYVMLINTNSGSDSAVYKLSSTEAQQLPHFTRNEESNFQNAYPMTNFMIGIMFG

SEQ ID NO: 157787 - protein, 93 aa, Heterodera glycines
MSGGQNAPKSVQGMPTEKVFGDWHEQRRCSTRTWPPHFDASPSVGVRTQPAVGPTSPPADVGQFCGRQKIAASSAADDGNGTFLTAQRPSSCR

SEQ ID NO: 157788 - protein, 130 aa, Heterodera glycines
MYGVFCRRDAGMRTGVLSLRKRGGLCADEQRAQYHQLIRRIDSGKSPSFATMSDTEETKYEMRKNEALSPIGGVQRGSLKELNGDPLTPLLPARADFFKERTLEEVIPPNQSLINRSMPFHNIHSQILNF

SEQ ID NO: 157789 - protein, 31 aa, Heterodera glycines
MPANIFRGADPMEVFDNIITNEAPPKARVGH

SEQ ID NO: 157790 - protein, 223 aa, Heterodera glycines
IFPNLSTSEEMSVLIARIAELNRVNTIEPSIASRSDVQKKNDEIVHVDGSEHYGNSGTDRLHCELLKAVHPDIRKKIAENFSNPKHNFWDVNTSHTDLEIFGSGSLKVHYKGDGSVFAQLDSPPKRCHWTEVLAKIRTVAHIKAMANFGPMGQRILECQTFLKAISSVVALIWPLVGWITFGFAVKQQSKFESIIQNGTYAYQSRGYLWINGEEKRIISQYSY

SEQ ID NO: 157791 - protein, 297 aa, Heterodera glycines
MEAEDDESDDNDAENNYMLGYDEEGEKPRSVTTYAYAHAGSRYDHVLIYGEMLRMGVRPELVRQGNHLLEMKARKRGAITTTIFRDSYKLIPIKLASFVKTFGLEIEGVDNKKYFPHKFNKAANYGVVLDTLPPLEDYYPGGHFPEERKKLEQWYEENRNTPFDLREVIADYCKADVQILAHGMVKMRELFAAATSQELTDSITIPSACMKFFVVLSHVGKERVAIIPHLGYEKRGKQSAIARKYLKWRAEEEMRDNGWTLRHVESPGGEYKHGNFLLDGMLERIGEDKNLAIEVNG

SEQ ID NO: 157792 - protein, 63 aa, Heterodera glycines
MHYGLQAGPRTPALQTSGELLLRARHLHGMHCKGHLGPATGPELRNLWNDENLRIGAVRVLRY

SEQ ID NO: 157793 - protein, 128 aa, Heterodera glycines
MQTLTTASCSSSFAADQACQLLAKGTALTPDEFIALLKTVTADDVKKQLTKLFAFVMLVGREPEFIKLESLLSSALGARADCDAAAAADDEPKPLAVYICGPPGTGKTATVGAVVKKLESAHKPCKLQ

SEQ ID NO: 157794 - protein, 208 aa, Heterodera glycines
MLEGSGNPTLVPVIERLEKLEKLVEWLIAGENRYGNRFADPQHISSSPSAHTSNNGTQLQWGQPPPFAGNGAVSRMITDAIINSEQLKEKANRAVIEKLPEAIDERALVEQIADECGVKDKLSPDIHRHPRTRTDGGVKRDRILKVPFTDKYSRDKFIYNFRNAVKKLPNVPQHIKVRRDMTQSELKILYSLRQQAYQANIAAEILKI

SEQ ID NO: 157795 - protein, 27 aa, Heterodera glycines
MGEQNDKNRKSNQRQGHFLTNYVNKSH

SEQ ID NO: 157796 - protein, 82 aa, Heterodera glycines
MDELQKCPKQKVKSARGKGLLCAIELDNGIDAWQMCLRLMDNGVLAKQTHEHTIRFAPPLVINEKDTRTVAKIIGRTLNAFD

SEQ ID NO: 157797 - protein, 121 aa, Heterodera glycines
MEIGGSLEDEPMRRRRRRRGQQQQQQNNNDDEDDDDDNDGNEEGDDDHGHDADNEEEEEVGTNRSVRLCFFDAETSQDLPLQLRTKVVQKHVPMLIIAEIICEACINEGISVHSGVGQYAN

SEQ ID NO: 157798 - protein, 92 aa, Heterodera glycines
MYRQYRIFCPITVCLFPRFESGYLAHSPPKLCCFPAILSMCTNRSVSMNCCLLRPLPQLLPSLTNPAQFLIKPSKLPMPFRDSKNNSKELRI

SEQ ID NO: 157799 - protein, 118 aa, Heterodera glycines
MARLVNDADLLMMMMIMVGALKFGQFFLLHFTQNTLNSLKRFFSTLLRILPPLPAQFEHLKRVNGTELLVSVSQNGDDGTIGTAERTAIGQLIGGEPTFIGRHIPCRKPQSRHQLEMY

SEQ ID NO: 157800 - protein, 72 aa, Heterodera glycines
MAKILSFFAQDRNGDWGIIFQPPQKGGGVIGDCGINRDWAIIREYTVYKRDCSNQERVLEKNWRTIFLGNVY

SEQ ID NO: 157801 - protein, 91 aa, Heterodera glycines
MTLSPNLKYATHIIFFISWILFVEILYGVIPFLDNAKSAVAFSIDESFSPIESFHGTSWFRSEPKFLVTSFFLANQIQQSWYHSIALSVLY

SEQ ID NO: 157802 - protein, 126 aa, Heterodera glycines
YGVVNTFLLYVLRFLSLLVLPQCICNSLGLILFNSFKDRIKLKTTPLLAPFICFRVVTKGDYPDLVKVNLEKNLQMCYEAGLESFIFEVVTDKAIHLPHCSNRVREIVVPHAYKWGSGIYFFFFVI

SEQ ID NO: 157803 - protein, 103 aa, Heterodera glycines
MLLLQTNGWRARERAIELADSDESIELQNIGQRKTDIRTPTERMSALRQMIAKQFIDKHNEAYKEGKVVLPSGRDSYCRPALFRIPKAERIPSFDGRQFAPQC

SEQ ID NO: 157804 - protein, 44 aa, Heterodera glycines
MINCKSSLSLLCILRDYQQQQNYFHSALSDPTTVETLGTVVSTT

SEQ ID NO: 157805 - protein, 114 aa, Heterodera glycines
  unsure (1)..(114): unsure at all Xaa locations
MCLFFKHSKNLHNSYIMLVNCFIISVKMINCKSSLSLLCILRDYQQQQNYFHSALSDPTTVETLGTVVSTTVRRAKEGTVETVVLPMVMIREGISGGASEIWRGIIXAKFGKRA

SEQ ID NO: 157806 - protein, 33 aa, Heterodera glycines
MADVFANWYFWIFKHLPLPYLIRVMDCFLVEGD

SEQ ID NO: 157807 - protein, 334 aa, Heterodera glycines
WICNDVWMDIFPSFDRPQLGLKLALLSPRFNALVDKHFNGKSELTIWRSIEIRRKDKGPEPKLSVWLDDKFVPFPLPDRPLPSKIRFKNLQIEYIDHSVIAFLRSNHQIFDKRGTNLHLWIPSSHSTNGQPILDIFCREIWPIFSTNIRCLGFTNGVDLDNLRRLISPTILTDLNQLNSINSGDLSPAAFGGDFDGPNATISAGQALSKWLHSPRNDGQPKRLRCDNYYEQTNTDWINNFKEHFLRANAISSVSYQIHFSFRVPSMQMVPFELVNEWTKEKLTLTKENENDLENWIMKRCKIGEAADVQLQKDENWGNNWNTVIIWLDSDTNCI

SEQ ID NO: 157808 - protein, 107 aa, Heterodera glycines
MSDDFNRLMSSNSIHNITQETDTCDIEPWIEDWHETPKARSHTTPSEFYQCMSNNSTRIELVCPTFEFGAAFFNLAFCIIPQGKAEAAAEKHQRRRHFSAVSPNVLK

SEQ ID NO: 157809 - protein, 179 aa, Heterodera glycines
MGTEHDDDDGEKGVQQLLEQFVAEGAVQLGQFTLKSGQLSPIYVDLLGLRLVGQADVVEAQGGQDVRQKAVDRRPFRGGPKRTDHRGRGHLRCQRVGDGGRPPCGWAALCARLLRVGPPAGRLLSMGSLLDFLEQCGTIDAGKKTQIVHQLQNPIFDDSATHLQEQKTEKNEGQTEMFF

SEQ ID NO: 157810 - protein, 256 aa, Heterodera glycines
MEIVDANSKRLPIPQIPLPNKVIGFKRITFSYFDHNVLTFLGRFHRFFASSPTYLTIVTENVRILAFVLSTNWPLLRNCIRLLYLPNFAFRRMRQLAPAILNDYPSLRFVMFSGDDILPEFPPDDSAMATDGQAVVKWLFSSRPDGVPKVLKYNVNLSANEWSSRIEQFKAAFSIASSRVGFSIFFQCSPLTPFLMTNELTGEQLALSKCSSEQRFVLTRCPIAQNEREKQWKELLMDDQWNQIYIGIGDHGIDNG

SEQ ID NO: 157811 - protein, 426 aa, Heterodera glycines
IFKANNKHISIIRVEPAEKDDVACILYTSGTTGRPKGAMVTHGGLVANAETCTDIWHFSENDINLHVLPFYHIHGLFIINLHVLPFYHIHGLFISFNCTLMSKSSCIFLPKFDVDETIAYLPKSTAMMGVPTFYARMVEHAGLNRAAVKNMRVFISGSAQLTPQVFEKFETMTGMRILERYGMTETLVSTSNPYDNMTETLVSTSNPYDNARTSGSVGQPVKGVQVNVDKSRKNDNFPRINVDGVIEVKSPSLFNGYLNLPEKTKQEFTADGFFITGDMGEIDQNGFVWIKGRQKDLIITGGLNVYPPEVEDVVTNIFGVKECAIIGVPHPDFGEAVVAVCEPSDAFAEKLSGVAHIDGRLAPYKIPKAVQYMPLPRNHLGQGVAHIDGRLAPYKIPKAVQYMPLPRNHLGQSQYLINMDIDWTRS

SEQ ID NO: 157812 - protein, 108 aa, Heterodera glycines
MLNASDVFESMFRFDGENAKEKISRQFYDIMIDAFESDDFAWQLNLRNWQSFPIVIGNFHFVGAIFSNVGPNSNKFQCPFARLEVYIHIFDIPTNDCDLDLNGLKARV

SEQ ID NO: 157813 - protein, 188 aa, Heterodera glycines
IVIIIKPLKIGHIFLVLSQNFGTVCSCAAKASSNVHSQKPILAAWIANTATNNGTTSAITCCPARIAAVLGQMSSVLHRSSLHVWQQKVPPLAVHCAPNLSQLKRLSMSQSPCVYHGMATFDPSLQFVTVQMSFFPSQSTSFGSVLNFVPGSSSGYCLHCRPTMGGGKRKPKKERQADRRGTERRRSI

SEQ ID NO: 157814 - protein, 73 aa, Heterodera glycines
MAFSTVFLGNTLIGHFTFLPNVLRIAQVFFACVATKSATFGRALCAQFVAAKATLNVTVAVCVPWDGDSKKAI

SEQ ID NO: 157815 - protein, 707 aa, Heterodera glycines
IRRNDHDEVKEFIDARYVCPQEAVWRIFELPIYDRSHCIMSLPVHLQGEHICYFDENEEEIRERIANGSELMAYFELNKTNVLAKNLFYHQIPEKFCFKKGKWTERKTYFNTIGRMVKVSPAEPERYHLRLLLLNVKGACSYDDLKSVFDTNGNAKVCETFSAACLERGLIRNDEEWKRALEEAESFEMPWKLREFFALILVHCNPAKPEELWNMFKLEKRLPLEKRLPIFQPWQINVDDDVEQVFDLAEELDLGQRSYALMYDEQRKISDEILHRVWNPINEPAFYFLSGPGGTGKTHVNKTIVHMLRGQKKKVCTMAFTGIAATLLPAGRTLHNRFGLTLDMSNSSPSSKAWQELKETDLFICDEAPMINKRAMRTLDEKLKEIMNNGIAFGGKVMLWTGDFRQTLPIQKHATRAEMVSSTIKRSEYWRLAKRYKLTKNMRALATEQEFARDLLEIGSGKWNNENDEIILPENCISNGDLAEEIFGQCIVLENWNEMARSAILAPKNVDVSEMNNRVLDMLPGEEVVYTSIDLAQDENRQRADDYLDEYLNALNPSGFPRHKLRLKKNAIVLLMRNLNIEMGLCNGARMKVEQLQPNLVVCQILTGDKAGQTVYIPRITLCCSEDYPFDLHRHQFPLVLAFAITINKAQGQTLEQVGIDLRKDVFSHGQLYVALSRARAWNKLRIRLDDGNLERKVKNVVYRELL

SEQ ID NO: 157816 - protein, 246 aa, Heterodera glycines
YIDHSVIEFLRSNKHIWDRSGTKLELTVYSYKTNDVQQIWDALTSEIWPIFATNIRNLGFTSANGLDNFRRHTSPTILTDLNHLNSINSNFLLPDAIADDGPDATAGQVLSKWLHIPTTDGQPKRLYCHGYYDESNLEWINNLKEAFPRATSSASFIIRIDRERAMSNAEPFELENERTKEKLTLEKEPRSAGYWLLKRCPISEKAAAIQFENWDANLNKIKFHLWGDINKFIGPLSPPTEEKADE

SEQ ID NO: 157817 - protein, 35 aa, Heterodera glycines
MHFILSNTVITDQSLLQADHYPITIYSSLALKMLM

SEQ ID NO: 157818 - protein, 115 aa, Heterodera glycines
TDGWAEMVKEHPRLVTEVVAAMSQEQSRLCECCFVGIGIGGVPPPPCSKSSASPPPPHHQQFPIVDGGGGEHPIAAVPGGVLNTFLLSIFYAFFILFCFFHALFTTLWHKFGGVA

SEQ ID NO: 157819 - protein, 122 aa, Heterodera glycines
NHNDGFLNNDLAPFQFPMDFFKIFRPTAGPRWSRSTRDSSPRWSPPCPRSSRASVSVVLLALALVVSLLRPAPNRRLLLLLRIISNFRLLTVVVVNTQLLLFPVVFSTHFCCPFSTRFSFCF

SEQ ID NO: 157820 - protein, 92 aa, Heterodera glycines
MSNSNIYTTFRNPNYYFFALNQQPPEDTDMADLCGTPMRPSDSWSSTEVRSLQHTHVLYNIACYFSIFFYSTRQAVARPSPIRWLAAVPAAD

SEQ ID NO: 157821 - protein, 90 aa, Heterodera glycines
MSNAEPFELVNERTKEKLTLEKEPRYNVVNLLLKRYPIDEKAAIQWENDEKLDDKLNYVQIELMRGSRSIGPLSPPSTEEKAGQSNQNLV

SEQ ID NO: 157822 - protein, 40 aa, Heterodera glycines
MLTTRDRPGPGSRPGFFLDPGPGHFSATWIFPGPGFSWIF

SEQ ID NO: 157823 - protein, 59 aa, Heterodera glycines
MKGRTNMPLEAVLALVHMVKARQQELRNHTKLYGSGNFGKTGTCQEGQKGRESRPGTGA

SEQ ID NO: 157824 - protein, 171 aa, Heterodera glycines
VLGDAQNWPVAFAFSGLPAFILCCVLPFCPESPKFTLLSRRDRVGTLDTLARLVNVHEGQTMFEALQREGQSTQTLTVADGNIDQSSAMSAASICRLFRSTELRMAFLISMWVMVAQQMTGCAAVFAYSTDMFLNAGLEPSIARYSTLAIGIMYFLFACSSVFFIERKGRV

SEQ ID NO: 157825 - protein, 116 aa, Heterodera glycines
MKRVMADQIKNTKKAFSSIDRDIWLNFVTDLNQIYAEAEKLTAIAYLENILGLVTCHLSMLCFKSLWKRKLEEAQALLYETNQQNFVRNGVYVCNPLEKGFRVDLAWSLFFNLMSS

SEQ ID NO: 157826 - protein, 30 aa, Heterodera glycines; identical to SEQ ID NO: 137412

SEQ ID NO: 157827 - protein, 88 aa, Heterodera glycines
MHLLTNSISSQCFIFLHISGDFVLLNGTTIGYQEQIEHVAFETIGGNRVLVLINPKANPIKVSVVDGQRRWTIPMSAESIVSAIWKAK

SEQ ID NO: 157828 - protein, 74 aa, Heterodera glycines
MCRALIAHGVNIELGTDSGESTLLCACFEGRFEIVTLLVENGANVNLADSDGMTPLIVTCYFTGKVVNKLLHNL

SEQ ID NO: 157829 - protein, 43 aa, Heterodera glycines
TARERRGGRPTRRSSRLSGRRTMRERERTDREKKQFVRLICFN

SEQ ID NO: 157830 - protein, 356 aa, Heterodera glycines
MHSLSRQNAIDARVLFGRGTDKRTIGDRQPRLAVQNIPLPSHGVGQTHRTVRTMERRKGKVSDRKRSERGANGMCKGKPNNERTFQSPHTNGQERHLLISPGTELARTELDPEDGLYERLGWEMWRSYVGTSAKALVLSLYLVPLKMPSFGPFSPQGMSDLLAPLLCTLQDEPLTYWCFVHLIEQTLFRPSNGGEQPSEMEVQLDFIRELLRLFVPDFHAHLAKLGGDAPGLMFVHRHAGHAIAPTTSICSLRVPSFPFMGPTLWTKICHMTKSSFTSLRCPCTWMPISSCARRARGLLYQFHRLPRIPCTLAGLCSYESDSEQWTSHIEPHGQFECSQKHGENGEEQCPFAVGFI

SEQ ID NO: 157831 - protein, 57 aa, Heterodera glycines
TLFQFPSKLFHWICWDQKGISPVFIFHYDINDQHHSFPLLRRRRSFRADGVKGFLHP

SEQ ID NO: 157832 - protein, 57 aa, Heterodera glycines
MKISVKGFFGSLITNRAPIFANFETLTPGNPSPGRHGIQVQVQAFFKIPSNDNDIAP

SEQ ID NO: 157833 - protein, 191 aa, Heterodera glycines
MKSVQPNNILIFERKIVEAETFETKKLKALYFYMQLFRKIIGQLETPYHKKYITNDYINQCQKERNFIVLWVRKTLENVSENFDVIANGPNINDSCQKVVFLKRENLFAANKLNKFETIKEIIVLAYFGIRQTLALIYEQQLENVLIMSKQSLADLLNETTKNDLACLLLSHKESLNLEQIVKNISILKNE

SEQ ID NO: 157834 - protein, 176 aa, Heterodera glycines
DNSSLMCHSQNLQQNQFIPNYKHFPSLSSSSSLSLPSSSSEATMFGEARENKIENDMEILNSNWSIVQQKMTEKSNDYENANERQQKLEEQMGNSALDEQQMEAQQAKKLLCIKFYKYNLILNGIEMHFYEHFDFLKMCSGKSGTKWMYNQQLETGGIGTSREIFAGISIPCFFLA

SEQ ID NO: 157835 - protein, 300 aa, Heterodera glycines
HNRGNQNNGQCVLNGGGRRAEFEAESSEGFVDGHALPEKSSIIRKKLYFFNYPFQDIITLQDPQDLDKFNIEQFYHVQFDTKTKAQIAEEKRAMQSPNYFLNRLNNEAKEALQQLEKQYVKEGTKKADDQTADEVNAAHFSQGKVAAGLTSTTMEPVTLNKAAVLEEDVVKFVCPKHFDNCMALTFLQGGDPTGTGKGGESIWGKTFKDEIQGTYKHGERGMLSMANRGSDTNNSQFFITFAACPHLDGKHTVFGRLVGGAQTLCNIENLETDEEDQPLRTVLFMQAEVFVDPFDEAMEK

SEQ ID NO: 157836 - protein, 200 aa, Heterodera glycines
MYGMVISKESPMKILDDKGMKRRFRASNFQSTTRVKPFICTMPLRLDEGWNQVQFNLADFVKRAYGSTYVETLRIQSDHILLISGDLVSDVRLRDMFKQYMENNAVLSCLLTDSALDRDFVILGPNGQLLFLVDEDDFAEEEGIPISLFDRHCHKIVIVIDSHVTNSSFRCPKAKATAKYKDVHLYLVQRKALDILLSKK

SEQ ID NO: 157837 - protein, 53 aa, Heterodera glycines
MADEFLGMPKAMAIEADGSSHLLYGTTPITTPAQVVGESEDGNCELDIFADRR

SEQ ID NO: 157838 - protein, 135 aa, Heterodera glycines
TGATSLVFGYVLTMPSLVYAFLWYHRPLSLQYSFFDLLCAFGYSLAPFIPVTALWLLFPFTLARWTLAVSAVVLTGSVLEFFLDEAISRPAQPPVPFDSSSKFLTTTPQVPTASFHGDHPNALNNNGTATIAVVG

SEQ ID NO: 157839 - protein, 15 aa, Heterodera glycines
TDQKRTKLCRDTERK

SEQ ID NO: 157840 - protein, 95 aa, Heterodera glycines; identical to SEQ ID NO: 142155

SEQ ID NO: 157841 - protein, 63 aa, Heterodera glycines
MSDQQFGMTRLKKAASSAKSSRPCSPFLTAAFFNAATKTCRTNIFPTSTRLRIGLGMTVRRAS

SEQ ID NO: 157842 - protein, 74 aa, Heterodera glycines
MTNRSLFFTLFIAIIWLCFECANGTGKVPKNIDEPSSDAALISPGYEFLMEYRYLFSIPAVPVLTGTKEYSATF

SEQ ID NO: 157843 - protein, 68 aa, Heterodera glycines
MFRFDSQNKKGENAPSNKPVEVTDIGVDAFKTMLDFIYSDDLSGLNGDNAIKVFYAGKFCGIKVYLIN

SEQ ID NO: 157844 - protein, 128 aa, Heterodera glycines
FLSFFRCFSVRGNTVLNPFPFLKPCSTPYAALVVSSSNVLIRHNCFRNQNADFEIGTELMEHAKRIDARENNWGDPQAHNFMHRIFDQFNRYSLATIEASNFHKIIIFKMKYFLLINLNKVKKYKKCS

SEQ ID NO: 157845 - protein, 29 aa, Heterodera glycines
MYQICIKTPKYVNSVPLAAMSEAQMSYNR

SEQ ID NO: 157846 - protein, 19 aa, Heterodera glycines
MTHFQLAHFPVTHLLDALM

SEQ ID NO: 157847 - protein, 91 aa, Heterodera glycines
MRKKFFAFTIFLFIVLQLTDAEMSNEYKEACNDTCAALPKQTCGRGRPQSNSNSQITCYCKWKTSGCCFGEGCVPREQTADEITLYGRTGI

SEQ ID NO: 157848 - protein, 189 aa, Heterodera glycines
MNCLAIMDSHRQKRLMWRDHFVLMMPKRHKNLTFGMRRSQIWQKFNWPIRKKRKTKYSSSSSTTTTTQINGAARANFKEQRHFLSGKQPIRSVWRRAKVALGMERNSEVLVKQLHVRTTAGVFVAIRRPIRPPPPPPIFADKFPHAFTYAGGRWVMGGTVKIPKNFEDFKLCFFCVPISKGVWQLQSKM

SEQ ID NO: 157849 - protein, 104 aa, Heterodera glycines
MPFGMIIAGPSGSGKSTFLIRFIAESSELISSRPASLLYAFGEMSSIVPTLQKCGVNVYPGVPPEDLINRLPKPLLFIQFGPTSISWITLDCFICLWKHSKNAV

SEQ ID NO: 157850 - protein, 111 aa, Heterodera glycines
WGPPQAQTKTKTAPAKSLRFLFTDFCSVQYLVLMRAPNSALAIRNIGVQLFPGKLDYFLSAYRIATNKPYGYLLVDMHAASNPLLRLRSGIFKDDEEEGKKIIFIPKNGLL

SEQ ID NO: 157851 - protein, 161 aa, Heterodera glycines
SITAATTGLDVPQKKHGEANEFFDALTAATTGMEVDENKVKKALPQPQSNASDFFSPISAATMGISGDHLKPKPKLRQHLPSASDFFSPISAATMGISGDHLKPKPKPRQHQPKASDFFSPISAATMGMSGEQKKDEPNSNQQKKDIPEFAEEKGEEGSRR

SEQ ID NO: 157852 - protein, 292 aa, Heterodera glycines
MSINYNDKKFIMDNILPAVEISHTTNGITLISERIAVPRTIPFDIVGKCRECKATECETEWCISKEGVTIWCSRFKISPRFVPFDYVYELPGYTFFKIRNKGRVFNVDHGFRSNVCTQTETPVYNLPPPPPPPQLKPKGNEQGTEEQTTQKFFESITAATTGLDVPQKKHGEANEFFDALTAATTGMEADFSTGLNDSLQLNQHPLPLPSDIFVTLNGGKYFTKIDLSDAYLQIELEENSKKLCTIATLRVHYQYERLPFCVKSAPGIFQSIMDNMLSYLPFALAYLDDLII

SEQ ID NO: 157853 - protein, 88 aa, Heterodera glycines
  unsure (1)..(88): unsure at all Xaa locations
DDQRKTWPKLHLXQAGLCSARRRRLFRCHWHFRRKCAQFGKEIKTWKLGRREKGNANGATKRLDYYFVFPVALNCMDTHKLLLFLFCF

SEQ ID NO: 157854 - protein, 306 aa, Heterodera glycines
LKNFKISFLAKCRRRLSNNSPSRWQQYSQIVAAVSSYWVCSIGLVFLNKHLLSTVQLNAPLFVTWYQCLTSLDFCLFCSLLSKWFPRLINFPDMSLDLRLSREVLPLSIVFVAMISFNNLVLPLSIVFVAMISFNNLCLKYVGVSFYYVGRSLSTVFNVICSYLILGQSTSKPALLCCMMIIAGFFLGVDQEDVAGTLSVIGVVYGVLASLCVALNAIFTKKTLPTVADSIWRLTMYNNLNACLLFLPLMLVAGEFGEVPYSPHIVKLNFWGMMTLSGFFGFIMYVTGWQQVWQQVTRPDAHISGT

SEQ ID NO: 157855 - protein, 19 aa, Heterodera glycines
GPGSRSRILKSSGPGPGRA

SEQ ID NO: 157856 - protein, 133 aa, Heterodera glycines
DFCEKFASLELNSSQQLSMIGELRADNNNLQAEFEKQKQMTSEHLVMLQAELFVLQNKQEEDEKENEKNALIGQLSRLQNEQIVLLGRIGELEKQQKEKDEQQQRQYGGKIMRDRPGPWSLAWIFLDPCVDFP

SEQ ID NO: 157857 - protein, 100 aa, Heterodera glycines
MHAKLKQSKNFTRKAFKKVALFPCRMKKGKPIEFNSLKSFEIKCKIRPKTQQQKFKGNSADVICLGQNEGATNAESSSASDPQQQNILKPKFCCFFFGKL

SEQ ID NO: 157858 - protein, 83 aa, Heterodera glycines
MRRKKLCEKQHIKNLTIKRLHEEVYSNVQEDAAGVYRVTDVYVGTEPVDVLPEDIEERMAEFVAWLNERRRWRTSTWWQRRHI

SEQ ID NO: 157859 - protein, 23 aa, Heterodera glycines
MTKVAGVNFLVTVIRLVETYVKE

SEQ ID NO: 157860 - protein, 194 aa, Heterodera glycines
MAQQIWPIFAPNIRHLEFSKIEYRDNLLRLISSTIQFNPNLSSIYAGGQFSDMFADDGGTDGKIGKALSKWLHIPSTDGRPKRLTCGMSCYSKGPPPNFEWINKLKKAFLRATSSANYIIKIQLRALAPIVPFEVVNERTQEKLAVKKEREFGCVNDWVLKRSPIGETDQHKDEEDLSNLNGIVFQLYGSNCIG

SEQ ID NO: 157861 - protein, 119 aa, Heterodera glycines
MDIFTNYIVVEEKTFTIWNKNSYFQDCTQFATLSFKVDANTFSLVIKDNGNANQSTEVPLAQITIWGWSNKGEQEAKEVKILNIGGKANFGNIGCSNGSQQMATIIIRILKKREKTDTK

SEQ ID NO: 157862 - protein, 69 aa, Heterodera glycines
MHSKTALNCLLIWALAFIVVGFVQVTVQQPPNEQQREEDKGIFEKSKDTLSNAAEGTKDWLVGAKDSKD

SEQ ID NO: 157863 - protein, 41 aa, Heterodera glycines
MPNIEVEFAKTCLASFVAICGMAKRKIYGWLKGKTMCNYSF

SEQ ID NO: 157864 - protein, 96 aa, Heterodera glycines
MDGGCQITLCLKLDNGCAGITPPKCAATVPRHTVTEQYTTRRRKSKRQRKVRSVAQAQQNESGQVIGDEQNGGTKVDVFTRPIMVGFMQILGNIIY

SEQ ID NO: 157865 - protein, 79 aa, Heterodera glycines
MKSLITFGFAVKQQNKFDGIILSHKGTYSYYNRGDIWINGKGKGRNGKYSYGVGDTVGIGVNTATRQIFFTKNGLRLGW

SEQ ID NO: 157866 - protein, 2265 aa, Heterodera glycines
MENSRRYMTRQELRRLLDNGVAVEIEDNEINVAHQQGLRTNWTDYAAENFEASRNFQPAAVFLENHQREIAFSSLRVPIRTSSPNNQNRDPVAPPAQNFVLQNMLPRRLDNDTLSLAGEEVELDQHNENELLGLPLDGRGRTDSMLEHQVSAIHPRGYIRLNELRENIQQNEPRHKLPMPHAYIPRQQPPQQNFGREIQYGTQNPFNQNALNPMHYQAVPVVSRLEMALILDRIPDLTGREGADKIRAFFRKFDISTDEWTDQQRLRALQSKIEGKAERAFNSALASEKISARLVLREPKYQKIRAEMIRILEELDAKEITAFDQLFSGLKRKPVEPIDQFADRVSSVVRRAYPGLDEQLINDYAIKHFLRALDDPDIAMSLELTRSQGMDFDQFVTMAARAEATRKAVRSCNRGQNIRTFPTFSGQVHEPQSNYPQQRQVLTCYNCNRIGHVSRECREPRRNNQTFNNPSNKFVRETNGDSQMPNRNYNTPRFPAQPNFGNSQRNFFNNAQTQKEVTKSANCIQLENAPVVNNLVACVNVNQELEKLKILSVSEGRKKELSSPPAVGKLVVMEFEVCKKKAQGMVDGGAQVSLISAQFLHSLFKDESLKISENCFGHSNLKVRDFNGKTIDVVGEIVLPIMRDGMRPVLITLQVAASDFGFDLIIGTNALNQLGIKLFDEVHQKLVTFETADTETKKETAVRVVYNVKIQPRSSTIIEVAVNDEIDEQDVLIEGASEVSELKIEPTLVMPKFGKATIPVINFSSLPIVLGENDKIGTGVIVEKQVTAENSLNWDCLNHSVTISSIQFLNELEANHVKQIESVWREQANTNCANETDQLGKLIIDHSQIFAIDDKDLTQTDLVTHYVDTKDSSPVKMRMRSIPYAFREKVSIMLQDYLSRGIIRPSWSPYASPIVLVPKKDGTIRFCTDYRALNAVTVKDSFPLPNIDNTLMMLGNKKVFSTMDFMSGYWQIRMHPDSIEKSAFTTEFGLFEYLVMPFGMTNAVATFQRFMNRLFEGVLNDFVFVYVDDILVASENFEQHLEHLKIVFERIQKAGLKLKITKCHFVAEEIQFLGHILTRQGIKKDMDKIRPIFEYAVPKTQKELHSFLGFMTYYRKFIHSFGKLAAPLFRLLKKDTKFCFGEKELEAFKILKEKITENVVLYFPDFNAAQKIPERMFIIMTDASKVGISAILSQPDENQRIRPIYFASRQCNSAESRYSPTELEALAVRFGVNKFAQFITMIPTKVLTDHKALIPMFKTNKETGNSRVDKWIMELRSRFILQVEYNPGKSNVVADVLSRNFPRNESLSIEEELENVALLKSALVTVIENETENGNNEICADEMEWKEKIMESEFGQLIEFLEHRILPEDPRKVQQILAQASFFTFIKNKLFYCDEKTGKLRLFVPEEFRKKLIDQRHAGMCAGHFSAKKLFLQMSEHFFWPNMRADCSKVALDCRICAYTREPRANQPGIQMVRTNEPLELVCLDVLNIGRSRAKNRYILVCVDHFSKWTVAEPIPDKSAETIARAFVENFILIYGAPKRIHSDRGKEFVNSTLEGIAKILKTGTSTTSGYDPQSNGLVERMNQTILKLLKRTTPSSWDWDLKLPFVIFAINVTPSVTTGFSPYSLMFGRVVNFPTDENIKFEEDPRYTVDQETYLQAFNENLMEIMGHARKNAEIAREKSKLEFNSRPNVTREKFKPGDRVMIVVHSTKAQASHRKLAWNHFGPYQIIEMTGSSAKVVPADKLKADPISVPIERMIRVPPGIPNNSILPKGKAKFKNLIGLICVSEEIKNGEINFENETDKEVVYSLGTMNFSGADGKEAANCDEYCLGDGTCFWTTICSGEGHEHCTQLVVADFDAVLNRKIGIGAKEVTTPLQALFCAFLLKKFGSTTASRRLVETIMDGTAGQEFVLFIGARGDMVPSDMLPSAENLMEVIEMRVRTCRKLWRTLEESSYQLLQIAPPKLPFGEESQTEQLAWQEFFAKAPWAFEVIRAQLIHRRRLIEKPRVVMGDSTAKQLVNFTEMTAVEMLISEEEGLAGLVRNFDNAVLSSKVKALLIVCGRDALLANETMETICECFERLRAICERYGHVFIYWAVPPYIHSRKAQFLELVRRLAKLCDDTHIRFGAVTEEGRSLMEVFRYGGTNAGNRVNQSGLLTEHGAKTMMAWIYEVGKFPGEKELGRPRPRSEVVRPGASTSEERRRPNISRGFGLVDHRRHSFSRPSLQTSNREGHQQEWRGRDRSEWASASWRRRGSDQFRSSRRGQQ

SEQ ID NO: 157867 - protein, 152 aa, Heterodera glycines
MSTNDVKEAAASTVLPPSSSQSISMASSADGSPLREENFVHSLKSQVDGENIEEIIQSQKKALERFEKTNEMLATCSSLAEKRLDRARKDFAIGREKICRAKSDLDSIFRRIASFKQTLASNYPAEFVAAQTDSPHNQNSDCINEHKKQTDD

SEQ ID NO: 157868 - protein, 36 aa, Heterodera glycines
RGTHFLAGSIFFSALTVSWVLWDNRNQQHKRTSSVR

SEQ ID NO: 157869 - protein, 142 aa, Heterodera glycines
MPGHNPNKNIRARYFEKSLDLDLDLDSMLNLDLDFLDKNPGKSRSRKNPGSSRPGSRPGPGFFETHLKNQKKVFRVLPGPGPGFFSHWTWNLDFLDKNPGKSRLPKNDLGLGPGSRKKSGPGSRSRPSSNKYICPYFFSFVG

SEQ ID NO: 157870 - protein, 26 aa, Heterodera glycines
RKASKFVLFGALATGGSVLLYSLENS

SEQ ID NO: 157871 - protein, 68 aa, Heterodera glycines
MERRTESHKARKKDVMRVVLGKLDNLTHATSNKKPKMFEEEIECEKPQMEGAFPEAEDFHQKVNLISV

SEQ ID NO: 157872 - protein, 158 aa, Heterodera glycines
SYVEHHLTLDELRDVHPDSFIDVISPEKSDGLSSEEANILQSTGVKIESSAITGEPQPVDYTHEPAAAHISLFDARNVALRGCYCTEGEAVGLVIRAGKYTLDIIDELGAATVNQTQTDQLISITFIHLEVIAADKTGTLTQNLMILTDMWSVLHIKH

SEQ ID NO: 157873 - protein, 34 aa, Heterodera glycines; identical to SEQ ID NO: 140281

SEQ ID NO: 157874 - protein, 42 aa, Heterodera glycines
MRQQMHTGAVRPWPIWEKIKDNVLNFLANLGSILKQISKDKS

SEQ ID NO: 157875 - protein, 51 aa, Heterodera glycines
MPPDGTPNGCGWPFLWHRLAFFATMCTGCCKNIGARTKSPLFRNVIKCFCI

SEQ ID NO: 157876 - protein, 62 aa, Heterodera glycines
MRRLSDINMAKDWYHWCTGQNLRFTFLLIWERNCKHCHLSNKKENNYHYNLDTLIRSSFLKK

SEQ ID NO: 157877 - protein, 78 aa, Heterodera glycines
TLATVIYRTPMVPILCHVYNINYCLLRPERLKRIWEIRGRAIPDEGSPFRSDFLAQLKDLGYENMTDEVAITTKTLEK

SEQ ID NO: 157878 - protein, 45 aa, Heterodera glycines
MAVLSKLTSSTVTKKVVLATLVEGIGRASGEGTFTLSASALSPAY

SEQ ID NO: 157879 - protein, 113 aa, Heterodera glycines
MDEAPISSGTRGFSSSSRWSGRRRSSPSPSQKGLSDLRRVHPHWDELCGQLLNQGYYQLIGRAQWLLTDSQRKLNREPRLAQPIQLLTRLHVHVLNPVDAMRSFLDEGDKTNK

SEQ ID NO: 157880 - protein, 292 aa, Heterodera glycines
MNPGPLSDQDQPIEFRFGFSCGDGVQRREAMCVREPDGQRLEEKDCEPRERIVEKQCQMAACPHWKLGTWSPCSVSCGQDGFQTRLVQCVDSEGRKVSDQKCMGIKKQQQTEKPQSYKVCSPGPCPYWRAAKWGHCSVSCGNGVRMRHVECVLKGQIVDDSLCMKAMRPKTSFRCVLLACTVWHGVPQAAATGQIGERRVRKGVRGLRAVVVNGHSKNFLQNGRPSNSSSSAAVSPNCQCRCCHRVRGGRRRGRGGGAGGAHGIIGAVFGHGERDGGRGSSPGQQHAYQSQN

SEQ ID NO: 157881 - protein, 43 aa, Heterodera glycines
IKHPISALLCREPAGNGWLSICKKLDWQYVVVKNFWVWNYFLK

SEQ ID NO: 157882 - protein, 88 aa, Heterodera glycines
KNKTETGPGLRDNFLCTNKTPSKVHVQLRSFSALTWSCPCRPSPFSSADATWLQVQTAGPLQHRTAPPSSTGTEHAQQSVQNVQQTWT

SEQ ID NO: 157883 - protein, 129 aa, Heterodera glycines
LDLNDEKRSGVCVDVFGIFPELKVDELNADKYPNIHKFLSNPSSRKSFDVDNLQSVQHELEELISLNVDCQKTIHGEITYMSTGDYPTIDLSNRPMPNLIDLGLLSSPEEEEPPHILDVPSRFWTWAKE

SEQ ID NO: 157884 - protein, 84 aa, Heterodera glycines
MRRFVNSAKCQRFVNSKIRQLSQNVTIRQLIQNLLKKAIKGSASLALEGGGSARGSLPSQQRLGLNYLLEAYESRWQDQRPFNF

SEQ ID NO: 157885 - protein, 125 aa, Heterodera glycines
MALLRFAETKTNRGKSLLSRGGYDYTFEGSCPDMCPEKERYMRDAKKTVHFYECNAHGQMVHEKMVKDYSRSAADPDTPLAHELRPLKILQLTMDYLIFNVRIAFPKLFGFKMTDRGRNSDNFEQ

SEQ ID NO: 157886 - protein, 24 aa, Heterodera glycines
IGFLAIIGIGDLIGIGFCLARHIP

SEQ ID NO: 157887 - protein, 81 aa, Heterodera glycines
MMNTEFGAPFKNVLGEIQLLSQAERDGELINKKISVKRKRYKFFMPIMPRGFEPTAWRKRSTRSVTVANYNGTAVFGQQHI

SEQ ID NO: 157888 - protein, 17 aa, Heterodera glycines
HKHLFDLFYHIHNLIKI

SEQ ID NO: 157889 - protein, 165 aa, Heterodera glycines
MIRLPFLSLALAFSAVLLVLCDDLPCPTDPSSAPLPPGCPPPPADGKKAPADGGKDGGNKGRKKRDNILRAKREDKSKDSEQKADDDEADCAPPNGTPPPGAPPPGTPPPGASPPCRRQRGGPAGGRGRSSAAPAERSAADHAEAIEKLAKRKRKSGCSTHKHLG

SEQ ID NO: 157890 - protein, 29 aa, Heterodera glycines
MISRLFDSVNNFKSYIDSKLAQTELARSE

SEQ ID NO: 157891 - protein, 88 aa, Heterodera glycines
AVQPLFKDRTVPCPQTEWREIIRQSILSSATVKGRADTSPMKIQMALTDRFPHNKFFVICSPFEQDNKNPSESAVNDGHQMPIEAQLR

SEQ ID NO: 157892 - protein, 75 aa, Heterodera glycines; identical to SEQ ID NO: 124542

SEQ ID NO: 157893 - protein, 92 aa, Heterodera glycines
MCRRCNANWTEEHDKLSCEQFAKLKNYKDDPFDKKIADAIIHKCIQCNISFVKEDGCNHIFCIKCRTEQCYCCRKSIDLFDHYCWSSNKINI

SEQ ID NO: 157894 - protein, 47 aa, Heterodera glycines
MNKVEAQNAERIRKCHEFKKKFFTPFSKKFDRKMNDKLKGSTRMNEQ

SEQ ID NO: 157895 - protein, 34 aa, Heterodera glycines
MISGIKLTFVFILRITSAMDFSTKFPALVISRSE

SEQ ID NO: 157896 - protein, 52 aa, Heterodera glycines
MTFLGVDGIMVAKMMCSSAGMQMTSLVMGRLLCAFLQQDDNKTPNDQPMLPV

SEQ ID NO: 157897 - protein, 184 aa, Heterodera glycines
MAGAETRAPKRHRRNAVDPNVNPFHSLAFPVQLNEKIFLMLYFWFILMAFVSLLSLAEWCWTLLFRSQNRFIKRLIELSLLQMIPDPEFDFGYAGTRRDESGTDECGAETEDGDELEERQHGRFTAVASGLTAAKAENVCDDNQSGSPSNNSTATMEEIEQHAKQMLRNSAVGQCGASDGKVKG

SEQ ID NO: 157898 - protein, 181 aa, Heterodera glycines; identical to SEQ ID NO: 124594

SEQ ID NO: 157899 - protein, 326 aa, Heterodera glycines
MALLSYRFDVLVDTHFDGKSELTIWRTIRIVKDEGPNANDNGPKPKVSVRIDGSFVDFPLSDRQLPNKICFKNLQIHYIDHSVIKFFRSKKRFFDKSGTKLEVFVHSIDTYVQPIWDVFTREIWPIFAKSIRHLGLHNANALDNLRRRTSPTLLTDLDELHSINSGHLCPEGIADDGPNATAGQALAKWLHTPTKNGQPKQLRFRAYTFRRATTSVSYKIQLYFWVEPMPIEPFELDNEVTKEKLTLKQEIDEFDLNVYNWLLQRCPIGETATAPVKWENRENPSANLNNVRFDLWSFDKSIGPLAPPAEEKEGEEEADQSNKNVV

SEQ ID NO: 157900 - protein, 662 aa, Heterodera glycines
MNFRGATEAYAIVHSMPFARLSHHVVKLAIHLPNQQPIVYRAFQLVSKAQQIQQGELPETQCSAYWKQWQNEWKNDPKFKDILFEKVPERFRWAKDKWVLYKRQQIKRPPIGRIVPVPPSDPERFALYSLMRHFPGDPDHLKMVNGLLCTSFTEAAIMHGLLEDDKIWDKTLAEAALSRWPDQMRWLFVSILVYGQPSNAIELWNKYKDQMYNPQGIITLAQHKVAELEALADIDWRLHSCFNLSCVHFSLPDPPTSIAKNTDAAIEEFFFGDDDLNLPPGQPNPRPQPNTPPPLNSDQQKVFDAVLLAIQSNPRDSTVPRRFFIYGDGGTGKTFLFGQIIRRLRKAPYTYKVLATASTGCAAILLPYGKTAHSTFRLGREVSLDKLPSIPLESFFARRIREAQLIIIDEITMLHNTVIEVIDRVCKEMAIRQHKDLLFGGKTVIFSGDFKQSLPVVPHEGLTAQVTACFQTSPLFGQFTTMKLTINQRLGQGQQAYLQMCRQIGLGETGEHFWIPPQFLVKSKEELIDYVYPNFQQLLGNDKELLNRLILAPHIDTCDEVNEIMMANVPGQVREYLSTDKPLDDRPLDIDEIESEVAALNRRTDSGMPPHSLRLKVGCVVVLLINKSDKEGLINGTRIVLEELGDDRLIGRVINSNAIGGQ

SEQ ID NO: 157901 - protein, 1061 aa, Heterodera glycines
MPSKQRNLKKKKQDVYRRQAERSVSRDNSPVSDGSADGNGEASASLRGTTTPSLSALQISTPASSIGSKKRGRPSKAGAKPNLATQESMSLIDIHQTVLTQSDQGSPCKKRGKVAEIDQPMFANEAIALTPVSTQSRAGRPAKKIGGPGRGRLSDSMSKSSEMDINLVNAPISATSHTVPEKINFSTVQINFATTRNFACKIWRWAAIGLYERDGETSLAPSSGPRYIETCWNDLTQFLNDGFAATYLAYLASISQRKVVVVDPMVWRNGLDRVMPYKNMTFGYNPNVPAEVILLPVHFPGHWTLIVHDVQWGTHFADSLPTPYGRLDWQLTDKIGKIISDILPSAVLTGIFNAVNLTVQHDGNSCGYFVCLYAESWLMNNCTFVLPDLNINYEKKRILWHINELYGSDIVPFHPREGVSTSFAVVSHHNGDVAQTSSKHIVPIEGDDSAVLPSSEDTAVLAQAPVIGENQADTHGVVADTIVQQEPIAQADDVIFIRPKTPPRRSMRVQKRLSASVSRSPSPAPKRPPPANSLGVATPITRRCSAFHKGWQCAAAAAKHFPEYCDSGKLGDKKCADCGAHLFSHEDSSICCRKGRVVLPMLNPHPDELKQLIVGNKQSREGKEFVRHMSRYNNLFQFASVSAGNKPSPAGGPMAVILNGEFHRRISSMQAGTTQIPGFGQLYILDPVEAMEQRRNNPRFTGEKITNEDEFVQGHQLNEQTLEILEQMIQLHHPAAQAYKQAREQLTELLQQQTPEELRFFRMTLLNERRAPAGLKDPKLHPHQIITPSTGEGMFAIHADPTGAPPPKGIWVENKQGQLNEIAPFSPWTDSLTYPLIKPMGDDGYTTGIKYAKPPSRKRKGAQNASGLFDSEAESDNESCETQSIASSDAGSVADSDAESVASVSSQHRRIDKSKQFISLRDYCKYYLAIRDENVELQYHHILSCGGGLGQRWILDQAAKIDWQIATFLRRPDMDLRISTPKNLLQYLVNQYNRQQARQNPNAQQKTVDDIGSVVRLSEHNVNSLQYWKKMYEDCNTVFARCHDAKKARLFITFTNNREMA

SEQ ID NO: 157902 - protein, 130 aa, Heterodera glycines
MDAYNLKSDSAVRFRLSRNQAYFLAFVSLCLVIITGLLIAVLVIQVTTQNGEKRKEFGSEDIRSSIFANINSDKIAANLEAFAEKPHVAGTEANKKVADRIMETWKANGLEGQLRDKKQRHFENQSRKFI

SEQ ID NO: 157903 - protein, 265 aa, Heterodera glycines
MAQFLKNFLFAMILFIEFVVVVVVEREEKNKIFECPKENARPEQLRELDKKERSEREFELLYEMQETFKKMFSEDSTVTYNNPITKNLLNRRIPKWHFEFIVEKAFQLLRRIKQIDLTNFEKWNQTQEKHEKEWQKISEKGEYFHRKICLLQGFAHRIVRDETLKENSEWQKFHISVASEIFGIGEESEFEEVINEFEENNFAILTEEEYMEHVKKCEESEEYSRKIGDYMLSSTLNKSFYRMCLHKVISNSEEFQHFLCYHKSI

SEQ ID NO: 157904 - protein, 452 aa, Heterodera glycines
FREKAKVMLKVADICVPITIYFVNEQKSVCNRDYQLILGCDSLRHFGSFTVNIDKNKIQIGTQWISLGSKNYELMNNIRAFAAENYTIPPSSQVMIRANIKTASQPKHSLVVDKPDLNLISTDINEREREALKNLLEEFKDIFSKSQYDLGSFSGGEHHFDTTTEAPISSPPRRMPYKYRDELKKHIEQLLNKGVMVESETPWVTPFVVVQKKDGGIRPCLDFRKLNEVMIPDRYPLPRLDSIMEKVGSCKFYSSLDLSSGYMQIKLSDDTSWKCGVITEDNYKPSMSRIEIIQMSTPKNLKDVKRVLGKKGFYRRHIPNFATVVEPLLRLSRRDVPFEWSAEHDKTFNHIKELLSQAPNLVFPDYSKTFHIFSDASMVGLGAVLMQKNELGTFSAISYCCRTLSASKRRWPPLQIELCAIIYATQFPFILSDIELHTDHKTVAFLKKSDTH

SEQ ID NO: 157905 - protein, 43 aa, Heterodera glycines; identical to SEQ ID NO: 155484

SEQ ID NO: 157906 - protein, 117 aa, Heterodera glycines
MKSLLLKLFVGLCFIDFTSNIKSKFEDFLENQEAMKSIQNYQEKRIKTIKELHAELTKKGIKLAERSLRLYLCKIKSANSDTSKESPNIPEIKFEKQDREEYFWQIFTPNMDHSVKD

SEQ ID NO: 157907 - protein, 98 aa, Heterodera glycines
MVIRRGTKVIRTGEKVIRRGTTEIRRGTTEIRRGTNLMKRRATTVIRRGATVIRRGVTVIRRGATVIRRGVTVIRRGATVIRRGVTVIRRGSTWFKII

SEQ ID NO: 157908 - protein, 154 aa, Heterodera glycines
MPSGSVIWQIGLYKKSNNNDFEYECAECCKNIICKKGNTSNAINHLKSKHKNSEYEAKYEDLLKQKREGLSSFDKKVIHWIACTQSSFSDINNPTTIALFMGNNPLHKLKDESIYRKKILPMVYRMSNQRSKMNWTNAQKLLLRRIFGRTLQTH

SEQ ID NO: 157909 - protein, 153 aa, Heterodera glycines
MQSLSPENQKEIEIFAKHCFAALKLFQQFITAAYCFIQQQIKMSGCLRLCSLVEDRQCLIKAQPYQLNRRPLDLIGNRKGSRHGEEKGAIGCPMGRVNGQNALVPFCWPAFPAICALCFGSSWPGVILIHSLTFLLMTSLFIIILIFRWERRW

SEQ ID NO: 157910 - protein, 40 aa, Heterodera glycines
MTDIISDYFLKKYLESNIWIAEKIGISNAKWTKSPMDNNK

SEQ ID NO: 157911 - protein, 148 aa, Heterodera glycines
MKNRISFGFAVNQQTKFEGINRSRKGICAYDSKGELWIYGEGRGITQFSYGVGDTVGIAVNFASLRIIFTKNGQCLDCYDFIYSPFLVGDYLHPFVSLYDTGDKIEANFGPKFKWDFATLWDKCSLILILLLFLMFFMHFFFNYVMVV

SEQ ID NO: 157912 - protein, 66 aa, Heterodera glycines
SDDDEFRLDDEDGRKKQERETPTNAADTEERFSQLQNDQKKLLEKISELEKQQKEQTNGEEKLKQK

SEQ ID NO: 157913 - protein, 223 aa, Heterodera glycines
MKFCILLFLFLIALIIPIESEKKKLQQKSFDAIFGEKWQEKEEERRNELKKREIIAKFYKIKEKIKQKGRKYSAKEWNKINTKIAKKLGTNRHKIYEWIKEIGLYKYHKSKTDEQKRKIVQKFIVMKNEFKQNRKYSQKEWEKNYAEICKKIGISRSTIEKWKKQFGIRCKITENEKMEKMKIYWQTKKENIKMTDKEIAKTLQKDRKSISRWKNQSSKKLKY

SEQ ID NO: 157914 - protein, 51 aa, Heterodera glycines
MRAVVASRIPPSAGLSSSSALVCAAALATLCVQSADFGGGGGQQIFEHISK

SEQ ID NO: 157915 - protein, 81 aa, Heterodera glycines
MVHKDENNCDGDLRLFAIVGRSHVLGTEPNAKTAAVTEKSVSKNIDDLKEGAVVAQKLVKAKNAYEEMVAKAEALLAKANK

SEQ ID NO: 157916 - protein, 187 aa, Heterodera glycines
MRVCIDQQFFVGQWHTVLGRTPTTKMPQICRNMALVDDQSEPLISAFDIAMTKTPLKFPNLEADESGVFPADIPCRFELDLYLPFVYTHLTIMSGGRPITTLAEARADFGRAKGQFKRAVMALPNHSLDGTFSSLSAYFGLDSSVGVQIVRDLGLTDPAAIFEKRVDHLCEMVSEHWDVQMFGQATR

SEQ ID NO: 157917 - protein, 80 aa, Heterodera glycines
MLHYQLDGDHYGSDQLAMNQLEGNEKKILKKCQTDRPTALGLGPGLPQIDPKVASRIPGWWPRRNCEKVWCTKYFGVGCN

SEQ ID NO: 157918 - protein, 198 aa, Heterodera glycines
MNSSVLVESGVQFEMPILFALSGIEMLLNLVELPTSGMNIYLIGRTPMIHRNLKFILLYQSAWIFTRSFARFSICLLKFLSANALVSEQLQPFKFAYQLSAYNRNFVPHILIIERLMATFWRKNYERSVGWHFSLGWSSFVVFIWLWHYNKKAYMKSLANVKLHCLTERYQVKEEASLSQKQNLKLLSCLRTFALASN

SEQ ID NO: 157919 - protein, 18 aa, Heterodera glycines
YREAIPEGFGLPINLGAS

SEQ ID NO: 157920 - protein, 29 aa, Heterodera glycines
WLTKTSSNLVLSILFQIAPNFFYSLTRPY

SEQ ID NO: 157921 - protein, 46 aa, Heterodera glycines
MHRASAEAAQRRAENRRLANAGAPPINVDEMTPAQLEAAQGGLDGN

SEQ ID NO: 157922 - protein, 26 aa, Heterodera glycines
VRFKVVKVANTSLLALFRGKKERPRS

SEQ ID NO: 157923 - protein, 250 aa, Heterodera glycines
MSSADGFFISMINLLAYGPIVPFVFALLIGIPSAILYCLEVWVIIANFADFNSAFFVLVVVRAILSLANWICQFFENRFGKIGLFLAFFHQLPECALSFLYFAVNFAFHVENLLTVFLLLNRFSSILLPFTYNKLWRCALVPALIVSFVLPLPFTVPIFSLQMFIHIQNDNVSFTIDHYKNENIIVYVTSTQFVDEPNKCTNNGQPAQFGLSAEQTQTLFLANYNQYPWVNDLSTIAIPAWLVHSQMNKH

SEQ ID NO: 157924 - protein, 134 aa, Heterodera glycines
MKIDILLLLCLFIIKNTIDQTVSMKIKQSKGFDQIFGDGWEKNLEENGMDQIDQNGTIGQRQNDDKNRTKNGKKMLKVYTNVERMEKMKQYYQLKSQNPKLTDRKMSEILNIPKRSLQRYKSETKVKANKFSIQ

SEQ ID NO: 157925 - protein, 57 aa, Heterodera glycines
NGLNRMPNKLNADGTLPIYFMARKKWRLQKLGSEPLMISVLISSLFKTIILSHFVSY

SEQ ID NO: 157926 - protein, 193 aa, Heterodera glycines
MNMKNSKNEEKLDEYCSNDTDILMKALIKMRKIFIDITQDKETPNGIDVLRISTTIASSCMNIFRAKFLKNNETLPIIPESGFEPKDSQSNIAIKYFEWIMHRDGVKARHAGNGGEISLLGDKKLKIDCIIGAQKRIIEFQGCAFHGCQNCYKGYMIQANGFTAEQNYERTQNKMERLRSVGKKMGYTVEEVW

SEQ ID NO: 157927 - protein, 237 aa, Heterodera glycines
MTVTAEPSDDKKSLPTDLATAEHPPPVSVPGITAPQHPVRPIYNSKLATQKKRAAIERDRLNKLAEVQRMKTELYTKLVEQQKSLLKKLQQTEDKEAKKKIVKYLKTFELKVDGVKTELEQLALKMREMQMRQPPTKRTRTGLSISEQQLLCRVVYVSACPQEFSEKLILHMERFGELFDYDINATPQIFTYKEPLDAQREQVAAKDLIALLEYDEEEEDDKKEGDEEQLSDKEGND

SEQ ID NO: 157928 - protein, 87 aa, Heterodera glycines
MGKIKQVNNKYKKSPKTAQECKICERATLFKYYKIQSCDACKQFFRRTIVAQRTFICPKSNLCPINKGSFFTYVNIILIKNKKFNKN

SEQ ID NO: 157929 - protein, 88 aa, Heterodera glycines
MVEKPMKFALLKSEKSLENCNVNKQINEQLFNTDEMQIAIFLRDFANESNDQGKGKAMDQNGGEEAQTNQQSNELIGSLELCRLSGVN

SEQ ID NO: 157930 - protein, 73 aa, Heterodera glycines
MLWLKASADWRPPLGSVWNPSHPLVQAWIQVSKSLDFSWTWIFLDFCPGNPGPGPTWNPGPGPGPGFFQNTEL

SEQ ID NO: 157931 - protein, 60 aa, Heterodera glycines
MFPCKDCPKWFLSPEKLKTHQRYSHGKCTFTCHKCSRVFTDSSNYRRQLKKHEEQCSQQN

SEQ ID NO: 157932 - protein, 66 aa, Heterodera glycines
MCSILARLVNIFALKNADSINHLYFEKTFLILISIWLLARAFGIIFNYQHKNESTLKLYFTMTFEL

SEQ ID NO: 157933 - protein, 169 aa, Heterodera glycines
MRCDFCGHKAKNPLKNLSVRVELRDCVDPEITQSTTRTTLFSNTAENFLQLKAKEIVEIGQKEPEKLARVFESKLDQQVLVKLNIKESKGDFEGSDFDWIVSRVFTEDKVKVEEEKEKKKLTEEGELVDDKTNHGEIQIIGEMLAGSTEFGSALWHLQIANSLFLNLII

SEQ ID NO: 157934 - protein, 197 aa, Heterodera glycines
MAELDKLGQSDGDDAGGVEEGAGMDKRSLLLSEAVQVTVTCFAPPVGARPRHFPHQFWGYNEKHRIQICNWDDNYCLFYALIGSRAYHDPVLFKEWTQARQPPQQNMAQLTLLQDFCESQEAFRLLLINRALMRSSAERLLNAAGIREALNAYGIDQLQPIQDYWDQRFPGLYRILLFEDRPEVLPKPMEGANWPSF

SEQ ID NO: 157935 - protein, 42 aa, Heterodera glycines
MSCQSVARLPAFGTAVNVDMIQMTNSLMDERVVNLTSQPRIG

SEQ ID NO: 157936 - protein, 19 aa, Heterodera glycines
TFAFSSLALPNTHTIFEML

SEQ ID NO: 157937 - protein, 19 aa, Heterodera glycines
TFSFSSLALPNTHTIFEML

SEQ ID NO: 157938 - protein, 19 aa, Heterodera glycines
TFAFSSLALPNTHTIFEML

SEQ ID NO: 157939 - protein, 19 aa, Heterodera glycines
TFAFSSLALPNTHTIFEML

SEQ ID NO: 157940 - protein, 19 aa, Heterodera glycines
TFAFSSLALPNTHTIFEML

SEQ ID NO: 157941 - protein, 19 aa, Heterodera glycines
TFAFSSLALPNTHTIFEML

SEQ ID NO: 157942 - protein, 19 aa, Heterodera glycines
TFAFSSLALPNTHTIFEML

SEQ ID NO: 157943 - protein, 19 aa, Heterodera glycines
TFSFSSLALPNTHTIFEML

SEQ ID NO: 157944 - protein, 95 aa, Heterodera glycines; identical to SEQ ID NO: 125597

SEQ ID NO: 157945 - protein, 35 aa, Heterodera glycines
KCLICSGVGATIPITYSHNDDPPLVSATPSISGGK

SEQ ID NO: 157946 - protein, 77 aa, Heterodera glycines
MEFNVDAGGLGKEFFCEHIFVENASIVTRQGPVQENSLNILSRRALSLKILMAQDGFYGRSYGEYIKLCPYFWTIYC

SEQ ID NO: 157947 - protein, 100 aa, Heterodera glycines
MLGHSEWMDAQEMMANFIEQHSVGSVLSAFAGHHVPQHIANLLNENEESTQVLKNWGIHPEKMTIETSIIFSKEITPAQKEKVFSTLDSFLKDNNIRTEM

SEQ ID NO: 157948 - protein, 207 aa, Heterodera glycines
MEAELCWTIWQNYFENLVDDPEKFGYAMDSLMKFKQDNYPNEHICFLGFGTTDDGDHLMNMVIAKFLQQNFEHISFVDGGYRTLHQMLKDGGNLTKLSNHYRRNDCTECKEGGPKEGENGKAMVGPQKCQIKVPIADCSLSDARPLLDVSQTVEKIAAEEKRINGAAGNGRPAKGDGHRRECEAREQHRSVRQALPQRAVGVQHQQR

SEQ ID NO: 157949 - protein, 145 aa, Heterodera glycines
MSLNIGIWAEEEDDQRPSFQHGKKRPNDSAPVSFVSAGVKVGSKTQLADGNLQEDEEESEISAVETPPEKRPTPSTFVPSVPSTSDVGAQVFAGMRSSKFQSGGGMTDTTWIKAGKGSVVMQMMQEMSIKNRNEKVISQMSSRFV

SEQ ID NO: 157950 - protein, 156 aa, Heterodera glycines
MDVTLPVSNSAGEWIGEERRDGVVLYAPWTDEWHVQQQQQQQQHQQQQHQQQQQQQQQQQQFVRRTGTGWTRFPAWNEPLVANDWREKEENRIQRKRLQRENPEYWAQILEEEKRAVCCWGREDSGWKFWRRALVNDVGMGLKVLRLTMIGDGIWH

SEQ ID NO: 157951 - protein, 238 aa, Heterodera glycines
MPVDLDDSLLSLDVSPTNSFPIDPPLADVDSFVPDLVPELGDDSAEYLSDSEEFEVERICGQKIENGRQFFLVKWKGYPKSQNDWEPEENLLGCQPKILQYWRRRQYDKEYRARTKDDEKSARGGKKKKSKAYEEKPKAAVDVEPDPVEKAKEEMGATPGEVLEEETEGLEEEDVCKKGKPESADAGPEVEQLKKMLRDSGQMPMDNAPLPLPRWVRGSGAFKKRYKKLYDAMTNNMG

SEQ ID NO: 157952 - protein, 86 aa, Heterodera glycines
ILTITFLLFSYNEVMPRVSYLKALDIWLAVCFMIVFLSLIKLALMKYMRQRIRIVTGGAQSSPSALLGGMLPIIQLSTGAGPMLDY

SEQ ID NO: 157953 - protein, 141 aa, Heterodera glycines
IATKNPREQSISHRSLLILQSNGQILYSRRLSVVAECPMDLTLAECPMDLTLFPFDSQTCKLGIESFPFDSQTCKLGIESYGYTSDQVSYGWSKGQREALKLHKIRLPDFRIKEAFVTSQLESYATGNLNNFFKFFLHKII

SEQ ID NO: 157954 - protein, 153 aa, Heterodera glycines
NGANLSRALHNLTNEIGQNGKCELSYAIHKNYITEANKKNNKFDASNSHFMYELDKINKISIDQSTNTLPTALIWINQLRTDFATLVPEIGLVDIWQNVDSYTETRELVVKLCEKIATIQTDVSYNGSNLVNQIISEAKDKLEDFKEKSGGSN

SEQ ID NO: 157955 - protein, 258 aa, Heterodera glycines
MTKEVFEQFRQKIEMNLSLSDLILRKWALIANSKLGENQIIGFQASNTWTNRFKKRHRIVSRKITKFISKKHFVNYENVKKEASEFVENIRKIIKDEKFSERDLLNADQSGFELEMHAKRTLAPLGTKLVECVVQSVESTTHSYTIMPLITASGILLSPLFIVIAERSGKFPKKGIFQAKNIYSVANTSHIMTKTLMVEWVENVLYPTLRSNQKTMLLVDSWPGWNEFETKEGVELSVKQIPKHGTGICQPLDVYIFR

SEQ ID NO: 157956 - protein, 256 aa, Heterodera glycines
MLAKIRTVVHTKAMANFGPMGQRILECRTFLVAISSVVALIWPLGGLSSQRMANLWVFYFILNYFYLNYFSDTSDLFLSPPFGFPLFPFISLNDSGDLIETNFGPQFKFDPAKAEAENRKLKNEIEKIQEKFDKKEEQLEKDLGELQKKLVEMEQQQNEQQKSNEQMKKVGKEIFTAHFERFRQKAFQEELEKKVTERIVAVQSKVDKMEMAHQQQKVVTEKAIFERIGELEGQQKHQKQQGERETNGENIFSIYY

SEQ ID NO: 157957 - protein, 176 aa, Heterodera glycines
YFNFTFGDQKGTSMFMNSIYFLNSMYLIQFKIVCSVQSVFCSVPYVSLRDGSPLFGIYSQAPTGKTVTQFLGVPFAEPPIGKLRFRRPVPKKPWRDQWNATAFRIGKLRFRRPVPKKPWRDQWNATAFRDSCVQSPDTYFGDFYGATMWNCSTCLFLDSLAINSKKRNILFVYFRN

SEQ ID NO: 157958 - protein, 24 aa, Heterodera glycines
TCTCGVVVKLSTFHNFSPGFNSPL

SEQ ID NO: 157959 - protein, 39 aa, Heterodera glycines
MDSLEAEKRRLQGRLDELEGGGTAATVATTTTTVADGGG

SEQ ID NO: 157960 - protein, 92 aa, Heterodera glycines
MEKTYILKTWAVFKVAEPFNYGSVELELRAQEGSTVTIVTKTDYVINGITKEMYFDFLGSKLALNETNFMPSKIENLRKGGEIHCKITQKIQ

SEQ ID NO: 157961 - protein, 214 aa, Heterodera glycines
MPTFPPNLLKIHGSLQQKLSAKRTAAHLTTSPLSTIPTKRQQFLDGTAHLDITALLTCTEVSEPVRAVILQLDALLKLAVDMVHETSTQDTRAVLEEDRREHSVVLMGVPESDSGLSSTRRAIADQQQVLDILDVCEMRQCRPRFTGWAKERKEAPTSQTVSVRPSLSPEQLKERHNLINCCKTARAQFPNLNFIVYAGHVIHRNDVSVFRDDP

SEQ ID NO: 157962 - protein, 18 aa, Heterodera glycines
RKSLKITFLRLQNMKFIN

SEQ ID NO: 157963 - protein, 209 aa, Heterodera glycines
PRAITPSNLSASDFGAASNSAGVVSYFSSPSVFPSSHRPYSSNWAPNSNCISSTTFGNNDSTISTIESAWSTRRVQTFNAFVGGGAGGDSSDEEPMVARARRQVMDSMEPIGDGGSGGGRNVGTDLPWHGRQWQQQQRRISASAEVDQHANNNNNNNFKQFEHRWYNKDNQHSNGNNTFKQFEQRWYNNEKEEEHSRGRSLRSSHHYST

SEQ ID NO: 157964 - protein, 91 aa, Heterodera glycines
APPAENALRHIAVIHPPAEKRKAQDRSQFALLRHAFPPLRPPPLHSHIPHKNPQSVYQRDENSQHFYDYWSAAPPPNVCCVKNNSLHFCGQ

SEQ ID NO: 157965 - protein, 228 aa, Heterodera glycines
EFPSPTKLFIAQKMECLGRSKAKSLCDQNESEAPQPKIKRKHLKKRSWMTLFRTDNSIGEGRWEMAANGVEEKRNRTTPTTTMSPRMSSFSANNGRTAKYGLGPRRPYARATPLLSLTARAPSHFSSPFSSTIRHQQQRKSVAPGRNRNSISNDDEWVRKTERFITRTSGFVDNSSSSTAFSRANRLDTAIDAEQRSSMRLERTAGAFDGSWRRTLAPAEHSKTQPQQ

SEQ ID NO: 157966 - protein, 227 aa, Heterodera glycines
MYEHLLSVHSSGGRGIKIDEYQTTEKEKKGQQQTTIMRNHQQTPPMSASAPATPPTPNNARAFHCEECNFKGRTLVALEQHKVQKHSQRARTGTFPNITPKMSGLTAHFEPMIPQQNGGRPLNGLSLLSGVLSAASLPDSPLSPSSVGGGLFPPAFPSSLLFGTVPSPFFAQSAIVADQQQQLIAQLIAAQQKLASALLGSPPAAQQNATQTATMAEVGDSNQQKMF

SEQ ID NO: 157967 - protein, 21 aa, Heterodera glycines
MKGQKRSGLKRGNLKRLNNLV

SEQ ID NO: 157968 - protein, 146 aa, Heterodera glycines
MQIDQRTRLEKVSQFDKEQKQKRKALLNLRQNYWDANVCHENLQIIGNKSLIVHYKRNFSAVKNRKDWVISIGFVLKKQKELKGRMGNGAFAYVSNGEIWINAEGKGKNTEYSYGVGDTVGIGVTSATRQIIITKNGLRFGWKRNI

SEQ ID NO: 157969 - protein, 108 aa, Heterodera glycines
VNGNAINLGNDGQLFDGKNSEQSITDQQQLKKEQKLKYQELMGEQKALKEKVAKIEQEKEKNGKKRNTSVEEGFSQLQNDQKKFWQLFWKKSVNWKSSKKNSQKARTN

SEQ ID NO: 157970 - protein, 171 aa, Heterodera glycines
MATSVVSLFLDLFRWLALGFGILFNAILIQMVVRHTPKPMRIYSKCNFITEKGEFAAILYGLVTIKGVEKGIWNLLAFVCFVFLVYVSMFGYVSQFIFRYFLIVRGKTISALNYFLLFFLMLLFPFAYCVHLFNCYFPPAEHGLMEDNYVAEILGINLDEQIPLAAFPLMY

SEQ ID NO: 157971 - protein, 180 aa, Heterodera glycines
MVLVSEFCAQFLSCPTKSLRDRLNHPEDRVRVLQQLIGKKVQTTYKDRNGMCKCFFVGGMTERGAAFEPAYGRLRKPFNINVAAHFYARHRVKLHYPYVPCIIEGFTRGEDRYYPRELLEIVDDKKGGRLFGRLFTEIEEREEEDTKSEASHSSNSSYLQFNGKGCKWYESIDEIANTGR

SEQ ID NO: 157972 - protein, 65 aa, Heterodera glycines
NVVLRRAHIVRSSTSWQFTWASEVAPRPRLQLELAIVQRLRRSTNRASANLTWLSLAPHSVPSWR

SEQ ID NO: 157973 - protein, 107 aa, Heterodera glycines
MSVFIFFNVFVIESGKIRQNFDEIFGDGWDKNEKEELMIKIEQNERNENSQSAAVDQMGEEMGNGPNDQMGNYTDQNLFKGDLNINDHKKREIIKKFEAIKEKLKEK

SEQ ID NO: 157974 - protein, 51 aa, Heterodera glycines
MLFSCLSVRIKTKWKKQLTDSLRQLCQDQMYGSVANGGNGLGQIGMDEDGN

SEQ ID NO: 157975 - protein, 110 aa, Heterodera glycines
MRLSVLLAYLFLLLPGPGGAQFGQLPIGGGALPGGATLRSNPLINGKNGAANIAPPGDEQMCQQPLQQFALLPPSQTSARREERSKTATSASTADYPSAFAAPTAPAAAG

SEQ ID NO: 157976 - protein, 485 aa, Heterodera glycines
MTTTSSSITVTAQKLNDERQRGMAQRQQQQQQQRGAERSSGGEAQDQTQNAKFSSNEPMEVAGIGNGSENNGTDRRVGPSIETSTISAKNSPGRNDTDLPKYWTFTRLPFINRTELANSAPPSVPIVPSSSSNNNNNNNNRPREEESWSAVDLELKPPHLGQADFFTPNEANQSKKQNNGSLAERQQLILDITKCQREGQSADDKVPTEKEAEQSTVALVAPQLVDTVYTEVPEAILPAAVDLSSSGNKAEMLQLATGNGTVTAAPVQTEFKKAANTVIERQELPTAAANTEIEQQQNAINFDAPTECNKTLEGMGNEKQNMVGDEKLQQRDEHPKNKTDKFVKTKNGEDTCCNLLRLLKSNSDNVTTEFAASIDGIGGGEPPELLPVTELRDQQQKPEKNALNGINDNKLDDSIRQTVADGEHEAEVANEESGTVKANWKVIEEGGQREKAAQCQGKANLKFKFSIHNNGNNYNNNTERGTGNS

SEQ ID NO: 157977 - protein, 88 aa, Heterodera glycines
MLANHRQLFLHFLFAIAIFVFVIAPLMADSEHEIHADQQSAINPREKRWGGGWGGGWGRPWGWGGGWGRPWGWGGGWRRPWGGWGWGR

SEQ ID NO: 157978 - protein, 19 aa, Heterodera glycines
MGSAVGIGFKIASKWPLPS

SEQ ID NO: 157979 - protein, 86 aa, Heterodera glycines
MSEAYGFLDRLTKRITRRRGTTPAASGFGADSSMDGGGVSKVCIGLCLCILILVILFAILLLVVALTPESFQGVAVLGGLASIFGN

SEQ ID NO: 157980 - protein, 19 aa, Heterodera glycines
MYVMFLENCHFKLYAYINE

SEQ ID NO: 157981 - protein, 15 aa, Heterodera glycines
MFDYDRDLNIAQQLA

SEQ ID NO: 157982 - protein, 446 aa, Heterodera glycines
YARDSMQSGVHLSASSSSGSSTETTRHENVFFLKKLPPLKKLPPNVESAALLVANVSALDRPLSAFVANVSALDRPLSAFVRLKYPTVYPELPDHPIPVRFIYVPELPDHPIPVRFIYVLLNPMDNYPNETINIGRAMGALLSDEIFQSVAFHCLERHTLSDAVDEFLSQIVLIPPGNCSLETRWKPADRDAGGAVRKRAKNSKRKIGARLDGTPRRKDARPYRTGRLFGGLMADLRRKRKLPWFPSDFSDFFRGRLSQSLAATILLFFANLSNIITFGAIMERSFHHQIASIENTICGALSGLLFGLFSGQPLNVLSATGPTLIFVLSATGPTLIFEKILFDFCTTNHWEFLPFRFYVTNHWEFLPFRFYVGLWMSFYLIILVATDASALVALITRFTEEAFATLISIVFIIQAFEKLFEISYEAPINSPRGRDQIEKRKNIVEG

SEQ ID NO: 157983 - protein, 55 aa, Heterodera glycines
MKLIESSDIVKFPDNVTFALNNRVVTVKGPRAAPCAEMVWHPQRSGSHSHSVLTH

SEQ ID NO: 157984 - protein, 104 aa, Heterodera glycines
EKMRTTKQLVNSIPGKGNTRDPSSEFHWDHWPGNLASVALKVKNIDWILEYTSKLNILCQKFRDGGQCCQGGAQEALEGQQNGLQDGFQDGAQRRQHVRWSAGS

SEQ ID NO: 157985 - protein, 140 aa, Heterodera glycines
HFTLKLYFYDFSEKMRTTKQLVNSIPGKGNTRDPSSEFHWDHWPGNLASVALSEVPRWRSMLSRRRSRSARRSAKRSSRRLSRRRSTSPTCSLVRRVIATSANETKTRIPKKIVIFSTLMRDSSSNLETTKGSRRALKTP

SEQ ID NO: 157986 - protein, 223 aa, Heterodera glycines
DPGISEDLKAKRHDCLYKERRTVKGILENRPQKVVIENHVPGPNVAPYLGLNNQSKPQETEEPRKIIIPRKRLKEQTPDPESDNDTLEELSPEPQTTSILNPPIPIKTIIHPTLLNGLFRYVKENKDLFKITAAGKVQSNMNLPIENSNYRDVLLYLAGKKDETPRGAKFLKDRLLKDPTVKDMVDKSKVMWGRGRKKAIKSIKTPGIAREKKPFKPLIWARL

SEQ ID NO: 157987 - protein, 58 aa, Heterodera glycines
MVVKIISRRLLALSTQYFRNAHVDAYQQIFVTVVMLFQLIKYAQIALPIGMEAARYRL

SEQ ID NO: 157988 - protein, 76 aa, Heterodera glycines
MYLYKFVQVNCKSEIISVYQLHTSATLYTVYFEGLIFLQMYLYKFAQVNCKSEIISVYQLHTSATLYTVYFEGVMS

SEQ ID NO: 157989 - protein, 223 aa, Heterodera glycines
VIINQLWRHGDRSPTGTFRTDIYQEDFWPQGWGQLSPRGMSQQVTLGKKLRNRYVEQLGQISGSYDSHELYVRATDVNRTLISAISNFIGFYGKGNGRDNFIGFYGKGNGRDYPNSDWPAGFVPIAIHTVDGNKDFISPSGSLCPRYAELSLCPRYAELSDLIGNTTEYQNTYHQYSSLLKSLLKFLNDEAEKKGDIVDIWLFQDTFFVEVNKFEMALNWEKV

SEQ ID NO: 157990 - protein, 92 aa, Heterodera glycines
MVKANENRTNGGKKRIASMALSLLEKALRREDEFGDGTKSEIKREMLSKECDEVNIFYVHGIKEEKKYATEKRFSEEANQSEERMKKRGLLV

SEQ ID NO: 157991 - protein, 343 aa, Heterodera glycines
MPKKFQRGNPTIQARRLLRRKDVMARWLNEDTMQIFACAEFSMQNVEYQAVNNCYRYIPVQIRIDKKTLNAFLDPELHILTASSPFADCGNFRYHYLQLSQSNWIKIDTRTATIQKIDSSSISEIHEASGDKSLLEITPLVFHRWTIDNETGEGLFAHLDEWLRLDQWKSKEKEHKTARALTLGALPSGVIGLTEEWFMDKLRLLVSYWTTACCIYVTFIFGRDVLIPLVWVYLMGPVIVTIRNLVTGNQWTQRNRATRGTRRAPAISRIEAIELVPPSMPQEMRANETSSSHQEDPEPSPLVMELKRQMVAFRSKRRFQSRGNVAAERQPRMSVERTNEDDG

SEQ ID NO: 157992 - protein, 107 aa, Heterodera glycines
MFSFRMIPRLLDLIDNKKSYSPKTRAGAETAAPKRYRPQRNKLYRKTFVGTEKENIKIVHSYNSEKKQNKRESQARAVKRSRNQRVHQSETMMKSRIFMELNWIGRC

SEQ ID NO: 157993 - protein, 33 aa, Heterodera glycines; identical to SEQ ID NO: 136023

SEQ ID NO: 157994 - protein, 113 aa, Heterodera glycines
MYVDMGYRTNPARTDTKVPSSPYSLPRQEKAADTRTKRDQQQLKPNRERITEEEVRMFGMDVTDQMDSGDPTESDQEGKAENLLPKTGVENHPNLAVNNCAIPSMAFDECSLL

SEQ ID NO: 157995 - protein, 93 aa, Heterodera glycines
MPTEPFELVNERTKEKLTLKQEIEALSNEIIYNWLLQRCPIGETATAPVKWKNRENSGANFNYIRFALRHANYSDANLNNIRFDLWGANDPIG

SEQ ID NO: 157996 - protein, 194 aa, Heterodera glycines
MNRRWLCSDVWMDILPSFDRPQLGLKMALLSDRFDVLVDKHFDRKSELTIWRSVVIRKDKGPKANNIGPKPKVSILIGGYGKFVGFPLPDHPLPNKISFKNLQIQSSLTFVYAKAFFSCFRYIDYSVIKFLRSKKRFFDRNGTKLKVFVHSIDTDVQPIWDVFIREIWPIFATNIRHLGFDDGDALDKTSKRCV

SEQ ID NO: 157997 - protein, 76 aa, Heterodera glycines
MPIEPFELVNERTKEKLTLKQETEESSIEIIYNWLLKRCPIGETAPVRFDPRYGNNACANLNNIRFELWGGNSCIG

SEQ ID NO: 157998 - protein, 92 aa, Heterodera glycines
MPIEPFELVNERTKEKLTLKQETEESSNEIIYNWLLKRCPIGETAPVKFDPWHDNYSGANLNNIRFELWGGNSCIGPLSLPAEEEADESIEK

SEQ ID NO: 157999 - protein, 133 aa, Heterodera glycines
MGMHRIPLLISIPSNISTNGSPNGSKLAHWIPQKTDFLTEQIDLNLFLLIRCIVILSLKYFNALKRFALYGRATLNLQIPNSKMNFNSVGGTNRPMEAPEGILNGKSIPTGNHQFHIFFIGIDLYLSNHFMTE

SEQ ID NO: 158000 - protein, 381 aa, Heterodera glycines
MPVAQNGGIFGTPPLAHEVQAVQQQHQHHQRQQSSSEAESIVHQRKQSMADHEEQWKEIDELLHSLQHDSQLIAHADQQNQNPSLLMKNSSKNSISSFNSSSSPNSCAGANGVTACAYQPIVRWLRIQVGLSREHRHHQQQQQQQLNNNGCSAQALAELLHRHGFDTVRFMKGSLNTALMDEIGVPRRVQLQICRFLNDNTVPEHIRSAEQFEFVSDWLDSLDLLDHLGSFALANLTSTTDVIAAKLSRGDLEKMNVTQLGHIARIMRSLDLAVQQRKKLHKSRTNSNSSGSSSPNVSVNGSSREACSAMQFMSSLNQNGQQNLRQNIFGVSPQSPIMNIAELRVRLKEDSARFSAHYLGSTEISNVEGTEDCRRAMQSAK

SEQ ID NO: 158001 - protein, 147 aa, Heterodera glycines
MDYWFLVPMFLGARSTLFIDRKDAGQKLAKALAHILPQRDNIVRMRALLQFSFRYTFMCTKNPEMLEFNLSNATKDIGICINQVVLALPRGGVPVACEVADAFQAPLDLLMVRKIGAPGHEEYGIGAVVEGNPPELVMVGRRNCCLM

SEQ ID NO: 158002 - protein, 59 aa, Heterodera glycines
MIFGPFPANIAKRAKLAMGSFSADEKSDNNQTQFEIVYVCRRSPSEVANPRSLTVELFS

SEQ ID NO: 158003 - protein, 186 aa, Heterodera glycines
HKIASVSKQLDEKGTKLKEALEQNASLKDRIGTLEDISELRQKCDELWGERTELQSQIDDFQSDKALIVQPIRTEWNGPKVVQHQKKMKTKKKVFHGFSMCENCSQNFLPNQCKVPKICGPIGNMPLPTLASVCAKFNDGATTNPLLADNVGTIEIDGDGTAGANVDAVRPSMSKSEKRALRRSSN

SEQ ID NO: 158004 - protein, 19 aa, Heterodera glycines
MSHFTNMKIELLACILING

SEQ ID NO: 158005 - protein, 30 aa, Heterodera glycines
LAHSGPIVHHESSNFFVAHFYRLINEYEMK

SEQ ID NO: 158006 - protein, 157 aa, Heterodera glycines
MAPPDEVKETPQGDNSEEVPTEAIVVDVVDTPKEADSENGKKESETAEKDQPSSQNSLGNDQKNEKTSPAQGGLPKWMVQNANAPPSPSPEVDGHKEQQQSSASPQKVRGRGRGRRPAAEKTAAPNDKRVQSPTDDKTSQRPRRSTRTRKSTQIPML

SEQ ID NO: 158007 - protein, 26 aa, Heterodera glycines
FEAYAFFFLRASFDILSIKNTFSTWF

SEQ ID NO: 158008 - protein, 59 aa, Heterodera glycines
MALQQRLTIFIKIRSIGQRHYEKIALARKLREEQVKLEMLEAIRREQLGTDDPDPNCII

SEQ ID NO: 158009 - protein, 55 aa, Heterodera glycines
MSFTVTVYAIRVYYRKDTGSNVEKVNLRIPYLLFFMCHGILFFNLLRKGYIIGDW

SEQ ID NO: 158010 - protein, 47 aa, Heterodera glycines
MIPRLMGFGRQIKKLLWKNLLAPNRARPNLLISKDLLGIQGRMGALL

SEQ ID NO: 158011 - protein, 82 aa, Heterodera glycines
MQKLIAKNTCACTNDHIPFIQKAYALFCSIFYFSNFLAKFCLFSLRQFSKSELGFVLEWQGRPGNWALSLENLKISLNSRCP

SEQ ID NO: 158012 - protein, 192 aa, Heterodera glycines
MFVQLVLLAIVGITFVDAAAPPFGQLSVKGTNLVGSNGKPVQLIGNSLFWHQWYPQFWNAQTVKALKCNWNSNVVRTAMGVEQGGYLSDANTAYRLTAAVIEAAIAQGIYVIVDWHAHEPNADKAIEFFTKIAKAYGSNPHLLYETFNEPLDVSWNDVLVPYHKKVIRWEMKIANILPLKVISAIRAIDKRM

SEQ ID NO: 158013 - protein, 70 aa, Heterodera glycines
MKDFWLGQVKTGQNHRFRAGLTFQENRFPGPVSQKPIKHAKPDFSKKKPRFKFPGQVMKTSLKIHKKHSF

SEQ ID NO: 158014 - protein, 66 aa, Heterodera glycines
  unsure (1)..(66): unsure at all Xaa locations
MLCDLSALKKQFNRNFDKHSHANFIYIYFSQSSHFPFSSVSVDHPDFRLYLAFHTCELLFVXYYCT

SEQ ID NO: 158015 - protein, 205 aa, Heterodera glycines
MFVQLVLLAIVGITFVDAAAPPFGQLSVKGTNLVGSNGKPVQLIGNSLFWHQWYPQFWNAQTVKALKCNWNSNVVRTAMGVEQGGYLSDANTAYRLTAAVIEAAIAQGIYVIVDWHAHEPNADKAIEFFTKIAKAYGSNPHLLYETFNEPLDVSWNDVLVPYHKKVISAIRAIDKKNVIILGTPKWSQDVDVAAQNPIKGFSNLM

SEQ ID NO: 158016 - protein, 81 aa, Heterodera glycines
MIISRSSKKLMRFSVQYFTFQIFWLNFVCSAYDFEVGRRKCEGRAKLGLALEAEGEAQFFSKHEVRSPKNPKFSKLEARSF

SEQ ID NO: 158017 - protein, 168 aa, Heterodera glycines
MRAILFLAMVCLVMAVILETANSKAVKNKKGAITTPAKGKAAPKGAAKGGIKKDAKSKGKGKKDAKGKKDKKAKPAKGKEVSKNAKPMAAVKAVPKAAENAQKGPSSAEVVAEENNLDTEAIDDLGAEESDFDQLAEDELLEDDAMDGEADEWEGMGEETEMDSQMAL

SEQ ID NO: 158018 - protein, 29 aa, Heterodera glycines
MLIKKGSNTKLIRSLLHGDLISPFWLGTR

SEQ ID NO: 158019 - protein, 150 aa, Heterodera glycines
MKEIFYFLLILLNIFHCAKFDVFTAMVDLENLLASEAARTPELLEHLAEEYARGLSEQKQQKQALLTKDKEEASVSNPVSAYLLIKRMARDWKSIKSLMNANQGELFIKNITDERMENAIKYPDSEDLEGAAQGLLRLQAIENSQLNFLI

SEQ ID NO: 158020 - protein, 22 aa, Heterodera glycines
MRSSSTFNSILRIHLNELSYLF

SEQ ID NO: 158021 - protein, 344 aa, Heterodera glycines
KSQYGLGNCVAGEHDIITTTEEPIASKPHRIPFKYRDELQKHIDQLLASGVMVESDTPWVSNIVLVQKKDGGLRPCIDFRKLNEVTVPDHFPLPRLESILEIVGKCRYYTSLDLASGYLQIKLSERASRKCGVITENKIYQMINLPFGLKNATSAFARIMAHVLTGLENVIAYVDEILIFTKSENFDEHLDCLRKVFERFRRFNLKLSPKKCTFASADMEFLGYVVSEKGYTPSLSKVETILSLKNPSTVKEVRQVVGMASFFRKHIPAFSTIVEPLTRLTRKEKSWVWADEQQKAFDQIKKILSEKPVLIFPDYSKPFHIFCDASSVGQGGALMQWDEENKIY

SEQ ID NO: 158022 - protein, 356 aa, Heterodera glycines
RSHNDMLRRASSDRDRAVAHNRGRNSRSRSPIRRSSTRSDKHNISGSSTATWQSKGGSSSASSRYVGGGKQRDGGSGGTGRSNSRTRAGMSSSSSNHHQSSSYDQQQKQQFGSGGGTAALNPFSQPQPFAGGSSVGALSYGKQQQYSIGSGGGGGSSRMTSATSTVSAAGGGGGGYERHGQMQGGFSRFIGGGARDEMYGVSSGGGGAFGDSGYATSSAQFASSRGQSSGGGGGGQPSSSYYNSQSSAWANPANSRATEMVNSRAFGTSAGGTSASGNGGWSRQTDDILSGNSCLSLADFFMNLKSEWNMYGSPSKMTGASSSSGGRYHQQQSMSYGGAGGRSGGSLYSGGGGGGR

SEQ ID NO: 158023 - protein, 319 aa, Heterodera glycines
MCVATGYTLAQKRAFLMKAISIKTPGMATMMKLTYKAKLMWTNGCRCAIIAALSLEHLLKEQRTLQLPEDEENTLNGSSLANSSTSTSFVSTIHSLLVFLEQSNNNNCYRLINCLETMRPKHLIMYSSDLASTRAIEVFKAVNKDHQMTVHSFVCALSSEEERFLSSIQRETDAIEMLIREQGVLMVPREFDVSRDSVSQLRRLTMNRTDSRKRTATSSTQRIVDEEFEEQLRPLVIFISFQAVIVDMREFNSELPITLYRRGIDLHAATLEVGDYVLAPQICVERKSLDDLAQSLLNGRLFKQIEQVKQKKWQINEKQ

SEQ ID NO: 158024 - protein, 205 aa, Heterodera glycines
PFGHGHLHPYHHRFLRMLNLRFYEAYLTFLYMGIKLLFLSNVCMQMFLMNWFLQTSNYRYYGLGVLQDLFDGRPWSDSGNFPRVTWSDSGNFPRVTYCDMDIRILGNVQKHTVQCVLVINIFIEKIFVLLWIWYSLLVVVTIFSFINWLMSSLPFEARKRFIARRLFIARRLELADVEFRQKDFEGELDEVSFSIIFSVFLQSQL

SEQ ID NO: 158025 - protein, 277 aa, Heterodera glycines
PRPLSTTPIRPHVRTRPTTTDQTTGTDFRATVQSTQTVLETADGATQTETEQGPIQRLCTELNKAKRRIGTLERQLQKKTEEVKLLKTRPTEQNGHRIKRALQYPKSTKLCARPSPGQFHLAQKTARKMDQKGPNKETRTNQSTPGHPSHTDVGIQLATKAAASTISQINAHPFMAISRQRYFFSHFPLFKKLWETHPAKFDTNNAAGFTPKLHWLLAHGPDFAKRWGWFAWISEQGIEHLHHVLNKQSERFMRYKGNELLLKIGEHQTLLNSIFDR

SEQ ID NO: 158026 - protein, 69 aa, Heterodera glycines
MDIGEMTPPPLVIDDRSERIEQLEMELKDRDDTIQFLREQRLEEQKEDDNFSEHSDGENDEDSVIDVIG

SEQ ID NO: 158027 - protein, 32 aa, Heterodera glycines
SGGIEPGTPFLVANSQTTKTKNQLVFELGTQN

SEQ ID NO: 158028 - protein, 144 aa, Heterodera glycines
MANFAAAAASTQQSATAAEQFAGGDADPPPVASPSSSLPSHNQSNSRKFITSQMANDDKPPNSANFRPFHSFESERTNSIGEGEITEKDKRSGGEAQNKQQQQQPMVKNEGEKREEEENGRERRKRKRDKEEEEETKKKTNIEG

SEQ ID NO: 158029 - protein, 112 aa, Heterodera glycines
MAKPPLFALFPPHAALLGPVSSAIYSSNSLPNCAQIPEDQLQQIKNVNEKKMTAFLEKNERRGGDGKETANSSNKSAMDGDETAPLRGEGAMSKLEAMPTQEGGDTEERERG

SEQ ID NO: 158030 - protein, 33 aa, Heterodera glycines
MHLARHLNILEFADVLFYSNIFVIFNLQINGFI

SEQ ID NO: 158031 - protein, 46 aa, Heterodera glycines
MILLLKPLIVQPMFGIIRFLFVPLASIGVCLKRRGCFVLMNIFNFR

SEQ ID NO: 158032 - protein, 53 aa, Heterodera glycines
MTKWFATVRKRAMFAREFVKIWAPNVPTDKGRVIVGERFIQNTFKMIKFCIFD

SEQ ID NO: 158033 - protein, 135 aa, Heterodera glycines
MSEGIEAAQPSPAHEQIQQQSVDRQSEDNEHQPSDVSQAPQQLFDARLPFPPHQMRPGFHPRFPPFPPNGMGGPPMRPPFRPPPNFSQQPGGTQPDNFPPFFNSPAHRSDLFFFILTVSSISTGFLNLSSPVYLK

SEQ ID NO: 158034 - protein, 51 aa, Heterodera glycines
MEQNEPQQQQGQEQGQGQQQGQQQGQEPQGQGQEPQGQQQGQRPEMRKTPS

SEQ ID NO: 158035 - protein, 75 aa, Heterodera glycines
MHNDIHLGNGGGNHWRQNAPGHGVPFGGAVANNGGQGGYGQNIVPGLNGGQGGYGQNIVPAQGDLLKTIQFIIFI

SEQ ID NO: 158036 - protein, 97 aa, Heterodera glycines
  unsure (1)..(97): unsure at all Xaa locations
IPPLTQXSNFFFFCFTTCRCLSPSAASSASRKESFIIMCCIVKRKYYMSMYVCIMIVFCKPSLIVISRSLPFPSLISPLFSPSVLLLLLVPVCWLHS

SEQ ID NO: 158037 - protein, 114 aa, Heterodera glycines
MSLSHSEGHFALFLTSNKSASVRSPLLGPRMLSLNFYLVYFPIPYDLPCFCFSSSTVWHDREATAQVALLIAGQSTAFRIEQSPEATDWRKEAFKASFQFTSYDFVGQTVKTGV

SEQ ID NO: 158038 - protein, 387 aa, Heterodera glycines
NAQQPPTVYTVRIDGRDYVTSGQHATHFSFRGSNLYINRKYYENHPPPMKRIGSRATDLENEENANRLKQQQSLNKASSSKNTEEAGTCSDDETYFSLSESEDEETGDGYYIFVPDEPAQGNVSEMPPTHPTTSTSLANMEISSDEEPENEAPDSEDEEYIPSIQPIMPPAFPTHSDDGYHIFVPNEPAQSNFLKMPSMRSMPSFLSLPSLPSLSSLPSLPSLPSLPTMPSMPTMTSMPRMPLTMPSMPRMPEMLPTTSTFPMHNSEDEEVEKSSDEETDNESSDSEDEDAKVYFKQIKREVDEYAKELPPQMKQAKLDAEKHMKELKSHLEDAKNTVTGYMKGLKMEMSKSKIHKIMPTPETPGLPPLSSPPALPSIQQLTSVSTT

SEQ ID NO: 158039 - protein, 63 aa, Heterodera glycines
MPAALSAGSMGYILHLPSLGLHFQALHPMIFPLSLFARDVDVVGCVGGISETLPCAGSSGTKI

SEQ ID NO: 158040 - protein, 138 aa, Heterodera glycines
MHTFLFSALVWIVLVCFLHNGNAQQPPTVYTVRIDGRDYVTSGQHATHFSFRGSNLYINGKYYENHPTPMKRIVSTATDLENKESENRLKEQQSLNKASSSKNTEAAGVCSDDESYFSLSSESEDEESLAINFTKISK

SEQ ID NO: 158041 - protein, 101 aa, Heterodera glycines
MPIDEGNDDQTKPAVDVEKSVGRKRKKNFEDAINFVNKIKQRFIDHEDVFKNFLNVWNNYRRGNLKNKNPNEVFWQVATLFHGHDDLVKEFEDFLPEQTIR

SEQ ID NO: 158042 - protein, 17 aa, Heterodera glycines
MPILKFLNTSSWSMNRC

SEQ ID NO: 158043 - protein, 260 aa, Heterodera glycines
MSVFFLTIDRICIIRFGHNYGYQIKRVLKLSFLSALSVGILFNFIGMLSAMPVPTKTECEIFGCILGTAVQLYLGWRAFCAILNTISGIWFFVVFYRSNRKMASTAKMLNNAGQLQIRRANRANNLLTSVAIVSELFLSFLPHFLPFIWERIFGAGSSLGTGPLSELMSSIEALLFSSIYSHMFSARDATSMHGTGGTLQQQQQPYHMEMNYSRQNMERRRSDRVVPMAPGQHQPVQILVRQVTPVENINNRPGTSMARY

SEQ ID NO: 158044 - protein, 48 aa, Heterodera glycines
MKPKQFLKSSIYPHLNDFRKLADNLDPTHKFRNKFINENIFESEQIDD

SEQ ID NO: 158045 - protein, 119 aa, Heterodera glycines
AAETEEGEYDVKNLMNKFLNIDLTPKERASKLDELEALRVEAKNLTKKVTTEPPRGGGLEKKTFFENFARFTVRAGQPGLSGEDRHRARQEYEQEMATAAAQGGEKEEIQVWPIQNDPS

SEQ ID NO: 158046 - protein, 56 aa, Heterodera glycines
GTEEDEEAMEQLVLNAQNLMQSVKDTVRAAEAASIKIRTNSGLRLRWIRKPMWSNY

SEQ ID NO: 158047 - protein, 51 aa, Heterodera glycines
MGLANVKGFFLFFFCNHFNNTDKKQLLLASVCDCLDDETTREIIKEMFIKK

SEQ ID NO: 158048 - protein, 75 aa, Heterodera glycines
MGINPQICEPCFNDNFQEDPHANITWHKAAPKFDDEMVFGDKEKKRRKRKIASPSKVSGAEQASEWKSGEEKGII

SEQ ID NO: 158049 - protein, 129 aa, Heterodera glycines
DEDYDPSAQMADKIASLGLDDVIRQQQPKGEKVPTQATNNSRKEGTAKEGATELSEREKREAQMRADGTAAMDLFGLAVERKEPTFDDLRTKDDFQAFADKLGEQIGARNDHANYSLFVSALVDHMTKP

SEQ ID NO: 158050 - protein, 238 aa, Heterodera glycines
LVAAALDSLREIYFKRNISAEQQRDAALLSLVAHPKQMLYAAQTGTIACEYLSLDTMDQWIIFGLTVCHRLLVDPAHSANLGPLYQRAVQHCLVVHLFRDECIVVQPLVHTVLEHIKQQQQHNHQSQQQHQQQYGMVKQLVGELKDGQCAHAARGWPPACPSTALFADGTARAVPADWRPARAAWAQVSIRLDGLGLRPGRGAVAVAAQRTVASADASRILQQKGDGQERVGHHCGGQ

SEQ ID NO: 158051 - protein, 151 aa, Heterodera glycines
MPLDGAIGQHLNSYGYRSDGSFGCNGISRPYKMGFGTMPMPFNAAIGQQRDRRYVGSANWPFPLEFVPVPMPSDGALAFQSPAFSTGDVVGCGVCLATRQIFLTKNVRRTDDSSFFTTTPINSLFPCVSLWTGDKIEANFGPSFKFNLATL

SEQ ID NO: 158052 - protein, 230 aa, Heterodera glycines
LYNEELIDLLSPDRDSSSIKIMENPTSHEILLMGASSRSVNSQEDILSALAIGAQNRTTAATNMNKQSSRSHAIFTLNIKQTRVVPVDDDSDEKENNTADEGGDDEEESSEKMGTGGTELETLHAKFHFIDLAGSERLSRTGATGDRVKESISINSGLLALGNVISALGGAKGRIGTVHVPYRDSKLTRLLQDSLGGNSRTLMITCVNPNQIDAIETLGSLNYANRIKNK

SEQ ID NO: 158053 - protein, 68 aa, Heterodera glycines
MPIRGYQFLHTELNGNSLSKVILPEENEKSPARLILLDMLRNTCPKGNITTLQRRYFNDSLGNRLVTQ

SEQ ID NO: 158054 - protein, 31 aa, Heterodera glycines
MAIICIQSIGAKGTLTKKLQIDVPFIEVIRV

SEQ ID NO: 158055 - protein, 134 aa, Heterodera glycines
KLTEQFGKILCEICRELVNDVELLRRLQAEHFDVILAELYDPCPMALFHRIGAKTKLGTLALPLYQMTVRPFGIPTLSSYVTNVITPMNGGHKMNFVERFVNFVNDLCDWLFLSDLVVSYEVSTKIKIKMSIYI

SEQ ID NO: 158056 - protein, 129 aa, Heterodera glycines
IGQFKNDQFLIIHFKFASNKSSRLLHSDTKRVNLCNSVELSKEWKMEPKETVPILAKASHKTGTILASGRDSFDAAIASSRNFITSSKYLSPNSFTNCRAFLDLITSIKFCIKILKWAFSIAPKFAKWT

SEQ ID NO: 158057 - protein, 327 aa, Heterodera glycines
RNLMREKKRLLKFAEYLGHCSREATDYGKCVATNAERIRKGDCSTESREATDYGKCVATNAERIRKGDCSTEFDRLIACLKKRRKKRLKRAAHILTFYRYNFHFLPPFSVLLDGTFCQAALQSKINLREQMLKYLAQSVEMVVTKCVLNELHQLGKPLHGALVICEQFRIAFCPHKPMRTASECIAHLARRSREEGNSKHIVGTQDDQLMEKLRKVGGVPIMSIRFNTILLEKVKESKKMAEEKPSKELEESKKMAEEKPSKELERVKELKDEAFASGKRRKRKAKGPNPLSCKKKKKRRGKKTETRGKCPGHLDRKRANGKGKATK

SEQ ID NO: 158058 - protein, 46 aa, Heterodera glycines
MLGPILMAIRFPLMAQDEFVKSIAETQPSVDNKLDKLKNSRSETQL

SEQ ID NO: 158059 - protein, 124 aa, Heterodera glycines
MVIKSATTVIRRGTTVIRRGATVIRRGTTVIRRGTTVIRRVTTVIRRVIRRGTTVIRRGTTVIRRGTTVIKRGTTVIRRGTMVIKSATTVIRRGTTVIRRGTSVIRRGTTMIRRGTTVIRRGTT

SEQ ID NO: 158060 - protein, 276 aa, Heterodera glycines
TSITPSSLFFVQITKFFDKRGTNLDLWIPSSRDMDGQQLVWDIFVREIWPIFSENIRHLGFYDGYHLDNLRRLISPTILTDLNQLTSIYSCGLFPAAFGDDFDVPNSTISAGQALSKWLHSPRKDGQPKRLRCIGYNKQTNFDWINNFKEQFLRANAISSVSYEIHFYVQLSSMPMVPFELVNEWTKEKLTLAKTKGWDNRWIMKRCKIIGETAAVQQQKNDENWDNNLNSVFVWLFRTTNCIGPLSPPPAEEAGQNITKGPSSELTMSDGQNEEK

SEQ ID NO: 158061 - protein, 184 aa, Heterodera glycines
GRVLKSLPNKNNTSPDGINFRLINSFAPYVTELFRISFDTGKLPTFWKKSIIIPLFKKGDKSCPTNYRPIALTCSLCKIFEKFVVRAITSFLLKHDLISLHQFGFVKGRSTVTQLILTLENWFDGIYNGKNIDCVYIDFRKAFDVIPHSLLYIRFIKLGLKVKPLWISDFLAIRSFLIRVENSF

SEQ ID NO: 158062 - protein, 51 aa, Heterodera glycines
VVKRIREKFTSLQNDQQFMLKRQRHTDLHAKLNAIKKALEEWNKREENDLY

SEQ ID NO: 158063 - protein, 21 aa, Heterodera glycines
MQLMRKVELRNQFKGFPTNRS

SEQ ID NO: 158064 - protein, 57 aa, Heterodera glycines
MPKNCAEFDFVFLCLIKVSSVDGKEDNATVNVCSDGTVTAAADHDGAALGQKQSDIQ

SEQ ID NO: 158065 - protein, 32 aa, Heterodera glycines
SRTKRRQPKRRRTNFSTITFFFLSSIKHSWYY

SEQ ID NO: 158066 - protein, 38 aa, Heterodera glycines
MPQFAFFVHFRRLNGFGFAVQKTKIELNCSESMKTFYF

SEQ ID NO: 158067 - protein, 158 aa, Heterodera glycines
MPQNCQCLSSAHPPMGGGGGSDQQQHKDGQRKINGMTQRCAVKSVGRVCVLRGRNKMPTFVPKVKDDVAHFGYPMEFTLNYDGPPANISEEAETKPNNVWPRMTFTVTAEDSWGRIFVEGVGIVPIFGYLSARKQCQKPSDKRQADKIPTKQNLNLIN

SEQ ID NO: 158068 - protein, 111 aa, Heterodera glycines
MVNLEVAQINVLSKVDLLTDNAPFRLEYFEELPNLTHLTDCLNDHPALIRYKKLNQSLCEMIESYGMVNFVSLDVQNKDRMGFLLRLADNANGFNLANVEDFRKVVMNDFS

SEQ ID NO: 158069 - protein, 154 aa, Heterodera glycines
MLFGLFLIHNMQLTSEKGEGKRKREGEESDEGQWRDEAKKREKVREKIGENEQFKAEDAPAKREGLKEKNEYFGQSEHNPWRPIGTVPEGEEEEGEEAAGEGTARGGANAAEEAADEETLRQLLLVRAKQWQTKCRKEFRSCRSATTTTPTAPN

SEQ ID NO: 158070 - protein, 96 aa, Heterodera glycines
MNNLALMYSNCRGLLIAHISALNCAVLRQHRAVKSGGSKPEPYKQMPEPEMDGGPKEKKHEQTDVAAKRMKRGAKGGGSSIGKALVKKEQRLWGLG

SEQ ID NO: 158071 - protein, 50 aa, Heterodera glycines
LYFINIEHSLCIKFLKSPFVIASLLLLLLLVAIVCRCVRADVTFIVKADH

SEQ ID NO: 158072 - protein, 56 aa, Heterodera glycines
SPQQESSNSVNTQRREHKRRNDQPIAGSLLDGSEHTRNTTAELHGDGDLYVMFSIN

SEQ ID NO: 158073 - protein, 356 aa, Heterodera glycines
FRFTHHSGNRWRCTNRSCSAYINITNNGETGASGTLSQKEHNHLPAPQKQQAESRRQKIKESVLAEPCLKPTRLLAKVRRSATDEAFVAMSSNNALTEMMRREKKKLLGNVDVQDPLAFVIPATLREKRGEDIVLYDSRNVRQGEKDVVLIFGSVKTLDILRQCGTWHLDGTFKCAPAMWEQCFVIGASVHQRMCISMWCLLPGKQRRYYEEALNFVRERTSPEVPGKVLCDFEKAEMAAVRAVFPTALIKCCMFHYGQSLYRNFKRLGLVHLYGEKTEYGEAVRNTFRRVLSLPLLPPDIIRRAFSIIVASSPPGMPVFFLYFSRTYIGLTQRQLLDGVNAFGDNPLNFSPIGNH

SEQ ID NO: 158074 - protein, 143 aa, Heterodera glycines
MATVSHSMPTRDKNVLSERAGPNYGLRFQVFVNVSDYLPSTEAAGVRITVHKSMRGVLAPTGFVSSFGIRLKCVNRLPSPYGECVEQGKTDEYIYRDKEYSTEESVSVVKCTAAARSATQPDCVCRQPCRCDQIKQLILIAFN

SEQ ID NO: 158075 - protein, 274 aa, Heterodera glycines
APMPYLIGIPKETFQTQNKAELGDVVIMDVDEKLLTSPYDDKLPDIFISDSLARAFLQTNALIFGNYVSGLVVGMSDQFEFDHFQLLLIDPHGSYSWDRKLFTEKQRPSLRQFLSSLIGKDGVQYFERFIDEKLSELNENRTTIDEFEREAQSMGVRGQLDKNGAVTVKGNATDVIGALKDQIHSLSVRNKLSVRRKEDAISSVKKRRLSSSVARSRSKYKQKLDPLTIDTSQFNLDKFSPSSKTRSVSPPSIESAHSVGDLIDLSDQNNSTIT

SEQ ID NO: 158076 - protein, 166 aa, Heterodera glycines
EDPILVPRPNLHQKKRMLCIFWSVHGPLYWELLAPGTILDSNRYINQLRAVVRRQQGQFDGPLLFHHDNAPPHRSHLTTQYISQTLNWNELPHPPYSPDLAPSDYHLFLSLKNFLRGRRFTEDAEVEEAVGQYLTSKSTDFFRRGIRKLPSRWRKVVRVQGNYFVE

SEQ ID NO: 158077 - protein, 172 aa, Heterodera glycines
MARPPPAALSGRKAVPISFVFGSSTPREISHHVNECAKKGLKAKLDQGGGDTAKRRGDIIYYMRQAKSTDAKGPAEQANFKWSGVIFVLQRWITAGGGGGRSISTESRNEEDEAASEPDILQDRMIDFMRHKKESTTTPTTATTKMEDGGGSRGRANREKASLSNGTKNVKS

SEQ ID NO: 158078 - protein, 369 aa, Heterodera glycines
QFLDLEAKLHFYVGRFWALESIGITDCPKLNDDEKALKNLMSQFCYPEGRYEVALPWKEEGEYPAENFRLAFSRLSALIRRLKESPQLFSGCNDIIQEYLEKGIIEKAHRAKSPQHFLPHHTVMGKKLRIVFDASSHEKGAQSLNEMLFSGPNLYPDLAGKLIQFRATKYPIWADIEKAFLMVSLKESDREFSKFLWVKNIFAPLSGENLLVFRFRRITFGIVSCPFLLAATLQHHLEAFPSELAEEIRKSLLYVDNLLLLADSPEEACRKAAEAQKIFAAAKMRLCEFIAADPSSLDEIPENDRLRNEAPTVLGLKWTICEDNLSLTFPVPSPDGLTRRTVLKTVASFFDPLGLCSPCLVGAKLFPKL

SEQ ID NO: 158079 - protein, 510 aa, Heterodera glycines
MAKRCTEAVDVQAHLSSMYMHEVVPAEVDLTRNYARLGGNYVLNTEAPKEAHRMLTMHFSKLASTEKHRVRVPHKQRIGFASMRLLESTQENVSLILNLQRQADARNAEMMQICAQRGMPMHAKMREAGDEQQTVNYELKAKRELGLDMHARATVDIASFGNDARLDADAAEDMHFSVSRELERDTAFAHHAFTVRIPNELSTPLPVLRTRTATEEHAIVIETRHRPEQNQRVELIRWIAHALPAQKYRCREAGDVHQGIYLRYDRPVSLHAVELTRQLARWGGEIRMRTDASGDEQLELVRELESSHERVSHSFCTIKTANKATRQQLRTGQSEGVEQVMHAMLQRQAEAERATPLTVWLKNTISHGPLRSRESTEEQQRVHCQWARREAPQLAELVNWIALFGGHIILHTQATGQAQFSHEIRLQKQREASPAPARRCIRCAREIVPAHSRVKEPLHEQYNVSEQWRRGSASEEVQLMMLCPNLGPPGIQIRTRESQTQTENSYSQHT

SEQ ID NO: 158080 - protein, 261 aa, Heterodera glycines
MQTKLGYLDEKVMQAMKLAFTQALKSICEYMVETRRWASSALLSNPTNFARSVFNSGKLLAKGIGPNLIRIWPCVELAKADYQFFPLEQDQSQTECYELIPIKFGTSSGTKLAFVDPKTMIVSSESKIAPCSEFRKQLIFINDALYEVDQWTAQVKQVKVDKIGKVGEFAPEIPSFKPHTFHYLALVNLSDILEQVYDANSPKISEITYGLRSTDTIVTKTMSSQWKAVKQELKDAIFGGWISTYQTVIAIMVAIVFADFL

SEQ ID NO: 158081 - protein, 214 aa, Heterodera glycines
MGAIIYALREFRPFIFMSDIELHTDHNPLALLLKKADNSPHLARWLIELQNYQIKIVHIAGSQNSLADALSRAAEDKPLSEFRKLQELDDIVEFPVCLAISQYDRVVLDPFVNTVTIRHKDGNSYEVNLEKELKNDPEATAYIDFLKIGKFPDCLDEKEKDEFAVATVNFQLDSGILYFKESGCQPRIYVPISLRGLIFESFHSSLLGGGHLNY

SEQ ID NO: 158082 - protein, 69 aa, Heterodera glycines
MATLRSPFFGEKSNITSLTQKISDAEYPPVPDDSYSQPVTALIQYCLRPKAEERPSAAQVHRMALLMAQ

SEQ ID NO: 158083 - protein, 97 aa, Heterodera glycines
MAIISEVKSVMPFVIGMVIGACLLFILLKVNGGKKKRGEMEENKEEEGREEELAEENNGEEEGGGGMEDNEPWTFFTHNYKIDYLLEFNLIIYKIKL

SEQ ID NO: 158084 - protein, 26 aa, Heterodera glycines
LLLPLCYCLCHLSNKYLPMRNMISLD

SEQ ID NO: 158085 - protein, 48 aa, Heterodera glycines
EAFILEACRTPIGSFRSQLASVSAPALASECIKELLKRTKVPAKEVQE

SEQ ID NO: 158086 - protein, 40 aa, Heterodera glycines
RKDFFFFYYSGGTSFLDNCLEMSVSPPIAFPSPSHCHFSS

SEQ ID NO: 158087 - protein, 183 aa, Heterodera glycines
MCYVYMTTKCSFDAHADHDVYWCTADCGWITGHSYVVYGPLLNGLTSVIFEGVPSYPDTSRMWAIVEKYKITKLYTAPTAVRALMAFSDEMVTKHDRSSLQVIGSVGEVPINPSAWKWLYTVVGEERCAIVDTYWQTETGGHVLTPMPGATPTKPGAATLPFFGIVPRILDAEGRHLEVGIYF

SEQ ID NO: 158088 - protein, 144 aa, Heterodera glycines
LLAGAHVNGMATYVDMYRHSLDDPKKFWHSVAEQLHFEVFSNNGLEWNFDHRKGEVFVHFMVGSRTNIAYNCLERNIKAGIGDRVAYRWEGNEPGDERTITYQQLLDQVVTFAAVLRARGVRAGDVVSIYLPMVIELPVAMLAC

SEQ ID NO: 158089 - protein, 56 aa, Heterodera glycines
MSKVCADEKSVGIERFLNEHTAERATAAGVIFRMDFSKCRLGSDKIKYLYSAKKIR

SEQ ID NO: 158090 - protein, 72 aa, Heterodera glycines
MAEVCVSHALFPHLTTVLLSIGLIFTAWFFVHGVTSTKKTRNLVKELFIGTLASLFLGFGTLFLMLWVGIYV

SEQ ID NO: 158091 - protein, 135 aa, Heterodera glycines
MGPVAGTIVSILPVQFPHLLNQPLRAAPTIFLKCADNVEVEVELDRNIFRFSTTLDTMMEDASIEPIYEEIALDVPTGKDAEASAPNAQAGEVAEAAESNAKPKELANNEKRLVFPSWDENFLDKEWPELVDIIL

SEQ ID NO: 158092 - protein, 137 aa, Heterodera glycines
MEIEKVSEFAREIDRSERKSESRHLHKWASMENKLKRKMEALTMRNGWAFTLCVNKKLNNHFVSLQAILGWFEASYKRPSWTVIEEAADAETQANGVQLSFDKLAHRNIEDSYTVKQREAIAFDLVGERNSYRDANK

SEQ ID NO: 158093 - protein, 35 aa, Heterodera glycines
IRVFLSSISLIVYDLSSVFASFTVTSMAKVTLPRF

SEQ ID NO: 158094 - protein, 77 aa, Heterodera glycines
VRQAGGRDIGGVAAPGAAARPGQILWLLGLTRLQTQMRVVKAFQATVQNSHPSSLSLQAGDRLRQSYRRLRIAKEIE

SEQ ID NO: 158095 - protein, 259 aa, Heterodera glycines
MKYAFYYSIIFSAFANLHVKAFPPKDKEGTSNGKIVNSLADQMEKVLKKGEYSDVHFLFNDQQNFNVDKTNKYASVAQWSDAHGLGFRIVTAHRAILSSASDVFKAMFRYNEGQIVIPDIEIGAFKTMLTFIYTKHFNGLDANNLLEVLKAADKYNISGLVKECANFCAKVSIKKLPNVFVAFEQALLLNMELFYFYRVVRDRDLILKERTTEYLRPGFDRDREKSRVFPCFASQKFPVFQPGKYLVPFFYGTIPDELK

SEQ ID NO: 158096 - protein, 129 aa, Heterodera glycines
MSFKRVNSFQPAVPMAKKWDFRSIGNNFAEEMENYKLMDYQSTTCEKFGFTKNITEFRVNPDVERPDEAMKDAIDNMIKVALKTTEEKMKRKVRMFGVAITGAGLASPVWVPYRAYPQNNADVIMQEIN

SEQ ID NO: 158097 - protein, 194 aa, Heterodera glycines
KKAMQMLKRELDINIDDIKLKSRQSPGSYDMFFEQWYTMEQYEIKEGAVIYVCYEYHYKTLVEFDIFIEYNQKKYPVRVKRADTVRDLKTKIGNIQEIGILPNQQQKLICQKADGKVLVDFEKIVAYNIEKNSTIFLTLAEIERQMEKHSLSNKQQEEEKHSLSNKQQEEEKPSSSNFASPQLKKRKGRNYRQK

SEQ ID NO: 158098 - protein, 62 aa, Heterodera glycines
MTLSEKVKSEENIHKITFFSNAAPIAARGELRLANSISAKLKSIFFLDTRNDFHVITVSATF

SEQ ID NO: 158099 - protein, 24 aa, Heterodera glycines
MTPDECRSIASEGERSLREGDAVN

SEQ ID NO: 158100 - protein, 55 aa, Heterodera glycines
MPIFTWENMNFRLDTTKRLALALAREMNIPELVDQLDADLENLSHIMAKNKSEFH

SEQ ID NO: 158101 - protein, 162 aa, Heterodera glycines
NEVPMEMPTAMRTLREVRESKGHQLHTFAQQLVQLTQHVHVARKEYDMAQLSTETKPLREIRRDAVCKQLREFLSENEWCAVLMENRAALGERVHTDWHDSVHGGRMSDLLQRPALRVQHAAVLSAAWGTTSGTYYRRARTGSTVTTTTTTAIRLPVTIQHI

SEQ ID NO: 158102 - protein, 415 aa, Heterodera glycines
MDTVVHERHSAEESVHYTTGQPVMEQRTLQVDIDRRTSRAKTQVQDVAETARATRRFSVENTKQNVSLSPLQVNNKEWPKRREEKACVTIKNGKGTRPDAAAVCQYLMVPEKSERAMSSRAALASSGSSYVKRLSTASEDEAVGTTSAPAPRVIGIETRIEQQPTPYIRREKTVLRTESWPKLDSRAKVEEWLRGTEEGMPEEMGEEQFGEEQDQLQNHLTVTKAELARPEEALGVSVEKPERREAKEERRMRLERQEMAFQLVQQLLSAGRSEASLSEKQRAMVSEQFKQFGLEEMSTSIVLEQLEEVAGRPEAKVALKAWKSLEEGLRVLAVMEERVGFEATWTTGETESGAEKTVQLARVEAAQKRVEEAQEQLRTFLTVLVGPEQFEEAKLLQKIPWHTSAEYRGPESREE

SEQ ID NO: 158103 - protein, 90 aa, Heterodera glycines
MDGFEQNQVAVSQVPPQGDEPQPSLTTMGTEQSAMGLYKRGLEMVQQGEVRFRKSRAESCECESEQDFAAKLYGVRLALRQIMDEPQMIQ

SEQ ID NO: 158104 - protein, 380 aa, Heterodera glycines
MVERRKESPKRRRRSSSSSSSGSSSSTGSSSSGSSSSSSTTASRSPSPKKQRAAARPSARDDRTTRRSPRRTGGRLTHSYSFRLIGRVLPIVSNRKQRKALSALAVHRLPVVVVRRLPAAARVAVRARLVMNARLHHHHQNLSRNITKAHMEEIFALFGALKSCELPMDRVHVHLPRGYGYVEYEKAEDAEKALKHMDGGQIDGLEIQCEMTFPFKGTGGGRGHSPVGINSMGIGIKRERSRSPARRFAAHDAQSDDATNAEIVDRLVERLETGSSIEDRRDALKALRSLARNLRLHVATRGMSAYMDILEKEANLQDLVALTLDILDIVLNDSANGGEQDATTVAENEDEVGDRLAEVFLQKPTFMVSLIKLLECYDFA

SEQ ID NO: 158105 - protein, 23 aa, Heterodera glycines
MLFLLLIVRLLLLLRNFQLFQFP

SEQ ID NO: 158106 - protein, 216 aa, Heterodera glycines
NFTYERPNALQPLAKGPSDLLLDYQFTKFFKLMEGHLLKFFRPNGELSSSVNTQLEGALVPYKKLIKKQDETIAELTRELKELKVAQKQQKTDNEQQKEHTNCNGVIPTEEFASTTVQADASANGEQLALLRAELAEKNALNERRADAETKLQQLTSQQNVPQGSAVATHSEELTLLKREHEDLLLLLAEQDRKIHDYRRRLASHGEALSDADEEP

SEQ ID NO: 158107 - protein, 33 aa, Heterodera glycines
MGKNESAQSRDKHSLTHFPFTYGAVTKANNFIH

SEQ ID NO: 158108 - protein, 60 aa, Heterodera glycines
MSSLSTIFVVLLVIAICLSLTIAMPAVDNQIESVPLRKKRYGYGGGGFGGGFGGGMGFDG

SEQ ID NO: 158109 - protein, 115 aa, Heterodera glycines
MLDPSMPILIPNKAFGKRVFDFHIKLSFNDVQQREQHEQFLVSVAIRTLTRPFGQAMLHFRTRHCFSEENSDPAMGMRQICLNGRVHSGRNQVDYPLNDSFPVCCSSGFTKIQII

SEQ ID NO: 158110 - protein, 19 aa, Heterodera glycines
FGREILFFETKLKTYITYI

SEQ ID NO: 158111 - protein, 104 aa, Heterodera glycines
MRELHLYYLFNLNRCTNNQKPYFNISTFLIPKMLLISTDIFMSLSLVAAFSHSAPVTQGKQNPPTSAGAVSSVAQVATAVLAVTAAGLPDADCARRPIGYAKEA

SEQ ID NO: 158112 - protein, 260 aa, Heterodera glycines
EWTLFVEGPMVQTTTSAPNGGGAFSASGGSSGVSSSSSTATAPVARPLATAELNVRVLIGPADCVAQVHLELRPIHEGVLGCSLDLVVYCFPFDNECVSPFSHHLLASTPNSVRGPPPSAAVVEHHHNAEDANVGDDIPIELVPPNDDDEENGGGDGTDGCCGIVAENVAQQQQQIVGDGISIELVPPNDDEENGGEVSDGTGTVAESVAQQQQQIVGDGISIELVPPNDDEENGGEVSDGCCGTVAESVAEQLKHHQEP

SEQ ID NO: 158113 - protein, 57 aa, Heterodera glycines
MPALFTSIFNIFLILLLKSEDGKESLSPTLPPYDKWAAGVCFAMRFTQYFIYTNLET

SEQ ID NO: 158114 - protein, 347 aa, Heterodera glycines
MTKKQVTIVGSGNWGTAIARIVGKTVQMHNSEFDDSAVKMWVFEEVVEGRKLSEIINEKHENVKYLPGKKLPTNVIAVTDVVEASKNADVLIFIIPHQFLHKVCEQLKGNIKKSAIAISLIKGLATFHEKDIGLRLISNEIATSLGIDTSVLMGANLANEVAEDHFCEATIGTKNPQHGNELKKLFHTDNFRINVVEDAATVELCGALKNIVACGAGFSVGLGYGDNTMAAIIRIGLMDMIKFIELFYPGANLKTFFESCGFADLLTTCIGGRNRRVCEAFVKSNKPLAEVEKELLNGQSAQGPLTAKEVFEVLQAKNLTKEFPFFVAIHKVCSGETPAKNFLDLIR

SEQ ID NO: 158115 - protein, 125 aa, Heterodera glycines
MLLPSAAMKMRRKCSFNPAWQHQYAFVRRSKKGNGFFYCAYCEKDINVQTMGISAVKSHIDNNKHRQMEQQQIVMSAVIGNAENGAIVAAHQQQQQYQMNNHNCNAVGGVKAEEPPLQQLHQQLF

SEQ ID NO: 158116 - protein, 38 aa, Heterodera glycines
EQFLQDERQRVDKLFNNNNNNSKSNNKPLEKAYGGAFA

SEQ ID NO: 158117 - protein, 454 aa, Heterodera glycines
MAKRSFGALLSPTFCGVPSERTAMLAASATAAATAVPHSLSQQSPFVVVVNSRSDYRHFVELVEQPDDNNNNNRPKLLATSLSSLAEDGICQQQKLANLARSLADAVGNVAATVAERLEYIDDHEPSSTAVEHHQSLAHIANNKNNNNENIATTVSQRWDSSGEPCPARESLPAGEPDNNHLPLMMREMPSCKMDDDDDDDDADDEQSSMGAAAEQLELQLVDSWSMEDDSQCTELAVGDGSVPLRHKDTLERLDGGNNERRLGMFLAERLAHGLERNERAMARASRQRNSLLDALISALILSEEGDDRKGEHQQQDGDEQCQDELQLNNKLRRVCRADQQHNAKKKNGLLMTPTANYINNSNNNNYANEHDDQQHSDHHQQQQHQQQQQQNWCTTTKNGSKKSRSMDLLQQQAHTTTTTTPATTTTWSSTNNTTKQPELLLDAAAAEHWQIGQ

SEQ ID NO: 158118 - protein, 122 aa, Heterodera glycines
SFPRRYDNYYTIPNILCNTEPSSTAVEHHQSLAHIANNKNNNNENIATTVSQRWDSSGEPCPARESLPAGEPDNNHLPLMMREMPSCKMDDDDDDDDADDEQSSMGAAAEQLELQLVDSWSM

SEQ ID NO: 158119 - protein, 473 aa, Heterodera glycines
MGYAPSKCPKYPTPGARRRRLADQHRCFNCLMQGHNSQQCSSPKRCPKCGEKHHFMICYSEGDAPRGTTPQQTSKGGAVQKKQSSNRRGEPPRPTQNHFSALNEPLRIRENPSEISIFDGKRTNVLTSVVTKKSHAFLMTRRLRVRSSRDPRRMIKAMFLFDPASQTSYMSDPLIEKLKPHKVTSEEMEVYGFGGERNGPIRFHSPVYSVQIQRSDNKWEEILLNRTEQISTPFKMVEWNSDDYTSEEQDVFQALSFSQDEPEILISARHFWKFFQSKKEVLPGLFVIQTTLGPLVNGESDFGPKVPNTGVSMVAIDESNQGQMPAVKEIEYFFNLESLGIKEDPNEDDDQTAMQLFDKSIRRENGGRYSVKWPWKEETPNLPSNYRMAFSRLMSTLNKLRHSPELLQQYNSTINDQLSKGIIEEAREAPGTLEHYIPHQGVLAKGKKLRVVYDASAHTRGTNSLNDCLYRGP

SEQ ID NO: 158120 - protein, 355 aa, Heterodera glycines
FLPSFPISSTPSSFFFFLLFLLLQIVLFLLAMCLICTMMSGLWEHVTGRQFRVFLPWDEFVVSTKQVGPSKALIIAALQFFSYMILLNTVVPISLYISVEMIRLAHSKFINNDIKMYDDTDTPARARTSTLNEELGQVQYVFSDKTGTLTQNIMAFKKCSINGRSYGDVMTERGEIVPIDEETPALDFSDNHWHEPHFRFYDRTLVEDTRRGVEEVHEFWRLLAICHTVMPERKPGEVHEFWRLLAICHTVMPERKPGKVLEYAQSPDEAALTSAARNFGFAQSPDEAALTSAARNFGFVFKSRTPKSITIEVNGAEEVYEVLHIVYEVLHILDFDVRRRMSVLVRNATRTVLYC

SEQ ID NO: 158121 - protein, 168 aa, Heterodera glycines
TKFLKKVQIFFFFLNKLVIYVAFQFSFGKRLLIWNTFRFHISDDTNQPFRRLSIKSAVIPGGTTKFIQPPDVCWNAPFKNPPDVCWNAPFKNKIRQIYDEWMVNGEKETTASGNMKAPPMETYLQWIVTAWNSLSKELIAKSFLSCGITEEINGSKDDQKFSQKIHPE

SEQ ID NO: 158122 - protein, 33 aa, Heterodera glycines
MDKNESAQSRDKHSLTHFPFTYGAVTKANNFIH

SEQ ID NO: 158123 - protein, 21 aa, Heterodera glycines
SPFWSLNPFAKGFNSIFLRVT

SEQ ID NO: 158124 - protein, 183 aa, Heterodera glycines
MSFSSASTDDEFTADHGISENFLKFEQLRRSRRIIEQRERILEMPAQKGNDEIPRKNLPKPEKLVDRMKVLLSTANGADIHFLLFRAHKHILMLASDVFEAIFRIDEKNPTDKGKMKIKNYYFHWIFSLNLAISAELSDPVELPDVEAAAFKVLLSFIYAEDLSELNGDDAIAVLYAGENNFN

SEQ ID NO: 158125 - protein, 27 aa, Heterodera glycines
MAFGMSYQISVRFVKSKELEKLVKCAK

SEQ ID NO: 158126 - protein, 158 aa, Heterodera glycines
FINAIILYFPGRLSVSKAFAANEIVPDVVSKAPEKLVTVEYAVGVCAKLGNELAPKNLTNAPKLSWDADMGKKYTVAMVDPDAPSRDDPNIREWLHWLIVNVSGTDLAKGDKLIDYMGPAPPQGTGLHRYTFLVYAQKEGTVVNGTQKPGNQCETENA

SEQ ID NO: 158127 - protein, 41 aa, Heterodera glycines
MLIYRFAIPYLSSSICVASIHRLPRQISIVSIRVDPRSRAT

SEQ ID NO: 158128 - protein, 39 aa, Heterodera glycines
MHCLQIRRRNRSKINEQKEVMRSNTEKRKEEKRKEEKRK

SEQ ID NO: 158129 - protein, 101 aa, Heterodera glycines
MSPQTIYAMGENPSDTWASRRRWHCVQCRHAAWAAARIGLATILRTLTSTTRPDCVTPCRCVTDCRLLEEILRFRHDATVGIRGLLRMEGPSECGGCNAQF

SEQ ID NO: 158130 - protein, 106 aa, Heterodera glycines
MIVLFLTIVVPFQQFLYLSNNYCTFSTVVVPLLITFVAHLITFVPLLITVVPLLITFVALLITFVPLLITVVPLLITFVALLITFVPLLITVVPLLITFVALLITF

SEQ ID NO: 158131 - protein, 20 aa, Heterodera glycines
GSGLGEARLCTRSRSRRRSP

SEQ ID NO: 158132 - protein, 29 aa, Heterodera glycines
MYGFVLKWTELCLLDAASPGPSDQQKKDE

SEQ ID NO: 158133 - protein, 159 aa, Heterodera glycines
MNSNSIRATSALSPTILTDLDQLNSIYSGDLLPDATVDDDFDGPNATISAGQMLSKWLHSPRKDGMPKQLHFFLKEPPNMEWANTLKKQPSTQIVPFELANEQTKEKRTLIKASANVWEDRWVMKRCQYWETAAVQWAAQNLDGFSTVEFHYYVEAGIG

SEQ ID NO: 158134 - protein, 282 aa, Heterodera glycines
MIDCRLYIPVTAHFPDRAIAAFLDPELRILSLTAQHASCNSYRFHHLQLRSNPNIWLWIVSRTGTARRMPKDYVHELYETTINQTNSNLELHPLIFHAWQLDNESDATRFPHINEFINSEQFKDKLEQHITARTEALGALKGGIEGFTMRWLKGLIDEAITWWIRVACVYSTFLMLRDIVLPCTLAYLLNPIRVTLLSLVGVRPHPTFRPTVSKPLGIEEGMPLREMPRTPKPPARRAEHRSMSPIKLDMIARTARYQQPRTQSHLDLTEDSPFGRPRRKEF

SEQ ID NO: 158135 - protein, 276 aa, Heterodera glycines
MPKIQSKSAFIRDWIKKVEGEEIYSINGKIIFCQVCEQQVKTTTTCNKQHQQHDNFPQIPCSQYCHLKQHAKHRANLDRFSKKKSKQHQPFLTTNENKQDQFSADFCKALVSANIPFFKLNNAVLSSFLEKYCQRAVPDQSTLRKNYLVQLFSEVVNSFNSDDAVCIKECQLTFNNSVWQDLAYIHSNFGQLATAITKLETQGMTIFDAMDVFTGVHNQMDNVYGEKANEIRKKFADIVDKNHGIEKISQFCQILSEKNTESDVSPNLSLFTNLLL

SEQ ID NO: 158136 - protein, 111 aa, Heterodera glycines
MILIKCLLYNTWLNLRVIFSCKRSLKCMISNYCLFKRLIQRMDQISTQFQSTLHDVLPNIRSFLQLLSFSHSQSLVLLSRATDRARNAILEWKSAAIANSIIFSKMSKNKR

SEQ ID NO: 158137 - protein, 137 aa, Heterodera glycines
MDRFFPIRLELLSDPADDVLMLDIMLITEICGQPKQQQQLDIRTLRLGEELNQEPALELVPRLSEIEITFDLLTEVDRLVQLIESPILAYVRMDLLHPDHQKSLSALLSALLMLLPQSEAFNVLQKRLQAVPHLAVL

SEQ ID NO: 158138 - protein, 134 aa, Heterodera glycines
MCVKSIILSLGPRRPSLTEGKSQCFRFEIASMVGDINAFPCSDDPSIDGKDEETIGGGTNDISQQRNDCGDGDKRCFELSVMVAEPGFRRRGIALEACKLMIAYILQRIRGKPNFIAKISALGGPQVWHSSEIG

SEQ ID NO: 158139 - protein, 82 aa, Heterodera glycines
DSQYYILHGSGSAFKSAAHAHASIKAHPCPFRRQLDSSAAVAVAIAIAITLLTKRVKLEIPAPKSAAIGHAQPLGEKWSAKN

SEQ ID NO: 158140 - protein, 57 aa, Heterodera glycines
SISDDSQYYILHGSGSAFKSAAHAHASIKAHPCPFRRQLDSSAAVAVAIAIAITLLT

SEQ ID NO: 158141 - protein, 45 aa, Heterodera glycines
SNIYYYFYSIIFLLTIRLLVQLISRISVQIPCPFRCPCPCPFRRP

SEQ ID NO: 158142 - protein, 33 aa, Heterodera glycines
MSSSSTIFVVLLVIAICCCSLTIAMPAAVNEID

SEQ ID NO: 158143 - protein, 52 aa, Heterodera glycines
EQLKREKRWGYGGGMGGGFGSGFGGGMGSGFGMGSGMGMGFVGGMPMGGFFD

SEQ ID NO: 158144 - protein, 85 aa, Heterodera glycines
MTAMKVSIILLILGIVLLSLAVAMPVAEAENMQLIRQKRWGYGGGMGGGFGSGFGGGMGNGFGMGSGMGFGGGMGSGMGMGFGRR

SEQ ID NO: 158145 - protein, 83 aa, Heterodera glycines
MTAMKVSIILLILGIVLLSLAVAMPVAEAENMQLIRQKRWGYGGGMGGGFGSGFGGGMGSGFGMGSGMGMGFGGGMPMGGFFG

SEQ ID NO: 158146 - protein, 62 aa, Heterodera glycines
MRIMRKAKCEKRNLGPSLMFSYQKLTQLKRAHHFHSLAFDLINSTGDGPEFFQDYASFNICS

SEQ ID NO: 158147 - protein, 56 aa, Heterodera glycines
MSSLSTILVLLLIISICLSLTIAMPAVDNQIESVALRQKRYDYGYGYGYGYGGRRV

SEQ ID NO: 158148 - protein, 115 aa, Heterodera glycines
MNSSMTVSLLLMLIIGTALLALTNGMPNADVSLTREKRGSYGSGSYGGSSYGGGPSGGGDAFGSGGAAGFGSGIGNGFGSGGGSGFGSGGGNGFGTGGGSYGGGSYGGGSYGKRR

SEQ ID NO: 158149 - protein, 296 aa, Heterodera glycines
QWSKEGAYTISANRALMEMLATQLLPFNFVDGEGFRCFIEKLQPKYTIPHRKHFALHELPGSFDAIKKFVIAELDSIYKIGLTSDGWTSKDNRHSLISVTGHFLDKKFRPTFYVLSTKPIKGRHTADAISAFIRESLNEFKISEDKISAITRDTENTMKKVSKDLGFESIDCAAHVLQLAITFALRKEGENRFSNIKNTIALAIEKRLNQFENQKYLVISTLLDPRFKAVYLDCNHVDGYKNWLISEIESYHNENYYTDELLVENNASGSSSTDIFSQFEKDAEFDQLINTVKLSF

SEQ ID NO: 158150 - protein, 176 aa, Heterodera glycines
MYDFCPLALYSGVRARMQRALRSLLHQPHHNLRLFVDGNVVHEDGCAFEPHALGAALFPAGASDGGGGHGPSDGANIDTFVSAICCILAGVADDRREKFRLTEGSVLNNLLTAQRIDTVGMVRAFELYKSLPDDVQIRIVDLDPKSAKNLENSYKRLMAGIRLLHANPHIHPPCVA

SEQ ID NO: 158151 - protein, 131 aa, Heterodera glycines
MRAENSLVAVKMLPEYADDLSKSDFLREIGLMKSLGFHERLVNMLACVTQSEPYCLIVEYCCDGASPIRHGMELLLVDSDLTIVDGEVTPTAAEALAVGGNGERKWKKCRRTKCQRMVINGGHLNFNFSHF

SEQ ID NO: 158152 - protein, 153 aa, Heterodera glycines
MSSSNSHNQSLLLSAAAGGGHQLQRPPPPPVSVQSAATHSSVATNATTQQHQQQQHRFLTNHQQQQNVSGTTAAVVKQQQQQAQQQLLNSSSTMGAAELSSILQQTHQQQQLQNAGVPLLGLPAQLLASGIENSNILQPNALRMVPGTQYAIM

SEQ ID NO: 158153 - protein, 37 aa, Heterodera glycines
MFGINAKILSSKSGADLAEHARALIYHFENGGAPVMI

SEQ ID NO: 158154 - protein, 130 aa, Heterodera glycines
MVYWTDNAEARLIEWQKMTVYGRRVIFPELKHDWFYLYCANACFQNGQRSPLSRAIFVKTDKMETNKKCEKDGTEKERIPFPPIHSLPRHWPFAHHRSDGSDWTARGMGGRKNAAAKACQIRLIRRVTAN

SEQ ID NO: 158155 - protein, 38 aa, Heterodera glycines
ILLNGQPKDKNEYIIYSFENGESGANEINIIIIVHYYF

SEQ ID NO: 158156 - protein, 80 aa, Heterodera glycines
  unsure (1)..(80): unsure at all Xaa locations
DGSAIAVLRFXDRSLGGDALGHLCDGVPPTPFVSPTELGFTVFKHLCLSPDQRALYCLASGPRRASSLIRLDLSTDCHTV

SEQ ID NO: 158157 - protein, 54 aa, Heterodera glycines
MPDVDGTLLRHADIAAHGDFVYAVQEIHSKKDESAEPTNKLVRVNVRDGHSEVV

SEQ ID NO: 158158 - protein, 24 aa, Heterodera glycines
RTLSTAVRQRSSKIYSMPQILWAG

SEQ ID NO: 158159 - protein, 24 aa, Heterodera glycines
RTLSTAVRQRSSKIYSMPQILWAG

SEQ ID NO: 158160 - protein, 235 aa, Heterodera glycines
MKNTVNNSKFYYYSNNENEELAEMLMTFLKGVALNGFISSDFERTFRINSTICFLKRFIQEMINLESSQNRKISKENTKLINNYWAVMVKKETEDEKREQICKLWQFGAQMYRNLAQIMAQNEIFEKFSFENRIDKIFGELNNSYENDCGTAGQKQQIFNRLCEPDLIFIINGLNLAKLLEINENLRYFFCHEIEMGNAKMFLGNFIEDEAMTRLDDQFPQIMRLGMDFNLKKGI

SEQ ID NO: 158161 - protein, 21 aa, Heterodera glycines
NFYFFPEIEKILGLSGTFESR

SEQ ID NO: 158162 - protein, 311 aa, Heterodera glycines
MAELDKLGQSDGDDGNVGAAEHGAADAIDKRSLLLSEPVEITVTCLTPPTGAGRPRFYPYQHWGYNDQHRIRIKNLGDNYCLFHALVAVRAYHDPALFKEWMSAGRQLQQPQQHNMGQLTLMLDFCENKEAFELMINNRQMMCSAVRRLMNYAGIAEGLAAYGLDHIQIVQDYWVYHGKDTGCYIKKLRIPMEKQRYRMVFWDTETRLEPAEGGQQQIHKVNFLSARVSCTECADSNLGQFDDCEICMNEDGEVERNKYWYLDRFFPKNYTISPKRSEAEEDEPIASFVEWIMRAWNEKFNTYIWVKMDHC

SEQ ID NO: 158163 - protein, 122 aa, Heterodera glycines
MKRHWDFRSMSCPPAQQSASLLPQQQLEEIQQGEGSATGAEGSSQSDSSDQYFRQIAHSVHKLERFSVSRHITEFVLNARVEEPDEVLRNALEMLMARAIHNSEQQSGRKVVKIGITLQGRG

SEQ ID NO: 158164 - protein, 233 aa, Heterodera glycines
MSTALDRFKLESGTAGQKRTSEGIPAKTKQLKEVIDFKSPGIFFVEAKIANLQYKIYNACPLKQRGLCCRRKLNDEMYCETCEHTAKSPLKNLFLRIEFKDCAHPECTQYATMFAHSAEKYLQLKAVEIAEMSEREPEKLANALEAKLEKQVVAKLTIKESKGDFENRDFDWIITSIFTDSNNKDHEKAAEATKKTAEKEDGEESEDEDGQEIQLVGEVKPINSEAFKKAKKN

SEQ ID NO: 158165 - protein, 127 aa, Heterodera glycines
MVVRLKMYIETAQENLGKELADQSVRADLIAERQNLCKTISLLEKYNGKWEAIFLRVKGQALQDEEQNYRDFKPEGKAFMHWGSTKPGGLVDTIEGALGLSELGGCNSPAKSASTSCAAGTSGASAS

SEQ ID NO: 158166 - protein, 130 aa, Heterodera glycines
KQLLIIAKRELSKVTKKLLDDELSLISASIGCSFYVGSNHGVTGTDFLGLTSLEVFNKKLEKVLAERVDYEDPNEIERAVRILVCQVNIGIGFLDIRTETDFVNGPEHIFLHYPSFLYLPFSIYKKFTRL

SEQ ID NO: 158167 - protein, 96 aa, Heterodera glycines
KTKILITDTVAQHPLPQCTLRFVNGSKQLMSLFGFFFKQFSVIAHQLLGVQQRRYLHPIQLFMGSLNLFLFFFFYLFSEWSYNNFSQQYGIYQHTF

SEQ ID NO: 158168 - protein, 176 aa, Heterodera glycines
MVNGTLAKMIHFVPPSNDDKMLPFFQIEKPKYSKFITNRTKLLPYQDDPNKFNRPDPCDEYGADCVPIRNLLLKIEELENCGKNESENDAMFEMPEWAPPLPPPMTMKKPSETLICEGDLFCDKQTLREQYNRLREICGMKPEEVESQREKRQYNPYEKWTESPIKIAFDERARNN

SEQ ID NO: 158169 - protein, 76 aa, Heterodera glycines
MPLLIYPCLKSVNSPIIIIIIVIITQMCRALILSGSPDSFARYPKWAQTFENELSFEFKTRMPNALLLYTDDGKFK

SEQ ID NO: 158170 - protein, 87 aa, Heterodera glycines
MPLDCFVGGFPGSFSYTGDGYFWTNASYRGNMLPAFSRDDVIGCGICLTTRRFIFTKNGQRLGWNNCKLNRQITYQLIKPIRLIGII

SEQ ID NO: 158171 - protein, 52 aa, Heterodera glycines; identical to SEQ ID NO: 126512

SEQ ID NO: 158172 - protein, 109 aa, Heterodera glycines
MRRREALIKCKSAKGSEEGMIEGSEYQCYDDSKCGAIFCSADKNEFRRIFLLTFGKNGGQPKKKKTRRLSRMGNILGNEWSCYIGYYGEQYYIGLRTVEFKLRPRANND

SEQ ID NO: 158173 - protein, 76 aa, Heterodera glycines
MAGGAMKCKKAKQSEEGMLVKDNEEQISSSNICYSYNGKCGVIFCSAENECECAGIRNSVESALMMMMIGLITSIN

SEQ ID NO: 158174 - protein, 60 aa, Heterodera glycines
MGALCTHKVSFGNPTDTWGPSFNASQLMHYDFRNKYLLSKNAKIVASLELIQQGKTSQRN

SEQ ID NO: 158175 - protein, 340 aa, Heterodera glycines
MNEHSMELSSKSDIWAIGIIAIEMAAIGTEFKGTHDEEPEKDAKEIAVLVYDPERRPTANGILDFLDGKCRFESMQNAPRLLPWLTLDQFKMHLRKRKILLKKESKESDGSSSKELLKKQMEELKTLLRLANAKEWVPGEKQREKPCDTTTNKAMNSQRHNQRKNGGDTTPRATNARSAKTQSARWKDRLANIEKTIGLSLSPRIQYELDKIITEEFLGIFENLQESFYNSNFEIFELMGQNFAALLWSMGYGKLLEQLDKVSERNKSEAEMLKSVVDSVRGQLGTEWEEIYQMAAQYECDEGDKTYTDIIHQISALYLYELMNKQLLDQFSAGSELNDA

SEQ ID NO: 158176 - protein, 177 aa, Heterodera glycines
MDDEEGKLAPESELDYDELNRGDFYLIGGVHDPISLRFEAAIRDQNAVEHKSAERYYWYKMAECFGDEEAMKNILHAQNVQQAEEAMKNIKGFDVAEWDKVKLKHWEDGQRLKLEQVRWIENLLVLTKTTYLAIASEDKVSPPPSVHFLLSIFAVFRHWMAQESRRGQQTDLLGWEE

SEQ ID NO: 158177 - protein, 196 aa, Heterodera glycines
MASALGALPPQSLPAGGGNAQHLMANPLDSSAAAATLAAAAMQAMQQQQQHNHNNNSRTETNGEAGGGTSNSNNTTAEAQIRTMKQSQQNDDIFGEALLKGTMAQLQRTCPSGEEMLERKAPTDIERIAGSGENGTGVIRHGFCTKAMKMAPTERTNDGTTESRGMGAMEMFSRMPPTGEMGAIFYLSNSNRITEN

SEQ ID NO: 158178 - protein, 29 aa, Heterodera glycines
MPMPMPLPSFGFIVFSVSTITIIVVYCLL

SEQ ID NO: 158179 - protein, 99 aa, Heterodera glycines
MNAQFAAVPMLTTVLLVCVLLLFPTICEARPKEDKAKGKTHKTENTDSRPVILESWDCNTNAKTTAPSTSENLQPHHTTNSPVSNQINGLPKSMFMPRK

SEQ ID NO: 158180 - protein, 234 aa, Heterodera glycines
KVFDENCLNKNAVIDRASEFYKIACDHKIELCDIVEYSEEAIRLIYRDKEDFVMEHKSSNIIISLWTTSMARLKLLEFMREAESHGGEILYTDTDSIFVRHDRDVEPITTGKYLGEMSEEYGGYEIEEYCCGGAKQYALKMRSKQTGEIEYVMKIRGITFDVDNKKTLHYDTFKEMVLNYGKGEVDPAFFVYKNDFGPTRDSKLVTREKHKMYKPVCQKGIIDEELNVMPFGFC

SEQ ID NO: 158181 - protein, 211 aa, Heterodera glycines
RHFFSLFNEIDQNKDTYLNSLEFNDIRPLVLAKAFNDIRPLVLAKAENAALRYLQNVDTDHNGQLSLTEAQNYILKEYGISNRDVERIWRLVVPSSGDEMDAVLFSKLRRRIRGMSIRLARQILKGADRDEDGQGADRDEDGQVNLREAQLIAFEQEGIGPGEVFEQEGIGPGEVVEMLASVDDNNDGMLNAPEFADFERIVRARAGKRRK

SEQ ID NO: 158182 - protein, 105 aa, Heterodera glycines
MASGLQMGPTSPVPLWPPNWRPLPSTRQIMVKETNSRSFYWIALVSDQNASSSPPPIDGVPPSEVPPSPPDESASTTDTLPTSPLSAPVDKSVDLDGDGALSLGE

SEQ ID NO: 158183 - protein, 109 aa, Heterodera glycines
MNSGQANLISTCSVMQKSISHAPREPSIKEEPMGGESAKDDDNGSDKFWSMATKTTSQHGEAPAIPTMTKKRTSIELCEATQIGHREELGQLVSPKPATDRTAPTADFM

SEQ ID NO: 158184 - protein, 213 aa, Heterodera glycines
IRAQVNMGDRFEYMINEYKKMAGGEYVGFNNADFLSEAATADRNFALAYFMKENGCFPEESKHTSLKETLDFYFQLCSLEVNCEGAAVIAATLANGGVCPLTGERCIGSRPCRDVLSLMNSCGMYDYSGQFAFHVGLPAKSGVSGVTIVVVPNLMGIALWSPPLDRMGNSCRGVHFCKKLIDRFNFHNYDSLAHNESQLKILPRTLTALLEST

SEQ ID NO: 158185 - protein, 321 aa, Heterodera glycines
MKLIISNVSSGFICGDCWLLVFDFLAPSQLGLEIALVNRRFNCIVDEHFKTRKWKLGGMQIYHEIGENGTKQMQIVNSDGNPLPILQNPLSNKVIGFRGISIAYIDQNVIAFLRRFHRFFAICSTDLYITTGNDRILEFILLNIWPMLRHSMHLMMFLNTIAFRRLRQLAPSLLNDCPSLHYVSFGDVILPEFPPDESANASDGQAVTKWLFTPRPDGLPKWLRYSVNSPVNQWSSTMEQFKAAFSNASSPVTFRICFHFPPSPLDSVVPIDRINEVTGEKLYLLQSANDFWLTRCPIGWDGRKWEDMSDAFKARQNPFDI

SEQ ID NO: 158186 - protein, 72 aa, Heterodera glycines
MWSNPPDDDHNHADPTDHCRCFGERLKQCHEHGAGVPKVLIIPRRGARIAHDQHEGERERGKAPGEKKNRNL

SEQ ID NO: 158187 - protein, 117 aa, Heterodera glycines
MIGEVEANDILGRKAWVANFLLILFEIITVILLMNLMVSLAVGDVNELRMNAEERMLRIKVNFCIEALHLSEQISFLNGFVQVLHRSQTNNILVIYKAENIVHSRLMPNIQFMVSET

SEQ ID NO: 158188 - protein, 349 aa, Heterodera glycines
PFTKRSSSTTAATMLTMMALARRHLPPLLDCVKRVLEFVNKLNSEKVEVLTQLYDWFLSNCSVNTTISSPMVADRLAKAYTLAHGLSSALCHLHHHIGTFVAQLASFHAHWSAVGCHLLTNGFVNPIPIADRQKGGDEADAKRTEAGDEDSNLHAFFFVFLTDPFSNLQQNDGNDQQQQQQMNDEQNNADADQQQQQQQQKMDETDQPIDVDDDFAGCLEALDAGEDDEQGIGDQRQMLDDDDACAKNDDTNADQQQMDQSQVEGADKADWTAAQDEAGDKAKPTAADEHADEEHGDAEGDDQQQNEGDVDNEQQQQEIDEANQQQQQKVDGEDNFAGQLDCRARRREM

SEQ ID NO: 158189 - protein, 146 aa, Heterodera glycines
MAPPKRTNAFKSEYANEFQGITKSKAGDEFAHCIPCNFDISLLSTGKTAIPHHLKTEKHKKAAKAANSAKAITAFMPSKSAPTNLDRQTAAAKEMTGLPFSLSIDSSNHKTTKLFPLVVRYFNPKKGIAVKLIDLEELSGETSAEV

SEQ ID NO: 158190 - protein, 399 aa, Heterodera glycines
MDFILTKVPNVEIYWQCEIEEMLTKDQQMKQKFNEYTGDGGPINIRACFMGGRTGALKLYHEVKADEEISYYDFTSLYPFINCVTNYPVGHPTLHVPCEEVDWQRPEDNPYPLAILKVFVIPPRKIDIPVLPVKVGDRLCFPLCMSCCKKYPNGGVKEAYSCQHTDKQRGWISTCTSLELNVALEEGYRVNMLLRVLEYDRSDNKLFRPYMSEFMVQKIHASGFDENIHGNFEVEEQFIAECWDQFGIKIDRTKMVPNKGKRALAKLAVNNLWGRFSLRNYGLSQTLITDDPSELGNYLDNRKIEVTGLDMLTPERILISYNQKKDWVQEHPCSNVVISLFTTSAARLHLLKAMQIVARTPGCILLYTDTDSLIYVHPKGRNPLKTGPHLGQFTDEFPK

SEQ ID NO: 158191 - protein, 673 aa, Heterodera glycines
MKNSSSSPPSKRSRRFFIEELLREPYNELSPPRKNPKDYIKKLDSEIEHVPKFQWVKNKSRFIIKDVPADPEALLSGIFQHCMDEAIVDSHQSGVEPTHLGCIVSSQLLTSDIWIPIRQLTPDTINTILNRFNDVAQSKKQDGVTLWGEPFTVTVTTVNRNGLPEKRQLKGGAARKLAPVHHRIHPNCLIKIQNFDADNYCLFYSMQAAMVRAVGDLDFRRFHDYINGNNGMRGKLKHDALEMMRAINAPAGQPNYDAEVYVPRIVDWWNGEKFSDQWKVKTFVFGSTGHYKPLFKYGPVDYGVPIILYFEDGHFNGVQKSGNLFGVPYCLSCEKTYDRPKRHMKSCKARCIKCSQMGPKFPCKPTHGFRQKCNGCNKLFFNNICYQHHLSSEYCKMSKECKHCGVVWDLRNNTQNGRERGCFIRPLEPNLKKETQDWRLVVFDLETMQHEPVNCEIPERRKHQVNFVTAKVACPGCISSGQWKNTLRGKKCNICGHHRTITFSQMPFHGTMVDKQVIDRHPLVSFVKWILYNLPKQCDTIAYSHFGGRFDMVLVFRELFMEGLNPSMIKNGNRLLEMKVKCRKSLNPNVIFRDSWNLVPGPLASMVPMFGLDVQDKPFFPHLANRPENYGCQIFPTKANYLADGMNPEKRKEFDRWHSQNHNMPFLLDEALA

SEQ ID NO: 158192 - protein, 377 aa, Heterodera glycines
MASKFILVPEEIYHGLTSSDSGNINLGFTKHALERTKRKRENVTAKNIHYNQELSRYLHLRDEHQNHPSKVEIAKGLKALIKKGDESDEDEQIFNLGSERSQPPASQIRRQRRPHHHYHDDEEMPLLPDSPPFQAVNRGQKRKANEYYSSWEEGAKRQLIQQYEPASSSKIAKRQRRKLPPISWRSEEKIPAEVQQEEPFQPAPQPSIPIHSQVNRKRKAQQNLNDVREAKKSLIDSEELRHPPLQQEASLRFKQKTTNKPRVTQPQHSTSSTLATRSNPPRDLLAEAAAAPLPDDDDHDLELLQQPNNSTQNQPLPPEPPLPSKTKKRKSSKNEEETEKKRIRVGSRKRLSSPNVIKNQPKRQKNPFGEALSEEQR

SEQ ID NO: 158193 - protein, 78 aa, Heterodera glycines
MRAPNSALAIRNIGVQLFPGKLDYFLSAYRIATNKPYGYLVVDMHAASNPLLRLRSGIFKDDEEEGKKIIFIPKNGLL

SEQ ID NO: 158194 - protein, 323 aa, Heterodera glycines
MSSGLLFICADCWLLVFDFLAPSQLGLEIALISRRFDFYVDEHFKTRKWMLNKKLLITWKIVGNGPKQMQIDDADGNPLPIPQNPLPNKVIGFSKCIQINYIDQNVIEFLHRFHRLFPICSIFLDITTENVRILDYFLLHIWPMFRDSIRFLFLNAFIFRRFRQLAPSMLSDCPSLFGVAVSNNDIVPAFPPDDSAMASDGQAVAKWLLTPHPNGVPKRFKCSVNSMEEEQWTSTMEQFKTAFSNASSPATFRIHFPSSSPLDFVVEFDLINQATGEQLTLEEYEGGFWLERCPIGWDDKKWDVLNETNPIDIWIEDGGYDDG

SEQ ID NO: 158195 - protein, 31 aa, Heterodera glycines
MPNPFLFVLFTCPLSVIWATRKSATRNTFEK

SEQ ID NO: 158196 - protein, 78 aa, Heterodera glycines
MDRENERVEVKGKSTNYRSSSSFVHLNVCVSSPNFPPNNAPMTTPRKKRNTRPSVSQMPSAHTQSHCDQKPNFTYRMI

SEQ ID NO: 158197 - protein, 124 aa, Heterodera glycines
MDLQHGVAFTRQGVVVNASIDGYSGTVGSKVCVITAGCRQREGESRLNLIKRNVEIFKGIVPELVRYSPDTIILVVSNPVAVWSGVNVAGVSLSLLDGQNEATNWEKEVHQKVVDSAYDIIKLK

SEQ ID NO: 158198 - protein, 28 aa, Heterodera glycines
MFVVTMAYCFDSYCISLRCSLFLVIFPY

SEQ ID NO: 158199 - protein, 216 aa, Heterodera glycines
SAKFLITLQFVVPMPFITYCYWRILRKVHKDMIVQNVQFSKSLSNSQRQNVQFSKSLSNSQRTDALNRKKRVNYILIGMVIAFIGCNTPITAVNLAKDFKQEPNWLQEPNWLKKQPYLWPLVAHVIAMSTIVFNPFLFFWLTAKDKGQKGNLTGIGTTTSEIITSLMSRMHSLRSTGGNEESRRKKAGEIVGKESTQIDREREREGEKEGMRNKER

SEQ ID NO: 158200 - protein, 50 aa, Heterodera glycines
SLMSEWTRTDQTDCETDHFFPNPTKYFFNIFARLLSFLKSFVRFKVKQCC

SEQ ID NO: 158201 - protein, 254 aa, Heterodera glycines
MDEAIDRKRGILSSPQEDNALISAYLARKSIIEGSFSATLTTKEKKNAWDEVTQAVNAVDARSVRDQEQIKQRYRNKLKQYKNFIAETKMPPTGGGRPTERKPFFDQFMAEDTRIVGIIGENPIELGERPKSSPAIIDSSFCSGSETYSAAAVPPSFTDLTPIRHQSGGVISSKKRKFSTASADYMSAERKEIVEIFPAASSTATARDLQIKVLEKESAKLDLEMEKLKLEIELLKLKKDREMRHHLGYNIEEL

SEQ ID NO: 158202 - protein, 728 aa, Heterodera glycines
MKICLIGKQAFGAEVCRQLISSGHDIVLVCTELDKNGRADLLALEAEKHKKPILKTKSWRRKNLEAEKHKKPILKTKSWRRKNKKTGKFELENELFNEYKKYAAELFNEYKKYAAEVNVVAFCTQFIPQEVMDFPRHKTIIYHPSILPKHRGASAINWGASAINWTLIEGDEEAGLTVFWADEGLDTGPILLQRKCAVEETDTLNTLYKRFLFPEGVKAMVESVNLIAAEKAPKIPQPTEGASYEPFITAKPELAEIVWSKIGTQRQLHNFIRGNDSVPGAWTRLNGEKVTLFGSSLWKRIEPPATGAWTRLNGEKVTLFGSSLWKRIEPPATAREVPAEEVPGGKLWAHPRGILLRTADGKFVNVDTMRIDGRTIKAVNVDTMRIDGRTIKAANYGMVEEIAEEKLEMSKEEKEMVPSLKNIWRGILNFSASDQIDDQNIWRGILNFSASDQIDDQMNFFDAGATSADVTRLVEEVRTVCGVEMRNGEIFMNSQFGDFLIAIFMNSQFGDFLIAIIRKIRGEDLERLEFEKVKQNFNGTKICVPTQMYINGKFCESNNFNGTKICVPTQMYINGKFCESNSARRMQTIDPSNEKSICTVPKGDAGDVDFAVRCAEEAFYHGEWSRKGDAGDVDFAVRCAEEAFYHGEWSRISARERGKILYRLADLMDQHRTELALADLMDQHRTELATIESIDSGAVYTLALKTHVGMSIDVWRYFAGWCDKIHGK

SEQ ID NO: 158203 - protein, 167 aa, Heterodera glycines
SCNCPSFSPKVPSSCLALFELKRDSARYVAERYMPSILAMIFSWVAPYVPYNYEEVRIITPYVPYNYEEVRIITPITVLLTLVQMEKGNQEVITSVITSYLTSLDIWFVVIKAFTVLSLIFVVIKAFTVLSLIESLAVMAYIKKGRAVESEAQRAPSEYRRDLLQAE

SEQ ID NO: 158204 - protein, 349 aa, Heterodera glycines
MEDGETETAEEDYDDDAEDDGWTIIEFDNSEEKRNTTEEKLRKQNDRINGSGRDEDGKWKEWDIGRDEKEERGKEKGRDGEEDARRKIEDDQTDDARKMKQGRDKAKEGGRDEEKGLLANDQRPDVALFKQLIIPWVPHRLRHHHHPLHHSHSSQIQGTHTEQSSNGTIIVTEQNVNKTMPEQNANVSEEVAQRETGSTKTPSTTGGTAKADVKLHLEDILIFGAFVTPSGEETKETAKAETENGNGTIWGQDRDQKDDPMAPLRNDLSNSGQKVLLNGTSLGKPMPATTTTGTSTTWAPINEEELAMNQHVDPLGRDRQQLLAQLIARWAIDWIMKWFGKRRDGLPSD

SEQ ID NO: 158205 - protein, 208 aa, Heterodera glycines
MLAMIAKVIASGIIIIVGLWLLISKEVQSGSFRQPFANTSDKPGNWVLALFAGLFSYDGWDILNFGAEDVKKPHRSMPFAIIVGMSTVAALYLAMNVSYFVVLSVTEVQSSNAIAMASQCQYIKLKIAYFVAFVTFAERTLGGFLQYAMPFLVCIVLIGSLNATLFQGSRYIWASARERHFPSFISCINRQHDSPRAALFVHNVWGSE

SEQ ID NO: 158206 - protein, 58 aa, Heterodera glycines; identical to SEQ ID NO: 128482

SEQ ID NO: 158207 - protein, 394 aa, Heterodera glycines
MATANNYQPRVSSASSHAPQMFMSGQQQQMPGGGAQIRAVTTTAPGTVNQSQQFVQQQQQMSQQQFHRQQQQQFEQMSVHMAAQQQIKSDNGMVGSYQIGTPTAPSAGDSGAASQNRMTTSTIVVKTESGLTTAMGSTSVRTPAGAIDGPPSADSHPPSVGTANGMATGRPGSVQQQFGTAASQVDTEEPEYKMLLKKLCKYHADVKRLLGRFELDTLPGVEMKIKASLVNVIQVMEGTRKGGPVTKTLLQKLLSNVQTVLERHHISRHLFSIAKKLSTLAPPHNGTSANGGGGTTPTTAPKEEPFETDPWRNVRHMAIKLPDAVLTILEDEKKSTAAEKQQKKADDGGQETADSESGGNEWTGRKRIRQQNEQKEDEKGEGPPTKKSLWKEGR

SEQ ID NO: 158208 - protein, 84 aa, Heterodera glycines
YIRPSFQRLFLVGGPSPFSSSFCSFCCRIRFRPVHSFPPLSESAVSCPPSSAFFCCFSAAVLFFSSSKMVSTASGNLKSEKQLD

SEQ ID NO: 158209 - protein, 219 aa, Heterodera glycines
MAVQLHFWHAEKFRIICGQIAYVAYLVQKKSIPFTFWRSPTECFLMDREDILSSMRTLLKPSHLNFVMSRVIGTVWDTISDTVRQKRGALALLEKLIGGTALVKLWENKEARAKLMEANFFFDKNRLVDHYVSILLNANIVPDSVDRMRRDIKSADLIVWAQWFQSLIEQQHKGKSRYSLHRDYVWMYLRIAYDMYDLGTEKSEFEHTFTKMETMMRSN

SEQ ID NO: 158210 - protein, 50 aa, Heterodera glycines; identical to SEQ ID NO: 145164

SEQ ID NO: 158211 - protein, 261 aa, Heterodera glycines
YIDHSVLTFLRSNKHIWDRSGTKLDLYAVFNSETNVQPIWDVFVRQIWPIFATNIHHLGFLCHNHFDTLCRHISPTFLTDCTRLHSVFSDQLCPGVIVADQFDDGQPNTATASSAGQALSKWLHTPTTNGQPKRLRCCEHQISNFEWVNNFKGIFLRATTTTSVSYTIRFGVLWPTTQIVPFELENERTKEKLTLKEGDNIYWLLERCPISEKAAAVKWEDDENLNNVELNLWAGSDYIGPLSPPAEEEDEETDESNENYI

SEQ ID NO: 158212 - protein, 25 aa, Heterodera glycines
SKSSLTTAQKNMFFVRFRPRGAQEK

SEQ ID NO: 158213 - protein, 26 aa, Heterodera glycines
SMEVIRSRATTINRQTYFNCDVACLL

SEQ ID NO: 158214 - protein, 84 aa, Heterodera glycines
VHLPPLRRRPTAVAAFVPRPCRNISSFPLAEAVINGTFDGLMMAKKRKKFLQKLLPYYFYYHIILTHHSFLCFHWFCVTFSHQF

SEQ ID NO: 158215 - protein, 162 aa, Heterodera glycines
LGGVCGTVVEMETKVYRAKYHRGRMLNRPYEWVFGMIQRGSNKVRFFPVPDRSADTLLPIIAENIEVESTIVADGWAAYGGINNMQQQYNHEWINHQIYFVDPANPKIHTQGIEATWRAFKQLKHLHGTTPELLPTYLFQYAFRRYQQNTKIFQHILEEMRL

SEQ ID NO: 158216 - protein, 83 aa, Heterodera glycines
MTHFGSGKNKCCQMIIKESDVVRSEYGAFSVQCTANVFICSLDESPHPTTWKGSTTCQHNVSTCQFSAKLSIGIQPTVAPFKF

SEQ ID NO: 158217 - protein, 495 aa, Heterodera glycines
MMNRQIDTKKQKPKITYEGQLYTFDKSSADGTRKFWRCEYKNSCKGRIWRDLDDQFIRLATPHTCPVNAANVEAQKVKTAIKRRALTTLEPPAVIRSEALQNVPSPAGLLVTQDASKLVIKRARHEVNAPPAVPQSVDQLLFLPHTRRTSQLTAKWSSFCWLTLVCITRPETKTRRGFCCFGRESFGRWADRMKDCFGDGTFSLAPPMFYQIYTILAKRGSWVIVVCHCLLTSKSQASYERMFGLLRQAWPTFSPASFNMDFETAARNAAVATFPACEIKFCFFHFVRNLQKKIKEQNLWQRYCTDTVLAENLRMLTSVAFLPLSDIRTAVIALDTEFGNVTALRPLIDWLLNNYIGQPRPNGTWSQPLFPPEQWNVYTRTLNGEERTNNHAEAEHHRLQGAFNCRHPSIWHFIDVLRREQKGTDGKYASFLAGLEPPRKAKKYQAADERLFNLVQNYIPVNPNNENDHNYHINPNFHIILEFLRGISRNYHMNP

SEQ ID NO: 158218 - protein, 245 aa, Heterodera glycines
MGLPTCTAQTTASAAATASSTPPSTTVRPGAAAVQLAALFDPNRPPPTLTPEMLSAGAGPTTQPPTATTPAVTAPTTTLISGGVAGGAVLSAPPPMYSTTTTMALSAEDSLSVWENFLKRKENEKAERNFQLMRNNSAGGSGIYQQQQPHQHKHHRTEHRDYHHRERDRDRDRERDYHHRSRGGEGRGTTRRDEQNGGSGREGNSSSHQPKMTVEEKSTVWKLFEKHYEKKDKKGEEKNEEEERE

SEQ ID NO: 158219 - protein, 83 aa, Heterodera glycines
MAQDQRQQQQTPPPTVSGANKPSVLTDTHSLLHKLLPGLAAAQAQRELDTTTRPTATSTAAPDGTPMVGKTLGSRALGKARNN

SEQ ID NO: 158220 - protein, 68 aa, Heterodera glycines
MAATELSAGVWASAAAAYTATKCKNEHMLISNGFLLFEILQPLSRPSTFNTYRRPRTAANFSGKLKKQ

SEQ ID NO: 158221 - protein, 14 aa, Heterodera glycines
LITCKFIKFNIYLY

SEQ ID NO: 158222 - protein, 178 aa, Heterodera glycines
MNRCNYNQKIKTSNPLYGRGYFIEQKEYSNSNGCGFRKANRPLVPSNAADIESWEPKVMSTQEISKLTARCVGVTDAFIKLDNYVDSVKKYNPSNHDLLRVMQRMQHQSKTLTEDPDKYAELIVQCVANPNKFNGTRHCLELVIGRRALEEFISRNEWTEERLKDYDIKCVWPSDGFV

SEQ ID NO: 158223 - protein, 131 aa, Heterodera glycines
MASDKQAVTKWLFTPRPDNVPKAFASASSPANFIIYVWFPSSFADSDVPFELINELTREQLTLERINNSNRFLLIRCPIERDESKWTKWEEEAIDWRIYNQCNLHIGIYNDDNIGKRLLNATLEPSDQQQK

SEQ ID NO: 158224 - protein, 69 aa, Heterodera glycines
MATFKTAPLIAVALLIHFGCLMFLMEVNGEVHVQSSLAPSHQVVKRHCSCGGSWGGWGGGGGACKTNFL

SEQ ID NO: 158225 - protein, 53 aa, Heterodera glycines
MLPHWPQEQPEIVATLDMLGALKLLAYFRRSIPEPNSPPEIIATTHMLGVLKL

SEQ ID NO: 158226 - protein, 92 aa, Heterodera glycines
MDILKEVGLHGRMAQWDMEAELLLCHERMNALETTCNNLALLLGGHLGGSESNKSCALEENEKGDYLAQFANECSRIRKELQKLKKRWRERK

SEQ ID NO: 158227 - protein, 116 aa, Heterodera glycines
MAVRSIILLYLKVEHLQLTTNGTTSKCEKVFLIDNDERYNSQPDELTEEFEFVDHCNNNNNSNTLNNLCERRMIVSSEIKADHHFNESVSIFPLSDREHSLVAVVNFGPFWHRHQK

SEQ ID NO: 158228 - protein, 154 aa, Heterodera glycines
MDENEDDGNNTDCSISRQLFQICLTLLQQVQSQQSELFTLKQRQIADEAVQDHERRRSVVVMGLPESQKQKPSERVAADRTAISGVLDELGIESPITVYRMGSPDQARTGQNRPRLMKPRGTQGPARRVLQEECSRKRKEDGGEWVVYADKVML

SEQ ID NO: 158229 - protein, 41 aa, Heterodera glycines; identical to SEQ ID NO: 151443

SEQ ID NO: 158230 - protein, 73 aa, Heterodera glycines
MTNNEMAEQSAFQSKLMLLRLKKVTHLTIDTDIKGNGEKEAEFPLTDFTSIMMYLILENIWDNRSIDVMAIED

SEQ ID NO: 158231 - protein, 63 aa, Heterodera glycines; identical to SEQ ID NO: 130392

SEQ ID NO: 158232 - protein, 170 aa, Heterodera glycines
MNSVPRYGMPKFLAFIIGKELIIFISVRSHWCRDSALVKSFLSHRVSRNCRVFTRLTAEALGFHYFHIYFFLDLISLFTNCTALPAIHFSLVFNVRLFKRTELSRPENKATYCVTSECGKATPGLITPWTHPSGICGTFPFPPHSEFQFPTPARPPRPAALLVAPDGSLL

SEQ ID NO: 158233 - protein, 77 aa, Heterodera glycines
MEMIWLGTKRIGPPLRRLKKPNLQLAEVKMRCEHQHVPRGHLSDWTWTRRSRSTTSSGHDISRRRDFSKEGRIVNYY

SEQ ID NO: 158234 - protein, 135 aa, Heterodera glycines
MPIESANEKLQQKSFDEIFGEKWQEKEEERRNELKKREIIGKFYKIKEKIKQKGRKYSAKEWNKIGEKIAKKMGTNRKKIYKWIKEFGLQKRKSYKSKTDEEKIEIVLKFIEMTKEYKQKSKYSQKEWNQNYAEI

SEQ ID NO: 158235 - protein, 22 aa, Heterodera glycines
MQIVWITRVSAFLCQTFDSKIF

SEQ ID NO: 158236 - protein, 144 aa, Heterodera glycines
MDPSNGLYDKKENKVTLAIDVITVDEPKMEKFISDPNKSNGTLSMEIEKVSEFAREIFESEPENWSCKCSSTFRIVSQKSGVKDLRRELNDDVFDNKNRGWGYANFISFAELMDPSNGLYDQSEDKVTLAIDLSVKEANIEENS

SEQ ID NO: 158237 - protein, 111 aa, Heterodera glycines
MDLAKSLLTECQAENVQRIVAALSDGQQTLLGHVESERARLTSRDAEERSAALNELCAVVLQMLPSAAAGGKQKAEGHVKIVAWENVPITRPQIDQLLPFLLSKVRQNAGD

SEQ ID NO: 158238 - protein, 480 aa, Heterodera glycines
FHKYLFGRHFVLLSDHKPLLSIFRNNKGIKACTANRLQRWAITLLGYDFELEYQNTDFGQAEVLSRLIAKTPVPDNKVIIANIRESNETGVLNFVAKTLPLDHSDLANAAKSDQVIKNVKKFVCSHWPTKNKMTADIVPFHRRRDALTIEDECLLYADRVLIPASLQKDVLQLLHRGHPGMKMKGLPRQYVYWPGMDEQIENFVKMCNECTMEAKMPVKTELQSWPKADGPWKRVHLDYAGPFYGKMFLIIVDAYSKWPEVFKMRSSNSAATIDKLRSLCASYGLPEILVTDNGTQFASKELKEFVTENGINHLFSAPYNPMSNGQAERFVDTFKRTCRKIKGEGASEMLTTFMATYRTTPCEGKSPDELFLGRKPRTTLDLLRPAIEKQFNRRHGAKPRSFAVGDKVLARHCAIEKQFNRRHGAKPRSFAVGDKVLARHCLSQPWRPGKVTKCKGVIYDVEFFDGKFGRFHANQLLVRS

SEQ ID NO: 158239 - protein, 78 aa, Heterodera glycines
MSNYYGRIGHLVGFNPPSNRNEAEEMIIEEDARLLLEQSLDENGLLVDQYFEEMGLNEVQDENSPDVNSEDGEVDIMN

SEQ ID NO: 158240 - protein, 83 aa, Heterodera glycines
MCAFHVKQAINRRIQSMGFMQLYSSKEPNGLEFELSHAEEETAVAVDEGRQLPARPLELLLNWTEELPQRGGYFGFFEHGLLQ

SEQ ID NO: 158241 - protein, 60 aa, Heterodera glycines
PITIGKGRRVTSAAFMCGYKSMPFLSPDSPLKLFVKGKSEGFPLPDRPLSNKIRIKCLQI

SEQ ID NO: 158242 - protein, 137 aa, Heterodera glycines
MELGSQKYKLNKNSSSLSPSPLSKKRWLPVELQFEIAHWLPITESIERPLIQAAKFPLVIAKCVLSRIEKRNILLFPEVYLKRIQTQIFKIQQDTFYQIEGIETSRKIGKKRELFIKWVGYPYSQNSWEDEEEIKKV

SEQ ID NO: 158243 - protein, 32 aa, Heterodera glycines
SGGIEPGTPFLVANSQTTKTKNQLVFELGAQN

SEQ ID NO: 158244 - protein, 101 aa, Heterodera glycines
MGIDKTHKEMAVMIRKFLFGSVSPANVLPNITVSAERHGMQVRNALGENLIVPHTAQMYQRQLAQSWGQRPSPAATASDNGQVDRSEATSQLQRMASFHFW

SEQ ID NO: 158245 - protein, 120 aa, Heterodera glycines
MGNIIQPMEHTAKNCSDAYEMDSTRLGLCIFEINTLITLAITMEFFVYSIWPNPTKSTTITLSAINTFWPWSTTIVIYWLEQNGIIETVPQFAVLEVINIISWMVVSFQLNIFELPFLSK

SEQ ID NO: 158246 - protein, 70 aa, Heterodera glycines
MAKWTEAEQQANCRGWQVFISENNIKSEGTFRDQFAFGQKQKPIGLQKEKHGQRGNRGDFSFSAGVLDFN

SEQ ID NO: 158247 - protein, 160 aa, Heterodera glycines
MREKEKLTEKEEKRERKKRERKHADETMEQVIEEEKRKEELKKRMEEIQREKRDRKLRQRQLQRNKDREPKKDNEKQRDDDKDEKNRKSEDREMSEESQSEGKSSNLAEDFIITPKNAQKGRKNRTFENKQTREEEGKEEKSEILFEKEWQKAMENTKLI

SEQ ID NO: 158248 - protein, 256 aa, Heterodera glycines
MLDWMSTRIANHIIPDRLRDRTIYDQTVNGEQMIIFCSRFDLDLLVNYQNEVPIDGTFDTCPRGFTQVYTMAVVIDHCAVPAVYGLLPSKTLATYTRFFETIRQSVGNNWFPYRIMSDFESGAIAAAGNVFPNSIRTGCLFHFGQAIWRRIQRLPNLLTRYRDDELVRTSLRSLQALAFVPTDFVYNYFCIVMSILEPTPELQELIIYFINTWIGPRRIIQNEEVLVRDAGGAADNWIRECSGQSSRRAWKNKQFA

SEQ ID NO: 158249 - protein, 210 aa, Heterodera glycines
MSYLFTFFFIFNLSISNGSKLTLQIAPTLPLIYDGLIDADQSHNADLPIDFGKYFVLQVDPMLEEDEAFYEVDVICHENSVRFYYGEMFCDLKCSTMVFSQNESCLNSEFDITIWKWHNKREVIKRKKKSAEGTAAFTVPKFTLETEKNGQLSTKSKSNESEKSSECTNWSAGLKWQCSILLQFVPFNHFPVQKGRFQHFTEKNQQMLLN

SEQ ID NO: 158250 - protein, 185 aa, Heterodera glycines
MFDKELESHGTGNKSGTKHLAKLLPEATTVRDETLPRIGLPSLVNRPNKDANSIPRGPLRSLFVNDSLTNDHEASSVQESPTKDELNTQISFSDDKPQRLRKYPSLHSVDYDYEYLEEAKIPEKFRSNIDDVQNDQKHKIVKDYEASSIEQGHQQTQGKAKDAGGQIEFVKRLPFLQESSPEVVE

SEQ ID NO: 158251 - protein, 51 aa, Heterodera glycines
MVPSWAYYAYEGITLYLASPPECQQIVYRRHRYELCLPFVRVVTKTRTGSV

SEQ ID NO: 158252 - protein, 55 aa, Heterodera glycines
MLIKKGSNTKLIRSLLHGDLISPFWLGTRGPEKSRPVSRPTSSSSKYIFSWVLML

SEQ ID NO: 158253 - protein, 107 aa, Heterodera glycines
MEGKGSKKRRATAAAPPLKPLFSTVKHGTGGTIVVVVPLIRPAGTVVLLLLVTPLLSGPPNGAAGTMVGLMMAHLAIIMAIVSIIALLTARRANVQSVQLDHLFLIS

SEQ ID NO: 158254 - protein, 182 aa, Heterodera glycines
MFGWLPPFHHFFRSRTFLSRRFFPVISFPPLLSRHSFVFHRRVKRVQKNRDKLYEEFVRGDDAAKKRLVYQRTDERIRNIVVGGLGERTIAEYLRGIANNFEMDQINSNFGKEKSRERNGGKEMSRTAFFPILKGRTSAEHFRLFVHHHFLLRAVLRFRVSAVVVRRGRRIRRFPPPQPTTT

SEQ ID NO: 158255 - protein, 154 aa, Heterodera glycines
MPSNSFYVVVPSNTNIEGNRTNSFLVRLPRKLQFNSEWEIEWQTGNKVRIELPPSNVTNPHELSKNLYRLLGDGSDPLAKKVRSTQNSFMLTINKARRWAREEYIKRKTKEKRGVRDEELLLQALLTDTGTLVELNTRKDFWHAKSMLKRAISR

SEQ ID NO: 158256 - protein, 124 aa, Heterodera glycines
MLILLPVQPAYAQNAWPLRRRREDAVALTVKVPMTLALSMSKVRRHGAAHPRGMVVIETGTWKKEFFVQSAYFLIIIISSIPSKKLTHGLRQLGPHVWAPACFWLNFFIYHPNPTNVFYGFYFF

SEQ ID NO: 158257 - protein, 618 aa, Heterodera glycines
MFRLACSAPASIGPQSAAKLQMQRLDGPMAVILNGEFHRRISSMQAGTTQIPGFGQLYILDPVQAMEQRRNNPTFTGEKITNEDEFVQGHELNEATLELLEKMIQEHHPAAQAYKQAREQLQELLKKQKPEELRFFRMTLLNERMTPAALKDPKLHPHQIITPSTGEGMFAIHADPSGAPPPRGIWVENKQGQLNEIAAFSPWTDSLTYPLIKPMGDDGYITGIKYAKPSSRKRKSDQDVAGLFDSEAESDNGSCETQSVASSDARVGRFHFLHFMAALTNRKDLSPCGITYLVNQYNKQQARQNPNAQQKTVDDIGSVVRFSEHNVNSLQYWKKMYEDCNTIFARHHDAKKARLFITFTNNREWPEFKENMYNNGQVFTDRFDLWMRVWSSKIAEFHEELYEKKFFGTILGSGESMEFQGRGGPHAHIVAQTDLDAIPDVIQQYIWAHIPPLPDKGDGTPIAQMHREVRELMHFQLHRCSDSWCGPRDPYGRCKKGFPALYSKCTILRPDRPALYYRPSSVDGGANIVVNGLIYDNSQVVPYNPYILLRYRVHHNVLFAYGNKANIKYALKYPFKGPGHCYVECKEESGNKIGIDEPAQYAKMNFRGATELYAVVNS

SEQ ID NO: 158258 - protein, 143 aa, Heterodera glycines
MAVAKKRSPAEYYAFSKLANCLHAVGLANRLASPAVACSFRDVKVVAIRMLAYPLIWMVAKDLDQGISSMLHCAQCDLAQLQNGALYYEGRVVPYKNEMVTNEEAEKLWQMSEKMTKLEENGEKGQPQQQNSEEQQQQKSPIK

SEQ ID NO: 158259 - protein, 134 aa, Heterodera glycines
MPQVLLAKNALRHNFVGQIMHNVPTKTSSHSGSSFPPDKGTVGIGVITAIFLFRCSMGCSPLCGECRNENFKRGDKRFLLNTGSGQEKLEFTQTFCQDCAKLNFDCTDLIMKHQKKDDVPQKNGGRNTYFKMEK

SEQ ID NO: 158260 - protein, 166 aa, Heterodera glycines
MHQGLHRRHNHQQHIIIIITINKFKQYNSSTSASIHAAWLQVHDHGNTPPHDVEMPIRPATWMSTVRSGRHLPVVESVYPGRNPARRRLFDAQPAAEGKEAQNLLRAPAAAEEEEAALIVDQMQPQAAAAAMMEDEDDDDDEIVFINEVQREARRRHHQQQQQQMK

SEQ ID NO: 158261 - protein, 182 aa, Heterodera glycines
MDTSKGLYNKKEDKVTLTIDVIVEGMKTDIADPPKSKGKILWTIQKLSEFAREVLMSERNSETVHFKGIEWKICAEVVKNGSNEKALDISLACVPTKESKNNKNSRILNKMSNQSAAELADEYERVDGEAIKSNEDRRTEAEQVGLLNTFFSNSLENRRMTTDSSLSVRRPKWTNRRTAAEK

SEQ ID NO: 158262 - protein, 633 aa, Heterodera glycines
PLLCSRQRYDQKMAKSSTELVLQTADEGENREAEGTERETWERKIDFLLSVVGFAVDLANVWRFPYLCFKNGGGAFLLAFLLPYTMMVLLAGIPLFYMELALGQFHIPLFYMELALGQFHRKGAITTWGRICPLFKGIGYCVIMIGYCVIMTAFYTDFFYNVIIAYALHYFYASFYNVIIAYALHYFYASFSTQLPWSSCSGKHNSPACYEPSWSNSPACYEPSWSDQSQQCTRNGTSPRIDRPVSAAEEYFYDQSQQCTRNGTSPRIDRPVSAAEEYFYKYFLGLHAKYFLGLHAEKEAIPHVTQSVGQLGPINWEIVACLFVACLFVVYIICYFSLWKGIKMSGKVVWFTAIFPYVVLFCLLIRGVTLPGSEKGIESEKGIEYYLRPNLEKLKDPNVWQDAATQVFFSLGPGFGVLMTQVFFSLGPGFGVLMAYSSYNEFHNNVYFDAAYSSYNEFHNNVYFDALLTSTINCATSFLAGFVIFSVLGYMSCKSGKPIHDVAQEGPGLVFVVYPEALALVFVVYPEALATMPGATVWSLIFFLMLLTLGLDSSFGGSEAIITGLSDEFPFGGSEAIITGLSDEFPAIKRNREVFVAVLFSFYMIIGLTMCTKGGMLVMEWLMGGMLVMEWLM

SEQ ID NO: 158263 - protein, 317 aa, Heterodera glycines
HMISRYYKLIVLILFINIIIIIIIIVLLLRNSLQNCTLTISSWTNSKSALDYYADEKVNLASFIPNEEWEVASFRIFRHEYKYACCPEPWVILYKYACCPEPWVILEASIVLRRKPLYYVINLEASIVLRRKPLYYVINLIIPTSIITIIPTSIITLVAITGFFTPASTADDRTEKINLGITTLLAMSILMLMLLAMSILMLMVSDQMPTTVSDQMPTTSEFVPLIAWFYLSIIIWFYLSIIIIISIGTFLTSVILSVQSRRQYGQLPSLPLRFIFFVKLVHRILMSVPTPRQTLFVGAFKRVVRSTFGRSHILTLH

SEQ ID NO: 158264 - protein, 157 aa, Heterodera glycines
QKLAKMPFFCFWASPSLRPFVARLRFRRFCRCARTLSSRRFRPLFSWRSFADRAPIAGRSGRRARRLFTRRKFKSQQRTKPKVEGFSILRNIAHQTAQRVLQKPTAEEIRRENAILECQSEGGEELVLTDSCYLLGHGLAVELARHLQLIIVQKLCH

SEQ ID NO: 158265 - protein, 188 aa, Heterodera glycines
ISAESFLEWCDLNENCEVGKECILSGLVYDGDSLLRIGNGICASTFPIDRKPSGGHAVDNSTVSAFVTVAFHRDDDIKRSSAECPLLWFGHRLATIAQGHAQFHSLWHFPLFSAHPNPSESLQETLDTINRLGQNEPQKSDKTRPRSDQQLLSIEEVLQKVDAKKLREMREKFIKMPMEEKESGKPSK

SEQ ID NO: 158266 - protein, 346 aa, Heterodera glycines
MSDRRKEAEEKMAKAIFISADCWLCVFDLLEPSQLGLGISMISHRFDFYVDEHFKTRKWALKIIGIRIKNGENGTKEMEIVNFSGKQIPIPQKPLPRGVIGFERVDFVYIDHNVITFLGYFRPLFAACQINLFIHTDSDRVLELILRNIWPMIATNICAIQLSTEIFRCLRQMAPSILDDCPSLRVVNAYSGRFFAEFPADDWLFTPLQNGVPKVFRCWMGNDEGTYPSIIEALKTTFASVSSPVNFIVVIWFPSSFASSVVLFNLTNELTREQLALKRTDNSDRFLLVRCPIARDENKWTKWEEEAIDWRIYNQWNQILMLINENDIGDGLLDATPGPSDQQQNE

SEQ ID NO: 158267 - protein, 153 aa, Heterodera glycines
MQPPKSWFLDNYTGRMRFNVPMTAPLFDPHEWSVHQRTLDGADRTNNFAEAFHRKLQRQFSCTHPTIWRFIDTIRCEQKALDADMARCMMGEAAPQKKRKYRDADSRILRLVQRYNDVNIVPQNDHNYANPNVNPENINNFLAGISRNYEMRP

SEQ ID NO: 158268 - protein, 90 aa, Heterodera glycines
MRRTAGGTVQKDKPKKEYLLKCIQKNVPFFIICDKNTLCSYQFLMDSNFPIFNEDFILVAILRHKIDVSEEFHAFSLNSTQTSKPKKADE

SEQ ID NO: 158269 - protein, 44 aa, Heterodera glycines
MFKEWYERECQGEKNAVIQSIDANELEELLQTCCAYGSTPTIHR

SEQ ID NO: 158270 - protein, 29 aa, Heterodera glycines
MAVLGSGGHTTEMLKLLAAQDDLFPGRLY

SEQ ID NO: 158271 - protein, 94 aa, Heterodera glycines
KILEIADKEKISGLLRIVESFIIDSECIHPIRKLEYAAEYRMSRLADTVLRLFPTQIDRLDSLFLYLAENGETLADVHLDVLKMLDIHDSYIVM

SEQ ID NO: 158272 - protein, 130 aa, Heterodera glycines
MAVHTVQLVGEASYKASIDVETVTGMPRATAILYQQRKAILANVLTASDAEQFAKLEYEQNKAQQTLVDIKLKREIKALRVEMYASEQKLHKQLVHAEQKLHEQQQKLHEQLVHLTNAVQQIRHPENNTS

SEQ ID NO: 158273 - protein, 139 aa, Heterodera glycines
MRDRASDSYEDAKQGAQDRYERAKEYGSEKTEQLKDYATDKKEEAGEKMEQNREKAAEKWDETKEAGGGGERDSKREAFGERANWQSMGLKFGQYVFVRIVQENEGGECIEQILFLFEETRNLQIDLVESRFLLEMIGT

SEQ ID NO: 158274 - protein, 251 aa, Heterodera glycines
MREIADIFERVFQRYTSAVPCNVFGPRDNYNLENGLNPPAFNHWDSTHQHSNRRDSTQQHSNHWDSILLHFNHWHSILLHFNHWHSTQQHLNHWHSTQQHLNQQDSTLQHSITGTQPTNIPINRTQPSSIQSLGLNPPTFQSPGLNPTAFQSLGLNSPAFQSLALNSPAFQSLALNPTAFKSLGLNPTAFQSLGLNSPAFQLLGLNSPAFQSLALNSPAFQSLGLNPTAFQSLGLNPTAFQSLGLNLSKFL

SEQ ID NO: 158275 - protein, 20 aa, Heterodera glycines
MNRKIIKILIEAKYSIFYKL

SEQ ID NO: 158276 - protein, 84 aa, Heterodera glycines
MNGKEKPTNKEEMLLLIGHDQDRTCRMCFLLCNFVPADHHQQQTTQRRSVRPNIRNEIRPSNPRKSQADDSRAAPANIHRPLLI

SEQ ID NO: 158277 - protein, 61 aa, Heterodera glycines
VFKLKGNVEMNEADRTANEELDNVINISANANANNRTNGDEAAAAVSDGGAQCQQWDKCRN

SEQ ID NO: 158278 - protein, 280 aa, Heterodera glycines
MNSDIGSQMKDLGGKYRFLRYLFSDLKNMTLNCTSRIELMENWANNERYSPYTSNRATVVSPAMLRETFELLNQQQKQHEAIANRVLQYGNEEVATIAASSLKRAMASSSSSSAATSAKKPKLVSEDDREVAALALAAFTQIKMRLAEDIEGLEMRTRKLEEGAAATTEAQMETMRQQMEQEFRQNLLEAEQRIDHKWATMLNKEQQRTQRIAAQSAAVIGQLMTGLTAREPNQGSKRQKGPTMGPHPKGEPNLGPHLRGEPNQSPKNKKLGPTWAYTPR

SEQ ID NO: 158279 - protein, 131 aa, Heterodera glycines
MNSTDLNSQVKDLGGKYRFLRYLFTDLKNLTLNSTSRIELLENWANNERYSPYTSNRATVVSPAMLRETFELLNQQQKQHEAIANRVLRPGNEEVATIAVSSLKRAMASSSSSSAATSAKKPKLVSEDDGV

SEQ ID NO: 158280 - protein, 121 aa, Heterodera glycines
MKRSAATLSTAAAAPNQHENKIEPIPTHVETEPDHETKGPPPTKKRAVEDRDLWKLAKGKYLLTTYLCPDDWNRLYHNQQKVKRLDDDRFSINFELCQECVRVNCRATDLIAPMKKKPNNE

SEQ ID NO: 158281 - protein, 117 aa, Heterodera glycines
MVVNKGKRSLAKLCLNNLWGRFSLRNFGLCQTLITDDPVTLAEYLDNKSIEVTSIDQLDETHILITYLHKKDWVDEHACSNIDTDSLILVHPEERCPLKTGPHLGQFTDEYPDHDIV

SEQ ID NO: 158282 - protein, 522 aa, Heterodera glycines
MVAKSRGWASWKFHRYLHSQHGQQGCLQRDALQLMQQIGARPGLNAYDAEIVVPRVVDHWNNSQQRHRFAVFIFGSTGQYKPLYKYINNYYDTPIVLYLNNGHFDGVKKEYGLFGQHYCLECEKPYERPSRHLNSCKARCMLCSRVGPRFPCSPLDGFFRECAGCNKAFRNNDCHQHHLTSNFCAQSKRCKECGVIWDTRVHNRDGRKGHKCDERYCQTCNNFHNVERGCYIQQIEPKENDPYRIVAFDLETMQHQAMDPQQPEKREHQPNFIAARVACPDCIENGKWKRATARCQICGPHRTVVFCQRRFMDTQVDKQVVADNPLEPFVNWLVFELPKKCDTYAYSHFGGRFDMVLVFRELFRIGFNPEMLRRGNKMYEMKVQKQKRRNPNIVFRDSFNLMPCSLAALIPSYGLDVEDKPFFPHLANRPENYGREIRPTPNDYLANGMMPGKRRQFDEWYAAHHQEPFMLDEALASYCTNDVEILMAALVAFRREFFEISRRQEYVDGIDDRENHDGIDVL

SEQ ID NO: 158283 - protein, 183 aa, Heterodera glycines
MVQEGAGTSSSTSKTAKDYVRKLDSTIEHVPRFQYSKAKSRFSIEDVPAAANPEGLIAGIFQYSIDAAVADSRERGIHPTHLGCLISSPLLTGGDIPIPIRQITDNTVNTILNQFVKVAQSKKQQNVTLWGEPFTVVVTTVNRPGLPTKRTLKGGARRALAPVHHRINDRSLIKVRYMIKQQF

SEQ ID NO: 158284 - protein, 388 aa, Heterodera glycines
TKSTTAAPVKSTTAPPPTVKATTAPPPTVKATTAPPPTVKATTAPPPAVKTTTAPPPTVKTTTAPPPIVKATTAPPPPKTTTPVTPVVKSPSVKPTISAPPAQLKSTANAPPPASVSAELAPRAPLADSPPRFDEGEEENKTDKLTAAKPSTKTTITAPPAQLKSSATPHQQKQQVPVKPSAPISVPAKPSGSQQRFEGTEQKQQPPPPPTSAALTLADLNLPENTLSVQIDPLSYVPNSVSIQYLENMERFKLVFNEAIVSHVSFSPQLGYVLGFENPQHVVSNELSKYPVDLRGGISSFAVYSKGLTENMIIGNSLSSLLRVVSISGAIPWEYNEKIYDSPIFARVLPREINEIEIELRTMDKGRLVPFAYGTTMVVLIFKKVINF

SEQ ID NO: 158285 - protein, 331 aa, Heterodera glycines
MSDNRKEAEEKMEKAIFISADCWLSVFDLLPPRQLGLGIALVSHRFDFYIDEHFKTRRWALKPMEIKAKFEADGTNGWEIVNFNRKPLPTPQKALPKKVVGFKRISIKYVDQNAIAFLCRFRQLFASCPIKLVIYTGGDRTLEFILRKFWPMIAKNICAIQLYGRIFYRLRQSVPSILNDCPSLRIINSYSGGFFAEFPADDSAMASDGQALDKWLFTPRPDNVPKVLMDDGNLSSRIEALKAAFANASSPVNFIVIWPPRLADSVVPFDQTNELTREQLTLKGTDYCYLLLLVRCPIARDASKWAKWEKEAIDWQFNDQWNRIDIQINNE

SEQ ID NO: 158286 - protein, 182 aa, Heterodera glycines
MSLFAMGLLPSKTTPSPNGTTPSPPTPPNGTTPSPPTPPNGTTPSAPTPSNGMTPSPPTTPNGTTPSPPTPPNGSTPSPPTPPNGTTPSAPTPSNGTTPSPPTPPNGTTPSTPTPSNGTTPSPPTPPNGTTPSPPTPPNGTTPSLPQQPPPVATAPSPSPPVGNVLPLLANGQYAVGCADIM

SEQ ID NO: 158287 - protein, 397 aa, Heterodera glycines
MTKDQLSERRKLIEECGKKRQTDNETEKIDILLITETWTKDGEEIDFCPWVKENYNYIFSSRKSKTSGGGCGILIRKEIGFFTKFSDSKFNSEILVIQLQNLQCIRFVLVYRPPKTTLKQTENLFKFLQKFFNENSVTLGDFNLPNKDLVWKNGHPYSMSKYGEIFCDFFNRFSYVLATNEPTRINSWLDLIFTANEKIITDCTVKGGIFSSDHLTQFFTLITPKTKPKTKIVNFRWFCPSNVLHFNIVIASRLNALSYECFSINQKYSAFNSMLLEILNECIPIKRLTKKDLTPKYPQHLLASIKEKAKLFRQAKTDPSKKALYDSISLHIKIQTNKYHSQIEKKAISKGRNSIYKYIQKFNVNPFEIPNLIYENKCYHNSAEKSELFATIICQFI

SEQ ID NO: 158288 - protein, 111 aa, Heterodera glycines
MAALVEQCLALANILRGYAFLPGHERTLAAHGGLLRLLSALMMLMVDKKQQKRAKPTTKRTAETAAKSGRDNDEIGTDTPVPGDHHQQGIKLNTNCNDTSIATTLEEGVEQ

SEQ ID NO: 158289 - protein, 30 aa, Heterodera glycines
MYETQLFFKFLIYRRCNSRAATDERILIYI

SEQ ID NO: 158290 - protein, 186 aa, Heterodera glycines
SLLQKASSDMLSHYLQSGVFKLDLLSLLPLDALYFFTGPVSAWRFCRLFKLHSFWEFFDLLDSAFSNPYAVRIAKTFCYMIYIIHCNSCVYYVLSAWQAFGQIPYFYKGKWYLNKWQIPYFYKGKWYLNKWVYNNEGNAYIRCFYFTAAVATSTGNNPMPTNVKVATSTGNNPMPTNVKEKLGFWC

SEQ ID NO: 158291 - protein, 258 aa, Heterodera glycines
MDKLATTLEEADKKWQLFNLSKEFFADGELSAFQRTIETVKNWFEGAKKEAEQLKDNQDATFSTDDLKTKTNSIIGEVRFLTSKYYAAALKQREEAEAAAKKAKEEAEAEAKKAEAEAKEAEAEAVEKKEEEGEVKKEEVEAKKEADEDKKEAEEVKKEEAAEVKKEAEEDKKEAEEVKKEEAAEVKKEAEEDKKEAEEVKKEEAAEVKKEAEEDKKEAEEVKKEEAAEVKKEAEEDKKEVEQDKKEAEKDEAVKSEL

SEQ ID NO: 158292 - protein, 374 aa, Heterodera glycines
MGQSSSESKRSDDKTEQQNFNEMAALSSPKASNGMPISDFCYEIFGDDQFNNLTSYLDEIDGFESNLFDGLLQENDEQFPITDFKITEKQFSGSNQTLAEQYDEANTSRTVSEQLQQGENIENTQEKSIGSDQGTNSNSENFQGPIPDHNIVVVQSPKQHEYTVLHQEREKEIKIDTVSVQPKRKSPNKGASKKIKENRKKAFDDSQTKPTQKVKPNAEKQHQKIKQVLSVTKGVQKSTSAMANHGQKLKKSNSFSKMLNNENVEHVLTRPIPGSSHTANYQRQSNASSPINIQTAHMTVSSPANPTQIQTGTSNSPDLGWKTQKSLPKLNMTKVAKLLDINQNSPQYSNSPTTVLNPATVPNSPLMSSQPRTP

SEQ ID NO: 158293 - protein, 390 aa, Heterodera glycines
MRQTENDNIVNADNNTSDRLQSQHSVSDYLKNSPSYPNLETTVASTSQSVSSTNNNYAEAGHYNSISPTVDATVKSMPPPQFSNPFASKSQNMNATDQLLAINKAARNLWTSQQNSTTNVTISGLRLPQLPITDANVRQLNSQPNNATVYMPPQQLSNPIASTSQNLSATDHLLAINEAARNYLRSQQNPTTNVTVSGLRPSQFAVADTNVKQLNSQPNNATVSGLTTEQMATADAAVKRLNSQPNTVSNATVSDLTPEQWALVEASVKRLTSKHADDANIATVKGQTPTRVATVIDNTVHSSQIQSATNAGRDAQPINSPQNNVLTRQSSLEFINEQSFITAANKTAAKGTYLRKSHSTTVPHSIFTVPPVPQFGKEQFPNCCFSGIIF

SEQ ID NO: 158294 - protein, 152 aa, Heterodera glycines
MPRYVEKIAKRADFKKRPSTPPQYITGKSTPIGNNPAEAQIQNQIIEPLNTVPTTIIPSLAVGGKVGETSDNLKIEQLSIGLELAKLALNATIPPLIIGTTATHVNDYKQILKMNFACLMLNKSELDIDQLYQNAINSNFSRKCKKFKVFFE

SEQ ID NO: 158295 - protein, 31 aa, Heterodera glycines
MSKIKSLGSSSGYLFLFLRSDLLKFLHHHLI

SEQ ID NO: 158296 - protein, 25 aa, Heterodera glycines
MSNRCAHNVAFVQCILPHREYLFSK

SEQ ID NO: 158297 - protein, 102 aa, Heterodera glycines
MGHRCNQCSACPVRMGCAWKRQFQCRVSHPTNDVPIYFRCIVFLQLRKVMAKAVKNIRRIFRICRTGLVFSKTTGFRIQSLKIRSIYVIRSIPIFQISGSRT

SEQ ID NO: 158298 - protein, 87 aa, Heterodera glycines
MIGRADIEGTKSDVANDAWPPQASYPCAPTEVHTLTSIHAAEALHKQLSPLVHAPSPKEQHAATGKSRLFHATARLTRPLEPILFPK

SEQ ID NO: 158299 - protein, 166 aa, Heterodera glycines
VQGFEVVKTGFMAALPPLGQAVMKECAGLINDRIPARIMSETVKTKLFNSIAFMSMSAVIVAVSFVPSGYGNLALFLLTFSAFTLGFNIGGFYKSALPFPIPSSFRLTVPVIVNPLTINNTREEWALAFYVNAAIIVACNIFYVCFAKAELQPWATIQVQMNGTEF

SEQ ID NO: 158300 - protein, 227 aa, Heterodera glycines
MNSGVSPTPFLSLRCVCSVLVLLICAFDVSLAAKDKEKNGKEEPGGQFNTLSIILLIPLVIVTGAFVYLLFMKPKSEGTGDDDGEGEGDADVEKGPTEETKTEPRIESPATLLGVTVPLEQDEEEQKKDDEGGDQTAEKKEEDAAAADEQPKEGAAEAAEAEKSATKEETTEDTEETTETTEGSTTETSDSGSGSSSASGSDSEGSSGTSDATSEATEDASSSSEGS

SEQ ID NO: 158301 - protein, 169 aa, Heterodera glycines
MVTDSKEDIVFFARVCKKARRYDDMTEAMKKMIQADANLNSEERELLGTAYKGGGRVPDEDGVRTAHHLPRYFAVMDLSKHAYQDGLEIATKEMKPSNPTRLGLAHNFAVFHFEVLKLPAEARQLAQKALDEAMAEIGTNEVAGETDADLQLIREVLNAWKLLDFAADA

SEQ ID NO: 158302 - protein, 31 aa, Heterodera glycines; identical to SEQ ID NO: 129513

SEQ ID NO: 158303 - protein, 200 aa, Heterodera glycines
MLSTRFAVFVFIFALLILEIDGCYRRRKKDKDSNESGEKKHAKKEDKESNKSGKRGPRGPPGRPGKNHEGKEGPPGKPGKPGQPGEPGQHHESKQGPPGKPGQPGKPGQPGKPGQPGQHQHHEGHQGLPGAPGEPGAPGEPGQHHESKQGPPGKPGQPGKPGQPGKPGQPGQHQHHEGHQGLPGAPGEPGAPGLPGTHGN

SEQ ID NO: 158304 - protein, 26 aa, Heterodera glycines
MEIYACFRFYNIVFRRMEVYAFFFNF

SEQ ID NO: 158305 - protein, 98 aa, Heterodera glycines
MKNEFKQNRKYSQKEWEKNYAEICKKIGVGYVTIKKWKKHFGFRYMRITEKEKMEKIKIYWQMKRKNPKMTDKEIAKTLKIHQNSLRKWKKQFGREEK

SEQ ID NO: 158306 - protein, 38 aa, Heterodera glycines
LLKIFFSNFHDFSMNFQHFYNFFCHSFFVFLFLFVKTF

SEQ ID NO: 158307 - protein, 45 aa, Heterodera glycines
MPLYGLSGAAVIEGPENPSVKDNPLAMDNPSWIILALYFNQWTFS

SEQ ID NO: 158308 - protein, 446 aa, Heterodera glycines
MESTSKFNHATLDLTSESFINVLRRFISRRGKPDIIWTDNATTFKLAQKTLELLSAPGPDQEVQNFLTQNRIKWSFIAQISPWAGGFYERLVKLVKDCFKRTLGRRILSFDQLNTFVAEVEATLNYRPITAVSDAVDGPVPLRPINLLQPEIHINWETTTDPIDSEEMFSSTHKRLASRIKALREANDIFWAKWHSEYLTLLRERAQWDHKGPRLQNFGEPKKGMVVLISQDLVPRNQWPMGRIVETHGRPGAIRSVKVEIPVRGTNNRKPKDMPRKTVLTRPVNRIFPLEAGPEMTDPGTEAVAATEQPNENHPKLAREPGHQMVTRRKAKLLEMLPVVAMTLLTLALPFASGFPIGKCDECGLTCYTKGIVVTVPPEIQKFEICCAESCIVRQGIKALNFELPIEVLLNNHHCEARLFLPFSKCFTAYSNFLANFGIILVPFFC

SEQ ID NO: 158309 - protein, 122 aa, Heterodera glycines
MAMADVKPNHTLYINNLNEKVKKEELKKALYAIFSQFGQIIDILAFKHLKMRGQSHVIFKEINSAATALRSMQGFPFYDKPMRIQFSREDSDVISKAKGTFVERLRISYYNFFFQKNPCKEP

SEQ ID NO: 158310 - protein, 72 aa, Heterodera glycines
NDGGVQDEAIVEGQQLVDLGNIDELLAGIRHTLVNLRDSANAEIDRIDGRLQGGYAASGVFVGIREYGIPFY

SEQ ID NO: 158311 - protein, 52 aa, Heterodera glycines; identical to SEQ ID NO: 148524

SEQ ID NO: 158312 - protein, 43 aa, Heterodera glycines
NYTSIETPRAIELYQELLIWLKMDQVMNLYVLHFFVFLPHGGF

SEQ ID NO: 158313 - protein, 200 aa, Heterodera glycines
GDDAVTYCVLTGNGRVEARLSVNPANTKNNVPAPAFRQHSNNGPGKDLARPNLHKAYYLFLAKGPAEEPHTIGIHSLDSDDHAVFPHISARPIVPLDASSLTKQPKQQQQQQPAPPQNHGHGGGLTLIDVHGIMMVIAWLCLTSVALYSARFMRSAWPHTTIMGLKIWFHIHRTLNFLSVIVMVVSVLLVVLFKGRWTAH

SEQ ID NO: 158314 - protein, 99 aa, Heterodera glycines
MADDDGLDSSGHSCASAGFTPKVQHGGGGGTVGTAAAAAQASASSTGVAPVHRLTITDLKAPWTIENRRDNCLVIAKGVQKAHIGFSSSTCMSLLAYIV

SEQ ID NO: 158315 - protein, 125 aa, Heterodera glycines
MLLAKPQPNSNSNQLNIRIFRALFFIISVNVGGYFLKLIHITMIIPLLNNDIIEIWNQNQIFGILLNISCISNAPILFWTSSEYRQAFVKECRRSEINSNCFIRHKFCTTLLMSFHTDAKVRKNF

SEQ ID NO: 158316 - protein, 117 aa, Heterodera glycines
MDYKMIMMSCFFHYAPPNSNSNQLNIRIFRALFFIISVNVGGYFLKFIRITMIIPLLNNDIIEIWNQNQIFGILLNISCISNAPILYWTSSEYRQAFVKEGQKIRNLLFSTNSVQPF

SEQ ID NO: 158317 - protein, 33 aa, Heterodera glycines
MPSAIHSLPNKKPFLATLCALGLVRMPHHWLFN

SEQ ID NO: 158318 - protein, 74 aa, Heterodera glycines
MLSSSEAPHSSAAASSSTEKNISKEKNIQIKLFQKLSNRLAVSKGQCAICLGDLVDLEANTTVKQLPSCNVNKL

SEQ ID NO: 158319 - protein, 78 aa, Heterodera glycines
MAKHLILGFLNRIYCPNVRLRLKVRRNTDKNRVPDRARIPRLFQDLASVPRPDFLKSNTRYPPELVGPSPTGSKNTLL

SEQ ID NO: 158320 - protein, 257 aa, Heterodera glycines
MVDVDDLEVKFEALKLKVNDLEDKLANKPATNLPAGVKTPKYDATGDLFKFLREFNLMATASNWHATDCVRMFPLFLEGEAKELFLNIPPDKKKTWRDLTNAMADQTKKIDGPMWAKKLLARAKMGHESITEYANKIRELVEQASPDPNYTSEARECESVHYFLNGLPTFLKRKIFFMKKPKTLVEAISMAKEVNQAREELANDEKGDEIKQQINEIREQISVISSQNNGNNENQREFVNRSWRNILKRKFLDRGEK

SEQ ID NO: 158321 - protein, 862 aa, Heterodera glycines
MKICGLRIIPKKSNMFGQEKNVQQQVNNFIEKGHGGILDFYLITSFGHKMNPYRGWEEMNSQTFIWEIPEPTDTYWATHFPVGNFLAEITDDAIVIESEQSVFYFEKEHPEEREGIIGIPDDAFKMTNDAFITIQVKQKAKREAKQKIEPKKKERPVKQEVVFFKFRQNKGNESVVNPTIQITREPNISQEEIKKERENAKEIISEIPTMPKPDQPKETKIAVAPTNFPITTTVRNVLTEQTKITTSTTPKTKMAAVTKAPKTVPNSKVENQPFSKGWIKLKQTEQKYMIKGVNFGKIDTTIIPVTKTAKNMENTTATTAKTPLMSFTTIKPKKEKTPKNISNSVFENEKSKQGNKTKTQTKGTKEEKHPKMVKIGKELDGKTMPEEEKVPKIVTNQKPKEKGVTKNITTTQTPKMTTIKTISTTTPKPKVEEIKAKKALPNQNTTLSTISVTNFSKNSEKELIKTETIEIKNESGEKDLQFRKLSEGDEKESDDVIFEKVKDNLENENESDEYENMENSAEIENEYELDRGENQFEFMEIERNKRTTITTPDAKWLSKLKKSEKRIKSGQENKNLNTRVNYALYRLNEDRKKQYENIFLQACENTKFQLQLAKAILQINPNEGVRKIFDRDDLVARWVGENLEVGFCVPITPEKIFWSKKIGNECYEWTPILAENTTFFVKPGSRELSILGKKVGCAEMEEYVMKNDTQKEAITKISTNFEKIRPKYRNIQNPLVLKAGTLYESETKRIETAMLEYRARMNTLPSATLRIIQKPNISEVIKVIKEEASETMEIVMGKTGNWFEMVKNIPEKAEEAVNYLKGASFLLILIPILILLALIAYVMVKYRLIIFAGFRAGRFLTE

SEQ ID NO: 158322 - protein, 472 aa, Heterodera glycines
FWKIQDLQDNPAGSCPVKILNSNPAHGESILGSKYNEKPRLSNLEMFKEELKQMQAMRDERMQAMRDERKGLRQHLKERLNMPEEELTESHHLDQPYGPSISDPYGEDDPNTTNLYVCNLPADAKLEDFFDTFAKLEDFFDTFGTFGPLASARILYPRPEDERRYRETLSGFVAFMSRTDAERSKCAMHSRTDAERSKCAMHQETIRNCELRVSWARSVNMPPLPFFVPLPLRELAMPDPPSGLPFPLPFFVPLPLRELAMPDPPSGLPFNARPVTEELRSFLQNYGDLPKLGVPLTEEEGEMIENATVRVVIPTERPLLTLIHRVVEFLVRSGPPLLTLIHRVVEFLVRSGPLFEAILMARERQNPMYRFLFFLFDNHHPTHVYYRWRLYTILQGDDRQKWRLEKFKMFEGGSWWQPPPHALFEQGMPPQLYGGAYVPKRRQPPPHALFEQGMPPQLYGGAYVPKRRRDKP

SEQ ID NO: 158323 - protein, 26 aa, Heterodera glycines
LFKLKLCTISATKNIPILYRSNTFGN

SEQ ID NO: 158324 - protein, 97 aa, Heterodera glycines
MILFISADCWLCVFDLLTPSQLGHGIAMISHRFDIYVDEHFKTRKWALKFIQIHSKIGKNGTKEMDIVNYGGKALPIPQNPLPKESRRISTDQHLFH

SEQ ID NO: 158325 - protein, 105 aa, Heterodera glycines
MLKVNGPSFNVHIIPLSREAMAISDIENPYAPQKLYSLAKNVALDSLCHFRDEETNRCILNYFETFEEKQSAVVGFLSKWPRNSNFAAGLTEKCHFNTFLQEITH

SEQ ID NO: 158326 - protein, 131 aa, Heterodera glycines
MPFFQILLELCAALASVPALLPKIVLPQDAHGKSIAKQLIPQFRNNLNNYPTLMSGISEADLSFMDFIRKVNDYSEVIIRLARQFERQIPAEKRVKTSHSHRYFTRIGADRVRRLRNASATVPSSTGPSSA

SEQ ID NO: 158327 - protein, 115 aa, Heterodera glycines
CPRSFGRAIGKFLDFVMGSAHSSANPSSSVSSCSSPTNFREKHTPDSLEDKIELIFELLEKKPTRLGYSIQWAVQLLANATEEEKLEMLRCRVLSRICALITRYSNVEVAAPPGT

SEQ ID NO: 158328 - protein, 140 aa, Heterodera glycines
MGKRKNKICESIGKGTSVVSPAQWCQKCRPFPQIFCTCTSGQALRFLLKRWFCPDLVVMDEASQMVECASEAFCAVLHLHALNLFGGLDLSKIGCITPYSAQAEKIQKLMAMGRDEGPRFEVSSVDALPGQQREAIVMSL

SEQ ID NO: 158329 - protein, 68 aa, Heterodera glycines
MEKYGNMDINREIWKNMDMESHPRSFKPSLKHVFRPRKTILVYINSLRIEYLGKCLLVPIFRNLGKNL

SEQ ID NO: 158330 - protein, 29 aa, Heterodera glycines
SCSWRVRIALHLKGIEFDQRIVNLLNGDQ

SEQ ID NO: 158331 - protein, 129 aa, Heterodera glycines
MPNEWEEQRMCGRLLIQALKMVCNHQYAQPNRDNFYETTGVLLRVRRSSASRAYVVKRQRSPTDDGAAPMAAPHGAMGRNRRGIIWECCTNKCSLNYIRNNYCAAPPHQSEQTEENAAFQLEDERRRRK

SEQ ID NO: 158332 - protein, 47 aa, Heterodera glycines
MLKANGDECAICLDAYQEGQMIRQIPPCQRTNAKLNSEFCAMKMCDF

SEQ ID NO: 158333 - protein, 44 aa, Heterodera glycines
MAREQLGGCGVGSICINLPGSFKCDCLPGYQRVDERNCVDLIRI

SEQ ID NO: 158334 - protein, 72 aa, Heterodera glycines
MASRQTFGVRVTNFTLAVGTMVDIHTDGATMVGQCLLLGTVQRGTERGISNSLFFISLNEFCQFSFSATGMI

SEQ ID NO: 158335 - protein, 84 aa, Heterodera glycines
MASFLSILPFLVVSAQFGRGNFLLDHLKSAKLTELFMARNLSLEFDFRQSNFTQFDLFNLKDGDQNLLFRIESSTITTPNEVPN

SEQ ID NO: 158336 - protein, 238 aa, Heterodera glycines
MAILLPFEYFVVQKVYTFAHKVPLENLCQGNNQCILNYFESFTQKENELSKIIDRWFNANEFAYFTEKDNFFLSAILKELVNEFKISENNGNRIGGDYANLLGIFSKAFIEENNPLMNIVKLRLAEEQMIDIISEMCQTIKKIPNSKQFLIEQFNILELKNFCDKWAPVHQKMLHFSEPKIANNALGHWLRQNVNDGKELADEERQIVNFWMTVLSSKMHYLCSKWMPNDIIMLTNIG

SEQ ID NO: 158337 - protein, 44 aa, Heterodera glycines
KRARSARLEAAKRPNVLNKIKKRARSARPEAAKRPNVSTKLKNG

SEQ ID NO: 158338 - protein, 150 aa, Heterodera glycines
RWNNISLTPIGVTFPPAPVLNSDFVFDGSNIALTREPLTIDFNCKSRQEAIDFNCSLGVQACTDCIPDHSSGLVNCNCRSHNLEKLMESPERRLPLNIKNYQLRNTGRKVIALTGFSPVQLNLQIEGLQIALELHQSLCTILPLNISGCY

SEQ ID NO: 158339 - protein, 151 aa, Heterodera glycines
MLGHLAANSNIPMLVWGQSMSSNNNSNTLDGRNADAEVIGRLALWWHYDITLSALSNQNYYGFFKRVIDRTGDWPFYCDESNCSKVINASIYSLLLYDAIYNYGMALNESFRQFGIRPEVYRNGTLLARNNRKPFMGKKCKRKPNFESICL

SEQ ID NO: 158340 - protein, 138 aa, Heterodera glycines
MSSNLFRSVEPMEMTDPIISNESPPMARVGQYRGMQRKMTKFIILTVVNITVTVGLLGFITIENGRTNAELEILKNSVGKLEQHGKELLKAVHPDIRKNIAENFSNPKQNCWDANAIHNDLEIFGSESLKVHYKGDGS

SEQ ID NO: 158341 - protein, 116 aa, Heterodera glycines
SRAVFGACGVACALMALGLFLIRSRTRRSGAGLVGAGFKKQQHHQAIPSSSMMSSSRRHWKESSQFGKGAKIGDAFENWVLRKFGHFGSPFVRYSLAWNSLGPSEHFDILLSSRLD

SEQ ID NO: 158342 - protein, 111 aa, Heterodera glycines
MGEKPVSSIWRASPATTEEQKLLQDLFQKEKPIKNVPWEEKPFPTVWTEEKPLLSEEKLTYDNGRRLRDVGGLVKPSPAGAGWQQRRRLYGWRPSAHFGAAAENGQIRRRF

SEQ ID NO: 158343 - protein, 130 aa, Heterodera glycines
MMAFKCHFVLSLLLFFCASSFLVYGGGKDASSGSNNSEKKSLADLMVEERLADRDGKPLNELLKFDKIDKKELDAFLKENGELLDISFDDYNPQNVQLGDHDQVSVLFSPPSAASPAEVGSECHPIFVPF

SEQ ID NO: 158344 - protein, 92 aa, Heterodera glycines
MPSSAPEIPPVQCFHHIEFFVSNAKQTLQENGLELLAPKQMTTDQNGCLFVAKIAGSAGSIAHTLIQNIDYRGLFMPGFRPIADFSLTSTLL

SEQ ID NO: 158345 - protein, 65 aa, Heterodera glycines
RWANHRSELVQWRKWGQWDEEKRKRSERRGGKGGATANDCLEKHSRLETAQRHKPIKELINELIN

SEQ ID NO: 158346 - protein, 66 aa, Heterodera glycines
MYSFFDLGKKNFGYLVSAVSFLVFYKVSSNIKLKKAIEAGEKCANYESELRFCKIIDFIYDFSSST

SEQ ID NO: 158347 - protein, 22 aa, Heterodera glycines
MPLTIEEYQIGQLFSVAEASRQ

SEQ ID NO: 158348 - protein, 148 aa, Heterodera glycines
MSLQYVGIAAVILGTAIALFQTVSLSTRRQIAAQNGRSSGSKRQSKSPSSAKTLAHKIAATVIAEKSLSSIPDKEILQLMDIGFQLLDEVLLRHPHRTAAAQAPTAAVPFAVPRRLRGPRRVQSGSHCAARLAEDPLLGQDHSAAWEP

SEQ ID NO: 158349 - protein, 37 aa, Heterodera glycines
MARAKVTPTLCLLLHFVPLLTALQQQCSSENIASSCR

SEQ ID NO: 158350 - protein, 273 aa, Heterodera glycines
MSLQYVGIAAVILGTAIALFQTVSLSTRRQIAAQNGRSSGSKRQSKSPSSAKTLAHKIAATVIAEKSLSSIPDNEILQLMDTGFQLLDERCNKLFTKLPLCAIISKTFLCMHGGLPRPEGWDFLMGDDFHKPKTDLEIDENNTFCDLLWADPTNNAQELRLSKDFEPDKGFLGEYGNYRFNQDRETSIQFNDRFAQEFFNRFPHIRGIFRAHENQPKGHSINEARTICTVFSSPRYMEDTDCGSVLRLSADMKHIHFVTLKPKATGEKLSQEE

SEQ ID NO: 158351 - protein, 38 aa, Heterodera glycines
MTAMSVQGKGQNGKQKNGNAKKITFQMDKKSDSANKKN

SEQ ID NO: 158352 - protein, 47 aa, Heterodera glycines
MVTFMETEGAVLNLDKDSNSLWSRTHVGRHCYRMQPICMEEETESPV

SEQ ID NO: 158353 - protein, 676 aa, Heterodera glycines
MLEDAQKNGTNISLKKIEEELRAIQLVKESALSLVNPPIATNAINTRPRQWTDPAQRQSGSNQRQHHNANSNGKQTRGRPTLPCASCGKSDHWRSDCSFKDAICLKCNKKGHISTVCRQNKTKAPPNSHRSFHTVKVDTHCLHVGTTQGRWWKLIILINGRQTSMNGDTGAQATIISLQTWRELGEPNLTPSDIDAKNCNDQPLALLGKFQCTVQFADKPPQTLIAYVSGEVGHNLLGLPWIEALEIIPRQILFPTSKLAQATKMIENFSTVKPPNKSISDVTTLTTALQKDFPEVFEDGLGHCSKAKAHLILRSDAKPIFCRARPIPHGAMEAVNAELDRLLQIGAIKPIDFSHWAAPILAVKKKNGKTRVCIDFSTGLNNALELNWHPLPRPDDIYASLNGAKFFSNLDLRDAYLQMEMDDKSKQLCAINTHRGLFQCQRLPFGVKSAPAIFQHLMDQICAGIPGVFAYLDDGLIATKTLEQHITALYTLFGRIKEYGLRIQLDKCKFLQPELLFLGHIVSANGIRPDPSRSDAIRKMPAPIDKSTLRSFLGALNYYGRFVKCMRELRAPLDRLLQKNVAWNWTSEQQNAFEKAKEMMTSDLLLTHYDPARPIVVSADASKDGIGATLSHTFPDKKEKVVEHAACTLTAAQQNYSQIEKEALAIVFAVQKFYRM

SEQ ID NO: 158354 - protein, 250 aa, Heterodera glycines
MNVTDLNSTNFTVWRCVVVDCIGTKTVNEMIEMTFRITEDYEPQTDDEEIMVKVLKQCHEYFLKERFMVNFKEIMDNFVGVIVRIGFTNVHKFLESEFETKPNDFWDSIKKGIDEISSCFESDVKSEIWEPVNEKSGKQKMKQLSSSSSSSSWYEKQNQQEFLALEKHDILKEKPLRGELMLQAERVSAALLYTLIHMKMRLLFDRKQVKKGINISKTNISKTSAKVKSKMRKQLKRLQKTVVERINSVP

SEQ ID NO: 158355 - protein, 95 aa, Heterodera glycines
LAAILLAKKSFWLFSALSAGSPCAPFVSSVGCKFQEFPVVAVYLHSLASSLAFSVQMYTKSLNDSMGYSAERNAPNSPKNIGTTATERRHGHWKS

SEQ ID NO: 158356 - protein, 23 aa, Heterodera glycines
MSGQGNGGKGRGKRGAKGYRKGN

SEQ ID NO: 158357 - protein, 169 aa, Heterodera glycines
MVIIWTICVVSTISAGQALYKWLHTPRKDGQPKRLRCAYFFRQTDFDWVNNFKEQFLRANAISSVSYEIHFSFLVPSMPMVPFELVNESTKEKLTFAKANEWDIDWIMKRCKIDETSSVQQQKKDENWDNVFIWLFAGTNCIGPLSPPPPAEEDEAGQSITKGTSSADK

SEQ ID NO: 158358 - protein, 258 aa, Heterodera glycines
MPIFLLLLLIPFSHYFQSISRFICADCWLLVFDFLAPSQLGLGIALISRRFDVYVDEHFKTRKWKLGKMRICHKIGENGTKKMQIVNSDGNPLPILQNPLSNKVIGFRYIQINYIDQNVIAFLRRFHHFFAICSTDLYITTGNDRILEFILLNIWPMLRHSMHLMMFLNTIAFRRLRQLAPSLLNDCPSLHYVSFGDVILPEFPPDESANASDGQAVTKWLFTPRPDGLPKWLRYSVNSPVNQWSSTMEQFKAVIIPI

SEQ ID NO: 158359 - protein, 259 aa, Heterodera glycines
MLYIDKSMPVLIGVKAMRQLNALFGHFTTSWPNTFRRLSPTSMNFWMLLIFATTRQCMLQQKLVVAIRHAWHAAADEYAKAQRKMKEQYDRKARPQQITIGDRVLIRNYDGRVGTSKKFQLPWRGIFRVIKIEGIYVTVISCTSPNSNPKRLHLNQIKKCFEILGPPCTMPTQPIEEEKCLENTENADKAISKGSEIQNEMDPESREGENLEQIHPRGPETRPELEADEEKNEHKKTDTEPRKYDLRKRTRTWKDLVNY

SEQ ID NO: 158360 - protein, 100 aa, Heterodera glycines
TNGIRITRQRSSARINWLTELTTRDSTPVTTTQTSKDFSEISKHLALVEDEDNIKRIQAKREKEAHERALAFVKNQLLNSRKDDWLHQPIEELLGYAPKY

SEQ ID NO: 158361 - protein, 99 aa, Heterodera glycines
PKEAKFLSFLEQFTLCTMFRIFVRFVGTYPIAFLIFSLILASLSGKAKVAGIARDWTWTQENPDLDPVGIEGPSSGRVHADHVHVTLQNGRTQRISWLI

SEQ ID NO: 158362 - protein, 43 aa, Heterodera glycines
KTAKFLSFLEQFTLCTMFRIFVRFVGTYPIAFLIFSLILASLS

SEQ ID NO: 158363 - protein, 62 aa, Heterodera glycines
MQLMMTQAAVLLIIPCTAELIPFIQQPVDCRCWHLSFWLAGEFRDGECSASWHVIHHQACVK

SEQ ID NO: 158364 - protein, 104 aa, Heterodera glycines
FSASFTADVLMSQIWHDRRLRYSHMSNCHQNLTLSSAIVDRLWQPFVCFVNSKKSELHISPSANTFVLIYPNGTVWMNFRLRVEGKLIIFLIYEIKNFKFELIL

SEQ ID NO: 158365 - protein, 127 aa, Heterodera glycines
MTVVVFFLFLLAPICEIALADNKGNALHLNNHPKDVKTNTKKAPPKNSIKTNGISQKAPLHENANVLTGRNEKHHKDKKLPVHKNGNALPKNNDSSEFEDDLLSQALTHLRKMNEQLKNRNWPQNSE

SEQ ID NO: 158366 - protein, 90 aa, Heterodera glycines
MQFSVTLAIFGIFSSLSFLANCRHLPNQNLNLPLPWKSLLLPQFMIRKIEREQMATILDAEQQIKHANIIDKGQSAEIEKVPSSAKDILS

SEQ ID NO: 158367 - protein, 422 aa, Heterodera glycines
MALNPTIDQLVKMLADQQKMVQDQSQQIAQLIAIGQNAPNAAAQPNQGANSVPILPDISPFEPTDDKSRISEWIERFKFALDCTAPTADDEVKVKCLMNKLSESAFSEYSRSVLPSSVTDFSFKVTTEKLEKLFAKAQSIFIDRYECLKAVRGEGEQFRQFINRHRKLLTDFKFDELTKEQFNCLMLLMALKAPNEAALRQRILTKLSADGANISYDGVVEDLISFQSTISEAKAIEATSSSRPVNSIRQNSKPNNSTNKYVKESPKPNNLPNKFKERTNTEATTICWRCGFGVHRPDECRYKTSKCRKCEFVGHLDKQCERVQEWRKRQNAKKKGNNRVGHLRIGMTTHAVNSISLLKTAVLFNMKPVEFHLDTGSDIVVIDQLTHEYVGRHRSKNATKLARLSTAQKFPLLEKDSVHSNL

SEQ ID NO: 158368 - protein, 20 aa, Heterodera glycines
MLLLLLLNLLLLLNLLLLLL

SEQ ID NO: 158369 - protein, 130 aa, Heterodera glycines
MLLEMSMRMGSKVIYFSLNKDMRAQLIRAIADCLNWACCVGDAAGLSRFGGIHSSIYGRASRRTQPGAESSSGGSVLLHKSSYGAGCMTEANRWRMNAWQARHGRHGMAYKIGAGWLSASRRFGSGTFCD

SEQ ID NO: 158370 - protein, 122 aa, Heterodera glycines
MRISTGASVPSTPNPTTSDQNSPGPTEKRVGGVGTVLGMSKRISLPENLEFQPQMLLNLKQSIHVEKQLTSNSDTSDSASEMSVFEKPVLKASRLQHYQHQQQQKRKAARLQLLRQQAKSLN

SEQ ID NO: 158371 - protein, 222 aa, Heterodera glycines
MEFKIVLLFLLMLKNLNTIYAGGIKEEKNFDEIFGQRWDEKEEENGEIETDQNGINGQTNDQNGPTNIENFVQRLFVEESNQIFDENLEMKDEKSEEMSTNCDQLEQMTENSGQIYDQIPILNDKQKREIVEKFHKIKEKIKQMGKKFTRKEWHKIERKIAKKLGANQMKIYKWKREFGLIIKDSYSDDEKLKILNQFDQIYGKLKMKLNGKLHKKVQNAKK

SEQ ID NO: 158372 - protein, 154 aa, Heterodera glycines
MELRWENANDSLVDAYQKFNGETLYSLSSAASVRLKLKELQEQIIRLSNSIEVWSSSPSQQNNNGSPAETVGEAPSLRQMQLQKNIKMLALHTLHDVVSVGPDLPSVEQYEQKKLDNQQRAMVAMRRHSGAVMAPTNNQQQQHGTPTADHDDLL

SEQ ID NO: 158373 - protein, 91 aa, Heterodera glycines
MALVAFASEMRISLTLWATFAFMIANVLEHLIRARADQFRFGSDASTGRAVNDRISQSSLQKVDNKKLGQFDGKKGQRDGQMNKQREKDRK

SEQ ID NO: 158374 - protein, 166 aa, Heterodera glycines
TNLVPYPRIHFPLATYAPIIATDRAFHEKSSVAEITNQCFEPGNQMVKCDPRNGKFMACCLLFRGDVVPKDVNSAIAAIKAKRTIEFVDWCPTGFKVGINYQPPTVVPGGDLAKMQRVIGEIGLFMYVGEGMEEGEFTEAREDLAALEKDYEEVGVDTYVEDEEEY

SEQ ID NO: 158375 - protein, 81 aa, Heterodera glycines
MVPPLIIRKYGIYLNQIVTVYLMCRKSLSLVRSNFSKGHHKYRNLFSDWQENFKGDEANSDGIRMLAFFCARFVSAFPAGE

SEQ ID NO: 158376 - protein, 72 aa, Heterodera glycines
MIWNGQQMRTNEQQLGKNEQQLETNGQQLGTNGQQLRKNGQQLRTNGQQLGDKWTRVDPPPPLPRGHIFGNE

SEQ ID NO: 158377 - protein, 215 aa, Heterodera glycines
CVNNFVLGVTNPFFLKAFAHWPHILKIGQHCNNKNNPQQRHNDSASRAGPPETTPKETIAAKGNGREAAASFFNGRWEVGRVLRNAKTIKRLSGHAQLDNQAMGGFLSTHRQFLSDDKLLAQKLLKRSGDSALKRHTLERHFMELTQSFINPLERCGVEIVDLVLKFRDHLAELEMKHRGSEQRENWSFSSTPMKQQRVLIRQRAQLQQQLNCLL

SEQ ID NO: 158378 - protein, 140 aa, Heterodera glycines
MGHQRERRAAKDNGDALRLLSLDGGGIRGLVLIQILLEIERLVDGGDTQKKGQRKKDNFVQRHFDWVAGTSTGAILALALADGTSLIDCLRLYLRLKDDVFGPEAKASRFGGYKPECLEKFLQDHFGKQRKMSDIRCGKM

SEQ ID NO: 158379 - protein, 64 aa, Heterodera glycines
MFHSLMVELGYSLFVNQNLTADGMIKVVQRFAEYSKHHAAADSCVVLIASHDLYDHVYGKDMAL

SEQ ID NO: 158380 - protein, 60 aa, Heterodera glycines
MILTSSYRFHKIFSKKNYFMKNQILLLLPLMKRRQVMRMKALTPRCKRTSVSSSPASSES

SEQ ID NO: 158381 - protein, 288 aa, Heterodera glycines
MECCNLGPEVLDEICSMMDLRTSDVPSCLRSSAQWAQFASDGEWSRQKGTAGGCRNFPTFANNPQFGTTISFSISPNNGTEDDGKCTVICAVLQKYRRELRAVGLDELAIGFAIYATDEGTEEGQKHQQQQKHTAQVSHVQRQNAEAPASGRSLSVGFGHLVYWSLDDLVPLGDLDSFGQLINCLRGFGPGYGQPNSYGSAYVQQQQHHVQQQLQPLVPNYYQSLPQMQCQKGNILYGQTYETHLPKQQNCQYQTNPKRIGQQFLEGAKSVAKSASFINLREVIRKKE

SEQ ID NO: 158382 - protein, 144 aa, Heterodera glycines
MAGDNQKLTEQTLQQRDEDGGGKETGRGGFGQTYQRYDRSVPNRADSTSQANKHPKPIELHAPICAQCESAKSATGGEGKADFVERMSTVRWHLLKTLTDTLKEVEKCQKGGQSRGFDQTREVIRCSTSLAVTLVQFTQLIHGL

SEQ ID NO: 158383 - protein, 263 aa, Heterodera glycines
MKRQERNQFIFINYFTCLNQKINKQLNGKSHLINGQSNVCRLERHISICALRIAHSMHCNSEDGVGRPEQGLGCQCVSLQSGHLNQRICVNIVSSFTDNCRDRTTAWQQTKAIGDSATSVDDRNAKTTLPLDGGLNEEVQSQKQKENALPELSSEGTLGGLVVFSRVCVQHFLSTADDNANETASAGVIQQEFETVRRTFDPTLNWVNFGQFDCPFAAFVSVNMPNPMPISRRNGNQNWPFNVRMFDFNPGKSCPNPVAEVQR

SEQ ID NO: 158384 - protein, 41 aa, Heterodera glycines
RGDDSSEEKHRGSKYQQPQQNAQSVAVAIAVAGGATGNAAG

SEQ ID NO: 158385 - protein, 62 aa, Heterodera glycines
ALLRGNALCRMGMGRGRKRRRCRLLLLGVLQMGQVQVVVPMVGNSKQNLGVNAAPLDRFLHR

SEQ ID NO: 158386 - protein, 87 aa, Heterodera glycines
MSVKDGEIGAFASTQMDDPSNWDGKEWGGRRNLGESPKKKGRRPKKEGEGMYTKGQKGDKKGQKDDKKGQKGDRKGQTGQNIQKDKG

SEQ ID NO: 158387 - protein, 157 aa, Heterodera glycines
MDLVTFRRALKVRPKGKAAHGKALFSFLKESERMEKERQIRCATCRRRCPPKAELRHGSVPLLPLNSPLGLCQIGRCCHCAFPPSAAVPFGCSPSVAAQKGLNSLNMLLYLLDVLRHRHCPSRYLYGSLGTHFLRNRRCAFLVFVSNAQRNGAILRQ

SEQ ID NO: 158388 - protein, 151 aa, Heterodera glycines
MRRGTKVIRRGTTVNRRGTTVIKRGTKVIKRGTKVIKRGTKMIKRGTTVIKRGTKVIKRGTKMIKRGTTVIKRGTTVIRSGTTVIRRVIRRGSTVIRRGTTVIRRGTTVNRRGTTVIRRGTKMIKRGITVIKRGTKMIKRGTTITKREILE

SEQ ID NO: 158389 - protein, 29 aa, Heterodera glycines
MANARGPSSSTSTSTNASVGVLMVGPNFK

SEQ ID NO: 158390 - protein, 48 aa, Heterodera glycines
MRRHHSALNGNVSQQCLTVHKIRHAAATDAKCFCLSKQRPQPPHKRLT

SEQ ID NO: 158391 - protein, 22 aa, Heterodera glycines
SHAHPSDLAVKQRLLTTKRVRA

SEQ ID NO: 158392 - protein, 263 aa, Heterodera glycines
MSAEGNDAPPAAEQPPPAEAAPAEAVPVQEAAAPPVEAAAETAPAEAAQPVEEAAPPAEAPVEAAPAEAAPPIEEAAPPAEAPVEAAPAEAAQPVEEAAPPAEAPVEPAPPVEEPKAAEPEAPVSEAVPAAEAPVEEAVAAPIEVAPAEAEPVSAPPAEAVPAEEAPAAEVAQLSLEEQAPAAEAPVAEEAPAAVPVEEAVPPPAEVPAAECAPPASEATPAEAPAAPEETPADGVSPAPEAAEPAAEQPPAAEEAPPAEGAP

SEQ ID NO: 158393 - protein, 277 aa, Heterodera glycines
RLRLKRGTCFGQKGTDCGTHGAPSAGGASSAAGAASASGAGETPSAGVSSGAAGASAGVASDAGGAHSAAGTSAGGGTASSTGTAAGASSATGASAAGACSSKLSWATSAAGASSAGTASAGGAETGSASAGATSMGAATASSTGASAAGTASETGAAFGAFGSSTGGAGSTGASAGGAASSTGCAASAGAASTGASAGGAASSIGGAASAGAASTGASAGGAASSTGCAASAGAVSAAASTGGAAASWTGTASAGAASAGGGCSAAGGASYRGRGN

SEQ ID NO: 158394 - protein, 475 aa, Heterodera glycines
MQILWESGEWPGASIEQAITTLSWTPAAKEGRGLLGVGCDTGAVGVTYTDLGPDHNCCKRHNFNHNFNLRGHQAAIALVAWNKAQTKLLSYDINGVIYFWVPNEERWTVELINDRGFKVRDFDWSPSGASAVRDFDWSPSGASALICYEDNFVLIVSSSGQRIWSNTFLFSSSGQRIWSNTFLFSILCGAWAPNSQELVIGLSSGVVHVLNDQGTLITERTLFQVGVQRAAFSPLRSAEAHGDEWTLACCSATDQILFLNTFYEVELCSWQAPDPVISMRWSSDGTMLAVVCSPNRIVILDYNGRGIHSSAPIPGGTLSAFTWAHSDQAIVVTAKGKIATGRLVRRVPSLSQLVSYSLWEQLGRSSKGVDHLPIPKRERKQIAQFDHHIIRCRVPVAERCRVPVAERLYDVVCQPSIWRWYCTIVPVTRKNLYMLCVEHMGGFVPILLGRHMGGFVPILLGRQTNRIIPQFVISL

SEQ ID NO: 158395 - protein, 305 aa, Heterodera glycines
MEEGKLRNKPRRKACRDFYGSPAQWCNTNAKCSADTPRRRDVQQRGHGTKQRFLNEVKGVNWHSDDVMVKLGDLFALSLRNRKMVHPFGGAAQLFPQRIGHQLGQRRHSAHQTARGDFALCRHDNGLIAVRPSECGESAAGDGCRERVNATAVVVQNDNAIRTAHDREHCAVTAPTHRNHRVRRLPRAQLNLVEGVQEENLIAEIKCYHWLLQLFVNEKETDRTTRQSPFAISVRLGTSQRGKGRPLDAHLEESAFSDQSALVVQHMDNAAAEADDQFLRIGGPRAAENGEKESVGPNALAGGRN

SEQ ID NO: 158396 - protein, 211 aa, Heterodera glycines
SPSTPPTNSVPQILLQQFGKDFVAGAVAACVAKTVIAPVERVKLILQLQTAQRTIAAASRYSGMVDCFVRLPREQGFLSFWRGNLSNIARAASQESLGMAFKELFKRWCVTESDRSVNYRRFVAGNLLAGGLAGSVTFFFNLLAGGLAGSVTFFFIYPLDFARTRLAVDMGKGPAKRDFLPLVSCSQTAPFSKPIPPFLRKRNSGLSWLIS

SEQ ID NO: 158397 - protein, 123 aa, Heterodera glycines
MKIYKWKKQLGLSRKNERSQKNYYEKKKREFVERIDEFKRMSKRGKQKQFAKALGIGKTTLSTWKKEFGIEISKRVYSNKEKISKMKDYYKMKNKNPYLSDRQIATFLKISPSTLNKWKIEKN

SEQ ID NO: 158398 - protein, 186 aa, Heterodera glycines
MPTNNVLVGLASVPNFLLVPSSSPQNGPLVERIIEFVHRIREAQPPVELCPTDRQLAFNRSLIAALCLCRSDGAGEHAAGAMMSASVPTATSDDGTGHAQLQLAIARRIHERLWQSLNATLATDLLPFGPSLLRRDSMERQHLAAMLEALRQLRLAHRQCLAHTNCYNVPAELFTAQRRGEQKKSN

SEQ ID NO: 158399 - protein, 108 aa, Heterodera glycines
MLYEDPRNRCCCAIKIQGIAVAVGSLYLLVLAAMFLLVPHFWQRWLNEFSDFQHQETIMQYPRLVTGCIGAVMLFVQVINIWFELVVYNASTFVQRQHFISQHGAHKV

SEQ ID NO: 158400 - protein, 102 aa, Heterodera glycines
MLLLRESDEAAVSKECPWAFGEMEKRGNCEIWFYEEKNGRTNGRREGHLEGKKNKTAKIKKQKRYSIMLCIWEENIRQRRANKTKESKRKNENEKRPKEKGK

SEQ ID NO: 158401 - protein, 80 aa, Heterodera glycines
MLVELDAERITGTCGLFPIEQKTLRLTTDGFQWNLANQCVAFGQLVSSSNCILCPQKSRIKSDGGAVVFTFELREPNKML

SEQ ID NO: 158402 - protein, 88 aa, Heterodera glycines
MSPNEFSDRPFQQPDNVQHPHQQPDEDAELRAQIEDAEEDLLLNWWREDLKIIRFLFGHRRAPTIEAALLQRAEREAEILRQYAENQQ

SEQ ID NO: 158403 - protein, 82 aa, Heterodera glycines
MNSDNHLIQTMNRGDERSADIYLQEQTLMITSSHQPVQLLYDGANGQYFIPVQNGNDGSVCHIALTPTQSKVIENQDKTSIG

SEQ ID NO: 158404 - protein, 242 aa, Heterodera glycines
CPKLKLILMSATLDSARFQKLFKNCEMLIIRWRTFPVDILYSPTPVISYTHAAVEYSPTPVISYTHAAVETALQIHLTESPGDILIFVTGQKVIIILYRKLNRIFNNFKETESLQYCFPLYASMPLDKQQRVFQQCIPNKNNTLISNRKCIVATNVAETSITIDGIAFFSNRKCIVATNVAETSITIDGIAFFVDTGFCKQKIYNPQIRVDSLLVTPISQASAMQRAGRDGRTQPGQCYRLY

SEQ ID NO: 158405 - protein, 465 aa, Heterodera glycines
MIIRSPPLTRQRALNLRTFAQNQNAAVEEQQQQQQVEGVHGENEPLFNAPISPGLNRNLSLSAEENEHHFSEMAAAAANDDEIRRRLLHVSIQSNLPPRANGGGNNGAEQQQIRNENVGHEDFVEGLRPNFGSFLVREEGVRMRFVESGTENRRFEQINRNLVRETAPNSRHVSQSELIGRTSTPINFNGELHNFPIVNNQIRHREIYEDFGPYREHENFRSSQIQIRQQPALARQQQNANFGFLPCERQHNEFVGRHIFEGGRRMMHPTEMPRQMHQQPPREERGWQQQTSVLYRPVARQQQNFPNYENQMLPPQSQNLAVLSSLEYNMVLERIPDLNGKEGTDEVKRFFKKFDAYTDSWPDEKRIKGLESKVYGRAERAFEVAKAVIPIKYELLRGEMMRQLEETDSKNLNAFDELMLGVRRKPNESIDDLACRISGLVKRAYPGLSFNCQTISHPIFDPINW

SEQ ID NO: 158406 - protein, 15 aa, Heterodera glycines
MNEILYLISDFDPSD

SEQ ID NO: 158407 - protein, 46 aa, Heterodera glycines
MGLRILHQFIQFVKSRKRAKNGQNVLFIVKKFCVPKMGLNAMPTNV

SEQ ID NO: 158408 - protein, 93 aa, Heterodera glycines
LFEYPKRTLEKIDFFVFGAVPPNRCAQIYGETESFGNSFPIACTLILRWIFAPHNCLSTPNGKNRFFLLFGQSPQTDAPRFMGRPNPSGIASL

SEQ ID NO: 158409 - protein, 40 aa, Heterodera glycines
MNETFRDVLLIKELLIRQPQSEEFHLFQLSGETSSIPVSS

SEQ ID NO: 158410 - protein, 19 aa, Heterodera glycines
MNFKLIGEKRMVRSRFNEK

SEQ ID NO: 158411 - protein, 138 aa, Heterodera glycines
MSFRLLGILCVLLFVAQLTNGDAAWNDANDVNPFKGHQERALAFNEKLKHAEENTPENVTPTPTPSINATETPDTNATMTTSEVTGETTEGPTIKTTAKPAPPSTSSFQMTILNIVLMGLIAVILLVDIVLAVVKCKK

SEQ ID NO: 158412 - protein, 90 aa, Heterodera glycines
MGNEWHGLARANIAMVPLEHFQVVKDQANLCKQWSKALARAAERTYQVDFVSVQKAADSDFGRKVIFTIEIMQKLNREPMNGQRIVGWSP

SEQ ID NO: 158413 - protein, 163 aa, Heterodera glycines
LKEAGAILLGITNVPELALWWETNNTVYGVTNNPYDLRRTPGGSSGGEGALLAAAGSVIGLGNDVGGSLRVPALFCGVFGLKPGPGVVPSSGILPRVRGYLIQMATAGPMTRYASDLTLMLTRYASDLTLMLRVMLFMLFSSLSSNNLYGIGRPTRAYYLGGG

SEQ ID NO: 158414 - protein, 70 aa, Heterodera glycines
MQPVLASFPSKDATKKVIKRLRREENAPRVEPLNLEQLEIPNTYRVYKRTEIDEEQFLLADTGVFQIHGY

SEQ ID NO: 158415 - protein, 36 aa, Heterodera glycines
MAFFCNEFFRYHGNGKDAKMTTMNWHRHCKNRIFNV

SEQ ID NO: 158416 - protein, 117 aa, Heterodera glycines
SSQSIYGTCTVAPLQSSTSFASFDSPPPGLSNSQNSHNGGANSSSSSSHPFRYRGNEKIHYRRMPFIAYKILEKILYFEKKRIACSAYAFAVLLLLQQCTTSSAHQPGRTRRIKLKI

SEQ ID NO: 158417 - protein, 48 aa, Heterodera glycines
RNGNNLFGRTLEVPMRMCRLRNILSFDQPTGRSWPSCVILGFCFFVSI

SEQ ID NO: 158418 - protein, 165 aa, Heterodera glycines
IPAQGYLPQFCQAMQSTLSDDVARSALRVLNQLSENLNCASAFAAVPSLPKGLLVCMRMQPELARESAHALKMLSQRCTPEMAEQMLLSGMVDHLLKMLGSSLPGVNNPSAAKAEIADALKACSRDAHFGERITQLLQKSQIWAQYRDQRHDLFLPTITQTQAIT

SEQ ID NO: 158419 - protein, 513 aa, Heterodera glycines
MAAFAFLGVIFGLFRIREKLGSLVISVLKRRCEAIDHATVELLCALMQPMHANFDLRIEQLNKQSLLSSRAFVEHLLQLVVEHVARGTGKQIKSTKVIVFQNDCPGALVIASMLDFLTFTVCAPYSETTPGDTFDSILAMVAQRGRTFYKLFQHPSMTIVKGAGMVMRAIIEESGRDISRQMQLLALTEGAFLKHLELALLSTGKDLRVLTNKQLSGYLVALWIAENQAAKDLLQRCLPRGLIDYLDSNEHVPASAVAEERDLLTIRNNLEMANNSERERPFAQLQDQFRNVQVTLEARLDSLLQHWNLEQKLNFLQSNRIREEHQQQKIQQRPVVLRKRRRLVKATANWKLFCYQFGQNHARADLIWNEKTRDEFRQSIENEWRQLQQELEFIQPGTTVSWNHSEFTVTYDSLLDEIRIGDYYLRFLLTEENSSNSATPIHRPEDFFNKIYHRFLLSQRTEMRCICLRAMALVYERHCISIGPFADTRHIVEMLAKCTNVAERDHFLFLINK

SEQ ID NO: 158420 - protein, 223 aa, Heterodera glycines
MTMTMALSPARPPTRECSRQRRAASPSDKMTWQWSKMVTNTVEKAKAFGHCIATRRTVSQRRPRQRRPNTERRAFKCQRKQSIAKLGFVNEMGQLDQSVETKTNIQFRQNVTMADTNGISPLDSFRQDGNFHLNGPQQFRRLSPGATMTQRKMNVVGSASASPIQFCEQRKPYGQKQYFSRAVVGDRNSNANEWRNGRYKMQESHSERRGTQTVQKGPFLVMI

SEQ ID NO: 158421 - protein, 189 aa, Heterodera glycines
MAAFRLNLQKSLFQQDGERLLGLANVKKDSKRKKETFWCLAGRYNKSTRGGKVLYCQIGKGRHFCEEGAICVEGIARGRRSSPTKSFKQKISKLRIIQPVTDIILTIRNNVYHLDSNTLEEKEFLIRQIFKVFPVILYFIGPIKKKRLKSCFYAFRSNTRGFSGALITNMISILTYFESRTRIRTQVGS

SEQ ID NO: 158422 - protein, 45 aa, Heterodera glycines
MWSKTMVGYGSEDEHFVLEPFSLNLTTFWRAWKVWESGQQKGLFC

SEQ ID NO: 158423 - protein, 26 aa, Heterodera glycines
MLLPMGLPEDVAVAGFGLSLERLISK

SEQ ID NO: 158424 - protein, 38 aa, Heterodera glycines
MTMALLPLALADLNRLTMWAAFEDLNRVELTSHLANPN

SEQ ID NO: 158425 - protein, 140 aa, Heterodera glycines
LFDQGGCRSDEHGRQVAGIELPFDTCNVARTRSLNPKGVFVSTTVVISFHPQFVTKVDRAYRIQCFYMEADKTVSSQLEVSEITTQFQTQVVPMPVCRYEILEGGPHGQPVILEGGPHGQPVQFATIRQVYHKWTCDSET

SEQ ID NO: 158426 - protein, 161 aa, Heterodera glycines
MIKSTGSAASRPRIIFLAFLQSLGLNPPAIQSLGLNPPTFQSLGLNPPAFQSLGLNPPAFQSLGLNPPAFQSLGLNPPTFQSLGLNPPAFQSLGLNPPAFQSLGLNPPAFQSLGLNPPAFQSLGLNPPAFQSLGLNPTSFQSLGLNPPAFQSLGLNPPTFQ

SEQ ID NO: 158427 - protein, 56 aa, Heterodera glycines
MEDRQGQLRSRRAQTQQTETTVEGPTDNRNGRTGGEETTARTHRNGGPNEASFHGY

SEQ ID NO: 158428 - protein, 55 aa, Heterodera glycines
MCRKIVQAWIQVSRSLDFSWTWIFLDFCPGNPAPGPTWNPGSGPGPDFFQNVELD

SEQ ID NO: 158429 - protein, 41 aa, Heterodera glycines
MKLSLSNLLVQNVVKVFDALFTDPCEPPPALGKVWPMGEKP

SEQ ID NO: 158430 - protein, 66 aa, Heterodera glycines
SFDQSNRCGKRESGPINVIRDYCFVSILSLFCYSIFVIRRTVIRNSCIIYYHFDKNCLRTNRQKPH

SEQ ID NO: 158431 - protein, 46 aa, Heterodera glycines
YPRKACNSPPNSKTTKMFPLKIAFLLVLICTPNFGENSSTESSKKS

SEQ ID NO: 158432 - protein, 176 aa, Heterodera glycines
SKKKLETDINDLELGLDMANKTNMEAQKTIKKLIGQVQDLQLQASEPQNLVEEEQRRREEQRENFLMSEKKLNIVLSERDELVVRREQMERDKQRVEAEVQEERARKTELQMDNSQLSAARRQTELDKTLNELKMAEESSKKVSADVTRLQEEYRNEQHHNDHVERQKRGLDAQLK

SEQ ID NO: 158433 - protein, 41 aa, Heterodera glycines
MSGGREEVEISFSRPLSSLHPAKFLPSTKWSKWNCKGMGGK

SEQ ID NO: 158434 - protein, 30 aa, Heterodera glycines
MVMRDGVTTETVQDEHNDKALARKFPIFHA

SEQ ID NO: 158435 - protein, 152 aa, Heterodera glycines
MALYILKVEVNCGAIASLALDSKITDLHTAMLKKVGINASKDVVPVNKPDQEFINMLHLAWQKFGDPNAIVVILHFINSSPYNLDYTNVEMELARVSNGQIKMDFVSLKEGKRLNLDPETFTLRLDGRVVAVVNSGTSALGYLANRAEMETR

SEQ ID NO: 158436 - protein, 82 aa, Heterodera glycines
MHPRNIHWHVALETDDHLTEKIIQDAIQNPGNYVLKPNRECGGNNYFDDEIPKKLQQFSLEQRAAHILMQRLHPLQVKVGES

SEQ ID NO: 158437 - protein, 269 aa, Heterodera glycines
IAILPRRDSDLEAFSHNPSDGSFAPLVYRPSTTKCLNLRFLSYAGLLLATGLGKTNLSHDGLNPAHVPYWWVNNPTLGEFCFAMIGRADIEGSKSDVAMDAWPPQASYPCGNFSDTSCWKLYTLKDRATLSRSVFVLKIRIKAFAFLLYERFPSSLSSLGHLRYALTDVPPQSNSPPDTVIGAGRRARVARLNTKMDTRRTPVLPIKGIDESSGISLAPCGSHLCYTSHDSSQSQTRVKLNRVFFPAKFAKPVPLAVVSLDSRGQWESR

SEQ ID NO: 158438 - protein, 256 aa, Heterodera glycines
KSQSRSRSRVSNELKPRFRVTTILERPYVMLRTNIDHNDNHQDAHGFCIDLLSELAQDLGFTYTIHVVRDNKYGKDGNNSIHVVRDNKYGKDGNNSWDGMIGELLRGEADMVMAPFTANFRRAEVVDFTKPFLSLGISILYRIPEDYQPDIFSFLNPLSLEIWLCILLSDIFSFLNPLSLEIWLCILLSICGITFGMYLVANVTPYLVANVTPYEWNLNFSCCTARRPRPAARFSTVSAATAPTSSAAGGAAPEEK

SEQ ID NO: 158439 - protein, 230 aa, Heterodera glycines
  unsure (1)..(230): unsure at all Xaa locations
MAIKYLEWRSKRDGIEIRHAGNGREVKVGKYKLDGFLLXNVGGRDKCIEVMGCYIHGCMNCYDPAAELIGGRTAQELNDETQERLAELRKTLDVEEVCVSLFDIYIFIVNFXGCQIEKELKKDEEMRDFFDDRGNEKGPIDPRMAYAGGRTGPMKLYAKSDEKKKISVYDIVSLYPSVNYGTAYPIGLPEIIIPKTDEINVNWMRPEDLKYKGLYKVRVTPPKGLRIPVL

SEQ ID NO: 158440 - protein, 399 aa, Heterodera glycines
KYVCFFNRGRKFCIDCECFYDQDVYHTLECRARCYYCNKVGGVPCEKENGVKIECPKCHRYFYNWECYNYHQGHQTCRLWRRCMICEKTYRFNPKKDHECGETYCQLCSVSHDPKRSCYIMPIEENEDKDVYRIVVWDSETSQDTIYTGDQKEHVINYISVRVTCTECCDDKHRTNCKICGEERTKDWSEAEGHDPTKDFVEWILTAFTNYDTYIFAHNAGRFDGHFVFNYLCRTGKNPIPLINGLKIYEFKVRNSKKHSMLIWRDSCLLMPVKLESLKATFNLGCEDKPFFPYYYNKKENYGVCLEHLPPMEDYSPGSMNKEKFAKFEKWYNENKGTPFYLDEELRNYSRNDTEILLLSIIEFRRILINDITKGFDPLPRSCNVFVDGAVIDCAGERL

SEQ ID NO: 158441 - protein, 119 aa, Heterodera glycines
MARAHLAALTWLALSWPCTPPIGMGGYRNPDLLCALTTDGFNLQEIRSAICGCKKLLGNELFFEVKGFLRQEDGTSQKVVNEYYEKYDGLNGFAEFIRNWAFTFFCFHAFDDDDTSDED

SEQ ID NO: 158442 - protein, 43 aa, Heterodera glycines
VKHRISALLCREPAGNGWLSICKKLDWQYVVVKNFWVWNYFLK

SEQ ID NO: 158443 - protein, 107 aa, Heterodera glycines
MNTAIGTINPEKDTVAVVEQTKTGFAHPLDFEFEDLGDPADVLQDGAESYDGATMKRPSDKGKGANGKSGMPRKQSLKLFGTSNSNGKVSLLWCYDVSQKPSNENIF

SEQ ID NO: 158444 - protein, 78 aa, Heterodera glycines
MECWDGYALNDKAGEGWELAIKDCGTPQKDMQNQICAYFHCTTAEGDDHLDMWSCFANINAGGGCASDAFAPRITQPE

SEQ ID NO: 158445 - protein, 28 aa, Heterodera glycines
MQLIGTRPLLKHWPMCCRQQSSQKVCVA

SEQ ID NO: 158446 - protein, 427 aa, Heterodera glycines
MSVMLNTDQQKQNLDTKTSQENGQLSDSHETAVIKAPSGGNRKVPKNCWKKVNIDLEYNTSREISRRRQLAWRGERRGGETYGRRDQPKEQRKGSARVAEESSARKDEAAEKRDRNEAQKETAGEAEDGRAEGGGDEETARKRTTAPTGGTKTKNGPNEDGTETGTDQQQQQSRDYCAGPRTTRMPYRSGGGGGIGGPRRSGGGTDYWHKKGGGGGSGQSGRGSEDDRERRPGGSYYQQRNDRWQRNHHPNAPPPLNVAQRRARGPLPDWDEVRPRLNPQQWPLVESATHTEAQNSPTTASGAVEEIAVDNEEMEQKEDQHEEKEGAEEGKELERPQSNEQQRQPQPNSSEEMETTIGTSEEEQRQSETVEEIMEEPKQQQKQEEKGEDQEGWKEVRTKRGNRKKQQPNNKQNKGKENSTHQPQVKQ

SEQ ID NO: 158447 - protein, 361 aa, Heterodera glycines
MCQLEMVLPLHYAPFASDFELIPDFQPDFNMPTKPFKPLEQLMGVFPSASRAHIPDGWRWLMTDSSSPIIDFYPETFEIDLNGKKYAWQGVALLPFVEEKRLLDALDSVYATLTTDEIARNATGPDRLFVGNKHNLFSLVYEVHSQKTTTSIKDELTNDDTKETSEGTRETEGEAEETQQAENGESEQIAKTEETTAQEEQANEEAISKPEQAPKQEFETEIEFVDDEEKKWVHIDAVKAYGMSGEVSYDVEALAFGEAHRSLFRNSLEFGDIKYQHQQQWQQGQFYNGQQQQQPVPLFSFGQMAMPPPPPLPPQNWITSHPPPQIQSHVPYGQPPPLISQPRNTQHHHRRNDNNRTYNRK

SEQ ID NO: 158448 - protein, 68 aa, Heterodera glycines
MCLSTAAADNKVVSKYDDYQKEMRLKQIERAFDEAMPKLLHGSYNNLMAFLDTNSFRFEDKVWLFESE

SEQ ID NO: 158449 - protein, 103 aa, Heterodera glycines
MLNFRNFNRQYRLKNLKWYDGYSIFYVNGEGLVYKVTIQRTMPDDSLKIASLKDKTKEFVQRKILPNPSPNCAGQHQQQQFTSANCASERPPRQQRNDGRRKE

SEQ ID NO: 158450 - protein, 39 aa, Heterodera glycines
MSTEYRQAFREEFPIIFKRNLNVIQVSPQQNGTTFAANK

SEQ ID NO: 158451 - protein, 87 aa, Heterodera glycines
MADLSNLTFLLEFANETPNWKLISCAAILGIIATMGIVLNFSVIYVTIRTKSLNGTVNYLLILCSFFEIIHQSGHFLFVYTAFSGQI

SEQ ID NO: 158452 - protein, 85 aa, Heterodera glycines
MEEQRKKTEVKRRKGRRNERHKQPTSSVLAGILEEDEARLWGEEGSTASLEGGKVSILLVLLESFSSHQNHPDGVIWSRWCKCLF

SEQ ID NO: 158453 - protein, 148 aa, Heterodera glycines
MAYQLTPIIMLRWLFVGLVLSSHQQMAQMGRMEGDQKRGMEMGQMRGMEMGQMRGMEMGQMRGMEMGQMSGMEMGQMRGMERGQKPGMVITQKSEMDMAQMRGMDGDDGQMRASWAASQKLLRAEEKEKGPKSQKNETEKVKKTCEMR

SEQ ID NO: 158454 - protein, 83 aa, Heterodera glycines
MLRTLGVWRKEQMRTGDAGQEEEGGLNSGALSLDKNIVPRECAGLKDACVEKPLFVGSKSKKCDCEVGFQKAGFKESEGMTEE

SEQ ID NO: 158455 - protein, 237 aa, Heterodera glycines
MQQINGIIMKPPPASEYEIRCYASAPTDESGESSPAAANPKPKAMQKLEEEQRNEFLGEYGLYRSSALQIAKNVMSKLLQAHLVAWATEHPGKAVERKVDGSVVQVAHMYTQGDVCTETGAHRDCQVRMKCREDINAQKVFIYMLEEEIMRVVRQLLEGAGDGQVFVSAAKLKIGKGEDSEEDEEAEQQQQQEGKSRETAEAEAEHGQGSEAEKGIGREEQQGQTQVTTDNETDRER

SEQ ID NO: 158456 - protein, 178 aa, Heterodera glycines
MSKWTEDGGQRVQMRNDERTATDKGPPRLNLYRTSQIIAQLPRDPPPELDEADEWEDERGTNGLHGDGHHGQPPPPPAPAPFAPLEVFPLALPSSSRSAPSSSYLRLFSSQPTTPRHAPPNHPTFAQPFMDDDQYYQRHLRQRQLLNALEGSINTPTVRTEQRRIIMETEMTNLVSKR

SEQ ID NO: 158457 - protein, 38 aa, Heterodera glycines
HFTRPITFYASQQHFTRPMTLYASHDILRVPSHFTRPN

SEQ ID NO: 158458 - protein, 45 aa, Heterodera glycines
MMAFVKSELAQQHAVRAQQLARRIRAVAEAAPSSLRLASGAVELQ

SEQ ID NO: 158459 - protein, 97 aa, Heterodera glycines
MRNIYNFLETNLLNEEELNYKMKEEKTKSPKVPKQLPPLIKPIFIELYSPKNLIDVVETLNDKSKYFWKEIENEFDYFDNNLNKEGKSGENKFINPK

SEQ ID NO: 158460 - protein, 38 aa, Heterodera glycines
MCKRKELRKKNYEEKEANEYGKGATNYGIITVINYDDT

SEQ ID NO: 158461 - protein, 37 aa, Heterodera glycines
IKVDVEASNQVENVLFMLNISKLVRRKKGICLKSRSL

SEQ ID NO: 158462 - protein, 637 aa, Heterodera glycines
MYDIISVFKNESRLYSLYLEFLTITKSMNWLNVKLKLDLFIFVQWTDAKISNSAATIARKKCANVWKRHKFLFYQLYDRWHDEPLDEMPNFQIYQSIFLSEMNLFFEKVLEGKQMKSEKAMDEEIRKIIEKAQKKYDEKKGTRKVKGKAKESDKNGENYAKFEVKLGEKNVETLSKLVEENAIFKKILKTIYESFVDVNDMPEYLGKETTEQIWKTLAIKYFETEEKEKEKEEKEKEEKEKEKEEKDEKEKAGKEEEEEKKEEAKLNAKKKKQKRKKSKNGNKETKENEIKADNGKNSRETEEEERRSFSTAEEEKESFAMGRDTERKEQMKTITVTKSTVEEGKGGNGKGKEEKETEPPNEGLMGTEEDEGEKEGTKLINFATDQFLALKYAEIVNASAKEQQNDDTKMTSAIELANVGILANEIANRLEAIEWLDVQRKSDKTKSISDQWERLKEMKYSAKHSYEGISKRLFQLLMELSGEMDNLGTNLEDKSDKLDQENENIKWENWKEIVGKLHFRKFGIAIVKGRIENWEKLGQKQKTLALSNIVEKREKILEEFERNLEQIEKSEKQRKLDKNIFCQYQSDTNLSEFIEKKDKINFSEKNSQLFPSEKWQEINSVKEFERTNLEEKEKVKI

SEQ ID NO: 158463 - protein, 293 aa, Heterodera glycines
MNMVRIGEENDKIIVQKTANLEESLYGILYGLEKENRGDTNDGLTAIRTKTMLIHLTEHFVNLHNGSEQLRQCFEGQTFIRLRFKRFVKIMEENVVDEGKVVADQFWHIFKGGTAHSKNNQIKPESFSAILPMNDECPDKEFSLLHSAEKDRVDMTFDSYALMEQYIQLLWEENKQKSEMEMNELTKSVEIGAALLYYGQKAEKLLKYAQFYVENDIFADEIVVYMSKFNKLMKVPKSDDQNLEGKLCQIYQFMHKLVNDAQLIELSEEWKKLLEENVKELGTEPLDKQISLE

SEQ ID NO: 158464 - protein, 147 aa, Heterodera glycines
MRSNNCQFIPLFSFYILFLASQTFSKNLFGIDTNRLDEYYAKLLFDDNLSINDQTILINRLSASHLHRRIKKDFEEFEKIIKPKKSADWLKRIKILKDKFEEIEKEFAKEDKFMQIVLSNLCHFWQLTILLDNFKSGLSTISLNPIE

SEQ ID NO: 158465 - protein, 87 aa, Heterodera glycines
MVRAEVTPTLIKMGKMGLPNVRKSMSLLGAYSSDQTPAAVHLPCPYFSKYHEIMKNEFPCVKFLLCSNNHKPPVVVVSVSYYYELRI

SEQ ID NO: 158466 - protein, 51 aa, Heterodera glycines
MLSYWRQRNKNANGFAKNSVKQLNVSIRTSNSNYMSSWKLHGFLQIYFFIY

SEQ ID NO: 158467 - protein, 106 aa, Heterodera glycines
MAFGVSRQLTFDELAVLCPDEKEFCYKTALLGNCFGKSVKAKLGNFILSESAKIRQNCWPNSANVLVKVHSTDAFRTVAERPTCDVQSIFSYQVKRKEKCLTSFGF

SEQ ID NO: 158468 - protein, 108 aa, Heterodera glycines
METVLRPQTTTNREAEKYLLKRGIEKGSTVMAVKKEPGKGHGSTIATNVVTNLFGIDMKQPATVFRYEVKINGQIVRQSGECLLVDITETTKFECVFHRMHSEIPFIF

SEQ ID NO: 158469 - protein, 58 aa, Heterodera glycines
MEHLPKNGVPKLYQCAKHKDTFPPTKTNQTTPINNKANLYNCLCFYCSTDNAETPSIP

SEQ ID NO: 158470 - protein, 66 aa, Heterodera glycines
MGDYLGGKWLFVIFNIDVGPKFSQYSFKTLTEAEYAEHEKKCDELEYSNKIANKLMYQKCKQLFYK

SEQ ID NO: 158471 - protein, 108 aa, Heterodera glycines
MALIALSFYCIGILLLPATIFSQNRRGNSEFAHICGKFPNRYFSYEPCPEDERQSSQNQRNRNDQPPRRDQQQQQQVCTRQGWQPIGIKCQNVNDCYQHRESILITFQ

SEQ ID NO: 158472 - protein, 79 aa, Heterodera glycines
IVETGNFKFADPVAGLEFKIFYRTGSGRINPANPAILQILHLKSAGSCAGLRILGNFKKFCINKKVFQSIKKYSNIFLN

SEQ ID NO: 158473 - protein, 42 aa, Heterodera glycines
MILSSLILLLLDMYVDFTNFCHYVLGNQYTLPWKRVFPIATL

SEQ ID NO: 158474 - protein, 21 aa, Heterodera glycines
ITVNALIIAQSLLIPQSPIIP

SEQ ID NO: 158475 - protein, 77 aa, Heterodera glycines
MSPRTESPFGFTSFQIWVIRAFFKNHEPRLALNLIRFHRRPFVLIWHCSKQKFYSLHKMYTNYIPYSVNMLIGSGIG

SEQ ID NO: 158476 - protein, 59 aa, Heterodera glycines
AMIIGNNLRDHRVLIGLNDENPAFHNVYELDLINNQMRMDDMQYLVNLRPSGTPVIESM

SEQ ID NO: 158477 - protein, 21 aa, Heterodera glycines
MYLYKFAQLIFLQIICINLLK

SEQ ID NO: 158478 - protein, 20 aa, Heterodera glycines
ENIDHSPQTQKCLKTVRIDV

SEQ ID NO: 158479 - protein, 667 aa, Heterodera glycines
PPPPPSVCQQHTFSHEHSNWLSKLFFCWTNPLLRKGFQGHLSQVVCLLLPPPSPFKILFSKRWTMCSIFRPASTPRLQRDILGDCHGQSDHADQRLLSAESFAEALFRAYGRTFLLIGVVRFTGDAFRFASPILLHLLITSLQESSQSVNLGYVCAALMSVSLFVSSVCDFQVNLGYVCAALMSVSLFVSSVCDFQFNYYIEMITLRAKSALLLAVYQKLLRIPAFQLTEKFSSGNLINLMSSDVDRVGGLMVAFHAVDRVGGLMVAFHAFWSMPINFFWSMPINFAIALYLLYREVGMAFLAGVLVSLLLIPLNKYIASKVGQFSNKMMQMKDARVKLCTASPPPCFFPFLNTVTELSRSMRTVKLNNWTAFFEAKIGHLRSRELANLKGMKYLDAVCVYLWASAPTVASAPTVIMVLMLVTYSVVLGELLTAAKVFTTLSLISILIMPLNAFPWVNAFPWVLSAIINGMVSKRRFDAFFAIRCGDQRQNILTQAEGGGERLLGLDLLGLDGNSFAWNETKSAVSNVHFNGKKVQKMIQLEFIFPVKGMLIGVIGPVGCGKTSLLMGLLGETIATGAVWAKCFDEGFLCCQDVWLEKGTIRKNVLCERPFDQKCPWDSCALSDIQNESLFDQRANEINSQMPKENIDPPAMDPPERSDVWGGGGGG

SEQ ID NO: 158480 - protein, 168 aa, Heterodera glycines
MLAHLTERVIVKDKDGQLPERDCVTLVNATQNALQSLLSSAACEVKTFVREAEVQHGPEREVKMTEVVVPVVEVTSTEPLSQMIGSGLIAASVSGVPVQNGLTTLNTHVKAATGEEVPQTILARTTSTLFDVKQYCTDMENLLHRIWKRYENGLPPDHILNAKLEASV

SEQ ID NO: 158481 - protein, 273 aa, Heterodera glycines
ELWLALHHFEKAIALDPNFIDALINMGNVLKEARIFDRAVAAYLRALALNPNHAVVHGNLACVYYEQAHLDLAIETYKRAIELQPNFPDAYCNLANALKEKGLVTEAEQAYNTALSLCPNHADSLNNLANIKREQGKIEEATRLYLEALKIYPEFAAAHSNLASILQQQGRLQEAIEHYKEAIKISPTFADAYSNMGNTLKEMGDINGALQCYTRAIQINPAFADAHSNLASIHKDAGNIPEAIHRQLLVVMRSYALRRFKCFINLRTLTPTN

SEQ ID NO: 158482 - protein, 46 aa, Heterodera glycines
MLDLVDREKVIAKNMLGPKREGPTEVNRFFETTKNREKRRKWWQGK

SEQ ID NO: 158483 - protein, 47 aa, Heterodera glycines; identical to SEQ ID NO: 130102

SEQ ID NO: 158484 - protein, 128 aa, Heterodera glycines
KKLKNGRKAPVLRPRSGRMFPTKLKNGREAPVLRPRSGRMSPKKLKNGREAPVLRPRSGRMSPKKLKNGREAPVLRPRSGRMSPKKLKNGREAPVLRPRSGRMSPKKLKDGREAPVLRPRSARMFPKN

SEQ ID NO: 158485 - protein, 329 aa, Heterodera glycines
MEDNSLLSPKELNAIKNGAMMKAKAASQLWSSLFCPKDEEAIFATDAYAKLNSWLLSWMERLRKKQQIEGENGRKGKKRRTDLEEEEDEEYLDDLGEEPPENPVILTGPTGCGKTAMCDLHYLPDTNFWSTLKQICANSLVPIVLTCNDYEVVRTNMLNREPALETFSTIHVDKMPSFQSFNAYLRQWLIGFTGKIRKNSYLSNLFEQKRGDFRAILNALQLDGQHSLSIIEKPTGNGQKQIDFKEFVLQSKRASAVDSTCGKTNEISWRAKQMTDLDYRREKPTRDWTTKVAEMDELRIELLSLLRVDVDWCEILDWFITRFHNYLYS

SEQ ID NO: 158486 - protein, 129 aa, Heterodera glycines
MQSKQLMWNRRIGRHRSITTLLPPPNQVWARSLSVGYDSWINITGFWINIPDHFIIASEGKNLFYAKPMYHQNSLIHNQQHYIGTCIETAIRMYSRDWDPVEEANREWFRSLQLGPPNSDRETSSRHLR

SEQ ID NO: 158487 - protein, 286 aa, Heterodera glycines
MRTVLNCLSILFAMFALGGAYPTNHCSECKLLCFNKGVKAKIPKEINKVELCCAENCYIHENVKKLTYELPKEILLNDFKCEGHFWMDSKHMFKKDILCPAVDECELIECYFCIEQLANPTCYPLISSMPIIYLAGPNRPPKDRRPRATASQNWTSRRVYRTMAFVVLMVNSLQNLTGAETIAVMAKSEKCIKNATSMRCIVENSATLTLLPAGQTNTLLLKTEEGVLLGSINVVLKALALECQSFTKAWLRSYAINVWPAKGALKWAPAKESIVEKFATILQFLS

SEQ ID NO: 158488 - protein, 330 aa, Heterodera glycines
MNAAMMAAAAAVAASSGGTASSMPSSTDVPPTSSLAAVMESGAGRYTGGGGGGGSSRSNHLHNHHNRVQSAAAGEEFGTAGFAHSSSASAFMAPPTMVPFGHHNAFQSVNALAASLYRQQHHQQQNNANGKRCASPMGSGGGGGINELLLHQQQQAATKRRRLNTADAPATRNLRSPPRDHHNNNLLANQQNNSNTTATSNSSAYNLQQGLLAFVNRHHQLQQQQIAASANALRLQQQQQQAVPSSSSSSSSASVAGGVPTQQHHQHHHHPILVDTTSSGSESGGASSEAAAAAAAQPSATSRYAPLGNNKRCSSPPHSCSDDAASSSAM

SEQ ID NO: 158489 - protein, 93 aa, Heterodera glycines
YPKRTLEKIDFFWVFGAVPPNRCAQIYGETESFGSSFPIVCTLILRWIFAPHNCLSTPNGHLKKSIFLFSGQSPRTDAPRFMGRPNPSGVASL

SEQ ID NO: 158490 - protein, 248 aa, Heterodera glycines
MQAVTRPPIVLERGVSGRVKWFDFSKGYGFITRDDGGQDVFLHASSIVRKVNMYFVLIEGQRVSRTDFELTEGLGHGESGEYNDPRIQVEFDVIDGEKGREAAAVSGPGGIRVGTAIQYNNTARSQPLPVNANNSAGRMFIAGRFRRPVGKVLFGVKMRFFGPLTFTPNKSFFGLSKWTSNGLVCPYKCVLPSADSPPNLFSPSAEQQSQVGRRFGPRGGQWRRRQCKVSAALSVQRHSQRPSHVQSE

SEQ ID NO: 158491 - protein, 86 aa, Heterodera glycines
GILKFILNPRKMSISFFEKFYTSQKRLRRDGGLCTIAILFHRGFLYLEVIPEKWLSLFLINFIHIQMLSSMIGRAVRNRPFIFEGI

SEQ ID NO: 158492 - protein, 56 aa, Heterodera glycines
MIGRAVRNRPFIFEGIFKFILNPRKMSISFFEKFYTSQKRLRRDGGLCTIAILFHR

SEQ ID NO: 158493 - protein, 63 aa, Heterodera glycines
  unsure (1)..(63): unsure at all Xaa locations
GSIGPTDPRFCHCSVLLKYLLASSSLTFGFLSVFSKCLLFLLWMSPLIRRLPLRIXPFASSQQ

SEQ ID NO: 158494 - protein, 38 aa, Heterodera glycines
MDSRYEVNERLASDFAERLNVVRECVIRAEDALAIRNL

SEQ ID NO: 158495 - protein, 491 aa, Heterodera glycines
HDETGADGRLLINAGKPDSDPEVLAEHLTNVLQPHQIGGVKFMYDNIIESLETFHKSAGFGCILAHSMGLGKSIQAITFLEILFRITGKRHVLLICPVNVLQNRITGKRHVLLICPVNVLQNWHNEFNRWMPETDAETARPIRHFELFVIGDSVKTLENRAQMIENWYQSGGVLLLGYEMNWYQSGGVLLLGYEMFRLLVHQCELLGEKSAQRKKASKKQPLEKAQMTQKDELQRNIRQEKAQMTQKDELQRNIRQALLSPGPDLVICDEGHRIKNLNTEVSCALSAINTKRRIVLTGYPIRRIVLTGYPIQNNLTEYFCMVEFVRPSYLGSKKDFQLMFDKPIRNGSCTDSAKSDVKLAKQRIHVLCDMLRGFVQRRSQHLLKKILPENREFVRSQHLLKKILPENREFVVLLRKSELQHSLYRAFHHFASEQISVGESSFNPLKAFAICLKIANHPDMLYAALKKHQIKLKIANHPDMLYAALKKHQIK

SEQ ID NO: 158496 - protein, 186 aa, Heterodera glycines
PSLSYAQIVRPPQKCVARTDQRNSWPTAHERGMAITNLRTEGGDHNQFLWNCFISCQFQSDDDDFIMPFGFTNQLTGERLAFKSANILSYRGTSDPSDQCECNWPEFAVFMTAFHLVCDYAEAELGPAEQKFMRTYRFRISIPPKDEKKWGTSLASAAYIGMVALLTGRAVRADWCVTGALDSDEE

SEQ ID NO: 158497 - protein, 121 aa, Heterodera glycines
MIGSNWKNGETHRKTSTEVKKREFNEMQLIIGDLQASTHPLMCPLWHTFYKFRTVTAHDGHWRRSSRNWWPITVAEARREMKTAKEEAERSSRNRRRRDLTNDLHAVIKLTQLMTQILFDV

SEQ ID NO: 158498 - protein, 35 aa, Heterodera glycines
MAEIFDSPRSVIEESEKIFLRQPIPDEVGKIPRKE

SEQ ID NO: 158499 - protein, 1784 aa, Heterodera glycines
MPSKQHNLRMKMKEDRRRTEKSVSPGRSPVPDGSADENGVVSHPGNVTPNISALQLSTPASSIGSKRRGRPSNAGTESITASQHSVSSVGTQIASATQNDESSPRNKKGKIDDFDRPMSALEAIASTPVSTQRNRGGRPSKKRGGHAGSGRSKANDSMSESSSMDQSSEAITNVVVLPTVTDKINFSTVQINFATTRNFACKIWKWAAIGLYERDGETALAPRSGPRFIETCWNDLTQFLNDGFAATYLAYLASISQRKVVVVDPMVWENGLDRVMQYKNMTFGYDPNVQAEVILLPVHFPGHWTLIVHDVQCGTHFADSLPTPYGRLDVQLTDKIIKIISDILPSTVLTGIVDVQNLTAQHDGNSCGYFVCLYAESWLMNNRTFVLPDLSINYEKKRILWHINELYGSDNVPYHPREGVPTPCPIVYRHADEAQSTSKAVESMEVDDNDDIMIIEPQTSGQAANAILTQAQVAGENQVDSLGLVSESCAPQEPIAQADDVIFVRPKTPTRRSVRIGRRQSASISRSPSPAPRRRLSTNAVEQVTAFTQRCYLVHKGWCCAAAAAKHYPEYSNSGKLGDKKCSHCGALLFPHEDSSLCCRQGRVVLPKLNPHPKELKELIACDKQSREGKEFVRHMSRYNNLLQFASVSAGNKPCPAGGPMAVILNGEFHRRISSMQAGTTQIPGFGQLYILDPVEAMEQRRKNPTFTGGKITNDEEFVQGHQLNDETLEILEQMIQENHPAASAYKQAREQLQELLRQQRTEELRFFRMTLLNERSAPGGLKDPKLHPHQIITPSTGEGMFAIHADPTGAPAPKGIWVENKQGQLNEIAPFSPWTDSLTYPLIKPKGDDGYKIGIPYAKPAQKKRRSDQCVDLFDTDTMSDDDICETESIASSDAGSEASMQSVTSRYDKSKKFVSLRDYCKYYLAIRDENLEWHYHHILSCGGGLGQRWVLDQAAKIDWQIATFLRRPDMDLRISTPKNLLLYLVNQYNKQQARQNPNAQQKSVDDIGSVVRLSERNVNSLQYWKKMYEDCNTIFARCHDAKKARLFITFTNNREWPEFKENIYKNGQMFTDRFDMWMRVWSSKIAVFHQELYEKSFFGTILGSGESMEFQGRGGPHAHIVAQTDLDAVPEVIQEYIWAHIPPLPCKDDDSPIAQMHREVRELMHMQLHRCSDSWCGPCDPNFGRCKKGFPAPYSKCTILHPDRPALYYRPSPTDGGAQIEVNGLIYDNSQVVPYNPYILLRYRVHHNVLFAYGNKANIKYALKYPFKGPGHCYVECKEESGSKIGIDEPAQYAKMNFRGATEAFAVVHSMPFAKLSHHVVHLSIHLPNQQPVVYRAFQLVSKAEEIQRGELPETPCSAYWKQWQNEWQHVPSLKDMLFEKVPEQFRWAKDRWVPYKKKPVKRPPIGRVVPVPPTDRERFALYALMRHFPGDPDHLKLVNGQQYNTFTEAALQHGLLEDDQIWHKTLGEAALHRWPDQMRWLFVSILVFGQPSNALELWNKYKDQMYYPQGITSAAIRQAREQQALADIDWRLHFFNLSCVHFGLPDPPNSKAKNTNLAVEEFFFGDDDLNMPPGQPNRKPQQYTPPPLNSDQQKVFDAVVRAIQSDPKDQTVPRRFFIFGDGGTGKTFLFGQIIKRLRKPPYTYKVLATASTGCAAILLPYGKTAHSTFRLGREVSLDKLPSIPLESFFARRIREAQLIIIDEITMLHNTVIEVIDRVCKEMAIRQHKDLLFGGKTVIFSGDFKQSLPVVPHEGLTAQVLACFQTSPLFGQFTTMKLTINQ

SEQ ID NO: 158500 - protein, 72 aa, Heterodera glycines
MPNSTPTVPFELVNERTQEKLTLLKESDAFANDWLLKRCPIVGETAAEVKWKDEYFFSARVDISLSVDNHCI

SEQ ID NO: 158501 - protein, 141 aa, Heterodera glycines
MKGCLIGTRELFCNELREYRVFVGFWQKHECNKPDNVPLGQRCNFDAYFNEIHGIYIAYFCELDEDQQQDENLLCDVFLPEFDNAPTLVKTANLSFGGRYIRGFLEKCQNMGIKYGHKCQNMDKYGNKSRNMEKYGYGNTA

SEQ ID NO: 158502 - protein, 207 aa, Heterodera glycines
MARLLLLVFGLAFVFAVLAFGSAQPPPPFQGSGQFGAPPFGGSPPFGGNSADVSVSASDSSECSGEGGNGVQGGGEYGNGNGYGNGNGYGNGGFGGGGAEGGQGMDIDVDVQQSSEEGKRRRKRHSGFGQLIDKIKNFVGGKESMERENDKNGFRPKRNYNPLMMGAMGASQYGQIDHQLIEKYKHLFPICRFDVRLALSVELGLWE

SEQ ID NO: 158503 - protein, 177 aa, Heterodera glycines
MAFGSFDGLSTSGVSSLQRLSLAGNQIRELLVHLDLSQNRIGRLTKDVFERLDSLEWLSLDILSSLKNLRQLSLAHNDINETQESAFANLPHLEELTMAHNRLRTIKEALLRLITPGVFDKVPSLSRLDLSHNRIEAFDLDFLGPTQVYQLRVLDLSFNVIRKLEIQSAKHSLRSWT

SEQ ID NO: 158504 - protein, 362 aa, Heterodera glycines
MSGPIQKGIINALKALDNAKSATSLLLHPDPDLSNWENAINLEAQFDRVVKEIRTTEMQMDSLRDLSNAWIELLARLTGDDKDNGEKEYIKFDKNEKIAERYDAASTKLRDLRDLEATLSAAAKLHRGRADREAKADQLANPQQQPPMPPAMAAPMTMPTFTAPLYQFQPIQLDKFFGQKRKWPEFYESFKSAIGSQSISKAQKLNLLRNLLGGEARELIAGFRLEDANYETVLQLLKDTYGAPEEHIRSLHFELANLKPCRSLRETKDFMLQLERLTRELNNAGEDIEGPQVFLMLEKKLTPPFLRSILTKKGEDPANWTTTKFLDVLTEAVRKEVQIQEVMGEYGHHYVQPKAEVVSAAP

SEQ ID NO: 158505 - protein, 67 aa, Heterodera glycines
MGPGHLPVTAVFTPSKVIVDEIVQADCDKLLFKHTSSVPLHLDKLADNAITDIVFRDWIDNLTEWVL

SEQ ID NO: 158506 - protein, 62 aa, Heterodera glycines
MEFEAECVDAMQKCMECGWAKCIPQEGIAASHCCAAGYNFTCCTEDNIKHLGLSKDIKVFKI

SEQ ID NO: 158507 - protein, 139 aa, Heterodera glycines
MPSSAQRKRAELHWGIIGLGNIANDFVLAMAYCQHPNKVTAVATSNSVERAQQFIQKVGLNSEQVKAYGNYEQLLQDADVGLLVWFLSELAENPTNGARRTDGQPQIGLGGFQSKIGESTDGGKKVIDVKVIGDVSAED

SEQ ID NO: 158508 - protein, 107 aa, Heterodera glycines
MGDIEGLVEKVTEMGLEDNEELIKRLKQGQFTLRDMYEQFQNILKMGPFGQIMSMIPGFGTDFLSKGNEQESMSRLKKLMTIMDSMADNELDHPKANDLFNKEPTRV

SEQ ID NO: 158509 - protein, 161 aa, Heterodera glycines
MSGPIRSKIGPCAARTKAYIEAATVNLGKDTTDVSIQADLTAERRGLRRAIQLLEDCNDKWQSLLLKLNGADRQQEEQRYDDFKPSGKHFMEWADKARGAVDTIDGVIGPEDDDEITESIISQPANPPQIQHVQPPPPRHEVNLPPISLPKITGRAKGRAK

SEQ ID NO: 158510 - protein, 28 aa, Heterodera glycines
PSHFWPIKRAPFSLYAHFHISIHSFLLL

SEQ ID NO: 158511 - protein, 38 aa, Heterodera glycines
MGDKLVFDEFNEEAFNIMGKSETARILEMYKNKENNKR

SEQ ID NO: 158512 - protein, 62 aa, Heterodera glycines; identical to SEQ ID NO: 150419

SEQ ID NO: 158513 - protein, 73 aa, Heterodera glycines
MTNNEMAEQSAFQSKLMLLRLKKVTHLPIDTDIKGNGEKEAEFPLTDFTSIMMYLILENIWDNRSIDVMTIED

SEQ ID NO: 158514 - protein, 63 aa, Heterodera glycines; identical to SEQ ID NO: 130392

SEQ ID NO: 158515 - protein, 204 aa, Heterodera glycines
MMNETGNEDWFDNVENLRPIRGGRRADTLNDIATGKAKISIERAEQKFLTEFANASKGSDPLEPMYRFTIWFEEHFPSGKQKHFCQFLYKICTTYCLVNAYKNDDRLMKLWLKLTENFPESGFAIMEFAFSKGSCRQLAKFYIHWSTMYQSISWWNKAREKLQLGQKMCAMPLDLLHRAVDELEASVMKVTRSGENSEETEADE

SEQ ID NO: 158516 - protein, 50 aa, Heterodera glycines
MHGGKRPSGQVINKYLQVQDKQSGEQVVGMPFFVGVVLKFDPINSDYQTF

SEQ ID NO: 158517 - protein, 26 aa, Heterodera glycines
MWIRKMSPVAKCHTKNKDESDLFIVF

SEQ ID NO: 158518 - protein, 79 aa, Heterodera glycines
MPKAEMIPKNEPKKCLICGGLSSFKYYSIPSCEACKQFFRRTVMLQIPYVCKKRGNCEMSTPYNSKILLIIFIINYQNV

SEQ ID NO: 158519 - protein, 195 aa, Heterodera glycines
MNLQKATCLFGTHFVRQSSDQLIREWVNENFKNTNDFGSLLEKIENFIAYYIVALPCKLNEKMNEQLTNEMTTEIGGETIRLSESQVKQVNEMLSDDHRWENGNESEAFQKLKRELGWDAKYDPILSKIAQRTVGMTSQVEKNMDDHAAHCAAALLSELSNRHDWVRMNPTEAEYATMDGIMCVHVQIQDALFQI

SEQ ID NO: 158520 - protein, 104 aa, Heterodera glycines
MSSWPGTPEALLAGMFKHCIEEAVADSRERGIEPTHLGCMISSPLLEDGDIPTPIQQMTNNTLDTILSQFKKMAQSKELEDVMLCGEPFTVTITTLDRNGLGRA

SEQ ID NO: 158521 - protein, 725 aa, Heterodera glycines
MRIRRQKKRNPNIVFRDSFNLMPMSLASLVPSFGLDVEDKPFFPHMANHPDNYGKQIHPTPDDYLVKGMMPDKRQKFDDWYEQHRQEPFFLDEALASYCTNDVEILMAALMAFRHEFLDVTKRNEGIVAERAAFYEHHDGIDVLRECMTIAGACMKHFRTNHLPKKHLAIVPERGYDNAQNQSLLALRFFHWYAEEHGVVVQTAHSAGGEKKIGQYSVDGWVEEERRAIEVNGCVWHGCKDCFPNDNMMMPNGKTAGEVRERDEKRLEFIESQVSRVDVYWECQIKRMLNRDPYMCESFGDYVDDGPLDIREAFMGGRTGPLKLYHKAGEGEKISYYDFTSLYPYVNFSTTYPIEHPKVLILNENVEWTRARDNPYKLSLLKVWVIPPRKCDVPVLPVKVNKRLCFPLCMQCCLDYPKGGVDFDYHCEHDDQQRGWVTTCTSIELDAALEEGYRVTKVFRVLKYRHGDDKLFRPYIAEFMSQKIEASGFDASIKGNAELEQQQFITECAEKFGISIDKDNMKVNKGKRSLAKLCLNNLWGRFSLRNFGLAQTLITDDPSVLTEYVENSSIDIISVDELDEKHQLISYVQKKEGVEEHECSNIIISLWTTSKARLLLLKAMQKVYGLKLRRNGQDEFVLKLRGITLNYDVMQNQSLCYDTFKEEVLRYAQTGEYEQINVMYPNFLRPDIRGGGHVTSGPLQKCYRPYVGKGIVGPNYDVLNFGHIL

SEQ ID NO: 158522 - protein, 179 aa, Heterodera glycines
MVLVIEFCAQILGCSPKSLRDKLNHPEDRVKALKELVGKKVRTTYQDRNGMQKTFFVDGISDKGAALTPAYGRLRQPYNINIAAHFYARHRIKLHFPYVPCVVEKYSGCGEDRYYPMELLEIVDEDYTNKERWLGKLFTEIEDDFIPVKRLGRVDEVEEIDDNDGGGRYECSQPSYVYW

SEQ ID NO: 158523 - protein, 97 aa, Heterodera glycines
MADQFVQPETAEEQQVKAKKPNVDERFLWKITRGQFVLAIRLCSEDWNNLFHNKDKTRRLEDGRVAIGLEMCEECAKLNCCVSDLIAGQKKNQKKPE

SEQ ID NO: 158524 - protein, 312 aa, Heterodera glycines
PKTRIKLPRGKVPARVQPITNNEQNGAEEEQMYEVESILAMSVLTTGERLYYLACCGSPGHDSWVRSSWSEALELTVNFIEDLTINQVLKALLNEEAVEAQLVVKLTTHPLFVRCRRFSYTVQEMEYPSNLTWVVVPQCECVAPLNVCVRPADYRHPIVCVPTFLVENFPTTISQCVPNGTDPMLKVWVTLVFLLLLELSILLLMVLMTRRLHSVKNVHRSPPKSEYKMPLAIPPFKHRTAPPEATDENGDGFIEDSWISDSTDRELDAGVTSDKNVVDGLPPKPKERKYKSHYVLTPIPEEEDNEQEDKED

SEQ ID NO: 158525 - protein, 175 aa, Heterodera glycines
MEKLSLDLILTDEEESSADGQLQKDDGDEDDASVREKKLQYNNLGYFARFLKTELAGACAGAVDKVVGDFSTTSSSSSASNGSSVDNNRDHVDEQYAQQCQQQQHQNAVQQQQFQAVQARLWTAALALAATRQQQQQQQHQLLPDQQQPQFVPAAAGTCRPPASQPPFSLASSMV

SEQ ID NO: 158526 - protein, 145 aa, Heterodera glycines
MSSPPTEPNAFAIFDRDECSDSDEENDEGESMLIETGHVYAQAARNNSEAARDNAAAARESARAVRDITDLMVKQLESKDRQIVDKEFQLAQKNVLLEEKDLQLEEKDRLLRQKDEMIARLQGIIAHGKREKKSIEKLIAHLIKF

SEQ ID NO: 158527 - protein, 18 aa, Heterodera glycines
MRTRPIWQVKQRLLTSQK

SEQ ID NO: 158528 - protein, 24 aa, Heterodera glycines
ITGVSIIAVLFLVFLMPSQNLVRF

SEQ ID NO: 158529 - protein, 133 aa, Heterodera glycines
GRIHYTDMYEMLRNIAPPVGFGRKCPYRLAYKHLIRMNMPVSDDGTVHFSTTLFALIRESLSIKMRPVEEMDEADEELRQTLRKIWPLKAKKNMIDLVVPPNGDLCFQKLTVGKVYAGLLILENWRARKSGVE

SEQ ID NO: 158530 - protein, 146 aa, Heterodera glycines
KKIRQLELEKEELQHALDEAEAALEIEESKVQRLQIESKKKLETDINDLELGLDMANKTNMEAQKTIKKLIGQVEEEQRRREEQRENFLMSEKKLNIVLSERDELVVRREQMERDKQRVEAEVQEERARKTELQMDNSQLSAARRQ

SEQ ID NO: 158531 - protein, 30 aa, Heterodera glycines
MFFPAILVVLLLIGGLRSFCGAIEAKMSIK

SEQ ID NO: 158532 - protein, 155 aa, Heterodera glycines
TALNRFLLWLRRMRNELKDDFGSILLLLLLYLLQGVPLGLIAAIPLILQSKEITYSQQAVFSFAYWPFSMKLLWAPIVDSIYFRRIGRRKSWMVPCQYLIGLFLLVISYHVEEILGTEDKTGSKFDLDLYPGMNFSWAWIFVQVQNGIVKAFFEL

SEQ ID NO: 158533 - protein, 298 aa, Heterodera glycines
MAKCIVRLLNNEFQIGLKNAKIIDGTKNMLKSEKWVGEIRVESESDEESGQQKRTEKGHDEKGHESSSGEKESVNDSSKTGYYSAMPKFEFAKVRKREAIFAGNQRHLNKGFLARKRQNIAISKSHSYNLLEAKRTFGLSPIGGFARFLMSGILEKKNKTRTIPWQKTISKIQKAKREHNQLKKEEKKWRDYALKQMPTKSATIGTNEKYMTMNSADETTAYGSKVGKLNEQIAKLVNDGIKVGMRLADLQRKSKSIEHSKSDEFNEEKSDEIANYDEDIEGEEYGSEQSENYGNNGE

SEQ ID NO: 158534 - protein, 90 aa, Heterodera glycines
MTLKAIVGQKLINEVLQPLHNPQKGGAWNVLIVDRLAMRMLSACCKMHDVMDQGITIVEDLNKRREPLPALDAVYLISPTKVKLSSIIYV

SEQ ID NO: 158535 - protein, 200 aa, Heterodera glycines
MHAKSRWQGGDVEGARQILSQAFKHNPNSEEIWTAAVKLESENQEFDRARKLLERARNSAPSPRFWMKSARLEWCLDNLDRANELLAEGIGRYPDFEKFYMMLGQILTQQAQFEEARKQYLEGTRRSPHSIAIWLLLIRLEDSRGRHIKARSQLDIAKTKNSKCDQLWLEGIRMELRAGQKELAQSMLARALQECEHSGK

SEQ ID NO: 158536 - protein, 152 aa, Heterodera glycines
MPFIKKRQNLVLNVLNNDKNLLVAPQQPLGIRPLRKPSPSSRQMAQVQQRSVNGMPSSNILKRFKFSLRNACEPPTTHPSNSLADPSAQKGAYGATNAIFNGEIFPDNLILETELLTNAIKSLLLDLQNAPSNRNNSGGASTESNALFHADS

SEQ ID NO: 158537 - protein, 417 aa, Heterodera glycines
AFPMEFSGTVCADCGASCPSWASLNHGVLICSDCCFVHRNLGRHFSQVRSLTKGVRHFSQVRSLTKGVWHDKQLALLQLLCRNGANNVWEHSLIDSLGAGRAKKKPSDPIIPKKEAFITAKYAQLSDPIIPKKEAFITAKYAQLAFAIRAKDEFNVDDLNRQLWSNRQLWSCVRTAHVETALRLLALGACPNYADTEKGNTPLHVAAKEGQNLQAELLWLYGADIGQRNGAGQTPAELAKTEGFNELAENELAERLVELEYEMTDRFSMFLCGRRPSRRPSHRENQHFLIPDLVDSKKNSQVKQFKDSIQRSSGLILERMVQDVYDEVDRVDRRELNGHWIASEHHPTASANQHVAMFLPPNPRLSAPNPRLSATRNQLRQKLAKFSSADFAHLIIDLLKEIRRRRLNLPLPATDSQ

SEQ ID NO: 158538 - protein, 253 aa, Heterodera glycines
MVDEKQQHELQRVRAVHGAEEEEDEELFLLHEDTSTEPMNIIDVEDEEDFDQDEYQHNRGIKIFEREEKMEGQQIMPQQRAPSSVSKVEVIMIRISRGLPSALISKIDLSLFRWSEIFEIGKKFESNKKKEIFKILNLVILDKLFTFFMKIQKKISDEQSGAEMISGSVSAGSVTSSPAKRQQHRTSQEIAGSANGSLLEFERIEREIHEVGAEHGGETSPKNERARAEIAAAAAVAAARGSGEALINVVFFN

SEQ ID NO: 158539 - protein, 298 aa, Heterodera glycines
DHLITTPAHHHVSPLVRSRSRSETASFASFRRSASFTSNSAGGFTLPSYGYGGGFMYGGGFMARSLSRSSASLFGRGLHSSALSLFGRGLHSSALDRTPPFHNIAVQRPTPHYTDKYPFVRYSYGNIETGLSIKTQTEMVKYPFVRYSYGNIETGLSIKTQTEMVSPNYYGSPNYYGIKDTGTKRWLEGKLNSYNSGIFSRKLNSYNSGIFSRPVSRERSIERPLAPIRSYVKYMYMPTEDAVDLFKKRCMTVSTLSKYWLSSSLWSFSRESRLHSFAGVVRVQPFPSLFYQLSKQIF

SEQ ID NO: 158540 - protein, 46 aa, Heterodera glycines
  unsure (1)..(46): unsure at all Xaa locations
SVINFQFXCFVYSVPLIRLPSDFGRRVVSDRQHLLSIYAVCVDGLS

SEQ ID NO: 158541 - protein, 145 aa, Heterodera glycines
IKFISKFCNFNIFSFKCRGDGRTYKVMLHIPQFMDITWGNSYTYLLHTHGGPHWQFEMIPFSRFVFTVEGRAIDVQYPVSLKLLSSIGITLVSLKLLSSIGITLMDRIEGPFRLEIDFIGATHDISHLEKHAYEKYNIPLGNPML

SEQ ID NO: 158542 - protein, 81 aa, Heterodera glycines
MIRRGATVIRRVTKMIRRGATVIRRGTAEIRRVTKMIRRGATVIRKGRTVIRRGATVIRRGTTVIRKGTTVIRRGATVIRK

SEQ ID NO: 158543 - protein, 197 aa, Heterodera glycines
MMKSSADAEQFGRLSFSINSLFSTQEVASSSSASDPTTQLIISSLNSVRKTNEGTTDNKELSTDEDEQQNVASTSTPEDGEFSKISRIRKRRYSQARIQPTRVKKVMQSDEDIGRMVASVPVAIGSAMEVFAEKLLLAAAESVQHSSTKTLSPMHIKMAVSRVPQFSFLEPMLRDVPMNPKMAPSFGQQSSSTSNGE

SEQ ID NO: 158544 - protein, 405 aa, Heterodera glycines
AIKRCYSIGGTPTQSPMPKYAALIGGTPWINSTNTIGTTSSSPPCTAAAGTTPPAMPFGRQFELLTKCHQQKQQQQTPPPPLLPRPPSTVFPTTVMQQQQQTPPPPSPVTTATSTVVNGPGNLSELVHHLYNTQQMQLQLQQLQQQQMLEHIMPKVGGIIPTTQTMPAPAAVTTPMVVPIHVLQSLLTTKVVPIQLTESIAPAAPIVPKAVPIQTPQLSLSADNTTPKSASQIRETAVYIAPKAPPFSAAGNTTPKMKGEAVPIQTAAAKQTPAAAAEENAKVGTCTNTDGTASSSSSTGPCFSSSTNAFAADVPTKQNAFAAAAYGEMLMTLFLMQNLLQLYGTRYDPTVRSAFSAVPPKVERQQQQQVQAVQATKTAAAQQQQMEQQHQKKHCENGAQLVQID

SEQ ID NO: 158545 - protein, 101 aa, Heterodera glycines
MKTLRNQVGRQTMPMVVNFGRTGDGQIPGQVGGRQSSMPPSVVPVNLGSMPPYQWYNWFTPTTVKQACVEALAFAREGGLKHENILKIIKMIEERENHDKK

SEQ ID NO: 158546 - protein, 204 aa, Heterodera glycines
MAINISDTKSLFNQILAQSDITITTSGITVSGPRLSTPRFLPFDDCGRCRVCKATEAEVDTMVTKEGVTLWCTRINKPQFVPFDVVYDLPGHCFFRVKNKARVFNVPYGDLPSGTCAKNKPTDHQQQQQQQQQDLKRKAKVALDLVEAGLMADAMQDGARWKKAKTAINVLGNILLAESLDNTSAPPLKNDAVDIKKEEEEEAN

SEQ ID NO: 158547 - protein, 173 aa, Heterodera glycines
MRATTPADGTGGAADGHGTSDRNNNSKNNMEAQSVIGMSEAGGTADDSVESFKISLFSELSIVFVLRSVTLTTPVAINGSSSCAEAAADALPTPQPQQLQAVPTPTPPPAEFWPNGACNRKREAETEDGQSARTTAFTPVMLGESEDFFPFIDDSAGTSLQEGSKAEKEEVTR

SEQ ID NO: 158548 - protein, 65 aa, Heterodera glycines
AQKSIYYKHNNNNNTKYNQSLGLGREKVSGKVARRLHFQYRARVCLACVGGCRENGDESLVEHWL

SEQ ID NO: 158549 - protein, 195 aa, Heterodera glycines
SSPSSSVSLLAIVTIFCLLCKCCVSAPHPCCPCCPGSQKVVSLMANYVGTFAHSFSKASLCSDAQSVAGALKGQLIGCSKGGDATLLADIEASLGTHSADECAHSLGFVRAMFVIAASASSHASNNSEWQALSAQFGQQISEIDSKCAEFGIGIAKVPFDGPKGDHSQRNDHSQRNVPGTDSVISMPGLTGSHKQ

SEQ ID NO: 158550 - protein, 96 aa, Heterodera glycines
VAVVLSSVHLKEDKIDVPQRVKRGEYGGGAYGGDGGGVGAPAPGGGGAANIANVNINQQNGCNGRGPQYQWAYTRKTGWVCINIINVIINQQSGGK

SEQ ID NO: 158551 - protein, 231 aa, Heterodera glycines
SSPSSSVSLLAIVTIFCLLCKCCVSAPHPCCPGSQKVVSLMANYVGPCCPGSQKVVSLMANYVGTFAHSFSKASLCSDAQSVAGALKGQLIGCSKGGDATLLADIEASLGTHSADECAECAHSLGFVRAMFVIAASASSHASNNSEWQALSAQFGHQISEIDSKCAEFGIGIAKVPYDGPKGDHSQRNVPGTDSVISMPGLTGSHGDHSQRNVPGTDSVISMPGLTGSHKQ

SEQ ID NO: 158552 - protein, 148 aa, Heterodera glycines
MNERMREANDPLPVNVCPFMHFEPAEQQQHHQQQHKEKVYHLNPTKECVQSILKQCPPAFLSNLAKTVCLFSMAIFYCFLDGGVLSSMLFLLLVPLFVVGICDGLQQRLLLTQVIDTKRDEAVAQQRYHLFTLLLFTSLGPFFASLLI

SEQ ID NO: 158553 - protein, 151 aa, Heterodera glycines
MPALTTPMNGTAEGQQRQFWLPNELIHELLIWVRPSYFWRVRQMLTTSAILCPLLMGGKHAITWHQPYDVGTKEMSHADRTFGSGKQYALLCRSHSQTLPGNFMRYQTHSNGTVTVYVLLILDESKFESPAHLAQSVRKMSKKEYLFIYPI

SEQ ID NO: 158554 - protein, 170 aa, Heterodera glycines
MPALTTPMNGTAEGKQRQFWLPNELIHELLLWVRPSYFWRVRQMLTTSAILCPLLMGSKHAITWHQPYDVGTKEMSHADRTFGSGKQYALLCRSHSQTLPGNFIRYLQTHSNGTVTVYVLLILDESKFESPAHLAQSRNFLDCSGSLREGHQTLGQGITSMTFVRCPGEE

SEQ ID NO: 158555 - protein, 362 aa, Heterodera glycines
MPKDRQSAESVAQILRPAALPIAAFSAASAQALVDANVRRFTTTAPLFTDYVKTLVELLKMLGSDLVSIVDFGDDFAYTPLLQEKLRAEGISTAEVVSLDHPMLPSILSASDAKIVVSLVPHRILRNARLGELRALIELHKLWVGIDTELDGGTDAAATDGEGNAAFVTIRRRVRQLKEFSAYFLRVLQSNHAHYTLLRAYAEQVFDCDVTVGTGRNCTDGLLSAERMAKLHRQSNTAEAAILLTYALARATEWIQSKKELAQKCTERGSFAGCHDATRTALLSFSPNDRLLSSGSVRMPPGFIKQLSEMNFFETPEGVVQLTGIGIEAILAEREDKDGANLYRHGTTEEERIVQKLMDECL

SEQ ID NO: 158556 - protein, 46 aa, Heterodera glycines
FDFASCQCKHFGENCCRSFRRMAKAEGFAFKGFARHRFRCVWLARG

SEQ ID NO: 158557 - protein, 119 aa, Heterodera glycines
MQNPLEMGTYRVGSETYRRNCPLEKASTAAPAAGAAFGATTAENDDALSPSSSGRCSSSEVRQADFAGSDYGSPGKRACISTEKRKATTILTAKAAQEIGEVSSAGENVPLIVQRKTVE

SEQ ID NO: 158558 - protein, 166 aa, Heterodera glycines
MTKQPISSNSQTVCRRRGVPSYIEEAAENAKTEVPTTSSTNMARHKAEAKVRNGGGSAQMAAHSQPTKGPRCTTAAEEEESSEIEHFAHEYKKQLRRILPSTYAKRLLPAQLYRLVIRKTKSAVVAMRYVRAHSATVSLASIEQSAQFQQLLHQIEDDQRPPALLM

SEQ ID NO: 158559 - protein, 35 aa, Heterodera glycines
MHESFLKYVLIECLINLQIKFENALKRPKFYYMLV

SEQ ID NO: 158560 - protein, 77 aa, Heterodera glycines
IIFIQKIFFWVFGAVPLNRCAQIYGETESFGNSFPIVCTLILRWIFAPHNCLSTPNGHLKKSIFLFSGQSPRTDAPR

SEQ ID NO: 158561 - protein, 56 aa, Heterodera glycines
MCGRGTAVIRRGTTVIRRGTKVIRRGTTVIRRGTTVIKRRTTAIKSGTTVIKKEIS

SEQ ID NO: 158562 - protein, 82 aa, Heterodera glycines
MAIKYGPKIAKYGHKMAKIAKYGHKWQKCQKMDINFSKLSAKFLQIYWLKLHMRYISKFFDSRKINNKSEIFAFLLIFDIIY

SEQ ID NO: 158563 - protein, 51 aa, Heterodera glycines; identical to SEQ ID NO: 124998

SEQ ID NO: 158564 - protein, 48 aa, Heterodera glycines
METEQDLDSQNEAIFRRYHDSIGPLSPQDQSDEKEFSTPGPSDQRKKE

SEQ ID NO: 158565 - protein, 439 aa, Heterodera glycines
LPDLLRLLLFPFVLHSLPSLFHLFPSLRAFVRKFPDFLLVESDQQLLTALCQQLLRQMAAENAEVRQQAATSALAQLKIAFRIARGFVRLNRCLTSIARGFVRLNRCLTSALCSLVSTSVASGKALDDNALRASLTLVPEAKKSEKAEFMSQLEQLVVNLNAILSDTFKLSAHIDDFEMSVDLMHRIAHGYRNNPKLRIAWLLGIARIAWLLGIARKHLEERKTYAEAAQCFLHCCAIVATTLLNAGTADDELLPVRCSTFEALSENISEEEDKRGKERLTDGAENFTLSAFIKMVEKMANLFERAQLFELVANALKLVLPLFERTHAHVKLIQAHAQIVSCLSRICHRMDKRCFGTYFRVRFYGVKFGELNGKEFVYKEPAITKLAEISARMEQFYGEKLGRETVETMKDSNEVKLGRKRKGRDQGMDVSSRKLTRNS

SEQ ID NO: 158566 - protein, 152 aa, Heterodera glycines
MELDFRLDTFERMLALMERKLENVNVDEVKKQSAEEKETAEKAEGMTRKEKGEETPEGTGEEKRTDKRQGKETAAEVTTKANEHPKLAKYFKMLKMGVPEAAVRQKMRSEGMDDALLNDPEKELPLESPQNKAQMVHDALAEDDESSSNSDE

SEQ ID NO: 158567 - protein, 94 aa, Heterodera glycines
MSIVVPSDIKPRLRGSKFAHATEEERKAIAAQMEQGRDANRTATTEAKRNAARLGQAEAKLDQQIEAEKAYFDAQLEKLENELQFVASLLPKSQ

SEQ ID NO: 158568 - protein, 121 aa, Heterodera glycines
MPTLYQAVPGRSSVRSSTMPTNRQNELVTVDNRPGLTVPQSWRNFLQTLSICIAYFLYGKEKRQKSRDEIEEGTYPVEKKTIQNKASKNRKRLTRTHSIPLTERWPSPEQKPTIPGKMGLK

SEQ ID NO: 158569 - protein, 44 aa, Heterodera glycines
MAKYAFILKNLQDMLLYLEIGFFILVVKPSVFRCLSLGFNSPLG

SEQ ID NO: 158570 - protein, 289 aa, Heterodera glycines
MYMWAKASVFGDEEAASAILRTSNPKECKRIGSRIRLFNTTAWRRISIFVMTCANWHKYKQNEDLMRHLFNFGPDAEFVECTANDVYWGAGVALSDVEKIRDINRWPGKNILGRILSALMKKFLRKKSEMSAPTAPPNVRDLSEFPPLEKLTLEDVRKKNKIASASPSGNSNISKETCNSAISVDLVASASHITWGGEKGNIGQEKGEKNQKLNKNVASASQRVSENFANQGFDKNPDEMAEEMMEEFSSFNVGENEGKIVEYLVCQVEENIVIGGKLRTMTTKAGHIL

SEQ ID NO: 158571 - protein, 45 aa, Heterodera glycines
MGESAPQKKKKYRDADARILRLFQRYNDVNNNIVPQNDHNYANVN

SEQ ID NO: 158572 - protein, 120 aa, Heterodera glycines
MVIKRLRRDENAPRAEPLNLEQLEIPNTYRVYKRTEIDEEQFLLADTGVFQIHGQNGPQRFPDNYMGRIRFNVPITAPLFHPHEWSVHQRTLDSADRTNNFADAFHRKLQRLFNCTHPTI

SEQ ID NO: 158573 - protein, 177 aa, Heterodera glycines
MDDKSLPFPLPDRPLPSKIRFKHLQMWHIDHSVIAFLRSNHQIFDKRGTNLYLAIPSSHSTNGQPIWDVFVREIWPIFSENIRHLHFTGDDHLDNLLRRTSPTILIDLNQLNSIHSFGLSPAAFGDGFDVPNSTISAGQALSKWLHSPRKDGQPKRFRCGRNLNAQADFDWVNSFKE

SEQ ID NO: 158574 - protein, 94 aa, Heterodera glycines
VKFPENSKFVFVTAANNAYFGPLRVLIASIKQTFGCKQKIIFYDLESVRQNKEWVINQIVNRDRTTGVGGIPNLNQKIILKFLFAENFFKNFRG

SEQ ID NO: 158575 - protein, 282 aa, Heterodera glycines
LKFHLLLHDERLFLFLDDFMLASALITFVTFTFFGMPYGRYAALSFFSKIPARIGWFLQEMPSFVLPTFAVCWQLTIRFLPPVNAIVLLMFIAHYFQRSFVYSFVYPFLIKGGKAIPAPLFSLGFIFCTWNGLIQGFYHANCAVYSSDHFWTLSALIGLPLFALGMFILPLFALGMFINIQSDQILRDLRKPNEIGYKIPHGAMFEFVSCANFFGEIVEWFGYALFAQSRVAWAFALFTAANTMPRAKEHHRWYFEHFSDYWYFEHFSDYPKKRSAVIPFLY

SEQ ID NO: 158576 - protein, 26 aa, Heterodera glycines
GSAAKTIPSEFAGFIAGNIGTHCSKE

SEQ ID NO: 158577 - protein, 1145 aa, Heterodera glycines
MAEQNSFNSQKGENVVLQGQIGSDFDPIFFTPEENQNLNNVLTRMRTFESAICRQFRKLEREFAELKIVAHQSDDTDRMVKIERSIIDLEDREEMDNFQMEEKVIKMAEKAETLEIRQNSFERLTKVKFNKVVEKMKVEMAKITENIDVLKIRVENEMESCEIMVSDPFLGGIAPLEMFDGKPSVSFSRWASKFVDMLSLLPQLTETQKLSRLRILLIGQVRAEYEALDPPPENLTTALNHLKSKFENENTRSIARQALSICKQAPGERVSSWKDSFPSSNLRQNTIQYKTEATACKCVKTSISRRIGFFGGKIEEISTSPVEVPTAICHQMKEMKHSPAGDLIFYEGNKTFRATNNSLEVGWSSWPTGIFWTTNEVTNCYVYEPVVFTRHGMPGISTPINDCNACVYQSGNCHCSQISLIWKPDQTHQCAYVEVGRWGGEYSTRIWTANYGDFALTFLNASRKSDCDGTEFVISDQAFAVPAAQYDEIIKRSGEPNERRKREIGLVYSSQLSAQLTALSVKISQNTQRLFTETIRQICMSLKFLADQTLALAEAIPTLLARFYLGNPFLLARLVTKETLEIKPCFAVNEREMHFNWQSGPCFDKLPIIFSLYGRQKHGFLDPNTMIIHQRAGEIYCNHAKHLYILIKGSILQYDQMTGEMTHIPYGSLHQLSRHGKIDFPEFPVQFFKNKVMANLTELYSPENFNETMEVAKFAQEIARLSKPKSPELGTATPLQRSLRFKENEQRVVQIAVAETNCDPNFRIAGMANDKKVIHLLDTGAHVTLCGIQTAKRLGITELEPAEISGVIGVSGKIVNILGQKKIEMQIFGCTVETVIYVAEAEIGGVGTYDIIVGRKTFRQLPLLLDLQTGTLIRKEDGQTYNCEKFNERDVYFYEPENNRENCGKIREELEICLDRNKSVFARHEYDLGTCAYCAPPILTTSDLPERVRPYPVPKKYEEELKAQIEKMLKSEVIRESCTPWAHNIVLVKKSNGQLRPCVDFRPLNKVTVPDPYPIPRMDKTILRAAGKKWYSTLDLASGFWQIPLDKESSYKCGILTPWGLYQMLKMPFGLRNAPSIFQRVMDKVLKDLPNVTAYIDDILIHTDSEKEHLETLEMIAHPLNQLTEKEKEFNWLEKEEEAFEKLKQ

SEQ ID NO: 158578 - protein, 94 aa, Heterodera glycines
MNRRWICNDVWMVMFPFFDRAQLGLKLALISPRFDVLVDKHFDAKTELTIWRMIILSKEIVTKPKLTVWDFDAVDFPLPEPFRHRISPCQSANF

SEQ ID NO: 158579 - protein, 58 aa, Heterodera glycines
NIDHRPQTQKCLKTVRIDVKRFEMGWKNRIRGALALFQDEKCRKWSAKLNWDSSDRAI

SEQ ID NO: 158580 - protein, 40 aa, Heterodera glycines
MFLMILLTNDCDNDDDASSSLVFVVVVLWSVEYTNIIYSL

SEQ ID NO: 158581 - protein, 85 aa, Heterodera glycines
GLRFPDAYERLFFDLFSGRQYNFVRADELEHAWRIFTPLLKRIEGDRVKPEQYEYGSRGPSSSDALMQKHGFVFSGTYKWPSVNP

SEQ ID NO: 158582 - protein, 99 aa, Heterodera glycines
MCLHCESGCFKDEKDGVHKCCDDACAAGCTGEGTDQCILYLSLFLGVQKVRAGRPLCDGVPRLRPLRSGGEAHGPAAGSGPTLRLRSALCANMSAGRSV

SEQ ID NO: 158583 - protein, 74 aa, Heterodera glycines
GNIPYNATEADIGNLFSQCGVVTNVRIVYDRETNRPKGFGFCEFQDQQGAQNAVTNLNGAELNGRALRVNWTNK

SEQ ID NO: 158584 - protein, 66 aa, Heterodera glycines
MSYFSADADASELITAQRRDDEQIQWVYDRMSDCVLRLFGERIWISYHRWLPSLAAFIYLSATNLR

SEQ ID NO: 158585 - protein, 666 aa, Heterodera glycines
RSGRGTWTIWRDFRPLCANSSCLSVALSLTADLDSEFDLHNNLSLRRWLAEPISSLFLDHSLFISDENISSLFLDHSLFISDENTSIPLNSVHRMLINYLLSNCRQSVTSIPLNSVHRMLINYLLSNCRQSVVLFSSSVQSDHFANCELKQMVLSTKQLILSNENICKSENPMSGYFDLLQVLRIIIFLSISEPFLQTPLQPLSDNLDSAVYQTFEQDNAKYEHYQMAIKAALLELSQRQMVRIVVFVLGAGRIVVFVLGAGRGPLVQAAINARDELEREKKHSEQNWKMKLIAVEKNRNAILSNWKMKLIAVEKNRNAILSLKYCNEERWANSVQIVHSDMRSLSTWANSVQIVHSDMRSLSTFVDSKVLERPDLIISELLGSFELLGSFGDNELCPECLDGVSPILKPGTICIPQTYTNFITPIQSLHLHQSVAPIQSLHLHQSVAADQCKSEEQSVGRSKKSVTYQNMLMFFPFRVFGCAFDRSYVVCMDQFCYLAGNVEPCFRFTHPNFQGSSNSRQSKVHFFQGSSNSRQSKVHFELPPNCELMGFSAHFEVNLFKLMGFSAHFEVNLFKDICLSTHPLRFTENMHSWFPALFPLRRLFHFRDTTTVTFNIHRKIDSDGCWYEWNIEYKGSDGQTTRGSDGQTTRSEIQNERGESQYMKLL

SEQ ID NO: 158586 - protein, 54 aa, Heterodera glycines
CFKVLSLTLLFFHLFQSASALRFCVLTLLFFPFIPIDHVNSFSIHLVSYFMKLY

SEQ ID NO: 158587 - protein, 230 aa, Heterodera glycines; identical to SEQ ID NO: 139868

SEQ ID NO: 158588 - protein, 117 aa, Heterodera glycines
MDKLSDRMNRLLSTGVDADVHFLVGQGDEQEAASLKEGNNPVEIPDVDVEAFKTMLSFIYTDDLSGVNGKNAIDVLYAAKKYNLPSLVEACVKIPIKELSNVFIAFSKARMKRNYAE

SEQ ID NO: 158589 - protein, 126 aa, Heterodera glycines
MRLCEVIVGKAPGFQLLTGATHVSVAGTAQPTETPAGCHVCSFAPVAASAQPIETHSPNATHAPLAKRSLAKPPGSNCCTGVTHVPVAATAQPTETPAGCHACAFAKSSLAKPPGSNCSRVPRMFR

SEQ ID NO: 158590 - protein, 108 aa, Heterodera glycines
MRGTREQLEPGGFANDDFAKAHAWHPAGVSVGCAVAATGTCVAPVQQLEPGGFANDDFAKAHAWHPAGVSVGCAVAATGTCVTPVQQLEPGGFANDRFAKGACVAFGE

SEQ ID NO: 158591 - protein, 46 aa, Heterodera glycines
MVAKLLPVILCCLFLASFALCSPNAADVLKFKREAAISSCGAVRHI

SEQ ID NO: 158592 - protein, 218 aa, Heterodera glycines
MSFVKTTVEALKQLQTSFTSDQMPIFNTLITTLSSQIDLLNGSISQLRSTALSTEGMPISAEELERQRSVVIIGMPEHNDSSPAKRAEMDRSKINCLFDSLGIECGTIAYRMGRSFNPAQKSPRPLKILLPSRGFQKQALAAWQKKQNTIRAADSSLHHVRLRESLTKAQLEERRRLHLQCVEKRQKDGQDWIVYAGNVILRDEVHIFRSQTIRESNF

SEQ ID NO: 158593 - protein, 605 aa, Heterodera glycines
MNKTDEISLALINKKISILLLTETWTKDNEGIPLSPWIKENYNYIFASRKSENSSRGGGCGILIKNEIAFFVKFSGTKFNCEILIIQLQNLKSIRFALIYRPPKTTLKQTKELFKFIQTFWCENYIILGDLNLSNRELVWRQGQPHAINHIGEIFCDFFNKFTFINATNEPTRGKSWLDLILSANDKIVKHCTVEGGIFSSDHLAQLFVLSVPEIRAKPKEICLRRFTPSNVSHLNAVISARLSSLSLSHFSINEKCCAFNSALLNALNECIPIKKLLKKDLAPKYPQHLLASIKEKAKLYRQCKIDPTKKALYDSITLHIKIQTKKIHNLIEHKAISKGKNSIFKYIQKHNVNPFEIPNLVFENKCYHESEEKSELFAILFANSFNNSEVVLNDLSLDNSYGNNQCFISDINFNIIETQTLLRKLPNKNGTSPDNISYKVLKNCHFSLATVITELFRLSLDSGSLPNIWKESIVFPLFKKGDKFNPENYRPISLTCSLCRVMERILSKNIYNFLLKNNKISESQFGFIRNRSTTNQLITVVEDWYEAIINGKKVTIYVILTRSFVSKTNSGRPKAGLGLKVVEGSYNFLRRIRENYREKFSADD

SEQ ID NO: 158594 - protein, 104 aa, Heterodera glycines
MPFPSFLIFLFATFFTFSAFDALDGEREESIASVPRTSPTFVRFSARAAPMPNESVFSAAQVGTECGANNARPDSVQWTAQMAECRKRKEVAQPMILAVDWHRD

SEQ ID NO: 158595 - protein, 99 aa, Heterodera glycines
MKRRKKQRRRPRYEAAQQTQQQQTGKEKNKRTKRAEKLTKKRRHWKRRRKDTEAAGHEAMKARKTTVLKERHRKCHQIRHQRRKKKRWHPYIIALFPVF

SEQ ID NO: 158596 - protein, 454 aa, Heterodera glycines
MAMELTSSVATPTAGPRHCHHNSGLLMNSLRTLETACHHGRPYSDGDGNDDDDEEYVKNGGEWHADDGGTTGMATTTNSNTEVQHDGEENARFGGGSGAKTVSGNTQGDYDDAGHGHCHADDGQQLLHRPVPRKQAFLANASEVPPPFSPSAVDDGTELLFVHRLDEQLATRRTSAPACLDTAPQFASGRAELRYLSIVYDLESRFSPIDSTTFATTTPGEVNCLKKLETHLYLCQQLMDRKLLYALPNNNNNLNKPNTSAVSCSSMYLPKNCVSSSSSPDSGLGHEMNNSSNIFNNNNNNNSNNCAVAVVGGEPSSSAAASSSSCCGLSGVMAAAASSPPSSSSASSLSSKVSTSIQKCGHLSTLLHSGNSFCGTSATASSSSVGAGFDGTSGAVPSALLSSWLSLLHARRLQCPSSASSNAVVSSSASLPASSACSSLFPSAAAASAALLHN

SEQ ID NO: 158597 - protein, 390 aa, Heterodera glycines
MTRCLLSNEICEKMRQERHQRRTEQSVSPGRSPVPDGSADGNGEVSASLRGTTTPSLSALQISTPASSIGSKKRGRPSKAGAKPILATQESVSLIDTPRTAVTQSDQGSPCKKRGKVAECGQPMFANEAIALTPVSTQSRGGRPAKKIRGPGRGRLTDSMSKSSEMDINLVNAPIPATSDTVPEKINFSTVQINFATTRNFACKIWKWAAIGLYERDGETSLAPSSGPRYIETCWNDLTQFLNDGFAATYLAYLASISQRKVVVVDPMVWRNGLDRVMPYKNMTFGYNPNVPAEVILLPVHFPGHWTLIVHDVQWGTHFADSLPTPYGRLDWQLTDKIGKIISDILPSAVLTGIFNAVNLTVQHDGNSCGYFVCLYAESWLMNNCTFVLP

SEQ ID NO: 158598 - protein, 84 aa, Heterodera glycines
MLEARKILNLLVILQLFLGINVLLLSSICSTEIVKPTAEESLVCFGSTMVVVLPCCPRIGRTSGFESHPSPNNFAHFLSYIFRF

SEQ ID NO: 158599 - protein, 49 aa, Heterodera glycines
MPFLNPKTNIVGVGAVNNPRILAANRIKQKFKQKFVPTTRQTFDSSSST

SEQ ID NO: 158600 - protein, 116 aa, Heterodera glycines
MQNDFSERIRKMEEQHREEKDKNGGQQNMKNYKNIFLFVNLKKFFKLCHKSHFGTDQHPGDMEIISDQQKEQQQQIDQLSIAIQEKCAKIATTENFYGGKIWHNATIKNKKLKRWK

SEQ ID NO: 158601 - protein, 456 aa, Heterodera glycines
MAAVDYIFMANIDQLPVTADEVAEHTQLDTTLRKVFDFCRNGWPKKSPTDLSAFFTHRHKLSEVNGCLLFGERVVIPAALRQRILSALHFTHPGIVRMRALAQQHVYWPRMDLDLERWVRHCVDCAMAAKAPPKTTLSPWPRTNKVYERIHMDFAGPCSDGNLYLIIVDAFSKWPETFQVKSTSADNVIVQLEWLYSRYGFPREIVTDNGPPFHSKDFSHFCRIKGIKQRFSPTNHPQSNGQAERFVDIFKRQMKKCSHGDKKWITNSLFAYRNTPNAALKGQTPAELFLGRSPRTQRSLLKPDISCSNRNQNDYTNNMSKQFDRKHGARHRTFAIGDDVLIINYRNNKKSWLQGKVVSGSGVIWEIKVPVLGNVIVRRHTNQMRNFFPIPQKSQNGNGPGTQHGSPGLVQKRHVRFADEVDQNGTIARDQQQQIADVADKQFEVRRSERHRRPTK

SEQ ID NO: 158602 - protein, 254 aa, Heterodera glycines
MARPFWPVLQVDGKDLPDAMQVRLLLGKLGQEEYARHTERVLPRLPTDFTLAQTIDKLKILFGETKSIFTRRYECFQLAKSIFQSPLDFASQVNAMCERSKMDLTKDEIKALIFLTGLSDEDRELRERCFRILEEAKKKTPPEMITFEKLTEECRAFLSLRNTSQSLATVSGTNAITLKSQKLKEQQLKKRSISQRPSAKAQSNKNRSPSPFQRQPKPPSPCRFCGQMHWVRDCSRAPTCSKCNRRGHYRSECR

SEQ ID NO: 158603 - protein, 152 aa, Heterodera glycines
MSKKNFQEISKDVRRSRNTRNYFRKSPDLGKYYEEVEKHVKENKKFGIKEYVRTFYFKCPPNEDPENNFKKILKKLMSEAISQEAEPGWKISKISVDLYCSALSDPVIIPARPFQQSNPDIVFNEFMHRQQSFGELNLLEERISINCYICFS

SEQ ID NO: 158604 - protein, 173 aa, Heterodera glycines
MYSFKKYFETALEKEDFFWPKNRAEVEAMLIESSQYKVAIHRDYESPFSGYIEMHEHTSAFCFTMVERDMRIFYDSGAGTPMGRYTLVLHGIVQGNYLGNDSGLGLPIFFFWFYWEGRSQTNRNGFFRSRLFLAKVQMLKVMALAWGKELLTSPIERIAWLLVVALSGPSKSL

SEQ ID NO: 158605 - protein, 52 aa, Heterodera glycines
LKKEKKRGKKKVKPNDFFCLQRLLIYTLTQRNASTMGQLPLVLAYYFHVSNT

SEQ ID NO: 158606 - protein, 118 aa, Heterodera glycines
MAELTKRLDGPMWARKMLARAKMGHESVTEFANKIRDWVEQASPDPDYTNDARENETVHYFLNGLPTNLKRKLFFMQKPKTLVEAISQTKKVLQLKEEIENDEKGEEFKQQIAELKEQ

SEQ ID NO: 158607 - protein, 231 aa, Heterodera glycines
SEPKYLNYLSISEGNALDPKQVQAVQNFRPPKSLTELKSLLGALTYFKIIKNFAHIARPLQTLTRKIEENWGNEQEEALETLKKMLTSAPVLQSPRFGKPFIIECDASKKAIGAVLLQTNGPVAYASRALNRHETNYPSIEREALALVYAVKEFSPYIVGSGVTKTITDCSALTSMMKAKELKVRLEKYQITLQSFDLEIVYRPGSKNKAADFLSRLLNVKSKNSKNILYP

SEQ ID NO: 158608 - protein, 269 aa, Heterodera glycines
MDAPKAPAEEPFNEEGLIAEKVRLLNEIEDLKHRLEETEKRKAEAEKKRSENNEQRPVDEIVLDMDEEDEEEEEEEEEAPQESKRARLDPPLANERRARQRSGTNWRQKKQKKSWRKRFAAKTPATQGQFANCVWEETAQNTKEEKMKKIENSICQKINQIQQQMTEAFGGLKELAKEMDELTKIAKKEMEKAEEFHPNSNRFANTNTSTWRQHDEFRYRNRGTVGRWVNNSRGRGRQRPYHHNWRGNEGWARNDHSQSEPSTSGAFNR

SEQ ID NO: 158609 - protein, 488 aa, Heterodera glycines
MNKIDEIALILETEKIDILLITETWTKDGEEINFCPWVKENYNYIFSSRKSKTSGGGCVTLGDFNLPNKDLVWKNGHPYSMSKYGEIFCDFFNRFSYVLATNEPTRINSWLDLIFTANEKIITDCTVKGGIFSSDHLTQFFTLITPKTKLKTKIVNFRWFCPSNVLHFNIVIASRLNALSYECFSINQKYSAFNSMLLEILNECIPIKRLTKNDLTPKYPQHLLASIKEKAKLFRQAKTDPSKKALYDSISLHIKIQTNKYHSQIEKKAISKGRNSIYKYIQKFNVNPSEIPNLIYENKCYHNSAEKSELFATLFANSFNNSETDPSNPCLGNIIEIDQCFISDINFNIIETQNLLKKLPNKNGTSPDNISYKILKICHSSLSTVITDLFRISLDTGSLPDIWKESIVFPLFKKGDKNNPENYRPISLTCSLCRVMERILSKNIYNFLLKTKKISEFQFGFVRNRSTTSQLITVVEDKYEAIINGKNS

SEQ ID NO: 158610 - protein, 296 aa, Heterodera glycines
FLSVVKCFEIGFPPPSYKMLGICSTSSIQFFSTLIVLLYTHYTRAKLRLRQRLIGHGGGAGAAGHSSTLMKAHLHENISIPVTNISIPVTLVAAILLGYMSIGAVLLAKWERWPLFDGFYYSFITMTTVGFDGFYYSFITMTTVGFGDIVPAKHEFFLFDLFYIPGLAITTMCIDLVGIEYIEKPGLAITTMCIDLVGIEYIEKIHYFGRAISGARFALVNVGGRMVRVPDLVRCAHVLHQKYGQRKPTQNILNLVRYAPKDLPYIRFIDFGSLASFESTRSQASFLQFLRVVVRS

SEQ ID NO: 158611 - protein, 101 aa, Heterodera glycines
AQYLVLMRAPNSALAIRNIGVQLFPGKLDYFLSAYRIATNKPYGYLVVDMHAASNPLLRLRSGIFKDDEEEGKKIIFIPKMAFCKIGEIVHKNFDFIRVLA

SEQ ID NO: 158612 - protein, 146 aa, Heterodera glycines
MTSLYIALKIKDIGNASSSNPSNSEPLAQIVNWNWDKNGAQQIIQTNTLNKGSELNYRSNNDSSFVIRILKKREKKSDEKNAFPAPSSSSPDDDLTVKIGDKQVKNRKNNSNIKPTLKQQIFHGKKQFFDTIKILKTICACLVAVL

SEQ ID NO: 158613 - protein, 146 aa, Heterodera glycines
MQILQNEIMRGKVEKFGQDKLLMELAKSWAEYKRQNGKKSHGKGKNNEKGRKNEKRILQLLYNLLNDGTNGLASADLKSGAKNRQRRRKGRGIITERHIVIFCVIGIIICIFNISLFCYCQCFDHRSAADDIEATDSQTTVETDHQ

SEQ ID NO: 158614 - protein, 457 aa, Heterodera glycines
MVPTEQIDTFLIKDVEMTHQMREDFERAYLELGGMGERVLGFCDFRLDHDKFPKGFEFDVEGPNFPIEGFRFVGLISMIDPPRAAVPDAVAKCRSAGIKVVMVTGDHPITAKAIAKSVGIISEGMETVEDIAVRKEISVDQVDPREAKAIVIHGSDLREMNEDQLAEVISNHDEIVFARTSPQQKLMIVEGFQRQGQIVAVTGDGVNDSPALKKADIGVAMGIAGSDVSKQAADMILLDDNFASIVTGVEEGRLIFDNLKKSIAYTLTSNIPEISPFLMYILFGIPLPLGTVTILCIDLGTDMVPAISLAYEEAESDIMKRLPRDPVRDKLVNERLISLAYGQIGMIQASAGFFTYFWIMADNGFLPKDLYQLRAQWDSRGINNLVDSYGQEWFVISLLQVIVQWADLIISKTRRNSIVQQGMSNWVLNIGLVFETLLAVFLCYCPGLDKGLRMYGL

SEQ ID NO: 158615 - protein, 47 aa, Heterodera glycines
MDTFRPCAIGEEVEHSASEFVLIDGPLKMGLIGRDSLVRRGNGRTPV

SEQ ID NO: 158616 - protein, 28 aa, Heterodera glycines
QHPKNLFIKFFVIHLVISRNTNQKFHNV

SEQ ID NO: 158617 - protein, 197 aa, Heterodera glycines
MNSSEETTENVGMGGNKDERQTTSKDETDESSSENQRNEQRQRQMDSEKEDSRFECNICLDMAKDAVSLPATMPFHYVFINTFHFCLRSFRCAAICSAGRAFSNGWTRVPIASCAPCANRRLAKTRFSIFTEFIGMDNQIKKPIHSLSHIPSKIAFFAKVIPLYGRGGGDSDPREKIPPRPQGQRTEETNQVDKRHF

SEQ ID NO: 158618 - protein, 90 aa, Heterodera glycines
MNKWLALVVLIALISVLDSAVLRQRLFVKAENAPKAEPKENPALMQQNGPLSAANFDEALPLGAFIKDFEGMALRLVALELTKGIATNAR

SEQ ID NO: 158619 - protein, 257 aa, Heterodera glycines
MVCRVSSSIGCLCHHSLVLFWPCQKTTPSQKRNVNKLIKNFEKILPIFPALSAATVGFWCSIFLRLLSSASKLRWSTAALTASSTNTSKHANGNWAECKFPTKLEKMAPNKCKFYIDQNVVTFLRRFHRFFAFSSIFLVITENVCVSEFVLLNIWPMLRHSMRAMFLNTIAFRRFRQLAPSLLNDCPSLHTVIFKDAILPEFPPDESANATDGQAVVKWLFSPCPDGVLPNVLHFHDFSVAQWSSTIEQFKAVIIHI

SEQ ID NO: 158620 - protein, 804 aa, Heterodera glycines
KKLRIVLLYRPPNTSASLTKKILNLIGNYLEEFIIMGDFNLNAKDITWTEHLLLNRKKDFCEFFNKYGLFLMTNGPTRGSAWLDLILSSKPDFVNNVLIDIFSSDHLTTNFSLSFPSNRTKTNTFTVRNYNSTKLNLLNKLIFNFTLQITQKFTIEDKFNHFYLLFREYVELYLPKITVGQTRKPNYPLSLKLSIKEKARLYKLQKINRDKYRHLYDSISLHIKIQINNFVTKNENNFLNKGKNAIYKYINKFTKNFEQIHSLSYENQIIFDDYLKAETFAKIFQESFSNSDVPQISSCPSKPSISDVEFNADEISKILKNLPNRESTSPDEISFKILRNCHLTLSPVISELFRISMDTGKIPEIWKKSIVIPLFKKGDRNDPHNYRPISLTCCLCRVMEKIIAKSIYNFLHLNNLISEHQFGFVKHRSTNTQLITVLEDWYDSIYGKKKNIDCIYVDFRKAFDSLPINILINKLHNIGIRGKLLSWLSEFLKDRFYTVKINNKFSNLYPIQSGVPQGSVLGPLLFLIYINDLPQVIPPGVSIKLFADDVKIYGDERSKLNVALDNIGKWANAFGLNISQNKTFILFLGKNNSKQQYKFFNNIINEVESISDLGILIDNKLRFSNHYTKIIKAAYLRIRNIAKILKTRSIRIWTKVFKTYIRPLLEYAPEIWNPTYKKDINKLERCQKYFTKIALFKCRLPYIPYEQRLDLFKLQTLEERRKTIDLVQAFKIINGLTHLKDIFPQFSGHIPYNLRRKGKTSNSFINRTALIWSKLNKDITDAPSVDSFKKRINKFELNKNLVCK

SEQ ID NO: 158621 - protein, 76 aa, Heterodera glycines
MEEKLFKICKEIRVGRALIEKWLQQFEMFGKRMTKKEKMEKMKIYWKIKGENQKIIDKEIAKMLEIKRRTFSTWKK

SEQ ID NO: 158622 - protein, 121 aa, Heterodera glycines
MGSPKRRDEYFSEYGTYFLLLYSRMGITVAFDTIFTAAIRQFDQKYSSAKNVVQLPIQNVHIYAFVYERMNNFLSSNVENIFSSNEKMEYFFSLMKKFFQTTLKQLNKFVEENEEKMAKFL

SEQ ID NO: 158623 - protein, 168 aa, Heterodera glycines
MNYYFICIFFLILLNHRNFNAFPSVNAAVIEDDALVALAKGPKHFANFCAIYGLTIDEKNQFLSEKYEAHLGLLYYLRKDWYEMHSTEENILYEKQWEMSRKFAFILYEYLFREYVAEYVKAVDPAMAEQIPAVMKPITAFQYIEMGYSISITFCEAISERQIFGLVS

SEQ ID NO: 158624 - protein, 191 aa, Heterodera glycines
STTTTTADSLDEFSLLVKNMYRYGEVKVLTTLNYNIDAYNLPSIVSSIEFNKDGDFFVIAGVTKMIKLYDFNALMDHSAFVHQPMVQLRCNSKISAFVHQPMVQLRCNSKISNVNVSWNPYNKHMLASSDYDHMLASSDYDGTVQLWDTAAAKCTRTFGEHEKRCWTVQFNSIDPHLMASGSDDGKVNKYS

SEQ ID NO: 158625 - protein, 86 aa, Heterodera glycines
MTDRAIRKLWDGVMFDGVWQRNETAWGSPQSAATNFTRNPQYFVQIGSQQPKKVLMIISLMQKYRREEGKSLMSIGYHVYRVVKFG

SEQ ID NO: 158626 - protein, 106 aa, Heterodera glycines
METEKPTAQKDAELIARSSSKVQNLTERQWMVKWQGKGQTSSIVLQIGVLVGTNSSESTKTGTQAVICAAAETAFLGLAEKRDTIWAGGTTGRRNLQAKEIRLDLA

SEQ ID NO: 158627 - protein, 98 aa, Heterodera glycines
LISRRPFDISRRLKPMHRHPLLSLRRPILSEQQLSKRKLILNIQFASFIPKRFVNGGPSQIFLHFSTKRLWRWKWAERKRTRGRRATVWRWTCSTWKY

SEQ ID NO: 158628 - protein, 186 aa, Heterodera glycines
MRMLCSREQLWQLAFDDVDSERDFRAMRRRLQKRFKYYEKKQKLEETAARKKATAAEKRARETEEEKPDETKKHDHDDEFGGGQRPLASDGRATKHERHRAEAQRGDEAAAVLAGRGGAPPTAGSETRQSQAVNGVTGRNGRTASDQRRTNERMFRHSVASLPPDPLFWSVITEPTQLVFYCSSVE

SEQ ID NO: 158629 - protein, 36 aa, Heterodera glycines
MPLLTLMVNQISGQAILCFFLRRTYDFYALLASKHA

SEQ ID NO: 158630 - protein, 140 aa, Heterodera glycines
MLRALLSPEIFVEIVNCYQELMVVEGCLQIPCCVEFPPLRKFVAANAIRSRQLRQENLERKWHLELARDACVSKLALSELSWDASLSFETVRVCMEKLRRIGPEKSAQFARLSIHLSNSPKLFVMFNGRLSVPIDWVKEL

SEQ ID NO: 158631 - protein, 92 aa, Heterodera glycines
SLLQFLSHSFCRLLLALKNLGFPREYVDAANSVLGECKIAAEKRLKRKNSRLDKCGIPEEQLWQMQQQLIEKVGKKKESGDLPMEWAQSARK

SEQ ID NO: 158632 - protein, 148 aa, Heterodera glycines
MKAIIVAYLLPAFFYIPYGIGRYSVKRNELANGDVLYYPDDSAVSKTMGWQIYKWTREGLLRFLPIVILFVLNSQIMVAFRRRQRMFNRLRNRDQTTIARDDTLLYILGGIAAMVMPLMFKVKEFTILLAFKVFRLQYSGCHQSVVHQ

SEQ ID NO: 158633 - protein, 128 aa, Heterodera glycines
MTEEENEVGLPQKGVNMIIKDALPDMRIANETRELLNQCCVEFVRHVSREAQHISSKDQRKTIYHDHVQKGALKNLGFPREYVDAANSVLGECKIAAEKRLKRKNSRLDKCGIPEEQLWQMQQQLIEK

SEQ ID NO: 158634 - protein, 167 aa, Heterodera glycines
GWDDLKQSIIMAYEALTDKVSQAFCWGKWLGQKCVHYGKVLLGFLVKLLVEIIPKLEKAMKKLTDFFAGGKNPIDVKEGISVCEVVKQYTTMQVKSGLTVPKVARNVAIRLPKGNCIRKFYEENPIVIQHIEAFYNVSSEQIKRKIANKKAAAFLQSKLNNGNTASS

SEQ ID NO: 158635 - protein, 66 aa, Heterodera glycines
MYVSGAPGEECWVLASDTECSESVGKFNSRAGIDAAKAELTREFIPNCMAKCVSEDGHKDVDEEEQ

SEQ ID NO: 158636 - protein, 136 aa, Heterodera glycines
MAANSPIFNPGPEFEPKVEILKKKFVGTLKQKRTMNELLLSCNFPIRCVGHPPSKCLIVFAKQNSCWASVCRRHFVSESKLSKKYFSAPATSTESERLFSTAGLIVTDLRKRLLPQNVDKLLFLHHNLKIYDFDYE

SEQ ID NO: 158637 - protein, 105 aa, Heterodera glycines
MNTKSQEKPPAEIYTFLHDHFVSLASKQQSSSTWIWSGKKREINCAFVNFGRVLAKRLKFVHEKFNTFADGKEKECGGRDPHTTNYYDYKHHHAFISDNNTPAEG

SEQ ID NO: 158638 - protein, 172 aa, Heterodera glycines
EVGRAIVAELTDCSVVLMMKKRIYFSWDIQTLHISAFLSSAIFYNDQTETENLNGWTYKQYLEIGPNMWVGRRNNDSVTFKLNQQQVIGQISVRELRKTAAINLMVKKRVYFPYFDGQPYSINAWTENGQEIFTEVALWDFSNNKRYLEIDPDQFGNMNSNDWIYFYIAGQQ

SEQ ID NO: 158639 - protein, 633 aa, Heterodera glycines
EKAKKDAEAKPKKDAEEKAKTDAEAKAKKDAEEKAQKDAETKAKKDAEEKAKKDAEAKAKKDAEEKAKKDAEAKAKKDAEEKAKKDAEAKTKKDAEEKAKKDAESKAKKDAEEKAKKDAETKAKKDAEEKAQKDAETNAKKDAEEKAKKDAEAKAKKDAEEKAKKDAEAKAKKDAEEKAKTDAEAKAKKDAEAKKKEEEMKKQKAKPEEKPEAPAEGVAVVPEAKKAEETKEKLKEEEKPIEVPPSPAEKKRKEAEEKKDAEAKAKKDAEEKAKKDAEAKAKKDAEEKAKKDAEAKAKKDAEEKAKTDAEAKAKKDAEEKAKKDAEAKAKKDAEEKAQKDAETNAKKDAEEKAKKDAEAKAKKDAEEKAKKDAEAKAKKDAEEKAKKDAEAKAKKDAEEKAQKDAETNAKKDAEEKAKKDPETKEKKRREKKKAKKDAEAKAKKDAEEKAKKDGEAKAKKDAEEKAQKDAETKAKKDAEEKKKEEEMKKQKAKPEEKPEAPAEGVAVVPEAKKAEETKEKLKQEEKPVEVPPSPAEKKRKEAEEKKAQKDAEAKAKKDAEEKAKKDAEAKAKKDAEEKAKKDAEAKAKKDAEEKAKKDAEAKAKKDAEAKSKEDAEEKQKANAEEKAEAAAEG

SEQ ID NO: 158640 - protein, 101 aa, Heterodera glycines
MVARLENNSVEKPTHKPLLVVFGKWQCANDFDHPKYLEKMARQRFVNSTIRQPSQNVTIRQLSQNVTIRQPSQNVTIRQLSQNITIRQPSQNVTIRQPSQK

SEQ ID NO: 158641 - protein, 190 aa, Heterodera glycines
MALNYPIQFINLIPEKGSLLTSLLMNRLLLGREYPLKKYLSVLAITLGIILCTLATSNLEKKIESVLSLEEAEKHYREWAVGVLMLSAALLISSYLAICQERMYSKYGRHPREAMFYTHAVSLPFFALMGGDILRSVRRFSSAPSALFLGFSLPISALWLRLLASCVLQWLCIMFVYRLNATIDSLSVTL

SEQ ID NO: 158642 - protein, 346 aa, Heterodera glycines
VGRRSVGGGRVAQRQQHFTNVGAGGGGGGGGGTPLSSSSHNQQQRAVLTGGGGGGSGSNSASSSPVRAFRPTTMSNTVTSSSSPFHHRRYYQQPHHQQQFHLSTASASAGSSPVLLAARPLRIKPSAGAASSCPRPSSIVVQQQPQQQLRIVQQHMNRNDIASTGNVVGGTTDATVATASSSPVSSLHHPHHQHQQHQLNMTTPRTIVVHKSSSSLMPSSDAEGGGGGGVADPATTTIAPLVAGPKRFYVHASGPPHQQHVAAVAGGQPPVMVRRQLPNCPPRQQRQAMATSNTFDILPPPAKMVKHMEFVPTVSDIISPTEPPLSSTTTTKTTTYSVPAAPVVID

SEQ ID NO: 158643 - protein, 333 aa, Heterodera glycines
QAARSNSPSNNFVCAVFPTKDSRENLERYGSTLWEQIDGIGTLAGKRVKCCRSDHLVQEGEICELRTIDQTVQFAEQFTRAMVNGEKANAAVRSAMMGITKPPLLLSIGFDRIIPAPFHVFQGLGNALIRELEQQDGCATIAQNFFRRFGARREQFRKRDMTGNSIRKILVHASEMEHLFSTDWPITICRTLAEPLSPNDIDELERRVDEFKSFLSAQERMRGFLSKKPKAHLLLSHFVPFAREHKFLGLLDEQGDEALHSVWRRLEQLWKCMPDADQILQQLEHHFVNNWLLDSGKIDELKREKVIRGKSMMSSIKRKKKLTKFRLSMSLID

SEQ ID NO: 158644 - protein, 157 aa, Heterodera glycines
QISIGGPQQGIFGLAFCHGSFYVCSLIRLAFCHGSFYVCSLIRRLLDNGAYTEFAQHNLVQAQYWHDPNLAEGYRRANIFLADVNCERSCDSTYRDNMAKLRNFVLVGFSNDHKLVPKETAWFGFYADNDTQTIVPMEQTSRRRDSLGCRHPEGIGR

SEQ ID NO: 158645 - protein, 129 aa, Heterodera glycines
MNYPTDFSWLPVNNCVCPVKDNLCYHFPGYKKPVICAHKLVQNITAFLSTPPHISNESAPASLSSGSVLMLLTVLQIFIILFTRLVLAVLLVHWRFQTAPQGALLIVCRAEWCQLVNERMMCEEKADKI

SEQ ID NO: 158646 - protein, 133 aa, Heterodera glycines
MSSPSKFSPTKSSPIKKENNVGKAEFVVPSLKAPTRKQPSKNVGMNGGEEQQPSMKKRKVEDRDLWKLAKGKYMLGFYLCVDDWNKLYNNKQRVLRKDDDRFAVNFELCEECALANVRATDILAPPKAKKRIE

SEQ ID NO: 158647 - protein, 249 aa, Heterodera glycines
MAINMSDKRGLLRQILGEAEITVTTSGLTISGPRLSTPRFLPFDESGRCRSCKATEVEVDTMVTKEGVTIWCTRIDKVQFVPFDVVYELPGHCFFRLKNKSRVFNLPYGDLPSESSEIPLTQHVDEERDLKRKAKAALELVEAGLIADSTVQDGARLKKAKTAMKVISDILLSEPVGDDQKKTVEVAVVDKQPQEQQPAPVQEKPVTAPAVEQNTVEVKTEEEKKDDLGDIDKTLDEFFASLKAATTSM

SEQ ID NO: 158648 - protein, 206 aa, Heterodera glycines
MANKFLLVPQEIYRGLTSASDTGVINLDAVRHDLERARRERTNPTTKNVRYNQQLRRYLQMRRELADRPTKVELTKGLSVLLKRDGGVDDDDGEVVNTQPRPPAPPPPPPPPPPPPPPHQYHRHHPSPPDEQSSSSDDSHPPRPPRPPRPQRTKKNHQSSIKHGRLNQWKQRRRDLQQQPVVRDLLAEAAAAPLPESDDDDEQMLE

SEQ ID NO: 158649 - protein, 366 aa, Heterodera glycines
EEESETDIRLNPDAWSTAVRHAPQEDVQVKTKGRQRKLIAEAAEFLLTHQIPQFVRDSVQLAVSPIDGVALVEAMHARGINIRYLGKLIEATQHNSRLDYLTTIAKMELLCRTIAKMELLCRCLRHIFRDFVQGVEVHFMGTAIAHFLNCFKNVSQISQFDNDQTNGVALKKSTGARKKRRYGYFDKNCHWRRLGPTPKTMAWAKLSQEIRCHWHFLSPFSCDSFVEWSGGAQRSAIIRRFCLMNGVQIMLKLNPLKSKSQAPLNPLKSKSQAPFSEDDIFNVFPVIKRLNPRSQSAYNLYLSALIKMQQGFIRTGYDLMQQAHSMMNSIYGPLHPDLAAHSMMNSIYGPLHPDLALCLRFMARMA

SEQ ID NO: 158650 - protein, 376 aa, Heterodera glycines
KPVKTNSFTGRGFQQLGFKTVTLGDLNLEEMRAMVCEYRKLLGEGVYAVFYFVGHGFEANGQCYLLPIGAPGEDYGPEHCLSMDWVMVMGQFRDFQPALNLILLDICRKFLPSNLVFTAYAEELRRGEVRVNRNTVYGYATSGGVGAYEVKGEQNGVFMKYLKRRIQQPIPLLDMLNKVISDVERDPKVRDVQIPELRSNLTKSRSLHDPLVYDGHTTSYDHHTYHWRTMHELPMPVTVDFAELGLQVTIWFDFCGHFTNKVYVFSSVDDMSTQSEEIGCDQQRGISNNVRIHRNFFVFFKEFESSRPKLCEDEVEGVSLCVLLSHLQRATVQNEIVCTVELRETESADDGEAKLVAKRERQILGHVLITRLGLAR

SEQ ID NO: 158651 - protein, 67 aa, Heterodera glycines
MGRWSATAFVTNAIIGSGIFITPTGILNNVQAVGASLVVWLLSGLISVVGAFCYVELGTSIKGPFAL

SEQ ID NO: 158652 - protein, 174 aa, Heterodera glycines
MLRIFFRIIFATLIFAKIRAEWEIPDELRPPQFLTVIKNGFQSAVYFTENGQNSVDEATTNQQWLFQRLLEFADENKMPTMAKRKGGANLEGNGIYREHTVSSNWHTLIDKINGKSGDFFYNHPKELSLKLGKKLTNCAIIVQPAEGNWTNYDQQQEKRHFEFFGISPTENNEI

SEQ ID NO: 158653 - protein, 119 aa, Heterodera glycines
SLLINFCFHRYYVNRDSLFSFHKAAEVFLANLMSIYAAAHYKNSPDDLQMLADAPAHHLFVLMAPVPADQSSVPQILAVVQQCLEGSISKQSVTNVRDKGKKRAAGDLIPWTLCQHFLD

SEQ ID NO: 158654 - protein, 132 aa, Heterodera glycines
MPFSDFDGRAMQIDFLRSNGPSFLSDYADLWLLGLDMLPMAHQTEEQREQLKMNLFISRSSKCSMEAWVEKQSDQKGPFRFAALYGIGKPYGRKPIYKDSHKCTTHDHGIEEGEQKEQLFPIFASQEKYFVI

SEQ ID NO: 158655 - protein, 52 aa, Heterodera glycines
MRKNKKSKRYNDEKVTQKVCGAYIKKKQKRFVEVKIAILMSRNYKGTTQNGE

SEQ ID NO: 158656 - protein, 154 aa, Heterodera glycines
MSTFNRQIEQEQDKSGKLIMEVERRVITKASPDRLLQQLLVGDENAVGSEEVPSDSHFVEDFLLMHRVFFRDSAQIVRQLLRWFRAEPNRRDRVARIMLIWLNNHFEDFEGGQSGRQMAELLDEFDELLASAKMFNHQSLLSITVSVKSQARMV

SEQ ID NO: 158657 - protein, 22 aa, Heterodera glycines
MTLLKMLNALIHLSVAFMINGQ

SEQ ID NO: 158658 - protein, 245 aa, Heterodera glycines
PQPLPLAKNGKNGGDFLVKGAAENGKITTNKGIMNSCGESVDEQHTAAFDFRHFSAMEKGHRVCKLFVLKKFDVSFRHLWLNLHTHQLVLTKLASSSASNDEPVLDLRIVKEAQVLSKAIGTMQIAEKWRRDTSLQTFDPELILIIQWGTAFVLNSWLILVNIKHMKPFVQQRLQCKVSSKQLQEIAEGEMGFEAFVLAHNRLLNFHALFDCMFSEYADTEHAQLVPFQRFVDFLRDIQHDGLGQ

SEQ ID NO: 158659 - protein, 170 aa, Heterodera glycines
MLRGKTVAQIAEECGRIRGICAKFKHVHFVWLPPPYVREQHTLYNELLPILETVAGEWFIALTTSGRSLVEMWRFGETFDMTRIRSDGKILSEGLKCFRAWIVTQIPNFPDDNALGFRRSSRSVPSVSDHISELSLSHSRTSRSHPYAVRHHYSSQAHRGGNEMISRRRH

SEQ ID NO: 158660 - protein, 92 aa, Heterodera glycines
MSSSTPNTSLITWDINSDQNNLCPSFALSDDGNELERLEAQRKAINAKIAVEFARQQMIMEGNEATPKSKGNLEALTNNKKNFIPKYFNSLI

SEQ ID NO: 158661 - protein, 31 aa, Heterodera glycines
MNKQRLPSELICEIIATIPLMYLFGGISKKP

SEQ ID NO: 158662 - protein, 70 aa, Heterodera glycines
MIRCPIILLLLFVSILPFNCAVDGMAGDALATVVTLSIGQSDGTSGTAQAKKQLDKEEEAVEEAKSGETI

SEQ ID NO: 158663 - protein, 225 aa, Heterodera glycines
MKLAFVRLNVLTVLCLFCSMSHSYGNPSDESDDEICEEEENEAQSEAEEADEFFHNFNGTIQSEREEKRTVVEIFCRNTNDKFQFSTDDEGNFKIQMEAKIKWKFHKCTTGLRMAFYKKKVMENKVPKCLPIILRSPKRKLKNAKRLDICVVPIRIKWLKFGPKINAEEAETEENDEILRNEFALDFDVEKNAQMNGQIRNCSDLHSAEHNFEMIFNKYFDDGKT

SEQ ID NO: 158664 - protein, 74 aa, Heterodera glycines
MARAFGINLLQKKISYALIYMRWMFFGHSVILFCFIANLYSFYSSADEVVKCPICQEEFGGNAQEKLLYDCNVS

SEQ ID NO: 158665 - protein, 1398 aa, Heterodera glycines
MSGTIRTRIPILVKSLKNKIEKYYEQIEQGKYEFDSNDLPGCLKLYEFIKKEIFNFEKTFDSLIELDKKWKKIRNKLNTEDKNAEIKIYKIYTEKHDYLKILEEADSVIDELKSLNLEVKKAIQNLKRNKKNNSGDQHEDENDDDDEPNDEQNTEEELTDKEEKETGTDQTNDSEIKSDLNSYEYSNFSSNNHRIKIKLPAQSLTHFNGKYSNWTSFWDDYKSSIHNDKELENIQKFKYLRGLLHDEPYRMISPYPITNQNYPIVIELLKSRYGNENLLRENLHNELRNLRKPSESISDLRKFILSINRIILQLQTYKEDINHPQIKQSIETKLPNNIRIKVREQLGTFNTKKLMNFLDQYTQAREEVQNIEEIDKMNHNAYSNKPQFRNGNFNKNNYSKQYKNFRINGNFQNNPLNNNHSFPTSALTTQSKPVLNINYNKTTDQKSNEIKLFCNFCEKTNHKSKDCKIYPDIETRNSRRRELKLCFNCLKKGHHVKECKSPYTCFYCKNKHNSLLCLKKKQNNNEKQIRPNQTRTNLINEEKLYETQTFSITKQFEKEEIEEILMTIEAPIININDNTELNSIILFDNGSQKSYITMELAKKLNLPIISKKTLALSTFNETKPKIIESQIVQIGIKTLDGSYETVTLQTIDKITDLINVNLQKTIDFGRSKMPIGLRIPHILIGIDHYWQFMLSDSKIRSLPSGFFRISTKIGDICSGKGTVEITKTNYASVKQQEKEELNKTIQKFWNLESIGISDSPSLNDDDLSVIHFNKTVKFENNRYIVRWPFKQEQPEIPTNFGLCFGRLKGVLKQLIKNKKLLEYDEILQNQLEMEVNEIVPFESSYLTHYLAHHPVIKESSNTTKIRPVFDASAKLRGNHSLNDEIFQGPKKMPDLCGMIMRFRLKKYVLIGDIEKAFLQIGLDILDRDTTRFLWIKNELLNELNKSNREIEMKDVEIRRFTRIPFGVNASPFLLAAVIELHLSKIDEMYENFKNINTNDIELDLEDKKEKFGKLCKELTENAYVDNFVMMCEDQNEIKFKHYWSKEIFKFASMNLREFISNHEESNNEIQKIEGSEMPKISKLLGIKWNVENDELTIPIKIPTISIGTTKRNVIHLIAKNFDPMGWISPVILPHKRFFQNLWKSKKDWDDQLSNEEIKNWNEITYEEEIHLRRFPFNNSLIQPVELHIFSDASGSAYASTAYLKLIESNEIYLIFAKTRLAPVKELTIPKLELLALLIGTRIAKFIINETKIKIQNTYLWSDSKCVLSWLKYKKELPTFVKNRVNEIKNATIVFNLKFHYIKSKENPADIASRGMTVSEIKNSDLWWYGPNWLKLPIDKWPYKQLEDFTPEEINEEFNEELEIQLTKSNLTTNPIKPFIKWEDYNLQQNDIRDEEVNK

SEQ ID NO: 158666 - protein, 595 aa, Heterodera glycines
GQPYSSPKQEKEELNKTIQKFWNLESIGISDSPSLNDDDLSVIHFNKTVKFENNRYIVRWPFKQEQPEIPTNFGLCFGRLKGVLKQLIKNKKLLEYDEILQNQLEMEVNEIVPFESSYLTHYLAHHPVIKESSNTTKIRPVFDASAKLRGNHSLNDEIFQGPKKMPDLCGMIMRFRLKKYVLIGDIEKAFLQIGLDILDRDTTRFLWQPRNNERRCRRFTRIPFGVNASRFLWQPRNNERRCRRFTRIPFGVNASPFLLAAVIELHLSKKKFGKLCKELTENAYVDNFVMMCEDQNEIKFKHYWSKEIFKFASMNLREFISNHEESNNEIQKIEGSEMPKISKLLGIKWNVENDELTIPIKIPTISIGTTKRNVIHLIAKNFDPMGWISPVILPHKRFFQNLWKSKKDWDDQLSNEEIKNWNEITEEEIHLRRFPFNNSLIQPVELHIFSDASGSAYASTAYLKLIESNEIYLIFAKTRLAPVKELTIPKLELLALLIGTRIAKFIINETKIKIQNTYLWSDSKCVLSWLKYKKELPTFVKNRVNEIKNATIVFNLKFHYIKSKENPADIASRGMTVSEIKNSDLWWYGPNWLKY

SEQ ID NO: 158667 - protein, 279 aa, Heterodera glycines
KRKSTEEPKPDTDTKQSKPEQKPAQQKEGKSEEGQKPKTDTSSLSKETQFVLQKLRQQEAIVQAKELSKVIREVQATINFNRNTDLISYSRALQKASQIPEQDEATDNLNFHSNFSPEINNKFLEELNSLESTHDDIYNRAVADCERAEQKRINSVTKQTQNIFEAVGKAIKAENFNKGLLTELAKAINSPSYNSRAGKDKALIIVNKLQDNLTHHHRFLIGQQKTAEFLRKTFKIPLEDEPSTRDQHENDDENDDDEDEPNDEQNTEEELTDKEEKET

SEQ ID NO: 158668 - protein, 80 aa, Heterodera glycines
MEIVKNKMKICNRRIKRDETNVISGNGRTEKYGNRGNEQRKKKKRNMEDDWTKKEVTDEQKKCWTDNHQTEEIRESEKAM

SEQ ID NO: 158669 - protein, 53 aa, Heterodera glycines
MKYQSHTEKGCMYKNALKCTTHGRLRYSSYKRAYTTHPYPTHPYPTHPYPTHP

SEQ ID NO: 158670 - protein, 76 aa, Heterodera glycines
MGGCWRRRYRPAHSRLFSTLPLSALSSEKRKRRHRTMFTEYQLNTMEEAFTACQYPDVQMREHLADKLKLREERVE

SEQ ID NO: 158671 - protein, 326 aa, Heterodera glycines
MNRRWICADVWLDILPSFDHAQLGLKMALLSDRFDVLVDTHFDGKSELTIWREIIIDKDEGPKPKVYIDHSVIKFLRSKKRFFDKSGTKLEVFVHSIDTDVQPIWDIFTSEIWALFTTNIRHLGFEDGNHLDNLRRRTSPTILTDLDQLNSIDSGRLFPDRIADDGPNATAGQALSKWLHTSTTDGQPKRLYCNNYFGPLNLEWVNNFKETFRRATTSVSYTIQLYFWVEQMPIESFELVNERTKEKLTLKQNIDEFDVNVCNWLLQRCPIGEMATAPAIKWGDSLNPSANLNHIRFVLWSFDKCIGPLSPPAEEEKADQSNENVV

SEQ ID NO: 158672 - protein, 140 aa, Heterodera glycines
MAAVTKVGKGPGPFLPDMCWATWWERFEFFIQLKGVTDVATKRLLLFTEMGQVYEELRRMAQPEDVRTMDLAEIEQLMVERFGEAKSIAACRHELFSAKQQTGQSIRDYSVQLRSLIAKAEWSRDSIDMCQRIVYQWHLQ

SEQ ID NO: 158673 - protein, 31 aa, Heterodera glycines
LLCPRTTDMKKRQIFIWSTNIINKWSSEGKC

SEQ ID NO: 158674 - protein, 105 aa, Heterodera glycines
NLNNSSTRSYDDGNDDSDDDAKNEKVAGGLFAQFTAAFRRRSVSMDERVFRPRHGTISSSYSISGSPTGEVYGGVAKGTRQPRAKESNTFRKMRERLNKWKLSTG

SEQ ID NO: 158675 - protein, 25 aa, Heterodera glycines
IWQHGKSYSELIAFSKSLNSFALLI

SEQ ID NO: 158676 - protein, 59 aa, Heterodera glycines
MDESSDGNAVDVGEGRSKYVQWILEMSAMVGKQNEEIRMTAKSVQNKRRGLLKFFRFFA

SEQ ID NO: 158677 - protein, 153 aa, Heterodera glycines
MPNVKKQHEDLPPNSKTFKGRGTFFCVQSVAYAPPIFADFRSAQPTIGSIVRPLRQFAADAPQFGRPTEHSHDEAEHEAEIIDSLFSFFRVCLDLDLAFFTLDWTWISWTKIQEIPGPGKIQVAKKWHGPGPRKNPGLDPGPGRSLVQTDATQ

SEQ ID NO: 158678 - protein, 162 aa, Heterodera glycines
VAILVAQNDTDFGMARKNAALPNSGGAIPMALEQLWADEILPKSVNFSIHWTYSQCNEANDFGQTYNYISKLGADAIIATSCIDVPPMLGHLAANSNIPMLVWGQSMSSNLASSNNATYPTLLNIVPNCKYMASGLISLLQYFNWTQIGIIIQSDIISASGG

SEQ ID NO: 158679 - protein, 84 aa, Heterodera glycines
NSSGKVPTANVQSNFLSNTTMPHKLQTTSTRKDSNCSVTSLLPNAEKEFDKSFAGVALSCGGGKKAHQLNDIKAVGEEAAAENV

SEQ ID NO: 158680 - protein, 46 aa, Heterodera glycines
NWFFQKKVMKELIVLYFYGHPKNVRSFKCMKIVQTFNYHITFDMKR

SEQ ID NO: 158681 - protein, 156 aa, Heterodera glycines
MPSFKFVCFQFLLIFVLTELAHSEKGCPKTEDLIEMTKHLLTTGKNVISGEAASSSTEGKCSDTVMESVVTKVIEFGCYDEMEKNDGERAKSKTKNAFIESIETQRKGFCQLWQNGKSIGEKEQKDGILKIVKGLGGIELKKIERILENVQNIGLS

SEQ ID NO: 158682 - protein, 189 aa, Heterodera glycines
MTTVKLLCLIALFAVVQLRFAFAMMNQNNQQVSQNNSSDEGEDDDDAGNGGQYDTVAPLRSDSTSFVSSGTLPPQGSTGFSGVGMMPPHAQNMGAMGMGMGNTSFGNLQQPTMQMQYQNQQMMQTPQMMQNQQMPFNQSGSFSGVGMMPMQHQNMGAMGMMNVGSTSFGNLQQSNMQMQHQNQQMMQNP

SEQ ID NO: 158683 - protein, 148 aa, Heterodera glycines
EGVSKLINGIPVAETVVYPAIGETKTHITVFTDTTCPYCHKLHAEVPALNKMGIEVRYVAFPRQGLGSPGDEQLQAVWCSADKKAAMDKMVDGKEIKSAKCANPVSKQFALGQSIGVNGTPAIVLADGQVIPGYQPAPQVAKLALGAK

SEQ ID NO: 158684 - protein, 157 aa, Heterodera glycines
  unsure (1)..(157): unsure at all Xaa locations
MISRRAIIIWAXALLALAAISPNFSTADKGVDAVDAXDEIIDDPKVEVPKNGVGKGTDDQTVQWEEEAIKLEGLSVAEFKQLRESAEKHQFQAEVNRMVKLIINSLYRNKEIFLRELISNASDALXKIRLISLTNSTALAATEELSIKIKADXENHI

SEQ ID NO: 158685 - protein, 83 aa, Heterodera glycines
MLMLLMTIFTVLSNVNEVAAEEHELVSRIKRNGYGYSSGYGGGCSACQSSCTTCGYTSYHTVPAAPAPPPPPPPPPPPAPVYS

SEQ ID NO: 158686 - protein, 196 aa, Heterodera glycines
  unsure (1)..(196): unsure at all Xaa locations
MKIITLIPILFSLINSVVGQTTCATPTTPPVCYCTCESTPGVSSTAPTTTVGPTGTTTTGTPLTTGQGTSGPXTPAPTGTPGQSTTAPTGTPGPSTPAPTGTPGPSTPAPTGTPGPSTPTPTGTPGPSTPAPTGTPGPSTPAPTGTPGPXTPAPTGTPGPSTPAPTGTPGPSTPAPTGTPGPSTPAPTGTPGPXTP

SEQ ID NO: 158687 - protein, 229 aa, Heterodera glycines
VKNCAPSQLAAKAATKTDLHSWPKSTRPWQRIHADYAGPFFGKEFLIVVDSYSKYPEVFEMNTKSAAATIERMRYLFIRHGIPETLVTDNGTQFAASEFAKFTEANGIAHLFSAPYNPKSNGQAERFVDIFKRAFRKIKGEGVPNKEIINTFLVTYRTTPNDSLPDAKTPAEMLLGRKPRTTIDLLMPPLPQPTERYAKRFVSRHFINLFLSISLSLSRPHYFSHLIVS

SEQ ID NO: 158688 - protein, 1174 aa, Heterodera glycines
MPGNSVQQFTTPSAPVANNQTVIKVAMLVAQNDTDFGLPRKNSMLRNAGGAIPMALEQLWADEVLPKSVNFSFEWVYEKCNEATAMGLTYQFIHDFGADAIIPTTCMEVAPQVGHLAANFNIPMIVWGQNMVSNLASSNNATYPTLLNIVPNYKYMASGLISLLQYFNWTQFAVVIQSDLGNVSGGCDYLAKSIDNSLATSNITVNYKTRIFNVQSSDMDRIANSLLQRARIILLCFDDKKQLRTFALNLFDGGLNTKNFVYIIPDNDMTLSFNLSLDPFWVQTSVNSNGLDGRDADAEVIGRLAFWWHYDITLSALSNRNYYGFYGRVVNRTYGWPFYCPESECNTVANGSLNSVLLYDAIYNYGMALNESFKQFGIRRETYRNGSLLAANNRRPFMGLTGYATVETDRNTRVFVLSNRKSDSKQSPLRILMQLAWTNGELNVTMRNASSLMWFSHGGVVPPAVPTCGFDGNGCTVSVFDLYKGYFLGGIALFVLLIGASIFCVAYLIHAKIVDKRKGNLQWKIPFALLQRQNQRRSERTAERSHHSLRSNQTNISALTHATTSSSLAQSKNFTLYAYNGQMCIVHAYGPTLLAMPLSAEGMAECRTLRLFDHVNLNRFLGLSLDGPNLLAVWNFCARGSLKDVIMSGNAMVRDVVFIQSSIRELCEGLHFLHNSPLQFHGRLKSSACLINDRWQVKISYFGLRWLKNTQKIQTKDLLWLAPEQLRKMGENKNLIDGTKQSDIYSLALIFTEMVNMTPCWETNNEDDEADSDKSAADDQAVQQENAMSRRRTTTTTAAQQRVKRRAPGGQQQRTGQRRQNAEEIVYLVKRGGLIPLRPTIRPALDNLNPELIHLIRDCWVESPAERPTIEKVRQKLRQMNAGQSINLMDHVFGMLEQYANKLEEDVHERTRELEEEKRKSDILLYRMMPRQVANSLKLGQSVEPEQFECVTVFFSDIVQFAALSNQMRPLHVVNLMNELYTTFDAIVDEHDVYKVESIGDGYLCVSGLPNRNGNLHAKQCADMALKFLNSLQSFRISEHSDQRIRLRIGLHSGPCVAGVVGLAMPRYCLFGDTVNTASRMESSSSANKIHISKETCILLHENSEGGAYLTESRGEVIIKGKGVMETFWLLGNAKISGGTIGTNHSQAAERQMAMESDKSEKEMYKSYKQSTTN

SEQ ID NO: 158689 - protein, 1112 aa, Heterodera glycines
MFFGTSVAVVLCWLFCTFPTTFGQQQNGTAPLIKVGLMMPHNQSSDLSFARSAGAISVALKHIFNDNLLPPGTNFSFIVRFEECLMSVAAGYAFDLLDGQQVDLFIAPPCTDSAQVALFVSTFYNIPSITWGQNSDSSFNSQSNYPTLLSALPNYADFGQIIISLCIFFKWSVMALIYQLSETGQCASFQQDLQIAINSNDKCDISYREEVKISSAGTSDAQYTISQIQSRARIVILCFDEFVQLRNFAAKLQEGGLDSADYVYLIPGLTMDDSIESVNCVFYKIQICVCFFSVFNLLFVLGGSKATAWWVDPNPTIQSAAYRIAQRSLYLMLDIFNKVATSGQVGNGTSFDQEVIRQVTQWPFFCTDCDQSLQASSYAPLLHDSFYLYAMALSKAAKIAGALSPSVYRNGQLIRSQTANLSFEGMTGSNKFGSDGLRNFIYLVSMYSSLNGDLTSYVWLQMNDAGVNSSWINATAEKLIWSSRNGVKPLAVPLCGFDGNGCHMDFFTEYRGYVIAAGCLLLLILGSFAFGIYWLFQSKAREMERQNRLWQIAYSTLTPAGTKKKMMESVRSLQSSTSSQFTRDSSHSHVSIKHNFNGIVYIMNGERVIGIQHSVGIRLSPQDMAELRTMRLLDGDNVNRFIGLSIDGAALLSLWRYCSRGPLSDVISGSSSLTMDGFFIYSLVRDVAEGLRFLHASSIGWYGNLRSTNCLIDDRWQIKLSEFGLRFFRAHEKREAKDLVWTAPELLRDNDIVGNKFGDVYSFSIVSSEIVNMKPIWEQDEAKGNVERVRTGGKRAFRPKLEPSSQDLSPALLHLIKDCWDESPAERPKMETVTALLQSMNTGRSTNLMDHVFNMLEVYAGSLEEEVEERTKELVEEKKKTDILLYRMLPKQVADKLKLGQSVEPETFDCVTVFFSDVVSFTTIASKCSPLQVVNLLNNLYTLLDSIIAEFDVYKVETIGDGYLCVSGLPHRNGHEHAQHIAKMSLAFMRNLGSFTIPHLPIERLRLRIGIHTGSTVAGVVGLSMPRYCLFGDTINTAARLESSSKPMRIHISTTTNHFLVNVLGGFVTQARGEILVKGKGVLETFWLLGLEGDPAVMRMLHSSDGNNATTE

SEQ ID NO: 158690 - protein, 47 aa, Heterodera glycines
SVAEVAKAAGVEWGRMSAADKTLWEQKAADDKKRYEQEMTQYRARQK

SEQ ID NO: 158691 - protein, 949 aa, Heterodera glycines
KITINYKTRIFNIQSSDTSTIVNAIRERARIVLLCFDDLKQMRTFALQLFDGGLNTKDYVYIMVDNDMYLSFNLTRLPFWVQSSNNSNTLDGRNADAEVIGRLALWWHYDITLSALSNQNYYGFFKRVIDRTGDWPFYCDESNCSKVINASIYSLLLYDAIYNYGMALNESFRQFGIRPEVYRNGTLLARNNRKPFMGLTGYVTVETDQNTRVFVLSNRKSSEKGNALRILMQFAWVEGKLQISLRNGSLSMWSSRGGSIPPAVPICGFDGKGCAASVFEMYKGYLLLGIALFVVTISGSTFTVGFLIHAKFVEGRRSNMSWKIPFALLTKSKPKRADRTAANRSRHSVRSNQTNISSLTHSTIGSLARSRIFSLYSYNGEKCIVRSFGSTTMAKAFTVTQMAECRTMRLFDHENVNRFLGLSLDGANVLAVWNFCMRGSIRDVILSENAMVKDVIFIQSAIKEICEGIHFLHNSPLQFHGRLKSSACLINDRWQVKISYFGLRWLKSSQKNRAKDLLWLSPEQLRKMGDSEIVEGSKHSDIYTMALIFTEMVNMSPCWDSSEADGAEADRAEDGEEQNGTEMSRRKQTAETEGETAQRRPGRRARGRNAEEIAYLVKRGGIVPLRPIIRPAFDHLNTEVIHLIRDCWVETPSERPTIEKVRQKLRQMGAQRRVNLMDHVFDMLEQYANKLEEEVQERTKELEGEKRKSDILLYRMMPRQVADRLKLGQSVEPEQFDCVTVFFSDIVQFAALSNQMRPLQVVNLMNELYTIFDAIIDEHDVYKGDGYLCVSGLPNRNGTLHAKHCADMAIKFMQALLNFRIPDLPNERVRLRIGLHSGPCVAGVVGLAMPRYCLFGDTVNTASRMESSSSPNKIHMSSETLELLHKNFNGSYHTESRGEVIIKGKGVMETFWLLGQVENGTTINADYAHRMHLPVIKFGEEGNETGKNA

SEQ ID NO: 158692 - protein, 244 aa, Heterodera glycines
MDRRFTVFLVIALVTSIYEVLSNGNLNDGDDSFKQFDELEENPAHKYSKEAQKGFEMEEEEVTIREPSGTKESFKLPINMPPVKFSFCVSCGYRQAYEQFAQILREKYPGIDIHGENYPPGILRTVGAQVIGMVKIALIVCVVSGRSPFPTLGLETPTFFQWMLSNRLSAALMLFLFSNAIEGMLQSTGAFEIYIESERIWSKLESGRVPSPPELFQAIDSHLAIRRGGAGRFGSSSSFGIDGS

SEQ ID NO: 158693 - protein, 139 aa, Heterodera glycines
MPNIFKILLIVLLAVVSFRLSASTGDKKTANDGSGNNSSAGIGTKIKRIVTAGLLFTSLATGGAEAIGRSNAQGGNAAGLVPSHLTNRSMAPPPPPAQFEKGAATRVEKMRAQLRELAEKMTDKDPKRLSPSGPDPHHH

SEQ ID NO: 158694 - protein, 393 aa, Heterodera glycines
MHFQTAFLLLVPFIVANIVLADMPKDDAPRPAVQIRTRRSVYVAMMDGIGVTKEAMRYACRGWQTSFCTKFGTTLAVERTRRDTNAEMMGTKMTANAEREAKKEMNGEMGAKKEMNAEMMNTKKDTNAEVMGTKTNANPERDTKMDAVVMNTKTNANPERDTKTETNAVMVNTKTDSANPERDTKTDAVMVNTKTNVNPERDTKMDTTNAEVMDTKKEANAAAAAPVAASDNTAPAPMTWMMDGIVPRDVNVMVDRTTKELRKTTETDGFYDMSQRAQERVMLETAGKQGEIVKTKLKEAIEEARKMIERALGTVISYSEAPMESKMQLEQVFMTLTDETKTPKEKMERIKDIQQKWTPEIRAALKPSTDDKEIAEAIRFFTDLPAQIELGKK

SEQ ID NO: 158695 - protein, 39 aa, Heterodera glycines
GNVNPLPFGNRMDQLRKHRKVVIRSVLRLAGSLGSADPH

SEQ ID NO: 158696 - protein, 1151 aa, Heterodera glycines
  unsure (1)..(1151): unsure at all Xaa locations
MEMPSCFFLLFFLMLFVSPSRHQLVTVSNSSSSPIGTTVAFGTPSPIIPISTAPSTNGTATFGVPPPISPPINSSSSLPSTGPLEASVQLKIGFLFANGTQRLRMLFGFGQSAPAVTLALERARQEHLIDSINFTYTWRMCGCFQPWAVGYATQLVLTENVDALIGPPCAIAAGYVASFYNIPLYLWGATVASEFYNTTVYPTLNNVNVNSDMLALALQSVLVQFNWTEVSFVYTPDNERMVCNSVKQSLTNVLNVTNVTIVFQHQMESNVDSMKATLRNLRNRSRIVLSCFDVEVERRNFLLSIFDTGLAADNEFVFIMGSLRNQGMLQQVASREDGSVKYVNNWMDKNSPGDGRDSDALAATKHVIMIDLENQSSDQLNEFNRNLSAKFGTYPFFCNGSCMGGATEQSPSQYARALFDTTYAYFRALNRTMEKRKSNGRDXLRNGTELNAETAGTTFQGETGRITFDAHGNRQPTFFVTMLNALNVPTVMVKVNITNGVLKMERLYGSEASLWVNWGGFRPMTTPLCGYNGTMCGQNVTVYILIGVTLMLLLLVAALLGIGYAIREKMREKQRLTRECLIPFAELRNLKELRSSEELKSETEKSMRSMRSSQSGSTRLTVGSHKAQRETANCAFFVFNREIVLAVKYHVRVRIMSEDLAFIRKLRQLDHDNMNKLYGVCTDGPLLFAIWRNCQRGTLKELIAKEQYVGDNCVMFALMRDIANGLLAIHQSFIGAHGLLSSENCLINDRWQVKISDFGLNMIRESQTLSKKALLWTAPELLRENNRKGTKEGDVFSFAIICVEMVNRETVWNGVERDQDIDEILYRLRRTNTTIPHRPQLHPRAEINQSLLHLIRDCWSEVPSERPRMDIVRTMLKQMVQDGSQNLMDYVFGMLEQYASSLEQEVEERTKELVEEKRKSDILLYRMLPRQVADKLKIGESVEPESFQMATIFFSDVVSFTTLAGKCSPLQVVNLLNGLYTAFDGIIDTHDCYKVETIGDGYLVCSGIPKRNGDQHAKEIAELSFAFLRTVSSFRVDHLPSERVNLRIGFHSGPAVAGVVGLTMPRYCLFGDSVNTASRMESNGKAGRVHISSSANHFLTSVIGGYVTEPRGEVIIKGKGVMETFWLLGRIGEAHLSEGTAERNASAATRK

SEQ ID NO: 158697 - protein, 437 aa, Heterodera glycines
MLSRMLSSAVAVPRMCESNKKLLRKGATFVGLLCGRMANSTFTATVTPPHRLLRPLHINEKKLFGPGPSNMPPLVQEGLVQPLLGHMHPEFFEIMDDVKAGIKYIFQTENALTFAVSGTGHAGMECAILNLLEPGQTILVVQNGVWGLRAANLAERLGIKVHRLVVPEGEVINLDDFAEAVDNYRPQVAFVCHGESSTGVVHPLERFGDICNAYDVLFLVDTVASICGAPFHADALKVDCVYAATQKVLNCPPGLAPISFSEKALEKITKRKTRVPSFYFDALELGNYWGCFDEPRRYHHTAPISLVYALREGLSAVAQEGIGHMVNRHKINAKLLYDAFDQLGLELFVQKENNRLPCLTTVRVPEGVDWKAVQDKLMAQGFEIAGGLGPTAGKIWRIGTFGINSNPEDIESLKQALKGALYEQEEKGQSDHFKAAI

SEQ ID NO: 158698 - protein, 297 aa, Heterodera glycines
MTAAEIELKTCEQKKTNGLTINNAHEETKMEPIEEANLKIIDTDIGYCRYGKGPVNFLFICGGVGCYKKDYPECVLRAFDPNFATIICIDPPGYGTSRPPDRKQEVNRCKMDAKYCLKLMETLKLTPFVVLGWSEGGRTSIHVAGQGKGLVSHMVLLSSGSQVDMRGDLAFKGMRNTDQWMPAAKAPYLEHYSNEFLKEQWAGLCDVVAKVYKDLGGSFPCDRVLNTLKIPVLIVNGNMDRFVLDPSLMSKKLENARIEIHAQGGHDLHIKYPRWFALKVTSFVKESAKSDVKANRK

SEQ ID NO: 158699 - protein, 88 aa, Heterodera glycines
MVRLVFRPYTQVRRSICTSESLRTSTRVSSGFILLRNSSPSFGSQRIRSVSAPSHAIETGLCCAPTPQCQGSHISSVRSLHFHCAFGF

SEQ ID NO: 158700 - protein, 1151 aa, Heterodera glycines
MEMPSCFFLLFFLMLFVSPSRHQLVTVSNSSSSPIGTTVAFGTPSPIIPISTAPSTNGTATFGVPPPISPPINSSSSLPSTGPLEASVQLKIGFLFANGTQRLRMLFGFGQSAPAVTLALERARQEHLIDSINFTYTWRMCGCFQPWAVGYATQLVLTENVDALIGPPCAIAAGYVASFYNIPLYLWGATVASEFYNTTVYPTLNNVNVNSDMLALALQSVLVQFNWTEVSFVYTPDNERMVCNSVKQSLTNVLNVTNVTIVFQHQMESNVDSMKATLRNLRSRSRIVLSCFDVEVDRRNFLLSIFDTGLAADNEFVFIMGSLRNQGMLQQVASREDGSVKYVNNWMDKNSPGDGRDSDALAATKHVIMIDLENQSSDHLNEFNRDLSAKFGTYPFFCNGSCMGGAAEQSPSQYARALFDTTYAYFRALNRTMEKRKSNGRDLLRNGTELNAETAGTTFQGETGRITFDAHGNRQPTFFVTMLNALNVPTVMVKVNITNGVLKMERLYGSEASLWVNWGGFRPMTTPLCGYNGTMCGQNVTVYILIGVTLMLLLLVAALLGIGYAIREKMREKQRLTRECLIPFAELRNLKELRSSEELKSETEKSMRSMRSSQSGSTRLTVGSHKAQRETANCAFFVFNREIVLAVKYHVRVRIMSEDLAFIRKLRQLDHDNMNKLYGVCTDGPLLFAIWRNCQRGTLKELIAKEQYVGDNCVMFALMRDIANGLLAIHQSFIGAHGLLSSENCLINDRWQVKISDFGLNMIRESQTLSKKALLWTAPELLRENNRKGAKEGDVFSFAIICVEMMNRETVWNGVERDQDIDEILYRLRRTNTTIPHRPQLHPRAEINQSLLHLIRDCWSEVPSERPRMDIVRTMLKQMVQDGSQNLMDYVFGMLEQYASSLEQEVEERTKELVEEKRKSDILLYRMLPRQVADKLKIGESVEPESFQMATIFFSDVVSFTTLAGKCSPLQVVNLLNGLFTAFDGIIDTHDCYKVETIGDGYLVCSGIPKRNGDQHAKEIAELSFAFLRTVSSFRVDHLPSERVNLRIGFHSGPAVAGVVGLTMPRYCLFGDSVNTASRMESNGKAGRVHISSSANHFLTSVIGGYVTEPRGEVIIKGKGVMETFWLLGRIGEAHLSEGTAERNASAATRK

SEQ ID NO: 158701 - protein, 1151 aa, Heterodera glycines; identical to SEQ ID NO: 158696
  unsure (1)..(1151): unsure at all Xaa locations

SEQ ID NO: 158702 - protein, 1112 aa, Heterodera glycines; identical to SEQ ID NO: 158689

SEQ ID NO: 158703 - protein, 949 aa, Heterodera glycines; identical to SEQ ID NO: 158691

SEQ ID NO: 158704 - protein, 48 aa, Heterodera glycines
TFSNFHLINLRRILPFLINSLVKRQKIGSFKYAYLNYFHCFPFAYDHT

SEQ ID NO: 158705 - protein, 45 aa, Heterodera glycines
RDWENPGRTQLNRLAAHPPFPSWHNTEEARSDRPYHHPHSLNGEW

SEQ ID NO: 158706 - protein, 54 aa, Heterodera glycines
  unsure (1)..(54): unsure at all Xaa locations
SLAEILQRGDCXNPGVTQINRLESYPPLASWCNIEQVRNYRPSQHLRTLNGEWH

SEQ ID NO: 158707 - protein, 51 aa, Heterodera glycines
  unsure (1)..(51): unsure at all Xaa locations
PTFXYPCMQHHTSPIMAPKFHSLAAVLQGPAWENPGVPTLRACSQSPFGSW

SEQ ID NO: 158708 - protein, 112 aa, Heterodera glycines
EWVICAPAAILRRSGHFSGPFSGVEPLSSATRHHHGSQIHYHRKLIRQTLERHVAGTRPCDQLSCSESTLDLKSGFALIFGSRICTLARTVVPKLVGQKVSQPRRSSRENGT

SEQ ID NO: 158709 - protein, 114 aa, Heterodera glycines
  unsure (1)..(114): unsure at all Xaa locations
CLLIINVLICKKKKKKKKKKKKLKRSYHCLKKQKEAASRGTKITQLLCCRRHCSSITSPKITSLHVVLQRXDWENPEDPHLNRLAVPPPFPXWRNSEEVHNDRPSQQLLILNGQ

SEQ ID NO: 158710 - protein, 48 aa, Heterodera glycines
  unsure (1)..(48): unsure at all Xaa locations
STFRVLNCCEGRXVRAFSFLRLLAKGGCVLTGLSWVTPGHSQSCSCKN

SEQ ID NO: 158711 - protein, 48 aa, Heterodera glycines
HWPSFYNLLTEKTLPLPNLITLHHIPLSSAGVITKRHAPIALPSSCAP

SEQ ID NO: 158712 - protein, 352 aa, Heterodera glycines
MLVQLVLLAIIGISFVGAAAPPYGQLSVSGTKLVGSNGKPVQLIGNSLFWHQWYPQFWNTETVKALKCNWNSNVVRTAMGVEQGGYLSDANTAYRLTAAVIEAAIAQGIYVIVDWHAHEANADKAIEFFTKVAKAYGSNPHLLYETFNEPLDVSWNDVLVPYHKKVISAIRAIDKKNVIILGTPKWSQDVDVAAQNPIKGFGNLMYTLHFYASSHFVDGLGNKLKTAVNKGLPVFVTEYGTCEASGNGNLNTNSMSSWWSLLDQLQISYVNWSITDKSEACAALTGGTSAANVGTSSRWTQSGNMVASQHKKKSTGVNCSGGGGAAAKPAAKPAAKPAAKSKGKSSKAKKSG

SEQ ID NO: 158713 - protein, 121 aa, Heterodera glycines
VLSHVLGQARALPRRLITATDVAASTNTPLVTARKTGNETTIPSQCVMCLPQQPLNDAQTPAQPLGRPTSVHPTLAQRTSQARRPATDTLPRSSHTQAFTCAALSGIPQLQRMEAPQKHGS

SEQ ID NO: 158714 - protein, 74 aa, Heterodera glycines
KRLVGIACSCMKNQLPSDTMHAILLLCSNLTKNHSVALTFFDAGGLSLLLSLPTSSLFPGFDNVAAGIVRHVIE

SEQ ID NO: 158715 - protein, 57 aa, Heterodera glycines
  unsure (1)..(57): unsure at all Xaa locations
KLLVEKERDKEISDDEAEEEKKEDEAKEXEEKPEDDVSDDEAEKKKEEGDEKKKKTK

SEQ ID NO: 158716 - protein, 114 aa, Heterodera glycines
PLVHPVIPAAPPPKSPAPGGELVSAPVYKTPKPPSAIVHFHAQAPVVSPVSTPSRSFNWTKGGEPVSAPPYKTPRPLPVIVHSPAQAPSSAHKARQFHHAPEPPISSPESPFNE

SEQ ID NO: 158717 - protein, 93 aa, Heterodera glycines
MKRQCKCAEIKPCKDRYQKTMEPCLDTCQSHITSLGGNFRQVKACFAPKESLLNSAMRCTERQHDNACTHSSAAQFVPKRYGQTLENEAMVEI

SEQ ID NO: 158718 - protein, 129 aa, Heterodera glycines
MVTNRTMLPDKRRLAVRKVGTATTNRQRRRTVPVRHTARSMVTNRKMLPDKRRLAVRKVGTATTNRQRRRTVPVRHTARSMDKRRLAVRKVGTATTNRQRRRTVPVRHTARSMDKRRLAVRKVGTATTN

SEQ ID NO: 158719 - protein, 150 aa, Heterodera glycines
MRTFLFIAVVGLMLAVILENVNATPTKGQSLPDSTKRETEPKEEYGNQQNHATVSNEVQNVDYRQQAPGKQSLDSPNHEKDHKNEHEKYEAAYFQISNVVQNVDNKPRPSAAASHLVPVTPGKVGGASLKMVKKLCGTMMPTMNKPKAVV

SEQ ID NO: 158720 - protein, 193 aa, Heterodera glycines
MGQINVCDDVWLDTLAWINRVEVGMKFALVNVRLNALADKHFKQRKWCFGEFHTCERMTEESGAEIMTSIDGSDFSTLPLPTTPLPDSVVGFRSISIWYINEEVVNFLRTIRRLLTKDIALEFSTFFTEYRSWKVMAQHIWPLLKDGISTLCLKKCDLGHAPSNTCRPPCCFDCAGLDRIHNAKCLPRVFVLV

SEQ ID NO: 158721 - protein, 288 aa, Heterodera glycines
  unsure (1)..(288): unsure at all Xaa locations
SLRMPSXWXFAPXFSPPIPFXISVLXLLFCLQFFPLNALHHSVFVRRDLSRPAPDDGVASASINTEEDLGGLNTEWLTDDQLSELASAGSNEERMIKMRTFYDNLEGEAKKGATKKIVEECYGWVDEVATEDERNALKQMHHQSHDECKAKVRELMGRLSEERSEQVENRMGFCEHVYYGKMDGEGDGGAGTAGDEHHHHHHHHTKRRAHRQRRDHHHHHHGEHGLEDYFKTHLAWLTDEQKAEISGMKESGKSRQEIKQKVIELYDATTGEAREKATRLAEGRVPES

SEQ ID NO: 158722 - protein, 334 aa, Heterodera glycines
  unsure (1)..(334): unsure at all Xaa locations
MKGFVSKDIVCIANICVQKQEFTEATSEPGLTFVAAKFDGILGMGFSEISVQKLPTVFDNMVTQQKVPEPVFAFWLNRDPTSEFGGEITIGGTDQRRFVAPITYTPVTHKAYWQFKMDSISGGNGKLACQNGCQAIADTGTSLLAGPKNDIEKIQKHIGAIPLFHGEYMISCERIPTLPDVTINIGGKAYTVEGRGLCAENDQHGQKHMPFRFYGHXFAGTCRRTLDSWRCVYWSLLHGVXCGPKSCWFCAGQRRKXNSNXASSARLRKGRRTLLXSFQRSXRFXSADGXGRFCNDGLKKIDFIYAIFSFIQFLIHDEAYEXTIFPSLIIVITM

SEQ ID NO: 158723 - protein, 280 aa, Heterodera glycines
  unsure (1)..(280): unsure at all Xaa locations
MFDKMEKDGDGKISSDVLKRFATAGSAAGAAGERGDELLKDIFKKKSDGETTETGDAKQQQIEESLDFAAFLDKFEMVKEFVDEIASAAEKQDAEIPAGTEEGDKTDDQSGEEGQKETEKYEQKTRELIERADQAXKEYDEVADKVSDLERLIRESSSYLDVEFGPDSAWAPLKGQCAELTTTQYVSNCACSTERCKRTETDTRRSAWAIGASGPGRKTATNSRLNAMNMAKRVGMDRRGPLWCSSSAVNSSNLWKPANRPSANITFWQNLRPLVLTRRS

SEQ ID NO: 158724 - protein, 227 aa, Heterodera glycines
MLKEVEEWYAHHKNDEHKKAPVFVFKCKDNVSLVINVHLDAVRLSKELSNMLEDTADEGYPKPIPSPVQNFKSDIMLKLIKLCEEYKYKFDGLKKTTDVPTGEVAEASASNVQEGDVGEASASKVKAGTIAEEIQKFVPPPHIMQWDVKTDLEMVRAADFYNINRLINDDYIDNVYEIVKVKWINGKTAAGNFARDSASKSPYPPGTSEMGTSLRRSTSWDESVQGT

SEQ ID NO: 158725 - protein, 120 aa, Heterodera glycines
  unsure (1)..(120): unsure at all Xaa locations
MESDMASSSLETSMTNSANIARQALEELPVKQVRQMEQIAEEGKSKTVEEQERALREYXEKNSESVKKAVDQVFVAKDRADIALETYLRSHAVTFXQEARKANDQXLFLDEXQESFNFXG

SEQ ID NO: 158726 - protein, 253 aa, Heterodera glycines
  unsure (1)..(253): unsure at all Xaa locations
MVAGGTQKRRKPRTEKGKKGPKEEARKGKKPRKEGGKPEQAQETSKPQKGGPEKGRGQKGRKQSPAPRPSLTESCRQCEQNGSMTQGLNRQKHRKNAAQATAKKTPERAGKSIERSGRKRRKRTAEDGCHQNFGGKSEKRRGIGKRSENENGNXFRGQQKGQRRVDFDNRRQKDAFGRKGXADGGADSQNVGQHEQGAESEQQCRRRRLRQVVLRRRRAGGGHGGQSMINQSDRRIRHCCVMKCSQQRNSLIK

SEQ ID NO: 158727 - protein, 234 aa, Heterodera glycines
  unsure (1)..(234): unsure at all Xaa locations
MNILLKSVLFISLLSLFGDCMKNSDQIGVKRKSAGIRIEEPNDVKGKGKVVETSRKGKEKVGEKISVMNTAERIEKMDLAQDKAKMEIDNIDTNAKPKQNEDKGVMNTAERIEKMDLAQDKAKMDIDTNGKPKQNEENAPPKYVFIWSGNNEKKNLEVDLRVIRHSKKLSELFHAKSDQSVNAKHGKQEALPGSETGSRKNARXEVEEWYAHHKNDEHKKAPVFVFKCKDNVSL

SEQ ID NO: 158728 - protein, 184 aa, Heterodera glycines
  unsure (1)..(184): unsure at all Xaa locations
MNPNGFFFVLAVLFLVKVDFLQCKYNEPMARQVLQKHASQFQQHCKNARRGSAVAKCCXAIRSIMGRFTSQKKAMNQMLAKCKAGTTPSEAQQMRRKLEGSNKLKDCGQFKSQIQHKFSELKQYCNNGAENEEENDERSEREREEERVLEREEQQNSNHQRSLIIADRLTGLADQVFLWHKELR

SEQ ID NO: 158729 - protein, 89 aa, Heterodera glycines
MFAQTLQQQRGFGTSFKFPGEGKKSSSGRGGNEAGNDDDDLYSQSVNIDYSEVISSDDEQNMSLFNCIGCIFAPCRLLCVLFFIYGKVE

SEQ ID NO: 158730 - protein, 262 aa, Heterodera glycines
MLFILLVITFVQIGQLNAGICTFPNPSKSVTVQSMMTVSSSTDYKNTLFVGGSGILNGACDVNNDKLKYLMTLKNGVTIKNAILDTPGLGIYCEGNCVLENIYYKRLCYHATGFGYKSTSTSYTYQVIGGAGQGSPDKYFTQSGKGTTIIKNFCAEGKYGKLWCSCGNCPFQTARTVQISNTVLKGPGLSVVSLNSNYGDKMSLSGLTLHGQKSASTKTSYICQEYKGLTYMAAMSPQANYEPTKSGSGTCAYSASAVKIAS

SEQ ID NO: 158731 - protein, 641 aa, Heterodera glycines
MFHLAAIVALAALALPLASSDKFRPCLEGYAQYGKYCYKAFTNPDKSLPWSDANKMCKTEGAELASVHSETEREFVNMLVLREANKMEFNCKQPGRAFFWFGLKLKWSEKKLEDASWTDGKPVDYLSPTEWGAYKRPLTMDNAGGAGYNKENENCVFLGQWPRKVKEYLSLETALDKSGVDVLWMDVVCEKPEEYWAPHGAVCKMRAKEEEKGYGKDKYGAKEEEEEEDEELRKINKYVTIGSGNFIYANKNTYMILLLKDLYGKQLKEESRKKVCELYNGEYVKVKDEPKEAQEYLDKVLAKEKELYSDASDHMFCRFTGIIGACGESCYKVPLPICAEGYAYFSGYCYKAFTNADKEVKYSEAQKICKSDGAELVSMHSELEREFVNVVALTAAKKYEYNAKVPGLAFYWTSMQLEWDEKKLKNASWADMTPMDYLSPMEWGTKKRPVYVDNSNGGEYNKENENCVFIGQWPREGKQYLKLDSAVDKYGLDVLWRDEVCEKPGEDCPRGAVCKKRATVGECYGTGAYLLDAAEEEEMKKLLKFITVGSGTFVYAEKNTYMVLLLKDLYGKQMKEEDRKKVCAYYKAEYVTVKAEPNKVQEYVDKVLSKQKQMYADASDHMLCKFSGTLGGCGDYCKTGY

SEQ ID NO: 158732 - protein, 272 aa, Heterodera glycines
MNSSVVSFSLLLFGLFTIRTAKSQCEKHCTKSKPMGQCNEAEEVILRNSDCAFMKKTETAFEFVVGMNGQTEDKTAPGANANGAFLCCKATQGTATLFIVGVANKRLMLAKDVVNYKFHQNISIDDFEREKQVLESVSAQGQKAGIGDNYGEKFFQDQMDANKMIQKGSVKLWTANKSLPPQNVPDLQKDTRPKVTAATEEMILALKVFQQFRKNKNCWASVEKELLKSQSFLSLAEPNGKDAMRKAAVRLCAKMEAKIEAQIDETAKKLLA

SEQ ID NO: 158733 - protein, 263 aa, Heterodera glycines
MILFILLVITFVQIGQLSAGICKFPNPSKSVTVQSMMTVSSNTDYKNTLFVGGSGILNGACDVNNGKLKYLMTLKNGVTIKNAILDTPGLGIYCEGNCVLENIYYKRLCYHATGFGYKSTSTSYTYQVIGGAGQGSPDKYFTQSGKGTTIIKNFCAEGKYGKLWCSCGNCAFQTARTVQISNTVLKGPGLSVVSLNSNYGDKMSLSGLTLHGQKSSSTKTNYICQEYKGLTHMAAMSPQANYEPTKSGSGTCAYSASAVKIAS

SEQ ID NO: 158734 - protein, 136 aa, Heterodera glycines
  unsure (1)..(136): unsure at all Xaa locations
FVQSKLASPPTPTGKGQRRGTGRKANQTSNTQSVHRTASTDPTTSFLTAAIILCILRAGITAAAGTRLALSXYSLKGLNCTHSDDRPHKRSXLVISRHYLLALRVVAISQAPSPESNPYPPLPVITMVVRYTTIES

SEQ ID NO: 158735 - protein, 209 aa, Heterodera glycines
MKKFDYLVIGGGSGGIASARRAAEFKVKVGLIESERLGGTCVNLGCVPKKVMYNTAIHAEFLRDHADYGFDSMNVKFNWSKIKNSRDEYIRRLNSMYQTNLENSKVEIVRGRAKFNKDGSVEVSRSDGSKETCQGTHTLIAVGGAPRIPKDVPGARYGTSSDGFFGFEQMPNKTVVVGAGHIAVELASILADLGSETHLLIRYDRVLRS

SEQ ID NO: 158736 - protein, 350 aa, Heterodera glycines
FENGKRNQFGCVLWTFLFVLADLAASFGSICFHGSSPSVGHFSDQFRAPYLFNRSVFDFFVISVLRSFFISLGCAICIFKNAQAPRTLAQLSQASFGLCILLCSFSPTKFLALSDNSGPDHPGTLFPGDIPLILANFIFSITAHRLWLFFLHTAQKNEYERMEEEEEEEEEEEGNERIETRNGAVKGNVRTFVIILRLLQYCRNEWFWHLSGFTWLFIYSLTRIFIPYFTGQVIASVVSSSGEEYASLISSVKLMLFISVISAMAGGLRGGSFEYAYSRINRAIRYNLFASLVRQEVAFFDNHKTGEITSRLTADTTTMSDTIALNVNIFLRNTVQMGGSMLFMMTLCWR

SEQ ID NO: 158737 - protein, 313 aa, Heterodera glycines
MFHLAAIVALAALALPLASSDKFRPCLEGYAQYGKYCYKAFTNPDKSLPWSDANKMCKTEGAELASVHSETEREFVNMLVLREANKMEFNCKQPGRAFFWFGLKLKWSEKKLEDASWTDGKPVDYLSPTEWGAYKRPLTMDNAGGAGYNKENENCVFLGQWPRKVKEYLSLETALDKSGVDVLWMDVVCEKPEEYWAPHGAVCKMRAKEEEKGYGKDKYGAKEEEEEEDEELRKINKYVTIGSGNFIYANKNTYMILLLKDLYGKQLKEESRKKVCELYNGEYVKVKDEPKEAQEYQDKVLAKEKELYSDSSD

SEQ ID NO: 158738 - protein, 211 aa, Heterodera glycines
  unsure (1)..(211): unsure at all Xaa locations
MDAVKAPTLASIHHKNRLQSPLNAHGHPLIIENGTVAETLVDKEEEELTEQVGTFLFTSESVGEGHPDKMCDQISDAILDAHLALDPAAKVACEVVTKTGMVLVCGETTSSATVDYQSVVRETIKKIGYDDSSKGFNYKTCNVLVALEKQSPEIAAGVHEDKEPEDVGARDQGIMFXYPSDESPEAMPLTLVLSHKLNAKYHQLRRSAVLP

SEQ ID NO: 158739 - protein, 85 aa, Heterodera glycines
  unsure (1)..(85): unsure at all Xaa locations
MQXSPMLTLLFHXXIXGIISLLSAIDSYFISHAFFTTLMRGXGAQIVFGFEYAVLLTTVAHXTINYILHLHDLRXPHPWENKAAY

SEQ ID NO: 158740 - protein, 61 aa, Heterodera glycines
  unsure (1)..(61): unsure at all Xaa locations
NDENPNPEMDDEMMEEEAAHHEDDQLVLGSDEDEQEDPKDYRKGGYHPVQXXDVLKNGRXH

SEQ ID NO: 158741 - protein, 34 aa, Heterodera glycines
RTLICIASDQKSININDVRQNSFINLKVFKRVLS

SEQ ID NO: 158742 - protein, 476 aa, Heterodera glycines
MCRLQATHLLARLFLLLALCTALVSSLTAVAPPFGQLSVSGTNLVGANGQPVQLIGNSLFWHQWYPQFWNADTVKALKCNWNANVIRGAMGVDEGGYLSDANTAYNLMVAVIEAAISNGIYVIVDWHAHNSHPDEAVKFFTRIAQAYGSYPHILYEDFNEPLSVSWTDVLVPYHKKVIAAIRAIDKKNVIILGTPTWSQDVDVASQNPIKDYQNLMYTLHFYASSHFTNDLGAKLKTAVNNGLPVFVTEYGTCEASGNGNLNTDSMSSWWTLLDSLKISYANWAISDKSEACSALSPGTTAANVGVSSRWTSSGNMVASYYKKKSTGVSCSGSSSGSSSGSSSGSSGSSSGSSSGSSSGSSSGSSSGSSGSSSGSSSGSGSASISVVPSNTWNGGGQVNFEIKNIGSVPLCGVVFSVSLPSGTTLGGSWNMESAGSGQYSLPSWVRIEAGKSSKDAGLTFNGKDKPTAKIVTTKKC

SEQ ID NO: 158743 - protein, 319 aa, Heterodera glycines
MFVQLVLLAIVGITFVDAAAPPFGQLSVKGTNLVGSNGKPVQLIGNSLFWHQWYPQFWNAQTVKALKCNWNSNVVRTAMGVEQGGYLSDANTAYRLTAAVIEAAIAQGIYVIVDWHAHEPNADKAIEFFTKIAKAYGSNPHLLYETFNEPLDVSWNDVLVPYHKKVISAIRAIDKKNVIILGTPKWSQDVDVAAQNPIKGFSNLMYTLHFYASSHFVDGLGNKLKTAVNKGLPVFVTEYGTCEASSNGNLNSGSMSSWWSLLDQLKISYVNWSITDKSEACAALTGGTSAANVGTSSRWTQSGNMVASQHKKKSTGVKC

SEQ ID NO: 158744 - protein, 350 aa, Heterodera glycines
MNRFFTLLFFVLFFNAAINFVSSHRIVGYYQGIRPLTNDQAKKLTHLILAFSTPDSQGNLSPLSSVLKQALKAGKSANGALKVMIAIGGGGFDPAIFTSLASNSGTRKSFINNIVSYLKTNELDGCDIDWEFPTSSDKAIFVTFLRDLKKAMAPSGAVLSMASAASAFYLDPGYDLPGIESAVDFINVMCYDYYGSWTKTSTGPNSPLFKGGSADPSDTLNSNWTMNYHLMKVYNRAKLNMGVPFYGKSWTNVGAPLNGDGLWRQLGTYGTELAWRNMGKSFDMTKTTYHKTAKTAYIYDTATKNFLTFDNPQSLKDKAKYVAEKGIGGIMIWSIDQDDDKLSLLNSVSY

SEQ ID NO: 158745 - protein, 350 aa, Heterodera glycines
MNRFFTLLFFVLFFNAAINFVSSHRIVGYYQGIRPLTNDQAKKLTHLILAFSTPDSQGNLSPLSSVLKQALKAGKSANGALKVMIAIGGGGFDPAIFTSLASNSGTRKSFINNIVSYLKTNELDGCDIDWEFPTSSDKAIFVTFLRDLKKAMAPSGAVLSMASAASAFYLDPGYDLPGIESAVDFINVMCYDYYGSWTKTSTGPNSPLFKGGSADPSDTLNSNWTMNYHLMKVYNRAKLNMGVPFYGKSWTNVGAPLSGDGLWRQLGTYGTELAWRNMGKSFDMTKTTYHKTAKTAYIYDTATKNFLTFDNPQSLKDKAKYVAEKGIGGIMIWSIDQDDDKLSLLNSVSY

SEQ ID NO: 158746 - protein, 335 aa, Heterodera glycines
MSAWICPGFLLFFVLILITDHCPMTQAVTQPPYGQLAVSGKNLVQKSTKKAVALHGLSMYWSQWVPKFWVKQTVNKLKCSCNANVVRAAMASSFGGYISNPTAEYKKMTAIIDGAIDQGLYVVVDWHTGDDLATTEIKYATEFFTKIAKAYNKYPHILYEIWNEPNKFVAWEAVVKPYAKTMIDVIRKYDKNNVIIVGTPNWDQDVDIVAKSPLKDANIIYTMHFYAGQHKDDIRNKVKTAYKLGLPMFVTEYGCYSADGNEKTNLEELKKWMELLDGYGISYAAWHVADIGEQSSILTKTSEVNNICDPAHLTNYGKAIINKLKSQNNGVKCSG

SEQ ID NO: 158747 - protein, 600 aa, Heterodera glycines
MSDANLVGTADHPLSSLHHRPSAYAWPPPSHSLMERFRQAAVTSDNGICSEIGRDVMMQKNGNAVDAAVAAMLCIGVTNAQSSGLGGGMVLTFYDAKTRSCKVIDARETAPARATAKAYSERVTANRTTARATGYHEIATPGELAGLWLAYKKFGSGRVPWSKLVMPAAKLALYGFPITEHMRRALVGTEKELINSPTMKQWIINPRTNQLYEFGDLVKRPKLANTLERLAAAEDPKKLFYEGEIGDEIVEEMQRNGAFLSRSDLKNYEPRLYEMPLYTDDPHGNLRMCGPPPPSSYAITQSIIATMRMEPMCGGDGSADDQSQANSLQNDPKFYHRLIEAQKFAYAQRANLGDQAFVPEAKKLAKHMTSNTFLHNVHKKMLDKAMPDEHYTLMIGPSRADKDHTGTSHTSILDADGNAVSVTSSINQWFGAVIQSENLGIIWNDEMEDFSFPDVKNWFGYAISPTNFVAPGKRPMSSFSPMVIYNKHTGKVKFVIGGSGGAKIPSSVAKTVLHVLCLNQTVKEAIDAPVLHNQFTPNHVIYENGTPPKLIKDLNENFGHIMKSYDNNNVVVQAIHVADDGFIYANGDFRRRTYMHPAGF

SEQ ID NO: 158748 - protein, 185 aa, Heterodera glycines
MSSSPSVSVLAIVAIVCLMCQCCFSAPHPCCPGSQKVVSLMSNYVGTFANSISKSSLCSDAQNVAEALKGQLIGCSNGGDRTLLADIEASLATHSADECALSLGFVRAMFAIAASASSHASNNSEWQTLSGQFGQKVTEIDSKCAEFGISIGKVPINGPKDVHVQNVPNSESVISMPGLAGSHTQ

SEQ ID NO: 158749 - protein, 132 aa, Heterodera glycines
MNWMHYCLIACFAFYYFNTVESSTINSVTVQVNKIENNENGRQFNLEFTNQVYERVCHVDFRIDLPDTVKLNKYSKMVPIPDTCGQYALPKSLDLLPGESFDAQLTLLGHDGKPNVTVLNTNNIPTSKQCKK

SEQ ID NO: 158750 - protein, 341 aa, Heterodera glycines
MLQNGLTILLLISVVIGHSLANLGPTIKHNPHFKAVQTAHHLHDAIAKKHEAEVTQVICSISNEQRQALALEFKKQFGTDLIAMLKKEFKSDFEELIISLMQTPAVYDANQMRAALSGSNEAVLIEILATRTNRQITAPKQAYEQLDRRHQHNQLEEDIKAKTKRTLPKSVGVFAQLLSRRKSAPASIVLAHDEAMKLFREGEGRRGVNAVVFNQVLATRSFAQLRETFEFYRQAAHHEIEEGIKQEFSGHNEAGFLALIKYVRNASVFFADLLFNSMKGLGTRDSDLIRLVISRSEIDLADIKHAFHTLHKKSLEEAIKGDTSGAYRDALLALVKGNTEQ

SEQ ID NO: 158751 - protein, 166 aa, Heterodera glycines
MAKFVAIALLSLTIVSMALAKTGKSQTADEVEGFRNMNIGDNNKVDAGKEPAADKATKKGKAQKAGTKSAAATNEPAAAKGTKNGKAPKTKAKQEVATNEPAAANEWNDQLMGMSVEKFNEELAVLLPKANTFMENALSFINEQVEKNGIATGAAGDSCSTGIPAN

SEQ ID NO: 158752 - protein, 489 aa, Heterodera glycines
MKNSFLFLLQIFILTNILTEILCGDKSRPSTEINANLGTRKKPETITATKNANLGTGKMHETDGTSKMPKHGKPVSNRMAAKSTTIKNNNEAAGPSQQSKQPAANITPQQKGPMQNSKKQPPNELFGKKQRSTPEEIKAGKQPAMELMPCYRGIGKKTMPTIAQRNATMLKRGDSLTRSADFEDPILANVKQSQMLIRQKSKGTMDLEMDEFLKLHKQIQGPRQKLVRMEREKMIKEATEKAKVDRRNRMLEREKMWSMKKAGVAAHQPASPAIRGRTQQQQQQKLQPDKKPEKMLKQQNKTQNFSAPSTSKQIVNRRLLIGPNKPRTGNKIGTTKHGIHSAEIMTSSSESNVPKSENLGSSEMETAEEAAQTYLNNLRVDLNKIPSMKIPFLEPIIEKYVDEYKKSRQLFAECMQKILRKSKNPNQTVKIIEFKKTIEKEMNDLLKHTDLPPDQLIDLLNTREWLLSMKKDIEYMERILTGRENNDNI

SEQ ID NO: 158753 - protein, 213 aa, Heterodera glycines
MSSLLLSIFPIVFLVCCNAMPNFPCCPGSQQVVAVMSKYIDTFSSAADESTVCSTAKSTVDGIKNELSYRVGCPSGGEAQIVNEIDRQLKNIAKMEINYEDECPYNLGFARAMFDLAAAAAGHAGNGTEWQYMKVQFEQESQAIKAIGQEKNFEVTDVHFGVPSKGVSAHQNVPSPSHVIANPGQHSFGWPTERKKNRCHRTSIFEDQPIRRK

SEQ ID NO: 158754 - protein, 347 aa, Heterodera glycines
MLKLCLTIILVTIGYKSFSLSEHISEFSECGISDFEPEFPIAPKVEIGTNHIFKGKTIVDDKSLPWMARILSGVSCTATIIGPRHVLTAAHCVEGQALENFVVSYGSADASNQQHKSGVEAIKYHPKTQHYEIKDKFRKNTRAYLFLNDIVVIKIKNSIKFSQNARPICLHGFHLTNSTKSDGKSIKYDEYSKFINNTQCVVAGWGITKPTCSNDDDKPLSGQLIYGQMRMISKQKCRELSIEYEKVFTPSDGNPEVESMIEAFDAYSIKSNICVVPEQSIGEPGDSGGPLMSKVGKNNWGQLGVLTKGDCRPKNPTSTEGLFAQYAPIDCEWVAEATDGEVKCQTW

SEQ ID NO: 158755 - protein, 247 aa, Heterodera glycines
MRVLLLLCLALPVFSENIDSHVVGGSNANIANYPHQLSLRVSGSHSCGASLVSTTKAVTAAHCGGSAISVYSILGGTTSRTDTTCSTCVTRNLSQFNRHASFVNNGNQGYPNDVATLHFSAVTTNSNLRTIAMAASSAGDYAGQSCVITGWGRTSATSSLPVTLQQGTMTVLTNSNCASRWSAAQINNGHICVSSSSVSACSGDSGGPLVCGSTLVGATSWGQAQCNPSYPSVYTRISYFRSWIDSH

SEQ ID NO: 158756 - protein, 272 aa, Heterodera glycines
MQSLSHILFTFFSILFAAHCQSDESKSAGAQMQTVDENKIRHGKPLTSIVKYPFMATVWQNDRKLCTASIVSPNYILSAGHCFVKMSEENYIILVGTVNAKLEKGNGQQFKVEKAHVYSETVFGQDIAIVKLKNSIDFSDNATQPITLSRRSNFTKTDLAFIAGWGRITDWSSPVTLQGANVLIWPKDEARCDGIMESEVCAFGEDGANVCFGDSGGPLLVKSYDGQRWEQIGVTSRGNFVCESNGFFSCVYIYCEWLAKITEGEVQCLNNE

SEQ ID NO: 158757 - protein, 466 aa, Heterodera glycines
MNLHTIFSVLLCALVLSCAVGKPPAKKGQQSKKADVIAKAAAGEPAEVKNDGKAKKSATVVPVAAGPVGASNDAKGTTAGGNKATGDTGTTKPSAGGSATTDDDDDDDESPSPSAAAGGATTTDGKAKPSGDGTATTLSGGGGKASSAAKVGSGGTTVPAKGEETTAVKVDENSKGTDETEKPEGSTDATITGDTFTKVNKIADEITECEFYFVHLENVKANEKEKLWTRTKQEAEIDTEEMAEDSVDYRIVTPAISKDQPDMGTLYEQDTDDLPSDPDDLRKEEYFAADTELVDAEFLKKNTSNLYDETDCHGIFGRNEIRHGKSWTIFQKGNSLMKHRFCLFSPDDQLQNTAKTASQVHARCCCYNKNVSDSLRDFDISKTADADAIRAKHIDNEYALFQKNQSSTMALRGSLVGEDGQAVYFSIWSKSAPGSYGLCTAEDGKNSRGKRQAEDDEAFYDNYDDE

SEQ ID NO: 158758 - protein, 272 aa, Heterodera glycines
MNSSVVSFSLLLFGLFTIRTAKSQCEKHCTKSKPMGQCNEAEEVILRNSDCAFMKKTETAFEFVVGMNGQTEDKTAPGANANGAFLCCKATQGTATLFIVGVANKRLMLAKDVVNYKFHNNISIDDFVREKQVLESVSAQGQKAGIGDNYGEKFFQDQMDANKMIQKGYVKLWTANKSLLPQNVPDLQKDTRPKVTAATEEMILALKVFQQFRINKNCWASVEKELLKSQSFLSLAEPNGKDAMRKAAVRLCAEMEAKIEAQIDETAKKLLA

SEQ ID NO: 158759 - protein, 92 aa, Heterodera glycines
MSLFRPQSLLLLAALCLSFALLFVTSSEEGGRVKRGGWPWDWAGKQLCKTSANCKCKDGKNWAKCVKSEGYAASNCCDKNYVWACCGKKPKH

SEQ ID NO: 158760 - protein, 138 aa, Heterodera glycines
MPNIFKILLIVLLAVVSFRLSASTGDKKTANDGSGNNSSAGIGTKIKRIVTAGLLFTSLATGGAEAIGRSNAQGGNAAGLVPSHVTNRSMAPPPPPVQFEMGANRLEKMRAHLRELAEKMPVNESKRLSPSGPDPHHH

SEQ ID NO: 158761 - protein, 136 aa, Heterodera glycines; identical to SEQ ID NO: 147069

SEQ ID NO: 158762 - protein, 214 aa, Heterodera glycines
MRTILFMAMVCLVMAVLMEMANSKVVKKDNKKAAVAASPAKGKASPKGGKSPAKGKAAKVSKKDNKLKAKKETKGIKVKNAKPTKKGKSAKGASKTAKKVQAAKKAPGKDKKSLVKPIVLKAPVPPHKMHPMIESEAVPPPAHARSLATVPYSTPGAADRNSLPSYTSTATNLDMADDNDDYQNYYYGTEDSSREFDASAEEEDELYERGESGQ

SEQ ID NO: 158763 - protein, 241 aa, Heterodera glycines
  unsure (1)..(241): unsure at all Xaa locations
MSNFIFVASLTAAFFSSGLALPAPYDAESVVSSELNVPLLSADANVEAAITNESDAAAEIQAPSIPVPIEHQTAADITHPTETGNESSIASSSSTPKSEQTPKKVMNMKSALEXRRQANVYEERLPLDKQPKTIAEAAAKAKQTPAKLPADYDVNRVAERAAARVYGWLPEDKQPKAIYDAAEKAKNTPKPPGDYDVERVAQKAARLVYGVLPIGMQPNFAGPSTDKSNVDDSEKPSAAAA

SEQ ID NO: 158764 - protein, 249 aa, Heterodera glycines
QCEKHCTKSKPMGQCNEAEEVILRNSDCAFMKKTETAFEFVVGMNGQTEDKTAPGANANGAFLCCKATQGTATLFIVGVANKRLMLAKDVVNYKFHNNISIDDFVREKQVLESVSAQGQKAGIGDNYGEKFFQDQMDANKMIQKGYVKLWTANKSLLPQNVPDLQKDTRPKVTAATEEMILALKVFQQFRINKNCWASVEKELLKSQSFLSLAEPNGKDAMRKAAVRLCAEMEAKIEAQIDETAKKLLA

SEQ ID NO: 158765 - protein, 537 aa, Heterodera glycines
  unsure (1)..(537): unsure at all Xaa locations
MALSALLLLLPLLLNVQNIPDESVQSDMKAVYSAISSPEQWKNSQNSLASLESQLTEPQRALAKMHWELETIQKEKPEAPPQFDLGLFSEALEVMVEMDEEAKEVKLRKDKLIRMGRRRGSKKKLKEKMTEEDTVPEVRVNENGKVEVKDGAGGEGRLEVRRTKDEKGREQVVITLMKNGGTEGPAEGTAEKPQEKAKTEEEVQKKNDDKSTRQEQEEAKKTEQENAGGVPKTDSANSHIPVMPMHTILSSPSPPVEEKGKASAEEAQKKEEDKNTRRGGEEANNTEQNKVGGVPKMSVDSPKSVVPMPMHTILSSPAPPVEEQDKARDALTEGANGRKKAQNNEEMLLVATENNGSMRNTNNGGIFDFVRKFISNVFGRKKRDTXSGAQRKYDGGTKENSQHSKFDYEHCREVRLRAEERRQTAAGREKEGGDQAVPGEGSGQHGWNQKGRETGICLVLGASVLDNQVDRGIRKSGGGSQTRIGTAILILQNGISCLPGAEGRGGQMRGEVGQTKGMDRRLFQVKMEETALRGVFF

SEQ ID NO: 158766 - protein, 142 aa, Heterodera glycines
MATYLFIAAAAFGAGIYCWKAYLGPMLDQPKSDDEEKPKPEGGEEATTAGDKEEKKAGSKGDKHKKKDKKGEGAAAAPAADKKEEKRKDKHRSKEAGKSDDNKAGKKDKHGKKDKKKDTADASTVDEALGEQSTAEMSQAEE

SEQ ID NO: 158767 - protein, 185 aa, Heterodera glycines
MASSFCSSLISIVAIVCLLCKCCFSAPHPCCPGSQHVVSMMKDHTGTFSASMPKSSLCLSAERVAAAVENQLKTIWCPGNGGQTLINEINAAQSSSDECARSLGFVRAMFEIAASAASHVGANAELANLAVQFREQVGTIDTNCAALGIHVGQISLGTPKGDHPQVHDSESVLSNPGTSGSHKRI

SEQ ID NO: 158768 - protein, 100 aa, Heterodera glycines
MLSRCCWLRSCLPGLGKCSDQGVGSGRKCRSRPEILQTDRAKEGSVQKARHDGEQHPENPRPRRSNGGPFRDGMGQNNLPNDGTFGENPNFHQSPAIVPR

SEQ ID NO: 158769 - protein, 133 aa, Heterodera glycines
MAFLLLSLAPLFVALSGIDANKVPLQLCCAGGQSLAGLIYDYSDHFSEVLQQSGTEMCTSLKKDMTKLTTAIEKAEGCKCNLVEKIEKELDDVEDDCAYNLSLHSRTVPHCGHGLGTFGRKLELRSGRVQRAN

SEQ ID NO: 158770 - protein, 222 aa, Heterodera glycines
MHLKIFLLILFVTICSVWSLSPKIHHNYHQQQQQHNIKNKLPPKNIGTKHLKTEINGHNKHKHNPASRHGHALLQKVKDQLNNDGWASEDANKTSVLLSSLLAIECHMKKLDKKRTNDSAEIKHLTEQICAAENKEQIGIHKLINEVAKTFEKDGKKMVEQMKRDEHTVKVHLDGHYGTLAEILPSAKKHAKATRLRTYHAVLHLLHLITPKMEEGPAKEAM

SEQ ID NO: 158771 - protein, 111 aa, Heterodera glycines
MLFGFFPFRAGCPGKNDIKAGSSSHVSSTIMIIEEKEDSESDEQMDGAGGDEEKRGGENGSEAQGGKGAARDNEMEDEELKVKAVVEETTTNEQGKTETNVEQSEKEGPMN

SEQ ID NO: 158772 - protein, 192 aa, Heterodera glycines
MAFAISSLSALISLALLAAPQNSYQQKPNDEPKVFNDIQNGCDLINCTDGRTCGIRVGLAKFGNRNFEKFAFPKCITNETELNMNTDNDGNAHIVPNGPGCQMIQCSVGYQCQVRISISKLGNLPYAQSIGTFPQCVGPNVSFNSSSSTIENGPGCDQLPTKCDEGTKCVTAVGIAKYGNLPWSQFFWPFCT

SEQ ID NO: 158773 - protein, 126 aa, Heterodera glycines
  unsure (1)..(126): unsure at all Xaa locations
MEMRCVPSRRPFRLIAPLFNAIPTFYLILTLIFCILSPWAXSADADEWYGARQLRAPKPKFIRFGRSGQKMIPFSRSFSTETQYGDEGINQLDALVDAVDKLYQSSPEIRAFKTAPKRAQKFIRFG

SEQ ID NO: 158774 - protein, 104 aa, Heterodera glycines
MAQFPVANILLASLLLGFVILNSKTNAQFQYGGGMLAEGPQMEGLLEDYGRVGDYPFESLAKRAPLDRSAMARFGKRAPLDRSALARFGKRAPLDRSAIARFGK

SEQ ID NO: 158775 - protein, 81 aa, Heterodera glycines
SRAPPPPPWPTPLSFLQKVAIPLTSSSNLANPIVHSWPQGTKKGCCCASCTRVRHCSPNWAFWSTKALADWPSAKEWANLL

SEQ ID NO: 158776 - protein, 104 aa, Heterodera glycines
MALQISNTAFMLIVLATSLLLLMPSSSSAKVMPQLGFANAEQLMNDNSSPMGAGVEGEVMDKVEARLLGALELLQSYKEVPIVPKFTEKRKNKFEFIRFGKRRR

SEQ ID NO: 158777 - protein, 355 aa, Heterodera glycines
MGHFFPGTVSFPIFLFMLGSARCWWHFGAKQPRVFASSHAQLTPPEGIESADLRMPGVSPQMNESYLCSAFPLDSERDHFIVGFEPVLSSRHIHHVIVYGCEMPGSEDKAWDCGEMASPRGSYSHSPVCASQPDIVYAWAHNAPELLLPDGVAFRVGGSSAVQFLVLQVHYMRAEEDDTSGIRIIHTDRPQPRQAATLLLATDGRIGPKRKEQLEVACVVDESVVLHPFAFRVHTHRHGRKVGGWAVREDPKSGTDKWTLLGQRDPQLPQMFQLVANQSVTITQGDVLAARCSMENEEKREIKIGPTGEDEMCNFYLMYWTKNGQTLEQNMCFSPGPPIYRWTKSAGLNHTPKRK

SEQ ID NO: 158778 - protein, 186 aa, Heterodera glycines
MSSSPSVSVLAIVAIVCLMCQCCFSAPHPCCPGSQKVVSLMSNYVGTFANSISKSSLCSDAQNVADALKGQLIGCSNGGDRTLLADIEASLASHSADECAHSLGFVRAMFAIAASASSHASNNSEWQALSTQFVQKVTEIDSKCAEFGISIGKVPIDGPKGDHSQRNVPSTDSVISMPGLTGSHKH

SEQ ID NO: 158779 - protein, 228 aa, Heterodera glycines
MSSLLLSIFPIVFLVCCNAMPNFPCCPGSQQVVAVMSIYIDTFSSAADESTVCFFAKSTVDGIKNELSSRGGCQNGGEAQIVDEIDRQLKNIAKMEINYEDECPYNLGFARAMFDLAAAAAGHAGNGTEWQYMKVQFEQESQAIKAIGQEKNFEVTDVHFGVPSKGVSAHQNVPSPSHVIANPGQHSSVGPRKERRTVVIGLRFLRTNKSGGNRIENHFVDMSNIYLK

SEQ ID NO: 158780 - protein, 92 aa, Heterodera glycines
MSLLRPQSLLLVPALSLSFALLFVTSSEEGGRVKPGGCPWDWAGKQLCKTSANCKCKDGKSWAKCVKSEGYAASNCCDKNYVWACCGKKPKH

SEQ ID NO: 158781 - protein, 238 aa, Heterodera glycines
  unsure (1)..(238): unsure at all Xaa locations
MSNFIFVSFLTAAFFSSGLALPAPYDAESVVSFVLNVPLLSADANVEASPPNESDAVFEIQAPSIPVPIEHQTAADITHPTETGNESSIASSSSTPKSEQTPKKVMNMKSALEGAAANVYGGLPLDKQPKTIAEAXAKAKQTPAKLPADYDVNRVAERAAARVYGWLPEDKQPKAIYDAAENAKNTPKPPGDYDVERVAQKAARLVYGVLPIGMQPNFAGPSTDKSNVDDSEKPSAAA

SEQ ID NO: 158782 - protein, 175 aa, Heterodera glycines
MSNFIFVAFLTAAFFSSSLALPAPYDAESVVSSELNVPLLSADANVQAAENVEIQIPSIPAPIEQQTAAHITHPTETGNEPSIASSSSAPKSEQTPKKVMNMKSAMEGAAANVYGGLPLDQQPKTIAEAAAKAKQTPAKLPADYDANRVAERAAARVYGWLPEDKQPKAIYDAAE

SEQ ID NO: 158783 - protein, 222 aa, Heterodera glycines
  unsure (1)..(222): unsure at all Xaa locations
MAMVCLVMAVLMEMANSKAVKKDNKKGAVAASPAKGKASPKGGKSPAKGKAAKVSKKDNKLKAKKETKGIKVKNAKPTKKGKSAKGAPKTAKKVQAAKKAPGKDKKSLVKPIVLKAPVPPHKMHPMIESEAVPPPAHARSLATVPYSTPGAADRNSLPSYTSAGTNLDMADDNDDYQNYYYGTEDGSREFDASAEEEDELYXEGGRGNEWADGRLRYWQWTG

SEQ ID NO: 158784 - protein, 278 aa, Heterodera glycines
MRTILFIAMVCLVMAVLMEMANSKAVKKDNKKGAVAASPAKGKASPKGGKSPAKGKAAKKLKPKKDAKGIKAKKAKPAKKGKAAKAVKGAPKTVKKLAIAKTAQAKDKKSPAKPMVLKAVPPHQMHLMNEKVQTAVSPPAHARSLATVPYSTPVAADRNSLPSYTSDGTNLDMAHENDDYQNYYYGSGDSSKEFDASAEEEDGLYEEGDGAMNWANGRLPDWALNRNTGINRGEWPPKSGMLQLKNTKNFGKNLFSKILKHLDFNIPVKKLNFFLPSL

SEQ ID NO: 158785 - protein, 271 aa, Heterodera glycines
MVCLVMAVLMEMANSKAVKKYNKKGAVAASPAKGKASPKGGKSPAKGKAAKKLKPKKDAKGIKAKKAKPAKKSKAAKAVKGAPKTVKKLAFAKTAAQVKEIKSPAKPMVLKAVPPHQMHLMNEKVQTAVSPPAHARSLATVPYSTPVAADRNSLPSYTSDGTNLDMAHENDDYQNYYYGSGDSSKEFDASAEEEDGLYEEGDGAMNWANGRLPDWALNRNTGINRGEWPPKSGMLQLKNTKNFGKNLFSKILKHLDFNIPVKKLNFFLPSL

SEQ ID NO: 158786 - protein, 109 aa, Heterodera glycines
MYKFLFFPHFCILIKAISGLHCWNSNMILLSEMPEKGSVTVHQCPSGHQCVTANCWLGVGNYIVQKCVPDQPGARNYCKDFNNICQMGFFGMPIHCSSCKGDLCNEARN

SEQ ID NO: 158787 - protein, 433 aa, Heterodera glycines
MNILLKSVLFISLLSLFGDCMKNSDQIGVKRKSAGIRIEEPNDVKGKGKVVETSRKGKEKVGEKISVMNTAERIEKMDLAQDKAKMDIDTNGKPKQNEENAPPKYVFIWSGNNEKKNLEVDLRVIRHSKKLSELFHAKSDQSVNAKHGKQEALPVPKQEAEKMLKEVEEWYAHHKNDEHKKAPVFVFKCKDNVSLVINVHLDAVRLSKELSNMLEDTADEGYPKPIPSPVQNFKSDIMLKLIKLCEEYKYKFDGLKKTTDVPTGEVAEASASNVQEGDVGEASASKVKAGTIAEEIQKFVPPPHIMQWDVKTDLEMVRAADFYNINRLINDDYIDNVYEIVKVKWINGKTPQEIRKGFGVEEPYPPGHPEWARVEKENEWEESDEEREARHAKEREEEEERERKEEQKRKEEEAERLHQEQLQQQQNQEQQPQ

SEQ ID NO: 158788 - protein, 484 aa, Heterodera glycines
MEAGDVDIIRQQHIRYYADIDGRKYPTEGPDYDVLLYGTDLLVDGKLYKNAVPTGYINYINRIEERIPVLGSSGRSIQLNAAGDDQGNNARLHTNVVGHQISGSVSLPEIPIGGNSDYINTGHNKHDGKPTFGDTKREEKQKNKQKQQKRGELIGGNFTHINNQNNENIGGTQDIGRIQIGGMPPGGALHLNTGGNRNVGGTQMIGGIKIGKMPTGGTFGLNIGGNRNVGGTQEIGSSQGLYNRSNTGDLTHALRQQRTEDNHISINGQIYSVDGPNVNVGVEGHDLSVNGRVYQNRATEQYLEIIQDKNIRNVIVSVPLSLFSRENTTVGQTRHIHAECDGNLYIDQSADDCIRILCVDVKKDAAAKNFGSTSGGFNFGSTSVFYNFSVRGTLHIHNSSLECANIECDASLNVTHSPIERNAQMKCGGSLSIDESPMGNIRLNCDGSLRIEKSKMESSQIDVGGSIGIVESPMGSIGIDCGGS

SEQ ID NO: 158789 - protein, 127 aa, Heterodera glycines
MATYLFIAAAAFGAGIYCWKAYLGPMLDQPKSDDEEKKAGSKGDKHKKKDKKGEGAAAAPAADKKEEKRKDKHRSKEAGKSDDSKAGKKDKHGKKDKKGKKKDTADASTVDEALGEQSTAETSQAEE

SEQ ID NO: 158790 - protein, 144 aa, Heterodera glycines
MATYLFLAAAAFGAGIYCWKTYLGPMLDQPKSDDEEKPKPEGGEEATTAGEEEKKAGSKGDKHKKKDKKGEGAAAAPAADKKEEKRKDKHKSKESGKSDDSKAGKKDKHGKKDKKGKKKDTADASTVDEALGEQSTAETSQAEE

SEQ ID NO: 158791 - protein, 182 aa, Heterodera glycines
MASSFRSSIISIVAIVCLLCKCCFSAPHPCCPGSQHVVSMMKDHTGTFSASMPKSSLCMSAERVAAAVENQLKTIWCPGNGSQTLINEINATQSSSDECARSLGFVRAMFEIAASAASHAGANADLAVQFREQVGTIDSNCAALGIHVGQISLDAPKGDHPQVHDSESVLSNPGTSGSHKRF

SEQ ID NO: 158792 - protein, 194 aa, Heterodera glycines
MLRPSVLPLGTSARPLVLSCVAIVASVGIVCAHSQSKGISGAPLNPSPSLLFVCGLSFATLFSVILAMFGLSWLRPIFLLPIICASGVVCVFHTLSVANWLSDWWISADQSLDLDWLIIFTSAITFQAISMLVFSLKHLMIFKLLRPFTFKFAAIAFFDSQIQNIPLIVALIIASTAAESELFLKGGGKSFLFP

SEQ ID NO: 158793 - protein, 265 aa, Heterodera glycines
MEKIVYLKLLQFVLTLTIIWQLRSLHQFCGTFADPKAFLHDISIGHCKNFTLIGKDSKSGEFSALFDQDKWHNQLIMMSSTNGQLIEEQQHQFMDELATKLPSAGRICIPITISPFDWIFYRIANDRILIDNDILYFSSVQLCVALCLLVPLVLGTLLMLLSVEEYEPCAYFLASYFVFCWCGFAAISSDLLLNWTDLWTCFNFQADHTNMPLATLVLSIVMACSSVFEIFFKNSLFKKRLVNAPAAAENNHHKLRKHYATCAIE

SEQ ID NO: 158794 - protein, 361 aa, Heterodera glycines
MSDSEKVTTRNAQPKVLDTRDDGKFTAKFIAPRSREPDSVFLHIFGSKKDPHLYLDVSEVQWGNVYIFDLNKTEVIAVRPRRVADELRKLEERDRPPVKREQPKPQPQPQPQPQPVTFQKILSGLVWPTTEKYTLLVSSRDFDLDGRGSPIKQRATNPDPTRAETNYKGTFDVKMALTERPETFYVWVSSAKGGQKRFVIPAYEVDSSKFALDMRTGKVEPFQRLENVLRKLKSVGMINNEQIPSGPPKRAVAAAEPARAAVAPSAGSDMLNSIKAMVNNLGAVLEKKIEQQHAKLKQDIETELEQRVGQKLVAVGKRLGLVDDTLKDMYKKLPREIEDVIAAEFDVLYKKKLIGKLDGKA

SEQ ID NO: 158795 - protein, 106 aa, Heterodera glycines
MRTFLFIAVVGLMLAVILENVNATGKNSPTKELIHEQGNLQNHATGQSPPDSPNHKNDHENEISNLQNRATGQSPPDSTKRETEHKIEKGKPSPDSPKYDEQALKW

SEQ ID NO: 158796 - protein, 146 aa, Heterodera glycines
MSSSPSVSVLAVVAIVCLMCQCCFSAPHPCCPGSQKVVSLMSNYVGTFANSISKSSLCSDAQNVADALKGQLIGCSASSHASNNSEWQTLSGQFGQKVTEIDSKCAEFGISIGKVPINGPKGVHVQNVPNSESVISMPGLAGSHTQ

SEQ ID NO: 158797 - protein, 185 aa, Heterodera glycines
MASSFCSSIISIVAIVCLLCKCCFSAPHPCCPGSQHVVSMMKDHTGTFSASMPKSSLCLSAERVAAAVENQLKTIWCPGNGGQTLINEINAAQSSSDECARSLGFIRAMFEIAASAASHAGANAELANLAVQFREQVGTIDTNCAALGIHVGQISLGTPKGDHPQVHDSESVLSNPGTSGSHKRI

SEQ ID NO: 158798 - protein, 195 aa, Heterodera glycines
MRAVLFLAMVCLVMAVILETANSKAVKKDNKKGAITTPAKGKAAPKGAAKGGIKKDAKSKGKGKKDAKGKKDKKAKPAKGKASPKNDKKPPAAKANDKKSPTKPMAAVKAVPKAAENAQKGPSSAEVVAEESNLDTEAVDDLGVGPEAVDDLGAEESDFDQLAEDELLEDDAMGGEADEWEGMGEETEMDSQMAL

SEQ ID NO: 158799 - protein, 244 aa, Heterodera glycines
MRTFLFIAVVGLMLAVILENVNATGKNSPTKGQSPPGSPKHEKDRKNEHGNQQNHATGKSPPGSPRVQSPPGSPRGKSPPGSPRVQSPPGSPRGQSPPGSPKHEKDHKNEHGNQQNHATVPNVVQKVEVHNQPTPSAAASHPVPPTPGNSPTAHDSHHTSPKVAHVAAAATLGHGRQECANVSCGDDVTEEMDRDDDKTVERAVGESPIGVSESSATDEDDSAAVSAYNKNNSSAAASASVADD

SEQ ID NO: 158800 - protein, 308 aa, Heterodera glycines
MLRIALLISILALFGDCMDKGKRKLGGISINEPSEYGTKEKEAIATKENALTSKDPPTSAGGQNEAIPSPKKPSPKGKLKSDFGLNLAKAFPRPVPKGKKVENTLSSKDSASEAHKELAKEKNEENAQTSKVPTSMERQNEPIPSPKKPSPKGKSKSDFALNLAKAFPRPVAEAKMGEEAQSSKDPTMNAKFVQFVWMHRLSLTLKLSKCHHRFHRECVDGWFKNNDTCPYCRAVVASRYLPRPTRTDRIFDARIENKRRFMGEGEGKYTIIRPNGSTLMVHDNHFGNNFTVEKTEEGSIQLSKNDRK

SEQ ID NO: 158801 - protein, 227 aa, Heterodera glycines
MRTFLFIAVVGLVLAVIMESVNATGNNSPTKGQTPPGSPKGGHGSNKSPTTPHSAGSPHGTQHGNQQNHAAGQTPPGSPKGGHGSNKSPTTPHSAGSPHGTQHGNQQKNATGQTPPGSPKGGHGSNKSATTPHSAGSPHGTQHGNQQKNATGQTPPGSPKGGHGNNKSPTTPHSAGSPHGTQHGNQQNHAAVSNVVQNVDNKPRPSAPASHLVPPTPGNSPTAHDSR

SEQ ID NO: 158802 - protein, 163 aa, Heterodera glycines
MRKLPFLLLFSACCYLQRKEVYFAEKTERKIHRAANKKHKEETEGMAEVALFQMAMACMANRMDFQMADLAAPVSIQIAAGRIAFQMVDLAAPVAFHRWDITRADFTALGPAHLLEATDTEAVLVEENEKKTESDRRENDLCCCLLCMQNLNGKTHFTSRTLF

SEQ ID NO: 158803 - protein, 235 aa, Heterodera glycines
MVCLVMAVLMEMANSKAVKKDNKKGAVAASPAKGKSSPKGGKSPAKGKAAKKLKPKKDAKGIKAKKAKPAKKSKAAKAVKGAPKTVKKLAIAKTAAQVKEIKSPAKPMVLKAVPPHQMHLMNEKVQTAVSPPAHARSLATVPYSTPMAADRNSLPSYTSDGTNLDMAHENDDYQNYYYGTEDSSREFDASAEEEDELYEEGDGAMSWQTDDYGIGIGQEYGHQSVEVPPKSVMLD

SEQ ID NO: 158804 - protein, 335 aa, Heterodera glycines
MNSSFVICCCFHNFVLFLLLSCVVPHAFACCPHGNLRVKGTHLADEKGETVQLRGMSLYWSQWEYGSKFFNEKTVNCLKCSWHADIVRAPLAVDQGGYLSNPEQEYAKVKSVVQAAIDKCIYVLIDWHYTSSEKYTDKAKEFFGRISTLCAGKCNCLYETWNEPIQNDWSSQLKPYHEELVKVIRQNDKNGVIIAGTPNYDQDVKAVVNDPIKEHNIMYTLHLYAASHKQELRNTAQQAIGAGVPLFVTEYGTSSYTGDGGPDLVETQNWYDFFNKNSLSYINWAIDDKQEASVALQNTQPPVGPADVCSTDRLTKSGKFVHDHLIGVNQKPDGC

SEQ ID NO: 158805 - protein, 344 aa, Heterodera glycines
MEMPSCFFLLFFLMLFVSPSRHQLVTVSNSSSSPIGTTVAFGTPSPIIPISTAPSTNGTATFGVPPPISPPINSSSSLPSTGPLEASVQLKIGFLFANGTQRLRMLFGFGQSAPAVTLALERARQEHLIDSINFTYTWRMCGCFQPWAVGYATQLVLTENVDALIGPPCAIAAGYVASFYNIPLYLWGATVASEFYNTTVYPTLNNVNVNSDMLALALQSVLVQFNWTEVSFVYTPDNERMVCNSVKQSLTNVLNVTNVTIVFQHQMESNVDSMKATLRNLRNRSRIVLSCFDVEVERRNFLLSIFDTGLAADNEFVFIMGSLRNQGMLQQVASREDGSVKYVN

SEQ ID NO: 158806 - protein, 344 aa, Heterodera glycines
MFVQLVLLAIVGITFVDAAAPPFGQLSVKGTNLVGSNGKPVQLIGNSLFWHQWYPQFWNAQTVKALKCNWNSNVVRTAMGVEQGGYLSDANTAYRLTAAVIEAAIAQGIYVIVDWHAHEPNADKAIEFFTKIAKAYGSNPHLLYETFNEPLDVSWNDVLVPYHKKVISAIRAIDKKNVIILGTPKWSQDVDVAAQNPIKGFSNLMYTLHFYASSHFVDGLGNKLKTAVNKGLPVFVTEYGTCEASGNGNLNSGSMSSWWSLLDQLKISYVNWSITDKSEACAALTGGTSAANVGTSSRWTQSGNMVASQHKKKSTGLSDQLNRQGQDTIKKYIEDLDLRIKGFI

SEQ ID NO: 158807 - protein, 360 aa, Heterodera glycines
MAVPQEVIDKIEAGYKKLQAAADCKSLLKKYLTKDVVDACKDKRTKLGATFLDVIQSGVANLDSGVGVYAPDAEAYTLFKPLFDPIINNYHGGFGPSSKQPATDLGEGKTQLPTDLDPEGKFINSTRVRCGRSLQGYPFNPCLTKENYVEMESKVKAVFEQLKGDAELGGTYYPLQGMTKDVQNQLIADHFLFKEGDRFLQEANACRYWPTGRGIFHNAKKTFLVWVNEEDHLRIISMQNGGNVGQVLERLIKGVKAIESKVPFSRDDRLGWLTFCPTNLGTTVRASVHIRLPKISAKPDFKSICDGLKLQIRGIHGEHSESAGGVYDISNKARLGLTEFEAVKQMYDGVKHLIELEKKA

SEQ ID NO: 158808 - protein, 121 aa, Heterodera glycines; identical to SEQ ID NO: 158713

SEQ ID NO: 158809 - protein, 89 aa, Heterodera glycines
MNLIFEIFAFGMDNFSSEKNVSLLRLFLFFFSTVVLFGSAHPMVNKLCEDLDKPEGWQLLKKLTIEKCRMSIMWNSPNGKTATKALKSL

SEQ ID NO: 158810 - protein, 67 aa, Heterodera glycines
NSPDKACQLAKQAFDDAIAELDTLNEDSYKDSTLIMQLLRDNLTLWTSDTAGDEQEAGGEAGEAGGN

SEQ ID NO: 158811 - protein, 352 aa, Heterodera glycines
MLVQLVLLAIIGISFVGAAAPPYGQLSVSGTKLVGSNGKPVQLIGNSLFWHQWYPQFWNAETVKALKCNWNSNVVRTAMGVEQGGYLSDANTAYRLTAAVIEAAIAQGIYVIVDWHAHEANADKAIEFFTKVAKAYGSNPHLLYETFNEPLDVSWNDVLVPYHKKVISAIRAIDKKNVIILGTPKWSQDVDVAAQNPIKGFGNLMYTLHFYASSHFVDGLGNKLKTAVNKGLPVFVTEYGTCEASGNGNLNTNSMSSWWSLLDQLQISYVNWSITDKSEACAALTGGTSAANVGTSSRWTQSGNMVASQHKKKSTGVNCSGGGGAAAKPAAKPAAKPAAKSKGKSSKAKKSG

SEQ ID NO: 158812 - protein, 335 aa, Heterodera glycines; identical to SEQ ID NO: 158746

SEQ ID NO: 158813 - protein, 284 aa, Heterodera glycines
MDAIKKKMQAMKIEKDNAIDRADAAEEKCRQTQERLERVEEELRDTQKKMMATENELDKAQEDLTAANNLLEEKEKKVQEAEAEVASLNRRMVLLEEELDKLEERLKLATEKMEEATANCDESERVRKVMENRSLQDEERANAIEEQLKEAQSLAEEADRKYDEVARKLAMVEADLERAEERAEAGENKIVELEEELRVVGNNLKSLELSEEKALQREEAYEEQVRQMEVRLKEAETRAEFAERSVQKLQKEVDRLEDELVHEKERYKAISEELDSTFQELSGY

SEQ ID NO: 158814 - protein, 319 aa, Heterodera glycines
MLVQLVLLAIVGITFVDAAAPPYGQLSVKGTNLVGSNGKPVQLIGNSLFWHQWYPQFWNAQTVKALKCNWNSNVVRTAMGVEQGGYLSDANTAYRLTAAVIEAAIAQGIYVIVDWHAHEPNADKAIEFFTKIAKAYGSNPHLLYETFNEPLDVSWNDVLVPYHKKVISAIRAIDKKNVIILGTPKWSQDVDVAAQNPIKGFSNLMYTLHFYASSHFVDGLGNKLKTAVNKGLPVFVTEYGTCEASGNGNLNSGSMSSWWSLLDQLKISYVNWSITDKSEACAALTGGTSAANVGTSSRWTQSGNMVASQHKKKSTGVKC

SEQ ID NO: 158815 - protein, 344 aa, Heterodera glycines
MLVQLVLLAIVGITFVDAAAPPYGQLSVKGTNLVGSNGKPVQLIGNSLFWHQWYPQFWNAQTVKALKCNWNSNVVRTAMGVEQGGYLSDANTAYRLTAAVIEAAIAQGIYVIVDWHAHEPNADKAIEFFTKIAKAYGSNPHLLYETFNEPLDVSWNDVLVPYHKKVISAIRAIDKKNVIILGTPKWSQDVDVAAQNPIKGFSNLMYTLHFYASSHFVDGLGNKLKTAVNKGLPVFVTEYGTCEASGNGNLNSGSMSSWWSLLDQLKISYVNWSITDKSEACAALTGGTSAANVGTSSRWTQSGNMVASQHKKKSTGLSDQLNRQGQDTIKKYIEDLDLRIKGFI

SEQ ID NO: 158816 - protein, 412 aa, Heterodera glycines
MKIAAFATLLVAAIALVEAGNPAQQQQQQQQKPTPAPSANVTKVPATTVPATTVPATKVPVPSNATKVPGTKVPATTAPGTKVPATTAPAPTPAGSKPTPAGNTTTAPKPTPAASVPTKQGNCIEVSVERDATYCIAGPICSGSGDKPAGDNCPKKGDVAVKDCLKTLKSYTESGKCVLPEDAKCQKIHTGAWGCVIGGGNATPAPSKPVTPPSNNSTTAPPKPTPAASTPCPSLPIKTPAPSNTTAAPKPTPAASTPCPSLPVKTETPCPSLPIKTPAPSTTTPCPSLPIKTPAPTPAATTPCPSLPVKTPAPSTTTPCPSLPVKTPAPSTTTPCPSLPVKTKTPAPTATKTPAPSNNGTKVPSKTTPAPTTNTTKVPATTAPATKTPAPTNATAVPTKKPQQQQQQQQKL

SEQ ID NO: 158817 - protein, 641 aa, Heterodera glycines
MFHLAAIVALAALALPLASSDKFRPCLEGYAQYGKYCYKADKFRPCLEGYAQYGKYCYKAGAELASVHSETEREFVNMLVLREANKMEFNCKQPGRAFFWFGLKLKWSEKKLEDASWTDGKPVDYLSPTEWGAYKRPLTMDNAGGAGYNKENENCVFLGQWPRKVKEYLSLETALDKSGVDVLWMDVVCEKPEEYWAPHGAVCKMRAKEEEKGYGKDKYGAKEEEEEEDEELRKINKYVTIGSGNFIYANKNTYMILLLKDLYGKQLKEESRKKVCELYNGEYVKVKDEPKEAQEYLDKVLAKEKELYSDASDHMFCRFTGIIGACGESCYKVPLPICAEGYAYFSGYCYKAFTNADKEVKYSEAQKICKSDGAELVSMHSELEREFVNVVALTAAKKYEYNAKVPGLAFYWTSMQLEWDEKKLKNASWADMTPMDYLSPMEWGTKKRPVYVDNSNGGEYNKENENCVFIGQWPREGKQYLKLDSAVDKYGLDVLWRDEVCEKPGEDCPRGAVCKKRATVGECYGTGAYLLDAAEEEEMKKLLKFITVGSGTFVYAEKNTYMVLLLKDLYGKQMKEEDRKKVCAYYKAEYVTVKAEPNKVQEYVDKVLSKQKQMYADASDHMLCKFSGTLGGCGDYCKTGY

SEQ ID NO: 158818 - protein, 144 aa, Heterodera glycines
  unsure (1)..(144): unsure at all Xaa locations
MNWMHYCLIACFAFYYFNTVESSTINSVTVQVNKIENNENGRQFNLEFTNQVYERVCHVDFRIDLPDTVKFDELNYLFNNVXLNKYSKMVPIPDTCGQYALPKSLDLLPGESFDAQLTLLGHDGKPNVTVLNTNNIPTSKQCKK

SEQ ID NO: 158819 - protein, 335 aa, Heterodera glycines
MNSSFVICCCFHNFVLFLLLSCVVPHAFACCPHGNLRVKGTHLADEKGETVQLRGMSLYWSQWEYGSKFFNEKTVNCLKCSWHADIVRAPLAVDQGGYLSNPEQEYAKVKSVVQAAIDKCIYVLIDWHYTSSEKYTDKAKEFFGRISTLCAGKCNCLYETWNEPIQNDWSSQLKPYHEELVKVIRQNDENGVIIAGTPNYDQDVKAVVNDPIKEHNIMYTLHLYAASHKQELRNTAQQAIGAGVPLFVTEYGTSSYTGDGGPDLVETQNWYDFFNKNSLSYINWAIDDKQEASVALQNTQPPVGPADVCSTDRLTKSGKFVHDHLIGVNQKPDGC

SEQ ID NO: 158820 - protein, 407 aa, Heterodera glycines
MSSVSKFITNKGPFIAVGMGVVGMGYFGYYKFWRSSREIAMSYKQEDESDGYTVKRIEEAYKTLQEAKDCKSLLKKHFTADVKDKLKYKKTKLGASLFDVIRSGVKNLDSGVGVYAADSESYKVFSPLFDPVIDEYHGGFGPKQKHPPSNFGEDRLGELKDLDPDGKYILSTRIRCGRSLLGYPFNPLLMRDDYLVMQQKVRMALENLEDDPEIGGTYYPLEGMTKETQKQLIADHFLFKEGDRFLEAANSNHFWPAGRGIFHNAKKTFLVWVNEEDHLRIISMQKGGDVGNVLKRLIRGVKGIEKQVPFARDDRLGYLTFCPSNLGTTIRASVHIRLPKISAKPEFKKICEDLKLQVRGIHGEHSESEGGVYDVSNKARLGLTEFEAVKQMYDGVKKLIELEKASK

SEQ ID NO: 158821 - protein, 586 aa, Heterodera glycines
MHFHKLFLLLPILLLHLQQSQACFSRGNSGEPSDGNPEAQGLKSENDVRTVQLKKEKQTDETEEEKDEESSAEQKLPSELDPEFVKTYLREFGHLKHNENGLSHGVKHFQRFLGYRQTGNVDLATLQKMSWKRCANSDEGYTAQDPSQLWERSTLFWNLNASHPKQFTHGETKELIAQAFRAWEIVIKIDFLETNNADNAQIIFTFESDGAKKEKSKNGEEEKEKEGKTGLAIAKASSPPVARIVLNADENWSTFQTQEEGKIDIFVVLLHEIGHALGLRHSGDEHSVMFPMFERSVGEHLPVISNDDVEHLRALYEGDLTDRPTLAADLRPTRPVPVQGGTHSTDSYGGEGATTAAGKEAEKCPHSITTAANVNSETLFLFKDGYAWHLSRGKLVGGPYKISEFFPDGPEKVDVAFSSGRLTVLVKSRMLFGYEFDQKTAQFTRDHRYPRELHSRILFYPEGAFPIVNGSVILFKDDVFATYNVESNTPHLFGSMSEFFPGLPQNLRAGFAATPDFTTYHMLTNDYAFLYDVRVARTVSSQSIGQFVGCEGNKLMPPGPPMPHLFFPYQPSPPQNPRFPQQNYGK

SEQ ID NO: 158822 - protein, 372 aa, Heterodera glycines
EQFLQDERQRVDKLFNNNNNNSKSNNKPLEKAYGGAFATSSSHDMQMAASTSTVGEEAAAENVHHTNQKLQQSATSAAEGGGKFSDFEDGSDNELFISTTTINNNDGDDDDDEEEEEGKEAIPWHGGGKYAKCFEQIVRDGTLVAKVRCLICAKELSTKSRTSIREHSKLHQLVAESGIFDHSQEGIFDGMMPEAVGTALVEERTPIVIPFRRRVTTTEMMPSTSAQQKMRSQSVEDDILNDEELQQQQNLAHFDWNKQKIELQILEAELIQKQLSNFQRCTELGIPARVHLPVGIVPSGSQSATGWNRRFATFSNAHALQQHSPAGRQQRQMPHGHADNGSRDNGGIAGMFAAAGDDDDGTPCDFVAFADI

SEQ ID NO: 158823 - protein, 64 aa, Heterodera glycines
LNVFGLRSVYALVLGGENAAEMMDEQAMLGMAQPQMVAPGQDPIGAFKSEWEALQLYTHTFNPR

SEQ ID NO: 158824 - protein, 92 aa, Heterodera glycines
TDSEDYFMVEKQLRERRVGIQNFSSMVLFDRKAKQRQKMAEKRRKERNNAKLILYGRPRKTKQCSSVFSKEDFAQIGKKDGSSAYERIKRIR

SEQ ID NO: 158825 - protein, 79 aa, Heterodera glycines
MVGYFVFGLGMIFWDYVQLRIIFFGTPNLSFSIFYLYLIATFLNWVLSFQFHGKQQIHSNFSKQFDDVKKSKHVICIHF

SEQ ID NO: 158826 - protein, 78 aa, Heterodera glycines
SERQRGGKGGKKEKKTPPGEGARKKKKLFVFPLAFSPLFWFFQTKYYSLFPFFFSQGKKAFLNFVFGYLLSPGRELFN

SEQ ID NO: 158827 - protein, 179 aa, Heterodera glycines
MSVVESSSSSIHGRRHQQQQDITAAQPEHHHYPIPIGQRRSASSSASDFVAQHSPFDSGNKWFHVVDLPSSEQRFVITEYSVPCYDRGGGGSGLATTTESVRRKRRAIEYASQLPDEQQQEQQQKTAATEQIALEPGTLYRIRVRAINSVGCSAWSQPVSFKTCVPGFPGSPTSIKITK

SEQ ID NO: 158828 - protein, 38 aa, Heterodera glycines
EKWGAEDKVTHVSPGGGPSLELLEGKVLPGVPALSDAP

SEQ ID NO: 158829 - protein, 186 aa, Heterodera glycines
GGSRAQEGTKGECVPDQGVRIDGRGQWQGYHALISSVQLFRFGGEVNAGQRIGVARDLECAGTRPKPRGDENFVRMELFREDKPIDPTHHLIDCMCTGQICETNRANALEGLPFKFDSRFNGVRGWEIVCPNVRPEEPNSSGESPEQSDNRQTMSPKIYSPIEGEVIGRVRLSASSNSQSYSGCAN

SEQ ID NO: 158830 - protein, 51 aa, Heterodera glycines
VMTNKEPFSIRQWINHKERRPGFLFLSAPESHIATLRPLLGFWADIAVSAL

SEQ ID NO: 158831 - protein, 177 aa, Heterodera glycines
KEAEKKENEEQKPAGKKEKRAAEKEEKKSESKEAEKKENEEQKPAGKKEKRAAEKEEKKSESNEAEKKENEEQKPAGKKEKRAAEKEEKKSESKETEKKENEEQKPAGKKEKRAAEKEEKKSESKEAEKKENEEQKPAGKKEKRAAEKEEKKSESKETEKKENEEQKPAGKKEKRAA

SEQ ID NO: 158832 - protein, 182 aa, Heterodera glycines
KFSNRKMNLRHLLFIIFFNIVVIDSGKIQPNFDEIFCNGWDKIESEEIVIKIEQNENSEVDQLGEEMANGPIDQMRNYTDQNHSKSDQNIIEEPNDQQKREIVQKFDAIKEKLREKIKYKRKDYDKIERKIAKLLGANRQLIHKWKNELKLNKKKMKKQLYDEKKRKFIERFDEFKELYGQR

SEQ ID NO: 158833 - protein, 179 aa, Heterodera glycines
MNILLKSVLFISLLSLFGDCMKNSDQIGVKRKSAGIRIEEPNDVKGKGKVVETSRKGKEKVGEKISVMNTAERIEKMDLAQDKAKMEIDNIDTNAKPKQNEDKGVMNTAERIEKMDLAQDKAKMDIDTNGKPKQNEENAPPKYVFIWSGNNEKKNLEVDLRVIRHSKKLSELFHAKSDQ

SEQ ID NO: 158834 - protein, 102 aa, Heterodera glycines
MPPSKYHRNDGQGHTGNIQPKAVKFIMGLKKEAEIYAEWLQRLCLSEYLALFLGQGYDLPTLARSSPEDLTTLGITRPEDRKRLFQDIQTWRNVTANCKKIN

SEQ ID NO: 158835 - protein, 183 aa, Heterodera glycines
TKSPANPKLYAKLNACLNTLLDYKTSNGKKLAGPFVQLPSRREYPDYYDQIERPMDPQRIRKKIEEDKYTMLAQMSADVDLLCENAQRFNMDGSEIHEGSKLLNMVWRRIAEAIGGQGGKEEEDETTGRGGGAARHTPQQEEAAAAPSTSGHAKAPAEDDDVPVSAAAGPSTSSMMNSEKDTN

SEQ ID NO: 158836 - protein, 186 aa, Heterodera glycines
YAKAYGRMGVALSCQNRYDHAVEAYKKALELDPGNESYKNNLSIAEDKLLKTRETLRNNPQPNPFANMFGGPGGMGGLMNNPEMMSTITNIMQDPSMRNMMTQMVQSMGQPGQQNQDQGQAGNPSANAFSEMLRVGEALARSMQESNPDLVEQLRRQFGGEDGNDGGAGAGGNQNNNNQQPPPGSV

SEQ ID NO: 158837 - protein, 190 aa, Heterodera glycines
  unsure (1)..(190): unsure at all Xaa locations
DTVILAVEVTADAPHGVNWDSKKDTGYIGLKNQGATCYMNSILQTLFFTNKLRKAVYQMPTEEDNPESSVALAMQRVFXELQFSDSPVGTKKLTKSFGWDSIDSFLQHDVQEFCRVLLDNLDSKMRNTKVNDTIPSLFKGRMKSYIKCKNVDFGSSREECFYDLQLNVKGKSNVLESFRDYIQLEILDGE

SEQ ID NO: 158838 - protein, 170 aa, Heterodera glycines
VASPVKAGKATTKTTASGKGGKAKADGKVKTGGKGAKKAGGKGGKVKIAASGSKNTRSARAGVAFPVGRIHRLLRNGRHAQRIGAGAPVYMASVLEYLAAEVLELAGNAARENKKLRITPRHLQLAVRNDEELNKLLAEVTISRGGVLPNIHTELLSKMQQKKQQNDDSQ

SEQ ID NO: 158839 - protein, 160 aa, Heterodera glycines
GGSRAQEGTKGECVPDQGVRIDGRGQWQGYHALISSVQLFRFGGEVNAGQRIGVARDLECAGTRPKPRGDENFVRMELFREDKPIDPTHHLIDCMCTGQICETNRANALEGLPFKFDSRFNGVRGWEIVCPNVRPEEPNSSGESPEQSDNRQTMSPKIYS

SEQ ID NO: 158840 - protein, 138 aa, Heterodera glycines; identical to SEQ ID NO: 158760

SEQ ID NO: 158841 - protein, 194 aa, Heterodera glycines
LTIAIGRRYGLVGPNGMGKTTLLKHIAARKLAIPPNIDILYCEQEIEADKTSAIETVLRSDKVRTELLEREKALIIQLEAGDISAGEKLQEVTSELKNIGAEAAEPRARRILAGLGFNKQMQEKAVEDFSGGWRMRVSLARALFLEPTLLLLDEPINHLDLNAVIWLDTYLQGWKKTLLVVSHDQSFLDNICTD

SEQ ID NO: 158842 - protein, 67 aa, Heterodera glycines
SPDCPVSPSDCPLSSPDCPVSPSDCPLSSPDCPVSPSDCPLSSPDCPVSPSDCPLSSPDCPLSPRDC

SEQ ID NO: 158843 - protein, 175 aa, Heterodera glycines
MKMVEKENDIAAAVPNNAANNGHVEAVDPSASKSAKEVPNNTEKHSAEDLMGLARLFLKEYYTKLSDLPSEAGIFYGDDSHFVHADVEETGRENIQRAIGNMGFEDCKARFYSLKTVSLPMQGDNAKLIQVCGELTLVKAAVQKQQPVLPRRFVQTIILAHQTPTVLYVKSDVFQ

SEQ ID NO: 158844 - protein, 55 aa, Heterodera glycines
DRGGGGGGYRSGGGGGGGGYRGGGGNRDYSRSRSRSRSPYQRRGGGGGRSRSRSR

SEQ ID NO: 158845 - protein, 197 aa, Heterodera glycines
MLGEFVDDYTVNVIDVFAMPQSGTGVSVEAVDPVFQAKMLDMLKQTGRPEMVVGWYHSHPGFGCWLSGVDINTQQSFEALSDRAVAVVVDPIQSVKGKVVIDAFRTINPQAIALNQEPRQTTSNIGHLQKPSIQALIHGLNRHYYSIPIAYRTNENEQQMLLNLNKQSWMDSMNLVNYNEHCTRTEKAVEHMLKLAK

SEQ ID NO: 158846 - protein, 155 aa, Heterodera glycines
VQVPQLHFLLVIPHGAHIASPNCLALHPIDAPVVRDHCRVHPRTLCAALRLLLLLVVFAAAALRLVALSLGHFLCIFQCLFICVQIRQSKHQQFVVLCSVSQQQAKRSLENRSDCRPKSRTKHQNLNTDSSFRMCETTNTPPHRIPILRSPSKFG

SEQ ID NO: 158847 - protein, 66 aa, Heterodera glycines
QGGKAPGLGPSHVTNRSRAPPPPPGQFEKGANRLEKMRAPLRELAEKKPVKELKGLSPRGPDPHHH

SEQ ID NO: 158848 - protein, 32 aa, Heterodera glycines
IEGAMANFTPAKFISHMARRILKQKLNFFLAN

SEQ ID NO: 158849 - protein, 58 aa, Heterodera glycines
IEWPSDRLKKFPDLRFKYIEDEDTVDFFVPYIWRLINDGLCLQFDAEAIRLFNVNGEQ

SEQ ID NO: 158850 - protein, 83 aa, Heterodera glycines
MEIIIDKINNSMERKSPTINGAGNNGKTKVFVVCHHGNDSQLAACHLHKQLSEAGIGDRFIVRDIVGGMDGWALEVDADFPRY

SEQ ID NO: 158851 - protein, 158 aa, Heterodera glycines
RPGRIHCKKKKSLHLSFRGTKSTHFSNEREAQKKQPKTHKRRPQTTKERDALTKICHAQKLTQQLRRVQSDWESASMVLRRGDAVVVKALQQDGFSLCDNAVSSGLVPVALLGPFDESFTAPFSPESPASGNEPHAIDLAVESAGHKQNNSDVPFASA

SEQ ID NO: 158852 - protein, 71 aa, Heterodera glycines
MGNRFRAFNLDNKKWQFRHTLNQKHHHHPMNGFFRSTNPKMVPMLRMHILWPTTTHHHHHHPPFSRKLILI

SEQ ID NO: 158853 - protein, 168 aa, Heterodera glycines
MSDEGQQLLESTLRNVLDQQSLRWIFVGGKGGVGKTTCSCSLAVQLAKYRRNVLIISTDPAHNISDAFNQKFTRSPTKVNGFDNLFAMEVDGSNFGDHGVPNLGDEDDKSDIFSIGKNFLADFAAGLPGVDEATSFSQMIKLIRSMDFEVVLFDTAPTGHTLRLLQFP

SEQ ID NO: 158854 - protein, 151 aa, Heterodera glycines
  unsure (1)..(151): unsure at all Xaa locations
MEEGSQCATGPFVELAELFVQCSILQELYTPPSIWGRNGHLQTIAYGLLGHHSLKRTFDCRHLVRLSDGTTATFDLFEPVXHQNGGDFTLVFCPGIANCSESNYIRTCVHHAQEKGYRCAVLNHIGVPKNVQLTSQRIFSYGGNGEMEAMF

SEQ ID NO: 158855 - protein, 123 aa, Heterodera glycines
SQTLYNSSHNSKLIFRFGLFLRLQLLQILLVLREHFIGQFCEAFLLVLDLLKVVAEFRDFLQHRRQQFVVLCVQTIFVVQIIFVLLGQFVMEFAQSQVNFAQFVDGGLVFLSDHVQTVLRVDQ

SEQ ID NO: 158856 - protein, 127 aa, Heterodera glycines
MAEETSKTSENIAEDNGIKVLDSLFASVDHASKCLAFAAGTPNFCLATPAFLAVMVWCCFLMPPVAVLFRSYRRDGNAFTVQAAYNVILCFFLWMPGMLHALWFCFGETVRMLRRHVPPSDDAQKNE

SEQ ID NO: 158857 - protein, 33 aa, Heterodera glycines
TIRQHPNTIQRLPNTTQQLPTTVRQLPNTIQPL

SEQ ID NO: 158858 - protein, 154 aa, Heterodera glycines
  unsure (1)..(154): unsure at all Xaa locations
DEFKQVKSVTLGSKPCIILQGHLFESNGILQRIGNLMVDLFRGPKVEYLPLQGXELIISLTALSEXGLNAEVYRASLKKDMESATPKIQLVEMGPNIDFKIDRTKLASDSLFKTALTKPHEVHKSAKKNVKFDAFGNKVAQVHTGRQSTDAIQT

SEQ ID NO: 158859 - protein, 70 aa, Heterodera glycines
YGYPQNQGITQERTCEQKASKRPGTVKRPRCWRFSIGSAPLTSITKIDAQVRGGETRQDYKDTRRFPLEA

SEQ ID NO: 158860 - protein, 141 aa, Heterodera glycines
MFNVLICLADIAALCCCCCCCRFSLVGGSYTFDSDIDRFFVRRPGTAFDGRLRCRCCSPSDSVLSSTANFRCSSLIFTMRRERFDGPAAEDCTNGELERRLPFWVILPLLRRTSGRIFWSSLHCWRPTAFCSSLFAAWKTR

SEQ ID NO: 158861 - protein, 193 aa, Heterodera glycines
DKMSDGTRSILHEVMEQQTLSIAKAGIICQLNARTSVLAAANPIDSKWNKRKNIVKNVNLPHTLLSRFDLIFLVLDPQDEAYDRRLARHLVNFYLESDGEMDKQQRVDMAFLRDYIAYAKQNVQPELTDETVQLLTDKYQFMRQQGQQAGLISAYPRQLESLIRLAEAFAKMRLSPTVTESDVEMAYALHREA

SEQ ID NO: 158862 - protein, 184 aa, Heterodera glycines
ADEHDLSTGSVGPPLRSCEIRLREWTEAGYLPSNSPPQGEVLIHGANVALGYFKNEEKTKEDFVELDGKRWFATGDIGEFREDGSLCIIDRKKDLIKLAHGEYIALGKVETAPLTNPNVDDICVYGESHKDYLIALVVPNLKNLQVLAEKNDVNEPSIERICANKEMPKILQKELHSFVSGKLR

SEQ ID NO: 158863 - protein, 168 aa, Heterodera glycines
MRNSAKLFHSDRIVCLRCTSDGRFLLSLSQNRNVCVWDAETMRMLCHLKVPESEGGLSTFPVQFELCDEGRLIWLFIPNSNNVTVVGIADPKLFSNRPIVGNIHFQTLRGHFQNVLSCAYRKEYNQLITSSTDRLILVWAPKMDEFRSDSAIQQIRQQLHEDAFSDDE

SEQ ID NO: 158864 - protein, 128 aa, Heterodera glycines
LNRRHSLSFYALFATFTQRKLAKKATMGKERLGEEQRKELLEPLLKEGWETVQERDAIKKSFTFKDFNQAFGFMTRIALKADKMDHHPEWFNVYNKVDITLSSHDVQGISERDVKLASFIENVFKTVK

SEQ ID NO: 158865 - protein, 55 aa, Heterodera glycines
  unsure (1)..(55): unsure at all Xaa locations
MADTPPPPPPXPPAAAAAAGGGDEAVDLEQRVRQLIMSIGLRNEHAAREISILIE

SEQ ID NO: 158866 - protein, 187 aa, Heterodera glycines
WWSLGALTFDMLTGGPPFSAENRKRTIDKILKGRLTLPPYLSFEAKDLIKRLLKRHVDTRLGAGPGDAEEIKKHAFFTHHVENWTNVYRREIEAPYKPNITSEEDASLFDSKFTKMTPVDSPTAELPPMSVNPFEGFTYIAPSVLEQVSQPTLVRPRQQRKIHGPAIFHSFHPHQSTTDNGPLEEME

SEQ ID NO: 158867 - protein, 217 aa, Heterodera glycines
RRRTAKSIYICTIEKANGLVNSLIENGRAHELGLVIVDEIHMLGEQGGRGALLEQCLCKLLFRPTNEQQQERVQLIGMSATLGNASELCRFLGANLFRTHFRPVALIERIKLHDKLFRVDEQGEWRMEKELEKGNKELERRDPDGLFKLLGNLLKGSVLIFCPTKQSCENVCQMLSNFSPKQLRDHRADERNALIGRLMDEHEGLICPVLSACIRNG

SEQ ID NO: 158868 - protein, 166 aa, Heterodera glycines
  unsure (1)..(166): unsure at all Xaa locations
REGNPTRDVLQESIATLESARHCRIFSSGLAAIAACVXLLNSGQHVIASGDCNGGTKNYFDKICVPHHGLELSPVDXTRLENLENEFKPNTKMALCETPSNPLLKIVDIEAVCRMVRARSKDCVVLVDNTFMTPYFQRPLELGADVTVQSLTKDINGHTDVLMGTV

SEQ ID NO: 158869 - protein, 49 aa, Heterodera glycines
MCDSISCSNCSSCTNERQPDWALSSTDCLRGFLPNIALVNADSPPPPPP

SEQ ID NO: 158870 - protein, 95 aa, Heterodera glycines
PSLYKNSRNHWSKTIHGLIYNALKLFMEENQKLFDLCVQNFNKQKEQEQQKQQNNRRRWELLEKAAMENARAIRQQQTDGEAEPYSIGEGEKKPK

SEQ ID NO: 158871 - protein, 156 aa, Heterodera glycines
AQNEFMRAAVEEGIRGVQSGDGGPFGAVIVKNGKIIAQGHNMVLFSNDPTAHAEVMALRGASKVLDSFDLSGCILYTSCYPCPMCLGAVLWSRISNVFYAAAPTDAASVGFDDQNFHEFVSNPKKYEKLMALEHLPVEGHMKVFKMWEQRDEKRMY

SEQ ID NO: 158872 - protein, 126 aa, Heterodera glycines
GADGQVPAKYKSTLCNIWLMEGICTRGKQCHYAHGIEELNYRQDDTMSRFYKTSLCTFYQQRGFCNNGDQCRWAHGEAELRKGADGSSNGLANYYAATMQAMATGQQNANGSSAEAAAAAAAAGWN

SEQ ID NO: 158873 - protein, 125 aa, Heterodera glycines
IIHALLFPVVVVVVLVEQLQIEPVLTDCFASITLDQQAQQIQFISSASNSSFFWFIFCCSTRFGILLLHIIHKCFPDRDCFFSANLVHVLAQCRATDHCPILEFIHHYYVCHIFQFEWKNVKSTV

SEQ ID NO: 158874 - protein, 98 aa, Heterodera glycines
FFFFFFFGTHSLCVLEKTHKNIIVKRKKHHPIILNVNKSKGREWKEMPTMRRIQTNLSQKLIQPNESAAPPNSPPFVYLVTGIRSQIEVLFPNVGCPN

SEQ ID NO: 158875 - protein, 189 aa, Heterodera glycines
MANAPTKLIRLLMCRPTHFNVKYEINPWMRPGDPVNVQKATDQWERLKRTLEESGAQVEVMEPVGADNYPDLVFTANAAVVRGKNALLSNFFYPERKGEQHFYDRWFKQNGYETFKDLHVPFEGAGDALWIGKSKLFCGIGPRTDVRALTLISEKLRDYGAPFKVYGFRLIDPRFYHIDTCFCPLNDQI

SEQ ID NO: 158876 - protein, 75 aa, Heterodera glycines
MRTIAPLRLPSPPPPPLHRRHRSPFPVRSRFVHPLAVLFLLSPLFLWFQTVFPLFVLPFSLFGVVVADSSFACKE

SEQ ID NO: 158877 - protein, 50 aa, Heterodera glycines
CQHGRKKSPDRTDLLHSVAPGRSFSMHGGIGHYGLDPQHSAVHNQLCVLA

SEQ ID NO: 158878 - protein, 204 aa, Heterodera glycines
MTMQTAVALCYFCENHGSRVVVVCQPMRNCELPRPNSANSMGGPIVNDRQPQQQQPSTSSFVHCQDCDGDGNVAESPQLFTDFFADNEVVDDEARCAACSSFEHGVGLMSKDGDAEISYISTQVPRNERLGHLLRQASLRSLSVEISVPLPTTDRSHSNHIDASPSSSSSDFRPKYDQRIGNVRGDFTERDGIVLFGDDEHWYT

SEQ ID NO: 158879 - protein, 192 aa, Heterodera glycines
  unsure (1)..(192): unsure at all Xaa locations
MLQNGLTILLLISVVIGHSLANLGPTIKHNPHFKAVQTAHHLHDAIAKKHEAEVTQVICSISNEQRQALALEFKKQFGTDLIAMLKKEFKSDFEELIISLMQTPAVYDANQMRAALSGSNEAVLIEILATRTNRQITAPKQAYEQLDRRHQHNQLEEDIKAKTKXTLPKSVGVFAQLLSRRKXPASIVLAHD

SEQ ID NO: 158880 - protein, 135 aa, Heterodera glycines
VNEEDHLRIISMQKGGDVGNVLKRLIRGVKGIEKQVPFARDDRLGYLTFCPPNLGTTIRASVHIRLPKISAKPEFKKICEDLKLQVRGIHGEHSESEGGVYDVSNKARLGLTEFEAVKQMYDGVKKLIELEKASK

SEQ ID NO: 158881 - protein, 137 aa, Heterodera glycines
MAHLNTGYLSTNRGVIKILQIICGFITCSLLCANWYGGKTCFFEGRLGYASGLNFVIVIINIVLFFLNFLSMAAYRMERIYSVIGTILFIVAFICMVWYLIDYDINRGQLIAATVFIGIQMVLFIWDYQILHGQAFN

SEQ ID NO: 158882 - protein, 107 aa, Heterodera glycines
MQKMNSATMFTLLLIIGTVLALTIGMPAPGGSDESVASMRQKRGYGMSNGGGMGNGFGGGMGNGFGGGMGNGFGGGMGNGFGGGMGNGFGGGMGGGSGGGYGYGKRR

SEQ ID NO: 158883 - protein, 92 aa, Heterodera glycines
FALFLLLLILENSLGQFPTSSTTEKTITEYVPWLYRFGQKLMPCQDNIPSDECQKHENDCQDTIKRREMALFCCGTCRTLYPNFLPKQSGRK

SEQ ID NO: 158884 - protein, 177 aa, Heterodera glycines
MSSLLLSIFPIVFLVCCNAMPNFPCCPGSQQVVAVMSKYIDTFSSAADESTVCSTAKSTVDGIKNELSYRVGCPSGGEAQIVNEIDRQLKNIAKMEINYEDECPYNLGFARAMFDLAAAAAGHAGNGTEWQYMKVQFEQESQAIKAIGQEKNFEVTDVHFGVPSKGVSAHQNVPSPS

SEQ ID NO: 158885 - protein, 175 aa, Heterodera glycines
MADDIPPPPAVAADGGDVVVDLEQHVRQLIMSIGQGSEDAVHELSILIESFNQEQLVDFLEIMARIYVESGVSVDMPGGQGINMLMVAASSGRVDFARYLLAHGATVGHLDATGSVFPLMLAAESGELEVCRLLVGEWAAEVNQQAIDGTTPLMSASSEGRLDVVIYLIDHGAEI

SEQ ID NO: 158886 - protein, 160 aa, Heterodera glycines
MAKFVAIALLSLTIVSMALAKTGKSQTADEVEGFRNMNIGDNNKVDAGKEPAADKATKKGKAQKAGTKSAAATNEPAAAKGTKNGKAPKTKAKQEVATNEPAAANEWNDQLMGMSVEKFNEELAVLLPKANTFMENALSFINEQVEKNGIATGAAGDSCS

SEQ ID NO: 158887 - protein, 177 aa, Heterodera glycines
IRGLVDSDDLPLNVSREMLQQHKLLKVIKKKLVRKVLDMLKKISPEKFDEFWKEYSTNLKLGVMEDPSNRNRLAKLLRFHSSADSAKQTTLEAYVERMKEKQQAIYYIAGSSREEVENSPFVERLLKKGFEVLYLTEPVDEYCIQSMPEFEGKKFQNVAKEGLKLDEGSKSEEQHKL

SEQ ID NO: 158888 - protein, 195 aa, Heterodera glycines
IAFLLLVLAKGFEGYTFSCLDGCECDTDDEAIHCHNRPDRHFVQLPPSRLRGFTVLALTRNNIDVLPSEEVLLEKLPDLKAVDVEGNEHFDCSTLDHYRTLMVMSDCGKTPEQLEADRAKLPTDTQPNEDCDFECVANRRSRELREYVKHLWEMVKEKVSRLAKKHGLDKVVDDVGNFFNDVGERISNIKLKKKK

SEQ ID NO: 158889 - protein, 85 aa, Heterodera glycines
NVNFCFTIDSFLILSFLYGINSQCFFSFFFVFLTFLALPFPKGLAVHFIAPWAHHSRHKTSSPRAGCTPSTKNGRRSRGRRRGDG

SEQ ID NO: 158890 - protein, 193 aa, Heterodera glycines
KIADPEAKKPEDWDEDAPFEIVDEEAEKPADWLENEPLQVPDPEAEKPEDWDDEEDGDWIPPMVSNSKCDEVSGCGPWEKPTIRNPAYKGKWNAPKIDNPAYKGVWKPRKIANPDYFEDKTPANFEPVGAIGFELWTMQNDILFDNIYIGHSEADAKALQTETFDVKVAVEKEEEEKSKPKKEDKKPDIKSPM

SEQ ID NO: 158891 - protein, 183 aa, Heterodera glycines
AELKSIEQNHNSNSTSATGTISSTDSNSDEHNDTSSRAKFTSNFERIANAYIKFVSNIFASIGIVIVSAVFFVICFRAVLGFEINLTMVKLFPPDSPLLEVDNYREDKLVPFYTMAQIFVNNPGDLSNNYVKDFNVSVLHDFGLFLGLLENMQDPVVIAGVIISIGFSVDIPAHISAFYGHII

SEQ ID NO: 158892 - protein, 147 aa, Heterodera glycines
MLQNGLTILLLISVVIGHSLANLGPTIKHNPHFKAVQTAHHLHDAIAKKHEAEVTQVICSISNEQRQALALEFKKQFGTDLIAMLKKEFKSDFEELIISLMQTPAVYDANQMRAALSGSNEAVLIEILATRTNRQITALKQAYEQLD

SEQ ID NO: 158893 - protein, 164 aa, Heterodera glycines
GRLTELEEFITEPNHAQIQLVGDRCAEDGMNDAARILFISISNFAKLAKTLVELGDFPGAVDAGRKANSTKTWKQICFACVNHQEFRLAQICGLHIVVHADELDELINYYQNRAHFDELIALLENALGLERAHMGMFTELAILYSKYKTEKMREHLELSWSRVN

SEQ ID NO: 158894 - protein, 129 aa, Heterodera glycines
  unsure (1)..(129): unsure at all Xaa locations
VPVQGSKYAADLSQRRRFAGPRRNYFFRGNRNRRPRHSEEAAGGVXSVGEKKEGAEENNGKEAKKEEVAKDANGGRGGGQRRGRGVRFRGRRNNRRNVAGSTSGGTENEGEQKKEQTQPEEETKVNGGE

SEQ ID NO: 158895 - protein, 61 aa, Heterodera glycines
  unsure (1)..(61): unsure at all Xaa locations
YPLSDGPSIQNHRINKTSFRTCSTCRSRSXARLCHCTISTISDRTXRTFVLLRYALGGDRP

SEQ ID NO: 158896 - protein, 45 aa, Heterodera glycines
KKSWRIWSAFTRLLLYVGLLASRLGFAVLLFSGEWGICRRSALRC

SEQ ID NO: 158897 - protein, 75 aa, Heterodera glycines
NRCRHAHASSCTVVGTKQQVQYSTVHNSGKITKKYNILVTYLPKIQKSAAYFLVEHFFILSNRIIIKKINKKNFF

SEQ ID NO: 158898 - protein, 129 aa, Heterodera glycines
VPVQGSKYAADLSQRRRFAGPRRNYFFRGNRNRRPRHSEEAAGGEVPVGEKKEGAEENNGKEAKKEEVAKDANGGRGGGQRRGRGVRFRGRRNNRRNVAGSTSGGTENEGEQKKEQTQPEEETKVNGGE

SEQ ID NO: 158899 - protein, 232 aa, Heterodera glycines
  unsure (1)..(232): unsure at all Xaa locations
EASSSHRTDESPPAINLNESNSLSHRHLAEEANASVAGDSATESTTTAAAALLVKKGRRRELDGLLKMDFGKHSPFQTSDPDKYAQEVLIEARQQQRTLALAQEEQRNARRSVESSCGGSATGKSSKRDKYAKKPFSPPVSPLPESRAASVRSTTPTLQLRAKNHGEKASSSSKLATASGIGKPTKEGTTTSVENKLKTSPKDSFSLEQRRSGGSNVXXEGEERCLYCRRSF

SEQ ID NO: 158900 - protein, 78 aa, Heterodera glycines
TPPNSSHISVEFWRQFWPCVCQKHVSIQINARTCTRSPSNAFSPCITRKLSTPQHSARPKSQRRLVVRTSLANWPKRW

SEQ ID NO: 158901 - protein, 195 aa, Heterodera glycines
VRELLLHAFHRLFVVRSVDLVEEAPNCVRVHRLRLHQKNAFARPKFVQHFARLFAQCPLHVTDRILRQNRLLTCEGGQRSAQRPLAHLCRLFQHFAVQFLLDRSADIGRQRRQCRTVQQRAVGLLQQKHQLLLIEHSVILFVQCANSELQRLAKVGPLSVHFRPTFRFNFDLALFAAYINLPVLHNFHTFCRPFP

SEQ ID NO: 158902 - protein, 44 aa, Heterodera glycines
FFFFFFFGPDCLCVLEKTHKNIFVKRRKLFSIILNVNKSKGREW

SEQ ID NO: 158903 - protein, 151 aa, Heterodera glycines
SANCSLITPNNKTMLLPTMAPKCLPLELLFEIVPLIPAENATPNALSSCWLLHKLLLPRVIKWKEIKMHAENIVWLEKYPRYFRINWNGMEDRRIDRYEAFVKQLSGVDDWARIGSLPVRSSMESYSLTFQVGAPSNEEYKFKIIAIDARG

SEQ ID NO: 158904 - protein, 176 aa, Heterodera glycines
MAGEEKRITWVPLESNPEAFNKYIEKMGVKGAECHELFGFEPDLVSFVPGPHLALIFCYPYQDKANDYQKGIYGQLTASDKGGVPEWAFFMKQKIHNACGTFALFHALTNNTDRIDIGNGVFYDWFKAAKQLNVEQRSDLLANDSELAHLHEHCALRESETDVPRNVAHHFISYTH

SEQ ID NO: 158905 - protein, 195 aa, Heterodera glycines
IHGTRSAVTFICEQPDIKAISFVGSDQAGKYIYEHGSKFGKRVQSNMGAKNHGVILPDANREHTLNQVAAAAFGAAGQRCMALSTAIFVGDARGWVSDLVERARKLRVGPGWEAGTDIGPVISQKAKERICELVESALEEGADVPLDGTNVTVKGFEKGNFVGPTVITGVKPEMLCYKEEIFGPVLCVLETETLD

SEQ ID NO: 158906 - protein, 157 aa, Heterodera glycines
MAKFVAIALLSLTIVSMALAKTGKSQTADEVEGFRNMNIGDNNKVDAGKEPAADKATKKGKAQKAGTKSAAATNEPAAAKGTKNGKAPKTKARQEVATNEPAAANEWNDQLMGMSVEKFNEELAVLLPKANTFMENALSFTNEQMEKNGIATGAAGD

SEQ ID NO: 158907 - protein, 94 aa, Heterodera glycines
MFQNNICQKLSNPKVNCKTYEGGFGGEPNCEAHSGYTFCALASLSLLRKVHLVNRDSAIRWLVNRQMSSEGGFQGRANKLVDGCYSYWNTACFS

SEQ ID NO: 158908 - protein, 186 aa, Heterodera glycines
EVPPIAPSVGQMSVDILSRHFGLTWEQLMAQFVLKLQIRERVDDTEAVFMDIEEAEWDTKLVEHRTIYKAMLYPKLEEEKNSDGKCDVKVPKLPADAEPLAKRGGQIVFRMTNFKSFSKGCGPKIVFSEPSVPINGMPWRIRVKHCDECVRVDLFCAADQNDMAWSCRAAFTVGVLSCANSDVYVK

SEQ ID NO: 158909 - protein, 170 aa, Heterodera glycines
  unsure (1)..(170): unsure at all Xaa locations
MKNSFLFLLQIFILTNILTEILCGDKSRPSTEINANLGTRKKPETITATKNANLGTGKMHETDGTSKMPKHGKPVSNRMAAKSTTIKNNNEAAGPSQQSKQPAANITPQQKGPMQNSKKQPPNELFGKKQRSTPEEIKAGKQPAMELMPCYRGIGKXTMPTIAQRNATML

SEQ ID NO: 158910 - protein, 184 aa, Heterodera glycines
GHKRRHHHGQQSSVGAACSSTQSSAPSSSQSEQADSTLHPEERKRILHLHAEKNRRFALKEGFESLVNAIPVVEQTGVKCTNAVVLNRAAQHIKQLKSEQDQQQMKLRVLREKITNMNERIALIQSNLPSSSTGGSRPCEAQTPSMRIQVEQFFEHYKKERSREDYRFWLMGEVLKPIVHSFAE

SEQ ID NO: 158911 - protein, 183 aa, Heterodera glycines
MKNSFLFLLQIFILTNILTEILCGDKSRPSTEINANLGTRKKPETITATKNANLGTGKMHETDGTSKMPKHGKPVSNRMAAKSTTIKNNNEAAGPSQQSKQPAANITPQQKGPMQNSKKQPPNELFGKKQRSTPEEIKAGKQPAMELMPCYRGIGKKTMPTIAQRNATMLKRGDSLTRSADFE

SEQ ID NO: 158912 - protein, 136 aa, Heterodera glycines; identical to SEQ ID NO: 147069

SEQ ID NO: 158913 - protein, 209 aa, Heterodera glycines
EENGEEETAATEKASSFPRQMTVDQFKQYINTTDNNTGDQGDAMEEEELTETARKRCKMMPIREDEEEGTVPEMETQTIVRQQSKRQQSLWQSNYVRVDAHLPSTDTLLFVPPNLNVFVGAELYYDRDQDTFVHRMGIKERKWGEDGQNWTDEDDDDDDHNHDHDHDYETSSVSSSSSIGATSSSSAVRSLRGRDNASLPPAFCCCWCQ

SEQ ID NO: 158914 - protein, 133 aa, Heterodera glycines
KLGLFCATPAVPLSRNVPPKIALDMLLTGRFLEANIAHKFGLVSRLVGTAELRRETLGAAQHICDNSRAVVGMGKAFFYAQLEQNERDAYRQATATMCDNLKWRDAQEGISAFITRPKRQPQWTHTDQRVIKD

SEQ ID NO: 158915 - protein, 190 aa, Heterodera glycines
DIPRTKESANVVWSLIFVETFLFTGDSRGQLSIYDALNGTLLKFFKTHQAAVLTIATNGKEVFAAGADYRIQIVKRISHDNVRFEWQQSGQRLFHANDVRAICVLDKRLLVSGGSDSELFISDKFTHANPQIKSECAFFVSKSNCYVIVSHHLSHLDLWYKTIGGSLMDQRKRLKLFLRITSGKLGFIKQ

SEQ ID NO: 158916 - protein, 60 aa, Heterodera glycines
GHKAEGVCSSQSAPLVSISFTHSSGQNRNCIEIAEHNLTSKQTIGTGKMKRNASIRLNAN

SEQ ID NO: 158917 - protein, 43 aa, Heterodera glycines
  unsure (1)..(43): unsure at all Xaa locations
ANCSHFEWQTNGVGLEYNHLFGFGVLYSVXMVLMAKVYKTVPS

SEQ ID NO: 158918 - protein, 182 aa, Heterodera glycines
LKSAGTLPIELARLYVAETVLAIEYLHSCGIVHRDLKPDNLLITSMGHIKLTDFGLSKIGLMNRTTLVSEGYLLQDDTQQFKDNQLCGTPEYIAPEVILRQGYGKPVDWWALGVILYEFLVGIVPFMGDTPEALFANIINEDVEYPEGDEALDSDAESLIHLLLENNPLDRLGTVGGAPQVS

SEQ ID NO: 158919 - protein, 82 aa, Heterodera glycines
FFFFFFFFYGMTVFNGKFSSNLSFSASLILHVFSILDIILCRLFVLLPIFGIILCRLFVLLPIFGIVFCRPFVLLPIFGIIL

SEQ ID NO: 158920 - protein, 187 aa, Heterodera glycines
TQIFGLSLHLQELKHFDGQNGKLIGNDSDESLESLVSFISKNGFGLINDERRTKIDQAIQEIEQIVKKWNRKAKIIVMGSYQLGALTKQSDIDAICVVPELRTWRAAKFFGKAKCQIQWNGFRRCADDSLFCHFCLAAQVTGLNRIQDAWVPLIKFKFEIDPKTSVDFDIGLETFAIHDDIFKSEEP

SEQ ID NO: 158921 - protein, 108 aa, Heterodera glycines
KAQNLAMEAANLTDATEQTMAGATETKSALDTLSSELDSVLTTTKDFENQAISDAERSNEVAKKATLSEATANSLQEKLSDSDTKLTEALAQLSQLICVCFVEILFLF

SEQ ID NO: 158922 - protein, 78 aa, Heterodera glycines; identical to SEQ ID NO: 137945
  unsure (1)..(78): unsure at all Xaa locations

SEQ ID NO: 158923 - protein, 118 aa, Heterodera glycines
  unsure (1)..(118): unsure at all Xaa locations
EFNLLYHLDTVYVIDLAQAMDISHPSSLRFLHRDITNVLNFFGRIGCEPLPTPHAFFHXVTDIEFDPNKNLYVQVESFERENRNMDLKGAKASPANYELHLHQQESTGRADSPSRPYN

SEQ ID NO: 158924 - protein, 119 aa, Heterodera glycines
  unsure (1)..(119): unsure at all Xaa locations
PVRVFYNLYVQAHHPVRGTAKIPEFIFPCNEVCATNEELDAFINGLCHSXQIVKAATSLPVPVYQAHELAKRGRSNYMELRRMAPERIPRSADGQVMCEQLSELLSYNDSPLRESRTTA

SEQ ID NO: 158925 - protein, 202 aa, Heterodera glycines
IRMFNKRGEEHGTVTCRINDRENFEVTTLRVDVVCDGRRAKVNFTTDWELDAFRRDLTINSLFLGLDGLIYDYTGGIEDVKQRRIIFVGDPIQRLQEDYLRILRYFRFFGRFSKLDAPHEQKNLEAIVRCRDGLKGVSGERIWMELHQILVGRLAAPVLRCMLVDCGLGPLLALRPDRVDEFERVSRLNAPNGDDGKLSIEP

SEQ ID NO: 158926 - protein, 189 aa, Heterodera glycines
TQIFGLSLHLQELKHFDGQNGKLIGNDSDESLESLVSFISKNGFGLINDERRTKIDQAIQEIEQIVKKWNRKAKIIVMGSYQLGALTKQSDIDAICVVPELRTWRAAKFFGKAKCQIQWNGFRRCADDSLFCHFCLAAQVTGLNRIQDAWVPLIKFKFEIDPKTSVDFDIGLETFAIHDDIFKSEEPIK

SEQ ID NO: 158927 - protein, 175 aa, Heterodera glycines
LAPRQRKMRLNVDPKQLLPNLPNPKDLQPFPTTLAFYLRGHSGQVRTLAVEPEIGELLVSGGADSTVRVWLLPSGKCLRLFEMPASVTCVAFCPNSNRTLTLVSCESDLVTVLNIQSGDRLAVSNTRQFIAGIPFGTENTAGVLWTHIHSKTMNGIRIKMNDKIRSLCWHKSGDY

SEQ ID NO: 158928 - protein, 167 aa, Heterodera glycines
MGIHPFWNIGVLRKTDDKSLMNGQLALKGCEIFVLYFGAHMCQRCREFIPVLKQFYDQLKKSPETMPFEIVFVPFDRSEDEFRNSLRDLHDDWLYIPYGSVHINSLAARFNIINWGVIPTLVVLKEDGTLITMAGQANVQHLSASEAMVRWRSIPNPESGFKDFSKF

SEQ ID NO: 158929 - protein, 195 aa, Heterodera glycines
VNADELKKFPSLTDAFKKKRGNILNFEEEEFDEIISNGTSKRDNSPYTDHDYAGTRQLATAKGATGKHQRQKGGGGTAKEPKKKTALVNGTDSVVRSSARPHRPTKRFVEETNESFIRGTSKVRRTSPRKHGKKSTAEGGSEGEESEDDGKEYSVEKVFKKRVKGGKMEYFVKWAGYDDGWNTWEPRKSLKHLEV

SEQ ID NO: 158930 - protein, 119 aa, Heterodera glycines
GAKLFEKVLNEFDFARRAEWELVQTLFGIASDRTILFPDDQIRLFIGCPQNSDAYKFLCSIFVDGSSEGINYGTTSTSVLLVDIEGTAVFHERRLVNPQSPMDDPQKWKFSRERFTICY

SEQ ID NO: 158931 - protein, 177 aa, Heterodera glycines
VDILSFGASKNGCWCAEAILVFNDLQQAHKDFPFLRKRAAHLFSKTRFIAAQFEAYFHDSLWLRNARHANKMASHLTSAIRSLDPSVIRLAWTPQANEVFVVMRRSVAETLRKSGEISHFYEWNVPDGERRELKLYTEEGLFRLVTTFATKEAEVDEFASLLKAHYLGKSEQMRSIA

SEQ ID NO: 158932 - protein, 101 aa, Heterodera glycines
YKTGLRDAVPIAAFWKKFSAFVMMPLCGWKDHQNVHHSPRPEYVAYEYLATRRKPFPWGDGNHSLLHNPATNWVPGVGYEAPWPGDAHKKEGDSGGEGKKH

SEQ ID NO: 158933 - protein, 38 aa, Heterodera glycines
TKKKKKTNLFLKIKNQLLQSKKFKKILKFLKKKKKKKK

SEQ ID NO: 158934 - protein, 179 aa, Heterodera glycines
MRKQQETNYTGAPSAHPSSPCSSSLLPPPVSSLSVPLHHRSSISGGGSRPIVIRKGPQGFGFSIRSVRVYLSEMSEYYSIEHIVAAVREGSPAWEAGLRTNDLITRVHAQSVHNMTHPEMMRRLLSCGNELTVHVVPLSSTSIKEGEPRRNIGKPLRKKPRRPPTAQQKNKQQSRKGSA

SEQ ID NO: 158935 - protein, 199 aa, Heterodera glycines
VTGFYTQIRAPPNPNVQKDKKGGESFILMDQIIGVSWATKPYMLLQRPLTIVLKFRHFRDERICQLPYWKKSDGISQEIYNHWLNDMRQWDEEYPSLEFIEKKSKELVTVLSEPPRGPPVDVIRLATIEAERENSTKLLKKLKEWQEEQKVGNAMHQPFPSPRQPFYPPSRPIRFPHWPFHHDPSRPRPHLMYGRSVGY

SEQ ID NO: 158936 - protein, 212 aa, Heterodera glycines
  unsure (1)..(212): unsure at all Xaa locations
IYRWITVKNLNVMNFDNDLDNDTPMGLLRGIKYGTESYHVLFKRLCSYAGLHCVVIKGFSKSAGYQPGLGFDDSRFRNTWNAVFLDGSXRFVQCNWGARHLVNAKENARGKRSMTVQNGHEKDGNGAVGSNLRYEYDDHYFMTDPEEMIYEFFPDESQWQLLPRPVSLKQFEQFPFVRSLFFRYGLRFSDPRLSAVVRADKTGAVSIAIALG

SEQ ID NO: 158937 - protein, 218 aa, Heterodera glycines
APKLVENDKVTLFVKGKKCSVMLNKILGELYQLKKPLANRLQRNNDSHPFEDDSLLCRFSHKFDASLFVFGSSTKKRPNSLLFGRMYDHQMLDMVELQVENFVSSDEFKQVKSVTLGSKPCIILQGHLFESNGILQRIGNLMVDLFRGPKVEYLRLQGTELIISLTAVSEERIKFRVYRASLKKDMESATPKIELVEMGPNIDFKIDRTKLASDSLFK

SEQ ID NO: 158938 - protein, 158 aa, Heterodera glycines
MMLIKFALPLLFVLLHPFVCSAAEENAGAADFPQQFYGAFKLDHSDNWDDYLIAKGYSDPEMRKKVELPRFTRILYRFPNGTYRMMVGTGLEGSKWVKGSKKNADWQFKPNEPFIGNYWDGSKHEITFTYDPKESRLTERHVKVDGTGTPEEFNYKID

SEQ ID NO: 158939 - protein, 182 aa, Heterodera glycines
MSLFEKKRVMNNSLPENTSNSSADDVYGGVSAIEYLSRRVGNCHIGKRSEEQIKSNAFNASLWLSETFPLKLHEQIFPVIDLLAVRNTKFSRLKSFIQLQLPSGFPIRVKIPIFHLINAQITFRNVNDPKEEAIERIAEHSEDDGPQMLQLRQSLFQIPDGFERCELSGSFLFNRAGEFERT

SEQ ID NO: 158940 - protein, 142 aa, Heterodera glycines
GPFFHNTLPSVASLLESDDDLLRVDIKEEKFYVSEEVTQTHLFCLSKNLCSNLFRLLRRCSSNNAIRVQHLLEISSQLVPIGAPMPNSNALVDLCNRFPTIFKLRCSPQDNYRFDNSVIMLNEQLLDSENLAWRVVLDTDEF

SEQ ID NO: 158941 - protein, 138 aa, Heterodera glycines
MPNIFKILLIVLLAVVSFRLSASTGDKFSANDGSGNNSSAGIGTKIKRIVTAGLLFTSLATGGAEAIGRSNAQGGNAAGLVPSHVTNRSMAPPPPPVQFEMGANRLEKMRAHLRELAEKMPVNESKRLSPSGPDPHHH

SEQ ID NO: 158942 - protein, 64 aa, Heterodera glycines
FFRYFSFNFTPFSIRIFFSFLFYFFFYFIEFSTYFSFFSVLRFFFLPIFLQIFLQMIFVPIFIF

SEQ ID NO: 158943 - protein, 116 aa, Heterodera glycines
AQNTKPWSFPYEQPFVAPEKLFCVLDMDEGQLAFATDSKYLGVAFRGLKGKKLYPAVSAVWGHCEITLRYLGGLNPDSQLMDTCRRSIRVRVGKERVDRIGELNLPPNLIKYLHYK

SEQ ID NO: 158944 - protein, 45 aa, Heterodera glycines
FFFFFFFFFFFFFFFFFFFFFFFFFKKIAFYSYTIKTRQSEKNER

SEQ ID NO: 158945 - protein, 142 aa, Heterodera glycines
ILETANSKAVKKDNKKGTVATPAKGKAAPKGAAKGGIKKDAKSKGKGKKDAKGKKDKKAKPVKGKGVPKNDKKSPAAKANHKKSPTKPMAAVKAVPKAAENAQKGPSSAEVVAEENNLGTEAVDNLGAEESDFDQLAEGELL

SEQ ID NO: 158946 - protein, 72 aa, Heterodera glycines
NRVAERAAARVYGWLPEDKQPKAIYDAAEKAKNTPKPPGDYDVERVAQKAARLVYGVLPIGFQPNFAGPSTN

SEQ ID NO: 158947 - protein, 106 aa, Heterodera glycines
AVPRSLKSTNWPKTISLGPILSRWQKKDSVCTDFLNTFTELFKEEDFYNSIDGSMLNLLLSNLRELYPRVKQTCAWLDLLIQAKLFPATMLLIEELCKFIESPGLY

SEQ ID NO: 158948 - protein, 109 aa, Heterodera glycines
QKCTICGTTNPLAFSEACTGYEVFEHKVLLGDWSRGRAYARDILNDLRTWVVGWTDWNMCLDLEGGPNLARNFVDSPIIVNASAGEFYKQPMFYAMAHFSRFVPRDSSV

SEQ ID NO: 158949 - protein, 182 aa, Heterodera glycines
MRTILFMAMVCLVMAVLMEMANSKVVKKDNKKAAVAASPAKGKASPKGGKSPAKGKAAKVSKKDNKLKAKKETKGIKVKNAKPTKKGKSAKGASKTAKKVQAAKKAPGKDKKSLVKPIVLKAPVPPHKMHPMIESEAVPPPAHARSLATVPYSTPGAADRNSLPSYTSTATNLDMADDNDDY

SEQ ID NO: 158950 - protein, 176 aa, Heterodera glycines
RATIAIATHKAEMHSALQQKDQEIEGWIEKCHSMEKRDTDSNTLWQEKVDTLQKAIVALEHEKADMVEKLSQAKQEGVKLVKESEEKRHGEILTEQLKKKDEEWSRRVKELEEQMQLAVEESDLQRKTSVTGHERELSNLRGRVAELEKENTQILQQFCGQKEELEQMKRKELTET

SEQ ID NO: 158951 - protein, 138 aa, Heterodera glycines
  unsure (1)..(138): unsure at all Xaa locations
PMLLSANFRHLHLLRIFNRIVRLSPRCVCQTTELFSERFLSTSFLLLQKRSTPKPTGPVRRVPAVSIGSDVRQKHSERTAGKGDGTNGFWQPWNASDDYSEIKKRLLRPPNDFSELREIIRKDIERMAXXKKKKNKKK

SEQ ID NO: 158952 - protein, 146 aa, Heterodera glycines
  unsure (1)..(146): unsure at all Xaa locations
GIVNLLNGDQNKDEFLSKLPFAKVPVFVHDNLVLSESMAIIEYLDEKFPEPNPLFPKSAEDRAHVRALALQIVANTQPLQNLGVLKHLSEEPAKRNACARHWIEQSFNVFEKALAKTAGKYAYGDQISLADICIPXQVYNAKRFGV

SEQ ID NO: 158953 - protein, 54 aa, Heterodera glycines
LSSSPSVYKIGRNRLIGREAVSSPVSISEMSGSLSGSATMSTPSTSPSSSNLSA

SEQ ID NO: 158954 - protein, 60 aa, Heterodera glycines
DRIGCAMAQNCPNTNWKTYVVCWYYTGGNYFGAPVYLAGEPCSKCKANDKCDKATGLCSQ

SEQ ID NO: 158955 - protein, 42 aa, Heterodera glycines
  unsure (1)..(42): unsure at all Xaa locations
LFFERWSFHTXPPDHYDLLSHLLDLSVSQLSTLMPLHYQHDF

SEQ ID NO: 158956 - protein, 55 aa, Heterodera glycines
MVPSSRHFRIKTEMPMLRPSMNDFVKSDAIPVFYLIIIFIMLKCVHQKKKKKKKK

SEQ ID NO: 158957 - protein, 68 aa, Heterodera glycines
MCPIRSTQSQRSRLIRSGKTVRKGKRVEKKKRKAPESRKRGEEKKTRKRKRKMMRKEEAPKKKKKKKK

SEQ ID NO: 158958 - protein, 149 aa, Heterodera glycines
DLQLDPSIFKESQPQIIMPEGYESGRGKFEFALGYIGCSVIGGFGVGSVRGMFGELGNPQNRTLAWNPWYTRMLNAATKHGSGYAQTAGTAMFLYSVTELGLKLSRADDLLNSFIAGPIAGGLFRGLPHGLRAGGVGALAGLGLVTVWN

SEQ ID NO: 158959 - protein, 84 aa, Heterodera glycines
VEKQLRERRVGIQNFSSMVLFDRKAKQRQKMAEKRRKERNNAKLILYGRPRKTKQCSSVFSKEDFAQIGKKDGSSANERIKRIR

SEQ ID NO: 158960 - protein, 140 aa, Heterodera glycines
GRVPPPPPPVGCGTPLPPPFPFLPPPSPGSPPFPFPPFPLSFPPLSPPSSPSLPSSSLSSLSSPSSFSFASSSAPSSSAFSSSSTPSASSWAPSASSPPPSSPSPAPSSSSRFFLNSNASPPFKAAGMALANPFSLGMKS

SEQ ID NO: 158961 - protein, 45 aa, Heterodera glycines
  unsure (1)..(45): unsure at all Xaa locations
XCFFNVLFRPFASPNSFSAYMQSVLILYSVPEYTKSNFINATXTP

SEQ ID NO: 158962 - protein, 51 aa, Heterodera glycines
FFFFFFFLLFFFFFFFFFFFFFFFTKEFFAHKDWGETIFFPEKKPTNLKTK

SEQ ID NO: 158963 - protein, 84 aa, Heterodera glycines
IELSFATTSQNQITPFSIQVRAPAAKNSTNRQVRRSEQKAAQRVSFACFPKSFALPFWWLACRLRAPPLSQCAPAPASVAIRLP

SEQ ID NO: 158964 - protein, 145 aa, Heterodera glycines
GGHLHLLRIFNRIVRLSPHCVYQTTELFSERFLSTSFLLLQKRSTPKPTGPVRRVPAVSIGSDVRQKHSERTAGKGDGTNGFWQPWNASDDYSEIKKRLLRPPNDFSELREIIRKDIERMAQIKEENLKKRKGTTKGKKQMTDEQ

SEQ ID NO: 158965 - protein, 138 aa, Heterodera glycines
MPNIFKILLIVLLAVVSFRLSASTGDKKTANDGSGNNSSAGIGTKIKRIVTAGLLFTSLATGGAEAIGRSNAQGGNAAGLVPSHVTNRSMAPPPPPVQFEMGANRLEKMRAHLRELAEKMPVNESKRLSPGGPDPHHH

SEQ ID NO: 158966 - protein, 60 aa, Heterodera glycines
FIKSHKCEFALPTPTKLRSALNVYFCRSVISSTFVSPFPLLACCECFVALGQQFLLSDVP

SEQ ID NO: 158967 - protein, 59 aa, Heterodera glycines
LVPSHVTNRSMAPPPPPVQFEMGANRLEKMRAHLRELVEKMPVNESKRLSPSGPDPHHH

SEQ ID NO: 158968 - protein, 83 aa, Heterodera glycines
RRHIGFRVEETKDFDQRAQILRMLLLFTSVTAQHKNTGTKGMELRSLVGINEIDEKLVIRQISTMVNVEKEKISRRLDEVENS

SEQ ID NO: 158969 - protein, 39 aa, Heterodera glycines
VSFIINNYGDQSSLYFPSTSIISLITHFDCQKKKKKKKK

SEQ ID NO: 158970 - protein, 76 aa, Heterodera glycines
FFFFFFFFFFFFIHFINQRRSSKETIKIINRKIGGFFLDWFWFINNMGAAGAPWHWVQRATVPAWRSAFFLALGYH

SEQ ID NO: 158971 - protein, 32 aa, Heterodera glycines
FFFFFFFFLFFFFFFFFFFFFFFFFFFFFFFL

SEQ ID NO: 158972 - protein, 135 aa, Heterodera glycines
GLIEILVTRSNAQLRAIKAAYQKLYGHGLEKDLAAETSGSFKTLLLDLVEANRDESYRTDLAKAKTDAEKLYKAGEGKWGTDEDAFIKVLANQNLSQLQLMFNEYEKLGKKHTIEQAIKAEFSGDEFSALLAIVS

SEQ ID NO: 158973 - protein, 34 aa, Heterodera glycines
MKTSQEFVLTLSCQDAKGIVHAVSGLLYQAGCNI

SEQ ID NO: 158974 - protein, 132 aa, Heterodera glycines
MPNIFKILLIVLLAVVSFRLSASTGDKKTANDGSGNNSSAGIGTKIKRIVTAGLLFTSLATGGAEAIGRSNAQGGNAAGLVPSHVANRSMAPPPPPVQFEMGANRLEKMRAHLRELAEKMPVNESKRLSPSG

SEQ ID NO: 158975 - protein, 148 aa, Heterodera glycines
  unsure (1)..(148): unsure at all Xaa locations
GCYTVYNLLLYFDPNVQRIYIERHGQRSLIPVLINDVVFASHALLACIITGVQCFFYERGNQRISYIGRAWASLLLCFSSVSLALALFRVLNWLDFINYLSYSKMAVTLSKYFPQAILNXKRKSTVGWSIGNVLLDFSGGFMGICQMC

SEQ ID NO: 158976 - protein, 101 aa, Heterodera glycines
MSSSPSVSVLAIVAIVCLMCQCCFSAPHPCCPGSQKVVSLMSNYVGTFANSISKSSLCSDAQNVAEALKGQLIGCSNGGDRTLLADIEAFLATHSADECAL

SEQ ID NO: 158977 - protein, 39 aa, Heterodera glycines
FFFFFFFFFFFFFFFFFFFFFFFFKKILFYPPNFCFSKF

SEQ ID NO: 158978 - protein, 121 aa, Heterodera glycines
GDFENIQHVINFEMPEDIENYVHRIGRTGRSMRRGIATTFINRKADLPVLLDLKHLLIEAGQQLPAFLKQLAGEDEDLGAIQETEPVNDMDKGCSYCSGLGHRITNCPKLESVRTKNASNL

SEQ ID NO: 158979 - protein, 59 aa, Heterodera glycines
IIGGVKKLNYGIQSFSKSKGTKIVGGDKIYRLGINTILIIDIICLEEQLSQFSSLHKAA

SEQ ID NO: 158980 - protein, 121 aa, Heterodera glycines
LQISFRVWMCGGSIEVVPCSHVGHIFRAGHPYNMTGPGGNKDVHGTNSKRLAEVWVDDYKRLFYVHRMGLKDVEVGDLSARKALRERLGCKSFKWYLDNVIPEKFVPDENVNAYGLVQDTD

SEQ ID NO: 158981 - protein, 88 aa, Heterodera glycines
GRRSPRSTWSSVSGAEMGRETRVRTRKATKSLIRIDQQRTHHHILLIGTVIFHHQIHNTFPFSGLSLISIFGYCFLFFSSIFCKILLL

SEQ ID NO: 158982 - protein, 45 aa, Heterodera glycines
KMKIYLTTKKKQSLVDIDHLKKNPNDRYCFCFFMNFWGHCAMAGH

SEQ ID NO: 158983 - protein, 95 aa, Heterodera glycines
AVKLLGWGADNGIPYWLVANSWNTDWGEDGFFRILRGSDECGIESGPVGGVPDLGRSPSAGGRDETNNEIEEQMDDEEKGKEEEEEEGDEWEEEI

SEQ ID NO: 158984 - protein, 130 aa, Heterodera glycines
GQRNLATRTVGFDDPNCLAMAIRDEENIRVNDKSAQFGFKSFKELLESPMMDKFVKVEVGIKEGRLRTTYTAKMDATTRKVMEQQKWFHQTAEGRLKEQRRQNYQSQNNAAAAKRRCSMAPLSVNHPSLF

SEQ ID NO: 158985 - protein, 127 aa, Heterodera glycines
GQNLAGREAAPKFTVPTVQDSYFLALKAGTRATNLVDKWVREYEESPDQAIVQLLQLIVASCGCSGKLDANMIHNMQWKDIVERLSEYFDEDSGDYPLTTQQYRKFRNNFAEFLQAFVLRSKNNILF

SEQ ID NO: 158986 - protein, 61 aa, Heterodera glycines
PRRILEFNFTEWRRKIRENGGKERDSRNESILKLFSNYIYGSLILNAFLLVLFLSFFYHFT

SEQ ID NO: 158987 - protein, 67 aa, Heterodera glycines
VLQLKFIFRLFFPDLNHYPDAFRIILLYTVICFYDDFLFCLCIFIIRQNISRSINFVKSKKKKKKKK

SEQ ID NO: 158988 - protein, 73 aa, Heterodera glycines
FPQFTTGDVIGCGLNAFNRHVFFTLNGEKLDMGILAADPVRLFAAVTLVDNKDAIRANFGPSFVFNLSSVLPF

SEQ ID NO: 158989 - protein, 74 aa, Heterodera glycines
FFFFFFFLSTNSTKLLRFCAILKNTEQKLTEHKMTGMRKKLKAQSKRDTFWLHNYLLGYNKIECQKLRKECEKK

SEQ ID NO: 158990 - protein, 67 aa, Heterodera glycines
GQGGNAAGLVPSHVTNRSMAPPPPPVQFEMGANRLEKMRAHLRELAEKMPVNESKRLSPSGPDPHHH

SEQ ID NO: 158991 - protein, 146 aa, Heterodera glycines
GTSEEDTEADMEEGDGLAADERKMEMLDKYIHCARQAQMEPQVAFRATEHICGWLLCGGLRIGSAESVKALAHLLLVMFNTESRDRAPEAHVCLSRFLPCFVAVNRRHQQLLFRAFMSAFSLLQTMSLALQEEARQIDTVKMAISV

SEQ ID NO: 158992 - protein, 71 aa, Heterodera glycines
FFFFFFFFFFFFFFFFFFFNGSNLNQITKQKKTVKISSCSSNFCSARTFWATPASPEWAILRFPSRGAIRT

SEQ ID NO: 158993 - protein, 97 aa, Heterodera glycines
QKSKKANLEMNKIFEKMSAFLCLSSTAFVLKFVIQSIDSIKVSRKSVEIALGAASPNLKMDSNTDSSAEVVSRPMNAIQSLTQQLPLASSWAVCSSS

SEQ ID NO: 158994 - protein, 50 aa, Heterodera glycines
LIFLSELSFIVCLSSLSNYNPSSSLFFNLNLLISSCKHAFSSSRFKQSIL

SEQ ID NO: 158995 - protein, 35 aa, Heterodera glycines
FFFFFFFSFFFFFFFFKPKMDLTTKKRGKPFFYTK

SEQ ID NO: 158996 - protein, 49 aa, Heterodera glycines
LLSLSVWTFPLLIKSLPDNNTCVLIQIALNKKIRFLHCIFDEKPEGCVF

SEQ ID NO: 158997 - protein, 83 aa, Heterodera glycines
QLHENDGDNDQCQHHHQQPWHNEHCANSTLVSPDFWRPISAQNTEQHLELTLEPSARTVYHGGRYGRFWQKVDNEMAKSLLLK

SEQ ID NO: 158998 - protein, 63 aa, Heterodera glycines
LETKKATCICVVLFCCYSNHIVHLCRCFTVLFSFFSLSVPLFLFFPLLAYKFLFLYYTNIEFD

SEQ ID NO: 158999 - protein, 55 aa, Heterodera glycines
KESREREIEERGEREREERERMRTEGDRERVREKKESEREERREKRKRERERGER

SEQ ID NO: 159000 - protein, 93 aa, Heterodera glycines
NLLCFHTHFLGVCAKEIERKFKILSGIGHHLFFTVALCCFEHEKYNNNSSEAKHRSSQIAKMTRIHFWSSHLFNVSSSPQQILFLLPLFGPRI

SEQ ID NO: 159001 - protein, 135 aa, Heterodera glycines
APRAFGTALSLRVKFKMDSEMAQADQQWTETRKRETKWLYSVAACVLAVAVGHLLLNFGYVLQSMIFESLSVATGLSFVFSMCLLGAVGFYAVRLLRFCLILSAYISLNLFVTASLLLFAFIQDFFFLATTLDDE

SEQ ID NO: 159002 - protein, 63 aa, Heterodera glycines
IKSIFFSPSLQNRPQPSADQNRQLRWNDQSKVRLPLRNRALEAQLEFHFRLWPAQNQHDFGPH

SEQ ID NO: 159003 - protein, 122 aa, Heterodera glycines
VPIPKTKSKALRSTFLNLARLKNIEFSFLKDEDNLWDLVGEGSPYFYAEFPDGSKMLSRSMAQFPLQFGREVFANKALLDCEEKVDWRNCSLGKKEEEKLTIALKEGFKPFAFTGDSFEDED

SEQ ID NO: 159004 - protein, 104 aa, Heterodera glycines
HEIEKGIEQEFSGQNEAGFLALIKYVRNASVFFADLLFNSMKGLGTRDSDLIRLVISRSEIDLADIKHAFHTLHKKSLEEAIKGDTSGAYRDALLALVKGNTEQ

SEQ ID NO: 159005 - protein, 65 aa, Heterodera glycines
RAPVFDRLQKEPGSSVTGQFVHGRTEKTGQATQFDRLKRVEFDEAKIHGGVMVVFSYDCVSICGF

SEQ ID NO: 159006 - protein, 123 aa, Heterodera glycines
MSIDEIERTIPLPSSHLFSHSQFVRAEIHSFEEAFVHNKRFKEFEGLLRTNHKTYESVEAKFDLQKIEKMSTLTNRLNKLADHLGEIGHLHFEKGELNAMDLEEKPMFEIVRLAEQKQHEIEE

SEQ ID NO: 159007 - protein, 134 aa, Heterodera glycines
  unsure (1)..(134): unsure at all Xaa locations
GIHGTRSAVTFICEQPDXTISFVGSDQAGKYIYEHGSKLGKRVQSNMGAKNHGVILPDANREHTLNQVAAAAFGAAGQRCMALSTAIFVGDARGWVSDLVERARKLRVGPGWEAGTDIGPVISQKAKERICELV

SEQ ID NO: 159008 - protein, 83 aa, Heterodera glycines
CGKTMNAIDCLKSHRPLVVIYLPPFFFLGPTVSLLPTVSVFDFGCSFSAVFTAAGCVLGCSLSTVRAATGCGFGCSFSAGFVT

SEQ ID NO: 159009 - protein, 77 aa, Heterodera glycines
GHPYANLLRKCRSMNRSVCPRVDPPLIIIRAMDGSNGGRKNGCLVFRFYSTLFYLLVFQNKFLPQLFNPKKKKKKKK

SEQ ID NO: 159010 - protein, 116 aa, Heterodera glycines
EQERPEDHESYWNSVLRQMLCADFSSVLTLLQFHSAFKNDEALLKMAKILQTVNVSLFKYDRTNCDELWALRKKVCDLTAHKQMFRSHDNLGVICSLLIGDRGTFKKYFDLFRPNW

SEQ ID NO: 159011 - protein, 98 aa, Heterodera glycines
KVDHPTLLSDSDSLFGATTAATNALNIYYMCHYYYYLLPNPNPINHLNYYVLHIPFISPQLNHPSSFKMIYSFFHTIFKFDFSSADTIAWNTHTFPRC

SEQ ID NO: 159012 - protein, 34 aa, Heterodera glycines
FFFFFFFFFFFFFFFFIFFFFFGKKRIFFSQNPF

SEQ ID NO: 159013 - protein, 141 aa, Heterodera glycines
GNLLESLEPPPRPKISWSNYLRASDEQSHLGRPIQTKVTTKDVSGMLAMSTDFPISLNLALDILSVMEPVNPTVAKLREFCTAKLPEGFPVRVEMPIFATIQARVIFQQFRWCGEGASPAFPDAMFRTPDDYREDPKRFRM

SEQ ID NO: 159014 - protein, 29 aa, Heterodera glycines
FFFFFFFFWVRGIYGIFKNNNLFLSMNKT

SEQ ID NO: 159015 - protein, 139 aa, Heterodera glycines
EQAQHFPWSPHQPFSMPFGGLPPPPPFLPFPQPPLFAGLSDAEIAAMEGTERRAVEARIQSLRNISTLLDAALLQFQQYLSVSPGIAPQQTQRDENFAQNPSTSADSATDAETNGRESQRNETETYAKKRKRDRERDSH

SEQ ID NO: 159016 - protein, 158 aa, Heterodera glycines
GDPPPYEALAAALEHLYALGALNHKGMLTKLGRRMAEFPCDPAMSKMIISSEKYECSEEIITISAMLSVNAAVFYRPKAMVIHADTARKGFWSSSGDHLTLLNVYNKWRETNFSMQWCIENFVQHRTMKRARDIRDQLEGLLERVEIEPKSSSDTMAI

SEQ ID NO: 159017 - protein, 56 aa, Heterodera glycines
AEPEAVFAGEVNKLREEQFKPIEQVTLEPYERDHAVVVAEYRAAKKKVKKEKMEEE

SEQ ID NO: 159018 - protein, 122 aa, Heterodera glycines
IKEFKHLSKNRIKNLLKLDLHVEQHFWQTLNAILTDIQYGRPYFFAQLLKEKLDKLRGNEKWASADALKNVTRILLTRAPIDLADIDQEFQGLSGSLTIRISISAYIEQIIGFKKKKKKKKK

SEQ ID NO: 159019 - protein, 51 aa, Heterodera glycines
THASVPEQMRNLIGISDTLIRLSVGCEAKTALINDLDMALNLATDEMNRAG

SEQ ID NO: 159020 - protein, 93 aa, Heterodera glycines
IKTRTIIMTISAGRFGREKKRKYVYPKDGHPLRCCEGDIFCKLRPAPIGCEDGGLLLLTLFPVETVEEGAPITPAAGGWMTLAERIPSTTPPP

SEQ ID NO: 159021 - protein, 145 aa, Heterodera glycines
GCLFCFMASLIVFALVLGLAITLTVITVNNWKEIGVLLSKQSALKSRSDIEAFYEIDCPIYSDNSKLPDKWDQFDLAFCNRYCDRNQMFEFMYRQLDPNRKSSAKSKDNQELMCPIYIEFKQCQMEEGGHCEEKLFSEEFTEFVQ

SEQ ID NO: 159022 - protein, 100 aa, Heterodera glycines
MKQRRRHTTNLFGDGAFGAHFAGKDENNCEFSTVIRFSTSSKDPGKKIKKTITQTRLVNGKKIVTKKVEDNGQVEEEVMENGVLKAKLINGTPVDIRAEC

SEQ ID NO: 159023 - protein, 142 aa, Heterodera glycines
LIIPMPLKNNGPAKKLVPKRLALELLYEITLFISPRNDLSSFCSSSAVFREFMCPRVIKWNLFWHSAIEKLKTSYKEAKKSPIWDSIISNASGVAKLGDNSVFRFLSDAVNLCEGEPVRFSSTRPVTGSLCISSPPPKKQKE

SEQ ID NO: 159024 - protein, 165 aa, Heterodera glycines
GSMVGCAMEKRASGFLMKKELEYFAKALESPTRPFLAILGGAKVADKIQLINNLLDKVDEMVICGGMAFTFYKVLTGKSIGKSLFDEEGSKIINDLMAKAKDKNVKIHQPVDFVVGDEFKEGTPFANVDAKDGIPNGKMGLDIGQETLKQFAEVIGRAKTVVWNG

SEQ ID NO: 159025 - protein, 28 aa, Heterodera glycines
LFFFFFFFFFFFFFFFFFFFFFERRSIY

SEQ ID NO: 159026 - protein, 102 aa, Heterodera glycines
LRCLEPSSISASKTSGSARVTRKFSPILLKFLAFPLRVSNFSARSKFAASSVVPPSASLLCCPPFVLSASVSPFCCCCCSQSVGPFLASFPSPPFPFVFNGK

SEQ ID NO: 159027 - protein, 51 aa, Heterodera glycines
SAETAMSAQKPRSGRRVAMWDSGADRKRKPGRRSLWLIHCRIENGSLLVIT

SEQ ID NO: 159028 - protein, 109 aa, Heterodera glycines
KKSESKEPEKKENEEQKPAGKKEKRPAEKEEKKSESKEAEKKENEEQKPVGKKEKRPAEKEEKKSESKEPEKKENEEQKPVGKKEKRPAEKEEKKSESKEAKKKKKKKK

SEQ ID NO: 159029 - protein, 135 aa, Heterodera glycines
  unsure (1)..(135): unsure at all Xaa locations
MFFGLDMSHAPPQTLFERRTGKAPAIPTIVGMAYTISEHLLQMNGTYWMQQPRVATVQMASPMVNAVKEALMTFNAKNGFFPEHIFVFRAGASEGEYKKVAYWEGGAFATAFAELTKERXMSKKPALTLIVCQRN

SEQ ID NO: 159030 - protein, 147 aa, Heterodera glycines
  unsure (1)..(147): unsure at all Xaa locations
GGWRRLFELCMDHVNGLGCSYQNVRLRIGSCLATISSSDFKKALVEANGGEANADDDSQLKHVTVEEVISRINAMLTPLWSEALRSSVGVSADVPHTESALSLDGIVVTPADEHKREKLALITLLNYFSSLSTHXAQLLRPFATSIF

SEQ ID NO: 159031 - protein, 77 aa, Heterodera glycines
  unsure (1)..(77): unsure at all Xaa locations
FFFFFFFFFVDHXFFKFIKSFNEFALFLIIXIGFSFSFYLILIHFSIWVLIADLRLIILQFFFQFXIIFPFVFYFFT

SEQ ID NO: 159032 - protein, 118 aa, Heterodera glycines
MERTFVCIKPESVRRCLVGKIIERFEANGFRLIAIKMIVATRKQAMDHYVACAGQPFFPKVISYMTSGPVVAMIWEGVGVVRGIRKILGATPDKVPPPGTLRADYRNNSDVGKYHDTV

SEQ ID NO: 159033 - protein, 79 aa, Heterodera glycines
TKKPGPSVSWTRAWPIGQFGGRKGVRANASDTCGILQGRRTTSSRPNSMKNVFLLFAAFQHSIFVLKFNFKKKKKKKKK

SEQ ID NO: 159034 - protein, 142 aa, Heterodera glycines
MVQMWCMETYPCGDPRLPHHCFPPKLVNPDELTKRTGALYYKLDLEDQVALSKRIAIMKLERNFTKEDTYTLDAQTTNDFKEKIAELFEETESDEDQARMVLEGSAYYDVEAKDGVWIRIFCEYGDLLIIPKGIAHRMTTTP

SEQ ID NO: 159035 - protein, 122 aa, Heterodera glycines
MNWMHYCLIACFAFYYFNTVESSTINSVTVQVNKIENNENGRQFNLEFTNQVYERVCHVDFRIDLPDTVKLNKYSKMVPIPDTCGQYALPKSLDLLPGESFDAQLTLLGHDGKPNVTVLNTN

SEQ ID NO: 159036 - protein, 77 aa, Heterodera glycines
SSQPTTPRHVPPNHPTFAQPFMDDDQYYQRHLRQRQFLNALEGSINTPPVRTEQRRIIMETEMTNLVSKKKKKKKKK

SEQ ID NO: 159037 - protein, 64 aa, Heterodera glycines
FFFFFFFFCEHCFFTHPTNVVQNDKIDRVGNGPPIQNQLCLKMEFFFASIPSDEFVQSQRRSIG

SEQ ID NO: 159038 - protein, 103 aa, Heterodera glycines
WWRRSWRQSEQQQPAASARQCLRSKNISEKEGTDRNLCDGPINCPSPCAIPFDFIRKTIILLCVLSSRTRYLLMSHNAYKSILGKHLMNQINPQFAKKKKKKK

SEQ ID NO: 159039 - protein, 170 aa, Heterodera glycines
GETLHHYSSSISSDLHISFPSVLSSNCCHFQLPFTAIVDDIPPPPAVAADGGDVVVDLEQHVRQLIMSIGQGSEDAVHELSILIEPFNQEQLVDFLEIMARMYVESGVSVDLPGGQGINMLMVAASSGRVDFARYLLAHGATVGHLDATGSVFPLMLAAESGELEVCRLL

SEQ ID NO: 159040 - protein, 108 aa, Heterodera glycines
  unsure (1)..(108): unsure at all Xaa locations
MDKLVLKIRELLDENEVNFGEVQRILEEYKSEPKDWRQFTHFDEHKXTDEVKQVESKVLFRYTRNLVDAGNGKYNLMILCWGPGMGSSIHDHSAAQCFVKVLDGQLLE

SEQ ID NO: 159041 - protein, 65 aa, Heterodera glycines
AGNAARENKKLRITPRHLQLAVRNDEELNKLLAEVTISRGGVLPNIHTELLSKMQQKKQQNDDSQ

SEQ ID NO: 159042 - protein, 42 aa, Heterodera glycines
VQFEMGANRLEKMRAHLRELAEKMPVNESKRLSPSGPDPHHH

SEQ ID NO: 159043 - protein, 123 aa, Heterodera glycines
GQGEITGLSPGKHGFHVHAFGDLSSGCMSAGPHFNPTNKTHGGPEDETRHVGDLGNVLAGQDGVAKLDFTDKVISLVGPHNIIGRALVVHKLEDDLGRGEGLKKPESMETGNAGPRLACGVIG

SEQ ID NO: 159044 - protein, 105 aa, Heterodera glycines
HIKNLSGGQKSRVALAELSLKQPDILILDEPTNNLDIESIQALVEGIEDFSGGVVMVTHDERLIKATNCRLWVVEDQKIYQIDGDFDDYRKEVLDQVEKSLTSIG

SEQ ID NO: 159045 - protein, 48 aa, Heterodera glycines
FFFFFFFFFCILALLFCLNLRNFDKLKWQLWFTNKIFYSHPPVRGWNP

SEQ ID NO: 159046 - protein, 94 aa, Heterodera glycines
LPLFIALLQAHAPVGMKIVVKKHSPRYQRSKYIPDPQLEDFKEPLGHLHDPVVRKLLGWEAYQPSQWKCTVINASCFNSRKQKKCAKKKKKKKK

SEQ ID NO: 159047 - protein, 151 aa, Heterodera glycines
MSDHPNVALADLSRVANDVWLDTLFWIDRAEVGMKFALIDARFGRLVATHFNLRKWWLGELGVHRAPRRWQCGGTAAVSAMDDYAMSNRLPLATCPAPNGVIGFRAIYIWYVDLEVIAFLQCLQRVINRGIAVQFTIHSTDVRCWALMAQR

SEQ ID NO: 159048 - protein, 78 aa, Heterodera glycines
SPVSPSDCPLSSPDCPVSPSDCPLSSPDCPVSPSDCPLSSPDCPVSPSDCPLSSPDCPVSPSDCPLSSPDCPLSPRDC

SEQ ID NO: 159049 - protein, 96 aa, Heterodera glycines
VRNLKRRPLSWIAHLKRNRRKSRMRHLMLLQPLLTHCPLRRLHRIRRMKLWRFPPLLLFPPLSMFRRTVDTAPPPSLSQPVAATAAAAQYHQHRNN

SEQ ID NO: 159050 - protein, 38 aa, Heterodera glycines
RTDAISPIGDFKFVSRFWYNFGLNKSPINKKKKKKKKK

SEQ ID NO: 159051 - protein, 143 aa, Heterodera glycines
GRFEDCVSDRTVLKYCTDGMLLREAMNNPLLEQYNVVLLDEAHERTLATDILMGLIKEIIRQRQDLKIVVMSATLDAGKFQNYFDSCPLLSVPGRTFPVEIFYTPEPERDYLEAAVRTVIQIHVCEEVEGDILLFLTGQEEIE

SEQ ID NO: 159052 - protein, 132 aa, Heterodera glycines
QRRVRGTLSSENFFEDEERPEENIYERHFAQQQMTKEETRLVELQKRKEKAMEKADATQQIAQDINDLNQIMQDLAQLVHEQHDMVDSIEDHVERSMQEVKSGERNLRRAVASNSAKYPVAAAAVGGAVMGG

SEQ ID NO: 159053 - protein, 117 aa, Heterodera glycines
YNRAKLNMGVPFYGKSWTNVGAPLNGDGLWRQLGTYGTELAWRNMGKSFDMTKTTYHKTAKTAYIYDTATKNFLTFDNPQSLKDKAKYVAEKGIGGIMIWSIDQDDDKLSLLNSVSY

SEQ ID NO: 159054 - protein, 66 aa, Heterodera glycines
RKFIGTNSPLGWHFPLRWTASTFSNQSTFDCLLLFCMFCYILLSTKSYLLLINLCARKKKKKKKKK

SEQ ID NO: 159055 - protein, 150 aa, Heterodera glycines
GTDINISQSLTTRFHEEMVKQEVRMDVPIHVMVLQAGAWPLSVPTAPAEPSSSSQQHETSADYVPPPVLQNSLKLFEQFYTTSHSGRKLTWLYGNSTAEVHLNYLDKLYQVTMSVYQLSILLLFSHQNTQQLAQIAFLCSLSVPAVIRAS

SEQ ID NO: 159056 - protein, 156 aa, Heterodera glycines
MADTSGQLNERFADLECLADAHQSLSRESAQGNKNAHQILHKVLTQLEELLNDMKSDVSRLPTTLARLRPVTERLGMTERAILGRLTSKDPDAVAGQSPLPPPGPFVTPMAQSRFSGIQPKFAALLKPKHQSKKENLPEKDGNDKQNQEEKRPSKE

SEQ ID NO: 159057 - protein, 167 aa, Heterodera glycines
ATLLKWTNGTFPEMNYSRVVCGQDPRYCARPRSVHPYVWGLNISNWPICEKHSPSIPKSEKHMHCTVTGRPCCIQMHGQCRITSREYCDFVRGHFHPNATLCSQISCLNEVCGMTPFLRRDIPDQLYRLFTPLFIHAGIIRCVISLTLYLTIMCRFEIMIGWLRLSS

SEQ ID NO: 159058 - protein, 106 aa, Heterodera glycines
MPNIFKILLIVLLAVVSFRLSASTGDKKTANDGSGNNSSAGIGTKIKRIVTAGLLFTSLATGGAEAIGRSNAQGGNAAGLVPSHVTNRSMAPPPPPVQFEMGANRL

SEQ ID NO: 159059 - protein, 44 aa, Heterodera glycines
PNIPNLLPILYCVNCWSSLGLFENRFVTVPFARSLLCLKSPTPI

SEQ ID NO: 159060 - protein, 32 aa, Heterodera glycines; identical to SEQ ID NO: 158848

SEQ ID NO: 159061 - protein, 58 aa, Heterodera glycines; identical to SEQ ID NO: 158849

SEQ ID NO: 159062 - protein, 78 aa, Heterodera glycines
MAEKRKLLNEIDKCYKKIDEGFEILDDIMEKMNEANSDNQREKFQDDLKKEIKKLQRLRDQIKGWQNSSEIKDKDSLS

SEQ ID NO: 159063 - protein, 72 aa, Heterodera glycines
FFFFFFFFLEMKIYECFKVQKIVRTKYINQILLKWISTIKRVCLMEFSGMTNNLLGRILAADQYNVWVGFFS

SEQ ID NO: 159064 - protein, 103 aa, Heterodera glycines
VFPQINFDLIRNRKVPTQIEQRHGEERARVGNIYEQFRTKESVYDLIRQIQQAEARRLSVKQSLPPQQFDVNGNLVTADRPTAAEETNNEASGFITENPLNLN

SEQ ID NO: 159065 - protein, 153 aa, Heterodera glycines
GVQAIHYSFSLTKYHNNFCIPEHSFIHSSFIMARPRGGGRNPAKARGARAKRRIGNKRKAAAGTAANVQAADRRPICPICLKKMTGVRQVRTICDHVFHYVCFHRWLKYRLFCPVCERNFRTELYHAGNAVVEGAYADGHVVLRTDGEQSNSG

SEQ ID NO: 159066 - protein, 73 aa, Heterodera glycines
VPSFSPPCPSMSPSRPPSSSLPTPSLALSFLSLFLPFSPSFALNMRRAFRSDAGQRERRTICAVVAGTDHRGH

SEQ ID NO: 159067 - protein, 71 aa, Heterodera glycines
PADGQGRQNVGQNCVVRGIGVARNHFAIVVEGDGLEKENGLCTAPFMIGCPFVILCLFVTFQCIRQMKAIN

SEQ ID NO: 159068 - protein, 158 aa, Heterodera glycines
GSNLRKKFAETEDEFTREIERVTAERDELRNEKETLSNLQTQRKKSDERQSQTDDEPKQRMTEQQIAEMVEQNVQLKTELNEREEELYRLRNDKVLAEITTSEGHSKRPPSDTDSATSNNDWERMGKEEIEAEGVSSSAGSEEKETPMANRHKKSSEL

SEQ ID NO: 159069 - protein, 124 aa, Heterodera glycines
GWTGILLSVLMNFMFMYTSTVLDKCWVILQRRWPSSYSKQHCRQPYPELGGRACGPKLRAAVAACIDLNQFSTTTVYLLLSAKNIHDALKAFLDLNISFCLLLIFLVLLLLPLIFLNSPVDFWG

SEQ ID NO: 159070 - protein, 108 aa, Heterodera glycines
GSFCSFTIKYALELQLCQTKTPRRGGVADAWIRGRVIALNLAHSNAMFPRELWNVVDRVAAGIGRTNNSVEAWHSIWNVHLKGNQRLSSFIRKMIEEDNMWANRIADF

SEQ ID NO: 159071 - protein, 45 aa, Heterodera glycines
KWLFFCSLSELICVFFPLGGIFFCFCCFLRIKHFLPKKKKKKKKK

SEQ ID NO: 159072 - protein, 55 aa, Heterodera glycines
FKNVLIALTIEHKQPRFGHKGNEQLPRVWIIKASLIKGVNKCFGFFFRIKNIGQG

SEQ ID NO: 159073 - protein, 137 aa, Heterodera glycines
  unsure (1)..(137): unsure at all Xaa locations
GPNSPYSXESYYNSLAVVLQRRDWENPGVTQLNRLAAHPPFASWRNSEEARTDRPSQQLRSLNGEWXAPCSGALSAAGVVVTRSVTATLASALAPAPFAFFPSFLATFAGFPRQALNRGLPLGFRFSALRHLDPKKP

SEQ ID NO: 159074 - protein, 36 aa, Heterodera glycines
TIIYRFLMFFLNSKCFYFEVHKKSPIRKKKKKKKKK

SEQ ID NO: 159075 - protein, 116 aa, Heterodera glycines
MVAANLKLSLIFVAGFCLLFIADSDAGKSCKPGEKGPPGPPGKPGNKGKPGVCKPKYETTSKYGTTTSKYDTTTSKYGTTTPEYDTTTSKYDTTTSKYDTTTSDYGTTTSKYDTTT

SEQ ID NO: 159076 - protein, 75 aa, Heterodera glycines
CFFFFFFFFFLPKLKAFYALINFNFISESYNTNLFCHYLNSLFTHWPFDGTKPAQHSLCSSPPFPFVLGLVSCGP

SEQ ID NO: 159077 - protein, 164 aa, Heterodera glycines
GPSTTAELLLPGGSIGRLHASELTHSKSEWSEGTFPMQNFMARSSGKTITVKVICVSRSKSISARGRELLMERRQSDRIVECTAISEKVQEPRKKLSLIRYREQFDFGNVVPVFIVDTAKKEGTDQTHFTGEINPEFRAIIQITQSAKPAAKKDGTDTDQSENT

SEQ ID NO: 159078 - protein, 105 aa, Heterodera glycines
RRRFFSMMATLFFNDGDFFMEGLYHFKKLLLEAGIFTHYLFPFDDTWQQKFVQQPTGRERIRCGIFGRDERHNFVQKFERKAFGGHCWEMQGAVLLFGVISEQIS

SEQ ID NO: 159079 - protein, 68 aa, Heterodera glycines
FFFFFFFFLLMFICQFKYDVHVKKYITKYSEGRESNKKKTERKALGKIMRKLNVYEFTANDRMDLKLG

SEQ ID NO: 159080 - protein, 133 aa, Heterodera glycines
MLSRMLSSAVAVPRMCESNKKLLRKGAIFVGLLCGRMANSTFTATVTPPHRLLRPLHINEKKLFGPGPSNMPPLVQEGLVQPLLGHMHPEFFEIMDDVKAGIKYIFQTENALTFAVSGTGHAGMECAILNLLE

SEQ ID NO: 159081 - protein, 73 aa, Heterodera glycines
EMQLMFRFSSVARRVPLRSLIKVAQRQFPHGPAWMNEEEHLSKWLNPKSGRKSEKQRTKFIVKSISVYYCNLE

SEQ ID NO: 159082 - protein, 57 aa, Heterodera glycines
FFFFFFFFFSSDQIVLHQKPIRNNQMVFPVAANTRALFLLGNKNPSRSNWFTASSKH

SEQ ID NO: 159083 - protein, 59 aa, Heterodera glycines
IIGGVKKLNYGIQSFSKSKGTKIGGGDKIYRLGINTILIIDIICLEEQLSQFSSLHKAA

SEQ ID NO: 159084 - protein, 93 aa, Heterodera glycines
GASVWKHWANFLGNLYLANHSESSALSTGVQAMASTLEHISMVGAQKSRTSVAKLLWLLKIASACPSEKLMNAVDELLFRYVDTIQPANWLFG

SEQ ID NO: 159085 - protein, 121 aa, Heterodera glycines
GIGLNNIKANDYTNVEYHALFHVPTLRDYFLREQNYMHIKRPTGDKLTLMPQRFGELLRKLWNPKAFKAHVSPHEMLQAVALCRDKKFQIIRQGDAHESMMCFLNTLHIGLNGTGKTNSSI

SEQ ID NO: 159086 - protein, 134 aa, Heterodera glycines
GVQRSLRPYIASSHQLNYHSEDNGGASAVNVCAELCAFLCANGFARAAKRRKTAPGIEENVARDGNCLPAEMGNKKGRGVQLGLRSLLRFHNKRYTAPKSEEKTQRRLLVVLLDADFAKPIALRHVFALLALGP

SEQ ID NO: 159087 - protein, 48 aa, Heterodera glycines
RRRRKRRRHPRRWRKKRRPRRRRNARRKRRRRKQRHRARKKKKKKKKK

SEQ ID NO: 159088 - protein, 139 aa, Heterodera glycines
GCCRDVRWPALGCLCSSSLSPPPLRFVVPRSCRSEATIRWMATRTFGTTLCSALRPRAQHHKQLLRTDSKRPPAPPCRTVQLLERSGRHAPARAAAPDVNSLCNNSSVRQRISGRPKSGATSTMPRATARKWCPPTALP

SEQ ID NO: 159089 - protein, 37 aa, Heterodera glycines
AHSSIKGMAPEISEDLYHLIKKAVSIRKHLERFKRTL

SEQ ID NO: 159090 - protein, 134 aa, Heterodera glycines
GAHFGHLLVGHRFAYALSPPIGWRRNGFWPISEIDRHFHRPLYFWARLIIGPHEKNAANRQRIGQTKRNDKNSVGHFCWTGQFANTSGIHRVSGRPFRTFHLCGRLISIYEILVCAYSSRPRVLLLFDGHYFGR

SEQ ID NO: 159091 - protein, 152 aa, Heterodera glycines
GEDDFFKKVIHEMTIKNIDWYTLDRTTHLAETTLGGLIVLVFSKTIQINTVRIRDRYFHMNSLATLANLASFFKQLSPLASQKLIGLLETMTKRRAKLIRLLRERAENEPQQQINREEAKDGGGEEETATERLTEAEEGDDLHHDITALEEG

SEQ ID NO: 159092 - protein, 50 aa, Heterodera glycines
RNQSERTRRTLSNWCPSLKKCYAGERTTKRQATETRKRCDVPLSERARAQ

SEQ ID NO: 159093 - protein, 114 aa, Heterodera glycines
GQLSLHNPWRSYNVVRLRPLTNYTFCLEYHLVHFPLHLADSSSSIFKTCIDVQTEEPLGFWTSLSPISIGILLAFCFCLSALLCFRALYLRFYIWHEAKLRARMNQSMSGQSFL

SEQ ID NO: 159094 - protein, 159 aa, Heterodera glycines
MSDANLVGTADHPLSSLHHRPSAYAWPPPSHSLMERFRQAAVTSDNGICSEIGRDVMMQKNGNAVDAAVAAMLCIGVTNAQSSGLGGGMVLTFYDAKTRSCKVIDARETAPARATAKAYSERVTANRTTARATGYHEIATPGELAGLWLAYKKFGSGRV

SEQ ID NO: 159095 - protein, 164 aa, Heterodera glycines
  unsure (1)..(164): unsure at all Xaa locations
MNTKTNQKPIKVLCAGDVNGKFAQLSARVKAVDQKCGPFDALFCVGEFFGPNDEQNKSVLEGEMQLPLPTYILGXPSCQFTTVYFPSESSELCQSLTFLGRKGILTTASGISVAYFSGVEESPGGHQQDETKPFEFDQKAVDDLLLPLSANSGFLGVDLLLTSV

SEQ ID NO: 159096 - protein, 72 aa, Heterodera glycines
AIKKSFTFKDFNQAFGFMTRIALKADKMDPHPEWFNVYNKVDITLSSHDVQGISERDVKLASFIENVFKTEK

SEQ ID NO: 159097 - protein, 66 aa, Heterodera glycines
RQNDGRPTAAADGHGTDNDERELRLTNNRTDVILYSIIFHVWIRTYICMFYPHIYFACHARYLLLL

SEQ ID NO: 159098 - protein, 81 aa, Heterodera glycines
RNGVNVPSFSACATSLFSSLCPSLTNSPYAEGIGFRLFGFLLFPLSFITWYSIQNSILLRTNRGLPISFCFQCPFPFFCSF

SEQ ID NO: 159099 - protein, 75 aa, Heterodera glycines
WNWRNWELMDCSLFHLPFRLITKRTNDRITSRPPTHRRVTTTRGPALCRRKETDDLNGIHFVSLTHLSVSWSLFL

SEQ ID NO: 159100 - protein, 161 aa, Heterodera glycines
MGNEKGIPIAEPEIVAFNSPDNSDREWMTMFERCVNKHIQFIMLVDEKRKDTHGLLKLSEAMHKVTTQHVTLEKANDVVRKNQRQTLENILNKLNMKNFGLNYVPVMEPSACRRFSLENGNVLVIGYDVNHPAPMPQQTRRLLASQGESQLSSLDPSCVGI

SEQ ID NO: 159101 - protein, 75 aa, Heterodera glycines
NKNFIKKTVEFESSHPNINHFPHFFTQNTHLSRLAAAVGLLLLLNPSFLRTQVALPLKLAVVRTEQKLLLVQIGV

SEQ ID NO: 159102 - protein, 83 aa, Heterodera glycines
ATDGRKGGPVLNWRGREEAKVKRWRPIDDFVQINPREKTECTASTSLTHTENFQIFMPRPPPFTSHLTLIYFSHFNNYYFFTF

SEQ ID NO: 159103 - protein, 149 aa, Heterodera glycines
NSQSAIGTFPSPVAFFSNSELKLRLAEHVMSFLTMKLCEDSVDSGDESNRWEKSDEGTNDRFQGVIRLWSREFSRFSFGCSAGKGGGRGRGKRSGHWSAANWEGTAMEFEWSKFKKGASFGVKFEATSSIRIKSSDPSRVWVGEAGPPP

SEQ ID NO: 159104 - protein, 114 aa, Heterodera glycines
  unsure (1)..(114): unsure at all Xaa locations
MPNIFKILLIVLLAVVSFRLSASTGDKKTANDGSGNNSSAGIGTKIKRIVTAGLLFTSLATGGAEAIGRSNAQGGNAXGLVPSHVTNRSMAPPPPPVQFEMGANRLEKMRAHLR

SEQ ID NO: 159105 - protein, 61 aa, Heterodera glycines
SLSKAMKEMDLDRSKQTPSSTEKPPSRKGSRKGAHLLEMMDQETAAPKTTQARKGSVKRGN

SEQ ID NO: 159106 - protein, 58 aa, Heterodera glycines
LKSFFPASVVPIARNCLRLPPFLCPALSDRRTTSSASSSNLNTFGDWSAERRRLNVTL

SEQ ID NO: 159107 - protein, 156 aa, Heterodera glycines
  unsure (1)..(156): unsure at all Xaa locations
MAANENMQTEDNKKGKVTNDERNLVVSFIQFLRHKVSSNQCTDEQIEGLEVAIQCLETAFFVSDRNYAFQPSKPLIEIFKAAEGLPDGDQEFPKPTQTDVEKSNALKEEGNELVKSNKFEEAILKYNEAIKLNRDPIFFXNRAAAYCRLEQYDLAI

SEQ ID NO: 159108 - protein, 150 aa, Heterodera glycines
GNHSSFHFLPIFSPALNCTAPRMVYEEYCFDVRLDDFNEEYCFEVSNADIVHNSCLYVEQTNPNYMTIHGVDYDIFVCEKTISGLKDDRSENVFNRRQGACASGDDRCDNVFNRGQVASARNGEGRDSILIQGLAFVIVKVVNAVYDMIV

SEQ ID NO: 159109 - protein, 148 aa, Heterodera glycines
GIASVPELPQKFLKSWSVDHSENFDEYLEAKGYGWFMRQVVKLAGITKTFSKNENGTYACKIETTKKNVEWPSFKLGEEFQAEYLDDSVPKITFDYNPTTDELIETHKKVDSEEKPDIYKYNIDSDGFLVMQMEYNGVKTKRFYKKNE

SEQ ID NO: 159110 - protein, 146 aa, Heterodera glycines
GEASDTIENVRAKIQDKEGIPPDQQRLIFAGKQLEDGRTLADYNIQKESTLHLVLRLRGGMQIFVKTLTGKTITLEVEASDTIENVKAKIQDKEGIPPDQQRLIFAGKQLEDGRTLADYNIQKESTLHLVLRLRGGMQIFVKTLTG

SEQ ID NO: 159111 - protein, 69 aa, Heterodera glycines
KVAEQPNVAHCNCEVKEEDESATIGQLIINQMPTQSKWPSFDHFLLSISSNRCLCFSSFLLLLFISVSI

SEQ ID NO: 159112 - protein, 188 aa, Heterodera glycines
GVYSKEGITGQQLSDEKLRRMATRNNSSPYILPRRTPNSARPGTFITTRNLSALHIQPRPTPFLSGTISKSSPQPLRVVGRIIDPMALGSSRQILLAPSSTVLSPAEQFSNVQPVVNDNFHRPLSRQQRTPLFKLGQDQSEEDEFDLDEMYRLLDESAGYRAQEMSLPRRRERLNNLSQEEKINRRKH

SEQ ID NO: 159113 - protein, 71 aa, Heterodera glycines
TQRKRGARRKRPARGWTKRLRTGNGDRCRQWRGGGGENGRRSGAIVRIYLDFKLHFCINSFSQKKKKKKKK

SEQ ID NO: 159114 - protein, 70 aa, Heterodera glycines
FLPDVYWVFMFISFTSILISCKIPSAAAPSLLRVALDQCQKCVSVNSAGVPFDRLLQALLVQRVKSVFDV

SEQ ID NO: 159115 - protein, 57 aa, Heterodera glycines
NDFFRLHVHLLPLDCLLYIASPITVFKILLIIAQHRYPCQILPFYCIIDTTVIYKRR

SEQ ID NO: 159116 - protein, 45 aa, Heterodera glycines
GDHSESEGGVYDVSNKARLGLTEFEAVKQMYDGVKKLIELEKASK

SEQ ID NO: 159117 - protein, 137 aa, Heterodera glycines
TTSPSYSQTSPNYSLTSPQYSPSSPRYSATSPTYSPTSPSYSPTSPSYSPTSPQYSPSSPRYSPTSPSYSPTSPSYSPTSPSYSPTSPQYSPSSPRYSPTSPTYSPTSPSYTPTSPNYSPTSPQYSPSSPRYSPSSP

SEQ ID NO: 159118 - protein, 57 aa, Heterodera glycines
KKDNLSLMKCRRHNVKHSNSSATFTVPIATAASAAHSTSKTGAHSASKTIAHSASKS

SEQ ID NO: 159119 - protein, 75 aa, Heterodera glycines
FFFFFFFFLVKGFSEHFLSLHSLWRLFLVIASDASSYFLPHWFGKKFGYKVRQGPQQNNAISWGFMGSWQSFSCF

SEQ ID NO: 159120 - protein, 74 aa, Heterodera glycines
QYMKVQFEQESQAIKAIGQEKNFEVTDVHFGVPSKGVFAHQNVPSPSHVIANPGQHSSVGQGKKEEPLSSDLDF

SEQ ID NO: 159121 - protein, 140 aa, Heterodera glycines
GFFLAFAQIWCQSAEDPAKTSRRLLLDPHPPPKFRVLGSLQNFPAFQNAFNCPKDSLYAPKEHCDVWISEVKQVNGDNFLPPPPSLNIPQKESELTPKFREASEYFEKSVDIAQDPCNNFYEYACNAFDEIAHFDRISIQ

SEQ ID NO: 159122 - protein, 75 aa, Heterodera glycines
PTVAAAADVMVALTMRRNCGSQTIGRMLFIFDHFYVCTYILSSCIFDVLCHARIFAALTVHIVLGILCLTTFNTR

SEQ ID NO: 159123 - protein, 49 aa, Heterodera glycines
VVENGWLLIGGFTFFIQLSWELQISKNVFFFEIFGKLIGIKKKKKKKKK

SEQ ID NO: 159124 - protein, 138 aa, Heterodera glycines
GFIAAAFLLNFGCCQQNESQTTETLRARNASSSPQFPLNTTTFTTTKKETTVATPSTTEAGTEAATTDDTNDEQSLLFWILIGVIVAIVLFLVLLVCIVCCMRGGSQKDARETVNGESGGAVTKLTMNGDNADSSSAS

SEQ ID NO: 159125 - protein, 54 aa, Heterodera glycines
FFFFFFFFFLFFFFFFFFFFFFFFFFFFFFPGVGYSENPRELKKGGGNFPPKAG

SEQ ID NO: 159126 - protein, 68 aa, Heterodera glycines
ITTSIKCNNQSKRKKQTTTDHHFFRALRDNTPSKKKLVILRPLPLFKVRLAPPVPPPPLPPQQFSFPH

SEQ ID NO: 159127 - protein, 92 aa, Heterodera glycines; identical to SEQ ID NO: 158759

SEQ ID NO: 159128 - protein, 159 aa, Heterodera glycines
  unsure (1)..(159): unsure at all Xaa locations
TVFRGDVSPVELAVVALFTEHEGPSVECATEKGNGVGPSVAADCEANKLAEVTEGLARITATAEGGETFYNRVQEFNRDLTGLXVVVLRAFAAEIPNEKEPKTEEEGPKAKQRKMDEGKAPEANAAQSQPRAFSVLDALSASGLRAIRFALEVPNVTRV

SEQ ID NO: 159129 - protein, 32 aa, Heterodera glycines; identical to SEQ ID NO: 158848

SEQ ID NO: 159130 - protein, 60 aa, Heterodera glycines
NVNFCFTNDSFLILSFLDGINSQGFFSFFFGFLTFLALPFPKGLAVHFIAPWAHHSRDKT

SEQ ID NO: 159131 - protein, 53 aa, Heterodera glycines
ALATNKNGDKLRYRLSLNKIVKVLLISPMPPDCEPFIAAVFETKYAYFNNPVI

SEQ ID NO: 159132 - protein, 53 aa, Heterodera glycines
FFFFFFFFFFAGAQIIVRFTCTLPRAATSKIIRPSAKDPPVSNMGQSLGVSAG

SEQ ID NO: 159133 - protein, 42 aa, Heterodera glycines
FFFFFFFFFFLFFFFFFFFFFFFFFFFFFLGPNPKKFFFPFG

SEQ ID NO: 159134 - protein, 90 aa, Heterodera glycines
FPQDVYWVFMFISFTSILISCKIPSAAAPSLLRVALDQCQKCVSVSSAGVPFDRLLQALLVQRVKSVFDVSQVNLRPRNDQTNQIPVACA

SEQ ID NO: 159135 - protein, 64 aa, Heterodera glycines
PPTDAARVLPRRDDSKRTRVSHGRHWHDSPGTRLSVISLLQIMLFRCDGVTYDMPIFEGFISYF

SEQ ID NO: 159136 - protein, 71 aa, Heterodera glycines
AADGQGRQNVGQNCVVRGIGVARNHFAIVVEGDGLEKENGLCTAPFMIGCPFVILCLFVTFQCIRQMKAIN

SEQ ID NO: 159137 - protein, 132 aa, Heterodera glycines
MSMDELKKRAKAIGTFEELRKIIDIRGVNRYNPNNAPVLERAVDLMIKETKYDKDILMTLLKLYQLNPFLYNEEYVCLVLLKTMTNFPRNDFALAKYLVDAAKVNAPELRRVCQIGSLLESCNFALFWRLVD

SEQ ID NO: 159138 - protein, 189 aa, Heterodera glycines
LDYVVERKTLDDLRRSIKETRYLEQKQRLKKCGLRNVVFVLEGGTTANDRQLEQAMVSSGVESGFLVHRTPNVQGTAKFLQNLTRWLRERCSKQKVTGPPFDSFQQESKKAHAATVSDYWVRQLTVCPGLSTDRARIIRNRFPTFRSFVEFCRKNSTDKNSIRDDYSSAIGVELPQLSAAPTKNLMSFF

SEQ ID NO: 159139 - protein, 48 aa, Heterodera glycines
GDRAGVSGLHSPVCCCTLGCYPPHWGLLSFCLSGEWGFFRRSALICSE

SEQ ID NO: 159140 - protein, 90 aa, Heterodera glycines
LTSAKVAFYQPDDPKYVVNTSRAESLWIHWPVIIKPNTATRLVPSTEGRMLHFRNWHFLEDENGILASENYMPRKIFDGNFNACNRKKGF

SEQ ID NO: 159141 - protein, 58 aa, Heterodera glycines
LPLLGLLLINTVFGHHFFDNFHIINPSLLLRDALLFFPRLPLGLPTEIKSARFACVVV

SEQ ID NO: 159142 - protein, 88 aa, Heterodera glycines
LTAIEHRSVGQIGRGRRAKGIRDDILQHRRSTFAVQCALIVGHCLLLLGTPVVICCRILSVAEFNLSEQLSASSLSGTSPLFSSSLSP

SEQ ID NO: 159143 - protein, 91 aa, Heterodera glycines
FFFFFFFFFAARLLITILVLKIEENQCQNIQTEMGVTGNNNWTWYSCPRHLSTALYSDRGPSSFCPAPCPKWVRASRKTPFRCLCLPWPMS

SEQ ID NO: 159144 - protein, 73 aa, Heterodera glycines
SPEKVGHRKRKRKKTKTTSKRGGMKTVMSQCPSMKRMRRKRRKSTTNCWKKKEEEEKKNKTKRKGQKKKKKKK

SEQ ID NO: 159145 - protein, 109 aa, Heterodera glycines
MSNFIFVASLTAAFFSSGLALPAPYDAESVVSSELNVPLLSADANVEAAITNESDAAAEIQAPSIPVPIEHQTAADITHPTETGNESSIASSSSTPKSEQTPKKVMNMK

SEQ ID NO: 159146 - protein, 62 aa, Heterodera glycines
GQKQTLLGAIRRRERPIYNWQSPIRIHGKINIELYEFADIQRGNCDPFLGEPFTKINDGTEK

SEQ ID NO: 159147 - protein, 48 aa, Heterodera glycines
AKCALFCLAIIKKVISLLPPMCYELCRQFKGFADPKIFQCQKKKKKKK

SEQ ID NO: 159148 - protein, 82 aa, Heterodera glycines
NHPRLCRNAATNCQFSLFSTAFQIHWKREKFDEHLAKERIYLLLVFRRILIIFSQKFSAGMNLFLFLSFSLFSCVFLIFISP

SEQ ID NO: 159149 - protein, 69 aa, Heterodera glycines
LGKFNGIEIHRRTTIYDHSSAADLYLLREIPPSIIQHIIVRLSASKALQIFMCGPSLNFSSVFNCSDWR

SEQ ID NO: 159150 - protein, 152 aa, Heterodera glycines
GQQCNNNGNVTAPTERIFRDALNRSRRLFFSFTLLTEHIAFVELFDKVWIAGWTSAVDLRLRENGCSLNFGDEVEQIDGSVVRNLRALTEIYQRIMPGAQIPLLLRANPTMMVFTLVKPENARLNLGIKFNRPAKFLLRHPFDCLTIDSIAL

SEQ ID NO: 159151 - protein, 120 aa, Heterodera glycines
MPNIFKILLIVLLAVVSFRLSASTGDKKTANDGSGNNSSAGIGTKIKRIVTAGLLFTSLATGGAEAIGRSNAQGGNAAGLVPSHVTNRSMAPPPPPVQFEMGANRLEKMRAHLRELAEKM

SEQ ID NO: 159152 - protein, 105 aa, Heterodera glycines
SIGRPMKRGGETQSKESKISEEILDDQKLLQLLEKAFVALVNGTELPVVPEKLSADEIANLKNGTRNPTDEKPMSESQKTETKSWWDTLKSYWPSAKKKKKKKKK

SEQ ID NO: 159153 - protein, 133 aa, Heterodera glycines
GIFSNSQMAFSKIFSSLLISFLFLLRKAFSYTDNYIKPYEESYGSQEIPNDGFKQNDEQLQQQYSKDDLNTYDRNDRRYGNYAPRSGFPEDYNFNDLNRDNYDPSYDNYIPSIDNDKRYSKNGNSCYNVKLPK

SEQ ID NO: 159154 - protein, 96 aa, Heterodera glycines
RQAPMNMSYNDKVGFINSASKQLGDRLSEQNKKMHEMLKEDKNERSSTSHFDEGNKKGSSYNFEKFSSSESRPAPYSYSGKPAVYFRGPTIRDVPP

SEQ ID NO: 159155 - protein, 115 aa, Heterodera glycines
RQAPMNMSYNDKVGFINSASKQLGDRLSEQNKKMHEMLKEDKNERSSTSHFDEGNKKGSSYNFEKFSSSESRPAPYSYSGKPAVYFRGPTIRDVPPSDGSIGGTVTTWEWGTVSN

SEQ ID NO: 159156 - protein, 130 aa, Heterodera glycines
RISMEHGSLPLQLIILFVLTLQISTQSPEISVPSDVQILSAVRNVDLTTQIVKVKTDFELKNGRNEELSSFVHAMSAEEAARLSWMSAYESGKESGKLRISRVRVKGVSSDMVFHKIEFLDLLMSGSNIK

SEQ ID NO: 159157 - protein, 139 aa, Heterodera glycines
VGIEKAAENGEQFDLVALDACEMYIDLICPASVFSDEKILQKIKAILKPTGAFVVNILMSDEKEEDKYVAEQKRKLLNIFPICLHTSFVGELAHVFVCLPTKINVFGEHAKLSKEWEKKREELTKEFGIDEHLTQYRIS

SEQ ID NO: 159158 - protein, 191 aa, Heterodera glycines
SGGPAAGIGTLWWSLHFKMDPIPERVAKMRKHADHLDSPTMAGGLFAVSREYFFEIGAYDPGMDIWGGENLEISFRVWMCGGSIEVVPCSHVGHIFRAGHPYNMTGPGGNKDVHGTNSKRLAEVWMGDYKRLFYVHRMGLKDVEVGDLSARKALRERLGCKSFKWYLDNVIPEKFVPDENVNAYGLVQDTD

SEQ ID NO: 159159 - protein, 123 aa, Heterodera glycines
GFCGTDDADDKVWSKSVLQHCIRPDHGYTYDSQQIKWLIDMLHGFPKEKRRRFLQFCTGSPRLPVGGFKGLSPPLTVVKKTASFVGNENELPSAMTCYNYLKIPPYESYNTFLDRFEVALQHV

SEQ ID NO: 159160 - protein, 202 aa, Heterodera glycines
DILLDCKGHVKLTDFGLCKEAIEGDQKTHTFCGTIEYMAPEILMRTGHGKAVDWWSLGALTFDMLTGGPPFSAENRKRTIDKILKGRLTLPPYLSFEAKDLIKRLLKRHVDTRLGAGPGDAEEIKKHAFFTHHVENWTNVYRREIEAPYKPNITSEEDASLFDSKFTKMTPVGSPTAELPPMSVNPFEGFTYIALSVLEQVS

SEQ ID NO: 159161 - protein, 129 aa, Heterodera glycines
RDYGIFYYEVKVLNIKRYIKIGFATKKLELDTGVGEKPDSYGYVNGGCLWRNGTEYSGNPKFARDDTVGCGINLVTGRIIFTKNGEQLDTADVFASPTSQWFPCVSLLDSGDLINANFGPNFKFDPSAV

SEQ ID NO: 159162 - protein, 136 aa, Heterodera glycines
LSGEFRPHSVVLTPPRVSHSALSVPSGANFGSDMVQFRQMAHSPPILSVPLATSVHQSSAGRLINSPQAENTTEESNGRLSGQLKHSPTVGSAATSPLASSSTIGVHEISLSYVRPNTFSPSAGDDRRSLPTYLSS

SEQ ID NO: 159163 - protein, 98 aa, Heterodera glycines
WDWYEDQKNCHRWTALHFPGDGWGESDWAKQCSGRKCRRIGAIACDQSLNGSTTSPVQFEMGANRLEKMRAHLRELAEKMPVNESKRLSPSGPDPHHH

SEQ ID NO: 159164 - protein, 124 aa, Heterodera glycines
VVNMAGPLIRILGERHPVPVKVAAVNALLRLLENVSLLLKAFLPQMQSVLLKILQDPSSQNLRQLASQAVVHLIDLHPKPETILKELNKLREADKSPEGLDLHTDKLINELIAKIALKNGNTSK

SEQ ID NO: 159165 - protein, 64 aa, Heterodera glycines
  unsure (1)..(64): unsure at all Xaa locations
HPWCDQPDDFERSLQLIGDFHSPAKFRVFGSLRNFPPFRNAFNCPLNSKYPPKXHCNVWVTPVT

SEQ ID NO: 159166 - protein, 138 aa, Heterodera glycines
MPNIFKILLIVLLAVVSFRLWASTGDKKTANDGSGNNSSAGIGTKIKRIAPVGLLFTSLATGGAEAIGRSNAQGGNAAGLVPSHVTNRSMAPPPPPVQFEMGANRLEKMRAPLRELVEKMPVNESKGLSPSGPDPHHH

SEQ ID NO: 159167 - protein, 145 aa, Heterodera glycines
VGSGKVPEIRRGLNDETSEKTRHGTQLRKEAAGDAGEGAQFLPARINRDNFKFVFFVGRRSDLKRQTVRLHGAANRKTSNSCPIVHPGQLLNKCLITVNSSVLHSVPVDAKVTRVFFEPNDIFSVHFYLFPFDDTWQQKFVQQPT

SEQ ID NO: 159168 - protein, 183 aa, Heterodera glycines
FPILFPPVSHQNVLAEWLSKLKVSQFHCAESEKYAHVTFFFNGGREEAFEGEEHVMVPSPRVATYDKKPEMNCEGIADKVVKQIELGKHPFIMCNFAAPDMVGHTGKFEPTVKACEATDVAIGRILEACKSHGYVLLVTADHGNAEQMIAKDGGPHTAHTCNKVPFACSSTSHSFKSAPPTTA

SEQ ID NO: 159169 - protein, 91 aa, Heterodera glycines
FFFFFFFFLVFFFFFLKLVKFIELKKHGNFVIISLAFHQFNWFWHKVQLPCMKWPPIGPLAFCKFSQPQLKKSPRWKGHSRAEIPVPSQIP

SEQ ID NO: 159170 - protein, 160 aa, Heterodera glycines
MAKVKQTEWHETDIKKFCFAEMSVDGLRALKAKTAALCFIFEKTTKNDCSCKDLEKELLQLGLPSDHVSVLVELYNSNRAALCDSLAGPAIKAPSLTVVCKEQVPTAADPSVKSDYFRLDTTSSDGSTATLLIHRDELVQLRTCMEDAVRVLESLVVNKE

SEQ ID NO: 159171 - protein, 55 aa, Heterodera glycines
FFFFFFFFYFFFFFFFFFFFFFTFFFFLKFHFFCQIINKLRGLTRVGIKVNQILR

SEQ ID NO: 159172 - protein, 71 aa, Heterodera glycines
GNDQQTIRDLSRNKQEPVKSEQGKAIAEQIGAYAYLECSAKTKEGIREVFEKATQAALQQKKKKKKGCNVL

SEQ ID NO: 159173 - protein, 138 aa, Heterodera glycines
  unsure (1)..(138): unsure at all Xaa locations
MPNIFKILLIVLLAVVSFRLSASTGDKKTANDGSGNNSSAGIGTKIKRIVTAGLLFTSLATGGAEAIGRSNAQGGNAAGLVPSHVTNRSMAPPPXTVQFEMGANRLEKMRAHLRELAEKMPVNESKRLSPSGPDPYHH

SEQ ID NO: 159174 - protein, 85 aa, Heterodera glycines
TKNGKAPKTKARQEVATNEPPAVNEWNDQLMGMSVEKFNEELVVLLPKANTFMENALSFTNEQMEKNGIATGAAGDSCSTGIPAN

SEQ ID NO: 159175 - protein, 95 aa, Heterodera glycines
AEQQQAAQAQTQKAKEQRQTHQPQKPREVEQQQTPQTQQQPKKAKEDEQQQQAAQSQQQPQKSKYVPPSMRKKRRDLFDENLVFNVCLIGVAKYC

SEQ ID NO: 159176 - protein, 187 aa, Heterodera glycines
LDEEMTSPAESLNLDAAEVPELLRKELDTLHKALGENMQRYTECKEIKVDEGLRTLEAKVGRLALSINSHKGILKRERMRLAETAKRLGLDQRIAHNVQRTRDNLAKSPQFGRAHSVDFLHEVATQNDQSLAEQCETVEKLRKLLDRLSNSDEEPSLSRNDLVDHLTRFDRIFEQVASQVYALNDSA

SEQ ID NO: 159177 - protein, 165 aa, Heterodera glycines
  unsure (1)..(165): unsure at all Xaa locations
TRWELSIWSTCRRPEFPRPPWRPGACDVGPNSPYSESYYNSLAVVLQRRDWENPGVTQLNRLAAHPPFASWRNSEEARTDRPSQQLRSLNGEWXAPCSGALSAAGVVVTRSVTATLASALAPAPFAFFPSFLATFAGFPRQALNRGLPLGFRFSALRHLDPKKLD

SEQ ID NO: 159178 - protein, 84 aa, Heterodera glycines
KLFDTLPLQSYVLEACQAPSGGLRDKPDKSPDLYHTCYTLFGLSVSQIYSGGIHSGNQNIVESVHPIYNVHIDAYSKAQRYFKA

SEQ ID NO: 159179 - protein, 100 aa, Heterodera glycines
MDKNNKKCLILNFRNGQNIFSIGSFLSLPRSFRAKNLRVGFLQFFDRFGVQLFVVQKIADEFLAGNSEVILGHVLEHFLLHGNHFALVGQTEFANGRLFA

SEQ ID NO: 159180 - protein, 175 aa, Heterodera glycines
AHQTPTVLYVKSDVFQWLDTAFLVTVSEKYNAANNAGATVPSPPTTVAEQQQPLENGGGQVAPPPMVNGGSGKLHQIVVESEPKKASVVVDHSPQKEPEKKPDAPSDAAPTVVDSLPSPTSTPNKKDEVMAISAVAPLSSIVDVPKTVDTAPPPSLSQPVAATAAAAPPPTSEQQ

SEQ ID NO: 159181 - protein, 124 aa, Heterodera glycines
VGILFWHVHSLAAECAPICPTVPLADRQICHCFLVHCPFCVRQRSVPDIEAWNLYGHLHARLAIVLHHFPANDSSDAVLFAYDANVFLWRLRIHRNIFNIFVARNAGKRIAGLNCPRSSCTNWL

SEQ ID NO: 159182 - protein, 65 aa, Heterodera glycines
GSSFKHVINCNIMVADMSDFQAVNETIKNFFPEDTYPARSFFQVVKLPKSAYVMIDVVAIVQGQS

SEQ ID NO: 159183 - protein, 183 aa, Heterodera glycines
  unsure (1)..(183): unsure at all Xaa locations
MKMVEKENDIAAAVPNNAANNGHVEAVDPSASKSAKEVPNNTEKHSAEDLMGLARLFLKEYYTKLSDLPSEAGIFYGDDSHFVHADVEETGRENIQRAIGNMGFEDCKARFYSLKTVSLPMQGDNAKLIQVCGELTLVKAAVQKQQPVLPRRFVQTIILAHQTPTVLYVKSDVFQWLDTXFLV

SEQ ID NO: 159184 - protein, 202 aa, Heterodera glycines
GITTNTIKYVDAGESDDVVLAELLRYEPSTAHKKIQANGLVVRKRPEYLLMYNPKYGLSILLPKYANVQSACEFDEKFSLGEFYSCAFIRVAEREARRLTYEWMCKGDFKLHEPMLKTRLIMDRFVHVHVNCEFTKEKITKLHGDHYVLKTDLGNVRFGKEFLTHNDLYDKSANVWVTFVKETEGCHWEIVQDSWGSLLDDE

SEQ ID NO: 159185 - protein, 51 aa, Heterodera glycines
FFFFFFFFLFFFFFFFFFFFFFFFLGGAFFVGPKIIKNFWEKKGGENWPPI

SEQ ID NO: 159186 - protein, 73 aa, Heterodera glycines
AKDGGPHTAHTCNKVPFACSSPSHSFKSAPPTTAEGVPRARALCDVAPTVLSLMGLTNPEEMDGQNLLGTAAN

SEQ ID NO: 159187 - protein, 204 aa, Heterodera glycines
GPLSNKIRFKDLQIAYIDHYVIAFLRANKQLFDGNGTALKFSIWSAKNDVQPIWDVLARDIWPIFAPNIRHLGLTNADHLDKLRRFISPTILSDLKWLNSINAYRLLPEAIGGDFDQSNATGGQILSKWLHTPTTNGQPKRFNCVYYQEPAINIDEWINTFKEAFLRATSSACYAIQFAVHATSTSMVPFEEVNKRTNEKLTLI

SEQ ID NO: 159188 - protein, 193 aa, Heterodera glycines
GQTRSSFYCGLSSFHRRFTAPWVLCRCIFKGGAEVAQKLRNYEFAVELLEFLLETDLLRNFCMSSRGKWYERIALNLERHLKSLDKSAHFCRLGMADELVGKSDKLILQHRLTQMNNRKKQTQSQTDLGFVELEDPEKMEINGTTLAKSLGDGEQVNHFYIPTSDRGEINKCSVEELVLHHFITVEHFTHGFH

SEQ ID NO: 159189 - protein, 158 aa, Heterodera glycines
IGTTKHGIHSAEIMTSSSESNVPKSENLGSSEMETAEEAAQTYLNNLRVDLNKIPSMKIPFLEPIIEKYVDEYKKSRQLFAECMQKILRKSKNPNQTVKIIEFKKTIEKEMNDLLKHTDLPPDQLIDLLNTREWLLSMKKDIEYMERILTGRENNDNI

SEQ ID NO: 159190 - protein, 169 aa, Heterodera glycines
GGREEEEEETDDDEIIVIEQSKSTGEEKTKSGREEAFQKTQAMQGEKEEKQIDEKEEEQMEDEEKEAEQIGEEMEEGQMEDEEKEAEQIEEEMEEGQMEDEEKEAEQIGEEMEEGQMEDEEKEAEQIEEEMEEGQMEDEEKEAEQIGEEMEEGQIEEEEREVHSRGGEN

SEQ ID NO: 159191 - protein, 72 aa, Heterodera glycines
SPTKKYVKNLFCVKNEQKKRLFKINRQLKRKVCLIPKSQLNSQTKMPSFIPWSAQFTDSSSAGWSAGVFPSV

SEQ ID NO: 159192 - protein, 93 aa, Heterodera glycines
FFFFFFFFFLFFFFFFFFFFFLNKFYLIFANFSKKQITMNKTVIITTNGSSLVGFPLSFFLKGGWCLFWIFSTRAPAIYPPMFPRGGVFAFAP

SEQ ID NO: 159193 - protein, 75 aa, Heterodera glycines
CCRQIFNSFISSEGAHLGYWKKELRADNCQLWVAFEKNYQQNDAEHYCHWHQQQQKQAEVTHCLCPVVNGLLKKN

SEQ ID NO: 159194 - protein, 212 aa, Heterodera glycines
EGYGQTECVAAATITIEGDPVPGHVGVPVPCCAVKLIDVPDLNYFATHGAGEVCIKGPNVFRGYYKMAEQTAETLDTDGWLHTGDIGRWTEQGTLKIVDRKKHIFKLAQGEYVAPEKIELIYMRSKYVAQCFVHGESLKTCLVAVVVPDFDVLPEAAKKQLGIEGKTMEELCRKQQVKAMVMEDIHEVGKKAGLFTFEQAKDIHLYAELFTV

SEQ ID NO: 159195 - protein, 18 aa, Heterodera glycines
FFFFFFFFCCLKFIGLII

SEQ ID NO: 159196 - protein, 122 aa, Heterodera glycines
YDLNSNSILFTIGNAELDLVSNEWVAYLHVNMRGTVVATTNKARLRLLSIEESKIRLFVDESAESNEHEIVKSSDSRIDPFWLEARSDLSTNCLNSRFVLVKHVEKNVSTRIPCHLRFFGKN

SEQ ID NO: 159197 - protein, 205 aa, Heterodera glycines
  unsure (1)..(205): unsure at all Xaa locations
MPSPPGGSEQETSISVQTVRFIYGTFTALTVLGTAILALLPVPTATTPARQTNTVDGTSSAAAVRDPSTVSTELAHSIDEGAEGSGEAVAVAEQPSHLAILSSTVKLMGTRRMVFFSLPFMYTGISQSFWSSIYPTTVANTEMFQLNQGVNPKLLLALTAIVQGVGQATSGFFFGILDSRTRRFGRTKIVGXGAALQLCSFLLAY

SEQ ID NO: 159198 - protein, 60 aa, Heterodera glycines; identical to SEQ ID NO: 158916

SEQ ID NO: 159199 - protein, 115 aa, Heterodera glycines
RSGQLDAKLLESAKRSLIFNLISKESTVELRVNSAILATIRSVDNNFTRDLCLKIWNAKAEDVLAIGGPPIRRLFEPEQSFCSIALNPSGVDELKEHFPETKVIKLDELQVPSIF

SEQ ID NO: 159200 - protein, 111 aa, Heterodera glycines
GYLSILFVLLFVISFATGPGSIPWLFVNEIFPSNARGNANSIAVLSNWGSNAIVGYSFPMLNTALGEYVFFVFTTVSVLCIVFAVKFMPETKNKSLEDIQAEIDRRRGITN

SEQ ID NO: 159201 - protein, 185 aa, Heterodera glycines
  unsure (1)..(185): unsure at all Xaa locations
FGNNAEYAGCKAGASRIVSLDLYRKEIQGFFSIPVDNLRASPFXLLQYMKYNIPDYKNAVIVAKTPGVMNKATSYSERLRIGIAVIHGEEKGVQEDGRQSPPPSPTDKRKGVSYELFPSQVAKEKPPLTVVGDVGGKIAILVDDIIDDAQSFVAAAEVLKARGAYKIYVVATHGLMSLDAPSLLE

SEQ ID NO: 159202 - protein, 104 aa, Heterodera glycines
GLKNIICSHWEVDDEKKRWTLSEQDKVSVKQQTIPAIIRSPEPIRIHLCTSIQNIMRNDFPARWANFTDEILPLLRVSEPETLMGTLLILHRLCKIYELVFDYI

SEQ ID NO: 159203 - protein, 74 aa, Heterodera glycines
FHVGSVTCLPGPPRFSNYKFPLLGFTISRIGGPIRHNTRLLLLHPLRSVFFPKQQQITIGTREIMPKKKKKKEK

SEQ ID NO: 159204 - protein, 82 aa, Heterodera glycines
FFFFFFFFYGMTVFNGKFSSNLSFSASLILHVFSIFGIILCRLFVLLPIFGIILCRLFVLLPIFGIGFCRPFVLLPIFGIIL

SEQ ID NO: 159205 - protein, 153 aa, Heterodera glycines
KFKEKFSHFIRINCKAFALADFYDFCGYVETRIRLQLLIDVERFDRIRLAHAKQIVEKEQILGENLDGSPANKKNPKKNVFFKIWLVGIELDEQIASENESESTNNWNSWKEALNSMLSEQFNAVILKGYRTKNGFSGPLVHIQLTAQYEQKH

SEQ ID NO: 159206 - protein, 191 aa, Heterodera glycines
MKLNDTVKTDFETIFAKFYSHICDDTEETIQRKQLKKLFSFIDTNKHNPNFRDRIGPRCDLRFLAGLLRRYQCSVSGEDRLLFSILELLEKHMALDFRIISPLVFGPSSKTYYEELIQYGRALHKYLTPEQVLAYFDSKRMWKSLLKLAHFDRHFSAALSKGSTVNAAMEIATGEIDPSCYDPRFVLRLLV

SEQ ID NO: 159207 - protein, 112 aa, Heterodera glycines
AFVLSKFYFYFRFLRQCGRWAIGPRGETVERSGKSFRFERRRSENARTDHTSGDQSGEAEEGNRYIGKRVGEFGSNQRFIADSLLQLCKFGAGGTTMKRSNWARRDGSSQVE

SEQ ID NO: 159208 - protein, 167 aa, Heterodera glycines
GVENFFYNKMMNKIYTTIHFLLLLTVIANKSTNCATNVQGTQTVKTADATYDEAGKISRDSSSSSDEDDSTTAASKMLLNEANHAFSKDNDEPINHQQKMRPEANFSVKYLPPRLNAAQIDNIAQQASSMITLRTLKHVKEVFSKFAPDSWLEALEDIPLPTIRCTV

SEQ ID NO: 159209 - protein, 58 aa, Heterodera glycines
MEADTLDPDDLLGEERSAPDGRFEVRGGESEIGDEEPYLMVGHTCPQRGVPPDPACHF

SEQ ID NO: 159210 - protein, 76 aa, Heterodera glycines
AQNGGVIDAVYAAPYHADAVIERYRHPDHPDRKPNPGMLLRAIEEHGIDPSKSLMIGDQPTDVEAARRAGVTGHLS

SEQ ID NO: 159211 - protein, 124 aa, Heterodera glycines
TEQTSEHNFDSVQSHRSEGNHASRHRHHFLDGICPFGVNAKRFDLHENDRCGRQHWQLETCECGKSVCLSLRCCAKHSLSIGEKSSFPPHNSSHQMAPSYDTAVTLTTSPQPPSHSANLQQKWS

SEQ ID NO: 159212 - protein, 186 aa, Heterodera glycines
  unsure (1)..(186): unsure at all Xaa locations
GSKNIAILPRRDSDLEAFSHNPSDGSFAPLVYRPSTXTKCLNLRFLSHXQDYYHSNRSLXGKTNLSHDGLNPAHVPYWWVNNPTLGEFCFAMIGRADIEGSKSYVAMDAWPPQASYPCGNFSDTSCWKLYTFKRIDXATLSRSVFVLKIRIKXAFAFLLYERFPSSLSSXLGHLRYALTDVPPQSN

SEQ ID NO: 159213 - protein, 82 aa, Heterodera glycines
FSVHSVINNSHNPPICASIDVFTTVVPRWTEERRNRKMEQIGKKSRRADSGRRNWAILENEQLIGVLHIYISYIYLQFFIGI

SEQ ID NO: 159214 - protein, 66 aa, Heterodera glycines
IELIYIERLIVWLLFFADKGHQKHVHFYQLLVREILIANASKLKQSVDQSRQFVTGLINSNCGRRR

SEQ ID NO: 159215 - protein, 98 aa, Heterodera glycines
LFPFPFLLPVFFFWPRTPWFFFFYHPKVFFFFFVRGEIFFFPPPRCFFFSPLSNYSIVFPLALLKGPFFNKGKRAQKKKKKKKKKKKKNQKKKKKKKK

SEQ ID NO: 159216 - protein, 118 aa, Heterodera glycines
LPKTKKKKLKKNRKRHRDIFEQQFKEIEGMSVEIVSPPKEEMDPITHNCDVNAQQIKEFGCKAIKGMSVEMVNSPTNEKKTAQLRDMSGSVVCSSEKALEKMDETLTKSKKKKKKKKK

SEQ ID NO: 159217 - protein, 122 aa, Heterodera glycines
GRKMKRRRSRKSGFATTFWMDILPFLTVFKLDSIWDVFVRQIWPIFTTPNSHNLSPSYADHLDNLLRLTTPTILSDLNINSIHSSSFLSVPALLSITTCSFICPCQRQLCHLNWRMSGRKKS

SEQ ID NO: 159218 - protein, 214 aa, Heterodera glycines
GSFDHAQLGLKMALLSPRFNALVDKHFDGKTQFTIWKAIKIRKDKDEMPKLFVEGKSEGFPLPDRPLPNKIIFKKLRIEYIDHFVIEFLRSNQQIWDKGTTLYITVWEKNEDNKPIWDVFVAEIWPLFATNICQLCFAGAEFLDYLRRLISPTILSDLNRLDSIISCHLFPDVLADDDDFDGPNTTSAGQALAKWLHNPRKDGQPKSLHCWELN

SEQ ID NO: 159219 - protein, 153 aa, Heterodera glycines
FSGLKSPIGSPLCDWIRTRKYFAYSAHDTTIAALFSALGFNKTNFDVDGYPHYSACVTFELWQNATNLEHYIKAFYWPPNSPSFEEMTGNITGCETNSTLNRFVERSEIFKPVPSPDEYCKDTHFPTNFSSKPAHYFQNIIIIYFVLFMAFSL

SEQ ID NO: 159220 - protein, 154 aa, Heterodera glycines
TKFKEKFSHFIRINCKAFALADFYDFCGYVETRIRLQLLIDVERFDRIRLAHAKQIVEKEQILGENLDGSPANKKNHKKNVFFKIWLVGIELDEQIASENESESTNNWNNWKEALNSMLSEQFNPVILKAYRTKNGFSGPLVHIQLTAQYEQKH

SEQ ID NO: 159221 - protein, 121 aa, Heterodera glycines
MAGPLIRILGERHPVPVKVAAVNAFLRLLENVSLLLKAFLPQMQSVLLKILQDPSSQNLRQLASQAVVHLIDLHPKPETILKELNKLREADKSPEGLDLHTDKLINELIAKIDLKNGNTSK

SEQ ID NO: 159222 - protein, 147 aa, Heterodera glycines
CAPAAILRRSGHFSGPFSGVEPLSSVTRHHHGSQIHYHRKLIRQTLERHVAGTRPCDQLSCSESTLDARRALGFVANKCAPLWGDWSFGACISSRITTVIQVRSQGQVNYSWCNEPYAVSLSGRLNLHMHGLIFEMNTSVQAGSTRS

SEQ ID NO: 159223 - protein, 141 aa, Heterodera glycines
YLAFENSVCPQYVTEKFWNAFRALTVPVVLRRAVLRGMGVPDDAYIAADDFCSAQELAQHLLTLRHDTDRYMQFFNWTRKYSKKKKIRYFLQFANSVKSHKKIQGQNMQSTREIFGLKHKVNTILLKKIFSPEKKKKKKKK

SEQ ID NO: 159224 - protein, 105 aa, Heterodera glycines
GIANQLRYPNSHTHYFSCALLYLFLGANSKHIQEQITRILFERLVALRPHPWGLLITFIELIRNQRYGFWKHEFVYCATEIERLFLSVANSCSVSGPESHHSNGI

SEQ ID NO: 159225 - protein, 121 aa, Heterodera glycines
FFFFFFFWLIKFIKSTKQWKNVKGNEFFCAQLVNSAICPSAPEVSSHRWVGWKTAQRMANRSLLIVSAMPAPSSAPSSSSPSTCGFSPSALFSSPPSSNFVVLRNLSNSRLAKNLWPKSRF

SEQ ID NO: 159226 - protein, 63 aa, Heterodera glycines
VPEGMPGGERTNGVTNIIYNIRANRSASSRHVIRFINAVQLSVIPFGLPIARILSNAFFVFSS

SEQ ID NO: 159227 - protein, 200 aa, Heterodera glycines
GAINCPNKQKMYSKYFFENFMKFLTIFVFIGIHSPTVAEVIHQLPEDNICAKFTVQFLEEFYQQNSSSPIFGWITAEGDVTLGQQNGTHFGIKCLALALSDWDFVVDRACLMTLAPPNSHRRFIASPWHQQNDQLNNGTNQTADQNVSYIVPLKSAEVRSPQLISFVQKWANKRPTARPCIFPIDDKIGSKLSWNGTICG

SEQ ID NO: 159228 - protein, 166 aa, Heterodera glycines
  unsure (1)..(166): unsure at all Xaa locations
KISCFFTLKFVYFCALFPYFLILVLLIRGLTLEGAGKGIIFYLKPNITKLTDTTVWKDAGTQVFYSYGVGFGTLIALGSHNKFHHNCYHDAMVVCVINGMTSILAGFAIFSVLGHLSXVCKKPIAEIVKPGVGLAFLAYPEVASNLPFKQIWAFLFFLMITILGLD

SEQ ID NO: 159229 - protein, 129 aa, Heterodera glycines
  unsure (1)..(129): unsure at all Xaa locations
HRLFQQQIXILLIPKQNVTEDPIALCDLLGAIGETSTATTQDLQDLTEKTDVVERLRKALELLEKEKTILRMRNQIKEDVERKVNEQHRKAVLYEHLKAIKRELGIEKEDKRAVLEKMEERLANLKVPE

SEQ ID NO: 159230 - protein, 46 aa, Heterodera glycines
FFFFFFFLFFFFFFFFFFFFFFFWGKGIFWVLKDQTKTPLKRKFNK

SEQ ID NO: 159231 - protein, 171 aa, Heterodera glycines
GVIRRPSRPIPIGAIVRSKAVWAILIGHFAGDWGAYMMALGLPSFLNDVLGMQMTSMGFASAIPYVVYFAVINLGGHLSDSLLQRQLLSTLNCRRLAMALALGGQAFFLLLISFCPCGYDKLVIALLTLSIGISGFQYSGFVINYLDIAPELAGLLLGLGNTLSCLAGFLG

SEQ ID NO: 159232 - protein, 191 aa, Heterodera glycines
GAEAPFLPFKTEGQHFGCQKNLKMRYPIFQIFLIMSFICRFKSAVIFRSDTMNQTDYGPMVLAHNGTSPSDQDKIQDEETDHWLTLTQTDQTTTDQNSTLSIDWMSNTIMKADHDATLSLGEDHGQTLEAKNDDEPNLENGHYGTTPTDYEPNEEKNAVDNADHNDMAVDGAHDLSSAEDYDGNDSISAKN

SEQ ID NO: 159233 - protein, 114 aa, Heterodera glycines
EKVLNEFDFARRAEWELVQTLFGIASDRTILFPDDQIRQQTGCPQNSDAYKFLCSIFVDGSSEGINYGTTSTSVLLVDIEGTAVFHERRLVNPQSPMDDPQKWKFSRERFPICY

SEQ ID NO: 159234 - protein, 187 aa, Heterodera glycines
  unsure (1)..(187): unsure at all Xaa locations
MLHGWRVFASCSKSVLKSPSLQSGGYGLSRRLKSDEVRGPVIGIDLGTTNSCVAVMEGKQAKVIENAEGSRTTPSIVAFTKDNERLVGAPARRQAVTNSENTLYATKRLIGRRFDDPEVQKDIKVVPYKIVKASNGDAWLEAQGKLYSPSQIGAFVLMKMKETAEXFLGTSVANSVVTVPAYFNDSQ

SEQ ID NO: 159235 - protein, 150 aa, Heterodera glycines
MEDRLRLPYTHAVESLRLSNLLPLNLHKVLQTDVEIGGHKLKKGTAVVNQIATVLFDDKIFPDHEKFMPSRFLEEDGKMRRVDELIPFGIGKRSCPGETLGRMELVLFTANFFHKFHVYPCDPLNPPKFEKRQTFAVKLADYKCKVTKRK

SEQ ID NO: 159236 - protein, 202 aa, Heterodera glycines
GPQKTFATNEKYDPEKAGEEKFQKVNEPWHSVPYSPPTKALLFNAISAAIGGTPLVKLQRLPREDGIEAEILVKCEFLNAGGSVKDRIARKMVELAEAKGILRAGQSTIIEPTSGNTGIGLALMAAIRGYRCIIVMPEKMSWEKECVLRALGAQIVRTPSEKGYTDADSHIGVALRLQREILGAVILDQAKEAGGWGNTPRG

SEQ ID NO: 159237 - protein, 175 aa, Heterodera glycines
LTTRRRRPKKGCWATRFLSLFWSTSTEVLATFVTSAFGTDELPTCSVVRCPHPLSSMSQRFSSVPFPSVAVPSFSSSELSSHGGRNASTRLFELGFFFFDGLTPCEGGRGPTKSFRVLAVNPKSGGCPQRKVFESLPDVFDSSCHLCPKFAFFCCLLDILRGFSLDYLKNRNISS

SEQ ID NO: 159238 - protein, 86 aa, Heterodera glycines
VITPIGKQLNLKAETREVVESIISHTFHHFVFFESAFFTFGDFFSSDKTSFWPFAFSALSFAFFLALCCSFLRSASFFLSAPVGNT

SEQ ID NO: 159239 - protein, 59 aa, Heterodera glycines
FGLNINRLPIRMSINLSQYQSVDLVSFLGDSSLESVIASFGGSFLSTLFTFTSSTALSS

SEQ ID NO: 159240 - protein, 192 aa, Heterodera glycines
  unsure (1)..(192): unsure at all Xaa locations
MLSRMLSSAVAVPRMCESNKKXLLRKGATFVGLLRGRMANSTFTATVTPPHRLLRPLHINEKKLFGPGPSNMPPLVQEGLVQPLLGHMHPEFFEIMDDVKAGIKYIFQTENALTFAVSGTGHAGMECAILNLLEPGQAILVVQNGVWGSRAANLAERLGIKVHRLVVPEGEVINLDDFAEAVDNYRPQVAFV

SEQ ID NO: 159241 - protein, 73 aa, Heterodera glycines
FFFFFFFFFAIYFYFNVINFDNHAGNKCTILLFVVSQLCCVCCLFHSFLLLNDASHLLRFSQIMRLQKKNELV

SEQ ID NO: 159242 - protein, 184 aa, Heterodera glycines
GFGANFGPISAPSTSDGPHFPDNVWFLCENYVLQSDAALETVHEEFDIIFALACSKWVHLNWGDAGIKRLFLRAFRQLRTGGRFVLETAPFKDYRKHCKKAAADRPPDEVLRNFGAIRLHPDEFTAFLLNVVGFSHHEELDSAHSKALGISGRLQVFYKGQFMLTDAPEGARDETPGATPQQQQ

SEQ ID NO: 159243 - protein, 81 aa, Heterodera glycines
GRPIRMCPILHALSTSHTNIWPRVETLSLGATAPIFYCTTRPLIGCLALATNPRGPAMRTKRRGTPAARGKSIERRPLPDG

SEQ ID NO: 159244 - protein, 140 aa, Heterodera glycines
GNVKAGFMMAKLFAPEIEQSGGGSIVFNSSIGAYRSPQGIAAYGITKTALLGLTRALAESLAPKGIRVNAIAPGIIKTKMSKALWEGIDERSSAEAIGTLMGRLGMPEECAALVAFLCSSDASYITGETVPVAGGAYSRL

SEQ ID NO: 159245 - protein, 138 aa, Heterodera glycines
NESDFVTLGLGNNDCEKGFEIGIALIKKDTIWSPWLKPIMLDPPIVFIDGNVDATKRIEFGSYFKLDIWPKLDENSEIVYRVNVYCAANTHFEFKTYPKSLANVVINSNYKVFTPIGSEKMKPDIKGQLCKKKKKKKK

SEQ ID NO: 159246 - protein, 99 aa, Heterodera glycines
NELTVHVVPLSSPSIKEGDPRRNIGKPLRKKPRRPPPAQQKNNHQSRKGSALLRRLSGKRTVGDIVPGTSSQKQMFIPRSVSSQEGRAQLFTSSTSKLE

SEQ ID NO: 159247 - protein, 142 aa, Heterodera glycines
GNLLESLEPPPRPKISWSNYLRASDEQSHLGRPIQTKVTTKDVSGMLAMSTDFPISLNLALDILSVMEPVNPTVAKLREFCTAKLPEGFPVRVEMPIFATIQARVIFQQFRWCGEGASPAFPDAMFRTPDDYREDPKRFKRM

SEQ ID NO: 159248 - protein, 73 aa, Heterodera glycines
IQFILGQQKNKLPHRKNGKCFFNHRMPWLIPRRVSRGFPTKITVPVDKAVLHDNQCLNNAWLLFNCRHALIAF

SEQ ID NO: 159249 - protein, 117 aa, Heterodera glycines
HWPFHHDPSRPRPHLMYGRSVGSHPYANQFPRPMTQARMRSPFCYGTFQPFGLNRYPRNIPANSASNFHPEALKNSALKKSQFAMEWTTNRPAPYFPRNDYAAFSTSQVGNAGGTWF

SEQ ID NO: 159250 - protein, 105 aa, Heterodera glycines
  unsure (1)..(105): unsure at all Xaa locations
IGSSLHTDRSRNTNRPRISRNGSVPGSDGRCVQRAGTYSERVDDSPLQGIPRSRTIIAMSDPNHGKFSPVYQPLSGKDKHADFASVARVQPRTSKGXHRPVIAQF

SEQ ID NO: 159251 - protein, 149 aa, Heterodera glycines
GAREQFTKQLARFRGFEKAEQQNVKLFDAKLRQRLCVADIDRERVLSLEDELGKVKTELTVQARENRQLKRKYAALETRTREYETELENGREQMERAKRYIDQEKRPENDARRTLLKLAEMFESPIPTTSNVARLRKQFDDDDNDADDN

SEQ ID NO: 159252 - protein, 46 aa, Heterodera glycines
HENQQLYDKLGLHWKLARLPVEPSNRLTEYVLLLETLPRIPLSMPD

SEQ ID NO: 159253 - protein, 162 aa, Heterodera glycines
MADPKKAVCVLVGDADPSVKGMITFTQDKEGSPVSVQGEISGLEPGLHGFHVHAYGDLSNGCTSAGPHFNPTNKTHGGPQDQIRHVGDLGNVHAGSDGIAKLTFSDHLISLCGANNIVGRALVVHKSEDDLGRGLGEKEDESKKTGNAGARLACGIIGLAKP

SEQ ID NO: 159254 - protein, 36 aa, Heterodera glycines
FFFFFFFFSFFFFFFFFGDFVLVFGEGKKNKKTFGG

SEQ ID NO: 159255 - protein, 74 aa, Heterodera glycines
QNEKHCERGSILFHFYLTFESFHIASPFQGFHFSRLNCVPTLSSRVHLGHFVSQCLKFHLLFGTFLNFLGVSEC

SEQ ID NO: 159256 - protein, 111 aa, Heterodera glycines
FFFFFFFFFCSSTALIFCCCLLISTMGMANKLHIFEKHLKFQVVVLVNFVVELLRGAGAVHFDVPFPQPTFFWVVPENDFVFGALPIIANEPVVRVELPIGVLFGPLHPFA

SEQ ID NO: 159257 - protein, 149 aa, Heterodera glycines
RAREQFTKQLARFRGFEKAEQQNVKLFDAKLRQRLCVADIDRERVLSLEDELGKVKTELTVQARENRQLKRKYAALETRTREYETELENGREQMERAKRYIDQEKRPEKDARRTLLKLAEMFESPIPTTSNVARLRKQFDDDDNDADDN

SEQ ID NO: 159258 - protein, 78 aa, Heterodera glycines
APLDGFPQFTTGDVIGCGLNAFNRHVFFTLNGEKLDMGILAADPVRLFAAVTLVDNKDAIRANFGPSLVFNLSSVLPF

SEQ ID NO: 159259 - protein, 108 aa, Heterodera glycines
TGEHAIAPQKNKVFGGAFAPRLSNGLSAGQFGQDSVAPAGKSHFLVKFCPVNPLRKKGKRPNKRDSRLLLCVHSIIVLLLHFRYSRNCYQKFRYQISSFWQKKKKKKK

SEQ ID NO: 159260 - protein, 92 aa, Heterodera glycines
DVEDEYVYLLARFVGPDTQQIWSIYAQQLHQAIEESLPPNFELANERQGAVIDGDLLKALELSEAEEKRRLEEFKEEEEMPRKALELSMVEK

SEQ ID NO: 159261 - protein, 48 aa, Heterodera glycines
SSCPCCGNSSSWHTVKNQKLNFWQNVFFSYNKTFARFRACQTCTLTKK

SEQ ID NO: 159262 - protein, 105 aa, Heterodera glycines
ISISPQNNKKILWQIWSKSPSSPIHPLKFVSVQNHPPPQILAVQQLFVEHNHRIVKAIIVLRGTTQFENGRETIAQVDQSVGVGHGGAHGHQLGRDFKQMLDPDG

SEQ ID NO: 159263 - protein, 125 aa, Heterodera glycines
DTIIQSLQLGSYVGIGSVECILLLLPFRGVSFASFPIHRSFVVSFHRVLLRPFTGISVVLLAVVAVNNRDVHFQRTIRIRVAKKRKDGEQHFRNGQRRRPMRRLQDVQTNATLLVDVRMVNGRFE

SEQ ID NO: 159264 - protein, 29 aa, Heterodera glycines
FFFFFFFFFFFFFFFFRGLNLFKKIQNNQ

SEQ ID NO: 159265 - protein, 77 aa, Heterodera glycines
GHTYANLLRKCRSMNRSVCHRVDPTHIIIRAMDGSNGGRKNGCLVFRFYSILFYLLVFQNKFFPQLFKLFVVLNLFR

SEQ ID NO: 159266 - protein, 85 aa, Heterodera glycines
KNGKKKEPKPRKKREISGKFYKIKEKINQKGKKYSNREWSKIEGKIAKKLGINRNNIYEWIKKIGLNQRINKCYKIRRKLLTLSK

SEQ ID NO: 159267 - protein, 79 aa, Heterodera glycines
RQRSEIPRPIPNNWQMGRNQSVCRHLQVKQRKMMEVIGPEFWMFWLGFGCQYVKMFFLNQMFSIIFILLLKKKKKKKKK

SEQ ID NO: 159268 - protein, 46 aa, Heterodera glycines
FFFFFFFFSLFFFFFFFFFFFFFFFFFFFFFFFFKKGKWVFFLKIF

SEQ ID NO: 159269 - protein, 93 aa, Heterodera glycines
ILFIFNDMPKMINNILCHLSRFVPFVICPVGHYSAIWLSISVSSPMPSNSSASPSMASYSSSSPFANWSKSDFSAPKLSTASVPKLFSFATTS

SEQ ID NO: 159270 - protein, 72 aa, Heterodera glycines
NRVAERAAARVYGWLPENNHPKAIYDAAEKAKNTPKPPGDYNVERVAQKAARLVYGVLPIGFQPNFAGPSTN

SEQ ID NO: 159271 - protein, 72 aa, Heterodera glycines
FPQAANQNRTKGAGNKRKLRGHYYANFHLNLHMHIYTHLFMFSFGHFGLNLIFINLNIFRCFIYFWFLPSKE

SEQ ID NO: 159272 - protein, 56 aa, Heterodera glycines
NVRNVSYYCKIAHFLMNYSMMQLIFEKMCQCFFWHSWTVLINWKVSKKKKKKKNVK

SEQ ID NO: 159273 - protein, 138 aa, Heterodera glycines
QLIPLSSEAGLRPHVVNMAGPLIRILGERHPVPVKVAAVNALLRLLENVSLLLKAFLPQMQSVLLKILQDPSFQNLRQLASQAVVHLIDLHPKPETILKELNKLREADKSPEGLDLHTDKLINELIAKIDLKNGNTSK

SEQ ID NO: 159274 - protein, 74 aa, Heterodera glycines
EAIGRSNVQGGNAAGLVPSHVTNRSMAPPPPPVQFEMGANRLEKMRAHLRELVEKMPVNESKGLSPSGPDPHHH

SEQ ID NO: 159275 - protein, 99 aa, Heterodera glycines
MVNITGIASSKAPPFSHGTPWANRHHIHQPFQSRPMTCCFGMVPTPQVTMGACFVSLLHNIPIHVNCCAQYFHPANRKQFMIIGAEQGIFAMDLTHLTT

SEQ ID NO: 159276 - protein, 80 aa, Heterodera glycines
RNSLPSYTSTATNLDMADDNDDYQNYYYGTEASSREFDASAEEEDDLYEEEVGAMSGQTDDYGIGSGQDEYGHQPVDVPP

SEQ ID NO: 159277 - protein, 94 aa, Heterodera glycines
WEIHTTSSSTPATAQQKSQFHTFNRLSHEPVHSAVPSLGTPKHQIRLSWPEIIPVLSTRIESHKLQLKSSHPTNSKRPDLEKATLVTPQMMLSC

SEQ ID NO: 159278 - protein, 127 aa, Heterodera glycines
FFFTLQFYCPNNLFMYNTKLDIAFVRSQLEMSADHLSTVALFTIRYEHNVSIVVRALKHGVSRMIQFRAKVEQTDGAKQTIFEPTVEADVVEHVVTDGAHLTDLGHFLQADQTNGAPVGSLHFAMNE

SEQ ID NO: 159279 - protein, 142 aa, Heterodera glycines
MIPSVGQPQPQQHGLLLTVSPKKSTAVVTDAENASAIVPNGDDEQAMTNSANKKRTDYLSWDEFFMGVALMAAQRSKDPITQVGACIVKENSIIGIGYNGMPIGCNDDEMPWGKGDANPLNNKYLYVCHAEMNAILNKNSAS

SEQ ID NO: 159280 - protein, 197 aa, Heterodera glycines
GLTLVIYSLDTVLLMLFPRPSAGVGMDFGPYLKLTAIFIVLSTFGLGLSLAHMKKMLQIGKELAKQNETTKTASATFVGQDNLRTLRAFTGCQAGLSVLSIYVAASLAFMKFWYVRTHLVQEFSCSLMAITLAVVQFFVLRMANGGGLLLIKGIVLANACQIVQELNMSLSAFYTFFYAGRIYDAVEERTSFFTGPE

SEQ ID NO: 159281 - protein, 122 aa, Heterodera glycines
MKLAICNLVLDTTTRPNFVADYLLYFMNKYRDFSYVDFLRIREPSDDIKQVLIAVFKLRNCMSDSYKVPGIEVTWDLHSAALQFLNLFRKYAKAPFLDRDLLGFRDSWTGTESNDVESKKAH

SEQ ID NO: 159282 - protein, 34 aa, Heterodera glycines
LLKYFNNISRNRWLIIKVFGVLKAFFVFFGIFLT

SEQ ID NO: 159283 - protein, 180 aa, Heterodera glycines
VNRNSLPIPQKALPKKVVGFKSISIKYIDQNVIAFLRHFRQLFASCTINLDIYTDDDRTLDLMLRNIWPMIAKNICSMELSGHAFSGLRQFVPSILNDCPSLRVVDTYFGGFFAEFPADDNANASNGQAWAKWLFTPRPDNVPKVFKCWLDGNLSSRIGALKAAFANASSPVNFIVVIWQ

SEQ ID NO: 159284 - protein, 204 aa, Heterodera glycines
GSTPVLQTTTAPKQITDKAKCNDKEEIRRVCESCEEYACVPKDGFVANSACCTDNFQFQCCPNNQQQRHPGHCANETKKIMDLCGCGTYWCRPNKGYRGFGCCPSDYEFVCCHVGNQTIQMSTVTTVTPELTTTTTLPTTPNLGKIENDPPLFCALKKTCNPSNNMTGSEKFGRRFNTHKKKCAALIKRQQSAPSTELKSELRQ

SEQ ID NO: 159285 - protein, 70 aa, Heterodera glycines
  unsure (1)..(70): unsure at all Xaa locations
LFLPVFALLQFHAFFVRXITSQIVVPTNPVEHLQLLFVLRWLHNRRFRRINLDIQIVGQRHSLFGQLDCP

SEQ ID NO: 159286 - protein, 114 aa, Heterodera glycines
DSILSMFERKWKGQQVEEGEKNGTENDERERADRTVDEKMDSLEALVVFIRRHRMGLIQPPQQLRFCWKTIVDWLVKNEKKEEKGKEENQSPAKIATELNHINEENWQIIDKCV

SEQ ID NO: 159287 - protein, 165 aa, Heterodera glycines
  unsure (1)..(165): unsure at all Xaa locations
MLVQLVLLAIIGISFVGAAAPPYGXQLSVSGTKLVGSNGKPVQLIGNSLFWHQWYPQFWNTETVKALKCNWNSNVVRTAMGVEQGGYLSDANTAYRLTAAVIEAAIAQGIYVIVDWHAHEANADKAIEFFTKVAKAYGSNPHLLYETFNEPLDVSWNDVLVPYHK

SEQ ID NO: 159288 - protein, 138 aa, Heterodera glycines; identical to SEQ ID NO: 158760

SEQ ID NO: 159289 - protein, 38 aa, Heterodera glycines
VRPPIDEYLCDLSRDKVAKLSKNANYGTQRKFRPWESP

SEQ ID NO: 159290 - protein, 105 aa, Heterodera glycines
DAEVMALRGASKVLDSFDLSGCILYTSCYPCPMCLGAVLWSRISNAFYAAAPTDAASVGFDDQNFHEFVSNPKKYEKLMALEHLPVEGHMKVFKMWEQRDEKRMY

SEQ ID NO: 159291 - protein, 42 aa, Heterodera glycines
KFYLNYKLFYGHIKSEKLKFFSSNQASHNFSISFSMVFGSLG

SEQ ID NO: 159292 - protein, 134 aa, Heterodera glycines
SANFRHLHLLRIFNRIVRLSPRCVCQTTELFSERFLSTSFLLLQKRFTPKPTGPVRRVPAVSIGSDVRQKHSERTAGKGDGTNGFWHPWNASDDYSEIKKRLLRPPKDFSELREIIRKDIERMAQKKKKKKKKK

SEQ ID NO: 159293 - protein, 113 aa, Heterodera glycines
GDTFFHLSHHFKIFPKMRVLPLLFSALLLLSVGLCFAQFDQSPSAALNHVRAKRGYKPWKKQSFSSSSSEMYRRRRPSGNGHYRDYNSYGSNGYYRRKPGILERALGKITRSY

SEQ ID NO: 159294 - protein, 91 aa, Heterodera glycines
FSRRPRAVRVAQQQFQFVGRAVAPTPSDVRVETVVAQQTQKNIEEIPLKRGQTDGMGNDVAYNYRHFPYFISQLFVNCSFYLCQKKKKKKK

SEQ ID NO: 159295 - protein, 107 aa, Heterodera glycines
GIHCISSYHFIPKMSFLRLITFVLLITLCSLPSLVESGLIGIVGTPVEAAWCGVLGKESSHCPTAGGGQHGGGGGGGGGGNYGGGAPGGNYGGSSGSYNGHRARRFP

SEQ ID NO: 159296 - protein, 155 aa, Heterodera glycines
NVPHLCASFFRLLIFVSDIAAEGIAQSPPQMLDDILRCVKAALDYSFGGDRVRSALEIVNGLAANCVEDSVKKTGKYATMTERLLALVPKMFQLAMEYSFELDLLSDASSALFSLILLGPDSFKAFVTHLLNLPSNQENRERLEEAFSQLLTPFP

SEQ ID NO: 159297 - protein, 179 aa, Heterodera glycines
GDAAEKFPLSAFTRPPPTKIVKADGDNDGTPAPPLIQTATIALQSLLRLLQQQKKVRVNALLVTQIGVNGPEYGEFACVNVRLEHGYGLRIEGRFARMTRNRRNRQIQPLCEKVCNAVVQLLKCDSAASATARIRRANCWARTACCWASGRLEDTECAGPCHSEAHSDEHGGGRELTEN

SEQ ID NO: 159298 - protein, 37 aa, Heterodera glycines
FFFFFFFFFLFFFFFFFFFFFFFFFFFKNLLFFSGFF

SEQ ID NO: 159299 - protein, 100 aa, Heterodera glycines
VDSGMTPLKKFSIMSEDDYDAKRVEYGDEFIALMGPEGIKKLLEEMDLDIEIDRLRNDMTGSELKVKKNSKRLKVMEAFKKSGIKPNWMVPKKKKKKKKK

SEQ ID NO: 159300 - protein, 57 aa, Heterodera glycines
PHHSSSSSPVMPSSPKHFFLPSSPKHHFFEDEAEVKQSPPHHHSFSDWEKEEQKLHA

SEQ ID NO: 159301 - protein, 187 aa, Heterodera glycines
MSSPSAGKRRMDTDVLKLIESNHEVVITGGLNEFPVKFYGPKGTAYEGGVWRVRVDLPEKYPFKSPSIGFMNRIYHPNIDEASGTVCLDVINQSWTALYDLSNIFESFLPQLLTYPNPADPLNGEAASLYMHKPDEFKAKCMEYVRKYANKEALEALDKKTMKGTENEGDAGEESDDSTISDFYEDE

SEQ ID NO: 159302 - protein, 35 aa, Heterodera glycines
SFPFQLFVVTYSCHNHIYYPINKPIMQKKKKKKKK

SEQ ID NO: 159303 - protein, 72 aa, Heterodera glycines
MWRLISTEESKSAVRYTSLNPKSFGWTEKMRWRNSSCGRPGALCCCHREKKETEEQRERGGRNLPHCCVQSS

SEQ ID NO: 159304 - protein, 125 aa, Heterodera glycines
AGQSIEPETLIPITRFATRNTRVVLWGDHQQLGPVVKAHFFKAYKWCHLSLMERLMAPMRAEENFFRINGQKRVYTEGRTFCQLRDSYRGHPKIIHFSSVNFYDGTFRAVNEENRKKKKKKKKKK

SEQ ID NO: 159305 - protein, 105 aa, Heterodera glycines
  unsure (1)..(105): unsure at all Xaa locations
IGSSLHTDRSRNTNRPRISRNGSVPGSDGRCVQRAGTYSERVDDSPLQGIPRSRTIIAMSDPNHGKFSPVYQPLSGKDKHADFASVARVQPRTSKGXHRPVIAQL

SEQ ID NO: 159306 - protein, 65 aa, Heterodera glycines
IPKFGVVFLSLHFLHLLLHFFNGRLCGGDEIGGRSEISRSLPRRLLLLHWRHNFQPMDRGKPNAR

SEQ ID NO: 159307 - protein, 116 aa, Heterodera glycines
HFQIYLFFPMASLKIPLYVIKGQLTFFLFCPNISRKLLTPQVKGAPLPFSQKLRFKAIACLYKGDYPFFTLIFPKSLAPFPIFKGIWFHFYSELTFFLKKKKKKKKNKKKKKKKKK

SEQ ID NO: 159308 - protein, 70 aa, Heterodera glycines
KKRSATPCPPFCFSPSVQFPSHFCSPFTGALWKWTQWPPKGRKRRRGDERQKESQSRPMGIWLLRHIDIL

SEQ ID NO: 159309 - protein, 167 aa, Heterodera glycines
GRNVQLVIQKESANKMNLPAMGALLHTILEMPRNVVKVFITNAALEECAESGGEPTTQLFDSVDIVPYLKPKSVVELQKNPPSEKNELENEIRKQQFLLEHLHGQVQQMREERLAERTAKEETMWEVQAAITMLKRRLKTLNEKGQRHDGREGEEGDGNVTGGTADG

SEQ ID NO: 159310 - protein, 70 aa, Heterodera glycines
NDSFKNDERIVKSEGNGGTDTTESPKAALVTEKQNRKDCDKTEKDSGSRQSNKLIAVSSVVHTVLLEPNQ

SEQ ID NO: 159311 - protein, 147 aa, Heterodera glycines
RHHRLINCGYDKSVLKRVDVKQLQLFLQGAVMPTVNAGLLAYAETFTAPAQQKRYGNKGLLRLWNALKTLLDELDEAMRVNEATMGNERREYQQMLRNAYENTVEKLNRAFARGRESPAMDKRRSMSIDRAKRSSKQGMLIRPIFAL

SEQ ID NO: 159312 - protein, 188 aa, Heterodera glycines
GVAQSSIDPAMFDASLRDHLNVTAPRTMAVLEPLRLRITNYRELGFIPAKSTLRVKQFPSSINESTDEWEISFDEFVYIEQADFREVAEKSYRRLTLEQPVGLRHVNLAVKIDKLERDEHGNPIELVVTANPVSSECKPKAFIHWVARPVLCEVRLYDKLFVHKNPEDPAEVPGGFLTDINPNSLHVL

SEQ ID NO: 159313 - protein, 193 aa, Heterodera glycines
GRTLRGKKYLAPLTTVGNLPFRRLCVELGAEVTCGEMAIATHLLQGLPSELSLMKRHPSEKIFGVQLAGGYPDSLGKAVQLITDNFNVDFIDLNLGCPLDSVNEKGAGCSLANKSNKLVSVLQCMQKSATGVPVSVKMRYGVKEGERTAHYTMGTIAERSPPQLLTLHPRSREQRYTKAAEWDYVLECEQRIN

SEQ ID NO: 159314 - protein, 49 aa, Heterodera glycines
FFFFFFFFFFLFMGLLNRKLEEKNKPKFFIGNEKLEIFSPKIKSLINIV

SEQ ID NO: 159315 - protein, 65 aa, Heterodera glycines
PVKTEQKLIAYNWGDKAHDDGNYGTMKLLDLMFEIKLKRNSLRELTTQSFPLIKLSDFLRKFSLD

SEQ ID NO: 159316 - protein, 50 aa, Heterodera glycines
FKSFFVIILLKSKKCLAIHSFFCIFLLFAKSLLYFDKKCHFKKKKKKKKK

SEQ ID NO: 159317 - protein, 60 aa, Heterodera glycines
GELMRITGTYALNDQNRLLAVVPFLVRTNFNGARVVQRALISLVQCCIVRQVDSQPSMVT

SEQ ID NO: 159318 - protein, 82 aa, Heterodera glycines
FFFFFFFFTKTNTFISGTTKKARINITQFNSIQSHRIKLKIVGDRNTHIQKYRRVLSLHLELLFRDINKHPSPICNYREQEN

SEQ ID NO: 159319 - protein, 74 aa, Heterodera glycines
KAQVFFIKSGLQQFLNFLLNGLRFFGRRITLHHFAVFIDQKLGKVPFDRIKAEDAALDPLQIGVNRMLIGPVDV

SEQ ID NO: 159320 - protein, 182 aa, Heterodera glycines
GAGFIPNWQHLQRVLALFALPCMGLILFLSESPRFLISARKMKEAKEAIIRMHKFDGRPYDEKALDALLEKELQQMLELSVTKKKYNYLHLFYNTKFTMYTLSVSFSLFVVTLITYALVYNIEKMSGNIFLNMIWMGMFKYTMNLAIAFADLKFKWLGRKLPHLLSEVLVLAALGLFVTLRL

SEQ ID NO: 159321 - protein, 103 aa, Heterodera glycines
HDIIEQMLEEEEFEQCLQKGAILCTELSKCTPSADEGQRVGGDQRKMAFQCRQEELARQKQWRRKDQQREDLSARVGTLIPIVNNSCPVSISNGEEAMSKDCY

SEQ ID NO: 159322 - protein, 38 aa, Heterodera glycines
FFFFFFFFLHAPFLTFCVKNLWMAKQKKWGKKRSKVRA

SEQ ID NO: 159323 - protein, 117 aa, Heterodera glycines
QQQHQPVAAAPMHLVNESVKQYIAQQLEQTQLMTTSKKKQQVVQQQKQMVEKNNDEGPFLIHQQNWMTERRPVSPSSSSSALSVHQPLFTFRHSVGSSQAVRRDIRIGTLFSAFDQK

SEQ ID NO: 159324 - protein, 137 aa, Heterodera glycines
VRFVSIGHCRPWLIRTREGQGFVPNPWLFPSGRVNWKVLRWMLEGVLSVVFHRSGLTQQELVSHFAPVLQPVLTLELVQILSKLGCLSQFEKILTEARKSDPFLRFGKAKPVRFVKTNIDGLERFVLFTEFKLKSFL

SEQ ID NO: 159325 - protein, 154 aa, Heterodera glycines
MTPDMPGFQLGKDENKLGWCTQPTRILTFEDVKVPVTNQVGADDEGFTIAMEGLNGGRVNIAACSLGAAQMSMDLAIEHTKVRQAFGKSISQFQWTQFKLAEMATKLVTSRLLLREACHHLQEDTPNASAMSAMAKMYITDEAFTVVNQALQMF

SEQ ID NO: 159326 - protein, 67 aa, Heterodera glycines
RFDFFRASQIPLIVPISQFSFQLHLTSFCPPQLMCVGMSCFSSCFVIFSLQFIKLCILQKKKTKKKP

SEQ ID NO: 159327 - protein, 55 aa, Heterodera glycines
FFFFFFFFFFGKINLSSFLDRNGTVKISYSSLKIPEKFNYLTTVDAKICCLISGI

SEQ ID NO: 159328 - protein, 23 aa, Heterodera glycines
FFFFFFFFFFGGLDLSKKIQNNK

SEQ ID NO: 159329 - protein, 32 aa, Heterodera glycines
IHLSCLSALIVYINNIVCMINRDSKKKKKKKK

SEQ ID NO: 159330 - protein, 158 aa, Heterodera glycines
GAKFRTLFAYFEDARKLYETRMKNASNGNNEADCRIKNLEKELKVLKRQLSALGDLLDQFLDTSLAMRERTLRMEGELGPRLERLEAQNVQLRANLAAMGQQTHKSGDNEQRNEAEQTIETIHFDELSISDGVPLQQNVQQQPQPPNVSNCPVNDEGG

SEQ ID NO: 159331 - protein, 102 aa, Heterodera glycines
HFNVFNTHLNKLGMECGIFVHNDNRSPITFGPSDQSGRPLSSLSLPPFRCRLGCPGAGRASVRCTGAPAASARASRARAALRAHSPAKCWPTPPICALCPPS

SEQ ID NO: 159332 - protein, 55 aa, Heterodera glycines
TKRRHTHERLRMGLAVIHGEEKGVQEDGRQSAPPSPTDKRKGVSYQLFPSQVAKE

SEQ ID NO: 159333 - protein, 73 aa, Heterodera glycines
FPRQKELPIPTKSLTASKKVRLIRRETNDWRLGEWQIDNLHKENIKFRVVLYIYNDAETGEEAITQFSMDRVH

SEQ ID NO: 159334 - protein, 175 aa, Heterodera glycines
ESIRRKKLSKRDRQVNRQNLPQIRKVIQFQLTIRSLKVVFVSRLKVVSSKIAFHRHQSVAHRRLPHNQQRKKAKKSLLVWPALLPTVFRLGNSFAMRQPLGRVLSPLSPQSKRSKKMITLKLSNRKSKSHRKRRSTSRDFACQQSSLAATRERTPKRNELLPQTTHSSHFCTKKR

SEQ ID NO: 159335 - protein, 78 aa, Heterodera glycines
MYKFLFFPHFCILIKAISGLHCWNSNMILLSEMPEKGSVTVHQCPSGHQCVTANCWLGVGNYIVQKCVPDQPGARNYC

SEQ ID NO: 159336 - protein, 111 aa, Heterodera glycines
HSKHIGIPPVARLLVRVRRVLPVRLSLWLYQGPSAAVRAFEARLFVLLGPSANLWRSQLVREAYPQSASRDERIGQNEEDVLIEQIMYHCVMSRMILCCDSYIMCYVLYVE

SEQ ID NO: 159337 - protein, 156 aa, Heterodera glycines
TKHEGNGGGGGANVRKVMEENSVLFWSQMRSMGLLDDLLNTLSTTLERLKHIYLNGGNAVSEEFAARRLSGVALALDLCTLFSDKIHNRCIQATLETNLIPKELLELQRKQEEQKRKLESAKRKSQMFELLKNGNASGEGRSADSPPEMKKKKKKK

SEQ ID NO: 159338 - protein, 146 aa, Heterodera glycines
  unsure (1)..(146): unsure at all Xaa locations
MLIKPLFTFSILLAFFGQIFCDILGREQSAGAKGLLTCEGKPAXNVKVKLYDDDRGIDADDLMGETKTNDKGYFEVTGYTSEYSTIDPKINIYHNCADGYKPCDRKFTIKIKDGYVSSGKNPSKLYDIGRIELEGGFSGESRDCLN

SEQ ID NO: 159339 - protein, 169 aa, Heterodera glycines
GDVTPLSLGIETLGGVFTKLITRNTTIPTKKSQVFSTAADGQTQVEIKVFQGERDMALDNKMLGQFSLVGIPPAPRGVPQIEVAFDIDANGIVNVSARDRGTGKEQQIIIQSSGGLNKDQIENMVREAERHAAADAEKKETIEAINHAESVLHDTESKITEYAEHLNAD

SEQ ID NO: 159340 - protein, 132 aa, Heterodera glycines
MPRALINRQPPVISASTKKTGRKRMSASSSAFVPEDEEDAPAAYRLPSNAMGDARGQKRKRSVSSSSSSSSVSSSDSSSSSGSSSSSSASSHTPLKNAKPNASEHPSKRTPNEREKSNDMSGSGGTTISCST

SEQ ID NO: 159341 - protein, 87 aa, Heterodera glycines
MSAMVGGGEEKTFEAFLKGLDEKKGRKLMKKIMKTEVSDGSDIEKAKKQRRKQKKEEKLKAAKKHKHRRSSSRETSRKRKEGKPPPH

SEQ ID NO: 159342 - protein, 69 aa, Heterodera glycines
GYFVLELVHIVWDFGGRLFVLRFLLPFLLAFGSLLFLFFLPGAHSSYVRHSQKKLLWCFYWLGLGVLSS

SEQ ID NO: 159343 - protein, 71 aa, Heterodera glycines
LQRISQTEALTIKDLAFLTLLTSSVFVFNEGRKYFHLRRQRIKQQFQGEGAQFASVDSQQKFKRANGGSRR

SEQ ID NO: 159344 - protein, 94 aa, Heterodera glycines
AAVVCNKNVVRKGMNYVNAYQTEVSSAAEWDSGQLYDELLLFTTPPTSIPERDDDDELPLRVMKLEVQTCNKNNANNFMPSNPSGPKKKKKKKK

SEQ ID NO: 159345 - protein, 57 aa, Heterodera glycines
KHPVSAVLWTFKRVRAVSDHSLLRSVRVFAVPPSVLLILRTALAQLQIFRQNAFPYE

SEQ ID NO: 159346 - protein, 90 aa, Heterodera glycines
PIKQSNHCVRSIILLPLTPGLFLGFFSSLCRFLFWWLGLRFHRSPPPKSAVLVLRVFRHRLFWSNLLIVHPLHVPPALADVQIDRNAAQF

SEQ ID NO: 159347 - protein, 39 aa, Heterodera glycines
FSNLTVCLVITFHFSLSFFFNFKGLKLSPLKKKKKKKKK

SEQ ID NO: 159348 - protein, 143 aa, Heterodera glycines
MLRAYRASGISERMLFQMPYLRSNDMAQLVVQYREMKRECKSNVYLARSKIQGMGLYAKRDLDMNQMIIEYIGELIRNEICEIRQSRYIEQNRGEYMFRIDCDWVVDATMAGGLARYINHSCDPNCGTKILPVNDEKKAHLRL

SEQ ID NO: 159349 - protein, 188 aa, Heterodera glycines
MRKFAYFKLCQAVLTSVFLWQILSTHQFCGEFGEPTAFFNSAVSSSHCEQFTLIGMDSTTGEYGAMPDKQKWHMQLMASSGSGQPIDEQQQNHMDEFSSKLPTVGRHCIPIAFSLVKPWVRDNKSHLQKVADLFAIQLLCGLLSLFVIAMHVLDQPRSWGYESIDYERTTFCAVLWCCPALVSSVLLL

SEQ ID NO: 159350 - protein, 62 aa, Heterodera glycines
ATKSIRKIMEKYPGAYKRKSNYDFLLQFLWMNVKLDCLVGKGSGLLKYRTTARREERQQKED

SEQ ID NO: 159351 - protein, 38 aa, Heterodera glycines
YQQQTHCLCFVVFYFVCFQFIYFLEKNWFKKKKKKKKK

SEQ ID NO: 159352 - protein, 130 aa, Heterodera glycines
GKFETLLINQSLIFVKMLPIFRSGNTDGFSLISAPFLLGLLSAALLLVAQTAALQTDPSASDIDYEIVLPVASLPSLDSPRGTTLNWQDEWVRRFSPRLVVVQNGGWKHRTLPRNDDDAHQRIVLHKKWS

SEQ ID NO: 159353 - protein, 50 aa, Heterodera glycines
TQLLIMIMILTPPSITPLIFTLYFFFGLNIITGRQKKTIIPKKKKKKKKK

SEQ ID NO: 159354 - protein, 139 aa, Heterodera glycines
GYAAESRQPEIVEDLMQYFLSQGLKDCFSTLLYKCYEFLRPDVVLELAWRNNLVDYAMPFMIQTVRDYGSRLDRLERAEMERKEEVKEQQQRSGSLIEPQLMLTAYSTAATTPNATAYPTGGIGTIPPAQGFPSYPFYK

SEQ ID NO: 159355 - protein, 89 aa, Heterodera glycines
LIGLLIIGRFVMAPYTELLSVLMNVITRKCEFSADRFSAQLGHASQLCSGLKKMCKDNLSLPIDDVLYSWCNHSHPPILERIEALKKYE

SEQ ID NO: 159356 - protein, 122 aa, Heterodera glycines
AFTQTKKPNNISIFLIFPYSSIYSSNPSTSFILLRLLLTRGLVKHCCCFVHAQTQHFLVSKQQHNLGIFHLEKHSRDFADFLDITIPEATRNHRVQTLTKHLLLCGYVSLGKQLCVQRLLVC

SEQ ID NO: 159357 - protein, 103 aa, Heterodera glycines
HIRVMRMRCSLCDAGAFFCSDMRVHLMYRHCDKLNLAPDDFISPGTPCMSREKADLLTQLVDPYHPGRVMYTTGKIVSWANPKAYFPDPKSERNILGPALPGY

SEQ ID NO: 159358 - protein, 50 aa, Heterodera glycines
KGKFSNIKIHMIKKGASNGLTISQSVWRRQTEGIIIKAIQMGVLSQPFVD

SEQ ID NO: 159359 - protein, 102 aa, Heterodera glycines
DFATGPTKKFCEICRSWIDLFEDKIQVEKLMMHKRCFVCAICDCPLEPGNCSRDDGIIYCQFMCNDRVPVRFCSAHMMLGSGEKCQLLKEKWMKENEEKQEI

SEQ ID NO: 159360 - protein, 108 aa, Heterodera glycines
ERDSGGGGTTASSAGGGAANAKATGAEQQQLPHAQHPLDAVATDDVLRYVLESYNALSWLSLDPVTGARRSCLPVHMQAIQRLNLAVNTFWGSAEQNQQHQQQQQQPK

SEQ ID NO: 159361 - protein, 89 aa, Heterodera glycines
  unsure (1)..(89): unsure at all Xaa locations
LSSLKLRFYETIPNSDDDSLKTLCYQLLVPTSAANIGFAIGDFQIHVQPXRPGGYNFVVPELIPLLKHTMKSLNRIFVFFEELLSCRFP

SEQ ID NO: 159362 - protein, 62 aa, Heterodera glycines
KAQVFFIKSGLQQFLNFLLNVLRFFGRRITLHHFAVFIDQKPGKVPFDRIKAQDAPLDPLQI

SEQ ID NO: 159363 - protein, 159 aa, Heterodera glycines
MDTGDNFLTTLKILTIGESGVGKSSLIARFVDDKFDPDMAATIGVDFRVRSISIDDRIVKLAIWITAGQERFRTLTPSYYRGGQGVILVYDVSNRPSFENLDHWLLEVDTYCTKSDTVKMLVGNKIDAERRMVSREEGLQSAKKHRMLFIEASAKTREG

SEQ ID NO: 159364 - protein, 98 aa, Heterodera glycines
THKESSVIKVLSNEKIVSSKRWVLAQIVQVGRWCNHVQMVGPRCRGHVGVEQVRLTTVLQWGDQHVLHVERICTGAAHLFDRSARLGRRSVAFWRIWR

SEQ ID NO: 159365 - protein, 123 aa, Heterodera glycines
DLAFGDNALTLINYIAISYWLAIGLAIASLFYFRMKMPNAPRPIKVNLIFPAIFLLGCVALVVIPLVGKPKDTAIGIAIMLTSVPVYLVFICWKERPSFFNKASASITIFCQKLFLVSNEAEK

SEQ ID NO: 159366 - protein, 181 aa, Heterodera glycines
GGLSGSGKTTLFTKLINSKNCWDSFISLKENQFDSYATDNGQTLTLLDFPGSDSFKKTLCRKRLNEKRNSLKGVVFVLDSATFSKKDAAELLYDVLFESGNAVPVLIACNKQDIGHAKSHSLIKKALENEFGLINVSREAALSSISGESEKRILTKSGREFAWSELKNKKIDFFGVHHAKR

SEQ ID NO: 159367 - protein, 42 aa, Heterodera glycines
CVTGSNNNYPCRCKFTHPNLQCAGNFAGFGLGKPKKKKKKKK

SEQ ID NO: 159368 - protein, 102 aa, Heterodera glycines
GEVDKFQSSQSLTGKRTHKFTLWVDKYAPSTFLDLLTKDETNRIVLLWLRLWDECVFEKRGGKKWEGNHRRISQRNNANATSLWDNLEERDRTLRNVTVKGH

SEQ ID NO: 159369 - protein, 155 aa, Heterodera glycines
GVSTPFIIPIFSLTKHLNNFWKPKHSFIHSSFIMARPRGSGRDPFKARSARARRRAGNKRKAAAGTAANVQAANRRPICLICLKKMTQVRQVRTICDHVFHYVCFHRWLKYRLFCPVCLLNFRTELYHSGNAVFEGAYDDGHVVLIPDGEQSNSG

SEQ ID NO: 159370 - protein, 130 aa, Heterodera glycines
MASPGDALLALQGKRTTGQSIRTQNVMTAVAIANVVKSSLGPVGLDKMLVDDVGDVTVTNDGATILKLLEVEHPAGKILVDLAQLQDEEVGDGTTTVVIIAAELLKAADELVRKKIHPTNIINGYRLACK

SEQ ID NO: 159371 - protein, 118 aa, Heterodera glycines
GDGANSFLTRFGWSILDYQATELFDFALQLANPNSPTLLSKSHYYAKVRLQYAQLLDELGGFKHAVELYRLENSNYSKTPSPPPLVPSVHKTKLAHLKRQDHEPTPAVAPAPPTFLPV

SEQ ID NO: 159372 - protein, 139 aa, Heterodera glycines
NHHSPNGCSLHSSHHHVQGASCDGHSQAVLLNNQTLYISGQTGIAAGSTNVVPGGARAEAKQAMTNIGEILTYAGSSFKHVINCNIMVADMSDFQAVNETIKNFFTEDTYPARSFFQVVKLPKSAYVMIDVVAIVQGQS

SEQ ID NO: 159373 - protein, 49 aa, Heterodera glycines
FFFFFFFLFFFFFFFFFFFFFFFFFFFFFKQNFFKWEIFPWAQKNPKSF

SEQ ID NO: 159374 - protein, 126 aa, Heterodera glycines
GAPPGWAPPPPSQQKVRLLSASTGASQLSLHSREQFPILSGASSSTAQQQQNNIWGQKATIDLFKNKPEQLRTKKEEPKRSKVIPPPDIWPEGMQEQLKARELGLPDPHPIVPPHWLNPPKKKKKK

SEQ ID NO: 159375 - protein, 79 aa, Heterodera glycines
SLPGEVLDQIPAPPGFERLPDDVKNRVKQINRQTNKAWAVKQKELQEYVKTLPQEQRAILMMGPMGGPPPPPPSFGRRR

SEQ ID NO: 159376 - protein, 112 aa, Heterodera glycines
QEGESRPYSPSSPSSSSSLSFSSLSSSSSFSSSSSSSSSSSAFPCASPPCCWASSSLSSFISPNSICARASLASCHRANVLCQMRDTAVENNLPSSLPSSFWWSSKVPNWCS

SEQ ID NO: 159377 - protein, 58 aa, Heterodera glycines; identical to SEQ ID NO: 159209

SEQ ID NO: 159378 - protein, 120 aa, Heterodera glycines
FFFFFFFFHFSAIYFYFNVINFDNDAGNKCTILLFVVSQLYCICCLFHFLLLLSDASHLLRFSQIMRLQKKSELVHFSFFGGKCGHQTEQSLLRVQLQLALLSVRNIPLIKMRNFPTFAQ

SEQ ID NO: 159379 - protein, 130 aa, Heterodera glycines
KKYGREADREREESQWKKYGREVAREREKGEVKTAQKETKEQQGEKQTEKMINKTEKPKEKMEQFTGEEQFGMDVWKKIKQFFEMKQHKENGKGDEKTKQYSAENKKGWREMGNGKETKQNRKKKKKKKK

SEQ ID NO: 159380 - protein, 62 aa, Heterodera glycines
ISRQMKKIVCVPCHSFHYPSVSGRRSMLLPLAAAVPLLFVRIAGPRGFVANARHPISGRVVQ

SEQ ID NO: 159381 - protein, 85 aa, Heterodera glycines
FFFFFFFFEKNNIFVPQNLTKSNVAFNKQIQFENELMIALLQYISELEQNYSLQFDNLSSYCSPSPGFAFASSASKRALIAFLLR

SEQ ID NO: 159382 - protein, 221 aa, Heterodera glycines
  unsure (1)..(221): unsure at all Xaa locations
VNXRNHLGASCRTIREEMNEETDEFLEMFSEEIVYYDGARTQSGFYAVEKVAFSNKLYRAFVNGPSVEMEAVPLNAESLDPRFVFLLDCDKVIWIWSGARSKVTIANKVRLFAVKMNKRDKKGKAEIESCNQLKTPEEFWLALTGSSKRPDEPIFEHILEDRKPERKRLYEVQLGMGFLELPQVELRNGVLHKELLKPKGVITSEFAAACRSTIWRAPNAW

SEQ ID NO: 159383 - protein, 138 aa, Heterodera glycines; identical to SEQ ID NO: 158760

SEQ ID NO: 159384 - protein, 205 aa, Heterodera glycines
GFQSQSQSALAAGVSGEALQNIRTVKVFAMEEAETELYRKEVQTACSLGERLGVGIGLFQALSNFFLNGIVLGVLYGGGQLVADQQLSAGDLMSFMATAQIIQRSVSQFSLIFGNGIKAWTSCARILQFLRIDPNCHNHLNGNEQIPRHSLIGDIHLHNICFSYPTRPEKAVLNGIDLHFAGGQTTAICGPSGAGKSTIAALVER

SEQ ID NO: 159385 - protein, 181 aa, Heterodera glycines
GKPTKSFKNAEVTDRIGKFAKTYGTTPVENMLSHQVERFKTVGEKQIIQNPSDEQKSKVEKCSFENFEVYSIDILISTGEGKVKTHDARTTVFKKADDIVYSLKLKASRAFLYEAQRRFGVMPFSLRQFEDEKMAKVGSTECSKHDLMQPYQVFYEREGEVVAQFKCTAIIMPSGIFKITG

SEQ ID NO: 159386 - protein, 117 aa, Heterodera glycines
  unsure (1)..(117): unsure at all Xaa locations
RLFIVNITSLLSVKAFPSFTQYXLAQAAREAYFRAFAVEHPKCRVLNYAPGPVDTEMHAEVKEKTYDSSVREVFANRRHDANLHRKLLKPEETVRRLIQMIVEDQFESGARVDYFDF

SEQ ID NO: 159387 - protein, 183 aa, Heterodera glycines
QWEPLAGQNHNAGQREQRLAVFLLTDGGQLAIDSNVLFDAEKVHHTHCLSVHFEANVVHLALTDRVDHNHSRRRVGQIAADAAEESAEFDPKTVHLSRVISVGALLLQHPIDNVLQIFVGKKGTCFHVRHQSRFGLSAVVNDSHAFCDSLPRDNARRLLQLFADLSLEETTRADNVMRFCVDP

SEQ ID NO: 159388 - protein, 171 aa, Heterodera glycines
GDFVGCGINLATRRIIFTKNGQPLNTSDLFLSPPFGLPLFPFISLSDSGDLIETNFGPKFEFDPAKVQQQASSNFRQNYWDANFCHENLEIIGNKSLIVHYKKNSYDAWRSVFAKYPILLNKDSSNIFYYEILVKNKNYWFISFGFAVKQKTKLDGIILYEKGIYVYESDG

SEQ ID NO: 159389 - protein, 64 aa, Heterodera glycines
NKFCFLNFILERLILLIIIPRAFHRHQMLFRRLAGFQQHFYCCCCLSKAALFRCPTRSIRTQCE

SEQ ID NO: 159390 - protein, 76 aa, Heterodera glycines
SHRNNPVQTFNYFQSVKNGEIITMSSFPADLSIDGRKIFLSRIDHFYCLPLLISLFSMSLSVGYIMFKNYNFKTYT

SEQ ID NO: 159391 - protein, 84 aa, Heterodera glycines
KLPFHPHLLFLKLKNQMQFNRQQKKSSKYFTSIFISDWTIKRKLNFFSNKNYNYYFRLLNKIRILINFKMTNPLVFKILIFCFR

SEQ ID NO: 159392 - protein, 39 aa, Heterodera glycines
FFFFFFFFLFFFFFFFFFFFFFFFFLLFPPSFSSPSFSL

SEQ ID NO: 159393 - protein, 61 aa, Heterodera glycines
FFFFFFFFGSRTIHRKIKIIGTLSGIQKWCGVKGIMELFYTQSDQRQTNEWIRILSLSSIS

SEQ ID NO: 159394 - protein, 76 aa, Heterodera glycines
GRSVDISDAVSGVDFASLSCLSTITQSTSDELGKKSKGSPTIELLRAESDCLPPEWLLPNSSDIILKPLIPMAEHS

SEQ ID NO: 159395 - protein, 68 aa, Heterodera glycines
GPHGPGFGSTQVVNSNAGEMEESARPPPPNRQQEEEHSEVKDCFRCCCFRRRRRKVPQQNVKCPLTFN

SEQ ID NO: 159396 - protein, 58 aa, Heterodera glycines
MAGRVRWDTSLWTGVPNHQIRFFVANFALTSAHFKAPVGRRSFFAQQIIRIKRVSLHP

SEQ ID NO: 159397 - protein, 177 aa, Heterodera glycines
GQREPIPGVNPLPSSANSSGSLPSSLYPRLPEVSLSRPTHTYSAVTSSPNMSINKSIAMSPGRAVAVQIKESKNEDVSRFHRLRRILGLLDREKPVPDTVVDLDELRKECWLGIPHRIRPLAWRLLSEYIPTSLDRCEMTLNRKRDEYWHYVEQYFHTRYDEQHQITFRQIHIDIPR

SEQ ID NO: 159398 - protein, 163 aa, Heterodera glycines
MCFQWLDTAFLVTVSEKYNAANNAGATVPSPPTTVAEQQQPLENGGGQVAPPPMVNGGSGKLHQIVVESEPKKASVVVDHSPQKEPEKKPDAPSDAAPTVVDSLPSPTSTPNKKDEVMAISAVAPLSSIVDVPKTVDTAPPPSLSQPVAATAAAAPPPTSEQQ

SEQ ID NO: 159399 - protein, 170 aa, Heterodera glycines
QNRTNLISKIIMTKSKSSSGTTRTKKRTADQVVKTVFRRKICLFCFMASLIVFALVLGLAITLTVITVNNWKEIGVLLSKQSALKSRSDIEAFYEIDCPIYSDNSKLPDKWDQFDLAFCNRYCDRNQMFEFMYRQLDPNRKSSAKSKDNQELMCPIYIEFKQCQMEEGGH

SEQ ID NO: 159400 - protein, 76 aa, Heterodera glycines
AVEKHCFVCRCLPNSFMCRKSCDAWALRLCLIRAVAVSPRRGFQKYRRSIDKASCRYISFKRRIPEANNFECIQET

SEQ ID NO: 159401 - protein, 176 aa, Heterodera glycines
MIRRRNLRTRSIRMLVLDEADEMLTKGFKEQIYDIYRYLPPNAQVVLLSATLPHDVLEMTSKFMTDPIRVLVKRDELTLEGIKQFFVAVEREEWKFDTLCDLYDTLTITQAVIFCNTRRKVDWLADKMREANFTVSSMHSDTEQKDRDAIMKSFRAGESRVLISTDVWARGLDVPQ

SEQ ID NO: 159402 - protein, 121 aa, Heterodera glycines
ICTWPGFRLFFTIAFPPQNFLIHVNNVKHYYPYSCIRRANCSFAAVFEVFFDAVTSAVPSVRSFVRLVVPSSSPLPPTLPQTAIGRAKLTSLVGEFRAQCPSLAYRVFQATNNKRTQRHRH

SEQ ID NO: 159403 - protein, 111 aa, Heterodera glycines
IKCTHNTNHINEHFVSAAFCLSIVLSKSSLFSFVPFHCEKDGALAVRTPTGCCIRMSCKNSAACSGVSGPFFSSPRSFSPISLPIRASGTLTSIGRNWKFTMCGRRSFTSF

SEQ ID NO: 159404 - protein, 129 aa, Heterodera glycines
  unsure (1)..(129): unsure at all Xaa locations
YNLGFARAMFDLAAAAAGHAGNDTEWQNMKSKFVQESQAIKAIGQEMNIEVTDVHIGHPSKGISAHQNVPSPSHVIANPGQHSSVGHGKENTXVVIGFRFLRAXKSRKIRRKIHSTENHFVDMSNTYLK

SEQ ID NO: 159405 - protein, 123 aa, Heterodera glycines
FFFFFFFFFTLSSIYIGKKNIDNNRRFAVSTSFDGFFCPVSSLSQITAADTARAVPRPAPSALRRRCCRHGTPHDLHRRPNCGHSGAGRIRSASLPPLPNSEQSQADPDEEAPKKAIYCICSR

SEQ ID NO: 159406 - protein, 52 aa, Heterodera glycines
DSNDNWWEEPLRRQRRRRRRTVLILGLIEFFRENPPKNKKIQMFQIQKIVKK

SEQ ID NO: 159407 - protein, 107 aa, Heterodera glycines
GIHCISSYHFIPKMSFLRLITFVLLITLCSLPSLVESGLIGIVGTPVEAAWCGVLGKESSHCPTAGGGQHGGGGGGGGGGNYGGGAPGGNYGGSSGSYNGHRARRFA

SEQ ID NO: 159408 - protein, 61 aa, Heterodera glycines
SNGRKGKVIKWKKRASDQMEEKGKGSNGRKGKVSNGRKGKVIKWKKRDSDQMEKKKKKKKK

SEQ ID NO: 159409 - protein, 148 aa, Heterodera glycines
GKGVTVDTVERYQGSQRRVIIVSTVRNNEKEAIGFLMSDKRFNTIITRAEELLIIVGNAKVMMRDSSWKEMIDYCRKNGATVDMPSEAELFPSGQFQNDVLTDSDKSSSSSNSEVDEKERTDQLVKKGTSSAAAAEQQNLRAKASSAE

SEQ ID NO: 159410 - protein, 167 aa, Heterodera glycines
MVLIAASIFTKSGKALVTRQYVADMTRARLEGLLNAFPKLITSDKAQRQHTFVETNSVRYVYQPMDNIYMVLITTKASNILEDLETLRLFSRVIPEYCRSNDESEITDKAFDLIFAFDEIVVLGYRESVNLAQIRTFTEMDSHEERVFNQIQIAQQRAAHTLMKEKE

SEQ ID NO: 159411 - protein, 45 aa, Heterodera glycines
DPYFKDDPQGNEHERFRNAEERLEKPHRKKVTKVITEWSELFFTT

SEQ ID NO: 159412 - protein, 65 aa, Heterodera glycines
DQARMVLEGSAYYDVEAKDGVWIRIFCEYGDLLIILKGIAHRMTTTPKNYVKVPRFFKSSDSDED

SEQ ID NO: 159413 - protein, 113 aa, Heterodera glycines
GVRDLQQQVNELEEKAKKIEHQRTKNLSAISAINQRNRDHMKQTFLGAGMVREEQEKDDDPFTRKSARMKVVSGSVKSKTAGEGNGANAELSVMDTMVSSLGSLSSSSESSPN

SEQ ID NO: 159414 - protein, 57 aa, Heterodera glycines
GIVTIVGAPMDVEKVSAPSDELVNKLHAEYCARLRELFNAHKVKHGGLGHDVQLEIV

SEQ ID NO: 159415 - protein, 84 aa, Heterodera glycines
PGFQPAVSGQYGYNDLSQDWSPRFAGLVSNTWADGQLGALFSLAYSERDSLEEGFSSVRWGPASADGGFLNGSAALANPARTYH

SEQ ID NO: 159416 - protein, 98 aa, Heterodera glycines
NKNFFVKLFYRRNQILEPMAIPGCEAKCDLINFLQILNPRSIRGGERELKILSDRKVPNSPPRRMGNIPGFAKSLIIAIFISIAPINPGTQSPVINVR

SEQ ID NO: 159417 - protein, 90 aa, Heterodera glycines
FFFFFFFFFSTCSAVYFYFNGVNFDNDAGNKCTIFLFVESQLYCLWWLFHSLLLLSDASHLLRFSQIMRLQKRSKLVHLRFFGGKCGHQT

SEQ ID NO: 159418 - protein, 84 aa, Heterodera glycines
FMPSRFLEEDGKMRRVDELIPFGIGKRSCPGETLGRMELVLFTANFFHKFHVYPCDPLNPPKFEKRQTFAVKLADYKCKVTKRK

SEQ ID NO: 159419 - protein, 160 aa, Heterodera glycines
GQFLLNLSSSYSQWISKAFASTGKGRWYAQPLDEMSRHRSRPPCYGMARRSKVLCVDNSEIAKEANMSGKLAYVIWVYKDGYRKRHMPKAELGDRVLLSIRGEMKRAVVVGCKQHLAIRKHGLPSTDTNNVVLLNNDGNPLGNRILAPVPAYFMRYRKWL

SEQ ID NO: 159420 - protein, 38 aa, Heterodera glycines
FFFFFFFWAQVGLSTNKTKTIENEIFNEKKYLGECRNT

SEQ ID NO: 159421 - protein, 59 aa, Heterodera glycines
KYLSSINYNRHLTKQTVLVLNGREQELGHKPLINKVDECVDARVSFVLSEHYYQDKAVS

SEQ ID NO: 159422 - protein, 69 aa, Heterodera glycines
VHFDDHCHDVEGMADFVRPFGPYFGQIAFGFTHLGLSVEQLKGPRSRSNWKSQSDLNSFEQKNGKVLII

SEQ ID NO: 159423 - protein, 148 aa, Heterodera glycines
GRPSSADFASPVPHVRNGASLVDFYIGLGLAISSSLFIGSSFIIKKKALIKLAGSAEYNQRASEGGDGYLKEWLWWMGVITMGVGEACNFAAYAFAPASLVTPMGALSVLVTAVLSSKLLKERLNLLGKIGCAICLLGSTSIVIHSPK

SEQ ID NO: 159424 - protein, 112 aa, Heterodera glycines
FFFFFFFFFRCKRIYFARTFVGISCVVRLNWAFLVIHPPFVHSFLFVLPICSSVRPSFTTNTPNSPGKRGRSTTRRKGKRRPIRRMRRSNTDSNVWHAPPRLDVARLRTLAL

SEQ ID NO: 159425 - protein, 47 aa, Heterodera glycines
RDMKLNYTCLFKSILEKIHGSGENGWLAPFSRAIKNTVPGRAQCIEE

SEQ ID NO: 159426 - protein, 128 aa, Heterodera glycines
AHSAHCCPAGFACAREEERCVSEQNGISLSTQMFPTHHATKRRFHGTKMPTECPDGTFCGSPTDICCAHSLPTNEGEQTTTFGCCPLSKGICCKESQKCCPMGYKCSAEGCERMEVRERIVRLFLDKN

SEQ ID NO: 159427 - protein, 80 aa, Heterodera glycines
LNISHSSIMTIISGSSSQLKLCRGRHLANHRQLLLLMGGRHLCLGRHASGHRFAVLRVRRGRRDVNRWLFDLDVVGQRIA

SEQ ID NO: 159428 - protein, 143 aa, Heterodera glycines
GSLAEEMFITVAPSDNARQMIYSSMEQMQQFLNFDEQIEAAEKQTEREKDDQNSEESEKMALKKLFEQKSAEFEINKAKATEKLSEMLAVRFEPILQKEEERMMEVQRKHFWEWAERRKRLIHSQAQRAEHLARLNEIQKRRA

SEQ ID NO: 159429 - protein, 105 aa, Heterodera glycines
GPFKVIPFRPRRPLDILESDGFGGFRKRPLNVMDANGFGSFQKRALDSLEGDDFMGLKKKKALTTADGDDFTDLGKRALDVLDGNDFVGFRKRSEMQKKKKKKKK

SEQ ID NO: 159430 - protein, 184 aa, Heterodera glycines
RRFVQTIILAHQTPTVLYVKSDVFQWLDTAFLVTVSEKYNAANNAGATVPSPPTTVAEQQQPLENGGGQVAPPPMVNGGSGKLHQIVVESEPKKASVVVDHSPQKEPEKKPDAPSDAAPTVVDSLPSPTSTPNKKDEVMAISAVAPLSSIVDVPKTVDTAPPPSLSQPVAATAAAAPPPTSEQQ

SEQ ID NO: 159431 - protein, 70 aa, Heterodera glycines
LENFEKANEIANDCNQAQKKWKPFNGQVLHGFRLEYDADLHPLKVSTSINSTRKVRSNAQANDVKRANLL

SEQ ID NO: 159432 - protein, 172 aa, Heterodera glycines
LDEKMTSPAESLNLDAAEVPELLRKELDTLHKALGENMQRYTECKEIKVDEGLRTLEAKVGRLALSINSHKGILKRERMRLAETAKRLGLDQRIAHNVQRTRDNLAKSPQFGRAHSVDFLHEVATQNDQSLAEQCETVEKLRKLLDRLSNSDEEPSLSRNDLVDHLTRFDRI

SEQ ID NO: 159433 - protein, 45 aa, Heterodera glycines
YLFFSSFLHFFLLFLPLASLRSFRLQFSLKPLNFSLRSLRLQFSL

SEQ ID NO: 159434 - protein, 148 aa, Heterodera glycines
MDESAKKTLKQIPLLKTNAGPRDGPLWLERLKEEYNSLIAFIEHNKQGDADWFRLESSADGTRWFGKCWTYHNKIKYEFDVEFDVPITYPKTAPEIALPELDGKTAKMYRGGKICLSDHFKPLWARNVPKFGIAHAFSLGLGPWMAVE

SEQ ID NO: 159435 - protein, 43 aa, Heterodera glycines
LLSEYKMQMFKNLRNMFLQKSWCSSIEHYRLWWHFHRLMTVLL

SEQ ID NO: 159436 - protein, 132 aa, Heterodera glycines
MLRIALLISILALFGDCMDMGKRKLGGISINEPSEYGTKEKEAIATKENAQTSKDPPTSAGGQNEAIPSPKKPSPKGKLKSDFGLNLAKAFPRPVPKGRRGKEKVGEKISVMNTAERIEKMDIAQDKAKMEI

SEQ ID NO: 159437 - protein, 81 aa, Heterodera glycines
SPFLPPQFFGFFIYLGNGNFPDLDSVFVFFGIYPIPFFDRVVGGKCPVLLTILGRVKNKFCDKKKKKKKKKKKEKKKKKKK

SEQ ID NO: 159438 - protein, 71 aa, Heterodera glycines
FLQDVYWVFMFISFTSILISCKIPSAAAPSLLPVALDQCQKCVSVSSPGVPFDPLLQALLVQRVKSVFDVS

SEQ ID NO: 159439 - protein, 118 aa, Heterodera glycines
HSNKGGQGNQPHSHCIEDICRPPRRWFFSRRSHPHSHCFEEIFRQRRKQYFSLLSPSVVWNEKERRQGETEIEKWNGSNDGSKKDKFDGKLRCVFYPIFFAPIHKDLTGQKKKKKKKK

SEQ ID NO: 159440 - protein, 103 aa, Heterodera glycines
MQTAVSQAAQLHSTQMQQQQIHQQQQATIAQPQQAVSAGMGAVSSSGGPAINPQTGQPDYSAQWAEYYRTMGMHEQAALIEAQMKQTHAAAQAQRPQQQLYMQ

SEQ ID NO: 159441 - protein, 79 aa, Heterodera glycines
MNNRRQILTTYPQQIRDLDCHHEVVHTFSNFCFKFSENPYALKYAYVLANLCERPELDAERIKMALIEQCAEVELSGVI

SEQ ID NO: 159442 - protein, 132 aa, Heterodera glycines
MCVFWVEMRKILDTNVSYLSMGLLLYLGGHSHSHSHHGHGTHSQRQTDRTNFAENEWGTVDGRPGQNGGNRQTHGTRRQTNINVRAAFVHVLGDLIQSVGVLFAGLLIYWKPNWHILDPICTLLFSAIVLST

SEQ ID NO: 159443 - protein, 55 aa, Heterodera glycines
FFFFFFFFFFQKNSIVFCLFLLLFFDFIIIITSRSSRRFLRVVDIALVSARAGEA

SEQ ID NO: 159444 - protein, 145 aa, Heterodera glycines
FFFFFFFFFFLHNYNFTFVIKLFFPLGRDSKVPSLSLVWRLTGDSLRPPFFFPSLHSVFLHCQHFLFPGVSFPPVFSLPPSFFQCLPQVFPWRPNADSAPLLLSRESAPFSQALPRVWTFRCPPPILQNSRRVPYSQTPTHFPAS

SEQ ID NO: 159445 - protein, 89 aa, Heterodera glycines
ITNTMPFHEDLPNQQIVDSQRKRRYKYPSWPNITKQCRTAIDALLTYQPAFRPNISECAKLEWFAQDSASLCCGGRRPGVGVMGQVRGR

SEQ ID NO: 159446 - protein, 101 aa, Heterodera glycines
FTHKRRERKGRNHYRNKTKGVQIRRQKSVKFPSLFTHCAPTHCSLPLLFLPPHHHPLLFSFVISLVPSVALRRLKPSTTASTSTMFLPTAPAFAAPIVRHG

SEQ ID NO: 159447 - protein, 104 aa, Heterodera glycines
ASKLRPFLQKLIQQASPPQVMTPPASRKSSSITSQNTPSTSSRKPSDSAINQLNVSGATYKQQKSCDVPEKTQKVGNKSGRERDCWWLNPKDKKRKKKKKKKKK

SEQ ID NO: 159448 - protein, 118 aa, Heterodera glycines
RKTPGGGGFFWGGFINPFFPPPGGVSPPPPFFFPPQIGGAPQKKNPPGGKKTPPKWPLFFFLKKKFFWGPFFSPKNFFPKKKKKKKKKKKKKKKKKKKKKKKKKKKKGQKKKKKKKKK

SEQ ID NO: 159449 - protein, 137 aa, Heterodera glycines
  unsure (1)..(137): unsure at all Xaa locations
SVPSDQFVPPRVFPSVPSDQSVXRGFRSVRSVYSXGLFRPFCFRLSPAAQNGIIACHSAFSPPSSALLNVALKSADSASTVKCPIGSLRFTPSWLNSTTLKDNGRGTPSPSIPTLSGSTNSSQSSALNTGLSVRLIP

SEQ ID NO: 159450 - protein, 126 aa, Heterodera glycines
  unsure (1)..(126): unsure at all Xaa locations
FFXFXXXVDAEFFSLSVLIRFFSIIRDKEIVRQNKNVFFCALPIYWFISRFLKRCVYWSSICSFSVFVLLRLLLLLLLVSLFVFDRLHIVRKPKCPSANVAKILASLRPLLLLLLRLSPVQLFVQF

SEQ ID NO: 159451 - protein, 91 aa, Heterodera glycines
GEFNLLYHLDTVYVIDLAQAMDISHPSSLRFLHRDITNVLNFFGRIGCEPLPTPHAFFHEVTDIEFDPNKNLYVQVESFERENRNMDLKGA

SEQ ID NO: 159452 - protein, 166 aa, Heterodera glycines
DLQLDPSIFKESQPQIIMPEGYESGRGKFEFALGYIGCSVIGGFGVGSVRGMFGELGNPQNRTLAWNPWYTRMLNAATKHGSGYAQTAGTAMFLYSVTELGLKLSRADDLLNSFIAGPIAGGLFHGLPHGLRAGGVGALAGLGLVTVWNLCDRDSRRELREILRLS

SEQ ID NO: 159453 - protein, 88 aa, Heterodera glycines
NPPPPPPRGALFFFGGVSPRGGGKKPLFFFFGPPFPPPPVFLVFFFPLGKGGKNPPKKKKKKKKKKKKKKKKKKKKKKNQKKKKKKKK

SEQ ID NO: 159454 - protein, 80 aa, Heterodera glycines
SHNSVVWVVANEIFTAFVENEKVKADDGGEKPNEHRRRLDIHQILEGRLNSDCDYASSRRGGGGSWYSSNLRGKHTHNFS

SEQ ID NO: 159455 - protein, 41 aa, Heterodera glycines
YESATFLQLKEGESDRKRRNLLITPLNWQMPSLRFPPPPLS

SEQ ID NO: 159456 - protein, 175 aa, Heterodera glycines
  unsure (1)..(175): unsure at all Xaa locations
DLIIDPQHNILTPXITFVAISLFNILRFPIAIFAMIGSQAIQTAVSNRRLKHFLAAEEMEPLLRGRPTSEISITIKNADFAWEKDRSLVLKDINLSVRKGTLFAIVGRTGSGKSSLLSAMLGELYRKSGENSLNGSVAYVPQQAWIQNMTLENNVLFGHEFDSDRYQSVLDVCAL

SEQ ID NO: 159457 - protein, 198 aa, Heterodera glycines
GCSLLGLNVYLNALMMFKVGPNSQRNVLPSVVKRDFHFCHLCQSNSPPRSFHCPVCNFCVFRRDHHCSFTGSCVGHFNQRYFVAAVFNLWPVVFSCCVWNWHALLLAFSPISLSDFLKWVFPHMALLFRFVSFHQFFVILAFAFSFITLLFTTYLIFAQIFCFWHGQTRVEYLMDVHAYNLSFRENLSACLGSRWPFI

SEQ ID NO: 159458 - protein, 63 aa, Heterodera glycines
KITKKQPKKIIYFKFLFFGPPIRSSDSQFNCQSVEAIQFVHGASLKAATPGRTLPSSSSRLAP

SEQ ID NO: 159459 - protein, 76 aa, Heterodera glycines
FFFFFFFFFRNFFFNTKRINKLKITIVGWFSVLVHSFAPIMPQATISNLTGASRSTLVLFTLTKCAPRGSFGFRFS

SEQ ID NO: 159460 - protein, 129 aa, Heterodera glycines
  unsure (1)..(129): unsure at all Xaa locations
RGKSKRRNVQKFSYLXPLLSSFKCFKTKMQNALRAKLAELQNSRRTKEEEKEQQKEEPPQKLDFSLFDDSEFANRSWVELIEEEEAAAXKTQKTKAATAETTAASAAPPIASVAAVASSSASPSNKRRN

SEQ ID NO: 159461 - protein, 93 aa, Heterodera glycines
MHRNLVIFYNPQLALGNVISALGGAKGRIGSVHVPYRDSKLTRLLQDSLGGNRSELQFLLCVSPNEVDANETLSSLNYANRAKNIKNKVKSIS

SEQ ID NO: 159462 - protein, 97 aa, Heterodera glycines
GRQIPGDDCGFFEDQSVRCFTAFGAKLGRLYCDLEHRDLQECVSRTKKNKRFWKIRDVRFKKWLRGETPHIFEPLADYLKSVHGAPTSYPTGHRVKK

SEQ ID NO: 159463 - protein, 96 aa, Heterodera glycines
PVPFCIYFLMSSPLDFIVPFDLINEVTGEELALIQSSANDFWLIRFQIGWDERKWDNVKDKLKNRTNPIVIRIKDGGFDDGLLDDASPGPNDQQQK

SEQ ID NO: 159464 - protein, 91 aa, Heterodera glycines
GGLCGRPEKLPDVCYSWWVLASLAIIKRLHWIDGESLTHFIIASQDDEKGGIADRPGDESDPFHTVFGLYGLSLLGHKGLEAKKKKKKKKK

SEQ ID NO: 159465 - protein, 88 aa, Heterodera glycines
INKNLQYDGYASCPLVVDRRHVILAEFSPDGALETSPYDQSRPTIFAYLMKRYLMPSLYWMFLLNGYWEGPANLRKAFGLFSRRPSGK

SEQ ID NO: 159466 - protein, 55 aa, Heterodera glycines
MSCIVFGIRGAYSIPILTPNFVKPCCVAFVHNLCKIKKKKKKKKKSKKKKKKKKK

SEQ ID NO: 159467 - protein, 102 aa, Heterodera glycines
FSGNKYRKIVTRNLCQSKLCTQKTKEEMGQAELVIIIINQYGQGSPWLRIRLASHEVCRSPMFRRRRKVTGPNKPPSGKKTLTAEPSEVEAAKVEDVEEDGH

SEQ ID NO: 159468 - protein, 108 aa, Heterodera glycines
TDEDVGLMSLTSGNIRRCYGPTNADEEKNNGIGPTTGGTSNTKQVMEYTAGDHFAMRSWHGLEDNSGNNFCISADGVTERQCPCELKQGMDGIATRYANEPFNSDVQK

SEQ ID NO: 159469 - protein, 36 aa, Heterodera glycines
FFFFFFFLQSIIYLPNNQNTKSTYEFKTKQQKADER

SEQ ID NO: 159470 - protein, 89 aa, Heterodera glycines
GSKSTRHSNKILKDPKKCQHFQILLIVLLAVVSFRLSASTGDKKTANDGSGNNSSAGIGTKIKRTVTAGLLFTSLATGGAEAIGRRMLR

SEQ ID NO: 159471 - protein, 146 aa, Heterodera glycines
KTIFEQGITYVHNRNSVIFKSSGESLTHKDVLELRHRFHGILGRFFVFLNFPFSKGRRRKLPTFIPIVKDFVHIRTFLRMSTIVPSRHPKAVQSDIIENQRGSGHLDRVFGHSSVSDHAPAVGQRSDKVNCAFPTDAIQRQFCSNF

SEQ ID NO: 159472 - protein, 159 aa, Heterodera glycines
IFVCFPTVEFMQLLATDDYYFIKSVKTILRCCRTTATIAAFRHCDLAALEDIELLGDVFAFIGKITVDDISHLLLVSECSEIAEIDTVNATLTRVERVCALPVLTDGMIHKKLFDIPSLDRFERLKNRPRNLLKLMSHKVPIKNLPTSPKLIDEIIAFF

SEQ ID NO: 159473 - protein, 79 aa, Heterodera glycines
PSFLLQLIPCLILRPPRRCSESSSTTAGRLNQQQTDGATVTNANEPGATTATDTEAPAATTPTTTTNADGATVTNANEP

SEQ ID NO: 159474 - protein, 50 aa, Heterodera glycines
DVLLMQNKRYCGEIGHAVSSKKRKQIVERAQQLRIVLTNGNARLRTEENE

SEQ ID NO: 159475 - protein, 124 aa, Heterodera glycines
MTLQWTVVAFILYAEIATIIVLLLPWVRPTMWKKVFNSRVVHKLKQFSNVYAYAFIFVLILLFVDATREVRKYSHVDTTREMVGRVAEADAVVHMRLFRAQRNLYLSGFSLLMALIISRIVTLL

SEQ ID NO: 159476 - protein, 89 aa, Heterodera glycines
GTFALSNVGSIGGTYMSPLLLPPQLVIGAIGSIRKIPRFDGNGNLVATHVVTFSWSADHRVVDGATLARFSNCLKEFLEQPETMLAELR

SEQ ID NO: 159477 - protein, 74 aa, Heterodera glycines
DGRVCMEIGHQNSEPGDSGGPLMQLTQNGTVWTQIGVSSISTLKKDNRLAILYTRVSRYCGWIEKNTDGEVKCL

SEQ ID NO: 159478 - protein, 210 aa, Heterodera glycines
  unsure (1)..(210): unsure at all Xaa locations
SHCQPSRNDMSINCHSLNNIEVSDDEDDVQPNNKRRPESVRNKIHEIEKRLNDSKLEEKDRFKSPITNSLNSSIAKMTPIRVIAMDDVQEILNRKDKRDAEFNKIIAAIKSPALEQRTTPGFKVTSAAKNPNREQHTSPIPITPTSTKNQGMKRSAGYNETIAAESRFRKQYAPPPPPITETSTSISTKNDKVFRPVTXTDQIIGSLLDD

SEQ ID NO: 159479 - protein, 78 aa, Heterodera glycines
SGKSLALKLATNAAISVLKIDQIIMAKPVGGIKPKAPKGRTTTTMTLGWLNQHSHRTHCRVFALRKYCCCFIFVNFNT

SEQ ID NO: 159480 - protein, 61 aa, Heterodera glycines
FFFFFFFFFFFFFFFFFFFFFFFFFFFFFFFFFFKGGGVFPKKTPTPKVFKRGGKNFFYHP

SEQ ID NO: 159481 - protein, 103 aa, Heterodera glycines
RFVTWLRYNVWLLLYPLGLFLEALVLLISVPFFYSSGVYSLQLPNALNFSYNFGVVLALFSFICFPFIGFTLIKHMFKQRRKKMDELYREEAAMKRSRQKKPQ

SEQ ID NO: 159482 - protein, 86 aa, Heterodera glycines
GSILAFRLMTVPAATTKRTRGARQFKCESKGPNRRRAAQMKRDDMPFLIDYNVHICGQSYCIIPTFHMAVRCMYVYVFIVYSIICA

SEQ ID NO: 159483 - protein, 53 aa, Heterodera glycines
RNRSCKKSFRDCSRRGRIREGKWALHCPFYDWMTFCYSLPFCDFSVYKANESN

SEQ ID NO: 159484 - protein, 113 aa, Heterodera glycines
GGCSNGGDRTLLADIEASLATHSADECALSLGFVRAMFAIAASASSHASNNSEWQTLSGQFGQKVTEIDSKCAEFGISIGKVPINGPKGAHVQNVPNSESVISMPGLAGSHTQ

SEQ ID NO: 159485 - protein, 73 aa, Heterodera glycines
FFFFFLLFFFFFFFFFFFFFFFFFFFFFKKRALFYPQKGGPPKLGGFKKGKVPTPKKFWPPLKFFFQKLKKFF

SEQ ID NO: 159486 - protein, 98 aa, Heterodera glycines
AKFFESNNRGEWNFNGNHARRLLCGRGNFKLENMFKRFFSIAPQFHRAQSDCEALLQVCLSYGMDFVKFVARNCSYFPDCFYTSSKKTQTLNSLNTDL

SEQ ID NO: 159487 - protein, 175 aa, Heterodera glycines
GDFQSVDNEFDALMMKHMYATVRFLLLLTAIAAKSTNCATNVQGTQTVTTSDATHDEAGKISRDSSSSSDEDDSTTAASQMLLNEANNAFSKDNDEPINQQQKMRPEANFSVKYLPPRLNAAQIDIIAQRASSVITLRTLKHVKEVFSKFAPDSWLEALEDIPLPTTRCTVKVSA

SEQ ID NO: 159488 - protein, 77 aa, Heterodera glycines
PNAEYLYGAGDTVGIGVNSATRQIIFTKNGLRLDTSDFFVDPSFADDSLYPFVSLLDSGDKIEANFGPNFKFDLATL

SEQ ID NO: 159489 - protein, 86 aa, Heterodera glycines
GLLFTSLATGGAEAIGRSNAQGGNAAGLVPSHVTNRSMAPPPPPVQFEMGANRLEKMRAHLRELAEKMPVNESKRLSPSGPGPHHH

SEQ ID NO: 159490 - protein, 102 aa, Heterodera glycines
DKIFPPQYLLSTSQTPLNQFDSEQEGISMAQKLKLVSAGGGFGPVTDAGYGVSYIVAGEDQISFHISSKKSATNTSSIRFREDLKKTLLEMKQLLTVEQRMT

SEQ ID NO: 159491 - protein, 142 aa, Heterodera glycines
  unsure (1)..(142): unsure at all Xaa locations
GLMGNGXRTSRHQIPSVSMEKSNLPSNKNTWRTPSRLICNFEESILNGRIPANSVVSGFRLQLTVIGNGVSTDNRLSFPASKRLTLPVLTYFFNDLMSQHSGRFPVAVPPSPLHLARCELAAENVPIPKRCTLQIVLLRPCG

SEQ ID NO: 159492 - protein, 70 aa, Heterodera glycines
KALIVHIHARRWAPFSQCCSSSSSVSVKNSSPSPEEEDSSKSSSSSSSSSSSSSSVVVSPATLESSSSSS

SEQ ID NO: 159493 - protein, 86 aa, Heterodera glycines
GKSSKSTRHSNKILKDPKKCQHFQILLIVLLAVVSFRLSASIGDKKTANDGSGNNSSAGIGTKIKRIVTAGLLFTSLATGGAEAIG

SEQ ID NO: 159494 - protein, 69 aa, Heterodera glycines
SIAAACAVSFVCFALTGSLSRLLGEVGMAIIVKVLGLILCALAIQFILLGLGEAIPGMISGAVTTPYPA

SEQ ID NO: 159495 - protein, 136 aa, Heterodera glycines
FFFFFFFCFFFFFFFFFFFFFFYLGLGVKPNASRKIKIKPTGGKCPSYSGTIPLRQKKPFFFPPGFFLQGRLPVRRKKHLPRPGIPKGRGAGLPRPKQGILCQIPRLGGPFHFLRKKFGAPVRYLDFAPGLGEKFR

SEQ ID NO: 159496 - protein, 87 aa, Heterodera glycines
MGRQAKGTAGVCQDIAAGTTCHSDDGPNGRSAAATAQLWPAPMKQCLCAYMLCLLINGSSISFSISFVFDEFNDKIGSKKKKKKKKK

SEQ ID NO: 159497 - protein, 92 aa, Heterodera glycines
MLNISSPNPIADKEVLNGFEDLYEAFVHFFTRGAPAERCMVNDAAFDRMIHTVEDKHLRAQHYIGGNAALMAQKIASSFPAATAYLVGPIGP

SEQ ID NO: 159498 - protein, 89 aa, Heterodera glycines
  unsure (1)..(89): unsure at all Xaa locations
NSWTVARRTTAKAFGKNVFINQERKSEVRRRSDTALVLTVNDANXAIRRRIYSPWWGASRKRKSSGSGGSMVQSXTKGIDGRAPPGVEP

SEQ ID NO: 159499 - protein, 132 aa, Heterodera glycines
  unsure (1)..(132): unsure at all Xaa locations
MLCCCSLLASTLHRRPCTLFQEFPTSTFPMYHYQYRIIVIGDSTVGKSSLLRYFTEGKNAEISDPTVGVDFYARMIETKPNYRIKLQLWDTAGQXKFRSITGRIVEFRRSIVVYDITNRRTFEHVVDWMTEA

SEQ ID NO: 159500 - protein, 103 aa, Heterodera glycines
  unsure (1)..(103): unsure at all Xaa locations
GVEQYAFRAFADALESIPAXLAENSGLPPIDTLTELKAKQIEAQNPWLGVDCLQTGTNDMKEQGIIETLLSKREQISLATQVVRMVLKIDDVRVPDDDERSFA

SEQ ID NO: 159501 - protein, 99 aa, Heterodera glycines
  unsure (1)..(99): unsure at all Xaa locations
QSTDYDPFKADVWSLGIVGYVMLTNRMPFRGDVSTAHLVEXQRSRRYRFPSQMSVTEHCRCTIDNMLTFEPDDRPSIFDVRNLPWFASAVNDANSDALS

SEQ ID NO: 159502 - protein, 73 aa, Heterodera glycines
GRPAGGREFTSDSVDFFLNEFVMSDGNTFVTYSANPLRIYWAMLQHRSQLLWFRYLYLAISRYIYVNNFVVII

SEQ ID NO: 159503 - protein, 56 aa, Heterodera glycines
MNIRCSGVCIAHIGRTLSVPRLLTASVVWCKSPWSTRTLGTRVPPLRPPPPLPSPS

SEQ ID NO: 159504 - protein, 102 aa, Heterodera glycines
PMACCGHFAWDFFKNNFALLIEKYGSVNSNVFLHCFDCVTSGFCSNAMAEDIMEFFKKELDEHSLKTLERPLRQAVESIKVKESLLKNNVPDLDKYLQNVGY

SEQ ID NO: 159505 - protein, 170 aa, Heterodera glycines
  unsure (1)..(170): unsure at all Xaa locations
MQCAYRFNVATLNCWLLPHPWPIGSKHKQFRLQKLIDELKNSRFDVIALKEVWSEKIFLQIAHELNGFFPHSHYFHSGFTGSGTCVISKHPIVSTLLHRYSLNGFPHHVHXGDWFGGKIVGMVEIMVEQYRVAFYTTHLHAEYNRENDLFLPHRISQCFEMSQFIRHTSR

SEQ ID NO: 159506 - protein, 96 aa, Heterodera glycines
QLTNRKGDDQLSEQLLVASKHREFVLASRTLDKIGAVLTHPHGPWSSPDDKKKIFWKLDVWEDDSRRRRRFVQNPWGKRHKLAATMHQKKKKKKKK

SEQ ID NO: 159507 - protein, 96 aa, Heterodera glycines
  unsure (1)..(96): unsure at all Xaa locations
PRHRMVTLSLAVXTTTAAEVGWDGSVPPASFSFVALLAFLHEGKKQPFAVFCCCPSLALLRRCRGRGSITRRGRRRTKVDGRGGRGHGVMLTISHP

SEQ ID NO: 159508 - protein, 58 aa, Heterodera glycines
PRSCVPCARSTGSTLSSPTSNWPFSGTLATTFVRLKIDGLLAVVTVFPSSPRLPLKCA

SEQ ID NO: 159509 - protein, 139 aa, Heterodera glycines
  unsure (1)..(139): unsure at all Xaa locations
KMAIIAKVFPLLLLFLMSMASLSFCANWPKNTVPLXTYVDESLHLHCKLCNKIANSASDGAKWLQKSEEGYVSLLKFCIDELRNSDERSQTLPAEEGHHQFLFACHGFTADKRKLSETIGAIAKKEADFCKEQKYCQMF

SEQ ID NO: 159510 - protein, 101 aa, Heterodera glycines
GAALRWADKKCRQNGTERSAENRRAVLGPALFKIRFPLFTKEQFSEKIVLSGVLTHREVISVFLYHSLPTKRSAQMFPLQFAAKHRAGHHAYSAYYDDGYY

SEQ ID NO: 159511 - protein, 161 aa, Heterodera glycines
GRSSQISADELQQALSNGTWKPFNPETCRMMISMFDSNNDGGINFQEFGALWEYINDWTRTFRTFDRDNSGNIDRDELVNALTQFGYRLSGTFYDMLMRKFDRTQSGRINFDDFIQLCVVLQTLTTAFREKDTDRDGWIRIYYEEFLAMVFSLKMSMMAKQ

SEQ ID NO: 159512 - protein, 91 aa, Heterodera glycines
EECLVPLLIVMRLAMRFLPFSIYASTNISPTDAPPPPPIVFFSPLIISLAPQILLSVCLIVLLRVQLLLGLFLKKIYRLKPFAKKKKKKKK

SEQ ID NO: 159513 - protein, 170 aa, Heterodera glycines
  unsure (1)..(170): unsure at all Xaa locations
KCDIELALLGXVFVKLQLVLLLLHQLLHNLFVFNQRRLIGGRGKESAMDSWPNDAQILETTDKQTDKVKLSRKGKIERVMREWRGGGERRRDTVPKAEDEVQKAAEVFQWQSPTFVGLFVLLLTLMLLFERNMHQSGQEISAELQNVSEKSGERESPSKVSKTKATKESP

SEQ ID NO: 159514 - protein, 169 aa, Heterodera glycines
GGQIFTISLDLADGNGVRVRFSFGSVSPTPWYSVRYPPYKSDFSLVIEVDKKAVLRRSYEETRLLKSGWTAEEREAQWDSGEQRAEVNIGLNTELVKGECVMCLEPNSDTLFYPCCHLNVHRKCLRDENVEECYACREKCEELISIRQRDIDCQFCHPNECREFNSFFY

SEQ ID NO: 159515 - protein, 131 aa, Heterodera glycines
ARISMHCARLHRHTGEARGHYEQSGKIAKHPRLGKCCKHLQTVEHFQVVPAQLLRFNGIRCFQQQRDHRWQFTKNCMSTVQIANWFRVNALVIHEFFPGTDFVVFRVVYLSMRNTDANWSTDNEQQTVGSP

SEQ ID NO: 159516 - protein, 77 aa, Heterodera glycines
GHTYANLLRKCRSMNRSVCHRVDPTLIIIRAMDGSNGGRKNGCLVFRFYSILFYLLVFQNKFLPQLFKLFVVLNLFR

SEQ ID NO: 159517 - protein, 51 aa, Heterodera glycines
MERTFVCIKPESVRRCLVGKIIERFEANVFRLIAIKMIVATRKQAMDHYVA

SEQ ID NO: 159518 - protein, 108 aa, Heterodera glycines
QKLNNKNNKDERRRKISQKGKGRRWKIVLCKVYRGFCPKVTTYIVFVCLRFLIYVFRFFNQRCTAFFFSSANFFLFAFGVLPVVGRFCFAFSRFSSSTISFRMLSICP

SEQ ID NO: 159519 - protein, 139 aa, Heterodera glycines
GEQREKEEKRWSKARYIAACIDEIKVELRQDSIFVKANAIEKLAYLHMLGYDISWAAFNIIEVMSSTRYSEKRIGYLAAVQAFNDETDCQQCHRRFGRNVTHQIIRCARPVAQRVRAKHCQAVHLPTVQIGGGRRLGQN

SEQ ID NO: 159520 - protein, 99 aa, Heterodera glycines
IIDDAQSFVAAAEVLKARGAYKIYVVATHGLMSLDAPSLLESSPIDEIIVTNTVPHEMQKLRCHKIKTVDISLLLSEAIRRIYNNESMGPLFRDLTIDD

SEQ ID NO: 159521 - protein, 214 aa, Heterodera glycines
GEYFTQFLQQIVDGSRPLPPSLFAHCRVLPLSFCAQKNRKPKMEDRHLLLPSLDIVEPEISQKLSKKVDPSAALFAVFDGHNGAECATFASAHLTECFLDAFAQSDDIEKILNDAFERLDKRITEKCTSENIKSGTTVSCVYLEGTTSAYLAWCGDSAIGLLTDTAVDTLSTPHKPEDKGEMRRIEQAGGMVVSIHGVPRLNGVLNLSRSLGDV

SEQ ID NO: 159522 - protein, 71 aa, Heterodera glycines
NLTPFAYLIYTLIHHHMLFLQTLDHSPDCPLSNSDRSWFLIRVLCLDFVLCCDFCFMMKTILSSFSPFFYF

SEQ ID NO: 159523 - protein, 148 aa, Heterodera glycines
MLRIALLISILALFGDCMDKGKRKLGGISINEPSEYGTKEKEAIATKENALTSKDPPTSAGGQNEAIPSPKKPSPKGKLKSDFGLNLAKAFPRPVPKGKKVENTLSSKDSASEAHKELAKEKNEENAQTSKVPTSMERQNEPIPSPKN

SEQ ID NO: 159524 - protein, 176 aa, Heterodera glycines
MRTILFIAMVCLVMAVLMEMANSKAVKKDNKKGAVAASPAKGKASPKGGKSPAKGKAAKKLKPKKDAKGIKAKKAKPAKKGKAAKAVKGAPKTVKKLAIAKTAQAKDKKSPAKPMVLKAVPPHQMHLMNEKVQTAVSPPAHARSLATVPYSTPVAADRNSLPSYTSDGTNLDMAHE

SEQ ID NO: 159525 - protein, 44 aa, Heterodera glycines
FFFFFFFFFFFFFFFFFFFFFFFFFFFFFFKKKKIFSKKNPPFF

SEQ ID NO: 159526 - protein, 55 aa, Heterodera glycines
GVVTNVRIVYDRETNRPKGFGFCEFQDQQGAQNAVTNLNGAELNGRALRVNWTNK

SEQ ID NO: 159527 - protein, 76 aa, Heterodera glycines
FFFFFFFFQPLVLVRAKTFKAYGNKPNLSRGKFNPLNSHHRGKPWTGGPKAKPGPQTPPYFHFASAGGFLSNLALF

SEQ ID NO: 159528 - protein, 43 aa, Heterodera glycines
QGFGAGNFKALFESIEAEQNERGNLFYKDVAVGGEKIEAKKSE

SEQ ID NO: 159529 - protein, 129 aa, Heterodera glycines
MSEESEEALFCISKHDVKEISQVVKAMAFRGHCTLNVSNEGIRLAVDDQHNQQGSAYFRSEHFQDFNFRTQTCSIKIPMRPLMEALNMFSGTMTMVQISWNGKGFPLLVILEDEGVVVHTEIRTLIAPE

SEQ ID NO: 159530 - protein, 159 aa, Heterodera glycines
GSEFSSRGHKLVSPVAETPVGRLGLSICYDLRFPELSLYQRNRGAQVLSFPSSFTLNTGLAHWEPLLRARAIECQCYVVAAAQTGKHNDKRISYGHSMVVDPWGTVVAQCTDREDLCFAELDLDYVEEVRTNMPVFSHRRSDLYSLHFNEWDEPKDSDT

SEQ ID NO: 159531 - protein, 147 aa, Heterodera glycines
YIKIVRGFYGWLLRSLDWINRQILHRLSLSAHNREDMIIEKFPADRHPGLLQRLNELKRSETVYNGGVFILFTIPYRYYEDYASITVNQAVNDINAMDKTGVLQNLKIAYIECNVGYWHEWDTTKKEPKSIFKTDETLGLRQLPTLL

SEQ ID NO: 159532 - protein, 109 aa, Heterodera glycines
LTARSARSNSKSKRTAKDARKKALLLAIMIFRRRLPVVKVAQGTKRRRNVHGHGTTTKRIRGQHYQEGSPIVQIRLRVKEQAQTECDHIKLISLLYKCVPSFCSSPKQM

SEQ ID NO: 159533 - protein, 92 aa, Heterodera glycines; identical to SEQ ID NO: 158780

SEQ ID NO: 159534 - protein, 104 aa, Heterodera glycines
GSQPLVKQTAQGPAFASFNLYTNVERRLGDGTTTTNTEVHSVVAFGSMAKYVEKNVERGTRVYLTGCLHYTGGALFPDGTRSPRICSVNLESIYPLSKQGAILR

SEQ ID NO: 159535 - protein, 185 aa, Heterodera glycines
DSVITFLRYNKQIFDKGINLRLDVHFLYKNAKDAQPIWDVFARKIWPIVVPNIRHLAFSEADHLDNMRRRISPTILTDLDQLDSIDYEYLLPDAIISDDGPNATAGQALAKWLNTPTTNGQPKQFHCDFMSATIKWVNAFKEAFLHATTSSANYIIRLALIDEETPIESFELVNGRTNEKADNGE

SEQ ID NO: 159536 - protein, 190 aa, Heterodera glycines
GRVLLERNEIWRDVRTDGQRSAILEKANKTQRIGPAFAALIAKICFAASIDPSDDGFSFKDRHGFSLMLAKLAELLAEDTGESCNLSRKTIFELLGSSSEWNLGLIGPLLPKYSFFMTKRASRSFSVRSFHRSFDVIISRVPTRPFPPLSKHCSALTHSRRPFPGRLTSSFHTFWIPVFRHEISSVPSAK

SEQ ID NO: 159537 - protein, 155 aa, Heterodera glycines
IQLNVNTMEIFDEFIVVDEEAIGQFRGAFTGKSSHWKMIRFVKLEFTIVTTDFNKVLKIADIGNASSSNPLNEEPLAQIIHWNWDKNGTQQISETKTLDKGSEVNFAIFDDTSSFVIRILKKREKKSEEKRNTLTNFPAPSDSSPDDDLTVKIGE

SEQ ID NO: 159538 - protein, 66 aa, Heterodera glycines
TEEMDDIEEQKTNDDFEVGQIIREQLIPRAVLFFTGEAAEEDEYDEFDDEEEMGDEQSEEEDNAMH

SEQ ID NO: 159539 - protein, 69 aa, Heterodera glycines
LNRCGVRLRCRRDISASRSICSALPIFLFVSHRNDIHHQSANKNDKSETDNTNVYAKPNICFTKAILTA

SEQ ID NO: 159540 - protein, 59 aa, Heterodera glycines
IYLCFKFVNCLLMICCFSLLWNFKNFFFVFFFFFIHFDQSAAMSFLFVSWSNICFNFGN

SEQ ID NO: 159541 - protein, 65 aa, Heterodera glycines
IGQKMLQSNTNKHPNQTKRINRTGQTFATNLEEASVDTRTSVALFVQHLLLFLLLLLLINRKFAV

SEQ ID NO: 159542 - protein, 113 aa, Heterodera glycines
KRAENFAVKTVRFDHLISTPIIGKEEDWKEFVNRDSEHFGTLLAEPALQKVNCGDILQIQRKSFYICDAKTANSMTLIEIPDDRETKNAAQKGPEGKETKKEGKETKKAKIVN

SEQ ID NO: 159543 - protein, 116 aa, Heterodera glycines
GKFPLAFFSLCLFAFAEVAADRVLLLIDNPTIRESHSVFIKSLEERGHSVIIAMADDPNLSLIKFGEFLYDHLIIFAPSVDDFGGNINVDEITKFIDGGGNVLVAADQNLGDAIHD

SEQ ID NO: 159544 - protein, 175 aa, Heterodera glycines
GGIIINQMLFFLLLLSLSLFLLLVPNVCCHNAELVLLDPSQIGFFLPNYFVKKFEKKLFVKFAREFRPVFVAFAMLEPPYLYVDQSENIRSVDRAEVEKLMKFKLVSRLRKEKKLMETAQFNLTLAHDIQGALFSVPVPSDERSLKFDRNSVIFEHCNANLIDNDNNPRCIYFYL

SEQ ID NO: 159545 - protein, 110 aa, Heterodera glycines
LKRRNVQFDCLYRMEFALREFFGESPADVFAEEIISRVKRFHLHAVAQFLRLNSKTVDGENCTKIVQVKNEANEFSPPDTFLATLLKKKRKKNNSKGDEWAEWDAENGAF

SEQ ID NO: 159546 - protein, 133 aa, Heterodera glycines
MSAKPLLELYVKASGIDSRRIGACLFCQEFWMELYALYEVGCVRVEVKTVNVDSEGYKKHFSGAQPPIMVEQDKGTANADNTDIERRIFQLCNQFHVPLFEKDPEVAKTIQDLYRNFKIFLQAKTNFGQRQAA

SEQ ID NO: 159547 - protein, 90 aa, Heterodera glycines
EIQQIHDDGSLSAEQKMERIDSIICTLPENVIDQIPDPPEVAQLPADVRQRVKQIERQQGKSFSTKFEEIMKYVDTLPEGTKSAAKNIFH

SEQ ID NO: 159548 - protein, 103 aa, Heterodera glycines
ANNKYNNFAMSAHTYKQITTELAYQYIWVAYRNSSGTVRLCVVFGHPSSSPSQFRRRFPSCCCASDELGFAGPRRGAQLAHADVCSCHSHGGAALLHLLRRLC

SEQ ID NO: 159549 - protein, 90 aa, Heterodera glycines
ANNKYNNFAMSAHTYKQITTELAYQYICVAYRNSSGTVRLCVVFGHPSSSPSQFRRRFPSCCCASDELGFAGPRRGAQLAHADVCSCHSH

SEQ ID NO: 159550 - protein, 127 aa, Heterodera glycines
KESKDKLLSPPPPLFGKSASRKGRSNSICLARKTTDSTPTILSTSKNNLSESFLSNAWQSDDRRQNNESSAFSTLSCPPSVVPGPFIFFSIDCTNWRRRKVTKLVPNLCCCCCASKSEQKNVKIEWT

SEQ ID NO: 159551 - protein, 146 aa, Heterodera glycines
ERANQTKEEEERMNNKEAELNSRKDNKEYHSKNAENKSNDEFYEETEINGLYQQEVPSMPQDKFYNNFEQNREQHQNRAESGNYDDQRAKEQIYANPLDENESQYYLNRPETYPYDNQREDQHTQVDTYVHDGQNSPKKKKKKKKK

SEQ ID NO: 159552 - protein, 160 aa, Heterodera glycines
HPKRLELLSSGANQTVVRWSYSDSDSIWLPISRFGDIVGDEVNCYDITYSPCGRYALCHSFLGGFHFWQIDSKGAVLPKCFPISGHFAEVTDLCWSPDGSFLLSCSADMTTRIFAKHKQLDFFFEIARPQTHGHPINCLTSVDRNLFVSGGEEKIFRVFQ

SEQ ID NO: 159553 - protein, 127 aa, Heterodera glycines
TFDRLNYQITPFLFVLLSLLNISRLYIGSAINCFAKAEFRAGWVQYAHDYCLVESTYYLRTDESIPIEHEMRGQKRVAYYQALKSTQLLPLRKMPWNNRRTKAKRRRTKLRGRFCMPRGTESEHFFA

SEQ ID NO: 159554 - protein, 91 aa, Heterodera glycines
EHEKLTNNNVKNEGQQVEQREFIHSVHNVRVVLVQVAQIAMETDLNAKVQVAWVADVRDNAKNAMDFLVFLHCQRFVKVKDCLFPMRVFAV

SEQ ID NO: 159555 - protein, 128 aa, Heterodera glycines
IIQIDRSLLNNSFHSLLLITRVGSCVEKPVADLIAKNFNVNFVPLIRIFPSNRFLLPFCPFAFVSRNWTTDQQKTVDVVSSFQCQLFPGQFVGKIKGQNGVSKRQRSANENDEIDGGRSIGKCRFEFP

SEQ ID NO: 159556 - protein, 52 aa, Heterodera glycines
GRIDAKTDAGKCNGKCEETVSGRRWKYHSMKAPKLPIYFNPFVLCLTIFSIF

SEQ ID NO: 159557 - protein, 168 aa, Heterodera glycines
GEPWMVTDQLLPALPKITSKDPSVLMAVLGIYKIVHENTKFGINKEQCARSVLPYLISTAVEPTLNLQQFGQYMELVHQLIRRVETEQRHCLEQLSASQEEQRKITDFADFLNAQSNEMNKTNQSEVDLGDLARALSGTSANDGICNRTTDKRDSTTENSGETMAKGA

SEQ ID NO: 159558 - protein, 97 aa, Heterodera glycines
SGRTSLFIAHRLATIVDADIIYVLDRGMVVEYGTHSQLVGLPGGKYADLWHSQHRIGAELELAQREAERQKKREEEEVMLDMELSEGKCCGGMTCNR

SEQ ID NO: 159559 - protein, 196 aa, Heterodera glycines
DLKGVLFRPDRVVIAARNLANNAAESKRDGNTVCHFLNACSTYSPEATTHFYSYLGLEKFHKGVAKAMESGRSDEVLARLEAVRRRVLAAPMNVHFGGDPSQIRLGTCSSSASSPPITDIASQWAFLEQPIHQLLQCPADYGASEAQFGQSRAIVVGGADSAFLLQKTRFDDDWNGPSTMSTLLLCSYLQQSEGPL

SEQ ID NO: 159560 - protein, 35 aa, Heterodera glycines
FWFFFFFFFWNTPIFFIITQMTEYDATQTNILRRS

SEQ ID NO: 159561 - protein, 173 aa, Heterodera glycines
GNEPKTIPMDTETLTAADSLRSHFGSLTKGIPNRMHRSSLLSAWEPPTSSASILKNPEQQQPPLLSDITEVFSAQQNVLGPSTSIGKITEMTHNVPSQFNDKDTVKELISQSFGETKGEELGRIVQAKGRPVTMGKDRSTEQLNKSGETHRKDNLRRKSGVDNALLPSPFTDG

SEQ ID NO: 159562 - protein, 82 aa, Heterodera glycines
TSKKRERFNWQKEIGNGFHLNEGVQKGSPFAHPQHGSPVALFKMAFTRSNWGKKKASISRAHTSPKTTAKHSQTLNVMKMSP

SEQ ID NO: 159563 - protein, 160 aa, Heterodera glycines
GINKSMLNGQNVLVSDVHYPFPNGNDVMYVDQEEEAEHFAEGTSTQHQPNLRSDQQRRLSFIQTTALIKDELRKAEQGQASGNAIEILFEQVHRSNVEIDNVDNLRTLCRGGETLDQLIQLSVTQVEGMKDETAHCLDPGKLVARLKSFAISHRKTGDSD

SEQ ID NO: 159564 - protein, 108 aa, Heterodera glycines
YFFLFFIFYALCPSSPLFPLHPHLSAPTLPPALPPPGALTFSVSSKSQICSKCCPPPLTAVAVLPTFSFLRLIAHLFTGAAQSAHFHIPLQGFLIEPQKSEFNGRNGK

SEQ ID NO: 159565 - protein, 76 aa, Heterodera glycines
FFFFFFFFFPGFYFFFPSPLLYSYGPSFQWIFPFLPFPPPFFPFFPPRVSPPFLPIGNQLIFRVGKTQGLLFPGPL

SEQ ID NO: 159566 - protein, 137 aa, Heterodera glycines
TLSSVLAVPFIPSLLGPTILLVRLLIVNPGIVVEHLNGLFGTGKRNIGHRWRWHRHLRIGNGRLRNIGQTVQQSLVVVLMRHRLRRIVKHLLWVNARVLLLCWLLEVVVLPLVVIRRVRKGRLLRWCLAVVVVVHHP

SEQ ID NO: 159567 - protein, 97 aa, Heterodera glycines
KGQKMANESVPPLLPPVNLYDVRQIVVGPSNSASEKTYVFSQQQQGNLGGGANVFWDLVFFFGGLVACVMLAVFGYKELRKRGFFVADGERQNENLI

SEQ ID NO: 159568 - protein, 74 aa, Heterodera glycines
TKRKTIKWKTKTINQNPSITNLSGVDAQLPQVGGVEERKDFGHVRISAQRPFHPFVLCEELQIFAVVNTVLGVV

SEQ ID NO: 159569 - protein, 138 aa, Heterodera glycines
MPNIFKILLIVLLAVVSFRLSASTGDKKTANDGSGNNSSAGIGTKIKRIVTAGLLFTSLATGGAEAIGRSNAQGGNAAGLVPSHVTNRSMAPPPPPVQFEMGANRLEKMRAHLRELAEKMPGNESKRLSPSGPDPHHH

SEQ ID NO: 159570 - protein, 143 aa, Heterodera glycines
KLFYCTKIMVASSFSNNGKNILESPFKLTGECKLLYYCTNELGHFLNQTSNALIGNPLRIVPFDGLSSPQKQVCTNTSNSLEFNCTERYISLTNGTALWIYDLQKGSTLRELHDHDGNISGVAWHRQSPWLLASVGDDCTLRL

SEQ ID NO: 159571 - protein, 50 aa, Heterodera glycines
MRPPKSLSEIVINYFRNEHFMCRVPVANCPPFSLFYPHRCPEPKKKKKKK

SEQ ID NO: 159572 - protein, 98 aa, Heterodera glycines
KKKRKKERKKLQTYESVEAKFDLQKIEKMSTLTNRLNKLADHLGEIGHLHFEKGELNAMDLEEKLMFEIVRLAEQKQHEIEEGRRNGKSKKKKKKKKK

SEQ ID NO: 159573 - protein, 224 aa, Heterodera glycines
MNRRWLCSDVWMDILPSFDHAQLGLKMALLSDCFDVLVDKHFDRKSELTIWREIIIRGDKGQKPLLSVEVDGKFVDFPLPDDSLPNKISFNNLHIQYIDHSVIKFLRSKKRFFDKSGTKLEVFVDAIDTDVQPIWDVFIREIWPIFEKSIRHLGFHNGDHLDNFRRRTSPTILTDLDQLVSIDCGYLRPDGIADDGPNATAGQALTKWVRTPSKNGQPKRLHRN

SEQ ID NO: 159574 - protein, 209 aa, Heterodera glycines
  unsure (1)..(209): unsure at all Xaa locations
PVLDLAXQEQKRLALEFQLKTKEFASCRDNFKFFERTYFTEQQKLRSEVHLKVSADFLDEIGRLEAIIDRFKHPFVDDPELISDYKRQLAIHVNGMLSEGLQNQCTGGLMAQIWSLEQSMHAFVKKILNERHAAQLDKIWQYKQPFKFAIVVNCPELMSDFYEDLEFRFSLGVENVARWILSITRGQPITAIDRNVLRMNVLSRQGHND

SEQ ID NO: 159575 - protein, 186 aa, Heterodera glycines; identical to SEQ ID NO: 158778

SEQ ID NO: 159576 - protein, 222 aa, Heterodera glycines
EEMEEMAEKTKSQRKGEKSLKRRRKSDERWKKRRKRRKKKWKIKRKLTERKEEEVEEKEKEPERMEEEKKMLERMEEEAEEKEEKREWAADEMVEKEEKREWTEKDLEEMEENDENPVEEDPEEENMEKTESNEKELDDTEEKQEEKEEKEEMAEEMKEEEEEMEQVAEEEEKLEFKANEMQQNMEEKQEEKEEKRELTEDQMEEKQEEKEQKTKSDERWKK

SEQ ID NO: 159577 - protein, 106 aa, Heterodera glycines
WLCCSASSLSPILRDFGLCLLFHTLLFTTYLIFAQIFCFWHGQTRVEYLMDVHAYNLSFRENLSACLGSRWPFIFISPFIPSQLETDGTFFRTREREEIGKSTKYF

SEQ ID NO: 159578 - protein, 248 aa, Heterodera glycines
KRVLGFCDFRLDPTISKGFEFDVEGPNFPVEGFRFVGLISMIDPPRAAVPDAVAKCRSAGIKVVMVTGDHPITAKAIAKSVGIISEGMETVEDIAVRKEISVDQVDPREAKAIVIHGSDLREMNEDQLAEVINNHDEIVFARTSPQQKLMIVEGFQRQGQIVAVTGDGVNDSPALKKADIGVAMGIAGSDVSKQAADMILLDDNFASIVTGVEEGRLIFDNLKKSIAYTLTSNIPEISPFLMYILFGI

SEQ ID NO: 159579 - protein, 68 aa, Heterodera glycines
  unsure (1)..(68): unsure at all Xaa locations
PSPALRILGKYPDTLEGRKIGILVADGSDGAGVSXVPKAVEGDGGSVFIVAPKIGGAKLADGSTLAGD

SEQ ID NO: 159580 - protein, 51 aa, Heterodera glycines
MDDAAIKRKLVDLFDDEASLSGDDVGSDSDGETQDEPDEYEAEEGDLDQLP

SEQ ID NO: 159581 - protein, 231 aa, Heterodera glycines
  unsure (1)..(231): unsure at all Xaa locations
CPNCWKSHPPXHRHKTSRCAKCNECPLCKNVLSGRSQADVYYLQCNSCQWTSRTSEGAERNMAKESWTEPTNPMEGELGKVMAIMKRLSNFERFEREMNRRSGMSKLDKFGTFERETPTKRMSGRGILRNDRFSLQNAYNSRRKALQKQDDVDEVLELLAPSADVPELDPDIFSVPPKFALSIEQTIAHPLCVSAAHLQPTKVKMMTRRAFRCSECATMLYRGQLSPNDVK

SEQ ID NO: 159582 - protein, 119 aa, Heterodera glycines
TWDSAATVMLQGRDFIMPGETVELEFLFNTPQFVRPQQRFTLRHDKTTIACGVFLEALPESEGEIRDKKWRKMQMRGVMERVGFNPFGNRSFERACKPDYTNSPKDNPAEALFKAEAKA

SEQ ID NO: 159583 - protein, 182 aa, Heterodera glycines
  unsure (1)..(182): unsure at all Xaa locations
WSKLTSFWPFNAFRERQRHLLLADPNLRLGDVTSVNLTKIEGGVQTNVIPAQFVAYFDMRVTPTDDFQQMEAMIANWCKEAGPDVTFEFVQKGMCKSLTPTDASSPWWHAFSSALSEXEIFIGGTDARFLREKGIPAIGFSPMNNTPILLHDHNEFLNEGVFLRGVKIYTKMIPRLANLPSF

SEQ ID NO: 159584 - protein, 194 aa, Heterodera glycines
  unsure (1)..(194): unsure at all Xaa locations
CPDCYRSTEAVLVCPFEVVKVRLQSELNTXSLTTVAREIVHSNGWGTEGLYRGIGANLWRHGVWNSCYFGIYHNLRLFLCSIPSKNSQSSADRLETASLTMRLTIASLSAIVANLANIPFDVAKSRIQGPQPTTGRLYFSTWQSIGLLQRQHGFCSIYRMLFPFAFIFGPGGGMMLVIYEGIYEWLIRRSMALE

SEQ ID NO: 159585 - protein, 245 aa, Heterodera glycines
MSRTSVSDLLLIVRAAASSAEHVELKYRMLSNGRDVALNVKHLLASLLFLLTRPDDPTTKSAVLTTANEIAKMVAELAQCSDQLRSNGASTAMSVEESVMAVGNELLVAANSVEAVSYKLAQMRPREIHKPDENLTYDEQILSSAKSITQAVQTLVKAASSAQQELVAQGRVADPGPANGSEEQQWTAGLVSAAKLVAAATNQLCEAANGLVQGHSTEEKLIAAAKQVASSTAHLLVACKVKCDL

SEQ ID NO: 159586 - protein, 191 aa, Heterodera glycines
  unsure (1)..(191): unsure at all Xaa locations
PSLRVSQKHFCPIWSPSSPDIQLIFQSVDRDRSGQISADELNRXLSNGTWKPFNPETCRMMISMFDSNNDGXINFQEFGALWEYINDWTRTFRTFDRDNSGNIDRDELVNALTQFGYRLSGTFYDMLMRKFDRTQSGRINFDDFIQLCVVLQTLTTAFREKDTDRDGWIRIYYEEFLAMVFSLKMSMMAKQ

SEQ ID NO: 159587 - protein, 227 aa, Heterodera glycines
  unsure (1)..(227): unsure at all Xaa locations
NAPNGLTILLLISVVIGHSLANLGPTIKHNPHFKAVQTAHHLHDAIAKKHEAEVTQVICSISNEQRQALALEFKKQFGTDLIAMLKKEFKSDFEELIISLMQTPAVYDANQMRAALSGSNEAVLIEILATRTNRQITALKQAYEQLDRRHQHNQLEEDIKAKTKXTLPKSVGVFAQLLSRRKXPASIVLAHDEAMKLFREGEGRRXVNAVVFNQVLATRSFAQLRET

SEQ ID NO: 159588 - protein, 249 aa, Heterodera glycines
  unsure (1)..(249): unsure at all Xaa locations
GKPESKDLYVRPNIIAKRISGTLEAHVNGFRXTSLRGDKIEVMYNNIKHAFFQPCDNEMIILLHFHLKNPVLWGKKKYSDVQFFTEVGEITTDLGKYHHMQDRDDIQSEQMEREMRKKLNMAFQNFCDKVFRMTNEQVDFDTPFNDLSFIGAPHRSTVSLKPTSSCLVHLTEWPPFVVTLDEVELVHFERVSSNTSTFDTVIVFKDYTKKPHIIGQIPSNNLDSIKDWLNSCDIRYSEGPMSLNWANIM

SEQ ID NO: 159589 - protein, 208 aa, Heterodera glycines
EQFASFSRIRPNLLNFSACFSSPSDGSAPRLEGSSPPPLASSIRFPHFVSRQKFTLSSTYEKQDWFPKHMGVQLKVMEGKLRTVDLVIEVHDARVALTGRNPSFGAKLYSVRPHILVFNKMDLINMKRYKEPIEEYYRNEQNITNICWTNCKNLTNKTQFQNLMDKMLDLLRNEHRFNRTVKTEYQVMVVGIPNTGKSSLINALRNVN

SEQ ID NO: 159590 - protein, 120 aa, Heterodera glycines
MTEKRTSLLLSKRFSLALICFAGCALCYALRSNLSFAIVCMVKEGSPTVDDNGTTKKGCGAAHATTEQQRQLPINESDMAISRFRRQTNRSALIGHHDADVEQSLPVPLGPGEFDWSKQV

SEQ ID NO: 159591 - protein, 87 aa, Heterodera glycines
QININLWPFSPQVFMCCLAKCQGKCLSGFAVDLQQMATPTVPASVIFVRNAILAVSTTRAFLARSFSAGGAIIFAFYFVLKFLRYLK

SEQ ID NO: 159592 - protein, 124 aa, Heterodera glycines
RLLARLRVLVLAKTERALVGMQVDSLNEAQALPLMAKLNSLPTERRIFQFIRDDQFYLVVTFAPDDQTGVRINFHLFSANENRLTLLDLDAEHIIRTAPAPSLRPQKSESFQNFYKRNKKQREG

SEQ ID NO: 159593 - protein, 208 aa, Heterodera glycines
GLSAAIALLGAFCYIELGTSIRRSGGDFAYLCHVKWRSIAFSFMACGCVLTFPLTLAIQAETFAQYFLQGFGIEFVDEWTAVMGRKCIGYALTWLLLFLNFFSLGSAVSRFQIFCSAAKLLSIGIVIATGFYLLIFHGQTHNLRDPFANSVWEPGHLVEAFFAGLFSYDGWDILNFGAEEVANPRSTMRFAILVGILFVAFLYFAVNL

SEQ ID NO: 159594 - protein, 108 aa, Heterodera glycines; identical to SEQ ID NO: 147910

SEQ ID NO: 159595 - protein, 211 aa, Heterodera glycines
  unsure (1)..(211): unsure at all Xaa locations
QEEAHMVEEHKLVERTLESCSKCINSKLFEKHXIVAYGLKTYLSVVNWDGLSPEHCYIAPMAHCASLVQMDEDVYEEMKLWMKGLVAMWRDEKGEDGMDCVFVETAINIREQQHMSIECIPLPKELGELAPIYFKKAIMESEKEWSNNQKLIDLAKTSKANVRGTIPKGFPYFTVNFGLQPGFAHVVEDERKFPFNFAQEIIGGMLDLPHS

SEQ ID NO: 159596 - protein, 69 aa, Heterodera glycines
LPTDSITQLQRSLSLHSLDIPCQCKCKRPDYVLALENRVALLQEQNKSLMDRLREMKGPNGEKSKKTDD

SEQ ID NO: 159597 - protein, 173 aa, Heterodera glycines
YQINHRTRAQTMGRRRGAAEAKGRQKNKKAETAATTKRTVVAKRILKRKVPNPSARKLTADASRHLGGQSATAIRVKKRRSRSLDTMLRCKWDTSSSFLDLTSSTDFSSFFDEPKKPRPFEGQKCANSPNTKLNQAKFSFFSSTERMMSEWMKNKNSGTDGRKFEEEKYCQNG

SEQ ID NO: 159598 - protein, 204 aa, Heterodera glycines
FSHSVMAHFISLFFHLIIFYFRFSMTIVKGADGEDDDSFLKFVEGLPSNKKDLEIFEKKLLKETPSGLFYVAHFGVLSLMRENWDCAKVRKELKEQCRTYVKYVHILYEYFFRLFIKAPLVVPKFHFDDSVLNEHILVNVINSLSMISSFYFEECNGTECLYALFSKPKLQNEDDLPYKIMEDKTFCQKASEKLKKVIKIKSEN

SEQ ID NO: 159599 - protein, 213 aa, Heterodera glycines
MKQLLEECGGWTEPNRYKIYFSYRNIEHEHISHENVAELASGSTIGNYFGSIEDVENISATVVRPKFHTVQTQTEDTNNNEMLSNSSFCAEPGADNDMDGSKTEGMTAQELRMIDYERDIERLEIQCSKQHEQLIILSERAKHVELLEEQKVGLQTQTDILRRQNAQLIRDHEELKCLFGGGSISRNGLEGVGAQCRPIARKDKELETKLKLL

SEQ ID NO: 159600 - protein, 101 aa, Heterodera glycines
  unsure (1)..(101): unsure at all Xaa locations
TVAWYLSFVVSRXYLPFXQIVGTSFSFVPFILVSAGGAVFVYCLLPETRGKQATDIVREIRQRVKSISHGQSPFAEGSAEAATTTAQPNGQMSELTALLSF

SEQ ID NO: 159601 - protein, 123 aa, Heterodera glycines
LTKLEIPVWDLGGQTSIRPYWRCYYSNTDAIIYVVDSADRDRVGISKQELVSMLEEELKNAILMVLANKQDIHGCLSLAEVHKALGLEAIRNRTFQIFKTSATKGDGLDEAMEFLAASLQSAK

SEQ ID NO: 159602 - protein, 122 aa, Heterodera glycines
HRTAITTHGILQRLVTLTARNGAGEVVAAHGAIGVVADPAIQAAAMERMGAAERRPRDGAHVGHTNGTSLAPLRFSCVSCASNCRPPPLGIAQLRLGTPGPRRVCWSGHEGYDVCDVMVRRF

SEQ ID NO: 159603 - protein, 52 aa, Heterodera glycines
FFFFFFFFFFFFFFFFFFFFFFFFFFFFFFFFNDNVLLCNFTTSLNRAHPNK

SEQ ID NO: 159604 - protein, 235 aa, Heterodera glycines
MGTLKSIKILEHGLTITEKWKTDNQLTNVLELKDKVLRGLKLTVETAFKPHVEGSRHAIAKADWANDAFHVNGDLTLFGGPLFTGSFVAKMSNDWLVGAQLKANLEQGTVGPTAISIGRKTAEYSLHSHTTDGTDFGASLYHRVHQNLEYGVQMGWKMGDAMASWAIATKYNMSPELTLRAKMDHDSLVSVSAVHNLNGTLKLTLSSHFAMAAFPDAQNKFGFGLEYCPGGTCCA

SEQ ID NO: 159605 - protein, 194 aa, Heterodera glycines
QEIEGKGHEIEDEEFDLNDEACFEACVNRLNMWDQCLDNAVRLEQRLLPHVIYDDAEHEAHHNDLIDVIQHVEPVRITNSGLEPLNGKLTEFINNPLNSSDNEAPVLPRAITGINHVTPSFDQIKQMIEAIRTQGDCPAVDILAPADNLTVYDAFVCKVLADVLDILKRQRFYTNLELIERDARARGEAKWQNA

SEQ ID NO: 159606 - protein, 160 aa, Heterodera glycines
  unsure (1)..(160): unsure at all Xaa locations
MEFLFXRKDIKQIWDLKGSLRNRLASTKNDNNGASSVLLDENYIQNMWRNQIYITTHSKTALSQAIINDSHFLADQGIMDYSLLAGICRGEEDEVIVGIVDYMRTFTFDKKVESAIKNAIPLTNSSTVISPEQYCRRFYEAIDGYFAVAPDQWTSESVFT

SEQ ID NO: 159607 - protein, 74 aa, Heterodera glycines
GNFQFLLLFSACCYLQRKEVYFAEKTERKIHRAANKKHKEETEGMAEFDFFKVAWACMANRMDFQMADLAAPVS

SEQ ID NO: 159608 - protein, 193 aa, Heterodera glycines
  unsure (1)..(193): unsure at all Xaa locations
AALVFEQLAAGCCSTAAYMAVHNMVPWMIDRFAXQELKQRYIPELASFTKLASYCLTEPGSGSDSAALRTNARREGDHYIVNGSKAFISGSGVSSVYLVMMRHKDAPPGPKGIFALIMTPDMPGFQLGKDENKLGWCTQPTRILTFEDVKVPVTNQVGADDEGFTIAMEGLNGGRVNIAACSLGAAQMSMDLA

SEQ ID NO: 159609 - protein, 132 aa, Heterodera glycines
  unsure (1)..(132): unsure at all Xaa locations
QDEAARRCPTKILIRPMISNPPIHGARIASKILSDPKLRQQWLGDVKGMADRIXTMRSQLRDLLAKAGSKRNWDHIVNQIGMFCFTGIGPEQVDRLAKEFSIYLTRDGRISVAGISSKNIDYLANALHEVTK

SEQ ID NO: 159610 - protein, 89 aa, Heterodera glycines
IIPDGGYFMIADFSHLDGQFKLRNESDEMENALDFGFCRWLCREKKLAAIPPSAFYSPENRKGNDYFIRLCFFKKDETLQKKKKKKKKK

SEQ ID NO: 159611 - protein, 46 aa, Heterodera glycines
  unsure (1)..(46): unsure at all Xaa locations
FFFFFFFFFFFFFFFFFFFFXRPVFYTYICTYGKYIMNDNTDHSVQ

SEQ ID NO: 159612 - protein, 138 aa, Heterodera glycines
SREFDWNLNYGAIALMWRGGCIIRSRFLDRIQNAFEKNPSLVNLLLDDFFMKAIGDAQDSWREVISTAVQLGIPMPAFSSALAFFDGYRTEALPANLIQAQPDYFGAHTYELLAQPGVAVHTNWTGRGGKVTSNAYSA

SEQ ID NO: 159613 - protein, 59 aa, Heterodera glycines
LIILGFAFISHRITNYLHFFALKSSDQSVIIAFPFFPLFFWFYRRRFVRPEFPPQRPPA

SEQ ID NO: 159614 - protein, 124 aa, Heterodera glycines
CAPAAILRRSGHFSGPFSGVEPLSSVTRHHHGSQIHYHRKLIRQTLERHVAGTRPCDQLSCSESTLDARRALGFVANKCAPLWGDWSFGACISSRITTVIQVRSQGQVNYSWCNEPYAVSLSAG

SEQ ID NO: 159615 - protein, 95 aa, Heterodera glycines
KMCNTPGSFECQCVDGFKRLDSGECSIDVEAHPNVPWLQPGEKLRLFSYFGLFLITVFVFTMHRSTLAVFLAVSAIFAVLLVDLFFGDGFLLLFR

SEQ ID NO: 159616 - protein, 196 aa, Heterodera glycines
MTEIGNGSSGFIPKGFRPSPISAFFSAEAVRYMTEAEFHRFRLKYITPQPFADRMRESWPTVEQPISEWLAQCWDSAAAYGEQCRRVSKARLFNLICMHCRDCPDAIAEMFCLVLRCKDDDPQACKELVLVDLKNSEFYARMFDLRGNPMKMDAISKCLEPQCIFPELRKRNANEYAPLLARVEALYKRSLKHGNG

SEQ ID NO: 159617 - protein, 194 aa, Heterodera glycines
MILQFPFGDFNVLLLLTISTVLLARCLGTIVQFEDELELMENTGTADESADGPLGAFWEWHRMVAGADKFGSISQRMLHLRPSLKVPSVSKRIAFPSTAFPNPNPNNAIPPPNVVRRRAHNIPRDKPPCLRPMDRPFREHRTYPRSWEMPGFEATIPRQWDWRNVSGTNFCSPNRNQHIPVYCGGCWVFGTLGS

SEQ ID NO: 159618 - protein, 220 aa, Heterodera glycines
  unsure (1)..(220): unsure at all Xaa locations
CLFPINQNTLHLQNLDFGIDLDXRVALVGPNGAGKSTLLKLFSRDVEPTDGMIRRHLHCKIGKYHQHLVEELPLELSALEYMQREFPDVREKEEMRKIIGRYGPTGREQVCPMKQLSDGQRCRVAFAWLAWQQPHLLLLDEPTNHLDMESIDALAEAINNFAGGMILVSHDFRLVQQVTEEIWVCDKQTITKWDGDIFSYKEHLRKKIESNDRKGTMTER

SEQ ID NO: 159619 - protein, 137 aa, Heterodera glycines
MFFHESRNTLKKSGNFWKKLISHCRKRRKSQKQKQRNKKQREKKQLNQKMKKKKHQKEKLNRKRQKLKRRRRKGAEWRRTERKRQQQRREIKGKSSRRNQKELTKMGRIDLISNSLMFCLATAIIETVTILIKYFGA

SEQ ID NO: 159620 - protein, 233 aa, Heterodera glycines
SAVEERQLRGNSLRLFFCPLAVISALFFGVGCNANHLYSEGGSFPVLSSDNSPPIPNDPPTFGSPADLLDNELQQPNQQYQTEFAPSMEQMVDEQRRNRLAKIIEQMRDNGQFSQQEIADGPGLFLEEGEANVPIERPSETETYWDGLKEGELESSEMFGENEGKKIAAVKKGQNEFVEFVEPRQHQNNRHKEWMDKRVPTDSTHAFYFLTNSGNILFMAYLAVCCFGIVAGA

SEQ ID NO: 159621 - protein, 120 aa, Heterodera glycines
KNEATNVKKIWICTTFWMDILPFLTVFKLDSIWDVFVRQIWPIFTTPNSHNLSPSYADHLDNLLRLTTPTILSDLNINSIHSSSFLSVPALLSITTCSFICPCQRQLCHLNWRMSGRKKS

SEQ ID NO: 159622 - protein, 94 aa, Heterodera glycines
  unsure (1)..(94): unsure at all Xaa locations
KRRRSQIVDEIDRQLKXIAKMAITYEDECPYNLGFARAMFDLAAAAAGHAGNGTEWQNMKGQFEQESQAIKAIGQELNIEPTDVHFGHPSKGFS

SEQ ID NO: 159623 - protein, 98 aa, Heterodera glycines
  unsure (1)..(98): unsure at all Xaa locations
LNKPPTHPLNPIKPDNACTFRLTAAAGTELAGAYSYSTLKNLRRGFFVPVQKQFTTQKAFVLHAAWLVQAYAHXPIFPTAASRRSLARISVPVWGTFH

SEQ ID NO: 159624 - protein, 111 aa, Heterodera glycines; identical to SEQ ID NO: 149987

SEQ ID NO: 159625 - protein, 154 aa, Heterodera glycines
IRHRLRNAQHCPSLRVVTFDGPIFIEFPPDESANASDGQAVTKWLFLPRPDNLMKELTICIVNSSVEHWLATVEQIEAAFSSASSPVNFVITVYFPPSSSLSAVMPFKLTNEFTVEQLALFKEDGEEDLIRDDGVGDGLLDGSPGPSGDQKQQK

SEQ ID NO: 159626 - protein, 206 aa, Heterodera glycines
  unsure (1)..(206): unsure at all Xaa locations
ANYFLMASSDRKKEKFSSDNRRLISSAAIGEHEQQQPMGSHGKRRNVRVAKKMNKSLGTTKPKRCCSLHNNFWMDIFPFFDHAQLGLKLAMLSPRFNVLVDKHFDGKSELTIWKLIQIRNPRTAPKLSVLVNNRKLVPFPLPFHPLPSKIHFKNLRIDYFDHSVVAFLRSNQQIFERGGLNLYLVVRAAHKRLLQPTLDVFVREIX

SEQ ID NO: 159627 - protein, 167 aa, Heterodera glycines
RAEEVLGQFVVRLLHADDDQPIGSWNFVLCLRPPLLSYIATVLQHSKNPSLVQLGLRSLFHLLTKCNSVDDCPPLSDTIGSVAGHLTSAVFVIIRSELVTGNINVVADILHALASKYPNVARSTVLALSGGDSQRLIALFARPNKFDFRQICATMHQTALLQKDPVI

SEQ ID NO: 159628 - protein, 104 aa, Heterodera glycines
FFFFFFFFDRRIIFSFWNKTFARNSEKEMWEKGGGGEKHRQKDKQSNFETELKVEKCHSSAFLGDSETKGKAKRQKKGGKVMEDKSKDGWSDRRRKRHSLVKKL

SEQ ID NO: 159629 - protein, 188 aa, Heterodera glycines
NLGVGRKSDCDLARWFSSFNSVRLVKSGLTRSKSQKFTQHVSTLLDCFSPFNVDYPQQDDTDDSADDESDKEKYDFLSWQKKLRQPQRSFKLPSESKYNPFQRFDPFQRLGPFQRLGVYGSRKEMENYLDIFGNEPSSSVTAPLIGSIKNAEIDQQNSEDEKGSSTSTKRVNPFLKPDGSSYNKDKDE

SEQ ID NO: 159630 - protein, 127 aa, Heterodera glycines
KESKDKLLSLPPPLFGKSASRKGRSNSICLARKTTDSTPTILSTSKNNLSESFLSNAWQSDDRRQNNESSAFSTLSCPPSVVPGPFIFFSIDCTNWRRRKVTKLVPNICCCCCASKSEQKNVKIEWT

SEQ ID NO: 159631 - protein, 167 aa, Heterodera glycines
HVCSAFGPLIVFALVLGLAITLTVITVNNWKEIGVLLSKQSALKSRSDIEAFYEIDCPIYSDNSKLPDKWDQFDLAFCNRYCDRNQMFESMHRQLDPNRKSSAKSKDNQELMCPIYIEFKQCQMGEGGHCEEKLFSEEFTEFVQPGGAGTSSKGENETIGTCVPCPS

SEQ ID NO: 159632 - protein, 113 aa, Heterodera glycines
FFFFFFFFFPGFFLGFFFFFFFFWVFFFFFFFFFFFFFFFFFFFFFFFFFLGYYKFILLRIQKAHCNHQHPNRELDVKEETELNPRALHPIARHVGPIPALFLQPIVFHFHPA

SEQ ID NO: 159633 - protein, 186 aa, Heterodera glycines
MTRTMALAEDLNMAEHLLLRSARDTSADEDDGGGDFDGSSNETESDSAQFGSQLKRDGAAGGISIGTFLGNISASARAQLHNIVNNASMTKKEMSEALDTWAQAQGQLFNTVYLGLKAAYESARQQLDQRHAAQMQNQTQAVREADAKIQTIANNQFITLAEEKQQMVEQMAKFPADVQQTLLQFA

SEQ ID NO: 159634 - protein, 166 aa, Heterodera glycines
RSRFRIQKLDQSWEHKSFEEDNDEEPKKLTIPDEYDQSDFLIENKSVGEQEKEIIREEIGFNGQAENGEKPSFEEEKCPPEGCRLYRDDLVESEEVLRNEHDLGRKLSKTEDLSKKMEVKGNEITKEDEHSAETHIVKEDENWMEHKEEEKREKKEGKREEEEEKR

SEQ ID NO: 159635 - protein, 108 aa, Heterodera glycines
MRDIRRGSPPKHARKPHDRKPIKGTAFRKGIVIKVVVKHPKKPNSGNRQCVLVRLSTGRQCIAYIPGEGHNLQEHSQIYVRGGRRRDLIGVRANVMRGKLDCAAVKKK

SEQ ID NO: 159636 - protein, 126 aa, Heterodera glycines
  unsure (1)..(126): unsure at all Xaa locations
PGQRVEILKEIAKKRXLKQETPLLDYALKVEQITTSKKPNLILNVDGAIATIFVDILRHSGMFTPQEARETIEIGSLNGLFVLGRSLGFIGHYLDQRRLKQPLYRHPWDDISYIMPEHEFAGQPSL

SEQ ID NO: 159637 - protein, 160 aa, Heterodera glycines
QSCWDELEEAKSKTEFNVGLMDVWDFGALALFHKIGTKNVVLTHNFLIMSHMYKYMEKAGWQTENSELFNYQKQILDKGVPELFSAVINDKNVGKAGAYKEKHNESSDIFSKVYEIADQKFKDLFKNNAFPTLEKLFGDAKALFVNTTPLLDYDIGSLPK

SEQ ID NO: 159638 - protein, 106 aa, Heterodera glycines
SMKRSTAFWSFEICSIQQNGHFFKYVELGSSFPLLRLSSLLFKPSGTRHCAAASASVPVFVALLRPTDNVIDAQNHNGRLNGCFDGLQSHSERVPNALGLRHAANS

SEQ ID NO: 159639 - protein, 138 aa, Heterodera glycines
MPNIFKILLIVLLAVVSFRLSASTGDKKTANDGSGNNSSAGIGTKIKRIVTAGLLFTSLATGGAEAIGRSNAHGGNAAGLVPSHVTNRSMAPPPPPVQFEMGANRLEKMRAHLRELAEKMPVNESKRLSPSGPDPHHH

SEQ ID NO: 159640 - protein, 156 aa, Heterodera glycines
QKTLKLTPFVVLGWSEGGRTSIHVAGQGKGLVSHMVLLSSGSQVDMRGDLAFKGMRNTDQWMPAAKAPYLEHYSNEFLKEQWAGLCDVVAKVYKDLGGSFPCDRVLNTLKIPVLIVNGNMDRFVLDPSLMSKKLENARIEIHAQGGHDLHIKYPRW

SEQ ID NO: 159641 - protein, 215 aa, Heterodera glycines
NLEELPEKREDEAIGKERAQSEWDGREGQTQANSAEPSHYRNPGELAQLRAKLLSPTKRRRAEDIDQSSENKLRRAEELRALLKQEKAQRLHLLHRRVGEVRTEREQIQQKKTAHLEMVKERIQKAEENRQKSLEEIVQKAQEDEMKIIEINLLNSFEAANQRLGKRFTQIRERNRHAKVVRKAEEERQKRIEENKQQREEAEKRRKDAEEQRTK

SEQ ID NO: 159642 - protein, 236 aa, Heterodera glycines
  unsure (1)..(236): unsure at all Xaa locations
MHVPQVHVATLNCWLLPXPWPIGSKHKQFRLQKLIDELKNSRFDVIALQEVWSEKIFLQIAHELNGFFPHSHYFHSGFTGSGTCVISKHPIVSTLLHRYSLNGFPHHVHRGDWFGGKIVGMVEIMVEQYRVAFYTTHLHAEYNRENDLFLPHRISQCFEMSQFIRHTSRGSDFVVVVGDFNLEPNDLGHHLIKNIAQXYDAWEIRSNLVDISQDNGMTCERPRHYTCKYVLQQCPS

SEQ ID NO: 159643 - protein, 121 aa, Heterodera glycines
  unsure (1)..(121): unsure at all Xaa locations
IVDAKLISAQRLKLVAFGQPRTGNGEWATAMDQKVGPFNYRVVNNRDLVPHMPPLWFEGYRHHMTEVFYNNAKNKTEEFVITRGXAESEECAGKYWFYNVRDHLNYFGKSVSEWGEKGCAN

SEQ ID NO: 159644 - protein, 208 aa, Heterodera glycines
NGGGTPPTPNSWLSRTQKQMLKKLRNRGHEDHEIHEQIHEFYEVSPEEVKATARGILQRGCESIFKRIFGEYNAEEIIQMRDEGASNVEIEEKITEALNQIRSPQKRQEAGRFAMSCRRIFAMIERRRRSADNAEHSLDQLFKSHLIWLNEQQREELKQMKGSGKGRTEMQQRVMEWYGQLEGQEKQKAREHLRDGCRDILAQVLGKE

SEQ ID NO: 159645 - protein, 130 aa, Heterodera glycines
  unsure (1)..(130): unsure at all Xaa locations
LLFLCSFWQRDLEGYTFSCLDGCECDTDDEAIIVQSXDRHFVQLPPSRLRGFTVLALTRNNIDVLPSEEVLLEKLPDLNAVDVEGNEHFHCSTLDHYRTLMVMSDCGKTPEQLEADRAKLPTDTQPNEDC

SEQ ID NO: 159646 - protein, 143 aa, Heterodera glycines
MSSSSIFLSFASFSLIILALCRAQNESAAQGDAQPPPFLTEASQEKINEFYQYVTSLGHLKETEIAEKVKEWVDKQSEEIQKKYVEFEQERERAKAEDEAAHEEAARKFTEAAKKADKELTEIANNPNLSANDKAEMINRKVH

SEQ ID NO: 159647 - protein, 116 aa, Heterodera glycines
MDRQNDLRQQQNVPEFICQERLDTNSPIAFKEPLPGAWNLHSEYLSTKTKEEKERKASRFRTELDPEDVKLVNELGHLSADKLMEYVRTLQNTALSLGEEEAAQFSRAKLLKILEK

SEQ ID NO: 159648 - protein, 152 aa, Heterodera glycines
SREAPDTRADEENRQVDSADREKRQDNRADREKRQDNRADEENRQVDSADREKRQDNRADREKRQDNRADREKRQDNRADREKRQDNRADREKRQDNRADREKRQDNRADREKRQDNRADREKRQDNRADREKRQDNRADREKRQDNRAIMY

SEQ ID NO: 159649 - protein, 84 aa, Heterodera glycines
MKRICPTAKLPYQTNPERIGHSFWRGPKSVAKSASFINLREVTARFRLAPGQYVVVPSTFEPDEEGHFLLRLFCSGQLKANELN

SEQ ID NO: 159650 - protein, 192 aa, Heterodera glycines
FSLLKQSRPPEFNTLRFDFKPASISSEASEAYVVQSQNQNENNFQVVVFGEAQKKTIFKGAKKEIKGDKECLLVYNRKSKELCLERVSANINVKKTRDTDLDQKAISEIERLQKRRRPKQSPPSPKAPVENATAVEPPAEQRKERTFSTSSAGDEIDEDDEENVSALEQLMASTKVERSEAEEDIFHPAQQR

SEQ ID NO: 159651 - protein, 129 aa, Heterodera glycines
RHIILQTECGEFHILLFCTSASGRRRRCQYPSVRQCPQMRCATLCPSVNSACPSLAAVGPQSVACTPPNCPPTICAFQTVDCAHPPISDEFPPPFSAFLSTAFARCLPRSALGPIPPHSVHPIHPQFGP

SEQ ID NO: 159652 - protein, 101 aa, Heterodera glycines
DAQKNFSEIEIPTIHGIDIFRENMLLQKILGLDLQFCMKSPAIVRFFVGLCRLLGFRARSSHEGDSICSPCREWNPGSGIPIGPALARKFFCFSMIHFFFL

SEQ ID NO: 159653 - protein, 40 aa, Heterodera glycines
VGLNSEQVKAYGNYEQLLQDADVDIVYMATINSTHLPLII

SEQ ID NO: 159654 - protein, 91 aa, Heterodera glycines
VFFPLRWFATTFRVLFDEPVEISSNTTYVASAKLTGNESHYGTKGLRKIKLERNGRPDINWHFQYAPGNNNGTSVEDGQIPEIIFCAKHPY

SEQ ID NO: 159655 - protein, 76 aa, Heterodera glycines
  unsure (1)..(76): unsure at all Xaa locations
KLNIHVGNQSLVDQLXWDMSNPNNSPEQFAQKLCAELGLGGEFVGAIAYSIRGQLSXDQRTYAFSESPLDTVACPF

SEQ ID NO: 159656 - protein, 145 aa, Heterodera glycines
NSEHLRLSDPKYSNICTIKSCSFAGDQYLVTGSDDWNIYVWKVPSNWDDFANGTVNVHSVLDGHRSIVNHVKYGPRSNLLLPCGVEKIIKCWSGLPLRDSYQNPKKRERISTILPDFLGDPDHGSMDSDTEEDLDTLQRFDFYYE

SEQ ID NO: 159657 - protein, 118 aa, Heterodera glycines
  unsure (1)..(118): unsure at all Xaa locations
LVARPEQCDVMVMPSLYSSIVDNLAAGLVGGAGVDNRESEGSDYVIFHPVARDTXKDVFGKQIANPTAVILCCANMLNHLHLNSYRSALRHSVEKALKEGKLRTRDLGGFANTSDCAQ

SEQ ID NO: 159658 - protein, 111 aa, Heterodera glycines
  unsure (1)..(111): unsure at all Xaa locations
CKAIVRELMGRLSEERSEQVENRMGFCEHXFITGKDGTGKGDGMMQEQHGDEHHHHHYNHTKRRAHRQRRDHHHHHHGEHGLEDYVKTHLAWLTDEQKAEISTMKESGKSR

SEQ ID NO: 159659 - protein, 118 aa, Heterodera glycines
LSSKFLCSPHFLLYKMNWSAEKNMPTPEQILATLRQALADLDSRLSEKLKTETVKLLKGIDSVLHAKADQHVQKNEKVLSFVEHARNAMLDRAKLMTSQVGKQVKDGLMLAFGRVVFT

SEQ ID NO: 159660 - protein, 171 aa, Heterodera glycines
IPASSSCSSSSMCCCNALAKMHESFVAKFRVIRPQANLITLDGDNNNDIILHEEADEDEAIAQPCTSSAGQQPRPIGGGTADELQQEAEDNESVLLNGAESPTPGAGTLGYEILAEDSKTPAPFYEMMSESELNAELAKYGHGPMGKRAAIRLLNRIYEATHPVISSDTPI

SEQ ID NO: 159661 - protein, 218 aa, Heterodera glycines
MGAQLAETLVENVDIPESAVGLVIGRGGEQIQLIQQQSSCRVQMSSESNVSGFRQCTLQGARHNIDKAKQLIQEVLERSNRSAPGPQNGANAITIELSIPGPKCGLIIGKNGETIKGLQEQIGVKMMLVQESHQPTMGTKPLRVSGPPDKVENAKRIIEQLLAGDGTQPNLSQTLRGTNVGGGGGNASRSIGEVIVPRTSVGIIIGKGGETIKRLAAE

SEQ ID NO: 159662 - protein, 93 aa, Heterodera glycines
CECFGGGRLGGTECLFSTDDSRRGVPISIMKANRKKGHRFDLCLRHAFYVFAFEYLLIIFAFICIFMSLFLCFALNAFSPISLTILHFIWSQP

SEQ ID NO: 159663 - protein, 152 aa, Heterodera glycines
EMVRILKALNRVHRKNTARHVDISTVLSLTLAFCVRMLMQFHFIAKQTTTRPFGMFHEKLLAVFASLDENERKDQSFFDGIQEKSVELCPSVIRFLLRRVNAESIVFSKSEQSIVKNGIFLRASEIIRRKDIWLAKATVNRRKMKRSNGDRT

SEQ ID NO: 159664 - protein, 173 aa, Heterodera glycines
  unsure (1)..(173): unsure at all Xaa locations
SLFRKPLTHYQITQNALLKXRFFYEFLLANDRQVAREVKDEYVDTTSKMFFSYFKAYVSRLFKFQMVDSATKSDLLGAEDVVKHPTTISALPSLFTSGKTHQTRSRATVFSLGHRQNLLLDDLLAPLIVPHVAQENNETFQFESLFRSVQYALVDHCSHEFLFICDFFMVNGQ

SEQ ID NO: 159665 - protein, 87 aa, Heterodera glycines
ITSSQMDRANDLRQQQNVPEFICQERLDTYSPIAFKEPLPGAWNLHSEYLSTKTKEEKERKASRFKTELDPEDVKLVNELGIYRLTN

SEQ ID NO: 159666 - protein, 109 aa, Heterodera glycines
MYKFLFFLHFCILIKAISGLHCWNSNMILLSEMPEKGSVTVRQCPSGHQCVTANCWLGVGNYIVQKCVPDQPGARNYCKDFNNICQMGFFGMPIHCSSCKGDLCNEARN

SEQ ID NO: 159667 - protein, 154 aa, Heterodera glycines
MAPKCLPLELLFEIVPFVHAEEAVPNVLLSCRLLHNLLLPCVVKWKKRMAEGKKEEDLTKQFAAMSKHFEDKMKAMFKEFEAKIDAKIEALTKRMEAVEEELKKSTEETKKSTKRIEAAEEELKKSTEETKKSTKRIEAAEEELKKSTEEMKKS

SEQ ID NO: 159668 - protein, 99 aa, Heterodera glycines
MTKQTKVQSDDGSRAKEGRDYAQSEDDNGHPKMDVSKVALQIMEHDNVSSEQRRKSEKVADHEEGSADERVNGATTEFPVVLLVLHVFVVSKRPKQQHY

SEQ ID NO: 159669 - protein, 140 aa, Heterodera glycines
MRCSDLDEHWFDCQSVTESVNATDINQMELLCPYFGISKGPLLFANISCRVLPCIECYGTRNFAKEFPCKKYTGHYFLSALLYSIFLGPFAVDRFYLGYSAIALGKLMTLGGLGVWWLVDIFLPLFGHLKPADESEWQPF

SEQ ID NO: 159670 - protein, 155 aa, Heterodera glycines
MTIEPSTLTSLGVSCPGRVCCASDSVIVGTMGDDRMENNGNFLLLDRLTFEPIGFWAEKEGQKGTKFGGTDFCIQTKQNVLLSVGWGTPAKFRGGLRPRDVTNGHYSNEVNVWEWRQRRLIQTIALEGDCGWMPMAVRFLHNADKCHAFVCTLLG

SEQ ID NO: 159671 - protein, 138 aa, Heterodera glycines
NCPSDVSACTQSANSSSSGKSPSPISPSSGDQNCDCFERFFNAASFLFCSLSFAFTSSSSVGSAVCFCDVIIRGAGTIGTSRSSREEKLARAACSIDKKCHPKFMVFNFLILCLLRTLAEPLLNHGFVPKPPAHGVRR

SEQ ID NO: 159672 - protein, 111 aa, Heterodera glycines
  unsure (1)..(111): unsure at all Xaa locations
GYSVGVAGILSTLETILGLLEEHPDIVKRVEPVVRSCITTIFDAYCETYFEEALSLTHSLVLVHISPEMWTVFDHIYKAFLEEGTSFFSDCAPVLHXFLTNDTDNFLSVFD

SEQ ID NO: 159673 - protein, 105 aa, Heterodera glycines
EQFFNNTAQLAGWGKITKCVAKEKAISAPYLIGRAVQLSECRKLYRGDRICFRGIASQSGDTGSAVLASNGTDYVQIAVSSYVECISSAPEASYAIYSRIDAKWL

SEQ ID NO: 159674 - protein, 172 aa, Heterodera glycines
  unsure (1)..(172): unsure at all Xaa locations
IEGEHYAKSAQNEIQFVIVRLLFTLVMFFGFAIQMYVVVEMLWPEFVKFLRNLCPNFGVYNENDHKNMVGIELLFRAALVTVSMLIGLAVPELENIIPLVGXTAGMLLALIFPALLDLLVFLPIHLQRHRIRQTFWLLLDNWTLVAIGVFGLIAGLRANLRNIFTPAEDIVA

SEQ ID NO: 159675 - protein, 102 aa, Heterodera glycines
KEEAKLLRTQLGDMRGKLADLEGRNSLLERQAEELAYQVEDDQRAYESALNDKDAQIRKLRDEAQALMLELQMLLDTKQTLDAEIAIYRKMLEGEEDRSGLY

SEQ ID NO: 159676 - protein, 113 aa, Heterodera glycines
FQRFWMWTYVDRLLKKKKQYDTECRIDYEEYFTKEERELLSPIPAFQSIMDVRYNSELLESNIRVSLLHFGGLPADCRWPNGKSPPKRDEIKKVKILKTISASTRRTIICSIA

SEQ ID NO: 159677 - protein, 128 aa, Heterodera glycines
PILDQIGLLRLEVLKGGADLCRHFHHQLLLRVRATAVGDAHGGEFVLKQGVQRAGPRAAWHSPAVCRCLLIVAIVRQLLLLLLLGCAECGQWINARVQQMSSGQHGQRGHQRHHPGTVVHRSSAPPLA

SEQ ID NO: 159678 - protein, 188 aa, Heterodera glycines
TTRFDFLFFFFLPMASAPSSDRFSSDRFSSDHFFSDRSLRPQCLPNCASLSFGFVVDKLAQHCHCFSHLFECGQRIFEVSATELSPTNGFTSRVFRCEFEFGAFVGEKRMPTPKKRTMSAIAKVISLERMDTLWENFVGKKQMEKMRNSREQTEMIKSTLLQLHRNECNLYKFIGSSAPLPLPKVFYT

SEQ ID NO: 159679 - protein, 175 aa, Heterodera glycines
AHGLRARKREFPAKIFRPTPIVPTSKYRHSVADGMLTRDLRDSQVWKTVVTVDGISGGQAERRGQRSTAKDEKRHGDTEAVALRRHFYAEKPTNEQWQQNGRVALDEDGHNANQQKLDRAPNGGQIRQLVFSVGRTQFSMGGGQSAGPLVQCHARGESHDSLGSNSTANMHRCIS

SEQ ID NO: 159680 - protein, 107 aa, Heterodera glycines
SARDYATAVHKQHSSIQPKCSSNNIHQQQQATIAQPQQAVSAGMGAVSSSGGPAINPQTGQPDYSAQWAEYYRTMGMHEQAALIEAQMKQTHAAAQAQRPQQQLYMQ

SEQ ID NO: 159681 - protein, 42 aa, Heterodera glycines
TTVHVNKHSVRLLKVHILQLIYFSFYRGILDSIYVLGWTSHN

SEQ ID NO: 159682 - protein, 195 aa, Heterodera glycines
LLVRLLLMTQHYWHFHHLFLFFGISLWHNILSIFVDFSFLVAFPYGTTFLAFSLISSCFLAFPYGTTFLAFSSTFRFLWHFPMAQHSWHFHHLFLFLVAFPYGTTLLAFSSSLLVYWHFLMAQHFLSFPRLFLFLVAFPYGTTLLAFSSSLLVYWHFLMAQHFLPYGTTFLAFSSSLLVSCGISLWHNTIGIFII

SEQ ID NO: 159683 - protein, 189 aa, Heterodera glycines
MCLFSLHFALRSVPFFSYGSPHKLLRVICASIDPRQLSRLMSEIVRENIVLFSPDEILVLLHDSLKWESMEQFMLWQLIQVEAVELDKFLDLLQRLNYAQHPEATAAILVIIRNMEPDPDPAVMRSLLRNLFLRQPDRDLFTVDALKLIVDYSDNIPPMSDCISKMVKHAIHNDEIIAPFGQTKLGKAR

SEQ ID NO: 159684 - protein, 138 aa, Heterodera glycines
MPNIFKILLIVLLAVVSFRLSASTGDKKAANDGSGNNSSAGIGTKIKRIVTAGLLFTSLATGGAEAIGRSNAQGGNAAGLVPSHVTNRSMAPPPPPVQFEMGANRLEKMRAHLRELAEKMPVNESKRLSPSGPDPHYH

SEQ ID NO: 159685 - protein, 178 aa, Heterodera glycines
ERKDDKNGFGRMINWAKINECRVISFGQKNNTKIRLRGKKWLFLGGHGWVKDPSKVSAWPLIPQFVSFVVGRQSPVQTVKQFANFFEYWRRDLQTVQRTPQLQHASGDQFETETEQFLVRYSLLKSFDASTSRSWYSKSIVASVSVSSNPKTATAFTFLLPFDIVPPKLQDDKKKNQR

SEQ ID NO: 159686 - protein, 171 aa, Heterodera glycines
MRFPGWQPFLAILREALLMGGVEIKEVAANCLSQLIPLSSEAGLRPHVVNMAGPLIRILGERHPVPVKVAAVNALLRLLENVSLLLKAFLPQMQSVLLKILQDPSSQNLRQLASQAVVHLIDLHPKPETILKELNKLREADKSPEGLDLHTDKLINELIAKIDLKNGNTSK

SEQ ID NO: 159687 - protein, 124 aa, Heterodera glycines
MRHFYSILFALALLCSAFVFLSAEEDAAEGEEKPKAEERTQREVDPEAADLIGPSSDVQSSFLFTNLKSGASTTDLIAGEIVKFLVGFANKGEKDFIVKHCETSFRYPLDFSYHIQNFSAVRYE

SEQ ID NO: 159688 - protein, 141 aa, Heterodera glycines
  unsure (1)..(141): unsure at all Xaa locations
MALSALLLLLPLLLNVQNIPDESVQSDMKAVYSAISSPEQWKNSQNSLASLESQLTEPQRALAKMHWELETIQKEKPEAPPQFDLGLFSEALEVMVEMDEEAKEVKLRKDKLIXMGRRRGSKKKLKEKMTEEDTVPEVRVN

SEQ ID NO: 159689 - protein, 210 aa, Heterodera glycines
KSCSCPVFLLVRVFAAAFPLLAVIPFMLGLYFQMLVISPLRVAIFQSPLFFPWKEWAMGVVHFKIVCASVLMGPDWWLKTAFEQIYADGIWNIRLRDLYTNLVFPIVNTLTFLIAFPYVLSNFLLFFVDASREEQIIVIRFAYPFLLGSICFCALITWQWQKLKLLAQKIRNDKYLIGTQLVNFYRENTSAIVGNSTVKKSVTPMESIVN

SEQ ID NO: 159690 - protein, 57 aa, Heterodera glycines
FFFFFFFFFFLFVFFFFFFFLGFFFFKPNKCIQTKEATNAISRSTSIHNDHSFVISQ

SEQ ID NO: 159691 - protein, 208 aa, Heterodera glycines
KSCPCPVFLLVRVFAAAFPLLAVIPFMLGLYFQMLVISPLRVAIFQSPLFFPWKEWAMGVVHFKIVCASVLMGPDWWLKTAFEQIYADGIWNIRLRDLYTNLVFPIVNTLTFLIAFPYVLSNFLLFFVDASREEQIIVIRFAYPFLLGSICFCALITWQWQKLKLLAQKIRNDKYLIGTQLVNFYRENTSAIVGNSTVKKSVTPMESI

SEQ ID NO: 159692 - protein, 225 aa, Heterodera glycines
MNLRILLFFAVFIPSARSFYLPGLAPVNFCEGKDKKPTCPNKVTLFVNKLDSDQSVIPYEYHSFDFCIGSEQESPVENLGQVLFGERIRPSPYEINFKENKQCSYLCEKDYKSSDKSHQEKLRLLQRGMKLNYQHHWIIDNMPVTFCFINQQNMNVCTTGFPMGCYVTKEGKPKDACVLDGRYRQQDSFYLFNHVDIKIEYRDMSDDPNFLDEKIGGRIIRIKVQ

SEQ ID NO: 159693 - protein, 235 aa, Heterodera glycines
YSRKLATLESARHCRIFSSGLAAIAAVSHLLNSGQHVIVSGDCNGGTKNYFDKICVPHHGLELIFVDLTRLENLENEFKPNTKMVLFETPSNPLLKIVDIEAVCRMVRARSKDCVVVVDNTFMTPYFQRPLELGADVTVQSLTKYINGHTDVLMGTVVTNKEQLDQHIYAQQIYAGAVPSAFDAFLVLRGIKTLPLRMRQHMENALAIGRWLEKDPRVENVLYPELESHPQHQIH

SEQ ID NO: 159694 - protein, 238 aa, Heterodera glycines
  unsure (1)..(238): unsure at all Xaa locations
MQISTLELGPTTSLTLLMDTAPNLDLSSSIGHPSIDWPVGACSTGNDSADEEQWVKLSSDQFAENAVNFSDESAFSAFFVFCKSCVSLECAKLRAYCRTCESSAIIFLNEPQQWDDVKENNSIXFFCHYCDKESCVSFRFKCVKCGEPASPLQHISRNFSLPPSECVICGSNSFPLGVRLRDCTHLSCVQCFVAYAEELLSRMSLKWHPQVGYTVGCPFYGCTAVVTDVHTLYLLGKP

SEQ ID NO: 159695 - protein, 42 aa, Heterodera glycines
SKATNKHDQKKTMITLTLSKREIPNSYCWKIIKPSLIAFLKI

SEQ ID NO: 159696 - protein, 186 aa, Heterodera glycines
  unsure (1)..(186): unsure at all Xaa locations
CQSRSQASLCHCTRRAISDRSELTIARLRYTLGGDRPSQTTHHAMSRDRIXGPRLDVNDSKGGISRTTPPELAPRFHSLPPILHIRSLTPRRSYSKGSXGSFRLXREPRIFTGNSISLSLCWRQWGSRYAIRAGRNLPDKEFRYLRTVIVTAAVYLGFSSELSLLPLTFRHRAGVRPYTSHCCFAE

SEQ ID NO: 159697 - protein, 140 aa, Heterodera glycines
  unsure (1)..(140): unsure at all Xaa locations
EVSPDGDCLXSAVAHQANVSGLGKFSAFEIRRMAADYIQQNPEDFLPFLANENGEMFKDEQFDEYCSKVARMCASGGTWGGEPELRALSCVLRCPIEVLHADGATIKFGEVFSGHPLIVTYHKFAYTLGEHYNSTKPTGE

SEQ ID NO: 159698 - protein, 36 aa, Heterodera glycines
MGFNFEFTEEQKQLQAAVKKFTQDEIIPKASHYDKT

SEQ ID NO: 159699 - protein, 155 aa, Heterodera glycines
RGLSCVGVASEWFTGTTTGEGGAAQSAATTTGEGGAAQSAATTTGEGGAAQSATTTTGEGGATQSAATTTGEGGAAQSATTTTGEGGAAQSAATTTGHGWRCRHRRQQTLCRIQVTNITLRTFLTTQRAIGTYLTRFWITMIGMRRRMTRNVTRS

SEQ ID NO: 159700 - protein, 230 aa, Heterodera glycines
NRAAYASYSSALRESLVVIETEFLLANNAVLNTDTVSLTQKSEELVNYLLCRNEIDWAESESISRCFNIVDSISKIHSVDVERVFLALIDRWVIEGQEQSDQAVSQITSDPDSTIDFTGPSVLSNSVNTDDSDFFVPVLYDDIQTTRIIVLLRRIREPTKKILEFSHKSEIDVSVLPGGYLTKVRIACCILRFLTDEQMRTMFNISIDQYGNFVTMLNQRYSLCRIDSSP

SEQ ID NO: 159701 - protein, 201 aa, Heterodera glycines
MAMVCLVMAVLMEMANSKAVKKDNKKGAVAASPAKGKASPKGGKSPAKGKAAKVSKKDNKLKAKKETKGIKVKNAKPTKKGKSAKGAPKTAKKVQAAKKAPGKDKKSLVKPIVLKAPVPPHKMHPMIESEAVPPPAHARSLATVPYSTPGAADRNSLPSYTSAGTNLDMADDNDDYQNYYYGTEDGSREFDASAEEEDELY

SEQ ID NO: 159702 - protein, 205 aa, Heterodera glycines
SLLRSSEFDQFANFSACFSSPSDGSAPRLEGSSPPPLASSIRFPHFVSRQKFTLSSTYEKQDWFPKHMGVQLKVVEGKLRTVDLVIEVHDARVALTGRNPSFGAKLYSVRPHILVFNKMDLINMKRYKEPIEEYYRNEQNITNICWTNCKNLTNKTQFQNLMDKMLDLLRNEHRFNRTVKTEYQVMVVGIPNTGKSSLINALRNV

SEQ ID NO: 159703 - protein, 66 aa, Heterodera glycines
TQQCGKFLPPLSLCSPVSFFSLFLSVAAAEGTGRPHQLFLHLIFSVHPNDLDLTTYNAPHFYSLPY

SEQ ID NO: 159704 - protein, 22 aa, Heterodera glycines
PPSPSLFRNKLIEMRCCCCCCC

SEQ ID NO: 159705 - protein, 78 aa, Heterodera glycines
  unsure (1)..(78): unsure at all Xaa locations
RDFMAFGKRSPXEAFQREFMAFGKRGAPSDHFQRDFMAFGKRVPDGFQREFMTFGKRSSDVGRGGSFDREFMAFGRRK

SEQ ID NO: 159706 - protein, 80 aa, Heterodera glycines
TSRHRQMAKEDTWQWLMKRKTKPTILLPFCALNVHVHPRVKKKIVLLLCVLYAVSADERFKIGRRKEHLRRDDKMNGKKM

SEQ ID NO: 159707 - protein, 75 aa, Heterodera glycines
  unsure (1)..(75): unsure at all Xaa locations
MERTFVCXKPESVRRGLVGKIIERFEANGFRLIAIKMIVASRKQAMDHYVACAGQPFFPKVIGYMTSGPVVAMIW

SEQ ID NO: 159708 - protein, 61 aa, Heterodera glycines
QVSNEPVQIAKESTILFTRAQLSENVQKSDVFLRSTTVCAKQKNGAVESLGKMKRCVRETL

SEQ ID NO: 159709 - protein, 87 aa, Heterodera glycines; identical to SEQ ID NO: 138961

SEQ ID NO: 159710 - protein, 195 aa, Heterodera glycines
MLEKKIGAEAILKCPANADAPEGCVPDHGRLSWPYVATMAIMPFVVGTLHHPTQMQQRTQSALVIGMGGGTLDMFLHRKTPSLDPMVVQMARKWFGTVEDSTRRTFVEDGIVGIEKAAENGEQFDLVALDACEVYIDLICPASVFSDEKILQKIKAILKPTGAFVVNILMSDEKEEDKYVAEQKRKLLNIFPICL

SEQ ID NO: 159711 - protein, 133 aa, Heterodera glycines
  unsure (1)..(133): unsure at all Xaa locations
LFLGSIGRLLEHRSFICMGNXNCPLXGVRCACRACRLEKCLQVGMDPNAIQSERDRIGYTKRTRREKLVGFDEGIGHERGDLCAESFASNDADLEESDEDDVIFRDTEPTGGSPSVNIAQRSKVGTKNYINLR

SEQ ID NO: 159712 - protein, 117 aa, Heterodera glycines
MVAANLKLSLIFVAGFCLLFIADSDAGKSCKPGEKGPPGPPGKPGNKGKPGVCKPKYETTSKYGTTTSKYDTTTSKYGTTTPEYDTTASKYDTTTSKYDTTTSDYGTTTSKYDTTTS

SEQ ID NO: 159713 - protein, 229 aa, Heterodera glycines
MFKFAKPMTTTAARMIARKSRLEVMPMAKKYTESDYQRELTYRRSDYSFPAFCESDVTHFKRGEVHHKLMQGGASEGGFTLTAYVLVALLENHVQNKVTELARSNLVSHLADFKEDPYALTLCTYVLHLANSPEKGDVLKMLEGLQTTDGMVHWTTKVSNGAKDGSGGAAKNIGDVAWDTNQYFSQPQSANVEMSAYALLTYMLLDNKEHALPIVRWLTAQRNSLGGFS

SEQ ID NO: 159714 - protein, 118 aa, Heterodera glycines
  unsure (1)..(118): unsure at all Xaa locations
RGFLLDNNRCEARLCFNHCIDLTSTVGTSQSANLLDLVAESTSPLEVPMCKKCANAVTAELNKQLGHLEKECIQYKKSLDHLLQRRADCPFDMEASRIKLDAXKSEERDLLEQLTLLE

SEQ ID NO: 159715 - protein, 190 aa, Heterodera glycines
  unsure (1)..(190): unsure at all Xaa locations
DGEALTTLVLNRLKVGLXVCAVKAPGFGDNRKNTLKDMAVSTGGTVFGEEASLIKLEDIQIQDFGEADEVTVTKDDTLILRGKGSQEDVEKRIASIQDELDASTSDYEKEKLNERLAKLSTGVALLKIGGASEVEVNEKKDRVTDALCATRAAVEEGIVPGGGVALLRALKKLDTLKPDNDDQKSGIKIV

SEQ ID NO: 159716 - protein, 179 aa, Heterodera glycines
IHCKRKSDSLCDESYTIISLRFSSQALRTIRPKGLGCTPRGNTAAYATRLFSHQFHCRPFRKGANGGDSRASSKHICGSSAGMANSPSLFHRWRKFCQGTTFGVQHNKPQCLALRFGKYNRRQRAANSAILSEVRPFLRLSLSSLWLAFLSGSPNRSFASPAMKFHLSSRMLVNSRSPL

SEQ ID NO: 159717 - protein, 163 aa, Heterodera glycines
GERNHNEKTTEWRNIVEFARQLKGENERRLLTGCRTFKFPTKWARIPSGSSSFSLMAKPREICELADNCFFDVQELKKKIKHREAFSPVDIAHSVDVSGKGDPCSFINENYEVRWAYDSNTANVNFVMKQKAKSGKWWSAVGDWRQYERHGHWRCVPRRRRAK

SEQ ID NO: 159718 - protein, 131 aa, Heterodera glycines
SEPEPDAEDDPEPLSEVSVVDPSVVSSVSSVVSSFVALFSASAASAAPSFGCSSAVTASSSFFSAVWSPPSSSFFCSSSSCSNGTVTPKRVAGDSIRGSVFVSSVGPFSTSASPSPSSSPVPSLFGFINSR

SEQ ID NO: 159719 - protein, 226 aa, Heterodera glycines
MSAWICPGFLLFFVLILITDHCPMTQAVTQPPYGQLAVSGKNLVQKSTKKAVALHGLSMYWSQWVPKFWVKQTVNKLKCSCNANVVRAAMASSFGGYISNPTAEYKKMTAIIDGAIDQGLYVVVDWHTGDDLATTEIKYATEFFTKIAKAYNKYPHILYEIWNEPNKFVAWEAVVKPYAKTMIDVIRKYDKNNVIIVGTPNWDQDVDIVAKSPLKDANIIYTMHFY

SEQ ID NO: 159720 - protein, 202 aa, Heterodera glycines
MLPSPSFSIQLVSRLFSQFFNRPLCSSAHLLSKDPSNSRNSGRDHNFFEGLYFEGEIPRDRIKQKYTLSSGPGGSNVNSHPTKAEIRFTVDEADWIPRRVRERLVERYPRYMNNRGEFAFTSQKTRYQIQNMNDCFDRLHNMLLNCSEELVKEEHRTHVSPQRISIMEERKKRSEEFRLASKKFSFAEKTKPTFGLQHLNGP

SEQ ID NO: 159721 - protein, 203 aa, Heterodera glycines
HEAKATDTEVKTTDNEAKALKKKKKKAIGEPSKDFRIKEEGLCSMFLIKVEEGRKAYRYDIEVMNMVKQKSLTRGTDDGLRAFNRKICYELLIIAYEKTGQFGMKPDEKGRMGEIVYDSKATMYSSMPFHLECPKIEITHEEIVDDYVRDHTAMDSFLVTITPNHQKPVLDISDYRQYYSKKSLFDEDRTVRTFLEKEKKKKK

SEQ ID NO: 159722 - protein, 185 aa, Heterodera glycines
SLRSVEYFAENEIDIFAILFVALFIAIAEADGNVRAKRHEERLKRQDNRADEENRQVDSADREKRQDNRADREKRQEDSADREKRQDNRADREKRQDNRADREKRQDNRADREKRQDNRADREKRQDNRADREKRQDNRADREKRQDNRADQENRQEDSADREKRQDNRADREKRQDNRADREKR

SEQ ID NO: 159723 - protein, 129 aa, Heterodera glycines
  unsure (1)..(129): unsure at all Xaa locations
MENALAIGRWLEKDPRVEKVLYPELESHPQHQIHKKQSSGMSGMLSFYIRTDFDGALKFLXLKVFLVARSLGGFESLASLPAAMSRDSVPAKVRAQTGISDNLIRLSIGCEDKADLINDLDMAMRVVTE

SEQ ID NO: 159724 - protein, 132 aa, Heterodera glycines
PEADDDAEPEPLSEVSGVPEVSSVVSVVSSVVSSVVADFSPPVSAAASSFFSSAADPPSSFFSSSALSPPSSSFCCSSTTRSDGTATTSPAAEGGVSFLSSSAPFSTSPSAPPLPSSSSSSPSAFFGFMNRR

SEQ ID NO: 159725 - protein, 123 aa, Heterodera glycines
NVRKLEEWLKDGAAQFGPDFDVDSAIKLLRSAELFHLASKLAAKSDRPFTFLDILCQDTREWGKAVKFISERPLSVSCELLETYGPILLEHVEEQTLALIGRLIWSEGVNLKNLTKKKKKKKK

SEQ ID NO: 159726 - protein, 88 aa, Heterodera glycines
KIQWKMFLAADFVPSGKVSTYFMISSNLVLNDFPCWRSICLTRWRTSAGSCATSGGSGIWSMTFSGRVQMIESIRSIFCSALNDPSSG

SEQ ID NO: 159727 - protein, 101 aa, Heterodera glycines
LIDCRAPRVSFIIPCCSDLYSLFRVVSPMYILYVCIFYIVYYVYLFDLYYVFVCNKQFMGKKKKKKKKKKKKKKKKKKKKKKKKKKKKKKKKKKKKKKKKN

SEQ ID NO: 159728 - protein, 136 aa, Heterodera glycines
QHWTTVRCSNCSVLLPIVCPTLAFTERMKTWYVKKDFAQQMLQNLRSNQPSTIHENQLHLRVEFIKALRDFQYNVEQCHDPLLHSLQSEEAVLKLLELMFPRTNPDEESENGDVMKFTNPSVVSNGVLVLNALMET

SEQ ID NO: 159729 - protein, 157 aa, Heterodera glycines
EHLRDCKERGYYIKETSIDNDMLRFAFILSLQNDSPSSSRIDKAANCKHHTDENDEKLEELLLILNDNTIKRDIPELIEEAMNWLKEHIGEEEYVKLEKVLEEKRQAEQKPSIIEKKHDKDGENSEEGMGKRIKDKISQAKENLKGIIKQKLMKKTN

SEQ ID NO: 159730 - protein, 126 aa, Heterodera glycines; identical to SEQ ID NO: 141921

SEQ ID NO: 159731 - protein, 134 aa, Heterodera glycines
LFLWPYRDCRNNYYSKDDLTKSTLKHLAFIICGLTLWSQLTKSFIICGLTFWSQLSQFGSIQLCTRRTNLSSKMRKTKMADRMDRMPKWSINNMPKLCQCQFNHLAQNGFFLKNNDKSEIFLMKEHLVSPAKTC

SEQ ID NO: 159732 - protein, 126 aa, Heterodera glycines
MVYEEYCFDVRLDTSQESVSGEQRRHRTQQLPLCGTDESELHDLPWRHYDIFVCEKTISGLKDDRSENVFNRRQGACASGDDRCDNVFNRGQVASARNGEGRDSILIQGLAFVIVKVVNAVYDMIV

SEQ ID NO: 159733 - protein, 224 aa, Heterodera glycines
MFKFAKPMTTTAARMIARKSRLEVMPMAKKYTESDYQRELTYRRSDYSFPAFCESDVTHFKRGEVHHKLMQGGASEGGFTLTAYVLVALLENHVQNKVTELARSNLVSHLADFKGDPYALTLCTYVLHLANSPEKGDVLKMLEGLQTTDGMVHWTTKVSNGAKDGSGGAAKNIGDVAWDTNQYFSQPQSADVEMSAYALLTYMLLDNKEHALPIVRWLTAQRNF

SEQ ID NO: 159734 - protein, 156 aa, Heterodera glycines
LQFDDEAFLAFVKGPANFDKFCAGKGVTNDQSKELLAQIYGTHLGILFYMRKNWHCANVRKEFEEFIGPEECQLFQNYLCIVYEFLFNVYAEQEDIMKPIFKQPIGFRISILMSLMSALELMAKFSKFCLYELKLIERNDSTLAETIQLENEQETL

SEQ ID NO: 159735 - protein, 225 aa, Heterodera glycines
MMEMTILGNRICITADGAKVSPFGSKMDMGDYYVENNKLRKTRGLGWVMAALFVVADMAGGGIVALPTAVVRCQFFSGLLILLCMAIISTFSAVMLGQCWEILLRRFPVYRTHCRKPYAEIGLKALGPKIRTIVSICVNVTQYGATTVFLLLCAKNIRDFIRAFLDKEISFCYLIVVIALVLLPVTLLKSPNGFWPVIVGGMLSTIVAIVFICIGAMMDWRSCAP

SEQ ID NO: 159736 - protein, 118 aa, Heterodera glycines
RGFLLDNNRCEARLCFNHCIDLTSTVGTSQSANLLDLVAESTSPLEVPMCKKCANAVTAELNKQLGHLEKECIQYKKSLDHLLQRRADCPFDMEASRIKLDALKSEERDLLEQLTLLE

SEQ ID NO: 159737 - protein, 223 aa, Heterodera glycines
  unsure (1)..(223): unsure at all Xaa locations
IFESLKYLKIGKICKPNSKPKQKLYSSNFLLLQYFILTMADLRMEASNDVIIPVNVAIRIFSFVSRDDLENCKLTCKSWKDVIDYADNRKNSELQLRHIDAICLSTNSEFSIKIYYNQTIREFYYKKYFADMEIDEIEVKKVRHLTNQFDEKKYVFPCGEHLPIRQSHSFVFPAVDIFHQHRCKMVRPTVYQDHVNYTRKLFTPPLXFYERLQXMLKKCKIRL

SEQ ID NO: 159738 - protein, 63 aa, Heterodera glycines
FYPDITMIDKTSAHNKTIASKPMCMNALIFYKMLHVVYERYTEIKAIRYQNPGALINRFPFES

SEQ ID NO: 159739 - protein, 205 aa, Heterodera glycines
FLEQEIGKEEEKDNGTSEEKGMERTEEQQTKTPTEEEKRGEEDKTEGQRMADFQRENAPSPEERDEAKQSPIEEKAFVWQTVQTHPAEERAEDTYAESVDHPAKFEEITAKTDEREGEDSARSVDHHFEEVNATSDHVGEEGSPRLADHHFEEVNARSEASPGSVDHHFEEVNARSEASPGSVDHHFEEVNARSEASPRSVDHHF

SEQ ID NO: 159740 - protein, 212 aa, Heterodera glycines
  unsure (1)..(212): unsure at all Xaa locations
WIWDADTLSXVEKFAFEQPISSFHWFVPCDCNSSLISIATSSSNVVLLGPRLGNTAQQIRCLQQRIWSVRWDRFRDYVLVTGSDSGEIALWDIRSGKNELKRVKGPYENDNAKSESDRKRTANRMRNSAKLFHSDRIVCLRCTSDGRFLLSLSQNRNVCVWDAETMRMLCHLKVPESEGDLSTFPVQFELCDEGRLIWLFIPNSNNVTVGNC

SEQ ID NO: 159741 - protein, 174 aa, Heterodera glycines
MPPSLLGKPYKFKHLPRELSERWTEPTWVEAVKQAHENDAGKLKPWQQRYLDWMILQARLCGYLTVKKNDKKAQLQQEVNFSWNSATNQFCFRFLANHMQDNGVIVPIEHRYLLKSAPPRALALLSKGNDPENGPWEVTSKKHDALFAALNYCSAREIRQGLWQSYVTRSAFSS

SEQ ID NO: 159742 - protein, 95 aa, Heterodera glycines
MVSNWMNCLGLISRRPTPPPSPPSPPSGPFSTTISAPSSSSSLITSSSSSSSSSSSSESITCTVTAGASFCCCCFCLYCLPSSWPPSVPWAPPFL

SEQ ID NO: 159743 - protein, 125 aa, Heterodera glycines
SFVTKTIINILDHVKKKGREKCGNDREKKEREKQCSIRHWNQNNKINNSRHLVVVCSRPILSHHPSIVFLCIPLPSIRRGGTIHFPPHCLCNGPYSRVWNFRCPKRLGWNCWCACICAALARCPR

SEQ ID NO: 159744 - protein, 162 aa, Heterodera glycines
  unsure (1)..(162): unsure at all Xaa locations
KGIAHRDLKLENVLLCENGVIKVTDYGFSKQSSDLXLTFCGSRSYSSPEILLGIAYDMFKSDIWSLGVTAFIMITNTMPFHEDSPNQQIVDSQRKRRYKYPSWLNITKQCRTAIDALLTYQPAFRPNIFECAKLEWFAQDSASLWCGGRRAGVGVMGQVRGR

SEQ ID NO: 159745 - protein, 189 aa, Heterodera glycines
MYSPIFEPNKVPSTTINGDRPQKLRHAALDDFRAGRYQVVVTTDVCARGIDLKELDHVINMDLPIDYTTYVHRIGRTGRIKEGASTSFFDLAEDVELAKELVEGLQKQDQEVPDWLKLVAEGKMPLDESEAASGANSVPIAVRVPSETVPDTNSLPAAVTVPTDNVAATGANSVPLGTRVQDDGTPNGE

SEQ ID NO: 159746 - protein, 186 aa, Heterodera glycines
SVAVCSCLPHLLLSHHHPSAHFRRFFARRRRCLAVHRCPIQCQCQCRRCRGANLNVLLDALSSTCSDNICRFNASLFVGSITVRICFLLLIHRWSAAAPALLAELVHAGASREEKLGARLGHRKIARISIPMSVLLLLVLAKTHFGQCRVQKRFSLTFRRFVLLPVTLNPLGTNDIRGGKARIGSV

SEQ ID NO: 159747 - protein, 192 aa, Heterodera glycines
MIRCGKHFVDAFSDESQITVLTGGGTTQIELIRSFDECELPEPIKRNIELKKYTQPTPIQKAVIPLIANTKRDIMGHAQTGTGKTAAFLLPIVCHVQKLVEARGSGVVNGTHPVALIVVPTKELAEQLYEEARAFAAGTSVSVCHTYGHMPMALSLREKSDGCDIFIGTCGRIQQFVEERYIQLDILRYLVL

SEQ ID NO: 159748 - protein, 197 aa, Heterodera glycines
  unsure (1)..(197): unsure at all Xaa locations
MGFSTKHIIIDGKDRLLGRXGAGTSKKLLLGQKMVIVRCESINISGNFHRSKLKFLGFLHRRCNVNPSRGPFHYRAPYQILWRTGRGMLPHKTARGMEALKKLKCFDGCPQPYDTKKKFVLPNSLRHIALKPRRKYCTVGRLAHEDGWQYQRVVDKLETNRKVRGAALHEKKKALLKLKRKAVENAKPKTALFDKIL

SEQ ID NO: 159749 - protein, 150 aa, Heterodera glycines
RTATLRAPVSRRFEWLRRALHASSAGLDLIGSDATLILNQQQQMIRQGDTVEPIADDLLRADFSMPKLREFFECQKAMGVPNFAEDFDEFWLLVVKARLFNVFKYRGPDAYNRVVLKIRDIAHQLRAQVEENEHSDGTEKPKRGKKQMTN

SEQ ID NO: 159750 - protein, 64 aa, Heterodera glycines
AKTTTENVKVRIAVATWRNSESRRRRTMEMAAVGPALRPFQPDQFCQSFAYPFTIIYRFPLFKH

SEQ ID NO: 159751 - protein, 216 aa, Heterodera glycines
TESVHKKWEVERTLSSGAYGVVFLCKDPLMDIKGVVKVARAESGSETAEWEAAVMDKVTKNTHGKSINIVKLLDKGVLVAPDNSRLNFMVLEFCELTVKKYLSYRPAGPPRRARICQVLLGALKAIYDMHNQGLLHRDLKPENMGILSRADPVTVLYDLGMSRMFTNQLGQVREPRTVVPFKGAVEWASGHALNGREQTRWDDLIAWLYIAVELFD

SEQ ID NO: 159752 - protein, 196 aa, Heterodera glycines
KKKLQLFFLFAVFIAANAFDSAQSVGKTSAEDEVRAVTEGAAPQRQTPTRKSLKMFGHGLRHHTGMDLLMKLGQQQAEEPKSFSSMDILRLFDGLDHQFYHDLEKAQSLFEENAKVVKSLENRVVKLESAMAKAAEHCEPGKVQLVSAHYDTAIVLLALLIVLLLCLSLLFANLMLANFKRKGVVQMPLAMMRGES

SEQ ID NO: 159753 - protein, 44 aa, Heterodera glycines
NKANRTGESITEQQSLLCVSTVSVYPRSAHFDEHCNLSRPDHVP

SEQ ID NO: 159754 - protein, 178 aa, Heterodera glycines
MELRVGGRYRLERKIGSGSFGDIYLGENIMTHEEVAIKLECVKTKHPQLHIEAKLYKMMSGGVGIPQVRWCGFEGEYNVMVMELLGPSLEDLSNFCSRKFTLKTVLLLADQMLARIQYIHSKDFIHRDIKPDNFLMGLGKRGNLVYIIDFGLAKRYRDQRTKQHIPYRDHKNLTGTAR

SEQ ID NO: 159755 - protein, 30 aa, Heterodera glycines
FFFFFFWLHSFDSTRIRPFLSFRRFPFLRG

SEQ ID NO: 159756 - protein, 166 aa, Heterodera glycines
MECQFDGTEAGKCAFCVKLPCKFGAVNCAEEVSISCVNPQELEKCCKARDNECCVCVLCEKNKVMKVLVECCGKRTETSAEAGKALCICVPKIGGGKCGGQVQVKQCDAKLVDECCAANTESGDCCCVCLSCNDQKCVVTVRCPTGEAKSTGPTCTASKCESVKCC

SEQ ID NO: 159757 - protein, 227 aa, Heterodera glycines
LFFAVRVHNVNSFNVMATTVNGNASSLVAPLSPPKTGPSGPQVAIVSAKLIITSNGIEKEGDQMSTAASVARRTPLSIVQTAGGAVHRQLSDSMCYKSGHSNGSGNENNDGGADSDTTLDRPAYCGDGLPPRSATMPPLRSILKKPRAPQPPSPVPANNDSTLLMMTKMAFANGAASGQQQQLRQHQQPNRFTMVPSPMPRNHLRRVPTRLVLERSVSDSVLDDAAI

SEQ ID NO: 159758 - protein, 115 aa, Heterodera glycines
EPSTNKHLMCPFKLENFGVYLPAWHKPVTNRYGKRKRVVREAGGMEVPGDTETQATETDSNNQIDEDGWITVTRKHKFSFRNKVSRSDEGNATFMGMEGSADEPYDRPRKKKRTR

SEQ ID NO: 159759 - protein, 124 aa, Heterodera glycines
RTDTNYSTTRRGMDNPNQANHRSLVISRRPVIPVLLWALLRWRQVRLRLFPSSPRSAVLPWALLRCPAAASTAVSLVSAKDTSQLRNSHVFTLLGGCGTCLVGYEVGVMYGFDRPLGYGFFVSA

SEQ ID NO: 159760 - protein, 63 aa, Heterodera glycines
RSFFSSTILCRLSNAFGWVLLFAQCLAWVCEFGLGMPVVLTRWSSSSGGRVAPEGAVQMAPRR

SEQ ID NO: 159761 - protein, 190 aa, Heterodera glycines
MVVLPIFAAVAGAVGEDKKRQRTGEAEEQLDGDGVITSAEQPTTTANSECSSIVGEATDGGGKTPTGGETVTNEYQQQCHRNNIINSGGSCPLALSSSERMVSELIAAVIEQSRQRQQLQKHQQQLLISTNKVEETNNSGGSEMRAEGEERGDEMAPEEGGSIWQQSKGENGTVTAEAVPNHPTTANAGG

SEQ ID NO: 159762 - protein, 187 aa, Heterodera glycines
KRTLLLLDGCVSGVKTACKGKVKVEFTEPGTGFFSGNCYEEAKTALENDFELSKGNDLSGFSEKDDNGTITEQAYDSTVFTLPVLLQHRKCSGLGSATMDNTFKDITLTISGGDCESQSFKLKDVDASKGRVQEMRGLELIMIDGTAKQWTDDSGNYQYTKKDQLMFKPMENIDKIDEFGKFESPSY

SEQ ID NO: 159763 - protein, 102 aa, Heterodera glycines
  unsure (1)..(102): unsure at all Xaa locations
MKMSNSNDMSGYEKLGKIGEGTYGTVFKARNKDTEQIVALKIVRLDDEDEGVPSSALREICLLRELRHANVVRLQNVVHTNKTLNLVFEXCDLDLRKFMLLS

SEQ ID NO: 159764 - protein, 234 aa, Heterodera glycines
  unsure (1)..(234): unsure at all Xaa locations
RIKPTRGMEQTMQSIFPRIQXALRRSMQTFQDSIEAELAQWRYCSKMQSSKMEALIRLVGESVEVQIRGPPEKATACIYFLEDLSTLVELTSAEVAPGISTERHFLSPAHLREHRTTPAIFTPETIMEMQQNESLVIVNSDGEEEXEFTDVVCFGSKEAAGLLTLGVDISVSQLQLSARSELAALLDAPNTLGMDWSILAVKLNLTEQIPEVDSSGQSLSRTDQLLTEWALHSP

SEQ ID NO: 159765 - protein, 184 aa, Heterodera glycines
RPTDPITDAWAPRTNLSANRTSDQAMANQRCPDDSVNARTQQIHANNAMMPTNRSNLSLNQPNVTPVHRQNGPSNVAQMLADRRAGAVTPNHRLATNSTIRIGGQSSQLGPFQQMKMRMNWSMRPPSGLAVSTPVQPRPIGQANNSSTSMLRQFPIRGGRGQPQQQQMRRAPPPGNCDVPSPPQ

SEQ ID NO: 159766 - protein, 117 aa, Heterodera glycines
MAQAEEFERHAQGQSAGANLAQLAWANDRLRKLEQCFVNPAMGLAREEPLKRHVLFATGNDNSYAATTLANVYNKIGQFRGAKSDNERTKRGNELALELTVVQQAIRCAVSTLSKGI

SEQ ID NO: 159767 - protein, 52 aa, Heterodera glycines
MRPPKSLSEIVINYFRNEHFMCRVPVANCPPFSLFYPHRCPEPKKKKKKKKK

SEQ ID NO: 159768 - protein, 215 aa, Heterodera glycines
WKRHKIAKECYEKMGKDGISAGGRHWRGIKVKTKPKSGPNGEQMRNFELETSFTSQIINVGLNRRQFSIRFDGNDQSDSFTMFSPSNNDSSSFADQSDLQNEFLNNLPKSAFLGEFAGFWLLGLDMLPPMNAVPSSSLRHENVQLYIHRGAQCTMEAWFTQPSDSVNPIDPKVATVVPKSFPPVSTSPPMSTADQQFTTNVTDSEHQSINISTTA

SEQ ID NO: 159769 - protein, 77 aa, Heterodera glycines
PGRLILSENFDEYLEAQGYGWFMRQVVKLVGITKTFSKNENGTYACKIETTKKNVDWSSFKLGEEFQAEYLDDSVHK

SEQ ID NO: 159770 - protein, 228 aa, Heterodera glycines
  unsure (1)..(228): unsure at all Xaa locations
FADVTERYFSEKMWPDEKIVEKVVGTDNRLFIILYKELYYRDLYTRMQRVTLMHRFHSYMNYQRLFSEILNQKDPNNPQNYIAVNLQLPNIWLWDIIDEFVYQFQAFCLYKANPSKRSPEEIEDLHELEQSQDAWNIYPVLNILYSLLTKSQINEQLKAIRGGXGEPDXVADEFGRNXXLYFKLGYFSLIGLLRTHVLLGDYHQALQTVEYLEMDAKGLYNTVPSCLV

SEQ ID NO: 159771 - protein, 211 aa, Heterodera glycines
NGYRLACKEAVRYMTENLSFPVEELDRASLIRAAKTSMSSKLIGSESDFFAELCVDATVAVKRTDKAGRVSYPINSVNVLKAHGKSSKESQLISGYALNCTRASDAMPRKILNAKIACLDFSLQKAKMHLGISIIVEDPEKLEAIRREELDITKRRVEKIIKSGANVVLTTGGIDDLCLKEFVEAGAIGVRRCKKADLKRIAKATGATLTA

SEQ ID NO: 159772 - protein, 123 aa, Heterodera glycines
ASTPPRLCSSITIISSSIKCDCSCCCCCCLCCSAIVVVAEDGNPSWSSPPSSFIFLCPPPAPWSCDCCCCCCSSASNSANMRFSACCCCSICCNRFVSSSNSMTRLRNCSFSARSRVISLLGR

SEQ ID NO: 159773 - protein, 153 aa, Heterodera glycines
MKGFVSKDIVCMANICVQKQEFTEATSEPGLTFVAAKFDGILGMGFSEISVQKLPTVFDNMVTQQKVPEPVFAFWLNRDPTSEFGGEITIGGTDQRRFVAPITYTPVTHKAYWQFKMDSISGGNGKLACQNGCQAIADTGTSLLAGPKNDIEK

SEQ ID NO: 159774 - protein, 237 aa, Heterodera glycines
  unsure (1)..(237): unsure at all Xaa locations
QPRLACYYREITASSFAKISVDGCVIDXGITPLGINQAGYVLHSAIHAARHDVNCVLHLHTASAAAVSAMKCGLLPIIQEAMILGPVAYHEYRGILTDVQERKEIVKSLGDKKVLMLRNHGFATCGATIEEAFHLAYETIVACETQVAAMRTDLNKNLVLPRESAVAHAYQIAKHGTNGMNRTAVPEENGKMEHTFERMGNIQWGVGELEWEAWMRQLDGAGYQTGHKYRLPILLEP

SEQ ID NO: 159775 - protein, 136 aa, Heterodera glycines
  unsure (1)..(136): unsure at all Xaa locations
LLPREDVVELLPNDGDFLVRMTEXISGTERVYALSVDVGGFLNHVIFRRHKGMFTVDLNSDKGFRTIERFVDNYLRTGVSVTTQQYVALIMAVPRAHWELSHTSIILGNELGRGTFGVVKSGVYVDQQGTRAAVAI

SEQ ID NO: 159776 - protein, 58 aa, Heterodera glycines
SLPIFFLLLIRIYFASAADDPLRMTNGISQINPWDCLDLCQNNFPILSLELGSPAGFR

SEQ ID NO: 159777 - protein, 161 aa, Heterodera glycines
WDDKILEMRVKNSTDKCNGRIWTDLHDQFIRLATPHTCPADASRVDAQMVTTTIKRRAIATFEPPSVIRAEALQNVPSPSAILVSKQAAKDVKNCTDSVFAENARMITSVAFVPLCDIRMAVAALDTEFGNLAVFQPLIDWSNGTWSQPTFRPEQWNVYTR

SEQ ID NO: 159778 - protein, 107 aa, Heterodera glycines
TAPSASPGRSPSAAFVPLRPAITPSSRSDWHSLIRQFWHSFTPCHPIQRTYSICDFDDYRREVIAHPITWPRVPVFRPIRSAYVCRPHWTYRSYWPYNASRFESPPI

SEQ ID NO: 159779 - protein, 194 aa, Heterodera glycines
MEHETALAVPADPQSQHSELLEMNDVLQWEMATRSEDEQVLDPEGDLEGFTVLIFQKLEKFLQNVPPSEEYTKITEELAKMVENWKQSVQPIDVDQETRQLFEVENSLENLDEQLTEQNLSGINATPAVLDIVLDIIKNDVHEKEKSEFMWKMVNRKATHYVKNLGQLLGGIPIAIKYLDQVVFVGKWALDNSF

SEQ ID NO: 159780 - protein, 138 aa, Heterodera glycines; identical to SEQ ID NO: 158760

SEQ ID NO: 159781 - protein, 227 aa, Heterodera glycines
MNRRWLCNDVWMDILPFFDRPQLGLKLAMLSPRFNALVDIHFDAKTELTLWRPIAIRNDGGTATPHLAVLVDGVHSVPFELPDAHSPPMPNNIRFKDLRINCIDHSVIAFLRANQLIFQKGTNLRLSAPFGPFNIDDVQPIWDDFACRIWPIFASTIRHFCFPNGHHLDMLLRLVSPTILTDDLINIHSIDSGRQFPEAIGDDHFDGPTITNFDGSIVTSVAAGQAL

SEQ ID NO: 159782 - protein, 150 aa, Heterodera glycines
MADKETIRLDGQQQQNDQQQQQKRSQEQSWHRIMMLIIAITAHNFPEGLSVGVGFGGAGRSESVSLEKASNLALSIGLQNFPEGMAVALPLAAFGHSKWKAFLYGQISGMVEPMAALIGASLVLSIEFVLPYALSFAAGAMIFVVFDSII

SEQ ID NO: 159783 - protein, 233 aa, Heterodera glycines
TVLWALPSLALPSRKLRTKCHKLCTESTTTTAAGHQKEAQPTDEGEEYYEEEYEEDEYEEGEEREEEAENISGDGSCSNSLASSLEGDHLLREPPKVFTTPHHPPPPPAAVHSHHQQQRQPQFPFDGKRHFSNGFHGHAKLGHKTVQAIGDSQQLAAELAKQGLQVICAPDCEPKAFAILIDFVYSDFDVRSLSVRGQLTDDNVMNTLYAAKKYAIDALVTECVRYCTARLTA

SEQ ID NO: 159784 - protein, 149 aa, Heterodera glycines
LQREGSDLIRSWSKEDVSNGEMSAHHFGNGGPSTSHQPTANQQRRDSPPKRMQKQSQQKQKQMSPDEWLKKLEAESGGLRDEEEEQAEKDVLKGSAGESMRKGAKAQKGNGVIRRDQQQQQQHDMNGMNLKGSLGGQNRRRKKSCCCII

SEQ ID NO: 159785 - protein, 137 aa, Heterodera glycines
IRAIGAEQVQYSCEFAQLLYTGGGHVDSVFCNIFSGYPPTFFEELIEYALTTHRPDALIRRICVWLAADEPWPDIATLFPSAVQRRVSNDRVLYEFQNIGKSCGQQQHKRSEFVLRIRAPSRPMLFRAMSNFSLCRK

SEQ ID NO: 159786 - protein, 105 aa, Heterodera glycines
VSAQVASVWAVVSSYLSSVVIQGAVRASICNGTRGFLWRHELEQPQVGKSRGRCPKYRRSRASLASYDRTPWEISRWRSCTPSPPILAPAPDSLPLNLVKERSAV

SEQ ID NO: 159787 - protein, 191 aa, Heterodera glycines
MTSEKNLPLTIGVCASSVALGCIAYKLLQRKGSQQELLDEMTLRKKKDEAQLMDSLKLDPNTPLNSHELALASLISFSEDAASFEKVGGCSSILELLRQKVVVPLQLASNRTTLPSLLYSAPKGILLYGPNGCGKTLIARAIAKEVDAYFINFGTSLVDFVNGSSVTMKSLFTLAEKIQPCVIFIDEIDLL

SEQ ID NO: 159788 - protein, 73 aa, Heterodera glycines
KMCSKFAEQCFDWFRRVVRIVLRLHQIVRVFALRFWRPKQIRPEGNGVVRSRRWDMASTVNLNSKSWLSFLLL

SEQ ID NO: 159789 - protein, 61 aa, Heterodera glycines
SFFFFFFFRFVPNFFVIFSSILFHSFVECFLPFCFIFSFILYIFNFFSFFSHFFFFFFPFF

SEQ ID NO: 159790 - protein, 223 aa, Heterodera glycines
RQTLCQALLWQSVLCFVRHWPHRIYEIPNFASVFSLKTPSVQKGKAVVTGRALQLYSPVQCVDSFAGPHFRFVRTIRWHCADSDDKPFSGELVGQKMEKMPRQFVVVPMKSIFTSENDADQSQDIVRKQKQRNSIRRHSVHPSRIFPAGRMTAAGARERIGRNFLCRLMVLLLMMAVVSFGRIGVMVMMEVMDRRRKGKEREKGKSGDGREKGQKRHLEGKRI

SEQ ID NO: 159791 - protein, 190 aa, Heterodera glycines
MELDFIQSVLLGPQRGNLTAIECLLAQNFNKQSSMMPNYGTERKNAKVPKLEMEKAGGGDEAKLDNGSETDQSDQKQKRKGVGRPKRHPSECKVCGRKSFYCYYSVRCCESCKQFFRRIVAKRTLLNCFGAKNCQIGKDGIRCRGCRLDKCLLAGMDPTMINAMQHEGMAQYLDRLELRKRSALLRKNCR

SEQ ID NO: 159792 - protein, 184 aa, Heterodera glycines
  unsure (1)..(184): unsure at all Xaa locations
MSSPSVSLLAIVAIFCSLYKCCVSAPHSCCPGSQKVVSLMANYVGTFAHSFSSXLCSDAQSVAGALKGQLIGCPKGGDAILLADIEASLGTHFADECAHSLGFVRAMFAIAASASSHASNNNEWQALSAQFGQQISEIDSKSAEFDIGIAKVPFDSPKGDHSQRNVPGTNSVISMPGWTGSHKH

SEQ ID NO: 159793 - protein, 191 aa, Heterodera glycines
MSDNRGASVASTGTTNSQESQVASPVKAGKATTKTTASGKGGKAKADGKVKAGGKGAKKAGGKGGKVKIAASGSKNTRSARAGVAFPVGRIHRLLRHGRHAQRIGAGAPVYMASVLEYLAAEVLELAGNAARENKKLRITPRHLQLAVRNDEELNKLLAEVTISRGGVLPNIHAELLSKMQQKKQQNDDSQ

SEQ ID NO: 159794 - protein, 190 aa, Heterodera glycines
MFNQRTNTKNNVLENAVKIPPFKELHANPLGNGIELAKHGQMENEMAAHFHDQRKLSTKSSVAEGKFNPKMRTIDPKFYPQAPRGNVKDTYKSQSGKEVKKISVPDPYRGLENATANATKQFVEEINNISQRYLNATPVRQKLNHSLTKMWNYEIFFTPEFCGGLFYYYHNSGLQNQRVLYQTKSLNSTG

SEQ ID NO: 159795 - protein, 227 aa, Heterodera glycines
IGGTEMAYRNDNCTTSGGNGGRMPLIEHVVKNGESLMQISLQYSVPVSEIKRVNNIVADHEIHGLPLLRIPMTRAFLLRRQMMEAEEEIGGQSEAKIIDILGDEGTSTANCGTFDAMTEEDNNEGMRTTHRNVMKEFGSHRSQTNRQQNALRKTDFGALLNGRQNDALRSSDESLAAYAKEAIEGILDETDRNVATVRQNLPSPSLEGGRFSFRRCRCARQFIECLA

SEQ ID NO: 159796 - protein, 118 aa, Heterodera glycines
MSPVIAPFVLAIIGIIALPTIEGAVGRQQVKLGEQYKYENVPGKLMVKRQTAASKEPQYLFAGQTAWTTDGKDRFGHAELDFATGTMTIPNFSENDLGSYTFPLEQPNFSAVNGPNGC

SEQ ID NO: 159797 - protein, 127 aa, Heterodera glycines
  unsure (1)..(127): unsure at all Xaa locations
PPVVFTFREKAIHQSDNWHLLPSVQSESVHQCQLVLPINKYSVTSFSSNTQKINHQRNSRVSKMEHFEGISHCKTSTEPKEDEENAXRLLKYSRNCLSQLPHQSGRNEMFSAKSISQQMRMPFSLWP

SEQ ID NO: 159798 - protein, 149 aa, Heterodera glycines
FFFFFFFFCTKFGERNVGERGGGGEKHRQKEKQSNFETELKVEKCHSSAFLGDSETKGKAKRQKKGGKVMEDKSKDGWSDRRRKRHSLVKKFHVCVFVSSVPFAVFRKRRRAVGHCHHRCCVRSLLTTVCPRFGHFRDRFRRNASKQAA

SEQ ID NO: 159799 - protein, 214 aa, Heterodera glycines
VFGEKVAGNSTKTEVNEQGELSAVVKTEAESQNSTEVQNYALVDLDWVNNSQKSHVLLQMMNAMGYEHGKGLGKRGQGIVEPIKTNPNQGKKAFGANHDSRREGRRRRRTRESGHMEGQQTDSGKNAIAEQQQKDEWKRRPNPSRRAQMHYEDNVRDTLRTAGLSEQSAEEIWQALGILARHQIMPLGMGLGLVKRRAGRRRIEMEAKNEGKAE

SEQ ID NO: 159800 - protein, 208 aa, Heterodera glycines
PDQLGCLGASPDQLGCLGASRDQPGCLGASPDQLGCLGASRDQHCLPGGSPDQPGCLGASPDQLGCLGASPDQLGCLGASRDQHCFPGASPDQLGCLGASPDQLGCLGASPDQLGCLGASRDQHCFPGASPDQLGCLGASPDQLGCLGASRDQHCLPGASPDQLGCLGASPDQHCLPGGSPHQLGCLGASIVLHGVLPGHCHLLQRWQ

SEQ ID NO: 159801 - protein, 250 aa, Heterodera glycines
EYESSFYLEYIRRDVDIPKSAPTELLTEKHKEFLLSYGQEEKSFEYIMAEHLRMSGIYWCLAALKVLGENINDEEKLADLIKENQNEDGGFAAADGHDSHILHTLSAIQVAVIIGRLDIINLDATVEFIKSLQQNDGSFAGDHGGEIDTRFSFCAAASLYFLNRLGSIDVHKAVEFVINCYNFDGGFGTRPGSESHAGQVYCCLGTLSVCGCLELIDVERTATWLAERQCPSGGLCGRPEKLPDVCYSWW

SEQ ID NO: 159802 - protein, 92 aa, Heterodera glycines; identical to SEQ ID NO: 158759

SEQ ID NO: 159803 - protein, 132 aa, Heterodera glycines
YPPLLHNAKMRSTFHPPMGEGEQHKQQSNSSVASSVRSSTTLDGGGPSCSQSTAGDESDSAVAGGTTPRPFGIGSGEFVTVQHHQQQYNTNNNGTNGGTKMHSTFSRCPTAESNAMLVMNNGDHLNESFSIL

SEQ ID NO: 159804 - protein, 248 aa, Heterodera glycines
RFRPPDVAQPTLSLSGVSEYFLNIKLEKTEREGNWSQRPLRLEQKKYAAQDAHCLNRIFRIVASKLKRLKDNELAKELKRHSLIDFNEEKAKPTMAIPLLSGQLVRVKEGEEDFILNVQKAAVEIERSANGVLDGFRTIGDVRFIVDSMLFGLGKRLRKCGFDTRMIGDREQIVEFCKQSKDEKFVVLGAGKGHKQLALQMPDNEVVNVPIATDGTTPPSLLVRNLLDELRIILRPSDMWSRCVECNK

SEQ ID NO: 159805 - protein, 59 aa, Heterodera glycines
TLSSVGLLCPSCFSMLTPLFIFLHPCVVRDVHGFSFCDKSYPGSCSSSPCTVHVIVSDL

SEQ ID NO: 159806 - protein, 51 aa, Heterodera glycines
LTPLAGNFTHSKGSISHAFAVRIRTENQDQVSICLFALREVSVLSRLALGH

SEQ ID NO: 159807 - protein, 173 aa, Heterodera glycines
AALDILPDFAFAVPVSLFVANPPAAILWAGWLAVGEYFAKKSWSLVLRDIVLPTKSGGKFMELLQQTEVPVERVFPKEVEEDADKLGEGSKGQKETMPVIEALAASQVDSNLYQYLFMNTLRAYYVTATSIYSHFMEKIELAKDEHAMTEFAKDVKNKMVENEVMKEKKKKKK

SEQ ID NO: 159808 - protein, 205 aa, Heterodera glycines
MNRRWLCNDIWMDILPLFDRPQLGLKLAMLSPRFDALVDIHFDGKTELTLWRPIAIRNSVAAVPELHVFFDGANKSVPFPLPDAHSPPMPNNIRFKDLRINCIDHSVIAFLRANQLIFQKGSNLRLSLPFGPFNIDDVQSIWDDFARQIWPIFAPTIRHFGVPDGHLLDTLLRLVSPTILTDDLINIHSINSGRQFLEAIGDDHF

SEQ ID NO: 159809 - protein, 189 aa, Heterodera glycines
MSAGIPAGDSDIELVGIDEFYASATGEKNGTEVAKTDEHQLHVARLKHELNERRSMLANLQELEGRKSALLSDIRGKEQRLSQIGSKISAIKKATIPLFDVLGLKAQPSEIGDKAKQSSCPFSVQLRPLYTNEEFCREIFGTHSIELGCDALVLVTEESAGPSNGTKENAEMDETSDGKEKEPMASANS

SEQ ID NO: 159810 - protein, 215 aa, Heterodera glycines
GTSDCKRRTWPKEDGLALERGHLPQGNNQSPTRLQSTPRIWIQEDDRWRQPMTFSRKDVRERSWLESDTDSDLDSPTSVLRSRRRSRVNILDDDQPTRRTAWGRSPTPSPNGRAVVQRTTTTTTTTTEEEEGGRRTVRFGEVVVVEPEERTVNRRTEVRTQQRETEVERTSEYTLILRIDFIDASVFLDKSLAYFGSLNTARKDERSVQRLCYVL

SEQ ID NO: 159811 - protein, 224 aa, Heterodera glycines
RCPAQQNDDDAAAIVQPKRKGIKRPYDEFMGDESAVGMVKSPSFTEQMQHTAPPNLNDFCMEHYGFDEQYIRAQPDRVYDILFHSSGRVELQLSRNLSATILSIPCPPEEEHNWGMVRQYRMTTQNREGDTLYFRCSRCESLMRYTNDEYRPKLTMKDGDIQGDCFPAHHPQCYPVNKEWVILQQLDRQARLYMMQFDMAQWEAMRQQQQQQPAEDNDGTAAAE

SEQ ID NO: 159812 - protein, 127 aa, Heterodera glycines
  unsure (1)..(127): unsure at all Xaa locations
RKEKGNSCQFVPTATRNIFLIRHGQYELDSKTKELTALGREQADLLGKRLAEFEVGKGKKITNVLXSTMKRAEETADIALKHLPHAAQIQKHSDLLREGAPCEPEPPLSSWRPQYYEFHEDGARIEA

SEQ ID NO: 159813 - protein, 188 aa, Heterodera glycines
TNWWRGSTERGGGASGLFPASFVTENFDNGQISNGTERNGERTEAVETAVVPKVQIDETVLMKCIELLEKCDPEADPSSDPAELPFLEQMAKAQAPLIDQKLVKIDKQLSMLAEVDIAIREVLTAYDTAVQRVPMPMPFSPPAGSLASSAPPPVSFASTASVPSVNTPSFPTQWTMNGQWQQQQNQNQ

SEQ ID NO: 159814 - protein, 217 aa, Heterodera glycines
SVGCPPPVRPSDENVFLFYPNLLGYVRILLAFGALFAMSYEEKPWSAALLYFASALLDAFDGYLARKFNQSSRFGAMLDQLTDRLTFLGVLMTLCHYYPTKMLFFQFVAFLDIAAHWMHLHATDLTGKETHKGSKNPILNVYYTSKTCLFWRCFGNELFYGLLFVNHFWAGPGLLGIHFVPLLACVVCPLALAKSAINVLHLVTASQTVAEHDREKR

SEQ ID NO: 159815 - protein, 203 aa, Heterodera glycines
  unsure (1)..(203): unsure at all Xaa locations
INTGQLGGVHLARLLTQLHRRTMQKAGLEASKDQLLNNGSDFVIAEALFMAWTAFGDPKAVFLFVASKTSRNRFGQRQIEYLLEKISNYKMKIIRISLPACARQMKLGQLTLDPQDNTLXLYGQKVAVTYIATEAPKPSDDEWKVRLLFERSTAIKSPTIGQDLANQKKVQQLLTKPGMLERFLPEPEHAAKVEALRRSFAGL

SEQ ID NO: 159816 - protein, 89 aa, Heterodera glycines
VNWVSMNFCSSFAFLVVLMLLIGEASSGCCISKSRIRAENERRTKSDGTMRYGQALNYGVIKVPQKNWTNGLRRELEECLGLEFIRALE

SEQ ID NO: 159817 - protein, 49 aa, Heterodera glycines
FFFFFFFLRDHGKIPGEHVPSQFDRKVSLANGVLQIVQSRNPCVIDVQQ

SEQ ID NO: 159818 - protein, 171 aa, Heterodera glycines
LIIHHSLLVHPFCSDQFTIELSSFSFSLSLHCCCPCCCCWWWLSSNSKPNTLCAFAVVALANSCAGQSMKAATSSQMAANELGSLRLKSECLCRARASVLIRCRMSMSLRNFLSSKFGYMYGASVSNKRRSIRMVRCRNARFTPSTARSFHRNPVSPMYSPMSMYCCASIS

SEQ ID NO: 159819 - protein, 154 aa, Heterodera glycines
MDQIGGTFSDQIWLDTLAWIGRGEVGWHLALVNARFAALVNMQLQQRRWCLEEFHISERKPKRTGAEVLSLANNGSYFSLPLATSPLPDSVIGFNGTFNIWYLDAEVINFLQRFRRLFNTYISLKFTIPITEFRAWQAVAPHIWPLLKHGLGTL

SEQ ID NO: 159820 - protein, 200 aa, Heterodera glycines
MRENQNALAKKVSETEAKLENGMRENQNALAEKVSETEAKLENGMRENQNALAKKVSETEAKLENGIQNNQKALSLMKNMATLAFFHFPLPIYHRWNASDCDPEIVINESTNAIQHNGTEDIDWRSCRAWPIQMSSAVGRIGIIYAEYRILAIIGGLRIGLSTKEMPLDRWVGNGHVSYGYAYYGEIESTNTNGNRAVIS

SEQ ID NO: 159821 - protein, 182 aa, Heterodera glycines
GVGADPKSRIEKDTFDLAIIAMAQHYHQQSQTLHVNNLVLPVYQFRCSDRKDEEFGKEFISRLQYLSSFQLTSTETALLSAFVLMDQSQAPGMEAFVGQLKSCLGGQLHQRMPDGDEALRQLLEFLPRLRELAKTHRKCLGRFRLQMVDQQSEHQTDRGAAEANVLASFPPLYTELFAGNSD

SEQ ID NO: 159822 - protein, 88 aa, Heterodera glycines
  unsure (1)..(88): unsure at all Xaa locations
HPFFRLDEAFTDSSGSFXMRGSTRELTNIDPVLKIYHDCDDGIMPGQRKVKLRIPSQYITNGGLARRTFEVGVLNLETVFAGEERDFI

SEQ ID NO: 159823 - protein, 232 aa, Heterodera glycines
FSFCSSPFFRLAKWTNPSTNGTVSAATSSSARILCFDHIRFWVGNAKQAAHWYCVNFGFIPFAYRGLETGSRKTVAYAVKQDKIVFVFESALLPNNGEMSAHLAKHGDGVKDVAFEVDNLDWVLDTARRAGAVVAEETAEERDQNGHIRRASIRTYGDTIHSLIERHHYSGPFLPGFCLVAASSVPRFLLGQLPSVGLNFIDHCVGNQPELQMESVAQWYERVLLFHRFWSV

SEQ ID NO: 159824 - protein, 215 aa, Heterodera glycines
PQGAWPAGRKREFPAKIFRPTPIVPTSKYRHSVADGMLTRDLRDSQVWKTVVTVDGISGGQAERRGQRSTAKDEKRHGDTEAVALRRHFYAEKPTNEQWQQNGRVALDEDGHNANQQKLDRAPNGGQIRQLVFSVGRTQFSMGGGQSAGPLVQCHARGESQDSLGSNSTANMHRCISPMFAPTDYGRLIECTTPFSAQGDNQLSLAIGERVLLVK

SEQ ID NO: 159825 - protein, 84 aa, Heterodera glycines
GQEMVACDDCDRWYHWGCVGILIPPPEKAQWYCTECRRERKKAAQRQQTSTGGGSGSNSRKSSFIGGTPTGGTAPAKKQRIAKA

SEQ ID NO: 159826 - protein, 155 aa, Heterodera glycines
  unsure (1)..(155): unsure at all Xaa locations
SPTVDGAAGEEIVEEVEEPTHLMTGHILLGAVVYSICNCARKFDAKFFLRLIVLKGANFTSQFVLKIGKISQPFTEATFKFIRNFDGTFGRIADFLLFFDWRRSAEIRLAGQSHRKQNSVFVCLNISAFSFFSRSFFVNCKRMXPFEHFHYFDEF

SEQ ID NO: 159827 - protein, 180 aa, Heterodera glycines
  unsure (1)..(180): unsure at all Xaa locations
QLENHXLLEFRRISAFLYKGNNRWKQSVELCKKDKLYNDAMEYAAESRQPEIVEDLMQYFLSQGLKDCFSTLLYKCYEFLRPDVVLELAWRNNLVDYAMPFMIQTVRDYGSRLDRLERAEVERKEEVKEQQQRSGSLIEPQLMLTAYSTAATTPNATAYPTGGIGTIPPAQGXPSYPFYK

SEQ ID NO: 159828 - protein, 183 aa, Heterodera glycines
MPPDTDQGNARRQRRRSSRGLNDSLSTHCNLYELLALPKTATDEDIKRAYRRMALKYHPDKNRNDPEASKKFQDINYTNAVLSNPTKRQIYDRYGEMGLKMMQQFGEENMSLALRPWLKWLICIIAVLTCGCFCCCCCCFGCFKCCCNFCFGACKPEDASNADFSPFDAFDDVESQPVRAQPA

SEQ ID NO: 159829 - protein, 232 aa, Heterodera glycines
ELKKFPSLTDAFKKKRGNILNFEEEEFDEIISNGTSKRDNSPYTDHDYAGTRQLATAKGATGKHQRQKGGGGTAKEPKKKTALVNGTDSVVRSSARPHRPTKRFVEETNESFIRGTSKVRRTSPRKHGKKSTAEGGSEGEESEDDGKEYSVEKVFKKRVKGGKMEYFVKWAGYDDGWNTWEPRESLKHLEVFKQYEKAQQNAAEKNKLEAEETEEDEEEEDEDNEYKVEKVL

SEQ ID NO: 159830 - protein, 157 aa, Heterodera glycines
MTCHASDGQAITKWLFLPRPDNLMKELTICIEDSAVEQQWLAAVEQIKAAFSNASSPVYFDITVYFPPPSSLSAVVPFKLTNEMTGEKLEMYKEDVEEDLSCFSLIRCPIAPDDKRERMKMIKELDKRWNRINIFLIGDGLLDGFPGASGDQKEQKK

SEQ ID NO: 159831 - protein, 157 aa, Heterodera glycines
MATNASQKRKEIYRYKASFNVYAMGWSTKLDNHLKFRLAIGSFIEEYNNKVSIVQLHEDQGEFGHLGTFDHPYPSTKVLWIPDPKSAFPDLLATTGDYLRIWRIGGHNGASLEVRLDNNRSSEYCAPLTSADWNEVDVSLIGTSSIDTTCTIWQIET

SEQ ID NO: 159832 - protein, 230 aa, Heterodera glycines
  unsure (1)..(230): unsure at all Xaa locations
MFVPCCTALRFIIVEQPRPVDDFLRPVIGKFLATVRDSDMTVRRVAIVTLNSVAHNKPKLIKECLPNLLPALYEETKVKQELVREVEMGPFKHIVDDGLDLRKAAFECMYTLADQSLDRVNINEYLTYVENGLKDQHDIKLLTYLMLVRLVHKCPIQMAQRLDAFCEHIKPQLLLRPKQNAVKRENDKQDELKRSAVRSVIALRKVPNSDRSQKMTXFGDVINGNPDLTQ

SEQ ID NO: 159833 - protein, 228 aa, Heterodera glycines
MEAGDVDIIRQQHIRYYADIDGRKYPTEGPDYDVLLYGTDLLVDGKLYKNAVPTGYINYINRIEERIPVLGSSGRSIQLNAAGDDQGNNARLHTNVVGHQISGSVSLPEIPIGGNSDYINTGHNKHDGKPTFGDTKREEKQKNKQKQQKRGELIGGNFTHINNQNNENIGGTQDIGRIQIGGMPPGGALHLNTGGNRNVGGTQMIGGIKIGKMPTGGTFGLNIGGNRN

SEQ ID NO: 159834 - protein, 140 aa, Heterodera glycines
EPHAWYGRRPSAARNALPGTAERNATTTAGSTATNCLFVVSAAAEPWRHSTADGWRSEWRWSQRWPCDHFFNTPGAVNTQCLPRLHNRQNNAGASVRWCACFGMGCKNRNHGMLLNGKCQLVCGTEMCVPWTTHRLYQPR

SEQ ID NO: 159835 - protein, 100 aa, Heterodera glycines
TILINLYQYMEEDYEQLDYDEDQLKNALRKAQQLKNIFPKDQERKKPLIQNAFIAKKEVRNISSKCYLNPKFAKQNIIKNGILNKTLSSIFSSNLLNVNS

SEQ ID NO: 159836 - protein, 91 aa, Heterodera glycines
  unsure (1)..(91): unsure at all Xaa locations
GGPKMIERALGXVISYSEAPMESKMQLEQVFMTLTDETKTPKEKMERIKDIQQKWTPEIRAALKPSTDDKEIAEAIRFFTDLPAQIELGKK

SEQ ID NO: 159837 - protein, 203 aa, Heterodera glycines
MQIRFVHHHKELEEPGGFERFMGWRRSNPAKANRNTHINERYMRRLRGAKRLIIDLEEDYAERRQLDQMRPDEVRMYLLWKGEPNIFKDVAPRDWNEHQITLNTFGQAIDPYIPPETSLFSRGAKDIFPDLKAFATRKYQGIFYGLRRIRKKDGFQNFNLKDFTKLAEQIYANAYNALALRDKTKLHELITEAAFSKMWPDVE

SEQ ID NO: 159838 - protein, 245 aa, Heterodera glycines
  unsure (1)..(245): unsure at all Xaa locations
MDCSHEPSLGTECSGEESEAAKTADETEGELKPSQRDEEEENGTTGKRQQKRRKRRIRLTDIGPKAKKKAERREKPMAEKKNEVQDETNPTETHCQSSKMSPPLLEIENELGQNPPNKVKPSPHFFTPFQLLCDNLIRKFMAKDPEKYFAQPVTELEAPGYHSIVDYPMSFSTIHDKIDNNMYLNLDQFKSDICLVSDNAMLYNNTXSVYFLAAQKLKVLAKYYFSEKYLLFLVYSLPFGKALTE

SEQ ID NO: 159839 - protein, 65 aa, Heterodera glycines
GVHFASLSCLSTITQSTSDELGKKSKGSPTIELLRAESDCLPPEWLLPNSSDIILKPLIPMAEHS

SEQ ID NO: 159840 - protein, 225 aa, Heterodera glycines
  unsure (1)..(225): unsure at all Xaa locations
MPCSLATQSSVLKRRAPASPQHAKMHDKKRHFDESANNGQAKADKVPSKGDKVSPTNEEKKKNVAFATLAIHAGNEPEKWDMNHVVPPISLATTYKQQFAGMPKGHDYARGGNPTRDVLQQSIAALENARHCRVFSSGLSATAAMANWLHSGDHIIASDDGYGGTQRYFRQISVQHHGMELSFVDLTKLSNLEKEFKPNTKMVXGFETPSNPLLKVIDIEAVCRA

SEQ ID NO: 159841 - protein, 108 aa, Heterodera glycines
LNDGFALQGTVADKAHVLLHALLANARVTGQFHGTVLLEHPISEHKMLILFVHSLGAQQLQKMAHRSVIARLRYLRIPNFDHFGGRKKCLHALTPAQIGTATVAQLIL

SEQ ID NO: 159842 - protein, 146 aa, Heterodera glycines
  unsure (1)..(146): unsure at all Xaa locations
EKELSELRGNNSGAVRVLEVDESNLLRWSLMLYPDREPYNKGAFRVNVDFPTEYPFKPPSVTFATKIYHPNINDKGQVXCLGIILAENWKPATRAEQVMNALLSLIAEPEIAHPLRSDLAEEFQRDKKKFFKNAEYYTKKYAERRD

SEQ ID NO: 159843 - protein, 109 aa, Heterodera glycines
  unsure (1)..(109): unsure at all Xaa locations
KVAGKESIAMEAFARAPANCPXIICDNAGLDSAEIISHVRAEHSKGNRQFGIDVENGRMADVYELGVLESYNVKLGVLRSGAEAAEQLLRVDCIIKCAPRPRTKDRRPC

SEQ ID NO: 159844 - protein, 105 aa, Heterodera glycines
SRILKKSQRTGEWNNSPRKPNNGSPRKDKKALQKERQEERKQKERERENRFLRTKSTAGNTTDATDVETESEVIPTFVAELEDSTVEYPTDIECHVATKTDLGRK

SEQ ID NO: 159845 - protein, 91 aa, Heterodera glycines
LFRRVGFCRDRRKHEQHEKGLKWRGVVERRAEIACCDSRRTDSKDAFLSTAITEFALLSPLSNKLLLRSLVLLQLCRWPWFCILYGRKAFS

SEQ ID NO: 159846 - protein, 161 aa, Heterodera glycines
MNCLPDPPEVEVEFDGEVPMEVSKLLGNAKNKEVTDKVNRAGGTQQQQQNGSRKKVPMRQKSRKDGQPNAKQQQQQTASMGQRKQLQSLQQQQQVELQEVTGGEGERQPFGRNNEVAIQPNNGQMPRKNNHRPQKQQQQQNEAVQGDQQQIFNGGRRATRD

SEQ ID NO: 159847 - protein, 122 aa, Heterodera glycines
  unsure (1)..(122): unsure at all Xaa locations
MAGRAEASLSRFSVVYVTVPSAEIGKRIAHELVRSRLAACVNIVPQITSVYEWKGKVEEDSESLLIIKTGRERLEQLREAVIKLHPYEVPEFVAFPIDYGSXPYLRWISDQISDKDGQTEDK

SEQ ID NO: 159848 - protein, 84 aa, Heterodera glycines
MDRNARGRWRPFAAGSAVVVVIAVVVGIPGKSCCCISLCCSSTLQVKCVPAGEQVEGLVNATTAPQTVANGHANVHVDGGGFCW

SEQ ID NO: 159849 - protein, 144 aa, Heterodera glycines
KFITRKFKECPFFSFLSFLKFVPLLYPFQCFCSLSQQVITAVFAPKPQLVLKWLADQQQKLGSASPPGLSSLFHVPGASSAAVSAPAHCPPTHSSAVALSQHNSSASSACASLMMLFPSISLSSATSHQPVAEAAAANGTARSK

SEQ ID NO: 159850 - protein, 241 aa, Heterodera glycines
EDETRHAFLARILAELKHLRTLDLSEWLLTDFTVLQKLENLTSLILYDIHNLEGSIDTLRKFCKLTGLDLSQSDRSSSGLYAQPVTALHKLVSSLPKLKYLDISGTNLTTLPSENDRPFRGAGTIDSDIPGLSYLKKPLKYLGIFNCESSSQYKNIPAEKISGDHGEDQVLTAMEMYLERPKTMQAVLNESYHLYRFGTNLSRQVEALHLVLKSMSLHLNNSNLQIAGSASMFYIIRSVKM

SEQ ID NO: 159851 - protein, 62 aa, Heterodera glycines
SVGLVSQLVHRRCSRLFCLYCADVRSLEVNRDEVMCGGPTIISGRSSCTGIRKPALPLSRVL

SEQ ID NO: 159852 - protein, 166 aa, Heterodera glycines
MAKFVAIALLSLTIVSMALAKTGKSQTADEVEGFRNMNIGDNNKVDAGKEPAADKATKKGKAQKAGTKSAAATNEPAAAKGTKNGKAPKTKAKQEVATNEPAAANEWNDQLMGMSVEKFNEELAVLLPKANTFMENALSFINEQMEKNGIATGAAGDSCSTGIPAN

SEQ ID NO: 159853 - protein, 205 aa, Heterodera glycines
MSDEGQQLLESTLRNVLDQQSLRWIFVGGKGGVGKTTCSCSLAVQLAKYRRNVLIISTDPAHNISDAFNQKFTRSPTKVNGFDNLFAMEVDGSNFGDHGVPNLGDEDDKSDIFSIGKNFLADFAAGLPGVDDATSFSQMIKLIRSMDFEVVLFDTAPTGHTLRLLQFPTVIEKGLSKFLKAKTQFMPIVSQMDQCLGLPDSTLDS

SEQ ID NO: 159854 - protein, 124 aa, Heterodera glycines
QSLLFTTIRNIYSSHWDKKYKLIGLKSKARYVRRITPKGNVLEFLSRNKILKTVITNTKVQNWNGKLYMRELKKNYFSDKTNISWSRSSLLNAVSRSSSDFCRMAARAFRNPSPSAYLEICSSK

SEQ ID NO: 159855 - protein, 217 aa, Heterodera glycines
  unsure (1)..(217): unsure at all Xaa locations
ILHDHGFTDEEREKQXAVYNNTVLAMATLLHGMQRLNIPFHNPRIENEAMIVMEVVNHGKESEPLSDELAHAIKTLWADRNIREKESVDRIAKQDYRPTEQDILLSTIKTTGLIEVEFKMKTADFRVFDVGGQRSERKKWIHCFEDVNAIIFITAISECDQVLFEDETTNTMVESMILFXESICNSRWFTNTSMILFLNKMDLFIEKIKRISISVCF

SEQ ID NO: 159856 - protein, 234 aa, Heterodera glycines
  unsure (1)..(234): unsure at all Xaa locations
WWGLGSALFVGPFALSKKKNMKLAFVRLNVLTVLCLFCSMSHSYGNPSDESDDEICEEEENEAQSEAEEADEFFHNFNGTIQSEREEKRTVVEIFCRNTNDKFQFSTDDEGNFKIQMEAKIKWKFHKCTTGLRMAFYKKKVMENKVPKCLPIILRSPKRKLKNAKRLDICVVPIRIKWLKFGPKINAEEAETEENDEILRNEFALDFDVEKNAQMNGQIRNCSDLHSAEHNXEM

SEQ ID NO: 159857 - protein, 208 aa, Heterodera glycines
IREREVLKELPFYADLFAAANIGTDEPLLDDNEECGVLQQNAEFDAFDDDQNYAPQPKMRKTSNSSSAAVHLPVGNGCAVGGGGFVWPAKSSFTGAAFVAGGANCGQSAAMPNLRVISKWEENCGETNDDGMDEVENQASSSSTPLLVGTICPTEGNSLSFQNASLSTGTRVFSLDFGNVDNISIYPGMKMAAKCTVEDCHGQQLCRM

SEQ ID NO: 159858 - protein, 126 aa, Heterodera glycines
  unsure (1)..(126): unsure at all Xaa locations
IPCIYVLNKSXISVEELDILYTVPHCVPISAHHKWNFDDLLEKIWAYLNLIRVYTKPKGQLPDYNAPIILNAEKKXLDDLCMKIHKSLSKDFKCALVWGSSVKHNPQSVGKTHLLNDEDVVQVIKK

SEQ ID NO: 159859 - protein, 201 aa, Heterodera glycines
SARFIPAIGNCIAAHTDIICYCFVIIVHGYTAGLLTLPLPALVFLWGTLASPRPSKLFWIVMIIYTEFEIVAKFAFQFGFWPWNGDTVGNNKVYKTEYVFGVQRIQGFAGKDVALLIALFFHRYMLRKFGLWRDASSDRLINEMPKKRMDNGSSSSSSAEKSPQKSTQSTVVPSSSGENFESVAKAQREQNSDDIEKGIKR

SEQ ID NO: 159860 - protein, 138 aa, Heterodera glycines; identical to SEQ ID NO: 158760

SEQ ID NO: 159861 - protein, 170 aa, Heterodera glycines
  unsure (1)..(170): unsure at all Xaa locations
TNPTDGFAVRGLVGDNIFKWQVIIFGPPESPYEGGTFLAQLDFPISYPQHPPKMRFITNILHPNXDGYVCISILHPPGDGPHGVERAAERWQPVHTVESIVISVQSMLSEPNFLSPANLEALLMFRINPQRYNERVKECVKESNVALDSDYRDSPTNGRTPGAVNGLRSI

SEQ ID NO: 159862 - protein, 203 aa, Heterodera glycines
MHLNYQKVTEEIFSNWIDDLVKRDVRLPLYQPYKDRREALFQLRINNDGKWPTDTPKQHKIPRQPPPTFVQTFGADILSCMVNPWHLIHLQLLGPRDFEKVAIGLYVRCKVKELCSVERIERVSWDASPPYEIYGRQMQVLLHFYGPSQTPPSPISAVQFPSTEIDRQVVEQQRKCRTFVPPSGNHIKRKSEELQNALYKIHY

SEQ ID NO: 159863 - protein, 212 aa, Heterodera glycines
VLFLIRCLKLIRFCPVLKGFLFEMFSSEKAKRGAFAKKSLNGNELESEANEGDAEDIGKSLEEQSHQLALPRLFKTLLSFEFANYSRLNESEVDPLLLSWDVLMRFFGDLDVLSRVRFCDAIDAKTLSNALAHLFNSLSDPPGHKDAICVVSNVDDLFTGPFHYKLVDRPFDREHFTSNLFFRTLATIPALFREWHGTLSKTEANTVNEYTQ

SEQ ID NO: 159864 - protein, 224 aa, Heterodera glycines
MQPQQRNKASKYDVIGKTNEQLFHLLTICLSLQPQRIDESIQSQLQDKYGERMLRMANGDIDEFRNAFQQGCPKFLSPTTVVYEGSSVAKEPLLRQCNAFLEGIESQISLPILRGYLKLYTTLPVQKLASFMDIPDSELDSFIGKLLTYKMIVTELGKETIDKTEGADETTDLDFYVDKDMILIADTKVARRVSEYFIKQIGKLREISRKIKSSVTPVGQIHKN

SEQ ID NO: 159865 - protein, 166 aa, Heterodera glycines
RRPTFFCWCVIIGTVLPVSFFVWLFSKAFGKDGSASLQLFLIGAAISTFVVVMVLCCICPDKDGHSSLEVLYKCSACGKNVHRTYECIIDVTYNWSGGRHRDTFRYRNQTYSVWGKYTANVIKTVLRTRMTMNNFEAVERVMSVVQTDNYYKTSDEWTDDLIRRLE

SEQ ID NO: 159866 - protein, 229 aa, Heterodera glycines
  unsure (1)..(229): unsure at all Xaa locations
DFIKFILFHKIXTFPSKMSLFSPLFCSSFLLLSFCFSICAFLPQISEVENEIAEFIHRNPLAIDHRIALVQLIFEHQTELILANEQISFPKNISLDDLAFPYEMLVSKITSENFEELAQNLRKNALKLAKESTGKFHFLTENHFYGQFINYLAKIAQLKVEEALKQRRENDNLDELSEKETNDFSEGWKSLQMFVEMYSFGSELFMQLAANYGGKISQENAKNNEAISG

SEQ ID NO: 159867 - protein, 210 aa, Heterodera glycines
  unsure (1)..(210): unsure at all Xaa locations
FRTLPAMIDLGVVALCRYAFTXNSNPKMACLIPKISKEANYPVLIHYLMPFRDDFRYFDFPLIKTPLSKYQLDLMDSYIDALMLYDEGSQVEQLKKRQVHDPRLQYECQLLRNRAVHPDKKGMELSAEDRQRLLETLSAPKQRMDEAQVVLDEIREEFPRELNENTRMAAFRTTKAKTDTLGQVDDRLQPIVPGAPVKDEQRTAKKEDAD

SEQ ID NO: 159868 - protein, 224 aa, Heterodera glycines
  unsure (1)..(224): unsure at all Xaa locations
CGTLCALAVTMDDFQFALGKNSPSALRETVVETPNVTWEDIGGLENVKREXQELVQYPVEHPEMFLKFGMQPSRGVLFYGPPGCGKTLLAKAIARECQANFISIKGPELLTMWFGESEANVRDVFDKARAAAPCVLFFDELDSIAKSRGGNVGDAGGAADRVINQVLTEMDGMGSKKNVFIIGATNRPDIIDSAILRPGRLDQLIYIPLPDEPSRLQIYRASLR

SEQ ID NO: 159869 - protein, 200 aa, Heterodera glycines
MQPCHLFSPFSFYFSGTFSHLFWILLFVSLPSKWRITSDHSFSIISERFEFNSTASKTEQLRNDKLNWIDFSTDNAESLLETVANSSGGSFCPDNDQNGLLLGHIGQATLLIEDLQEEDVELAFPELSPGGHWKPSNCVALHKVGIVIPYRDRKSHLVRLLDFLIPVLKRQQLDFRFIVTEQNGDSLFDKGRIMNAAFRF

SEQ ID NO: 159870 - protein, 234 aa, Heterodera glycines
  unsure (1)..(234): unsure at all Xaa locations
EQEEEKHEEWKRKRRKNQRXEEKEEEKEKDKGMEEKEEEEEKDKGMEEKEEEEEKDKGMEEKEEEEESDRERMTWLKKRKSRKRPIHLHRHVHVWGRNSDHTRTRNNRNNNRHRFGSSASAPKRSNSAHFPPLSTPFKRKLSFVDSSREEAHQKGYSPQSFSDHSWGSANHSSASDHFYSPHDQSPPISAAERSLSIDGHKYSDNWDHFDKRKEHTKKAPRHKINKMTKSNQSQ

SEQ ID NO: 159871 - protein, 219 aa, Heterodera glycines
IFARATDCCPEDELSFFQNFEGYSDERRSRLLPTSVLFFNSLPEIQFASATVLKGFLFEMFSSENAKRGAFAKKSLNGNELESEANEGDAEDIGKSLEEQSHQLALPRLFKALLSFEFANYSRLNESEVDPLLLSWDVLMRFFGDLDVLSRVRFCDAIDVKTLSNALAHLFNSLSDPPGHKDAICVVSNVDDLFTGPFHYKLVDRPFDREHFTSNLFFR

SEQ ID NO: 159872 - protein, 132 aa, Heterodera glycines
ICAPAAILRRSGHFSGPFSGVEPLSSVTRHHHGSQIHYHRKLIRQTLERHVAGTRPCDQLSCSESTLDARRALGFVANKCAPLWGDWSFGACISSRITTVIQVRSQGQVNYSWCNEPYAVSLSGRLNLHMHA

SEQ ID NO: 159873 - protein, 63 aa, Heterodera glycines
  unsure (1)..(63): unsure at all Xaa locations
KTIGALDMDELERALKESXTMXKAIVVXNPGNPTGQVLSRANIESIIQFAHKHRLXIFADEVY

SEQ ID NO: 159874 - protein, 164 aa, Heterodera glycines
VPKQSVAVNLHTDSSLAASTVKEASNTQFKLFYTCPDCPRDQSPVRSECSDYVDDDWSSIEDGDNPRTSREAQEAEIEDKYRSALNFLQEGNIERAVSIFSALLVHPVMSKYHIADWSTFDWQKSMTAGDGTSSQRIVPNMAKLYFNINLAMSGLAKDPFQFYV

SEQ ID NO: 159875 - protein, 160 aa, Heterodera glycines
  unsure (1)..(160): unsure at all Xaa locations
RLLLAERPTCADHRWRTDCNHCPARGCCXCCCCCKKRKRRRRHTSADDDKEDNKKRKRRHHTSDDDKKEEDHYHIDQHNKKEGEQHGKEDNKSPIQSELKVSTISAVPSDYNTNKRLGATELDVEAEEVPKTKPVPKKPKSEGGTKRKLSNFFWSTGTTE

SEQ ID NO: 159876 - protein, 142 aa, Heterodera glycines
YLAVCCFGIVAGAVGGVYYYNHVRSSRIDDPFNEFTRYSPAGPTKDKLKKSGSPIFGQSGDDTLAYKAQLHHYQQQKQKILGTASGPVVDNVSDNEEDTDEMDHNYSVFECPGLAPTGDLEIQNPNFVGAEKSAAGETRRTE

SEQ ID NO: 159877 - protein, 215 aa, Heterodera glycines
MSSSHRETGRSPRSVLMRQYEMLLQNSNDNSGFRAWFDNNNLFKWRILIDGPPGTPYAGCKLTALLHFPASYPNDPPTMTFLTDILHPNIDQSGKVCISILHAPGIDPLGHEQPSERWNPNRSVESILVSIQVLLAEPNFNSPANVDAAILFRNDPAQYRKEVRRRVERASASTPRARSSSTPPPVAQPSGEQQQGTPQPPATPPTPPQEEPQQQ

SEQ ID NO: 159878 - protein, 231 aa, Heterodera glycines
TGKILSEGRGEVQEFVDIADYATGLSRMFSGRIMPSERKKHLFLEQWNPLGVVGVISAFIFPAAVYGWNAALALVCGNSVLWKPSPSTPLTSIAITRLIGEVLSKNGLSPAICSLICGGGDVGMCLVKDPRVNLLSFTGSTEVGRVVGQHVQARFGKLLLELGGNNAIIVMDDADLSLVVPAVTFSSVGTAGQRCTSTRRLIIHEKVYDVVLERGGQRVQTADGHAHRGRE

SEQ ID NO: 159879 - protein, 99 aa, Heterodera glycines
MKLLTRIDCCCCCCDGGGGDGLAAATIFVGGVAAAKAATAPLSLLMAEMLFLGLLVVAPALFIFSSMLRFVRVSKTRLHSSSPNTQRPRIQPSSRCTKM

SEQ ID NO: 159880 - protein, 191 aa, Heterodera glycines
HKERQTYGEEDKSNAQNQMPTRDERRKIRRERKAMSDKADDGTRIPEGLVELKFEAPAAAAEEQLIEGETSTKSAFVSKFSTHPLGPWVPVKKEEKRPDLDSADSELQPHGKKRAKHYDDLPEQSYGPGSADYSQTPAELLEIAEMDPDDLSFKPKQTGQPQKSAKGKAIGFRKPGTSHATKSFRKANKTE

SEQ ID NO: 159881 - protein, 188 aa, Heterodera glycines
MALPSYNSFSGTQFAHRFPFAPLSSSVRPISFCGVIPSPPPPHSLNSLPSSSSSLNSNNCSLLLPSEISAKVFCPPSAIDPKLCRRAARRSRHELSHKRTHRCTVGGCDKVYTKSSHLKAHQRLHTGETCAFGTFVGVKSVLFCPFLRLAFKVNNCRFMCGGAQRTFIRADFVLSLLPSLSAFFTSER

SEQ ID NO: 159882 - protein, 196 aa, Heterodera glycines
MTSQVRSGTTRTKKRTADQVVKTVFRRKICLFCFMASLIVFALVLGLAITLTVITVNNWKEIGVLLSKQSALKSRSDIEAFYEIDCPIYSDNSKLPDKWDQFDLAFCNRYCDRNQMFEFMYRQLDPNRKSSAKSKDNQELMCPIYIEFKQCQMEEGGHCEEKLFSEEFTEFVQPGGAGTSSKGENETIGTCVPCPS

SEQ ID NO: 159883 - protein, 99 aa, Heterodera glycines
RIALLQPYLRSHKRGCSRPMNTSHYQITSLCTIWHFPMKCLLSKYLLKIMKTWHTIFRITHSNWLQKTLANAILSLKITCMDILSMIWQKLPLLKWNTH

SEQ ID NO: 159884 - protein, 226 aa, Heterodera glycines
LGYVFSAALSSLVLSFGAYRASLAFTTTSPSLFRSPMAFFDRTPLGRILNRIGNDIDRIDENIPWAVGYSLSILAEAFNSIIAICIVIPFLVLVAVPLMVIFLCITHFYNVSSVQFRRLTSKSRSSHLSFVEDAYSGSDSIRIFKAIKQFRAKGYRISDICNECFIVEIFSNRWLQIRLDIVADVSVFICVAVAIWMASQGVISLGVLALVIGCGYTFTGYLGEVA

SEQ ID NO: 159885 - protein, 221 aa, Heterodera glycines
KNMRIPIILILLRIVALLIHDACAGKKTPRKANRNRANKNGNSGTPSRQAAAPGKQNKNTPEARTNGQSPKKGGKSIGNQANPAEVKDAPQQSTPKKLLHAASVGVLLLSNLAGPIPAGAYDINQDRNSHMTEQYKMHGRNNMAAYMNQRSNLYGETAAANNIHGKNNNIHAPPKNKAVEEKTKPQMTHNNFARHTRTRYPPPPHKKTLRSPNFSALAAER

SEQ ID NO: 159886 - protein, 232 aa, Heterodera glycines
VCSSAANSWHSVSEVLSEQKQRLSLNGWFHYAPGTANVAQTGPNCAVEEPICRVEPSMNITLAEVNEWLSPNYIRPGQHRQIKRIFAYKSELSLQQFLNNERYNKALDELEKAQFESVGPPHKRNVWRLVESSLEQNSVLQSLLRLFRSEAITLLLTQWTGLHLYDLKTKRGTAHSPNGAKRAAEPPKKRKRADEEEEGTTSGGLKQGGESRQRRRKRRYKCSNRFFHPSFR

SEQ ID NO: 159887 - protein, 132 aa, Heterodera glycines
PKRWANELFIILFIHHSYFLNIILATNMLKFVLSVQMNWRHFNVSEEIWQINASQKMAGRVRWDTSLWTGVPNHQIRFFVANFALTSAHFKAPVGRRSFFAQQIIRIKRVSLHQEDFGANVRLSWHHNSPRT

SEQ ID NO: 159888 - protein, 233 aa, Heterodera glycines
  unsure (1)..(233): unsure at all Xaa locations
TRGMEQTMQSIFPRIQVALRRSMQTFQDSIEAELAQWRYCSKMQSSKMEALIRLVGESVEVQIRGPPEKATACIYFLEDLSTLVELTSAEVAPGISTERHFLSPAHLREHRTTPAIFTPETIMEMQQNESLVIVNSDGEEEXEFTDVVCFGSKEAAGLLTLGVDISVSQLQLSARSELAALLDAPNTLGMDWSILAVKLNLTEQIPEVDSSGQSLSRTDQLLTEWALHSPDSA

SEQ ID NO: 159889 - protein, 206 aa, Heterodera glycines
FHKKRRRRRDSIVVFPWNTAIDKRIYAAIEATQEIAKNPSEKLTAHANSFLDIANSLSESILGLPRAVEDPEWGLKERVTFLASRIGHRISSKTNERIVEPLLQQMCVLTEQLSKCIVLVDCAKQRQEWTFNKVSQLSTSVVELRNKIETEATRTRKIPGEVLLKIIRFYSSKLNVQMSKLRDRSSELLSSSMQKQILTLTAYVQQ

SEQ ID NO: 159890 - protein, 142 aa, Heterodera glycines; identical to SEQ ID NO: 158766

SEQ ID NO: 159891 - protein, 140 aa, Heterodera glycines
MLLPLLVLMLLSASFPLSAFSPSYSSYSNWPYPNSPRYSDYNRLYPSYSGQYGNYSGYNYGNYYNPYGGNSRGYYGMYDSPSYGSGYSPSYYGGYYGRNGGLGYGGMYPGYGGYSTASYYGGWPYTAGYGAQNGYTSPWR

SEQ ID NO: 159892 - protein, 100 aa, Heterodera glycines
FFFFFFFFSIFFFFFFFFVLFIFCEILMKFEHKSLKIHFYFYSQTNISFFLSFFVCEKEIFNEILPAANAIVGTANRSGNSEDESAEQEEQVLNSAQSIT

SEQ ID NO: 159893 - protein, 179 aa, Heterodera glycines
MSAVIPQPPSPAHPKFQKLYLDKKDKSTGQAHKPKTNKGPLHRLRTFFSRVILEKKIDGIVQVYEKIKDSPGGWAVLIQKMFTEMVLAKQFGEGSAGESRKNCQIALQLISNGGDKVGGVHLDKVKPFDSTWSLVKSAAQSLVELFKRNAGGEKARMKRTETILRVFKTFAMDGNALEG

SEQ ID NO: 159894 - protein, 102 aa, Heterodera glycines
DVRGTAADEGRHGRGQKVNVSNANSLRLCSFLVSLALLLTIAQQKVSSTRVHIFTITLPVAEFLAQNHSRICDGSRHLKQKKGNISFCWSIVRQIAFRLSSQ

SEQ ID NO: 159895 - protein, 28 aa, Heterodera glycines
MAETPPPPPPADAAAVGGDEAVDLEQRV

SEQ ID NO: 159896 - protein, 129 aa, Heterodera glycines
  unsure (1)..(129): unsure at all Xaa locations
WKACVHLCINSSKNVNNCVMDMLTXIDACETSMAKSIPVHYAIICPNIKHGRMYHNSXVPMKLACDMVCKSGTTRIVALDSYRKEIQCLNIIPVDNLPASPFFXLQYMKYNIPDYKNAVIVAKTPGVMN

SEQ ID NO: 159897 - protein, 173 aa, Heterodera glycines
EHAVKKEKGEKAQVIGGKCRQIAFDARSNRCHAGRKTELGALEEHGPRLISLTEFGQQSLGTGRGGRHRLIGAIGGGGRRIGGRAEKGSRREPRGLLLLLLLSLRMTILRRRVHLGSGRIGRKRWIKRLMRDGRGTIAGGGESISFSPSLPFANYDHIVVFLVIFLACLRLFH

SEQ ID NO: 159898 - protein, 38 aa, Heterodera glycines
SWIYDIKINYGQSSRNKTCQNRTKLTKHETNFHKQFGQ

SEQ ID NO: 159899 - protein, 174 aa, Heterodera glycines
IADTFLFKEGDRFLQEANACRYWPTGRGIFHNAKKTFLVWVNEEDHLRIISMQNGGNVGQVLERLIKGVKAIESKVPFSRDDRLGWLTFCPTNLGTTVRASVHIRLPKISAKPDFKSICDGLKLQIRGIHGEHSESAGGVYDISNKARLGLTEFEAVKQMYDGVKHLIELEKKA

SEQ ID NO: 159900 - protein, 136 aa, Heterodera glycines
ELDGEQRRHQETDKNYRKAERRVKELDFQVEEDKKNTERLTDLIDKLQGKLKVYKRQVDEAEEVAATNLGKYRQLQAQLDEAEERADMAENSLSKLRAKNRSSASIAPASASGLATSASAAVLRSTSFARNSFADY

SEQ ID NO: 159901 - protein, 220 aa, Heterodera glycines
MWQRIKDRVLIYDRMGRGTVHGETSIKYEFKTDEDFGKWLTGSDSEWSEGFSKCKLYRSDRGSAIFEGTLSTRLVKDGKTQGAGWCSMRSLNDKKAFDRKNFFSDWSHYTHLLIKCRGDGRTYKVMLHIPQFMDITWGNSYTYLLHTHGGPHWQFEMIPFSRFVFTVEGRAIDVQYPLDPRAASSIGITLMDRIEGPFRLEIDFIGATHDISHLEKHAYE

SEQ ID NO: 159902 - protein, 221 aa, Heterodera glycines
SSRKSCSLSLGNGIKSLLRLSGLATTLAVDFVALWPLSNWLFVSLSPSSSSSSSSISIWSSASLASVSSKLTSLSSIATQSCRNWSRSSTDSSFSASSNCRCPSSIPSSSNSICSCNSSPSPSSSPSSSSSSSSSAASSSSVINCKRFFFGGRSTIAPDSLDNALASHFVRKHLSDANFVSPAFNFAPNTANSLPIPFNSRFSSSTFFCSVISSSFRPRSL

SEQ ID NO: 159903 - protein, 184 aa, Heterodera glycines
  unsure (1)..(184): unsure at all Xaa locations
MASSFCSSLISIVAIVCLLCKCCFSAPHPCCPGSQHVVSMMKDHTGTFSASMPKSSLCLSAERVAAAVENQLKTIWCPGNGGQTLINEINAAQSSSDECARSLGFVRAMFEIAASAASHVGANAELANLAVQFREQVGTIDTNCAALGIHVGQISLGTPKGDHPQVXDSESVLSNPGTSGSHKR

SEQ ID NO: 159904 - protein, 103 aa, Heterodera glycines
KSKAMEYFQLDRRHGDELYGCLLLLLLGMAFTICATTFSTNAAHKRNSQNARSECVCPYKKNWANARVLALSAVVCTTQRCSAACSATSGQHCPLTLRAQFRP

SEQ ID NO: 159905 - protein, 84 aa, Heterodera glycines
  unsure (1)..(84): unsure at all Xaa locations
LFFVLFFNAAINFVSSHRIVGYYQGIRPLTNDQAKKXTHLILAFSTPDSQGNLSPLSSVLKQALKAGKSANGALKVMIAIGGGG

SEQ ID NO: 159906 - protein, 173 aa, Heterodera glycines
FDISIGGVKKGRIVIGLFGEVVPKTAKNFLELAKGTHGYGYKDSKFHRVIRNFMIQGGDFTRGDGTGGKSIFEGKSFEDENFKLHHYGAGWLSMANAGPDTNGSQFFITTVHTPWLDGRHVVFGKVLEGMNIVREIEDGETAGGDRPKKDVVIVDSGELTVSEPFKVAREPVV

SEQ ID NO: 159907 - protein, 234 aa, Heterodera glycines
TLGTKQLKRDNVYELIGDFAKALLPSSFLYGYCKEANCAPSSILLNYAVELCKLSSSLTADANRFELCIETAKAAILKAEMDERTVMVLLSTVKDICPYNYEAIELLFHTMHEIATNGKIEPENPDLVLIRGGYMLLKFLRCTNRGKNISSGEIRWYKQFTSQKNWNSSLSYVTNTELVLADETAGAPSLDESAMGPVRQQSNLLPSNESNSILPSWAMKRLPFHLLFNEENES

SEQ ID NO: 159908 - protein, 32 aa, Heterodera glycines
FLFFFFFFLAQKRRKIKRDKYVFNWRKLVQIQ

SEQ ID NO: 159909 - protein, 111 aa, Heterodera glycines
MSDHPNVALADLSCVANDVWLDTLFWIDRVEVGTKFALIDARFGKLVATHFNLRKWRLGELGVHRAPSGWDRGGTAAVTVMDDNALINRLPLATCPAPGGVIGFSAIYIWS

SEQ ID NO: 159910 - protein, 186 aa, Heterodera glycines
LFTNSSLTGNKGYKAADWKLDSPDWVGRLRLISIGDKLEIRLEDKTSGELFAKAPIGQLNSVDYGSVSDSSRYFVVRLRNDNAQTAFVGIGFADRADSFDLNVAIQDHFKAVKKCDDSAEDNAETVPKLDLSFKEGQTITVNIGKKTITSNNNSSSAVPNLRTSLGGSSAVPLLPPPPASGNKIRK

SEQ ID NO: 159911 - protein, 178 aa, Heterodera glycines
MYMNSMGSRGASSAAVVASAAALCLFSAMAVVVYGAESAGPKADQAMAAKQFNPSAFPAMPPELEKILPADVVQKLKAVHADMSLNIMQKQDKIDRIMSSLPGEVLDQIPAPPGFERLPDDVKNRLKQINRQTNKAWADKQKELQEYVKTLPQEQRAILMMGPMGGPHPPPPSFGRRR

SEQ ID NO: 159912 - protein, 143 aa, Heterodera glycines
  unsure (1)..(143): unsure at all Xaa locations
FGKHFFAKWHFQETLELNSPFEAVSTVNGHQFMLQSSKGRNPYCETCLGTIWRLAQHWRRCKSCGYRTHEKYIDKVRRVCPSLALARTEFSLQFDLCPEKSLLEQNYQCAECXLPIGFDDDSEKLPRICDFTGLFCCRRCHWN

SEQ ID NO: 159913 - protein, 181 aa, Heterodera glycines
IPMHRPRHCSEFRPFILNRRAVPCRPSLHLPYRMPNNNNDSTPKTAFSLRPTRTHCQQPMHIHNPFSCPPPPRHRSNLSKFDPSKMPPQFPAFGNPPSPEGMTLTGRMPRQKTKFHRQCAQFSPFWKCFLASSHCSWVRPCPNALSLSKFARPIRRCAQCESVQLPHPTQRAHLFDPFRHP

SEQ ID NO: 159914 - protein, 42 aa, Heterodera glycines
FFFFFFFFFDHSSSHCFHSVQLSFHLYPLHLVSRCSSSLPPS

SEQ ID NO: 159915 - protein, 36 aa, Heterodera glycines
NRLLAVVPFLVRTNFNGARVVHRALDQSRALLHCPS

SEQ ID NO: 159916 - protein, 166 aa, Heterodera glycines
SVVELRNKIETEATRTRKNPGEVLLKIIRFYSSKLNVQMSKLRDRSSELLSSSMQKQILTLTAYVQQLDDSFVKAKDIDEVKQEVLEEAKQKLFDIARWSASLSLRGPPKTSTADDVEHENLSSNIETEPKQEETKGEEEETLQQSMKEDEEEKGEEEEDEEEEED

SEQ ID NO: 159917 - protein, 212 aa, Heterodera glycines
MAAVSSAKSSSALKWVSLIVLIGQTTALVLTLRYSQTQKSHPSDGPKYLSSTAVLMAEIVKFFTCVSVLGYQNKWNFGRLLHDFDGRDSLKVGVPALLYVVQNNLLFLALSKLDAATYQVTYQLKILTTAFFSVTMLNKKLDLIKWMSLILLTFGVALVQLPKSAESPSLAVDEKAFGADNPPQKSTGDGFVGLFAILAACCSSGFAGVYLE

SEQ ID NO: 159918 - protein, 183 aa, Heterodera glycines
FLYKKQNKIFVLNGLRQSYTCCWGPFRTRIETGTTVMALFGFGLGILSAISSYVGFHNIYAGMVYLASSLFYLSVIIAMKKKEPSLFLPYLIFEGIGLLCAAVISLTMFIFGIWSPQQAFSTKEQEMNFRSLMLFFAATVGIDVALNAWFYSIIYRTYNLLKKTTKLVASASTVASARVPPPV

SEQ ID NO: 159919 - protein, 112 aa, Heterodera glycines
LQFDDEAFLAFVKGPANFDKFCAGKGVTNDQSKELLTQIYGTHLGILFYMRKNWHCANVRKEFEEFIDPEECQLFQNYLCIVYEFLFNVYAEQEDIMKPILKPPIGFRISIL

SEQ ID NO: 159920 - protein, 187 aa, Heterodera glycines
DGSFLARINYFRAFSSTVSRSFKQVKHTVQDNVTTIELVDVPIASTHRELKESAATQSKTPDDCSCVLCKIPTSISYKDVLILEQFMRLDGTVFPRQLTGLCHDQQQRLERCVMQAHWSGLFPDRTIPEFDRAGYKRFNRHWDDDLAMFRLKYKLHPGSWFYIKRYNPRIREYRPFKADEIPDIERE

SEQ ID NO: 159921 - protein, 202 aa, Heterodera glycines
NRIGCVNSRTTGRTENGTVKPSLICGKEEEETEQMAESKSELGDELWTGMEGPPVKEMKLETRAEEEEDEFDEQFLNEPKTIPMDTETLTAADSLRSHFGSLTKGIPNRMHRSSLLSAWEPPTSSASILKNPEQQRPSLLSDITEVFSAQQNVLGPSTSIGKITEMTHNVPFQFNAKVTVKELISQSFGETKGEELAKIVQA

SEQ ID NO: 159922 - protein, 141 aa, Heterodera glycines
QSSACERIDELHLELNFTILDITSIESKALTKWLTGKKAKKSSKKLLIRPRSREFATSWIRILQSDRLDNIYQVRVQCEFSLEQFSISCGANGTMTMEMRQDGQKDYLLNKYPTGEKMPPNYAFQLNGPLIKVSFVAQQKS

SEQ ID NO: 159923 - protein, 186 aa, Heterodera glycines
SALSTLWRLFSFYKASLSRSQSESKPTNSFGSLAIKPPTLANTHCQFNYNNILATLGNGIDYHRQNSGTGEGTQLPVGPFGVFAGFSPFSKPSLSRSQSESKPTNSTNSFANIAAKPPTAANTQYNYNQQLRMIMPQPSVVSKKNSPTSQNDKRMDKLENGETNTPSLCGDEEEKPAKNYLHKTQI

SEQ ID NO: 159924 - protein, 198 aa, Heterodera glycines
  unsure (1)..(198): unsure at all Xaa locations
SMNRQKRQNLNSIXKKKAIDLALNQSPLSVRLSLSCFHLFLTAEKINERNKVKVTLLSKPQCDANGYEIIVDYKLIVGNWTKLVQKDKWDVEETLLSMEHDSCYIDTLEVLANVRETLAPQDIKTSTGFRSFNILCSDRSFYVNTTHLNLLGGRMFKEWYERECQGEKNAVIQSIDANELEKLLQTCCAYGSTPTIPQ

SEQ ID NO: 159925 - protein, 126 aa, Heterodera glycines
IAKKVNQLEDKKENDVEEKAEELKTQGDTFKKQLNNLFAQVDDRRRKRDLPDYLCGKISFELLKDPVITPSGITYDRQDILTHLHRVGHFDPVTRVPLTADQLIPNFSMKEVVDHFVQENEWAIDF

SEQ ID NO: 159926 - protein, 186 aa, Heterodera glycines
  unsure (1)..(186): unsure at all Xaa locations
CXRRTFSRTHGIAKSGRLDLENRANPHFFRRLSASSVTLVLFYHSLGTRSVSQKLCCKIFFTLNNGTWPSALSYDEDPNSNCPYQCIYTTERTAEASASVLLFHVFWSNPIGFWPFWSWPQHRSEEQLYAFFTQESPYYAGSAFNKLSNDWFNLSMTYHADSTIATKYDELLEHRSGEMLAGEDEF

SEQ ID NO: 159927 - protein, 142 aa, Heterodera glycines
SAFGRPSTIFARLTVADEHTNDAGIMHTGFAAAMADVLTAATVRITAAQQTPVVSVDLTTAIVQPARIGDILLMEANCLQADRSIAFTEAIFRRKSDGQLIVKASQQLAILHYLPLKTKGKGGDGNDAKKGPTDCEQQQQQN

SEQ ID NO: 159928 - protein, 180 aa, Heterodera glycines
IGETSGYFQRLLISLCSGARDEQMHTDPIKANQDAQRLWRAGEARLGSDEIAFNSILAVQNFVLFRMVFDEYQRQHGHSIEQAISNEFSGDIRDANLALVKSIRNRASYFAELLHNSMKGIGTRDTDLIRLVVTRSEVDLVDIRQAYQNMYGTSLENAIASDCSGAYKDGLVAIVKGYYH

SEQ ID NO: 159929 - protein, 203 aa, Heterodera glycines
GAPSAHPSSPCSSSLLPPPVSSLSVPLHHRSSISGGGSRPIVIRKGPQGFGFSIRSVRVYLSEMSEYYSIEHIVAAVREGSPAREAGLRTNDLITRVHTQSVHNMTHPEMMRRLLSCGNELTIHVVPLSSTSIKEGEPRRNIGKPLRKKPRRPPTAQQKNKQQSRKGSALLRRLSGKRTVGDTVPGTSSQKQMFIPRSVSSQE

SEQ ID NO: 159930 - protein, 126 aa, Heterodera glycines; identical to SEQ ID NO: 141921

SEQ ID NO: 159931 - protein, 94 aa, Heterodera glycines
MKMAVNNTERLHFSSFASQKFSLQNFQNCNIVEKLNIRNTKQFNIDIRVEEGNGLFTVTFDTGGKATKCQYRSPDMPTWAVQYITVRTELAQLF

SEQ ID NO: 159932 - protein, 234 aa, Heterodera glycines
IPLRRFLRLLLLIFGNSSDPAQIVSPWAWRMPWLQWLLLFWFLIFMQRVQYYYAWTMTDAICNISGFGFDGFTSDGKPKWDLTTTVDVWKVETAQSFKETLDGWNLKTMFWLRYIAYERMPKNYRTLSTYALSAVWHGLFMGYYLCFATGALITVAGRMSRRCIRHHFQRNAFLHHLYNLLTFLATKFALAYTTFPFVTMHLNPGLLLYRRLFFFLHFLALFAILALPRLLPPE

SEQ ID NO: 159933 - protein, 227 aa, Heterodera glycines
DGSCRNGRKLGHFIFGKKNKWNCPEKANDKQRKRPSLQRNDATAGQMLENCNLLRFANNALRKYFLYLKANKKFLEEDRDNRGAEQIIKAKDDLLKKLSLKPSFLQLSENNLSTVKIVLLKAYKHFNLQTENLEENEFKLITEKFVNFENCAKLMKLSKAFQKKKSLEFPIDDTMNRYRKALGKIKAKMEDDDDYCIKCKIPTVDEIINGKEAKLKDRFEDAFQKAT

SEQ ID NO: 159934 - protein, 185 aa, Heterodera glycines
MTDESRLEDVYKLIWAIGRDPLTAELNLADVGVKLIFGDYIKVDDYQNTTKEGFYAVGDVCTPKFELTPVAIAAGRRLAHRLFNKEAENRLTYENIPTVVFSHPPLATTGLSEKEAVERFGRDQVKTYNAGFTNMYFAMTQHKEKTHMKIVCHGKDEKVIGLHILGMGADEMLQGFAVCVKAGLT

SEQ ID NO: 159935 - protein, 50 aa, Heterodera glycines; identical to SEQ ID NO: 158994

SEQ ID NO: 159936 - protein, 197 aa, Heterodera glycines
  unsure (1)..(197): unsure at all Xaa locations
MSMLRPSVLPLGTSARPLVLSCVAIVASVGIVCAHSQSKGISGAPLNPSPSLLFVCGLSFATLFSVILAMFGLSWLRPIFLLPIICASGVVCVFHTLSVANWLSDWWISADQSLDLDWLIIFTSAITFQAISMLVFSLXKHLMIFKLLRPFTFKFAAIAFFDSQIQNIPLIVALIIASTAAESELFLKGGGKSFLFP

SEQ ID NO: 159937 - protein, 94 aa, Heterodera glycines
IENGSEPTERLHFSSFASQKFSLQNFQNCNIVEKLNIRNTKQFNIDIRVEEGNGLFTVTFDTGGKATKCQYRSPDMPTWAVQYITVRTELAQLS

SEQ ID NO: 159938 - protein, 50 aa, Heterodera glycines
QNINSNNSRRKRKKSENRPNNYLICLSLIRANLSEKSSPFPCTPLNGQLL

SEQ ID NO: 159939 - protein, 190 aa, Heterodera glycines
MTTTVEMSSGAATTASAAAVAGTAPSAGPMPSCICSSTSQLLTAAGMDGIPPAKTPANSGPDANFLADSLGVSPLYRQEDTKRWQTAAKVYQSSRSQMHSPTSGTCAPQHFHFGESLTAEGHLTQKIRQCRSSGSPISLEDIAAVNRQFHRQMDSGQRRRVNGPALNGSLELEAIAAVHELASQVKQISV

SEQ ID NO: 159940 - protein, 176 aa, Heterodera glycines
MSDSEKVTTRNARPKVLDTRDDGKFTAKFIAPRSREPDSVFLHIFGSKKDPHLYLDVSEVQWGNVYIFDLNKTEVIAVRPRRVADELRKLEERDRPPVKREQPKPQPQPQAQPQPVTFQKILSGLVWPTTEKYTLLVSSRDFDLDGRGSPIKQRATNPDPTRAETNYKGTFDVKMA

SEQ ID NO: 159941 - protein, 211 aa, Heterodera glycines
HFCWRGGLNVYDIYENCTPHPNNLDIMRRGIFNAKSMHSNDSVLWRTDDAFENANQPKEEKVNYLLRCLNGQPLVDYLNKDQVRKALHIPPTVPSWTQCSRWVAMHYRNQYADMSHFVWKALWANVRVLLFYGDTDMACNFLLGQRFSEMLGLKRLGTNLWHFGGQIAGIKTEYGSGLTYITVRGAGHMVPQKRGSEIEYAIGQFPTNRTI

SEQ ID NO: 159942 - protein, 228 aa, Heterodera glycines
  unsure (1)..(228): unsure at all Xaa locations
KSYCADIGHLIANRTFVWSTLAYTAVVFVTGTLSWGPTAMEHAKAMDEHLNDTSKLRPAEKNQIALIFGVITCVAGIXGVSLGSLIAQHWKTGKFCFAHHRSGRADPIVSAVGSFVAAPLMFVAFSLITTDQLLSWFVVFLTILCLCLNWAINVDMLMSIIVPERRSIASAIQILFSHLFGDASGPYLVGAISDFVRGSSDLPTDRFHSLIFAFYLPNALLFLSGAAF

SEQ ID NO: 159943 - protein, 162 aa, Heterodera glycines
NPMYVKVIHPYGEVLHVDWTKQYKALRGKIGIAFPGYMIHESGQWSDIHKKWFFLPRRASNDTYSETEDEHMGTNLLLIADEDFEHIQVRHIGPPGDGFRGFSAFRFLPNTEDDIIVAIKSEERGGKPIASYLFVFRLSDGHVLLDDQKFDGPYKFEGVVVY

SEQ ID NO: 159944 - protein, 201 aa, Heterodera glycines
MKKIRVANPVVDLDGDEMTRIIWAGIKEKLILPYLDIDIKYYDLSIENRDATDDEVTVDAAEAIKKYNVGIKCATITADEARVKEFGLKKMWLSPNGTIRNILGGTVFREPIICKNIPRVVPGWKKEIVIGRHAFGDQYKATDIVVPKGSKFEINIIKSDGQVERHSVFNFADTGGIIMGMYNTDDSIRGFAHSCFQYALK

SEQ ID NO: 159945 - protein, 145 aa, Heterodera glycines
MATYLFIAAAAFGAGIYCWKAYLGPMLDQPISDDEEKPKPEGGEESTTAGDKEDIKAGSKGDKHKKKDKKGEGAAAAPAADKKEEKRKDKHRSKEAGKSDDSKAGKKDKHGKKDKKGKKKDTADASTVDEALGEQSTAETSQAEE

SEQ ID NO: 159946 - protein, 133 aa, Heterodera glycines
DHKERKGQAKNEEHSLDHSVPASFVLLLPIFFQCFVLLIRHLLLPIGRSLPLFYVFLLYLCHSFNVFAYNFPELGEIIRRTQKTFFNFTVIIRSIPWLPESICSITFSAGSFRMLLSHITSNDNSGKFDGQVQ

SEQ ID NO: 159947 - protein, 80 aa, Heterodera glycines; identical to SEQ ID NO: 159706

SEQ ID NO: 159948 - protein, 87 aa, Heterodera glycines
KIQWKMFLAADFVPSGKVSTYFMISSNLVLNDFPCWRSICLTRWRTSAGSCATSGGSGIWSMTFSGRVQMIESIRSIFCSALNDPSS

SEQ ID NO: 159949 - protein, 52 aa, Heterodera glycines; identical to SEQ ID NO: 159767

SEQ ID NO: 159950 - protein, 118 aa, Heterodera glycines; identical to SEQ ID NO: 159796

SEQ ID NO: 159951 - protein, 203 aa, Heterodera glycines
NALAEKVSETEAKLENGMRENQNALAKKVSETEAKLENGMRENQNALAEKVSETEAKLENGMRENQNALAKKVSETEAKLENGIQNNQKALSLMKNMATLAFFHFPLPIYHRWNASDCDPEIVINESTNAIQHNGTEDIDWRSCRAWPIQMSSAVGRIGIIYAEYRILAIIGGLRIGLSTKEMPLDRWVGNGHVSYGYAYYGE

SEQ ID NO: 159952 - protein, 219 aa, Heterodera glycines
RSCITWRILSVYEFHSPALDDPDFNAKPMILLVGQYSTGKTTFIRYLLEQNFPGIRIGPEPTTDRFIVVMYGEEEAVIPGNALVVDSTKQFRALTKFGNAFLNRFQCSMLKNEVLNGVTIIDTPGILSGEKQRIDRGYDFSGVLEWFAERVDRIILLFDAHKLDISDEFKRCIEALSGNEDKIRIVLNKSDMVDHQQLMRVYGALMWSLGKVFKTPEVA

SEQ ID NO: 159953 - protein, 141 aa, Heterodera glycines
LAVCCFGIVAGAVGGVYYYNHVRSSRIDDPFNEFTRYSPAGPTKDKLKKSGSPIFGQSGDDTLAYKAQLHHYQQQKQKILGTASGPVVDNVSDNEEDTDEMDHNYSVFECPGLAPTGDLEIQNPNFVGAEKSAAGETRRTE

SEQ ID NO: 159954 - protein, 105 aa, Heterodera glycines
  unsure (1)..(105): unsure at all Xaa locations
MKEWRQLCEEVDVDELERAKRSLXTNSLLMLDGSTPICDDVGRQLLCFDRRISTEELEEKINAITPYTIRIIGRRYFVNKPFAYVIIGKTSNWPNPMKIHKWLSW

SEQ ID NO: 159955 - protein, 127 aa, Heterodera glycines
FGKHFFAKWHFQETLELNSPFEAVSTVNGHQFMLQSSKGRNPYCETCLGTIWRLAQHWRRCKSCGYRTHEKYIDKVRRVCPSLALARTEFSLQFDLCPEKSLLEQNYQCAECFCPSDSTTTLKNCLG

SEQ ID NO: 159956 - protein, 225 aa, Heterodera glycines
  unsure (1)..(225): unsure at all Xaa locations
MLLSSSLFLCFPSPFAIPLAMSSLPIVRSQSTSYIGFPRARDFAIGDGHVPSLIIVTSVPNLNHLHVSDAYRSSTLYKYRRDWDLLDSAISDHSHRGPGFHWVDRRFRARRFMNTDPIPDSLGLDYPNFWSRYKWYSDYLEPRHWRRHRDPNYDRPLWNSWKPYILDGKNQKQAIDMYRQGLVSFAYLDKDWITPWALGRKEKDWADIYPPAGXYGSRRYMYSWA

SEQ ID NO: 159957 - protein, 183 aa, Heterodera glycines
LARINYFRAFSSTVSRSFKQVKHTVQDNVTTIELVDVPIASTHRELKESAATQSKTPDDCSCVLCKIPTSISYKDVLILEQFMRLDGTVFPRQLTGLCHDQQQRLERCVMQAHWSGLFPDRTIPEFDRAGYKRFNRHWDDDLAMFRLKYKLHPGSWFYIKRYNPRIREYRPFKADEIPDIERE

SEQ ID NO: 159958 - protein, 99 aa, Heterodera glycines
EKMRVLPLLFSALLLLSVGLCFAQFDQSPSAALNHVRAKRGYKPWKKQSFSSSSSEMYRRRRPSGNGHYRDYNGYGSNGYYRRKPGILERALGKITRSY

SEQ ID NO: 159959 - protein, 205 aa, Heterodera glycines
CFLRWTLFCSACFCSFLCWSVFGQFAAFRPAVPRRFFVHKSGPTGDPSTLKHSSANDFLDGGRRLPVLPVCLSLLTTFVSGIGLLSTPAEIYSRGSAFALFNLCGSFAFALIGIFFLPIFFKLKCLNAYEYFELRFQSQSLRRLATLVFMANTLFYMAVVIYAPAISLSGVTSLRLWPFVLLVGVVSTIYTAAGGIRAVIWTDTL

SEQ ID NO: 159960 - protein, 190 aa, Heterodera glycines
IIGPNNIKLDDFTDRLCYRYTPVLLGLFMFITGTVDNFGSPIRCMVPQEFSASWSNFVHQYCYVTGTYVKIVDPSDQTVERIYVNYYQWVPYLLILQALIMRLPLSFWRFGRRISDADFDYVNELGLKARTSTAEKRTEFLTEAANYICQIVGSRKTHNGLGSLVGYMYLLYKMINVIVVFAQIYMLKIF

SEQ ID NO: 159961 - protein, 222 aa, Heterodera glycines
  unsure (1)..(222): unsure at all Xaa locations
FFYSIGLTFVQIGQLSAGICKFPNPSKSVTVQSMMTVSSNTDYKNTLFVGGSGILNGACDVNNGKLKYLMTLKNGVTIKNAILDTPGLGIYCEGNCVLENIYYKRLCYHATGFGYKSTSTSYTYQVIGGAGQGSPDKYFTQSGKGTTIIKNFCAEGKYGKLWCSCGNCAFQTARTVQISNTVLKGPGLSVVSLNSNYGDKMSLSGLTXHGQKSSSTKTNYIC

SEQ ID NO: 159962 - protein, 72 aa, Heterodera glycines
AGLSPIETVTEMRSQLSMGNKEHGVNVRMGAITDIREENVVQPFLVSSFAVKQAAECVLRPLKIDDFVLSVR

SEQ ID NO: 159963 - protein, 217 aa, Heterodera glycines
  unsure (1)..(217): unsure at all Xaa locations
TDTVIFIGMXMYAFEGQTMILPIENKLATPEDFLDNFGVLXSTMCLCTFFMIAIGFFXVNGFGTIVRETITVNVPHTGLYSAVNGFLCIQSMLGHSIAMYVVFDMFYKGFRRKFTARFPNVPSLVVDKGFRVGWVFLTYLMAILIPRLAVMIPLVGVTSGTLCALVYPPFFQIVTFWSDWKLNMSPVRRAFLIGRNCFVIVLGFFAIGAGVAANVLQ

SEQ ID NO: 159964 - protein, 114 aa, Heterodera glycines
VADFEGELLLAIVVQCPTVLLVEGRLKPNIIKLKQSRIKIRVRRHFVLLVEGRMKHNIIQIKIRIRRHFVLLVEGRMKHNIIQIKIRIRRHFREMFKLFRQLLIHISQLGNFYS

SEQ ID NO: 159965 - protein, 119 aa, Heterodera glycines
MGASLKTNQDLSQLSSTRLPISKIAEKPPSADASDRYEDINTDVLNERFTDAETNKFVQRTIERAQIEAERTFLNQQILERRFAPGESLFGPVNKRAMGSAQPDRTVSGGIKRFINLPN

SEQ ID NO: 159966 - protein, 215 aa, Heterodera glycines
  unsure (1)..(215): unsure at all Xaa locations
PARRQGDVISPHRAVLTLSKXMFNAGCFSLPYAWMLGGKWVSLALTFVIAGFNWYGNHILVRSSQHLAKKSGVASLDYGHFAKRVCDYSELPFLRRHSKRIMYVVNITILFYQLGMCAVAILFIADNMVHMLGSWLGNSTTLMATIAIVFIIFTNMFTEMRVIGVFAAVSSVFLLLGAGVIMQFTLTQPSKWDELPAYTNFTDTVIFIGMSMYAF

SEQ ID NO: 159967 - protein, 159 aa, Heterodera glycines
VLLTLDRTHCWASTHQMVATPTVDGQPKELYCSDHVWGFKFDWIKTFKEEFLRSTTPASYYILLHLCSMPEKPFELVNDQTQEKLSLAKIEGNVLISYWLLKRWPIAGGETAQRKDENGNKLNNVRLLIRGINCIGPLSPSTADQSNGNAVPSGAGSSE

SEQ ID NO: 159968 - protein, 97 aa, Heterodera glycines
YSYTIKCCHLACLFIQDALSKCRSNHRLSCNNCPEQCSSHRICAPPPQNCSWSSAPAVPFLRHLPCTVPTHCTFEYGSESGCEYRNHGPSSVTTAAV

SEQ ID NO: 159969 - protein, 92 aa, Heterodera glycines
  unsure (1)..(92): unsure at all Xaa locations
LCQALGFSSTAHHRISSXMAGSPQTVRVFVDELSRRFRPVFFSRLEGAWKTYAEEQEERVISDLEAFDLFYICRKEAEHNQNVDSLELMKHF

SEQ ID NO: 159970 - protein, 90 aa, Heterodera glycines
SLSMLSGGGGFFRMTVYSFCLWIHNKRVCRSITLSIDHLSYCGIITSSRLSQIVHNLQFFNLAVSNVQGLVGIVFPIVDIRVILEVIVSV

SEQ ID NO: 159971 - protein, 199 aa, Heterodera glycines
PFLRELVNAVEKPAKNDQTEQYQQRSEHAVKKEKGEKTQVIGGKCRQIAFDARSNRCHAGRKTELGALEEHGPRLISLTEFGQQSLGTGRGGRHRLIGAIGGGGRRIGGRAEKGSRREPRGLLLLLLLSLRMTILRRRVHLGSGRIGRKRWIKRLMRDGRGTIAGGGESISFSPSLPFANYDHIVVFLVIFLACLRLFH

SEQ ID NO: 159972 - protein, 207 aa, Heterodera glycines
  unsure (1)..(207): unsure at all Xaa locations
IRTRDVVIXYWCLLKALEDGMKLSGNEPNTNKFLLDLMTVLENVKQSHKENDAIMQEIVGQSHIEDQAQRLFQFAYGLDQQSQFGQKLIKAFYTAGYWCDVLTCFGQLDDNIQSARKYAKWRAIDVHNCLKNGEQPKPATNPTVQHQKELSDQDDIAAQINDKLSGELNDLNAYLTKSPQAAAVPQQQCFNPMLTHPSQQRQIPSNY

SEQ ID NO: 159973 - protein, 138 aa, Heterodera glycines
MPNIFKILLIVLLAVVSFRLSASTGDKKTANDGSGNNSSAGIGTKIKRIVTAGLLLTSLATGGAEAIGRSNAQGGNAAGLVPSHVTNRSMAPPPPPVQFEMGANRLEKMRAHLRELAEKMPVNESKRLSPSGPDPHHH

SEQ ID NO: 159974 - protein, 55 aa, Heterodera glycines
GPLFSQVPAPALCSVPRVLYQQYSSVAEIPQSLIHRVMSKVQHSCRMVQWTIIKK

SEQ ID NO: 159975 - protein, 197 aa, Heterodera glycines
MQLLLFLLAGFDTTANSLGFVSYYLACHPDVQLRAQEEIDTVCSSENPTYEELSQLKYMEAVIKETLRLVPVAATVVTRVCSQTTTLGQILVEKGTGVTIDLYTFHRNKELWGDDADEFRPERWLDIDPPPASAYYYAFGGGPRICIGMRFALLEEKMALARLLRRYPLAKNEQTEKFLKVNSQVVLNPGAVMVQLN

SEQ ID NO: 159976 - protein, 211 aa, Heterodera glycines
VRRTMCSTGCSMLRQCSTASAAEMPSPTTTTGQSPDTYSVSAVAAIVARAIVVAVASVAGAIVVAVSVAPESPPSVSSNRCFNELRLYTTRPSAAAADSPGTPNSLGCCRPHANTTCLQRSVKVRCSAVFGTVSVPCSSQWHVPTKEGWQIFFPLLLCDEKMTFISQKTMNECEKNGRQMNDWGRERDRRESKKREKRERERTKERRRNAR

SEQ ID NO: 159977 - protein, 205 aa, Heterodera glycines
TTHRGTAAAADVCPTEQLSKCIVLVDYAKQRQEWTFNKVSQLSTSVVELRNKIETEATRTRKNPGEVLLKIIRFYSSKLNVQMSKLRDRSSELLSSSMQKQILTLTAYVQQLDDSFVKAKDIDEVKQEVLEEAKQKLFDIARWSASLSLRGPPKTSTADDVENENLSSNIETEPKQEETKGEEEETLQQSMKEDEEEKGEEDDDE

SEQ ID NO: 159978 - protein, 92 aa, Heterodera glycines
RRPRRKARRRRRLMCPRLKQKGKSRTHRWKGRKRRKAAERRQMLYLFLAQLCTNPSPFPHFAIPRLSNFFWLLAFAFRVILPMNSPCLFFRQ

SEQ ID NO: 159979 - protein, 66 aa, Heterodera glycines
FLMTNSMPKILFTIIAFVNISQILFATAMYKGKEICGKTVEECQAALIAFMKDSGSNQNYHASGNT

SEQ ID NO: 159980 - protein, 83 aa, Heterodera glycines
MPKASKNKDPNMPKRAQSAYFIWMLANREKIKKPGMSVAEVAKAAGVEWGRMSAADKTLWEQKAADDKKRYEQEMTQYRARQK

SEQ ID NO: 159981 - protein, 180 aa, Heterodera glycines
  unsure (1)..(180): unsure at all Xaa locations
SGKENEKQLEEEEKEKQREEEEKKQEEKETQQKEEEKKQNEEEKMHEEKEVEEIIMLDSNDDEAMEKEGEEKEKQLEDKEKPEEAQGEQEEEKEKQLGEKEMQIDELIVLDSDDEEKEKQGEEKEETQRKKXEDKERQEEEKETQGEENEKQAEDKETQGEEKEKREEEKEKLLQKKYKK

SEQ ID NO: 159982 - protein, 211 aa, Heterodera glycines
  unsure (1)..(211): unsure at all Xaa locations
MHSSRNVFAYFVSSDTSQPAIQHFHRVASTLRDNCTFWLGSGEWVRSVVGNESAIFFRDPHVDDDPXYNGPLDNLDSVKKWLTDKCVPLVREITFDNAEELTEEGIPFLILFRIPGDLQAERTFTDIVTTELEGQKNAANFLMADGKKFAHPLHHLGKSERDLPLIAIDCFRHMYXFPDMKQFGVKRHLPQFVLDMHSGKLHREFHQWPDP

SEQ ID NO: 159983 - protein, 235 aa, Heterodera glycines
QIPPIFVTLSFVLFVFLLFEFSSEAVTRKRKIPCKKTAFNRRTTNYQAWKEQITVCELLENYDPAVRPLGQEPTLEKRGPVVVTTSLFVNSISAVSERNMEYVVQFRFQQEWLDDRLAYSRLGDERSFAHLFVARDQTIWIPDSFFQNERSGHYHMLDQENRFVKIRADGRVTYNRRLTLTLACNMNLLRYPMDVQSCLIDFASYAYTTNDIIYKWDQVGVEIAPTANGALPNFE

SEQ ID NO: 159984 - protein, 106 aa, Heterodera glycines
WHSVFTSLSLGLCSALVWMTKFAYGLFLPLAMDFLGISATFLLLLLFTPLSTIFVWLFLPETRDKTLEEMEKQFREEDWAALKRKGRKRSKETRERIEDGESGERS

SEQ ID NO: 159985 - protein, 142 aa, Heterodera glycines
MEKIVYLKLLQFVLTLTIIWQLRSLHQFCGTFADPKAFLHDISIGHCKNFTLIGKDSKSGEFSALFDQDKWHNQLIMMSSTNGQLIEEQQHQFMDELATKLPSAGRICIPITISPFDWIFYRIANDRILIDNDILYFSSVQL

SEQ ID NO: 159986 - protein, 86 aa, Heterodera glycines
IAYEHVWAIGPEKPPPRKAQEVHGWIRKFLSEKVSQEIAEKTRIIYGGSVTAENCKDLAAKQDIDGFLVGGASLKPDFVNIINAKS

SEQ ID NO: 159987 - protein, 77 aa, Heterodera glycines
HNCRVGLAFGNGRKGINKHLNTGQKCHEENRENGKPKAYKCTGADNLDEEETEEQNTPKERRVAKTSVGKRMVLKQR

SEQ ID NO: 159988 - protein, 100 aa, Heterodera glycines; identical to SEQ ID NO: 158768

SEQ ID NO: 159989 - protein, 159 aa, Heterodera glycines
YVRGVSDALNSYRKMAMSVLPYAPTEYAQVIHHVVKFAKASEKAQTGHFFLLVILTNGVIKDHRDTVDTIVEASSLPIAIAFIAVSNAHHPSQLAALRQQFAVHTLKSSRNVPLARETVTAVSCADPSMAYHFLMAVQRQLILHLLRAATDADAITASG

SEQ ID NO: 159990 - protein, 166 aa, Heterodera glycines
MYMNSMGSRGASSAAVVASAAALCLFSAMAVVVYGAESAGPKADQTLAAKQFNPSAFPAMPPELEKILPADVVQKLKAVHADMSLNIMQKQDKIDRIMSSLPGEVLDQIPAPPGFERLPDDVKNRLKQINRQTNKSWADKQKELQEYVKTLPHEQRAILMMGPMGG

SEQ ID NO: 159991 - protein, 150 aa, Heterodera glycines
  unsure (1)..(150): unsure at all Xaa locations
MAKFVAIALLSLTVVPMALAKTGKSQTADEVEGFRNMNIGDNNKVDAGKDPAGDKATXKGKAQKAGTKSDGXTNEPAAAKGTKNGKSPKTKAKQEVATNDPAAANEWNDQLMGMIVEKFSEELAVLLPKANTFMENALSFINEQMEKNGI

SEQ ID NO: 159992 - protein, 219 aa, Heterodera glycines
  unsure (1)..(219): unsure at all Xaa locations
NILLKSVLFLSLLSLFGDCMKNSDQIGVKRKSAGIRIEEPFVVKGKGKVVETSRKGSXIVGEKIFVMNTAERIKKMDIAQDKAKMDIDANGKPKQNEENAPPKYVFIWSSNNEKKNLEVDLRVIRHSKKLSELFHAKSDQSVNAKHGKQEALPVPKQEAEKILKEVEEWYAHHKNDKHKNAPVFVFKCKDNVSLVINVHLDAVRLSKELSNMLEDTADE

SEQ ID NO: 159993 - protein, 216 aa, Heterodera glycines
PARRLAWGKWLNCGQTCLAPDYVMVTNEMKPRLVEELKAVLVEYYGTNPETSKDYSRVINEAHFDRICALLKNSVGIEICKMGQPNREDLFIPPTILEVQTDDALMQSEIFGPILPFLIVRSFDEAIDIIKRGEKPLAAYLFTRDERKVNRWVAETHSGSVCVNDVMLQITVDTLPFGGVGESGMGSYRGKFGFDEFIHQKAVLKRCFFGDGIAAG

SEQ ID NO: 159994 - protein, 136 aa, Heterodera glycines
RRIPRHSPFGSLFALPHFFRLAKWTSPSTNGTVSAAPSSSARILCFDHIRFWVGNAKHAAHWYCVNFSFIPFAYTGLETGSRKTAAYAVKQDKVVFVFESALLPNNGEMIAHLAKHGDGVKDVAPEVDNSDWVLDT

SEQ ID NO: 159995 - protein, 205 aa, Heterodera glycines
  unsure (1)..(205): unsure at all Xaa locations
YAFTHFSVHKLNIVGKTVVPFFGSVVHCPSWSVRFVSTVPNWIHGQRVESKTKEWIELTNPATNEVVGLVPESTLDEMQLAVDSCKKAFRSWRNSSVVTRQQCMFKLQELIKRDMKKLAENVTKEQGKTLSDAEGDVFRGLQVVEFACNAASLLLGEHLPNIAKDMETYSLRLPLGVTAGICPFNFPAMIPXWMFPLALVSGNTM

SEQ ID NO: 159996 - protein, 188 aa, Heterodera glycines
IRKTQDKKCTKSGERKWKFGVNKSGSERLMKKTKRRSGKISEMATIETDKMSEMGTNRNGQNERNGDNQNGQSGRRNDGIDQRQTDDHAGEDPPLDALVHSAQMLQKAIFPFLEMKYLAQKRRRGDTPADGGLLNRVQTERKPQQSYRRRSLPHRSTSNHLQTVANKTLSPHAFELPKSDRGNLQHLD

SEQ ID NO: 159997 - protein, 245 aa, Heterodera glycines
TLSSSDVGGGNRSSNSKHSSADNTNRGKKAAKVVVNKRREVKEFVLVGGGGDVKEAAVAAGTVTLPEGAAGVGRVDDPRRENSNRMVAACVATPSVTVTATAATYFNNQTGFAGTLGGGGGSKKGMEANSNPSKASKGVTMTTAEVDQLMQQLQSVVENGDLPTWTLAFRTGECTTFPNRTDSCFLSQVNGTKSLPEETRKFIPDPSFINLFAFLLGCFMTHRTPIIIPLLFASSNQSVGLLITN

SEQ ID NO: 159998 - protein, 197 aa, Heterodera glycines
CLDCSKPACLVAHNGLNFDFRILCHELRKSDLFRTHPIPEQVYFLDTLSCFYELEKEYNREIELTMENVDWTLVLSQFQPNSETVVATAEIEETVQQNGTASEGTQNSNGHKSTTVLHRLTVLQETPTKKPELISVAKTTAKRSLFDEDVHPIQFMRKTHWSPAKRRCIDAKFFESNNRGEWNFNGNHARRLLCGRG

SEQ ID NO: 159999 - protein, 90 aa, Heterodera glycines
SPPSYFKGDMNYRKLVGDRAWPHQTPFSEALCGFCPTTLLALRTLKAETVAGVPLESLRKIKEKFGEKDLSWMSSSEYAVAQLCERRNGP

SEQ ID NO: 160000 - protein, 142 aa, Heterodera glycines
MPGCNNGVTTAQQNTKRSPIVPLPDNFCTFGLDGVSKKVIERLREMNLLQPKALQLNDDEFASAEVILSQADFAINECQIVALEKGILWSPETIVPALDLFRIALLHPKLNEIFCSLESVLGNPPKGVPTVRRLVELLNLAH

SEQ ID NO: 160001 - protein, 199 aa, Heterodera glycines
  unsure (1)..(199): unsure at all Xaa locations
DNGRKQQNTFLTPKFSILLPTYNEAENLPICLWLIIKYLKGLSYEVIIIDDNSPDGTQEVAKSLQKEFGAGRIKLLTRECKLGLGSAYVFXGEFVILMDADLSHHPRHIPEMVTLQEKHGYDIVTGTRYAMGGGVSGWDFRRKMISRGANFLAQFLLQPGVSDLTGSFRLYRKSVLSKLVVESVSKGYVFQMEMMFRAK

SEQ ID NO: 160002 - protein, 214 aa, Heterodera glycines
  unsure (1)..(214): unsure at all Xaa locations
QFFDNEIERRVELRKSADGYSGDGTFLDILDQFIDQMEEKRRKSKAKAFLKLKYLSTLCYDIFLAGQETTSNTLNFLILFMLLDQKSQQKLHAELDSLANDKNEQTAPEGRGTVFRMEDRLRLPYTHAVVNVKGAREQRQINETINXLTIGKESLRLSNLLPLNLHKVLQTDVEIGGHKLKKGTAVVNQIATVLFDDKIFPDHEKFMPSRFLEE

SEQ ID NO: 160003 - protein, 169 aa, Heterodera glycines
  unsure (1)..(169): unsure at all Xaa locations
AGKVELRCEKTGYRAEIDFLXQPFFRGKAHQIHGQIXYTSRKTALMQLKGEWNGEIYLKRDGATDYQLFTDVRQKPDVRKECVPVREQEDRESRKLWRHVTAALFINNIEIASQSKRCIEQRQRDEKVGRERLGHHWQPRFFVRIGDGSPSDSWRYCDALEQRTTTDGP

SEQ ID NO: 160004 - protein, 129 aa, Heterodera glycines
MNQTVPISGSFGVDDHQKTAKNIYPSLELLEKEPRGGTLMGCVDGEEVCTAGLPYPGYQKPKGQKHSRHCEWKHKNLVIQSLVEQLVGMGFDNCNGWLFRVAEKEGAELDRIFVAIDEDTMYRARISLQ

SEQ ID NO: 160005 - protein, 137 aa, Heterodera glycines
FTVNSKFQEANFTFYQKSDLTFASCCADLDRYDFHLFNVHDAATNRASKNDEDLDTTMVFDDQNPKGPSPSGTKRENEAHFEVDDEENVVIDPHEYNIRFFDDDDDGAAQIPSDEGEGLEMSDQPKGNEAPINRYAR

SEQ ID NO: 160006 - protein, 166 aa, Heterodera glycines
MGQINLCDDVWLDTLAWINRGEVGMKFALVNARFNTLVDRHFEQRKWCFGEFHICERMTEESGAEIMTSIDGSDFSTLPLPTTPLPDSVVGFQSISIWYINEEVINFLCTIRRLLAEDIALEFSTYFTEYRSWKVMARHIWPLLRDGISTLFLKKCDLAMLRKHVS

SEQ ID NO: 160007 - protein, 153 aa, Heterodera glycines
PCGAGGGGGGQFLVGERGRSRVGPMNQQKRYLREDIGMSEEMPDFVLVMSFLFCLFVLPFQMFCFYTIVVFVAIFGFSQLFKVAFSPSIVFLELFVGLFKFFHGFFLRFVCPLFFPLLLWLFLSHCFVSGGFVWTPFHSLYECPPPPIKVRFL

SEQ ID NO: 160008 - protein, 241 aa, Heterodera glycines
GVSLILDISRSGTVLFSFGTVANTRTLGESLRRTLLHTFSQFPDYEFIWKLDAESAANESELIKATPNVHTFEWVPQNAILRHPKLRAFVTHCGQNSLAEAAKIGVPIVGIPLFGDQLYNAVLAKHRGMAVHVGIRQLIADKTGKVLRTALSRVLHDASFRANAKLIQKKIALSPFGAKEQLVRWVEFAAEFPHLNELNMPTDAELGWVAYYSIDAILFTISAVFLAILALFFDAADGISS

SEQ ID NO: 160009 - protein, 112 aa, Heterodera glycines
  unsure (1)..(112): unsure at all Xaa locations
KRKRKAQAPAQKQHHQRRKAPLHKKKDRLKQRQGKRPMKRQXTTKKKEKSSKSAKGKPTSNPKPERTEPSVKEDSKPVAAEKGVEVPHSMMSKGDSVVDEEDEVGYTTTTDV

SEQ ID NO: 160010 - protein, 187 aa, Heterodera glycines
QALILHAVGDRGNFGTGGIFSALRRLSSAIPNCYEYAHRMRDLNRGDVHLVENIAVQSVPEPFKQLDNINNIKNENEPELKAKKGSNNASRTLSVALMVVQTHRTKKTNVGTQLEALEQCLLRIRLFARRFACSVHLLRIWFDLDEIEERQVRELLDQHLCAHGINVYIYKLRRSEGKSAAAEKMEN

SEQ ID NO: 160011 - protein, 211 aa, Heterodera glycines
  unsure (1)..(211): unsure at all Xaa locations
XLEWDEKKLKNASWADMTPMDYLSPMEWGTKKRPVYVDNSNGGEYNKENENCVFIGQWPREGKQYLKLDSAVDKYGLDVLWRDEVCEKPGEDCPRGAVCKKRATVGECYGTGAYLLDAADEEEMKKLLKFITVGSGTFVYAEKNTYMVLLLKDLYGKQMKEEDRKKVCAYYKAEYVTVKAEPNKVQEYVDKVLSKQKQMYADASDHMLCKF

SEQ ID NO: 160012 - protein, 231 aa, Heterodera glycines
TCLLGILLLDICCVAEEYSIELRVKPSLGRKQPHFYYAEVKCSSEEAFVPINAFFEHSPDDGYDLANFNVGNKKCPGGFQIGIAMFNGSYPEDFGWYTWGAKKPLLLKGIKFKENSFAMVQNVEFANHFKLDISPKLADTSNLVYRVNVLCMDNDQQLVFETFTQSETIVVFNSIDGPKCGTYDVKVWPTFLNWLDKSEKEINSFLETEFSLHGIGVKNGEMHHINFPTLA

SEQ ID NO: 160013 - protein, 180 aa, Heterodera glycines
ITSADIELDRLVSLVASQNTTESSDSQPFTSKTPEGPNNKSNTLSNEPVFELPKFTPPDSPSERPSTLNNLAAGDVNETKHFDLAITEHKGPLNSLEETFERYPSTADENLVLIPKDIKPEILMTRRKANKLPIYKQNSNSLQNKTSQSRSDNGHQSRKRNNDAYSFEDDELLAVSSYSV

SEQ ID NO: 160014 - protein, 137 aa, Heterodera glycines
MPNIFKILLIVLLAVVSFRLSASTGDKKTAMMGVETLIAGIGTKIKRIVTAGLLFTSLATGGAEAIGRSNAQGGNAAGLVPSHVTNRSMAPPPPPVQFEMGANRLEKMRAHLRELAEKMPVNESNRLSPTGPDPHHH

SEQ ID NO: 160015 - protein, 104 aa, Heterodera glycines
LIVIGQALTRQLRKCSKRFVRSFFPWQHLFLSTRIALINGFCGKIRIWRIMRVPTDPDSPQCLCAVRCLVKCRSQLSRNCKSDWQNCEGVSAGAFVNYSLPYGN

SEQ ID NO: 160016 - protein, 66 aa, Heterodera glycines
FLMTNSMPKILFTIIAFVNISQILFATATYKGKEICGKTVEECQAALIAFMKDSGSNQNYHASGNT

SEQ ID NO: 160017 - protein, 213 aa, Heterodera glycines
MLSIDRPAASCGSASYPKNRDTIMPQPPVTPSNQNEEPLPEGWETRMDQYGRRYYVDHTTKSTTWVRPSSMPLPPGWESRRDPRGRVYYVDHNTRTTTWQRPTADMLAAHEQWESNRSQAMHQWEQRFLYTHHDDPLGPLPEGWERREDPNTGRHYFVNHQNKTTQWEDPRTQGLTDAPLPEGWEMRITEQGVPFFIDHNNKTTTYNHPRTGR

SEQ ID NO: 160018 - protein, 150 aa, Heterodera glycines
MLLLRSVPLLSACLSFFGFLLPPPIVGLQCKQYPELEPGTKFSTEPKEVDCEGKNDICTVTNCKDGSNVAIPWYTHGDCDIESRFSCDKLGAQCTAKGGTFCCHTCKEDLCNTEDICPNTAAMRAGQQVIALVVPLLVAVFAIRAAKIGF

SEQ ID NO: 160019 - protein, 215 aa, Heterodera glycines
QMLGLILSEYVPNTFFWHIFNAQLGHVTVSYSHRHMPHFLRSIAKMACADCRLVIGANLTASPRALVDVNGVVLALEGDVSAVFRRKNKVHNLLSARGQLRVAIKPHFRHSRLYSDVLLTGVDFKVYKGGMDGIMAGAIRKMVSFLIPRAIWPKIQQRLRLVVNYKGVQIPRLCSVEFNHLHLDYIAHAAIISGDFDVDLPLFIRSFKEFMDEKQ

SEQ ID NO: 160020 - protein, 67 aa, Heterodera glycines
IFFFFFFFFFPFFFFFFFFFFFFFFFFFFFFFKFNGFYKRKKKQTELSSIISNANTFLEMQRKLNEQ

SEQ ID NO: 160021 - protein, 174 aa, Heterodera glycines
  unsure (1)..(174): unsure at all Xaa locations
MPQENALLAGVDICVASPGRLMDCINDRVTNLHNCTYLVLDDFYRMLDMGFEPQIRXILLQIRPDLLTLMFSATWPAEVRSLAADFLSSPVGLNVGSLDLSANHNIKQTVEVVEDFAKKDRLWVVLNDILKQTEYKTLMFAETNRKVDELTRQMRYKGMPALCIHGDKSQKERE

SEQ ID NO: 160022 - protein, 143 aa, Heterodera glycines
FLLFPLLPLAKGLFSLIIPSLLVNLSKSQDNPSTNGTVSAATSSSARILCFDHIRFWVGNAKQAAHWYCVNFGFIPFAYRGLDTGSRKTVAYAAKQDKIVFVFESALLPNNGEMSAHLAKHGDGVKDVAFEVDNLDWVLDTAR

SEQ ID NO: 160023 - protein, 201 aa, Heterodera glycines
KSIPPSFLKAENKYFILKNEFPLILLLSLAFCALIIEAYPKNDGPIVRREADNEKAAKAQPGKEDKQAVKAEEKEEEKPKDKKEKRGAEAEEQKEGGEKKGEEKPKGKKEKRAAEKEEKKTENKEAEKKENEEQKPTGKKEKRAAEKEEKKSESKEAEKKENEEQKPAGKKEKRAAEKDEKKSESNEAEKKENEEQKPAGK

SEQ ID NO: 160024 - protein, 190 aa, Heterodera glycines
SSDPIVRLNKIHDGLHGGIYVHEKGKGLIEENEIYGNTLAGIWVTTGSSPILRKNRIHSGKQVGVYFYDNGHGLLEENDIFNHLYSGVQIRTGSNPKITRNKIWGGQNGGVLVYNSGNGVLEDNEIFDNAMAGVWIKTDSNPTLRRNKIYDGRDGGVCIFNRGRGLLEDNDIYRNAQAGVLISTESSPIL

SEQ ID NO: 160025 - protein, 231 aa, Heterodera glycines
  unsure (1)..(231): unsure at all Xaa locations
ALFGDCMKNSDQIGVKRKSAGIRIEEPNDVKGKGKVVETSRKGKEKVGEKXISVMNTAERIEKMDLAQDKAKMDIDTNGKPKQNEENAPPKYVFIWSGNNEKKNLEVDLRVIRHSXKKLSELFHAKSDQSVNAKHGKQEALPVPKQEAEKILKEVEEWYAHHKNDKHKNAPVFVFKCKDNVSLVINVHLDAVRLSKELSNMLEDTADEXYPKPIPSPVPNLKSDIMLKLIK

SEQ ID NO: 160026 - protein, 91 aa, Heterodera glycines
NFFFDRAQIYRKALVACPGRAAPATCHTQATGQCWQWQMASSYLIGKQMEDGSLKLAFFGEYFWVLPRIFELCINARPCRGVRPLSIHFFT

SEQ ID NO: 160027 - protein, 157 aa, Heterodera glycines
AVPRSLKSTNWPKTISLGPILSRWQKKDSVCTDFLNTFTELFKEEDFYNSIDGSMLNLLLSNLRELYPRVKQTCAWLDLLIQAKLFPATMLLIEELCKFIESPGLYFGAVPESTSEEDPYQTVACVGPTKNAAGLQSTSSSLAPIPPPKQKPIVPSR

SEQ ID NO: 160028 - protein, 100 aa, Heterodera glycines
LKLCPPFTHITGWSAPTWRANDYRSAVYYHAYLSRPKPLSCTHYSCNRGGTHVLKMDNDSSSIRSQHLTTYSACTTDTRRSGCTRAIRRGNERTERSVGH

SEQ ID NO: 160029 - protein, 80 aa, Heterodera glycines
STGEEKTKSGREEAFQKTQAMQGEKEEKQIDEKEEEQMEDEEKEAEQIGEEMEEGQMEDEEKEAEQIEEEMEEGQMEDEE

SEQ ID NO: 160030 - protein, 205 aa, Heterodera glycines
SFDAHNTRLFDRTISVRMDRYPKEVERREGGLPFGLRAVGMGLGANGAPLTDVASVISSISPSQTQPGMNGTAGAPITPFQSPPNVAQFGPVAAQPVAAGPPSGFQQGLPDHGISGHFQSPQPTYQPQATSGFFNPPQPSPQNRPSGGMAFGGGGATPQYAPTKQMGVVGGGTASAAVYGHPPQQQTQKYEHKVEPKFEMGAYPG

SEQ ID NO: 160031 - protein, 221 aa, Heterodera glycines
TEIEGWIEKCHSMEKRDTDSNTLWQEKVDTLQKAIVALEHEKADMVEKLSQAKQEGVKLVKESEEKRHGEILTEQLKKKDEEWSRRVKELEEQMQLAVEESDLQRKTSVTGHERELSNLRGRVAELEKENTQILQQFCGQKGELEQMKRKELTETEETPKERGETQGKEIEEREKMETKLAETERESNELKRTIETMEKEISRLVHLSDSQKVQLSEQSEK

SEQ ID NO: 160032 - protein, 163 aa, Heterodera glycines
IVPSPKPGKFPKTPTTNNTKYLPPELLDEMTFYIYPNQNCSRILTSSWLLMEFLRPHIERWKKIFKILLNELIDLHKLCKEGIPWRTFTALAEKDKNCNAFVAALLELVKEDAYASIDGSGSNALLIRLRELYPSVIETLAWTGLQTLNAELFPSTQRMVQAL

SEQ ID NO: 160033 - protein, 162 aa, Heterodera glycines
MRLKERQTMEKMQSAARYIQILKVELRKSSDNERIALKERNQMKAEMERYKEQAQNLKTKLADREKQLHLHACKLQLQPRNPNRAFASLNGNTPLLGLSFDCVKSTPNLNDTTMFQANRKDVGNNVLETPVFNESEIAGPLRMPDTPAMLRNRNSFEPPRFF

SEQ ID NO: 160034 - protein, 132 aa, Heterodera glycines
RGFLLDNNRCEARLCFNHCIDLTSTVGTSQSANLLDLVAESTSPLEVPMCKKCANAVTAELNKQLGHLEKECIQYKKSLDHLLQRRADCPFDMEASRIKLDALKSEERDLLEQLTLLEDEERTLLHELDTKQ

SEQ ID NO: 160035 - protein, 142 aa, Heterodera glycines
NFPIFCPFENRRIVTRFQARKFISLLLRHISPTFSFYNLIPPDSALIQLAKDSGGIIVGPFLREMHSIKGQIGEALIAFLTKMSARSTKLFAENEGTKEERNSARNLIKVGIIFSMAKIIGEKLHDYEINWAKEILETQQKR

SEQ ID NO: 160036 - protein, 171 aa, Heterodera glycines
LDCCSLTHLEMCRALIAHGANIHLGTDSGESTLLCACFEGNFEIVTLLVENGANVNLADSDGMTPLIATCYFTGKIDIVHLLLLHGAIVGQTDFTGMKFALLGAARAGYLEVCQLLVNGWAADVNQQTIHGTTALIRASGRGHVDVVTFLVEYGADLDHTDIDGYNALMCA

SEQ ID NO: 160037 - protein, 208 aa, Heterodera glycines
  unsure (1)..(208): unsure at all Xaa locations
MAAVINQNPSVTMTSSLGENARMDCCYFLPTELAQKIEGQLTGRIAGIHLLEREDGLLVVNEDRTLRVLLRRESGMFWPSIIHDLPHIPTKLSCSEQKNTIFVGFANGQIHEYSIENDFNSISFKRQWNSHTNSISGLGFSERLEQMVSCSKDKTVVWHCTSTTRKIASYCTGSPCTTLQFDGDASFVFVGDYSGXISVLRLVVGTQQ

SEQ ID NO: 160038 - protein, 201 aa, Heterodera glycines
AFDSKPKRFYWRRKLKSFHFRTTNALPSQNIVWAPPQENWNAWNASNIDNQTLAFRSLEWISNDLLTREKIKKIPARLTASRQTLPVFQHRDEIMHNVQQNSVVLVKGATGCGKPTQICQYLLESHLTQGKGAHFNCVVTQPMRISAITLAERVAEERCESVGESVGYSVRFEWMGPRPYGAIMFMTVGVLMRKMEHGLRG

SEQ ID NO: 160039 - protein, 133 aa, Heterodera glycines; identical to SEQ ID NO: 158769

SEQ ID NO: 160040 - protein, 162 aa, Heterodera glycines
CGCSSHSNKDTVLFKWWKVETIGSLLITCLVMYFGAICFEAIKWLRLMLEQKSRQPNSANSAGLNMTDQNKTVPMTNRRYAESLLSRVHLLQSVLFTVQLLLSYLLMLCFMTFSVWIGMAICAGAATGFWLFGRRVPMLAFASSGAAGSGQGYASTGRTELH

SEQ ID NO: 160041 - protein, 112 aa, Heterodera glycines
SSSFSRSVHILATVKEFQKFYPMKMPSNFKSVVGGHQLCNSNRFFSQEPSNLSPGEAFLQRSREANKEQLKKLVEEHERVKRECAEKRKRLIRLRRYYYLCVYGFAFFHFFL

SEQ ID NO: 160042 - protein, 154 aa, Heterodera glycines
PKVSTIGRVVKMSFSGHCLCYSTDSGAFYVQNLQAKSGGALKLFDGATDGHAICTFGMEEFALSGVHDLVVFVNMHGVSSRPPISVSGRSRIVGLSLKDPFLHVLIEDGTVSIFSTVDAHLVQSLAFPTDEVQDVRQNICGRSPAPITCQLENI

SEQ ID NO: 160043 - protein, 165 aa, Heterodera glycines
  unsure (1)..(165): unsure at all Xaa locations
SPFLIGNESNGFFFVLAVLFLVKVDFLQCKYNEPMARQVLQKHASQFQQHCKNARRGSAVAKCCSAIRSIMGRFTSQKKAMNQMLAKCKAGTTPSEAQQMRRKLEGSNKLKDCGQFKSQIQHKFSELKQYCNNGAENEEENDEXSEREREEERVXEREEQQNSNH

SEQ ID NO: 160044 - protein, 175 aa, Heterodera glycines
PVFGCGDVHVIVFTVLPIFMQNLSFLLLCDVPKCDREGALKSEIEQTFPSLKCQHIHCYKKWPGHKFDTFMHVTVAGQQKQQHSPKLCAASEHGTNKSHCFCPPLTDLDSLHKMLRVKGARRVTVQPWLAVNGEQHEQQQQQSIRNNCSCCVSETCREKQCCEAVEDEEEKKYEI

SEQ ID NO: 160045 - protein, 223 aa, Heterodera glycines
RKSFHSKPHLEQLDGVKEGDQKEQELSEFMRSICNFLSTLTNEMTIMQRISTDTLRSFIDSLLSLVSDQRLKILNKQVFRSLNIIVIRLCEFTNPNVCFVALMKLVMKYQASDPGGQLSSLVRKCLTKFTDAIVEPTRIEKVDILTVLHPIHEYYSRFYVADGQTNQISDTVKDTSKLLCIFLQRLVINQKYAMLNYLYPFPESSQLVSYVRRCIRTVGRKAM

SEQ ID NO: 160046 - protein, 138 aa, Heterodera glycines
MPNIFKILLIVLLAVVSFRLSASTGDKKTANDGSGNNSSAGIGTKIKRIVTAGLLFTSLATGGAEAIGRSNAQGGNAAGLVPSHVTNRSMAPPPPPVQFEMGANRLEKMRAHLRELAEKMPVDESKRLSPSGPDPHHH

SEQ ID NO: 160047 - protein, 97 aa, Heterodera glycines
MRVLPLLFSALLLLSVGLCFAQFDQSPSAALNHVRAKRGYKPWKKQSFSSSSSEMYRRRRPSGNGHYRDYNGYGSNGYYRRKPGILERALGKITRSY

SEQ ID NO: 160048 - protein, 187 aa, Heterodera glycines
LMASSFLGKSPNSFTNIAHHHQLLQSSHHQNGGTEIEKRSPSSSSTALNSGDLLSDNNEAAMALSSLIELGKNRQQTQRDEAENGIDNDDCRFDGSVAVSSPSVISSTFAATPANCSAETFQSHANGTHNVTTIKTEDNESGDELPPQDDSASDAPVHEIRCGLLNARLHMQRFTCPGIHRKCVEFE

SEQ ID NO: 160049 - protein, 189 aa, Heterodera glycines
AESTGKLLVLSSIEGMDRHNASTESGSFFALIKRTVVEARVDAEIEQHFQFGWMDGTQIASGVVMDSLPLPNLVVLNYSSYEFYLSKDHPAQMTAKSLLLFLHSVRLGEVTVHGGRAWITRLRRMAYEITSNVYDMFQHQPILTVCLFGVPLAFFSIITYSICSADFSVERDEFYPDDDEEESLPLEEL

SEQ ID NO: 160050 - protein, 211 aa, Heterodera glycines
MPRRASERTLDRFEDVRTIASSDIEVIRQMDDWSVTSSYPNSSHQQSNTQKIGQIRSIGELQQSQTPPELTTKLDTSEQSQREMDEKIAVLMAKLAHRDQKIEELGRANENLRTTNATLVAKSKQKNAAEAKLQSQFAEKEKQLTDLLDEGRKLSEYSGRQAKEVRKLKQQLEQLDIVTAARDSAVEELQEARQQLQEQENAMEQLRDELD

SEQ ID NO: 160051 - protein, 138 aa, Heterodera glycines
MPNIFKILLIVLLAVVSFRLSASIGDKKTANDGSGNNSSAGIGTKIKRIVTAGLLFTSLATGGAEAIGRSNAQGGNAAGLVPSHVTNRSMAPPPPPVQFEMGANRLEKMRAHLRELAEKMPVNESKRLSPSGPDPHHH

SEQ ID NO: 160052 - protein, 64 aa, Heterodera glycines
  unsure (1)..(64): unsure at all Xaa locations
SETVNRHRXVKMEPSLWKAFWTVWTGFLETKVDLTEQAKSAWMSLGEDFXQEALAHLKRLGIPH

SEQ ID NO: 160053 - protein, 211 aa, Heterodera glycines
MHLKIFLLILFVTICSVWSLSPKIHHNYHQQQQQHNIKNKLPPKNIGTKHLKTEINGHNKHKHNPASRHGHALLQKVKDQLNNDGWASEDANKTSVLLSSLLAIECHMKKLDKKRTNDSAEIKHLTEQICAAENKEQIGIHKLINEVAKTFEKDGKKMVEQMKRDEHTVKVHLDGHYGTLAEILPSAKKHAKATRLRTYHAVLHLLHLITP

SEQ ID NO: 160054 - protein, 182 aa, Heterodera glycines
SGRNLRDVDAMSSAMFPREFDEFEQFRQKYGPVDKLNSKVFFAGMDIVEEIQVEIERGKVLNIQMLAEGKLNSRGEREVFFELNGQGRSMFIPDNEASKSIVVRPKALPGMKGSIGAPMPGEILEVKVKVGDIVQPKQTLFILSAMKMEMNVGSPIAGTVKAIHLNKGEKVSPNDLVVEVEQ

SEQ ID NO: 160055 - protein, 122 aa, Heterodera glycines
VFRRPFQAMPDYDTLTTVYAGDKHLIELKVKANTRIGWQYLTEEEDIGFAVYFDPSGNANNLTEMDCVFPYIRLECSQVPISGSLLCEQSGRYIIEFDNYYSWFSAKQLRYNIEIDDRGIGQ

SEQ ID NO: 160056 - protein, 71 aa, Heterodera glycines
FSCCPASSSPLPIAPSTAVGMPPPPPPMANALRRPPPCPETQLILFFLNFTFFALLYLFIFVLFGAHSFLF

SEQ ID NO: 160057 - protein, 222 aa, Heterodera glycines
RALLGPVTTYVIGYVQQDDLFMGTPTVKEHLMAPAQLWMVGHTQRTMRRRVNELEEAISDGEARRLPFAFEPRHNPQIIFALQPTKDLASSVVDSAVSHILRTLNLFGRRIVVTIHRPSEGMCQKFERDRLLKLLERTQKDVQRLTTANQQLTTANQQLTTANQQLTTANQQLTTTNQQQQNTINHQQQNIQQLQNLLAGQQPLVPAFAPGVFGEQQQHHHA

SEQ ID NO: 160058 - protein, 73 aa, Heterodera glycines
NCRPSLPLRLLSCGWKCCASVEPQLCHEGRRNRWLKAVDDGLILDSSSVTADTSDLPLIGFQKNGKEDLIFKL

SEQ ID NO: 160059 - protein, 182 aa, Heterodera glycines
NQAMSLCSHPNVVNYYTSFVVGEELWVVMRLLNCGSMLDILKRKIKAVGKDQAAYGVLDEVIIATVLKEVLRGLEYFHNSGQIHRDIKAGNILLANDGTVQIADFGVSGWLAASGGDLSRQKVRHTFVGTPCWMAPEVMEQVSGYDFKADIWSFGILCIELATGTVPYHRYPPMKVLMLTLQ

SEQ ID NO: 160060 - protein, 223 aa, Heterodera glycines
  unsure (1)..(223): unsure at all Xaa locations
ILIISPVHEPQLLASGLPELFWKSLYKKISNQIFDAGKYFEVIIEESEPNETISSQVKAMSELKMDDPENVFLIDHAWTFRPNTARFALQQVDGLRKRLLDMFNIKAWYANKECLKDPFADDSADQQQKCADAVATHSADCEDSEVASPCGQNVEEIWEKHCEMDDLIIDEMWKYAMTYSIRMLNLEMDEHQIPVWYVMDEFGVRIGHSXSPNVKMVPFLDFS

SEQ ID NO: 160061 - protein, 98 aa, Heterodera glycines
MLFGFFPFRAGCPGKNDIKAGSSSHVSSTIMIIEEKEDSESDEQMDGAGGDEEKRGGENGSEAQGGKGAARDNEMEDEELKVKAVVEETTTNEQGKTE

SEQ ID NO: 160062 - protein, 154 aa, Heterodera glycines
HCVGWYSNIQWLFLPRPDNLMKELTICIEDSAVEQQWLAAVEQIKAAFSNASSPVYFDITVYFPPPSSLSAVVPFKLTNEMTGEKLEMYKEDVEEDLSCFSLIRCPIAPDDKRERMKMIKELDKRWNRINIFLIGDGLLDGFPGASGDQKEQKK

SEQ ID NO: 160063 - protein, 174 aa, Heterodera glycines
KKKKKIKKKRAAFLKAFFFPVDDHSLVGPDGDSPLFTHRIGKSAPEGQPGENGAAVTLTGEEAAEGRRQMSYWFMNVKASDKLSLDRALPDVRPNACRSLSYDLANLPSASVVIVFTDEPTSVLLRTVHSVFNRSPMSLLREVVLVDDFSHREELKAPLVAHLRRFGSRVRLFR

SEQ ID NO: 160064 - protein, 54 aa, Heterodera glycines
IFFFFFFFFFFFFFFFFFFFFFFFFFFVSKIYLQKVKKWTNIPSFKVTLFCYLI

SEQ ID NO: 160065 - protein, 111 aa, Heterodera glycines; identical to SEQ ID NO: 159909

SEQ ID NO: 160066 - protein, 156 aa, Heterodera glycines
MVEEQQPIISPAHCGSGAEEFSPDAQCAQQWKKPNESLFVVQQLARQGLGPRQILATLYPRYCSTISDDIPDEWIMQLLRELCEHRTRQKLSNYNTFEDAVELFMKSKRILVITGAGVSVSCGIPDFRSENGVYARLKKDFPELPTPTAMFDIDFF

SEQ ID NO: 160067 - protein, 141 aa, Heterodera glycines
RSKKCQHFKILLIVLLAVVSFRLSASTGDKKTANDGSGNNSSAGIGTKIKRIVTAGLLFTSLATGGAEAIGRSNAQGGNAAGLVPSHVTNRSMAPPPPPVQFEMGANRLEKMRAHLRELAEKMPVNESKRLSPSGPDPHHH

SEQ ID NO: 160068 - protein, 142 aa, Heterodera glycines
KDPKKCQHFKILLIVLLAVVSFRLSASTGDKKTANDGSGNNSSAGIGTKIKRIVTAGLLFTSLATGGAEAIGRSNAQGGNAAGLVPSHVTNRSMAPPPPPVQFEMGANRLEKMRAHLRELAEKMPVNESKRLSPSGPDPHHH

SEQ ID NO: 160069 - protein, 207 aa, Heterodera glycines
MSASPSVSAALYDFPPADTETMVKLTNTTIPSPTATIEPSSVPLYELPPDNGKMPPSKASVADSVVLSVGVALYQWKARNEQEMTFGRGDVIEVLEQSEMRWRGRLQKNRQITGWFPKSYIKISAPSEQQKDESATTDLYQTGQSAAKNGGKARVGESGEWFIALYQFDAVESTDLSLKPGDRIWVTDQRDQWWRGTCDGKSGIFPA

SEQ ID NO: 160070 - protein, 57 aa, Heterodera glycines
LFFFFFFFWVFFFFFFFFFFFFFFFFFFFFVFFFCIWSVFMCQGNNNKKTKVLWLLA

SEQ ID NO: 160071 - protein, 210 aa, Heterodera glycines
MLQAHQYQLRQGHRRVSARSILAHFGFEFSNDYRLGCGHYSKVYKGYFKEAQRTFAIKVTDLESVSEKFKQKFLPRELEVWRELDHPNLVYLYNDFQWSDYQFVVMELAVGGDLLSFLQKCGPVSETTCHNWMLQIVAALDYLHRKGIAHRDLKLENVLLCENGVIKVTDYGFSKQSSDLSSTFCGSRSYSSPEILLGIAYDMFKSDIWS

SEQ ID NO: 160072 - protein, 200 aa, Heterodera glycines
  unsure (1)..(200): unsure at all Xaa locations
MQIFEAPWITHEGGSIFSLDFHPSGCKLATAGQDPSGAGLLIVWDLGFLNCPPDSKEFNCSQLPLTRIPHTSTINCVRWSKHSATISRLVCAGDDSMICVYECVGVYSSEGSFSNSLEMPTCQKRNIESYRCTXKLYGHSIDVLHIDWSSDGRFLASCSLDSTIIVWNALKLPEKVIVLKQTNDGHVRGVKGLAWDPIGR

SEQ ID NO: 160073 - protein, 155 aa, Heterodera glycines
  unsure (1)..(155): unsure at all Xaa locations
TPQSNYPPRHVPGPDNGPRLDVSNSKGGISRTTPPELAPRFHSLPPIVHIRSLTPRRSYSKGSXGSFRLTAGTXIFTGNSISLSMXWRQWGSRYAIRAGRNLPDKEFRYIRTXIVTAAVSWASVRXFTPPFNLQAPGRRQTLYVALLLRRDPVVC

SEQ ID NO: 160074 - protein, 101 aa, Heterodera glycines
  unsure (1)..(101): unsure at all Xaa locations
MGKESLGEEQRKVLLXPLLKEGWETAQERDASKRAYLKFFXQAFGSMTRIALKAVPPYYHPFCLYVYNKVDITLSSHDVQGISERDVKLASFIENVFKTVK

SEQ ID NO: 160075 - protein, 142 aa, Heterodera glycines; identical to SEQ ID NO: 160068

SEQ ID NO: 160076 - protein, 59 aa, Heterodera glycines
MAKNNININRGVQDPFYRYKMPRILAKVEGKGNGIKTVIANMPEIAKALSRPPTYPTKY

SEQ ID NO: 160077 - protein, 60 aa, Heterodera glycines
TATKTGSTSTTTTAEKCQIANCHNRRMARLAHADDESADQLAAREDWAHFEMVDRQLDEL

SEQ ID NO: 160078 - protein, 91 aa, Heterodera glycines
GGLKGHEWQQKGHHSQSEALNRAKVSIGAKRPLTGASSSSEDDSGVLVTREHVPRKGRTLFRAVDAMRCDSVGSAVSAQQHRSRSHKPKPG

SEQ ID NO: 160079 - protein, 206 aa, Heterodera glycines
  unsure (1)..(206): unsure at all Xaa locations
RALLYLSGIRALSDWAGQXPPVEKHQKGKSVLAQNAHLPPLGFFREQRYHLEKKMLNQNGVLNENNFFAIRPANEPEFVPKLKDVIGKALDKIGTYGDMDNSDQVVAVIDDDLCINCGKCYMTCNDSGYQAISFDKQTHLAKVNEENCTGCTLCHSVCPIPDCIKMVPKTIPHKINRGIAPRQQQNGDDAQQTAQNANRRIILEIN

SEQ ID NO: 160080 - protein, 184 aa, Heterodera glycines
SPRGDGRPKILLCQEIWSFADKIRELKTAFCDASAPVSFIIRLYLSSFAGEQFELRNDRTGEMLSMEMVATEDDEDGEGQQLQQMEEEDNDNADILTHYIKPERNLWLLKRRPTVGGGKWQKQWAQWEAEAIGWNWTNAWNVIEVANEEDVDVIEDGNEHLDMDEVTYEGEAMDEVDEMDDTDG

SEQ ID NO: 160081 - protein, 103 aa, Heterodera glycines
MLFGFFPFRAGCPGKNDIKAGSSSHVSSTIMIIEEKEDSESDEQMDGAGGDEEKRGGEDGSEAHGGKGAARDNEMEDEELKVKAVVEETTTNEQGKTETNVEQ

SEQ ID NO: 160082 - protein, 213 aa, Heterodera glycines
MRNHSAQSQTDGGEVPKSGGEENGKTEQTGKAAREEGRESIDQVLEDKTGALADVPEEEMVISQCQISGENQSDSKKEGLISQGEPRNLSNAGPISQEGQIDSEKNDELINQQEQQQVTLISEEGLISEKKQQTVTEATTDEEALLISIQLNELTISPAKELDADDGKDAVVQLQKLVANGIASGEVGQIVADVVQNVVQTDAAATPAVQHGQ

SEQ ID NO: 160083 - protein, 49 aa, Heterodera glycines
  unsure (1)..(49): unsure at all Xaa locations
KRSEKCQHFKILLIVLLAVVYSRLXXXFYLVTKELLMMGVETTHQLGLV

SEQ ID NO: 160084 - protein, 259 aa, Heterodera glycines
  unsure (1)..(259): unsure at all Xaa locations
YVKLSRRSFSQAIERITWDHNFSDXYFVCVSVPEAQSRRLYTAVKNSLELHTISIRESLLRLSGDQLLSAYNSEWEKFHKGAIYLHNLYGYLNKQLVKEKMDAESQHPFVVDNDSDGLYPHLGVGDLAFSIWRNELLMPLAAQLVAHIIGLLGRIRNGISASFGIRISDLRGAVLSFVDVNESIHREQKAQLLCMSIGIPTTEFYEEIFEKHFLEASENYYRTLTSETFVHLDCCPYMDAVIQKINDERSIVQRFLHYS

SEQ ID NO: 160085 - protein, 204 aa, Heterodera glycines
  unsure (1)..(204): unsure at all Xaa locations
MDDENTHQANMERVREDEDEKIGLMDIKREIKAELNEAIGRQTEDGETEPKAERERERKSDRERERKKKSKRTSRDRSRSKSRERKRSRERRRSRSRSKERHRERERSREKERGEKRSKVKSNKYWDVPPAGYEHMSPKEYKELQHLATGAIPRATLQSSVPVVGPSVTCQARRLYVGNIPFGSNEDAMLDXFNQQMHLCGLAQ

SEQ ID NO: 160086 - protein, 144 aa, Heterodera glycines
AFDASLIRLFVSYFSVFEFWCAVNKNLFAASQKNAALTKHLHVSPFRYADSSDDGKEKKENTIKIDETIQKDKVDETLQKEEKAAQLTSLEPQRLRMKPDNRRVLVRMAIKAHKINAASEEGGGMSGAKSLLSMNTTEIDRLSA

SEQ ID NO: 160087 - protein, 164 aa, Heterodera glycines
  unsure (1)..(164): unsure at all Xaa locations
SQKGGAENGRGQKGRXQSPVPRPXLTEAADXCEQSGXMTXALNRQKHXKNAAEATAEKTPXRAGKSIERSGRKRRKRTAEDGCQQNFGGKSEKRRGIGKRSENENGNTFXGQQKGQRRVDFDNXRQKDDFGREGEADGGADSQNVGQHEEGAESEQQCRRRRLR

SEQ ID NO: 160088 - protein, 211 aa, Heterodera glycines
IENVKAKIRTRRASTGPQRLIFAGKQLEDGRTLADYNIQKESTLHLVLRLRGGMQIFVKTLTGKTITLEVEASDTIENVKAKIQDKEGIPPDQQRLIFAGKQLEDGRTLADYNIQKESTLHLVLRLRGGMQIFVKTLTGKTITLEVEASDTIENVKAKIQDKEGIPPDQQRLIFAGKQLEDGRTLADYNIQKESTLHLVLRLRGGKNCIDE

SEQ ID NO: 160089 - protein, 100 aa, Heterodera glycines
LHRLYPSYSGQYGNYGGYNYGNYYNPYGGNSRGYYGMYDSPSYGSGYSPSYYGGYYGRNGGLGYGGMYPGYGGYSTASYYGGWPYTAGYGAQNGYTSPWR

SEQ ID NO: 160090 - protein, 83 aa, Heterodera glycines
  unsure (1)..(83): unsure at all Xaa locations
RLAAMLMQNPAGLMGTMYAPASGGFFLPXAIQNQRAXAVHANTESVRGTNAWRCPSLEQYGRFQPSNARLHDGSSCWRSVRRC

SEQ ID NO: 160091 - protein, 159 aa, Heterodera glycines
MEESVESKRTSEQNQTQQEVEQLKQLENREEGAKNGQQTNETVAIEEEWTPTSEWVESWKKKLPLQTIMRVLQILVPQVEKICIDKGLTDESEILKFLQHGTLVGLLPVPHPILIRKYIANSATNNWFRTYLWGVVYCRNIDPPIWFDSNVTLFEIQRL

SEQ ID NO: 160092 - protein, 220 aa, Heterodera glycines
  unsure (1)..(220): unsure at all Xaa locations
RSFDLYLRFPELKPVERAHFRYPQTIDDAKRLGRVLIRYKDLLFYTVLSGVAAIYKIRSPFAIPVFIFLTILSGYLFSFPLALALVCLCSAAGATVCYFLSQMFGRSLVMYYFPEKLSKWQIEVQKQADNLFNYIVFLRVTPILPNWFINLASPIVDVPILPFFFGTLAGVAPPSFLFIQAGTTLQMMSNANVVWSWGSIALLAFFAALSLAPILXKYLK

SEQ ID NO: 160093 - protein, 114 aa, Heterodera glycines
SSCSAVPSDPQQKSFYECSAKDMDGNETCFGKYRGEVLGVVNVALNCGFTDFNYSQLKHVLDKYKWNGLEIVALPRNQLNNQELGCAIDIKDFVTKKYNFEPDLYNKIDVNGPN

SEQ ID NO: 160094 - protein, 157 aa, Heterodera glycines
ANSVHPNAIPLRRINLAWPPGGRRTSRSTAKAPSSIAGTGRSMNSAKTFLARAIVSGLETTWLIVLSRRTSSTLNLLITGAMFNLSSKCAVCDCSDPNHGKFSPVYQPLSGKDKHADFASVARVQPRTSKGITDLLLLNFVRLNTENPSKKLCPQKQ

SEQ ID NO: 160095 - protein, 105 aa, Heterodera glycines
  unsure (1)..(105): unsure at all Xaa locations
IDVFEXHEAFAGQVLANLKALDSDWFCQNYMKRKAKFGLLPLEKVNMWGGSLSLGHPFGATGVRLLAHAANRLQSEGGRFAVIAACAARGHGMGMLVENYESKQK

SEQ ID NO: 160096 - protein, 138 aa, Heterodera glycines
MPNIFKILLIVLLAVVSFRLSASTGDKKTANDGSGNNSSSGIGTKIKRIVTAGLLFTSLATGGAEAIGRSNAQGGSAAGLVPSHVTNRSMAPPPPPVQFEMGANRLEKMRAHLRELAEKMPVNESKRLSPSGPDPHHH

SEQ ID NO: 160097 - protein, 176 aa, Heterodera glycines
GFIDSIWEHWRQNKQSRLQRETDFPRNDAACAPRWHFSEEFMPMLQPLWNIDVLSNNYTDNMYEFMPRPSCARTGKSEECGSSDYLWCDSRTNGGHAVCTSKIKPGGNCAGFEWSAEVCYGGSQCVEGRCTKAKTMDKENDEGKAKKMDDDGTAFMRGGAERGDGWHSTISFMKKR

SEQ ID NO: 160098 - protein, 170 aa, Heterodera glycines
MDQIGCSFSDQIWLDTLAWIGRGEVGWHLALVNARFAALVNMQLQQRRWCLEEFHISERKPKRTGAEVLSLANNGSYFSLPLATSPLPDSVIGFNGTFNIWYLDAEVINFLQRFRRLFNTYISLKFTIPITEFRAWQAVAPHIWPLLKNGLGTLVNVKRKQLALMRKHIS

SEQ ID NO: 160099 - protein, 221 aa, Heterodera glycines
  unsure (1)..(221): unsure at all Xaa locations
KPSLVGDVNFEEAKRXAGFLTPVPGGVGPMTVAMLVRNTFLQAVCQKLNGRVEPDGTVKSRAVNAWKLYPLKLDLSSPVPTDIDISRAQQPKAIGRLAAEVGIAQSELELYGHSKAKVSLAVLNRLKERPNGMYVVVAGINPTPLGEGKSTTTVGLAQSLCAHLGRNTFACMRQPSHGPTFGIKGGAAGGGYSQVIPMEEFNLHLTGDIHAISAAHNLMAA

SEQ ID NO: 160100 - protein, 107 aa, Heterodera glycines
MSLQHHQCIAIEKQQRSEHFMSSVFEECDALKQEYDKCFLNFFKTFVKEDERHERTVNPCQQLQNIYHKCLEKNLKTHKPYDIDLDELKKEVSISIEENIDWKQRGN

SEQ ID NO: 160101 - protein, 153 aa, Heterodera glycines
AEPLSRGSPPEGFGPPPPVPTHQQSFGESEAVKELEQMPGVRRMDLIKVESDGIHKGLGFSIAGGTGNQHYPGDDGIFVTRIIKGTPAYYDGRLQKGDQILAVDNTIFKNVSHQFAVDTLTNTGDRVKILFLKNPHPDIESFGGMEGNTFDLT

SEQ ID NO: 160102 - protein, 139 aa, Heterodera glycines
  unsure (1)..(139): unsure at all Xaa locations
KNGDCKHLGDKKVIFLRNHGFAACGASVEEALHLAYHTLIACETQVSAMXGGRKNLIYPNEIAKKRAYDIAQHGANGMNRTASGQNGTMAHTYEKMGDIEWGVGELEWEAWVRQLDGAGYQTGHKYQMPSLLEAVMKGK

SEQ ID NO: 160103 - protein, 184 aa, Heterodera glycines
PHAHFGRIVATYASPTSSQFPDYVFIWKLDAESAANESELIKATPNVHTFEWVPQNAILRHPKLRAFVTHCGQNSLAEAAKIGVPIVGIPLFGDQLYNAVLAKHRGMAVHVGIRQLIADKTGKVLRTALSRVLHDASFRANAKLIQKKIALSPFGAKEQLVRWVEFAAEFPHLNELNMPTDYYS

SEQ ID NO: 160104 - protein, 207 aa, Heterodera glycines
TTGCPHARPALVNAILNRHIETAIFLLEKGADPHQTMIGQLNGLNMNVTPLWAAVVFVNLELCRALIAHGANIEMGTDSGHSPLLCACFNGNLEIATFLVENGANANLADTDGMTPLIVTSFSGQIDIVRLLLSHGAIVEQTDFTGMKFALLGAAIGARLEVCRLLVDEWAADVNQETIDGTTPLLGASGEGHVDVGEEKMNFLIER

SEQ ID NO: 160105 - protein, 98 aa, Heterodera glycines
RFASEMSFVEHFNLVNGRTNERLTLEKEGNYCLLKRCPNGPNVGETAAAVQWENGGNSDANLNNVIIILDGVERIWPLSALEEEEAGQSSEKGTSSDK

SEQ ID NO: 160106 - protein, 91 aa, Heterodera glycines
SVGHSFVINQITTQNLSHCFASLPPLAHLRHQLKSPPPPGCKIVPLEKPSVKLNWRFSRGDKAAKDKNGRRRSRNRKRKKRRMGEGIGGLI

SEQ ID NO: 160107 - protein, 196 aa, Heterodera glycines
LIKDLSRTCISYSGKIVRRCKSFVRNTTPLLDYDIGSLPKRVKFIGGIDLMQPDHKDALPQVFGQPKPVIVFSMSSLLEPSKMPLDKFETVIRGLGVCEKEVIWKYAKQEDHGRMSLLQKHAPNVHLVEHYDQATVIGNKKTELVISECDIRIVMDALSSGKALLCLPMFAEQFYVSEKLRRMGAAVVLDPRSGSF

SEQ ID NO: 160108 - protein, 251 aa, Heterodera glycines
EGSVRTFQLLDSLCNPNAFKRRPDALFAPKRIGGMDVAAVSFLDSLNLTEENISKEAISRFSKEVYKMSAIQLSQLLKATSNRKIEHPVLINHICTALKDRPLPPSLRHICQIAFYLSKHSFLDKPLLNRIKEDFLVYVRNEIISKTSFSHIVIAFAFFRLTDRHFWQQIIQIIETLANRPEYSTALIECVNSLAVVNVHPKLVSSVVEKTKSLEKDGLFLGKWLQLVHSLAILNSLDSQMAESVLNRNFF

SEQ ID NO: 160109 - protein, 99 aa, Heterodera glycines
TNPIFLNDNSIELTPICFVRISLPNLPFSHYLPVDSALKGAPTAVHQKDEHLSNSDSLQFPQQVLNRCEDGPNKNDFQCRNISVQNEKTSVRQRKMRRE

SEQ ID NO: 160110 - protein, 120 aa, Heterodera glycines
FSLLNKSRPPELTHCVLTSNQLQFPPRPRKRTSFSRRIKMRTISRSLCLERRRKRPFSKGRRRKSKGTKSNGGKCQRNDGKGGETIATTETSDGGEEDVVIRTEKHFGGRFAAEREQFGG

SEQ ID NO: 160111 - protein, 51 aa, Heterodera glycines
FRTPDKFPLPHRVNSKRRNMTPLRHSVRELILCRERNDTTCLSDLLIKVLC

SEQ ID NO: 160112 - protein, 133 aa, Heterodera glycines
  unsure (1)..(133): unsure at all Xaa locations
MAFLLLSLAPLFVALSGIDANKVPLQLCCAGGQSLAGLIYDYSDHFSEVLQQSGTEMCTSLKKDMTKLTTAIEKAEGCKCNLVEKIEKELDDVEDDCAYNLSXHSRTVPHCGHGLGTFGRKLELRSGRVQRAN

SEQ ID NO: 160113 - protein, 136 aa, Heterodera glycines
DEDLKSQFKEFQELRIDKPRSYFAFDPSLAPDHWFEPSVVWEVKAADMSISPRHLAARGLVDAEKGISLRFPRFIRNRADKKPENATSSEQIAEMYRNQDHIKNQKDGKVDFDEEEEGEEKKEEADDEKEEEEDEQ

SEQ ID NO: 160114 - protein, 200 aa, Heterodera glycines
  unsure (1)..(200): unsure at all Xaa locations
LTELANLEKEFKPNQXMVWFETPSNPLLKVIDIEAVCRAVRSRSKECIIVVDNTFMTPYFQRPLELGADVVMHSLTKYINGHTDVLMGAMVTNNDQLDQHLKSQQITAGAVPSPFDVYLVIRGIKTLHLRMRQHMENALAVARWLEKDPRVEKVLYPELESHPQHKIHKKQSSGMSGMVSFYMRADADGARKFLANLKLF

SEQ ID NO: 160115 - protein, 228 aa, Heterodera glycines
  unsure (1)..(228): unsure at all Xaa locations
NKLFFACLLCCSHLPIVFLVCCNAMPNFPCCPGSQQVVAVMSKYIDTFSSAADESTVCSTAKSTVDGIKNELSYRVGCPSGGEAQIVNEIDRQLKNIAKMEINYEDECPYNLGFARAMFDLAAAAAGHAGNGTEWQYMKVQFEQESQAIKAIGQEKNFEVTDVHFGVPSKGVSAHQNVPSPSHVIANPGQHSSVXPRKERRTVVIGLRFLRTNKSGGNRIENHFVDMS

SEQ ID NO: 160116 - protein, 173 aa, Heterodera glycines
MDFAVLVVSDSSDKDHKMDKSGPLLVELLQNSLLIRRGQKVTVANYTIVPDEKSKIVEYLREYSTKVDCILTSGGTGFSKRDVTPEATKEVIERECPGIAVALLKKGLDITPFAALTRLTAGIAANCLIINLPGSPKAVREGFEVIEPILSHAIAIVKGDESETSVLHKRTAL

SEQ ID NO: 160117 - protein, 232 aa, Heterodera glycines
HDPYKKKSREPPATNKKDVKKDTTKNLEQAQKTTNEMTITPNYKNGKAEEKAAVCTNLEEVQEKTNELSLKDKRETTQDIPKQTVPTVSAVGPSKMNFVGCLASVYPTNSSDIYQGKIMSVDVKGHSVRLEKPFLNGRPMSVPFIDMSGKMMKDIRVVRGPSPVRFHCVENSPINGRHSTGSVPSIRRPSPADSVRSEHTKRKRLSPLIVSSTYSPIAATPSTRCAPLNHQT

SEQ ID NO: 160118 - protein, 232 aa, Heterodera glycines
  unsure (1)..(232): unsure at all Xaa locations
DRFPPQQLRVDGTHFLLGNLVAGENFEFXIRTALDAERISSAAAIVEIAIPSDSDLVEVGKLIVTSRFRPDGNGVVNLTWEVPQHLLGKIQSYEMRYLEAARAQSVAMPFWERLFFPGTAPTAEIYNMKPDTEYVLRIRTTMESRVQVESAEFRFRTPKSAGANPIARLDVLYSSETPAVRLQWILAPHINAVLVGGFDVFFTDRYDLAESEWTHRRIHGNDPQLSLDSLSP

SEQ ID NO: 160119 - protein, 187 aa, Heterodera glycines
KNTPSCCSSSFSIDKLIFVPINPNGNEKLVKLIDFDRAQIIRICNNSEPCNEIEEEPAIMADTTTIIHSTLDIGKYSSPEIFVGNKQLSVKVDIWSFGISVYEAILVAKDKYGKKEEIPNVLNSIATLHRGFAIDQNGLKSEEINFNNNDWLQFSSGFKLAVKAILKIWKDQPKIALLIMVFSVFHF

SEQ ID NO: 160120 - protein, 235 aa, Heterodera glycines
VVCTSLKKDDEHAETVLFEMPELKRVIFVQIGGTSDDAPPMCLEVLNCCFGSESTSKLAAMSAAKINQIFWEFFVSFPVAFLSANSRWTVFSSFDAHFYVLSTQTGRLQFELCLDEPLSVLELEQNLCLSVGIAGSFALWDLLNGKVLARHSLKELLGDQNKHLLASAFSLRKNEKETNSTSIFLELLFSDFNSFAFSSKLGGWNKAQTVFDFVNEEKMSPNISSMLLQMPNSSD

SEQ ID NO: 160121 - protein, 192 aa, Heterodera glycines
EEGSGDGHSAEGSGSAPTDEFGRQTPNESVAITDTRSPAQFGDSDRRPQYANTTTTVIHLHNLSPVSVLSTTRATPPIFATTTTTIMLATTLRPPSMKPAATTARTTTTLPSSVSSRASSPKTATTTVPRMIKPKDKDKWPQPLPKSTMPPFAPTRTTKRPFSFRTLPALWNNFGPAFSPSLSAELWLDCFC

SEQ ID NO: 160122 - protein, 190 aa, Heterodera glycines
KKAGKCLEDALLHFPFVLAQLLDRLQVQPDSAVDFNSYLGSTAIYRETVGSRLLAHIYVHHTAEELWRPNLAWLERATHLALPRLMKRQKEMDEWALNRKRCFVGLPPNLLRHCVLHGIRPSDVQLRQLLDEQSGPNTVVDPCPPKDNRRQRYEPANLDDLLQLHGLNVEDSPAMDGALHGVGTFLRTLL

SEQ ID NO: 160123 - protein, 213 aa, Heterodera glycines
MPTVRCALTFGSPYGASLPLNTVSHAFAYGSGAIPQREEDPNTKMVDFLIVCNDSLLFHQQNLLQYVSIALLGLSSLHQFNLQRNPSHYSLPFRWFDANWVNQMQRLSGARLYYNTRISTQGRLIKYGIIQEDDLETDLLDWTWLYAAGRLQKPVLEVYNGRGETSDVQRTGRNIGRALFDNYRAAAHAALLQLDGWFTMDQFLNKVVSISYG

SEQ ID NO: 160124 - protein, 231 aa, Heterodera glycines
  unsure (1)..(231): unsure at all Xaa locations
YLELGLPFPREVICNKCGRKGHIAKICRNQNNTPQHSGFKYSRTGSNKQNANIIDCLHIMPSDWKTENEPYIERHVRLNGKVHKMVVDSGSKLTIVRKLIWVKLGQPFLTETKLKGRSFTGNIFTFMGKFKVQAALDDGMPLDLECFVIDSRDTLDLMGLPWIRAFERAYNQVVATTLSIENVADSRWCNRSNSTSTQFEMDLQNTFPKIFEETLXXCTKIRAHLKIKENS

SEQ ID NO: 160125 - protein, 208 aa, Heterodera glycines
VNGRKKHNESGGEAAAAIRVLVTGGTGLVGSAIRQVVTEEEQQRKPQRLQEQWFFVGSSECDLTDLEQTRVLFRRVRPTHVVNLAAMVGGLFHNLRHNLQFFVKNLAICQNVLQCCHETDVERCVSCLSTCIFPDKTPYPIDETMVHNGPPHDSNFGYSYAKRMTDVLNRGYAQDHNRKYTSAVPCNVFGPHDNFNLENAHVVPALIH

SEQ ID NO: 160126 - protein, 93 aa, Heterodera glycines
LFFFFFFFFTFFFFFFFFFFFFFFFFFFNTTTLINKSEIQVVSFLSLHKMSSRTLCRERSHIASLGIHTVRKRKFDLGVLKLLHPGTLQSATL

SEQ ID NO: 160127 - protein, 141 aa, Heterodera glycines
HSNSRKTAMAYATKYYDYQIAVVFAILLGGLLLLALVVTAIYYICVVNMRGKKGGITRVPSGRSTVRTRMNPQQYSPSAQPQIFHQQYPRYSPYGGMEGMSSQQTQQQQQQQHPFQAQNYEQAGVRVREMQPEYFQQQGPI

SEQ ID NO: 160128 - protein, 219 aa, Heterodera glycines
  unsure (1)..(219): unsure at all Xaa locations
YGTLHFYDKALMDKLSVKNPLHLEKXPASFYSLTTTEDPVFRKLSCNNVGNVFATDIILTTIMAANRSVNSWDIIAYRIGDKLFFDKRSTSGVSPIDAFWVSETAPDPPSGDAQGINNANDLASEALYVNQNFRRQVLKRDGKVFKFEEERIPFEDEQLGRTDCAYKYRTWNLGTMANGTAITLVARTEHDAVMLAGTSTKEVQKLTVKAFNEWDSSLS

SEQ ID NO: 160129 - protein, 152 aa, Heterodera glycines
QRKKTEEENGDEMTRSVCIGQINGNDQLLLISAAGHCSVAEYLNASSAAASLSPPALPPKPPRFRSFANFSDWPSPSAPSASPTDTLSQPKFGQHIQSPINLPDQTHPPEPIHHNSKPTEEERKRKKSKETEEDRGRKSDEEAEKRGKSPLH

SEQ ID NO: 160130 - protein, 208 aa, Heterodera glycines
  unsure (1)..(208): unsure at all Xaa locations
CPTNDHPVIGRQRCRLVRWPLQRHQIHSEDHSVVICDQIDVVVLDEKVLPQSLFPLNECCSFGRLKADQRFKLNAALSAHSEFSLKQCSTDKTVQMLVLWLLFWFKQRQIELILQQGLTPFSFWVAANIPMSLEMKLALLDEDSTDRRLRTAWRIVSQMDSIVCSNCAQSLCNVSDIVNLSTGSNSTLFTNSHGXVHDLFTIKKVSGI

SEQ ID NO: 160131 - protein, 222 aa, Heterodera glycines
VRYAWGENELRPIAKIGHSGSVFGRAPVGATIIDALDTLYIMGMNKEFDQARDWVAQNFNLKESLSDLSVFETNIRFVGGLPSAYALTKDQMFLNKARDVADLLMPSFNAGPFGIPMSLINLRTGRTGNYGWASGGCSILSEFGSLELEFNYLSRLTGNLTYMSKCARVREYVIELQKPDGLYPNYLNPQTGKWCQKHVSVGALGDSFYEYLLKIWIFNGKR

SEQ ID NO: 160132 - protein, 175 aa, Heterodera glycines
KRWNNRLVHSHPATVQKNNILSDKLAAAQTIIGGLQPGQSDGAPQWANSLLGFCAEMVGICRELLSMVKEQQNDNMDTRETLEEERRLHSVVVENLPESEETVPSARVNSDFVDAQSMLDTCEIECRPCQKKTEAPPLSPPKSTQGKADEPPSDVFSSDNNMDYGTLKDFDPNRF

SEQ ID NO: 160133 - protein, 161 aa, Heterodera glycines
MANMFGAKLARCLLCGLTVYDKHLPTHRAIHRGDRPVDGHSVGGAFFCDLCGLAFRTRTNLIRHWRTGCSTIHANLPPNSDFALDDAGLKQMVVNLLKKLTAERKDSESFSESLDDEIGQPSTSHKHQIFHTEARDRTQIGVPAKAASKRCHDDQQQYQQT

SEQ ID NO: 160134 - protein, 84 aa, Heterodera glycines
RDRPPQLAPLMPPFCAALSSRIPSCHSYHKQHICTPLARMPLNSRRHVSLALQCQPAHRLVVMARHPLSDIGTRTLVHFVTAVL

SEQ ID NO: 160135 - protein, 206 aa, Heterodera glycines
  unsure (1)..(206): unsure at all Xaa locations
TGRAGNXGWAYTFILPVGQEKIAGEVCRAFETADATPPEDLKKLWDDYKARMAAEGVEVYSGGGGYSGSGYRYDDMEDEIELNXRKMTKLVYGLESGMEDDVANIDSQLESVMKSSKRIVHCRAGATFRGGRADPSTEKKVEAARAMAERIAYEKLAQPTNQMEKDATHLTADAIMIRTEATTLTLSGISLAKQKATELNEKLNYL

SEQ ID NO: 160136 - protein, 192 aa, Heterodera glycines; identical to SEQ ID NO: 158772

SEQ ID NO: 160137 - protein, 90 aa, Heterodera glycines
VRQSVTENGGRVPLVAGAKQRKAMPSEIGQQQKSQTNGKQKGHHFETAPLVRSNSQECVVMHKSESLEVMDSDQLAECFCFTTSHFFFCF

SEQ ID NO: 160138 - protein, 148 aa, Heterodera glycines
  unsure (1)..(148): unsure at all Xaa locations
MANARGPSSSTSTSTNASVGVLMVGPNFKVGKKIGCGNFGELRLGKNLYNNEHVAIKLEPMKSKAPQLHLEYRFYKLLGQTEGLPQVHYFGPCGKYNALVMELLGHSLEDLFDLCDRKFTLXTVCMTAMQLLRRIEYVHSKHLIYRDV

SEQ ID NO: 160139 - protein, 220 aa, Heterodera glycines
LDDAADYEGEEQDRNEAGIDEMERDEDNEEETTAPEGAEETTELDETEEAPTEGRGSEVNADRIKSVLESHAIIGGYEYDVHNEQWCTFKIHMPFLNKTRIDVLAIVEREIESFVLTQVRGIEKCNVREEQRNGRMVRVLQTQGINLGAFYAHADFLDINTIYSNDIDFMLRNFGIEGAARTISREMNNVFGVYGIEVNPRHLSLTADYMTFTGEVQPFS

SEQ ID NO: 160140 - protein, 179 aa, Heterodera glycines
MSSDESTTSSASVVSVQLREVPIKDFKDVLPVLQKTLNELEHPFIKKAEEISGMEREKLFYITSSLVLLVLMLCPGNMLLSTLITVAYPMYASLLTLNTQNTSEYTQWLVYWCVFAEFCQFDYLFGSINGLLLLYVPLKTVFLLYLALPQTYGAHNLYVKHIRKVLAVTNVLDKMKKMF

SEQ ID NO: 160141 - protein, 112 aa, Heterodera glycines
MYKLNQAEKQTKTKERKEEKLIMETEKRRMWQIGERPSWQWSGHWKVGRSVESDPDGRLFVRTNGERMGRLLRNRRTAEGQRSSAGAAVFTHGKGRRVNESVANLIGSSVCQ

SEQ ID NO: 160142 - protein, 235 aa, Heterodera glycines
MNYQQSVQQQLGGGMSAQQQQQQAVRHMQRPQNPASAAVPQNMSPNVAPSPQQQQQQMYQMPMYNHTNAGGTPFSPHNVYNQQMMTPQMASQQQFPPNAPATPATPQMSQSIGTPLSVHNIQQPGSVQPQQPGSVGMVATPAAPYSVGASTTGGPASNQPIAGPHSNPPAAQQATQTQPIGGASTQTEFDPIGTAKLLILKDLRRAIVNLNQFAEKALDSCSNPTHCLQSLQSVA

SEQ ID NO: 160143 - protein, 93 aa, Heterodera glycines
RRGPKMMEAFVTRRKELEDEFQKRKDQYSKEMQQRVSKKEAELKHHEEILNIRHTEIDNTYQNELKLVEAQINGLIEEKAKLEIKLKKQQRSK

SEQ ID NO: 160144 - protein, 146 aa, Heterodera glycines
WKKTTGGSLQIVLKSILCAMAPLLRIGLFAVDIFAIIGSHFYAHLSSDSSLSVITKSPDFNDAAEFVATFKSMTDASADVLDKISNIGNGAFTLLKFAGPIGQMVHIGLSIGLKQQDSPELRAIQALQRQITEQFEALSRKIDDSI

SEQ ID NO: 160145 - protein, 194 aa, Heterodera glycines
MLQAHQYQLRQGHRRVSARSILAHFGFEFSNDYRLGCGHYSKVYRGYFKEAQRTFAIKVTDLESVSEKFKQKFLPRELEVWRELDHPNLVYLYNDFQWSDYQFVVMELAVGGDLLSFLQKCGPVSETTCHNWMLQIVAALDYLHRKGIAHRDLKLENVLLCENGVIKVTDYGFSKQSSDLSSTFCGSRSYSSPE

SEQ ID NO: 160146 - protein, 231 aa, Heterodera glycines
VCSRADNSWHSVSEVLSEQKQRLSLNGWFHYAPGTANVAQTGPNCAVEEPICRVEPSMNITLAEVNEWLSPNYIRPGQHRQIKRIFAYKSELSLQQFLNNERYNKALDELEKAQFESVGPPHKRNVWRLVESSLEQNSVLQSLLRLFRSEAITLLLTQWTGLHLYDLKTKRGTAHSPNGAKRAAEPPKKRKRADEEEEGTTSGGLKQGGKADRCGESEDTNVRIASFIHRF

SEQ ID NO: 160147 - protein, 99 aa, Heterodera glycines
RTVQLRHIHSLLATFKFCDSSPKFGRVHRAEKSRGSEKEQCKAQTTINVLRWTRVFGFLNNNNSRSFSAFILVSIFICYFISFHLYKFLLGRKKKKKKK

SEQ ID NO: 160148 - protein, 85 aa, Heterodera glycines
  unsure (1)..(85): unsure at all Xaa locations
SVMPLDVRGCTRATLAKSAXCPSPKGVGKPVKICRDWDRTLQLLSANDEFLVGASHQLALNTSLPFAHTARRCPGLSHFEKFRDG

SEQ ID NO: 160149 - protein, 32 aa, Heterodera glycines
CFSPRPPPPRPLSILRFVSCDLSSIASSHYGD

SEQ ID NO: 160150 - protein, 200 aa, Heterodera glycines
  unsure (1)..(200): unsure at all Xaa locations
TTVLDDMQYLVNLRPSGTPVIESMSMDFETWLVSFISDDQPFEYFLYKRSKKRADYLFTTRPELAGRPLSKMIGFDYSARDGLRIQAYLSLPPQTPLLSPAQVRGDKLELARQGMLPRRPQKLIVLVHGGPKSRDFLASRXINAWLTSRGYAVLQINFRGSVGFGKNLTNAGTXGAAEQNTXNLLDGVDFLVSNNIADRR

SEQ ID NO: 160151 - protein, 126 aa, Heterodera glycines
FCYCYCFFSFYFCYCYCFFSFYFCYCYCFFSFYFFFYFCFFSFYFCYCYCFFSSFCFFYYFFFFFFSFYFFFSSFRCFCFCCFFSFLCCFTCFLYFYFIFLHISLLFFWSAAFFRSITCEHCCRKQ

SEQ ID NO: 160152 - protein, 60 aa, Heterodera glycines
QVSNEPVQIAKESTILFTRAQLSENVQKSDVFLRSTTVCAKQRNGAVESLGKMKRCVRES

SEQ ID NO: 160153 - protein, 185 aa, Heterodera glycines
MVCLVMAVLMEMANSKAVKKYNKKGAVAASPAKGKASPKGGKSPAKGKAAKKLKPKKDAKGIKAKKAKPAKKSKAAKAVKGAPKTVKKLAFAKTAAQVKEIKSPAKPMVLKAVPPHQMHLMNEKVQTAVSPPAHARSLATVPYSTPVAADRNSLPSYTSDGTNLDMAHENDDYQNYYYGTEDSSR

SEQ ID NO: 160154 - protein, 200 aa, Heterodera glycines
VLVFALAVAGSFHTETFTHLRPGLYFTGLWGDLKQSKRIERFNKFNAVDGGAAMVCTDVASRGLDFRGMDWVLQMDCPSTVDDYIHRVGRTARMNRKGEAMLMLTPSQEPFVALLRQRNVPVTKVTVDSNKVFDVRNKITNLMVPFPSVKQFAQQSLIAYAKALYFSELKEVFDVQSIDFDALSRSYGLVVTPRIRFLRK

SEQ ID NO: 160155 - protein, 185 aa, Heterodera glycines
MYLKDRLTGLISTGWQRYSHTTPLCELLPAGIPSLARQAIFVSQWMNKREERTDQFMQEFLNCSVRHSTSATKFVRKGFTFPFVFEFKFCDCQFPGVELYSEIEELNLLRWKAAIERYISSNETEKETQNELEKMEEEFRKLRKTIASLLGHFFYEDTVDEWLAQHDHLNRFNDDDLGLPPPNRL

SEQ ID NO: 160156 - protein, 222 aa, Heterodera glycines
MLFSSSTVLLLLLIVLPFSLSFILIPQNVRQISPALSSRPFRRFGHFSVIAKRNPIVLIPGDGGSRLKANLTGKPSVVHYFCQRQTNDFFALWLDLQQFGPFVIDCWADNMRLNFNRTSGRAQDLEGVKVRVPGFGHTRTVEWIDSSKRSPSRYFAPIVASLAKLGYQRGIDVIGAPYDWRRAPEELLHYFVKLRSLIEQLYHANGNRKVIVLAHSMGNPMA

SEQ ID NO: 160157 - protein, 76 aa, Heterodera glycines
HLLQEARKANDQMLFVMKDKKLNSEDKVRKLEEWANTLPENVRGELRVRDLRELKQLVHLYNGLTPVLHQGIQGGI

SEQ ID NO: 160158 - protein, 133 aa, Heterodera glycines
APPLPSSAAVVLFRPVRRALPQSSMASAGWLPPGATVGCGGPPQQQQQQTISMMMMHQQQQNGIMVNGNGTVVGIGHLQQQQQYHQFIAANPGMVGATSLPQDLENVNAMPFDQSLLDLNDYEIAPDGQFDFP

SEQ ID NO: 160159 - protein, 187 aa, Heterodera glycines
  unsure (1)..(187): unsure at all Xaa locations
CPKLPTVFDXMVTQQKVPEPVFAFWLNRDPTSEFGGEITIGGTDQRRFVAPITYTPVTHKAHWQFKMDSISGGNGKLACQNGCQAIADTGTSLLAGPKNDIEKIQKYIGAIPLFHGEYMISCERIPTLPDVTINIGGKAYTXEGQGLCAENDQHGQKHMPFRFXGAXFAGTCRRTLDSWRCVYWSLL

SEQ ID NO: 160160 - protein, 153 aa, Heterodera glycines
MRKFAYFKLCQAVLTSVFLWQILSTHQFCGEFDEPTAFFNSAVSSSHCEQFTLIGMDSTTGEYGAMPDKQKWHMQLMASSGSGQPIDEQQQNHMDEFSSKLPTVGRHCIPIAFSLVKPWVRDNKSHLHKVADLFAIQLLCGLLSLFVIAMHVL

SEQ ID NO: 160161 - protein, 176 aa, Heterodera glycines
KLRWFELTITNPSTQSSLSTSLPALPSAAVFAHSASLRRRAAAVPPPQNRHHFLPPPDPPPLLNGNASKVFSSSSSDTFLPAADVSGGDRRQVMFEEEPTTFISIRSVLINGQRFFQPLSVPAALCPSASAPPVDPMGPLLALSAADNDQSHPKQQKDAPLAPRVPFIYQQSLAAA

SEQ ID NO: 160162 - protein, 196 aa, Heterodera glycines
PSPTTTTGQSPDTSSVSAVAAIVARAIVVAVASVAGAIVVAVSVAPESPPSVSSNRCFNELRLYTTRPSAAAADSPGTPNSLGCCRPHANTTCLQRSVKVRCSAVFGTVSVPCSSQWHVPTKEGWQIFFPLLLCDEKMTFISQKTMNECEKNGRQLNDWGRERDRRESEKERKKGKGKDERTAEECAIKGVNYMCN

SEQ ID NO: 160163 - protein, 184 aa, Heterodera glycines
DETCSGEEEERVQIERDGSVFDLSKIDEPKFGKIDPNNVPHVGGNTWAGGTGGYNTAGLGGVGGPFRLDAGHAVHQLPDSAKEQVPEHIRKRAREIAREEYAKRLKEIDMGEYDAAAYEELATRVGRQVRVLRIVIDSLEHRKHGRQWAKHQTSGDLDDAKLIEWMAGERNIYRKRIEQPPDPS

SEQ ID NO: 160164 - protein, 143 aa, Heterodera glycines
MTGTLKAKNAIADANITCGLNSNFYFGWSSCMKIAFYGDDGYKKHAQKYGLDKTEGPEENFKNMTEFDKYGFMHDMVLLLFEGCVVCKNAKMTASLSLRQYMPQGLLNETCAAFVKRPTKALVGVTADSFAYGITLMERLCAE

SEQ ID NO: 160165 - protein, 136 aa, Heterodera glycines
MEQKTFKQNGERKRKTQKMEEQSREKPKDSEKENLDGRISKRNKMQSEEATVDAECAELRGNAKVFVDGKGRCYDVMLSQTNIQQNNNKFYLIQLLCNQTAANKFWVWFRWGRVGFKGQTNLVPFGTDFDGALELF

SEQ ID NO: 160166 - protein, 172 aa, Heterodera glycines
FPSFLFLIIIPVANGVITRSLTPRRGAAGEMAREFVELSTNSRESTSRRPSRVNILDDDYVEPSLGVRRYSAGSSSRTRTVKVMTEFKLLGQIWPEDVYIIYLDTSKFDKDDQKRIIGHDEPDVLKTASDGSFSWKFLVKHNESDEDIAVDVHMHIFGTVPNENLHRNIVIA

SEQ ID NO: 160167 - protein, 146 aa, Heterodera glycines
MSRLNAHDFCSTNSDFLLEYSDEKALSAVENGFFMRCSDLDEHWFDCQSVTESVNATDINQMELLCPYFGISKGPLLFANISCRVLPCIECYGTRNFAKEFPCKKYTGHYFLSALLYSIFLGPFAVDRFYLGYSAIAVGKLMTLED

SEQ ID NO: 160168 - protein, 140 aa, Heterodera glycines
VMHGDGGSPIAAQQRHSPTTLSRRSSSARPTPSLSPVYICPVREAITAEHADQQSASLPHGSAAGGGTLLYPLRKGERVRVLAIRGEYTRCSRLPAAEHRQQQLRQQRLALQNGLVPTRTLQFGANNGTTALNDERMTEL

SEQ ID NO: 160169 - protein, 168 aa, Heterodera glycines
TNLVDCSSKYGNEGCDGGLMDSAFEYVRDNNGLDTEESYPYEAVTGKCQFKNETVGGTVVSFKDLKEGDEEQLKIAVATIGPISVALDASNLSFQFYKTGVYYERWCSNRYLDHGVLLVGYGTDETHGDYWLVKNSWGPHWGENGYIRIARNKQNHCGIATMASYPVV

SEQ ID NO: 160170 - protein, 129 aa, Heterodera glycines
TLLKSPLIVGVFRRQWSRIVLDGWVLCFSIRGSVVLNAGSKRHRISTGCSHIISRNSYSSWQRIGVRNSFRRNANSDRHRICTAGCFRLVKWHFPLSHQLKPIRHFLVLFLESFNEFFRQLTISARSKT

SEQ ID NO: 160171 - protein, 138 aa, Heterodera glycines
KKYREANKLQSCQTTTSIMNSDNHLIQTMNRGDERSADIYLQEQTLMITSSHQPVQLLYDGANGQYFIPVQNGNDGSVCHIALTPTQSKVAGYYSIIIIFCNIGTFSFKFPNNKADYLSIGELQKDVHETFLNYVLKR

SEQ ID NO: 160172 - protein, 234 aa, Heterodera glycines
  unsure (1)..(234): unsure at all Xaa locations
FPDFLQKKGTXTDWWVDDFVRFLNEVQFDGIWIDMNEPSVFGTNEKHPWYFDTQPAFAGKPPIAPLMCPEPNNKLDYPPYRTWNAYKWDSIFSKRTLNEKTLCMIGKSGRRNWTMYDTHSLYGWSEMVATQKALRVSTGKRGPLTSRSTFPSSGHYGGHWLGDNQSRWPDLRLSIIGVMEFNMFGIPQVGADVCGLIGDSNEELCLRWQQLGAFHSYYRNHNDVNSKVSQDPAQ

SEQ ID NO: 160173 - protein, 209 aa, Heterodera glycines
IEHFVVNEKYREAVTMSLYAIEPSYKNITDPLKQRYQYKEEFIAMCRNASASPFDVLLRMEQSLKDDCQLPSQEQAENYAAILELFQKIEQRHHMLNLNDAIPMDKYKSIKSSILAKSAREALQEKLNTILNSANSAEEVLQALNKLNSDLHYYPCWLQAMADGNEWKREPLFHFAQIVRLDLMKASLIALHCAYISNEDDEFAIDINF

SEQ ID NO: 160174 - protein, 175 aa, Heterodera glycines
GAELIPEERNLLSVAYKNVVGARRSSWRVISSIEQKTEGSEKKQQMAKEYREKVEQELREICHDVLDLLDKYLIPKAGNPESKVFYLKMKGDYYRYLAEVATGDDRNAVVEKSQQPYQEAFDIAKDKMQPTHPIRLGLALNFSVFYYEILNSPDKACQLAKQAFDDAIAELDTLN

SEQ ID NO: 160175 - protein, 214 aa, Heterodera glycines
DAVANAIVCPVCFAKFEPFPNLHAHVLRHLDKKCMAEFFSCKLCKDSNCVLFLSVTAIREHIRTAHGVATDSYLLTNIYPGNNIHKGTTRIMVQEVLKRFARIRFEQWRNVRQIKTKLGSMKRNCSFPPVDDHSWKRKKVGNEGGKVAEEDVIDRILFSPSQIPQNLSERLHRLKKMDRISRHQMIVPICGMSSFVGLSNVRIAKMAKSCSTHK

SEQ ID NO: 160176 - protein, 174 aa, Heterodera glycines
MDVCRPGRGGYCSRVVFLNADGTIREVITSCLKREQLVPRELPFVCQNSTTPQWNKLVNCCKSESFCNDIQFPIELGLRNGFLPESFDGLPSVFLTLLISLVLVLLFALSICVAISCCCFPRKRAVADCEMDSESLCGAPMGQLAEAATFSTGSGSGVPMLAPRTISYQISLQT

SEQ ID NO: 160177 - protein, 187 aa, Heterodera glycines
  unsure (1)..(187): unsure at all Xaa locations
SDHIILEIVFEIFENIKEDVXWELVFVGTDGREEHDQVLDSVLIGPIQEGRHKFLFEAPPPQIHNLRPEDFMDVSLLLLKCKYREQLFMKIGWFVTHTYTDPELVENPPSQPVIEKLKRTIVSEDVRVTSYPIKWDEETEQPMDDDEEPNAGNEVSYGVAAIELTSNGNSQQMNMSQQEQTPMAAVN

SEQ ID NO: 160178 - protein, 79 aa, Heterodera glycines
  unsure (1)..(79): unsure at all Xaa locations
NCAFFTAYQRFAQLANHSDNQATLTLRPGTVLFIDNFRVMHGRKAFQGERVMCGCXYLNRDVFLAKARPKLSPEFYRNV

SEQ ID NO: 160179 - protein, 86 aa, Heterodera glycines
EAKRGVPHFLTIKSFSIITFALRSYQMAIPEWNFFHLLSPPPLIFEFVIFSFSRLFPFHKFFFPIGFPSFQFVFSFSEVNTYYIVD

SEQ ID NO: 160180 - protein, 150 aa, Heterodera glycines
MAVVVYGAESAGPKADQAMAAKQFNPSAFPAMPPELEKILPADVVQKLKAVHADMSLNIMQKQDKIDRIMSSLPGEVLDQIPAPPGFERLPDDVKNRLKQINRQTNKAWADKQKELQEYVKTLPQEQRAILMMGPMGGPPPPPPSFGRRR

SEQ ID NO: 160181 - protein, 207 aa, Heterodera glycines
  unsure (1)..(207): unsure at all Xaa locations
RQKRKGNEGCDPGEKERKERESLIEEAYALSQEANISLEQIIKRYTKCRNQFLERVADQISDQLQQDHSDSTDDISTNKHERKKRPIVFISPQLRKRVKIQQQLAEADSANDGDDDSEQKQQKEKSPFTIPGGAEDDEMTDVHSQLEQKQQQQKQQQETEAKKSDGTTKTEXHSKRPICQQIQRGGSDQQHFERQCARRDQQMQQQQ

SEQ ID NO: 160182 - protein, 230 aa, Heterodera glycines
  unsure (1)..(230): unsure at all Xaa locations
NGLGPLSPEAVKQAHENDAGKLKPWQQRYLDWMILQARLCGYLTVKKNDKKAQLXTGSEFLVEFRYKPILLPISVICPFVPFYLFFRANHMQDNGVIVPIEHRYLLKSAPPRALALLSKGNDPENGPWEVTSKKHDALFAALNYCSAREIRQGLWQSYVTRSAFSSQMLNNSQNIEELRHNTEGFAKALGFSSTAHHRISSKMAGSPQTVRVFVDELSRRFRPVFFSRLE

SEQ ID NO: 160183 - protein, 119 aa, Heterodera glycines
KKIVEYLREYSTKVDCILTSGGTGFSKRDVTPEATKEVIERECPGIAVALLKKGLDITPFAALTRLTAGIAANCLIINLPGSPKAVREGFEVIEPILSHAIAIVKGDESETSVLHKRTA

SEQ ID NO: 160184 - protein, 171 aa, Heterodera glycines
MATKCLPLELLYEIVPLIPAENATPNALSSCRLLHKLLLPRVIKWKEIMSENTGFQKQLLEMVKALHEKVAVIEKSVAIIEKNVAVIEKKATVIEKNVTVIEKEVTVIEKNVTVIEKEVTVIKKTIGIKGETTGVVEQQFHIRETVPTKTRKRETEETGARDRSAKAAAGL

SEQ ID NO: 160185 - protein, 209 aa, Heterodera glycines
  unsure (1)..(209): unsure at all Xaa locations
ILDSMPHTNIQWFSIMNSLVIVIFLSGMVGMILLRTLHRDIARYNRLDEEEDAQEEFGWKLVHGDVFRPPRHALLLSVFVGTGSQVLLCAFITLAFACLGFLSPANRGSLMTFALXFFYVLFGVIAGYVSSRIYKTMEGLAWKSNILLTSFLIPGIIFGVFFVSNLMLWSKGSSAAVPFGTLCALLFLWLFISIPLTFVGAYFGFRAKR

SEQ ID NO: 160186 - protein, 132 aa, Heterodera glycines
ILLIVLLAVVSFRLSASTGDKKTANDGSGNNSSAGIGTKIKRIVTAGLLFTSLATGGAEAIGRSNAQGGNAAGLVPSHVTNRSMAPPPPPVQFEMGANRLEKMRAHLRELAEKMPVNESKRLSPSGPDPHHH

SEQ ID NO: 160187 - protein, 202 aa, Heterodera glycines
DANCTDFLDDGENEIELLQEATDKTDQLDLKLKNKKSKSVGSDHFFDVRSNQVAASANCAHLSFTDLNLSRPLLKSISEAGFQNPTPIQTACIPVALAGRDICASSATGTGKTAAFMLPILERLLFRPSRRTSVTRVLVLVPTRELAIQVFQVSRQLAKYTQVEICLAAGGLDLKAQEAALRLGLDIVIATPGRLIDHLHNS

SEQ ID NO: 160188 - protein, 57 aa, Heterodera glycines
KLIKLYLKKFIFTAMKNGEQQPYQEEELRRTYSSSSSSSNSLSVHKRKCSGTDQLNK

SEQ ID NO: 160189 - protein, 211 aa, Heterodera glycines
  unsure (1)..(211): unsure at all Xaa locations
ASPPPKAXLILEAQADFALKLLREVSTDDRSCIVSPFSAAVTLSMVYAGAKEKTGEEMGQLLANGAPESEVHKYFGALLKSITSGTNSSNTLETANKLYVGKGSKVKDAFKEQIEGNYGGQFETVDFLDGKGTAEKINKFVKEATHKKIRDLVTPDNFDGNTRLVLINALYFKGTWADKFDSKFTEKAKFHVDAKNFKELEMMHLTANFIY

SEQ ID NO: 160190 - protein, 187 aa, Heterodera glycines
MHAQPVPAESQLASGFEFGGSRLSAGSNQFGGISNMGNNSEAMHGKSFGGPSFKFNPLQGTGNNELLTFLDNLQSTLRSSGFNDQSVSEVMQAMQVLAKYNIMGLGLGLGVAAMAQMRNTESAMAQQNVLLGAAASNTPLQQQQQRYDIMSQSNITGSLLDSSQNIDQSIVGGSGGVLIDVMSQKKS

SEQ ID NO: 160191 - protein, 180 aa, Heterodera glycines
TSSRVQNGPDPFVRLLHFCNSEEGETIELPEFRIFVPDTYDLGILVLDQKTLPNSTVNFPVPENPRRRLQQAKRPTEVGTLDESNGKKGAEDGFVTVDAPKSHNAKGLDDLLPPGKTVTKTNGDLLWETQSVEMEEVPAEYDTSIRQSQQHNWEEESNDGNERKNWTKKKQPTKEEKKRK

SEQ ID NO: 160192 - protein, 187 aa, Heterodera glycines
EERNATERVKRSRTEAAEEEKRERLDDEEDGGPAETAEGMKTKRTKKHTLDSDEEDETEGYQRLDMDKVEGQEESTLEYEGHVKIMPFNMKDDLEEGHFDANGTFIFDKKQSVIKDAWLDNIEWDNVKNAAGKHWGKLDDEDDKKADDEKEVEPKEVYRRLIELLNEKETIGAALKRLNNEKKSNAA

SEQ ID NO: 160193 - protein, 224 aa, Heterodera glycines
SLFRKSLTNYQITQNALLKNRFFYEFLLANDRQVAREVKDEYVDTTSKMFFSYFKAYVSRLFKFQMVDSATKSDLLGAEDVVKHPTTISALPSLFTSGKTHQTRSRATVFSLGHRQNLLLDDLLAPLIVPHVAQENNETFQFESLFRSVQYALVDHCSHEFLFICDFFMVNGQSAVDLFTSVMGRSISLLLKTLEEKIAANFDAISLFLCICFCAKFREMMGDR

SEQ ID NO: 160194 - protein, 250 aa, Heterodera glycines
LFTGVNSHSSVVAVSAPKGILLYGPNGCGKTLIARAIAKEVDAYFINFGTSLVDFVNGSSVTMKSLFTLAEKIQPCVIFIDEIDLLFHRNRNDFQLLKTQFLAQWDEFLRCNSNCNVIIIGATNRVLDLVLCRFSLKVHIPLPDEEAREKLLRKILANENLEADFNYAEVVEATQKMSSSELKEVIRFAFLLRYQQVVQTQISVLQQSSSVANEGSENEAEKIQIKLSHNDIIRAFHDLKNVSMAPFSES

SEQ ID NO: 160195 - protein, 69 aa, Heterodera glycines
STAVPNDQHIWNRSSYACRNTGRASTHSKKTSTIKSNVSLLYSSTEVRLIYSGNDDDLIGASSTGKSGG

SEQ ID NO: 160196 - protein, 124 aa, Heterodera glycines
MATYLFLAAAAFGAGIYCWKTYLGPMLDQPKSDDEEKPKPEGGEEATTAGEEEKKAGSKGDKHKKKDKKGEGAAAAPAADKKEEKRKDKHKSKESGKSDDSKAGKKDKHGKKDKKGKKKDTTDA

SEQ ID NO: 160197 - protein, 178 aa, Heterodera glycines
EIREMIKETAIPPTVLRVHNERVKESLQLVNNEYLTKASVHFDTTPLHVDYRVLGPPATLYRNNHRVTPATSNCEWRPGDALVNAQIGTWVAYAFGNPVGDSVRRLGLTETMWRNFVDKYASEMRNKGIVCVPPVRVSICWYTSVNEVLNILHKEALNGGVEFCLIGHAKGSEGDDVH

SEQ ID NO: 160198 - protein, 86 aa, Heterodera glycines
  unsure (1)..(86): unsure at all Xaa locations
PGSRVVLXMEHCAKGGKPKILDNCTLPLTGKNVVRRIITEMAVFDVHPTDGLSLVEVYETFSVEDVVRATGCQFKISENLKPMLQA

SEQ ID NO: 160199 - protein, 138 aa, Heterodera glycines
MSNFIFVAFLTAAFFSSGLALPAPYDAESVVSSELNVPLLSADANVEAAITNESDSAAEIQAPSIPVPIEQQTAAASSSSTPKSEQTPKKVMNMKSAMEGAAANVYGGLPLDQQPKTIAEAAAKAKQTPAKLPADYDV

SEQ ID NO: 160200 - protein, 191 aa, Heterodera glycines
QLLRIVLSLAFVWQLLSLHQFCGTFVCPKAFLHDISVGHCKRFTLIGKDSKTGEFGAVLDERKWHNQLFMSSTNGLPIKEQQQQFMDELAAKLPCPGRHCIPITTPSFFFWTEKNRNLLDTVVDSFSGQLLLALCSLLTIGIGFARMLRSAAEYECFDYCMALYSVFCWCCSAWASSYLLLYWTPYWSCMN

SEQ ID NO: 160201 - protein, 91 aa, Heterodera glycines
  unsure (1)..(91): unsure at all Xaa locations
IKMRGKACKWSKCSHKIRPPLLFASLRPXHSSAAALLRLVPNIPLHNALSQILIPPSDQMRGICWLICPTKLTFFCTSLIRQTNNIYLTAE

SEQ ID NO: 160202 - protein, 185 aa, Heterodera glycines
IPNSSMPFLVHKFFLIFSKWKWPMPVQLTPIDHKFFGTFLSWSPFGDWIGRRDLAWEKARRKHRTKKEQQNEIEKAMKSIRKELAMAVIMPTIGGRNLAEKVNISSAKVVENELKRACDKLRSKMETKDEAIAFTEKYEHFIVIECKGSSHNVDKFCDFVGKRLRYELLEFVENPLAIWVDFCHV

SEQ ID NO: 160203 - protein, 227 aa, Heterodera glycines
ILRTFQFCRAENPFFLEIHNKKARNSLNWTGKLIADELGQFVRAIRLAMGVFKDGTQMARFEDQLPPAKMISPDSTSLYMAHIRLERFCASEHFHVGKFGLATRQIANLLRAFTQRVSGIYSLERCSFLADSLFRLFTKFYECIKWHFRQSPNKSEIEKFGAAILKFGRFVCGTLREGDNAGSFCLPSSTTIGTELLLPSTLRKIKQKTKGRKEQKTITGRIKVSTE

SEQ ID NO: 160204 - protein, 49 aa, Heterodera glycines
MSTKRRLLAKKFPFFGCDANQLLLPPPTPGVNSHDIGLSFGVIHTFISP

SEQ ID NO: 160205 - protein, 215 aa, Heterodera glycines
VTPPDIYAVRHAERLDDSEKRKVWHYNSRFAKDNPPLSPRGVQQAEELSVEFRNISIDYCFTSPYERCVQTASKILEGRSTLINVEPGLIESFNLICDRSGVQKISFQTGKELAQRYTNINRQYEPMYLAPPEIEKSKGVHGCFPRVEDTFRKIVAKCYGDILIVSHQGPVAALQRMLTGSMEFGGSATVSKYVEVPGMAGRFEAEYIYDSSHLS

SEQ ID NO: 160206 - protein, 192 aa, Heterodera glycines
ASSSELPKGNGRNGVRGEEEVKGGKEIASKTLNIQSKRFYLDVKQNDRGRFVKLAEVAMNGRKNRLFMSMRICKNIKELLGKFEGHVPASEEVNGKAENVTIQSESIVTERRRYYIDLRENRRGSFLRITQLETHSGIRNSVALPFEGIGQLHDALDSILEEYGEGFIEEEAELPHSQMIRTDGKSFFFDPG

SEQ ID NO: 160207 - protein, 184 aa, Heterodera glycines
FDDDFKPNLSTAVDVNVQQKPVDKTSAVGDIEVKNNEIVQNGNQLSKESVSTVPYEQQHGQVIGQVKTVKYKALFEFNARSGDELSIQPGDLILVFEGHQSEPGWLAGQIRDKVGWFPASFAEPLSAAAAGPLLKRGGSLAGSPSGEPLAIIREECEPPPTGQIHPTEQRRGNAFDTDFTAAFT

SEQ ID NO: 160208 - protein, 109 aa, Heterodera glycines
FLYLIKCFRSIFWIFFCQNSFIFFINFFFALSIFSFPWVQSSLILVFLTFSVYSSTIKKNSFFEINSFTKKQKIQEKFAEFSRKKRTIKIFFFHFLEFHYYLIFIYFWN

SEQ ID NO: 160209 - protein, 218 aa, Heterodera glycines
MTRRVGPITDEDWQPLMWPVELRNRRKFRLLCAHVMDGKCGGGVFAMRRLWQSVIHQIAGDEVSNRVLNHCIRHIQRKLVEAHTVICPWRISPGLNTSATYDITARYHQLVDSGQPELPLADNVLDEALADKFGVQSRFFLALAIFGWLPISKQATNDVEMNKPQPNFHCPLCGRHLCASVFSSNNPLDPREQHQHYCPVVEDSVSPLWRECLQMCTN

SEQ ID NO: 160210 - protein, 143 aa, Heterodera glycines
LKKFEQRWREICGTNNNYVDFIVPNSEVHLANFGAIENAHLSILIQNLIDVIRSRNARQLVKEFGDKYLEEVMKFLDEAMAASNESLPLAKIVPVLCDAFAKIGTVSFGSIFHSLLSSTELHRFTLFVSECSKRDDLFDANLK

SEQ ID NO: 160211 - protein, 98 aa, Heterodera glycines
  unsure (1)..(98): unsure at all Xaa locations
RPYPFLRNPKLXGITFDPLLTFNAHSEKLRSKIQKRNNILRXLAGTTWGQSKEVLLTTYKAIARSLLNYAAPIWSPQLADSNWSILRRCQSALGTIGC

SEQ ID NO: 160212 - protein, 165 aa, Heterodera glycines
MRFRLIHAGFRHPLVVHIEQHQMEVIAMDGNEVKPFRTDALIIYPGERFDVRVTALGHPRWPIHRMVVGLAEQFLAETEEPIYGLANLDYHWHGETADPNWDGGEKVDFLLNRCTARQCVLLGCPFRTENGTFAAFDGRKFKCHSIDELRNNGKLNNYPSGHGYD

SEQ ID NO: 160213 - protein, 119 aa, Heterodera glycines
CRFEFCCMCLGPWAPHVSGSGWYSCNRFDDDAAKRARDSQERSRAALKRYLHYYSRFTNHQNSLKLERKLFEKVSEKMEQMQVLGFSWIETQFLQKAVEILVECRRTLMYTYVFAFYLV

SEQ ID NO: 160214 - protein, 189 aa, Heterodera glycines
  unsure (1)..(189): unsure at all Xaa locations
PEPVFAFWLNRDPTSEFGGEITIGGTDQRRFVAPITYTPVTHKAYWQFKMDSISGGNGKLACQNGCQAIADTGTSLLAGPKNDIEKIQKHIGAIPLFHGEYMISCERIPTLPDVTINIGGKAYTXEGQGLCAENDQHGQKHMPFRFYGHXFAGTCRRTLDSWRCVYWSLLHGVXCGPKSCWFCAGQRRK

SEQ ID NO: 160215 - protein, 74 aa, Heterodera glycines
MERIDSIICTLPENVIDQIPDPPEVAQLPADVRQRVKQIERQQGKSFSTKFEEIMKYVDTLPEGTKSAAKNIFH

SEQ ID NO: 160216 - protein, 183 aa, Heterodera glycines
RPPSAPDYFGRVSFALSPSQPPLTVNSTVVGVPSSPVNIPPCVGHCDICSGRIPPDEHFPFHWQANFTHVICCVIPCVSPFTPYGLAPYTGLNDGTMDLALIPKVSRFTNLQIIRKVAMYGARFIPDEYPDVKVYRVSRWKFTPEALIVPSGEDTDKAAEQGQHSGAWNLDGEILLQPSDRPL

SEQ ID NO: 160217 - protein, 229 aa, Heterodera glycines
  unsure (1)..(229): unsure at all Xaa locations
FCFSLISKKAAYSTVYFAXERQTSRKFAVKMCLKKKIIKEKKVQQIFRERDILRLLSTPANACPFVVHLFCTFQDDESLFFVLSYAPKKDLMARLKKLQRFSVGQCQFAMAELFLALEHIHALDVIHRDVKPENILLREDGHILLSDFGCAKQIIAKRENVAEENGDKTDGQRADDGQKAEKSADSKSSKKREEEEATKLALRRRCSFVGSGAYVSPEVLNGKEVTGAC

SEQ ID NO: 160218 - protein, 256 aa, Heterodera glycines
ESYAAGLVQRWLTKLQISNHYSNTVKGICRDNKGYCRKLYRYLNANLEWISAQIDANPGDLYWRQVNLTFNQLTGIFDGYAMDSGKSFSPRVNFTITPIYMIQISGELIDLSILFKKVPRSKGEAVELAEAGHCSGLVKVAAGNSDLLMSHVAMSGFNTMNRIVKLYKFAYDPKDVPGFAVSFSGYPAALASADDFTLTSAGLLSIETTISVFDKSLYSQFVHPQGQLHCWLRSYISNQLTSTAHDWVKIFARFNS

SEQ ID NO: 160219 - protein, 114 aa, Heterodera glycines
MAKQCFVTVGSTRFDALVESLFRSDVLDALKKLKVECVTIQNGNGVIPKQIQSAILNQTQCIIDGITFHLFDYKASIREYLQSAELIVGHAGAGTCLEALECGKPFITVVNDSL

SEQ ID NO: 160220 - protein, 83 aa, Heterodera glycines
CFLFFGHLHPLWFVPWKTSIFLAFIFPADAQHFVRFANWPIASGLCQCHVRKAAQSEQSENENEEKTERKHLEKSPVLEERSS

SEQ ID NO: 160221 - protein, 177 aa, Heterodera glycines
SEQVQNVTFVYNLSISLALYGLFLFYTATRDLLHPYNPVLKFLTVKSVIFLSFWQGFLLAVLGATSAIDPIYDLDGNEIIGRGTVAAGYQNFFICIEMFFAAIALRFAFSVSAYIDAHTVTAGSDVRPMTLQSISSSLKETMNPRDIMQDAIHNFHPQYQQYTQVIIKISCFISLIF

SEQ ID NO: 160222 - protein, 131 aa, Heterodera glycines
VPSEDKSCNILDDDYVEPSLGVRRYSAGSSSRTRTVKVMTEFKLLGQIWPEDVYIIYLDTSKFDKDDQKRIIGHDEPDVLKTASDGSFSWKFLVKHNESDEDIAVDVHMHIFGTVPNENLHRNIVIAEANS

SEQ ID NO: 160223 - protein, 116 aa, Heterodera glycines
MRCSDLDEHWFDCQSVTESVNATDINQMELLCPYFGISKGPLLFANISCRVLPCIECYGTRNFAKEFPCKKYTGHYFLSALLYSIFLGPFAVDRFYLGYSAIAVGKLMTLGGLGVL

SEQ ID NO: 160224 - protein, 152 aa, Heterodera glycines
SYEKCCCFVSLYLIVLFCTCFHRFVHFSLSVHGTQQTPITTLISKSIISHSSVIRSSFNAVVPLLAPNWSVLVGTRPFCNANRCCRSCCWRCSAAGKRLQRVYSPRMANTRTRSPLRNGYSSVPPPAALPCGSDADCWSACSAVIASRTGQM

SEQ ID NO: 160225 - protein, 178 aa, Heterodera glycines
  unsure (1)..(178): unsure at all Xaa locations
TASKIIYLSEXNLVDCSSKYGNEGCDGGLMDSAFEYVRDNNGLDTEESYPYEAVTGKCQFKNETVGGTVVSFKDLKEGDEEQLKIAVATIGPISVALDASNLSFQFYKTGVYYERWCSNRYLDHGVLLVGYGTDETHGDYWLVKNSWGPHWGENGYIRIARNKQNHCGIATMASYPVV

SEQ ID NO: 160226 - protein, 99 aa, Heterodera glycines
TRVPSGTELAPVAATLSVGTVTAVGKELVSGTVSDGTRTAIGTEFAPLAASDSSSGIFPSATSLSQSGTSWSCFWSPSTSSFASSTSSARSKNDVDAPS

SEQ ID NO: 160227 - protein, 138 aa, Heterodera glycines; identical to SEQ ID NO: 160171

SEQ ID NO: 160228 - protein, 232 aa, Heterodera glycines
  unsure (1)..(232): unsure at all Xaa locations
MWPDXHCGFPDFLDPLPNTTDWWVDEFVRFHNEVQFDGIWIDMNEPSVFGTNEKHPWYFDTQPAFAGKPPIAPLMCPEPNNKLDYPPYRTWNAYKWDSKNTKRTLNEKTLCMIGKSGRRNWTMYDTHSLYGWSEMVATQKALRVSTGKRGPLTSRSTFPSSGHYGGHWLGDNQSRWPDLRLSIIGVMEFNMFGIPQVGADVCGLIGDSNEELCLRWQQLGAFHSYYRNHNDV

SEQ ID NO: 160229 - protein, 199 aa, Heterodera glycines
LKLSNDCTYEGQNIEHFVVNEKYREAVTMSLYAIEPSYKNITDPLKQRYQYKEEFIAMCRNASASPFDVLLRMEQSLKDDCQLPSQEQAENYAAILELFQKIEQRHHMLNLNDAIPMDKYKSIKSSILAKSAREALQEKLNTILNSANSAEEVLQALNKLNSDLHYYPCWLQAMADGNEWKREPLFHFAQIVRLDLMKA

SEQ ID NO: 160230 - protein, 152 aa, Heterodera glycines
MAFLSRLSILPNSPISLLAVSLAVLAFVALASANPPTARETAPNAQQNNANSVATGEIAKNIAEKMERMNEFIKAKKFIDAHNLAFEKGEVSFKVAPNHLMHFTPAQYNRIRGLQMRSNRQRHNMATLAGNSSTLPEKLDWREKGAVTEVKD

SEQ ID NO: 160231 - protein, 134 aa, Heterodera glycines
FQIPLIVLLAVVSFRLSASTGDKKTANDGSGNNSSAGIGTKIKRIVTAGLLFTSLATGGAEAIGRSNAQGGNAAGLVPSHVTNRSMAPPPPPVQSEMGANRSEKMRAHLRELAEKMPVNESKRLSPSGPDPHHH

SEQ ID NO: 160232 - protein, 213 aa, Heterodera glycines
  unsure (1)..(213): unsure at all Xaa locations
MWXSRIYFPENRPMKTAVANAIVCPVCFAKFEPFPNLHAHVLRHLDKKCMAEFFSCKLCKDSNCVLFLSVTAIREHIRTAHGVATDSYLLTNIYPGNNIHKGTTRIMVQEVLKRFARIRFEQWRNVRQIKTKLGSMKRNCSFPPVDDHSWKRKKVGNEGGKVAEEDVIDRILFSPSQIPQNLSERLHRLKKMDRISRHQMIVPXCGMSSFVGL

SEQ ID NO: 160233 - protein, 211 aa, Heterodera glycines
  unsure (1)..(211): unsure at all Xaa locations
GIGYRNPYALNETKIYSSRFSTHDDELLCKCNHFATCGKEGVASYVGEQYMDVCRPGRGGYCSRVVFLNADGTIREVITSCLKREQLVPRELPFVCQNSTTPQWNKLVNCCKSESFCNDIQFPIELGLRNGFLPESFDGLPSVFLTLLISLVLVLLFALSICVAISCCCFPRKRAVVDRCIGWLVQCRSPTLNSSKADCEMDSESXCGAPM

SEQ ID NO: 160234 - protein, 156 aa, Heterodera glycines
  unsure (1)..(156): unsure at all Xaa locations
NEFRINVVSVQLLENPATPSDXHKLEIVFEIFENIKEDVEWELVFVGTDGREEHDQVLDSVLIGPIQEGRHKFLFEAPPPQIHNLRPEDSMDVTLLLLKCKYREQLFMKIGWFVTHTYTDPELVENPPSQPVIEKLKRTIVSEDVRVTSYPIKWDE

SEQ ID NO: 160235 - protein, 207 aa, Heterodera glycines
LHLHCHVVKSSLGPVGLDKMLVDDVGDVTVTNDGATILKLLEVEHPAGKILVDLAQLQDEEVGDGTTTVVIIAAELLKAADELVRKKIHPTNIINGYRLACKEAVRYMTENLSFPVEELDRASLIRAAKTSMSSKLIGSESDFFAELCVDATVAVKRTDKAGRVSYPINSVNVLKAHGKSSKESQLISGYALNCSAVLTKSYRLAFQ

SEQ ID NO: 160236 - protein, 147 aa, Heterodera glycines
VVKTCHHRPPWSWPTAAVVVAVHWHPLRSARGCCNAESAHRRRPHFGAVCHWCRRCFASVFHCPRRWQPSPLRASADGSAAQRQLRRVSTPRHRWSHRHTSVSSNPWLSTRLLHVPSVLGTSARRRAHFSARDEESGLSASPSRFKG

SEQ ID NO: 160237 - protein, 55 aa, Heterodera glycines
  unsure (1)..(55): unsure at all Xaa locations
TLRPGTVLFIDNFRVMHGRKAFQGERVMCGCXYLNRDVFLAKARPKLSPEFYRNV

SEQ ID NO: 160238 - protein, 53 aa, Heterodera glycines
LDCKKVGDTSIGLSSTLYPSSADQRLYRRMITRGGLQPIHIGPFNQPAKPVNR

SEQ ID NO: 160239 - protein, 128 aa, Heterodera glycines
SSNRTTTAIKWRMMGVNHVRHSTKAKKVLGKTRFLDLDLPESFDARQRWNFCPSISLIRDQSSCGSCWAFGAVEAMSDRTCIASGGNIRIALSADYLLSCRHKCGFGCDGGDPLQAWRYWVNEGIVTG

SEQ ID NO: 160240 - protein, 111 aa, Heterodera glycines
MAVVVYGAESAGPKADQAMAAKQFNPSAFPAMPPELEKILPADVVQKLKAVHADMSLNIMQKQDKIDRIMSSLPGEVLDQIPAPPGFERLPDDVKNRLKQINRQTNKAWAD

SEQ ID NO: 160241 - protein, 172 aa, Heterodera glycines
QQAEEQKANEGCDPGEKERKERESLIEEAYALSQEANISLEQIIKRYTKCRNQFLERVADQISDQLQQDHSDSTDDISTNKHERKKRPIVFISPQLRKRVKIQQQLAEADSVNDGDDDSEQKQQKEKSPFTIPGGAEDDEMTDVHSQLEQKQQQQKQQQETEAKKSDGTTKT

SEQ ID NO: 160242 - protein, 216 aa, Heterodera glycines
  unsure (1)..(216): unsure at all Xaa locations
MDWAPWVEAVKQAHENDAGKLKPWQQRYLDWMILQARLCGYLTVKKNDKKAQLXTGSEFLVEFRYKPILLPISVICPFVPFYLFFRANHMQDNGVIVPIEHRYLLKSAPPRALALLSKGNDPENGPWEVTSKKHDALFAALNYCSAREIRQGLWQSYVTRSAFSSQMLNNSQNIEELRHNTEGFAKALGFSSTAHHRISSKMAGSPQTVRVFVDEL

SEQ ID NO: 160243 - protein, 119 aa, Heterodera glycines
KQIVEYLREYSTKVDCILTSGGTGFSKRDVTPEATKEVIERECPRIAVALLKKGLDITPFAALTRLTAGIAANCLIINLPGSPKAAREGFEVIEPILSHAIAIVKGDESETSVLHKRTA

SEQ ID NO: 160244 - protein, 106 aa, Heterodera glycines
TFFSMTVAFFSITATFFSMMATLFSMTATFSWRAFTISRSCFGSRYFHSYLFPFDDTWQQKFVQQPTGRERIRWAFCRDRGTISTEVERKALVAMLEIRGQFVLGY

SEQ ID NO: 160245 - protein, 91 aa, Heterodera glycines
NCAMSSKTTLSLILSHASHFSFLLGTGKVSPLVSAQSFASRIRSIKTFSSLSMFSTQYFSSVSWVKAEFTNFCRSIPRKKRIRKVHFFIFF

SEQ ID NO: 160246 - protein, 134 aa, Heterodera glycines
  unsure (1)..(134): unsure at all Xaa locations
VWEHPDVKWSSRRDIILDSCXSTNIQWFSIMNSLVIVIFLSGMVGMILLRTLHRDIARYNRLDEEEDAQEEFGWKLVHGDVFRPPRHALLLSVFVGTGSQVLLCAFITLAFARLGFLSPANRGSLMTFALVFLC

SEQ ID NO: 160247 - protein, 138 aa, Heterodera glycines
MPNIFKILLIVLLAVVSFRLSASTGDKKTANDGSGNNSSAGIGTKIKRIVTAGLLFTSLATGGAEAIGRSNAQGGNAAGLVPSHVTNRSMAPPPSPVQFEMGANRLEKMRAHLRELAEKMPVNESKRLSPSGPDPHHH

SEQ ID NO: 160248 - protein, 204 aa, Heterodera glycines
  unsure (1)..(204): unsure at all Xaa locations
KSRNSDANCTDLFDDGENEIELLQEATDKTDQLDLKLKNKKSKSVGSDHFFDVRSNQVAASANCAHLSFTDLNLSRPLLKSISEAGFQNPTPIQTACIPVALAGRDICASSATGTGKTAAFMLPILERLLFRPSRRTSVTRVLVLVPTRELAIQVFQVSRQXLAKYTQVEICLAAGGLDLNAQEAALRLGLXIVIATPGRLIDH

SEQ ID NO: 160249 - protein, 56 aa, Heterodera glycines
DVHIQAAQVAAIHFQSIKGNAAERISSINKHLHTIGALIFVSDHYAFSVVFISFIL

SEQ ID NO: 160250 - protein, 158 aa, Heterodera glycines
MSSPPSPKASLILEAQADFALKLLREVSTDDRSCIVSPFSAAVTLSMVYAGAKEKTGEEMGQLLANGAPESEVHKYFGALLKSITSGTNSSNTLETANKLYVGKGSKVKDAFKEQIEGNYGGQFETVDFLDGKGTAEKINKFVKEATHKKIRDLVTPD

SEQ ID NO: 160251 - protein, 223 aa, Heterodera glycines
MHAQPVPAESQLASGFEFGGSRLSAGSNQFGGISNMGNNSEAMHGKSFGGPSFKFNPLQGTGNNELLTFLDNLQSTLRSSGFNDQSVSEVMQAMQVLAKYNIMGLGLGLGVAAMAQMRNTESAMAQQNVLLGAAASNTPLQQQQQRYDIMSQSNITGSLLDSSQNIDQSIVGGSGGVLIDVMSQKKSGTNGTNTFANSVIKERVVDDGHTELDVPDNIVGAVL

SEQ ID NO: 160252 - protein, 141 aa, Heterodera glycines
LNFLPGVPNLPDPFVRILHFCNSEEGETIELPEFRIFVPDTYDLGILVLDQKTLPNSTVNFPVPENPRRRLQQAKRPTEVGTLDESNGKKGAEDGFVTVDAPKSHNAKGLHDLLLARLNGDQNERRFVVGDAIGGDGGSAG

SEQ ID NO: 160253 - protein, 140 aa, Heterodera glycines
VLKRVRFTEERNATERVKRSRTEAAEEEKRERLDDEEDGGPAETAEGMKTKRTKKHTLDSDEEDETEGYQRLDMDKVEGQEESTLEYEGHVKIMPFNMKDDLEEGHFDANGTFIFDKKQSVIKDAWLDNIEWDNVKNAVG

SEQ ID NO: 160254 - protein, 175 aa, Heterodera glycines
  unsure (1)..(175): unsure at all Xaa locations
ISLFRKPFTHYQITQNALLKXRFFYEFLLANDRQVAREVKDEYVDTTSKMFFSYFKAYVSRLFKFQMVDSATKSDLLGAEDVVKHPTTISALPSLFTSGKTHQTRSRATVFSLGHRQNLLLDDLLAPLIVPHVAQENNETFQFESLFRSVQYALVDHCSHEFLFICDFFMVNGQS

SEQ ID NO: 160255 - protein, 178 aa, Heterodera glycines
MAKEEYCFDAKAAAAAGQSRRPSTTASVLVQGDGQSSRFVDAIIRKVTQPPLQRFTDEITDEELKQLCKAATDVFRMQPTLVRIRPPVVVVGDIHGQFSDLQRIFTTHGPPPEQQYMFLGDYVDRGAHSMETIILLFCYKIKYPSNFMLLRGNHECSNINKAYGFYEEIDRRYPRPGA

SEQ ID NO: 160256 - protein, 167 aa, Heterodera glycines
LPSLLYSAPKGILLYGPNGCGKTLIARAIAKEVDAYFINFGTSLVDFVNGSSVTMKSLFTLAEKIQPCVIFIDEIDLLFHRNRNDFQLLKTQFLAQWDEFLRCNSNCNVIIIGATNRVLDLVLCRFSLKVHIPLPDEEAREKLLRKILANENLEADFNYAEVVEATQ

SEQ ID NO: 160257 - protein, 144 aa, Heterodera glycines
MATYLFLAAAAFGAGIYCWKTYLGPMLDQPKSDDEEKPKPEGGEEATTAGEEEKKAGSKGDKHKKKDKKGEGAAAAPAADKKEEKRKDKHKSKESGKSDDSKAGKKDKHGKKDKKGKKKDTTDASTVDEALGEQGAAETSQAEQ

SEQ ID NO: 160258 - protein, 50 aa, Heterodera glycines
WPTEMSWRKALDRQMSAELGSREVPHESRTEHNSQQFEVDDLAQDLRIKM

SEQ ID NO: 160259 - protein, 109 aa, Heterodera glycines
NPSSPFVRIPSPVHSSAAALLRLVPNIPLHNALSQILIPPSDQMRGICWLICPTKLTFFCTSLIRQTNNIYLTAEKNIIKFGRLSFFLFLEYRKDYPLGLKELKIRKFS

SEQ ID NO: 160260 - protein, 172 aa, Heterodera glycines
LEPLHSMTIKCSYFSVNAIASSYVSILLLNLSHARFSSFSTTFALEMFTFSAKFRPPIVGIITAIANSFRMLFIAFSISFCCSFFVRCFLRAFSHAKYLRPIQSPNGDQLKKVPKNLDQWSQLDGHWPFPFGENEKEFGTRKGIDEFGNRRNTFVALQKSCSLKMPKGSQKI

SEQ ID NO: 160261 - protein, 183 aa, Heterodera glycines
NYNKKARNSLNWTGKLIADELGQFVRAIRLAMGVFKDGTQMARFEDQLFPAKMISPDSTSLYMAHIRLERFCASEHFHVGKFGLATRQIANLLRAFTHRVSGIYSLERCSFLADSLFRLFTKFYECIKWHFRQSPNKSEIEKFGAAILKFGRFVCGTLREGDNAGSFCLPSSTTIGTELLLPS

SEQ ID NO: 160262 - protein, 218 aa, Heterodera glycines
  unsure (1)..(218): unsure at all Xaa locations
WWTAPELLRENNRXGTKEGDVFSFTIIYVEMVNRETVWNGTERDDDVDEILYRLKRTNNTIPHRPQLRPREDTNQSLVHLIRDYWAEVPAERPRMDMVRTMLKQMVQDGNQNLMDYVFGMLEQYASSLEQEVEERTKELVEERTKELVEEKRKSDILLNRMLPRQVADKLKLGEAVEPESFQMATIFFSDVVSFTTXAGKCTPLQVVNLLNGLYTAFD

SEQ ID NO: 160263 - protein, 60 aa, Heterodera glycines
PLHGCVKFLILNVTKRRLLAKKFPFFGCDANQLLLPPPPPAVNSHDIGLSFGVIHTFISP

SEQ ID NO: 160264 - protein, 173 aa, Heterodera glycines
KAQGVAFNSRFAKDNPPLSPRGVQQAEELSVEFRNISIDYCFTSPYERCVQTASKILEGRSTLINVEPGLIESFNLICDRSGVQKISFQTGKELAQRYTNINRQYEPMYLAPPEIEKSKGVHGCFPRVEDTFRKIVAKCYGDILIVSHQGPVAALQRMLTGSMEFGGSATVSK

SEQ ID NO: 160265 - protein, 55 aa, Heterodera glycines
REEKKLLARHLIFNRTVFIWTSSQNDRGRFVKLAEVAMNGRKNPLFMSMRICKNI

SEQ ID NO: 160266 - protein, 164 aa, Heterodera glycines
PKRTFGTSFDDDFKPNLSTAVDVNVQQKPVDKTSAVGDIEVKNNEIVQNGNQLSKESVSTVPYEQQHGQVIGQVKTVKYKALFEFNARSGDELSIQPGDLILVFEGHQSEPGWLAGQIRDKVGWFPASFAEPLSAAAAGPLLKRGGSLAGSPSGEPLAIIREEC

SEQ ID NO: 160267 - protein, 109 aa, Heterodera glycines
FLYLIKCFRSIFWIFFCQNSFIFFINFFFALSIFSFPWVQSSLILVFLTFSVYSSTINKNSFFEINSFTKKQKIHEKFAEFSRKKRTIKIFFFHFLEFHYYLIFIYLWN

SEQ ID NO: 160268 - protein, 97 aa, Heterodera glycines
ISDFLALNDAVNGNDGGVNVGSSSAELALNDEKSWANYRRRLATFDVASRIAKPKEISPVVCARHGWKNVGEEFLQCDDCGKVLYIKLPATKCPIAC

SEQ ID NO: 160269 - protein, 148 aa, Heterodera glycines
DFLFLIEKIRAKMEEICGTNNNYVDFIVPNSEVHLANFGAIENAHLSILIQNLIDVIRSINARQLVKEFGDKYLEEVMKFLDEAMAASNESLPLAKIVPVLCDAFAKIGTVSFGSIFHSLLSSTELHRFTLFVSECSKRDDLFDANLK

SEQ ID NO: 160270 - protein, 109 aa, Heterodera glycines
TFDAHSVGLRSKIQKRNNIIRALAGTTWGQSKEVLLTTYKAIDRSLLDYAAPIWSPQLADSNWSILRRCQNSALRTITGCVSITPTDHLHAETSILPVKDHNLVLSRQL

SEQ ID NO: 160271 - protein, 165 aa, Heterodera glycines; identical to SEQ ID NO: 160212

SEQ ID NO: 160272 - protein, 83 aa, Heterodera glycines
  unsure (1)..(83): unsure at all Xaa locations
HMTCKNLSCRFEFCWMCLGPWAPHVSRSGWYSCNRFDHDAAHRARDXQERSRAALKRYLHYYSRFTNHQNSLKLERKLFEKVS

SEQ ID NO: 160273 - protein, 186 aa, Heterodera glycines
  unsure (1)..(186): unsure at all Xaa locations
QKVPEPVFAFWLNRDPTSEFGGEITIGGTDQRRFVAPITYTPVTHKAYWQFKMDSISGGNGKLACQNGCQAIADTGTSLLAGPKNDIEKIQKHIGAIPLFHGEYMISCERIPTLPDVTINIGGKAYTXEGQGLCAENDQHGQKHMPFRFYGHXFAGTCRRTLDSWRCVYWSLLHGVXCGPKSCWFC

SEQ ID NO: 160274 - protein, 85 aa, Heterodera glycines
PDDGSLSAEQKMERIDSIICTLPENVIDQIPDPPEVAQLPADVRQRVKQIERQQGKSFSTKFEEIMKYVDTLPEGTKSAAKNIFH

SEQ ID NO: 160275 - protein, 70 aa, Heterodera glycines
WEMLIRRDAPRANVAMADAWRNVDGGGGNADDGRIDSQRRLGGAESEENTTEVCRVADGGAQCGIYVAER

SEQ ID NO: 160276 - protein, 192 aa, Heterodera glycines
PFLFLAELGEGSYSTVYLASERQTSRKFAVKMCLKKKIIKEKKVQQIFRERDILRLLSTPANACPFVVHLFCTFQDDESLFFVLSYAPKKDLMARLKKLQRFSVGQCQFAMAELFLALEHIHALDVIHRDVKPENILLREDGHILLSDFGCAKQIIAKRENVAEENGDKTDGQRADDGQKAEKSADSKSSKK

SEQ ID NO: 160277 - protein, 213 aa, Heterodera glycines
SEWHSYAAGLAEGSLTKLQISNHYSNTVKGICRDNKGYCRKLYRYLNANLEWISAQIDANPGDLYWRQVNLTFNQLTGIFDGYAMDSGKSFSPRVNFTITPIYMIQISGELIDLSILFKKVPRSKGEAVELAEAGHCSGLVKVAAGNSDLLMSHVAMSGFNTMNRIVKLYKFAYDPKDVPGFAVSFSGYPAALASADDFTLTSAGLLSIETTI

SEQ ID NO: 160278 - protein, 91 aa, Heterodera glycines
  unsure (1)..(91): unsure at all Xaa locations
MAKQCFVTVGSTRFDALVESLFRSDVLDALKKLKVECVTIQNGNGVIPKQIQSAILNQTQCIIDGITFHLFDYKASIREYXQSAELIVGHA

SEQ ID NO: 160279 - protein, 169 aa, Heterodera glycines
  unsure (1)..(169): unsure at all Xaa locations
TFVYNLSISLALYGLFLFYTATRDLLHPYNPVLKFLTVKSFIFLSFWQGILXIDRSNVSIDPIYDLDGNEIIGRGTVAAGYQNFFICIEMFFAAIALRFAFSVSAYIDAHTVTAGSDVRPMTLQSISSSLKETMNPRDIMQDAIHNFHPQYQQYTQVIIKISCFISLIF

SEQ ID NO: 160280 - protein, 189 aa, Heterodera glycines
NNWKLKFVECAEEIAEDQWHGLIIAKHQDGVISYESSHGFDDIFGTEQIKETEKYLEINLSKNAEPLGNELQEALSSAAFFDDFMPFVLAFEFGATFCAENGGTTKLCKEKCLSQSLVAPKTKAPFVGPTKFHRTTPRAVPKTTFGIVPKTEETFGFVPFARNVDHFGTNCTNIFFPAEVDKFLLNITA

SEQ ID NO: 160281 - protein, 178 aa, Heterodera glycines
MTLDFKYPNTDKAQWLTGEQLADMYKSFINDYPVVSIEDAFDQDDWENWSKLQAAIGIQLVGDDLTVTNPKRIQKAVQKKACNCLLLKVNQIGTVTESIEASKLARKSGWGVMVSHRSGETEDTFIADLVVGLATGQIKTGAPCRSERLAKYNRIMRIEEELGTDAVYAGKSFRSPQN

SEQ ID NO: 160282 - protein, 206 aa, Heterodera glycines
  unsure (1)..(206): unsure at all Xaa locations
MSSLLLSIFPIVFLVCCNAMPNFPCCPGSQQVVAVMSKYIDTFSSAADESTVCSTAKSTVDGIKNELSYRVGCPSGGEAQIVNEIDQQLKNIAKMEINYEDECPYNLGFARAMFDLAAAAAGHAGNGTEWQYMKVQFEQESQAIKAIGQEKNFEVTDVHFGVPSKGVSAHQNVPSPSHVIANPGQHXFGWPXERKKNRCHRTSIFE

SEQ ID NO: 160283 - protein, 153 aa, Heterodera glycines
RLIRLPIFPLPHTISSSKEWCPSSPQNHSSSSTNATNQQHPSQQHQMHLQQQQVQNAVAQLLRQQFPTSAPGIMGMNALLNAAGISGGQAFPNIGTFPVHQHQFDLQSLAAAAQPHHHQQQQQLSSALNLQALVGAGAVHQPPTPITSAAAPN

SEQ ID NO: 160284 - protein, 184 aa, Heterodera glycines
  unsure (1)..(184): unsure at all Xaa locations
XAYLXXGVLNDEXIXKHKGPPVFNKKERYRMVRGIKWVDKIVEAAPYVTTLKTLDDNNCDFCVHGDDITLTADGKDTYAEVKVFWRYRECSRTPGVSTTDLVGRMLLLTKTHHKSNERELDDVERDHALKLSTDQEDRSPWTCISHFLPSTQTIMQFSEGRAPTPEYRIVYVCGSFDLFHIGHL

SEQ ID NO: 160285 - protein, 89 aa, Heterodera glycines
AKREKPNAPMEREKKKKSGGEETNALPFPCSIVYKSLPFSPFRYSPTLQFLLAVSFCFPSDPSDEFAVPFLPSMTHPQKAINSLIFLLP

SEQ ID NO: 160286 - protein, 231 aa, Heterodera glycines
GLNHSTLGILRNRSINRIPIRIEECAENENGFADDYANYLFDSDQSDSDNAEEENEVSVQIQSQPIGGHRRKKTKSYRPIEIVDGFPLKRNMGAQKWRRVENTRLLTSFADTQDICFDGSDLIPETISAFSRLLRDEAKMKVWNDFLEKDESGQKKRLLQFEYEILMARDASKAQHSQQSVKNTDIKKSESQPHNKNGQPSSGGGKSSSDCFQRLDKKFRRLFAQTTERPI

SEQ ID NO: 160287 - protein, 106 aa, Heterodera glycines
ATSTSPSALETRQKAEVEVNEYLRDPKIKSRADPSLYWEVNSQKWPMIGDVVRKFLSPPATSSESERLFSTAGLISDDLRKSLLPENLAKLLFLHHNLLLTGFSIE

SEQ ID NO: 160288 - protein, 42 aa, Heterodera glycines
ELSSLCDFFLFDILTLTHFGLMLKYCASFCFSFLSNLWSGDE

SEQ ID NO: 160289 - protein, 195 aa, Heterodera glycines
GSGMCKAGFAGDDVPRAVFPSIVGRPRHQGVMVGMGQKDSYVGDEAQSKRGILTLKYPIEHGIVTNWDDMEKIWHHTFYNELRVAPEEHPVLLTEAPLNPKANREKMTQIMFETFNTPAMYVAIQAVLSLYASGRTTGIVLDSGDGVTHTEPIYEGYALPHAILRLDLAGRDLTDYLMKILTERGYSFTTTAERE

SEQ ID NO: 160290 - protein, 83 aa, Heterodera glycines
GSLVATRLFQKLRFAEKGGRLAWAFMGAIATGATIWCTHFVAMIAYQPGVDVTYEPGLTGVSLGIAICGSALALWFGSRQMRF

SEQ ID NO: 160291 - protein, 209 aa, Heterodera glycines
DFFVISLDPSVTNAMQSSVSSNEMIFGGNSTVCSEESHAMSEKVQTIASSIYREFETMIQKHGQESIKDLMSLVVNVLESLDTAYQEKDELIVDLEMLKDENGQLLNQYERERQMRKNQDQKSLEREEFMSETIRELESKVQSMASIVRMLELKAKNANDHAMRLEEREADQKIEYEKLHERYNELLRTHIEHVERTKFLMGSEMFDMA

SEQ ID NO: 160292 - protein, 196 aa, Heterodera glycines
WIICFSEAEKDDLEKWFGRNRWPFLTQISATNIRKIAESTGKLLVLSSIEGMDRHNASTESGSFFALIKRTVVEARVDAEIEQHFQFGWLDGTQIASGVVMDSLLLPNLVVLNYSSYEFYLSKDHPAQMTAKSLLLFLHSVRLGEVTVHGGRAWITRLRRMAYEITSNVYDMFQHQPILTVCLFGVPLAFFSIITY

SEQ ID NO: 160293 - protein, 97 aa, Heterodera glycines
LWDGHFDENDSDRMAGKALEWLSYHLKLAKNDETNYDETLTRVIRLLGLSIQRKWTEAKSLAEEMFITVAPSDNARQMIYSSMEQMQQFLNFDEHIE

SEQ ID NO: 160294 - protein, 87 aa, Heterodera glycines
RVKVRVSAISVVLLGVDLRRDIARNACWGYVGTMSEDEKLQERRRMVRPPTGGTAAGRSMGTKMKTPDTKSMSSQERIKRQLPSLVK

SEQ ID NO: 160295 - protein, 175 aa, Heterodera glycines
MADDIPPPPAVAADGGDVVVDLEQHVRQLIMSIGQGSEDAVHELSILIESFNQEQLVDFLEIMARMYVESGVSVDMPGGQGINMLMVAASSGRVDFARYLLAHGATVGHLDATGSVFPLMLAAESGELEVCRLLVEEWAAEVNQQAIDGTTPLMSASSEGRLDVVIYLIDHGVEI

SEQ ID NO: 160296 - protein, 235 aa, Heterodera glycines
PTTGLTPAESVRRSQISALVEPKQPQQQQQDINNGAGDEHGGVLRRSISVLSDNWYDWVEGNQTDKAGLSNQQQNVIVHQSVNSTIDADEHGISDEASPVASLSTIDLGRVYTTVGTVMESLLVNFAHLWQYRFFRVAFVLLSIYFCLGFLERCAVAMTAACVRWAWPPVHFMLGSSRGTLFYLTDWFAWMDDFLSSWVCDMANRYCHQYDVMCDCQCSFVSRTQRAALLGGRRF

SEQ ID NO: 160297 - protein, 126 aa, Heterodera glycines
IHLADENPVHIRHIRRASQPNGHREWSSPIFLTFHLFRWSNPQFVPHKPRQPVLVQLPSRIRLPFSVHSPPSISHPRVHRCGCCCCCQPSLPREIRAPIVPRMGQRRRCHRRTPRDDAPRRSRTTS

SEQ ID NO: 160298 - protein, 87 aa, Heterodera glycines
FCLFCFFLPTFHGSPFLLPLTHLIVRRHKLIIRAPKKSLILATLPRRRRTANGRRSRAKKRRPKAAAAVHRRRRKKKNTKKKKNKKK

SEQ ID NO: 160299 - protein, 182 aa, Heterodera glycines; identical to SEQ ID NO: 158791

SEQ ID NO: 160300 - protein, 188 aa, Heterodera glycines
SFAGTLLLEGGEEFSPDAQCAQQWKKPNESLFVVQQLARQGLGPRQILATLYPRYCSTISDDIPDEWIMQLLRELCEHRTRQKLSNYNTFEDAVELFRKSKRILVITGAGVSVSCGIPDFRSENGVYARLKKDFPELPTPTAMFDIDFFRQNPRPFYNFAREIFPGQFRPSLSHMFIKFLDDEKKLLR

SEQ ID NO: 160301 - protein, 172 aa, Heterodera glycines
ENRLSIRLYFAKIMAIFTKIFNFIKTSTEKENKQKYLLVFVEIWNKICPRIHAELQQNDISSTVGILYNIWRGIASRYNQIPLGIFQGYEPIRVLSSDNGLLLLDEKGTYSSNVIRAELFEDHVVNMLRLYEQQSEGNSFGLLLRRCKLDGIAYKHLDKFANGNEFEKLRAK

SEQ ID NO: 160302 - protein, 140 aa, Heterodera glycines
  unsure (1)..(140): unsure at all Xaa locations
KKKRGTIRKXEEEEXDEIFXNGTXKRDNRPDTDHDYAGTRQLATAKGATGKHQRQKGGGGTAKEPKKKTALVNGTDSVVRSSARPHRPTKRFVFETNESFIRGTSKVRPTSPRKHGKKSTAEGGSEGEESEDDGKEDSVE

SEQ ID NO: 160303 - protein, 125 aa, Heterodera glycines
LKIVDFQAVCRMVRARSKHCVVVVDNTFMTPYLQRPLELGADVAVQSLTKYINGHADVLMGTVVTNKEQLDQHIYAQQIYAGAVPSAFDAFLVLHGIKTLPLRMRQHVENALAIGRWLEKDPRVE

SEQ ID NO: 160304 - protein, 210 aa, Heterodera glycines
AEIISYLSPSDLALSAAGVSRLWRSLSEDKLLWAGKCRQHSINEMFPPNICRKENWARSDTGGESSSELANIYNDSSRAKSVAFPPPNPSPMPLCLHRSRWKAVFLRSLRVSNNWKLRRPTAVCQLRGHDEHVITCLKLRGDLIVTGSDDCTLRVWSAATGTCVHVLNGHIGGVWALQLSQDGKIAVSGSTDRTVRVWDTEKGTLIHCLN

SEQ ID NO: 160305 - protein, 80 aa, Heterodera glycines
MDKMRVIVGGEMGKRNTQTENSRFDQAEKAKANASAKGIHSKGSRAIPICSASRNTPSIARFVAWLSLSHSKHGKVHCLH

SEQ ID NO: 160306 - protein, 109 aa, Heterodera glycines
IAGAVQSIADSVTKAKFVGTTKLGIDECVLFQILQSLRSLVLSPGGRHLTNETLCEILQCCFRIGLESSLPELLRMAAENALAEMCRYLFASIQTFEQDIRPGLKELMK

SEQ ID NO: 160307 - protein, 176 aa, Heterodera glycines
TSSPDIPLIFQSVDRDRSGQISADELQQALSNGTWKPFNPETCRMMISMFDSNNDGGINFQEFGALWEYINDWTRTFRTFDRDNSGNIDRDELVNALTQFGYRLSGTFYDMLMRKFDRTQSGRINFDDFIQLCVVLQTLTTAFREKDTDRDGWIRIYYEEFLAMVFSLKMSMMAKQ

SEQ ID NO: 160308 - protein, 134 aa, Heterodera glycines
  unsure (1)..(134): unsure at all Xaa locations
LILLIVLLAVVSFRLSASTGDKKXTANDGSGNNSSAGIGTKIKRIVTAGLLFTSLATGGAEAIGRSNAQGGNAAGLVPSHVTNRSMAPPPPPVQFEMGANRLEKMRAHLRELAEKMPVNESKRLSPSGPDPHHH

SEQ ID NO: 160309 - protein, 194 aa, Heterodera glycines
  unsure (1)..(194): unsure at all Xaa locations
TCANLVRKPLKAEEGGQGEEMSYDIEMRIMATAGLVGIPNVGKSTLLRAISRAKPKVAAYPFTTLSPSVGMVQYGDFFQLAVADIPGLVQGAHRNEGLGFSFLRHIVRCESXMTLYDDELSKKEAAIVINKTDLLDGEMVKSAIVSMFPEQSVFFVSGRHRLGIEPLLMFLREKHERFLKEREAKMEIEREQLM

SEQ ID NO: 160310 - protein, 90 aa, Heterodera glycines
KCPLLPLHFVFFVRPFSSELPFCGAQLADVQALQTHWLQQHVAQLARPHVCVDCDAGFTTAEALRAHREMQHAEKTARKEQRISSRNEVK

SEQ ID NO: 160311 - protein, 75 aa, Heterodera glycines
MNFGPSFFQVGVISAFNFPAAVYGWNAALALVCGNSVLWKPSPSTPLTSIAITRLVGEVLSKNGLSPDICSLICG

SEQ ID NO: 160312 - protein, 34 aa, Heterodera glycines
  unsure (1)..(34): unsure at all Xaa locations
CCLISSGCSSXAGTFHPSDXXLDRHSPIDRGQHL

SEQ ID NO: 160313 - protein, 156 aa, Heterodera glycines
RVQVPQLHFLLVIPHGAHIASPNCLALHPIDAPVVRDHCRVHPRTLCAALRLLLLLVVFAAAALRLVALSLGHFLCIFQCLFICVQIRQSKHQQFVVLCSVSQQQAKRSLENRSDCRPKSRTKHQNLNTDSSFRMCETTNTPSHRIPILRSPSKFG

SEQ ID NO: 160314 - protein, 228 aa, Heterodera glycines
FVDKMCDEEVAALVVDNGSGMCKAGFAGDDAPRAVFPSIVGRPRHQGVMVGMGQKDSYVGDEAQSKRGILTLKYPIEHGIVTNWDDMEKIWHHTFYNELRVAPEEHPVLLTEAPLNPKANREKMTQIMFETFNTPAMYVAIQAVLSLYASGRTTGIVLDSGDGVTHTVPIYEGYALPHAILRLDLAGRDLTDYLMKILTERGYSFTTTAEREIVRDIKEKLCYVALDF

SEQ ID NO: 160315 - protein, 132 aa, Heterodera glycines
QQHRTKMARRRRKKEPRKQSYKLYVRRVLKEVHPGKEISMRALNIMNSFVIDALDRIATEATRMAHNDRRKTITLRDMEFSVRLCLPDVMAKDANQKAQKTVTKFYAAKVRDRMRRTEMRRGEFAMMQMAAL

SEQ ID NO: 160316 - protein, 64 aa, Heterodera glycines
LSAARATSAANIGFAIGDFQIHVQPEMPEIINFVVPELIPLLKHTMKSLNRIFVFFEELLSCRF

SEQ ID NO: 160317 - protein, 273 aa, Heterodera glycines
  unsure (1)..(273): unsure at all Xaa locations
LLAFLIGPSIGAFFSXVPAESGEFDPSPALLAIALTLAELALLVFFLPETLAKAKNDDCHKQSGHSLRHLLSPRALFSFDFLSPASASSPPVSVPLLQKYSRVYFLFMLLFSAMEFTLGFLTHLRFNYSSMQQGRLYLFSGFCMLVIQGFVVRRIPSTLKAQSHGALVGLVSIVPAYFVIAFAHCQNGIXTALFMGLLLFSVASATVVPFLTTLFSNQCDQSAKGACLGTFRSVGALARACGPLVGALLFWLLGPTLSYCLGAIGLIAPGIIF

SEQ ID NO: 160318 - protein, 145 aa, Heterodera glycines
  unsure (1)..(145): unsure at all Xaa locations
MALSALLLLLPLLLNVQNIPDESVQSDMKAVYSAISSPEQWKNSQNSLASLESQLTEPQRALAKMHWELETIQKEKPEAPPQFDLGLFSEALEVMVEMDEEAKEVKLRKDKLIXMGRRRGSKKKLKEKMTEEDTVPEVRVNENGK

SEQ ID NO: 160319 - protein, 142 aa, Heterodera glycines
MEGTTSPPYFLRSRTRKEGPAVLELIEKLQQANDKVDQQIAEEHQLRNEVLQMAPRAMKKYLGTRFERLMNAKLEFPQMADSERKSEAELAKAKEELRQLKLQAVKEAEEQKRELEEAQRMERELKERVNRKLAKLRALEEM

SEQ ID NO: 160320 - protein, 81 aa, Heterodera glycines
  unsure (1)..(81): unsure at all Xaa locations
GHRHXFQXPRISSHXXEGYFAQHXTGGTSXDVXLPAPTIGTKGREGKXAQISRGNRXGTXFXRNKFCXELELARKAYHGXL

SEQ ID NO: 160321 - protein, 238 aa, Heterodera glycines
KCHNNWREKLRSLQEYGDFKQFLRLCHLEPGYGYELLAPVHSDFPAEGSICELQVGRRQLVLIYPDDEGCTVRFALPSKRIRVWRVSHSEHQLLAQMSFQLEYLRQPDEFGLITLRTDQSVLLSLFLQSIADEILQDQQYKTESPFKFVDDAISLKAASDGSSAVASSSIVAGVGDDQKSVKSCSNNSSSSNHANSSSCALDALVNGAGGDGTEYRIKLISYQMPFLDHENFEDVLDA

SEQ ID NO: 160322 - protein, 221 aa, Heterodera glycines
MGNEKGIPIAEPEIVAFNSPDNSDREWMTMFERCVNKHIQFIMLVDEKRKDTHGLLKLSEAMHKVTTQHVTLEKANDVVRKNQRQTLENILNKLNMKNFGLNYVPVMEPSACRRFSLENGNVLVIGYDVNHPAPMPQQTRRLLASQGESQLSSLDPSCVGICANMAPDFNAFVGDYFFQESRREAIDQMQLVDRMKWILQNVEKHRPGKSRPEYIFIFRDG

SEQ ID NO: 160323 - protein, 197 aa, Heterodera glycines
NSLVNTIRAVPPVPFRLAWSRFTSRVSSESSQFRPADDSRQLIEDNHFLLTIVISNATNHESISYKQDGGRFDSSQFTLKFHANTLYKIYVKTKPAQQFLSLNIAGNVLSLAPIEGGSGEYVAIWNTADKEPTKKGTRQDIEFVLSAKDKTLSKNLQVKFYPHNDTHAGWGQKLDQITWRCSTNDIGHVFVLEEQAL

SEQ ID NO: 160324 - protein, 157 aa, Heterodera glycines
MRGGGEGGGIFLSVIVRLSKKGGFQMLFSPNSVLLLLLIVLPFSLSFILIPQNVRQISPALSSRPFRRFGHFSVIAKRNPIVLIPGDGGSRLKANLTGKPSVVHYFCQRQTNDFFALWLDLQQFGPFVIDCWADNMRLNFNRTSGRAQDLEGVKVRV

SEQ ID NO: 160325 - protein, 190 aa, Heterodera glycines
SPSFICTNNNLFAVNSVNPNAHSQQMAMETLGGGEERNKMETEMDVSVGEESPHQQRFLEECLNLSQKFLKEMSKDEEQQQNVINGEANDGKSDVAKELLICHSSSPTASPQPSGCFLTSANVVAESDGILREQNRSGEADGQSTAATTPNASRRPSNSSAAAVSGSVEDELAKIKVVLRQHERRIRLLE

SEQ ID NO: 160326 - protein, 216 aa, Heterodera glycines
KIGKRFGVGKGTIGKLKFVECAEEIAEDQWHGLIIAKHQDGVISYESSHGFDDIFGTEQIKETEKYLEINLSKNAEPLGNELQEALSSAAFFDDFMPFVLAFEFGATFCAENGGTTKLCKEKCLSQSLVAPKTKAPFVGPTKFHRTTPRAVPKTTFGIVPKTEETFGFVPFARNVDHFGTNCTNIFFPAEVDKFLLNITARPYEIACNDYEKRAKI

SEQ ID NO: 160327 - protein, 213 aa, Heterodera glycines
LLEPAPSSVDYFFWQSDEASSSSVCAEERRQMYEQYGGQKQMRRTENDKNTEQCQRNAQRNIGERMPTMDDNNDQQPSMLRRMPLQSMENASLLKSSEFSSSEHFSACKKEPIEQSEVIAPKNRLGPPAHWRVEETEKRQKRSAKRAPLPRQTTYQIDEHGRQVVVVRNDDSYRSNDEDDERTENAERGVPPIARNGFVKPAYSYSCLIGLSL

SEQ ID NO: 160328 - protein, 181 aa, Heterodera glycines
RGKIDLDFKNPNTDKAQWLTGEQLADMYKSFINDYPVVSIEDAFDQDDWENWSKLQAAIGIQLVGDDLTVTNPKRIQKAVQKKACNCLLLKVNQIGTVTESIEASKLARKSGWGVMVSHRSGETEDTFIADLVVGLATGQIKTGAPCRSERLAKYNRIMRIEEELGTDAVYAGKSFRSPQN

SEQ ID NO: 160329 - protein, 120 aa, Heterodera glycines
  unsure (1)..(120): unsure at all Xaa locations
CLLCCSHLPIVFLVCCNAMPNFPCCPGSQQVVAVMSKYIDTFSSAADESTVCSTAKSTVDGIKNELSYRVGCPSGGEAQIVNEIDQQLKNIAKMEINYEDECPYNLGXARAMFDLAAAAA

SEQ ID NO: 160330 - protein, 170 aa, Heterodera glycines
MQNSLADVAGSAPQNVQVGSAVPSLPLTANSFANFPTTTHNQQQQRMVPAPPQNHSSSSTNATNQQHPSQQHQMHLQQQQVQNAVAQLLRQQFPTSAPGIMGMNALLNAAGISGGQAFPNIGTFPVHQHQFDLQSLAAAAQPHHHQQQQQLSSALNLQALVGAGAVHQPP

SEQ ID NO: 160331 - protein, 196 aa, Heterodera glycines
  unsure (1)..(196): unsure at all Xaa locations
MGAYLVVGVXNDEEIGKHKGPPVFNEKERYRMVRGIKWVDEIVEAAPYVTTLKTLDENNCDFCVHGDDITLTADGKDTYAEVKEAGRYRECSRTPGVSTTDLVGRMLLLTKTHHKSNERELDDVERDHARKLSTDQEARSPWTCISRFLPSTQTIMQFSEGRAPTPEDRIVYVCGSFDLFHIGHLCFLEEARRLGD

SEQ ID NO: 160332 - protein, 54 aa, Heterodera glycines
  unsure (1)..(54): unsure at all Xaa locations
FFFFXXXXFFFPRLLFLKTAVLVLKRTPPLYLLATLYHSNETAGDKPEEGGDDV

SEQ ID NO: 160333 - protein, 182 aa, Heterodera glycines
YSLDTRGAGGLSPPWAGVGMDFGPYLKLTAMLIVLSTFGLGLSLAHMKKMLQIGKELAKQNETTKTASATFVGQDNLRTLRAFTGCQAGLSVLSIYVAASLAFMKFWYVRTHLVQEFSCSLMAITLAVVQFFVLRMANGGGLLLIKGIVLANACQIVQELNMSLSAFYTFFYAGRIYDAVEE

SEQ ID NO: 160334 - protein, 97 aa, Heterodera glycines
RPHLKRRPRRKARRRRRLMCPRLKQKGKSRTHRWKGRKRRKAAERRQMLYLFLAQLCTNPSPFPHFAIPRLSNFFWLLAFAFRVILPMNSPCLFFRQ

SEQ ID NO: 160335 - protein, 209 aa, Heterodera glycines
MGILRNRSINRIPIRIEECAENENGFADDYANYLFDSDQSDSDNAEEENEVSVQIQSQPIGGHRRKKTKSYRPIEIVDGFPLKRNMGAQKWRRVENTRLLTSFADTQDICFDGSDLIPETISAFSRLLRDEAKMKVWNDFLEKDESGQKKRLLQFEYEILMARDASKAQHSQQSVKNTDIKKSESQPHNKNGQPSSGGGKSSSDCFQRL

SEQ ID NO: 160336 - protein, 106 aa, Heterodera glycines; identical to SEQ ID NO: 160287

SEQ ID NO: 160337 - protein, 57 aa, Heterodera glycines
YSKDHGAGSCQDSPRVRNILFGLKIVVLKKNAILRPRFLAIFNYSAFMCSHCTILNS

SEQ ID NO: 160338 - protein, 96 aa, Heterodera glycines
  unsure (1)..(96): unsure at all Xaa locations
LRLVFIAAILCLLGSLVXTRLFQKLRFAEKGGRLAWAFMGAIATGATIWCTHFVAMIAYQPGVDVTYEPGLTGVSLGIAICGSALALWFGSRQMRF

SEQ ID NO: 160339 - protein, 215 aa, Heterodera glycines
  unsure (1)..(215): unsure at all Xaa locations
FSDIFCFFLAPSVTNAMQSSVSSNEMIFGGNSTVCSEESHAMSEKVQTIASSIYREFXTMIQKHGQESIKDLMSLVVNVLESLDTAYQEKDELIVDLEMLKDENGQLLNQYERERQMRKNQDQKSLEREEFMSETIRELESKVQSMASIVRMLELKAKNANDHAMRLEEREADQKIEYEKLHERYNELLRTHIEHVERTKFLMGSEMFDMAQSLP

SEQ ID NO: 160340 - protein, 44 aa, Heterodera glycines
GAARDNEMEDEELKVKAVVEETTTNEQGKTETNVEQSEKEGPMN

SEQ ID NO: 160341 - protein, 215 aa, Heterodera glycines
EELPGNETRILAVKDVDYLQIFEAEKDDLEKWFGRNRWPFLTQISATNIRKIAESTGKLLVLSSIEGMDRHNASTESGSFFALIKRTVVEARVDAEIEQHFQFGWLDGTQIASGVVMDSLLLPNLVVLNYSSYEFYLSKDHPAQMTAKSLLLFLHSVRLGEVTVHGGRAWITRLRRMAYEITSNVYDMFQHQPILTVCLFGVPLAFFSIITYSIC

SEQ ID NO: 160342 - protein, 148 aa, Heterodera glycines
LNEENVRLFRYPFLKNPFWDGHFDENDSDRMAGKALEWLSYHLKLAKNDETNYDETLTRVIRLLGLSIQRKWTEAKSLAEEMFITVAPSDNARQMIYSSMEQMQQFLNFDEQIEAAEKQTEREKDDQNSEESEKMALKKLFEQKKCRI

SEQ ID NO: 160343 - protein, 181 aa, Heterodera glycines
MADDIPPPPAVAADGGDVVVDLEQHVRQLIMSIGQGSEDAVHELSILIESFNQEQLVDFLEIMARMYVESGVSVDMPGGQGINMLMVAASSGRVDFARYLLAHGATVGHLDATGSVFPLMLAAESGELEVCRLLVEEWAAEVNQQAIDGTTPLMSASSEGRLDVVIYLIDHGVEIQHANAE

SEQ ID NO: 160344 - protein, 229 aa, Heterodera glycines
NEQNEVQSTTGLTPAEAVRRSQISALVEPKQPQQQQQDINNGAGDEHGGVLRRSISVLSDNWYDWVEGNQTDKAGLSNQQQNVIVHQSVNSTIDADEHGISDEASPVASLSTIDLGRVYTTVGTVMESLLVNFAHLWQYRFFRVAFVLLSIYFCLGFLERCAVAMTAACVRWAWPPVHFMLGSSRGTLFYLTDWFAWMDDFLSSWVCDMANRYCHQYDVMCDCQCSFVS

SEQ ID NO: 160345 - protein, 126 aa, Heterodera glycines; identical to SEQ ID NO: 160297

SEQ ID NO: 160346 - protein, 101 aa, Heterodera glycines
RSFFAMNFPSIFSVLSLLLLFADFSWLAVSSPTDPSYRTKAQIDHSGTKKVVNSRHSPAPAPHSQRKEKQGKKEKAKSSSSSSSAEEEEKKHKKKKKKKKK

SEQ ID NO: 160347 - protein, 143 aa, Heterodera glycines
MASSFCSSIISIVAIVCLLCKCCFSAPHPCCPGSQHVVSMMKDHTGTFSASMPKSSLCMSAERVAAAVENQLKTIWCPGNGSQTLINEINATQSSSDECARSLGFVRAMFEIAASAASHAGANADLAVQFREQVGTIDSNCAA

SEQ ID NO: 160348 - protein, 189 aa, Heterodera glycines
VAVCGPQLARQGLGPRQILATLYPRYCSTISDDIPDEWIMQLLRELCEHRTRQKLSNYNTFEDAVELFRKSKRILVITGAGVSVSCGIPDFRSENGVYARLKKDFPELPTPTAMFDIDFFRQNPRPFYNFAREIFPGQFRPSLSHMFIKFLDDEKKLLRNYTQNIDTLERIAGISNLVECHGSFARATC

SEQ ID NO: 160349 - protein, 188 aa, Heterodera glycines
STVPSDAENRLSIRLYFAKIMAIFTKIFNFIKTSTEKENKQKYLLVFVEIWNKICPRIHAELQQNDISSTVGILYNIWRGIASRYNQIPLGIFQGYEPIRVLSSDNGLLLLDEKGTYSSNVIRAELFEDHVVNMLRLYEQQSEGNSFGLLLRRCKLDGIAYKHLDKFANGNEFEKLRAKYPKLKELFR

SEQ ID NO: 160350 - protein, 196 aa, Heterodera glycines
QLKKFPSLTDAFKKKRGNILNFEEEEFDEIISNGTSKRDNSPYTDHDYAGTRQLATAKGATGKHQRQKGGGGTAKEPKKKTALVNGTDSVVRSSARPHRPTKRFVEETNESFIRGTSKVRRTSPRKHGKKSTAEGGSEGEESEDDGKEYSVEKVFKKRVKGGKMEYFVKWAGYDDGWNTWEPRESLKHLEVLKQYE

SEQ ID NO: 160351 - protein, 169 aa, Heterodera glycines
  unsure (1)..(169): unsure at all Xaa locations
MVLFETPXNPLLKIVDIEAVCRMVRARSKDCVVVVDNTFMTPYFQRPLELGADVTVQSLTKYINGHTDVLMGTVVTNKEHLDQHIYAQQIYAGAVPSAFDAFLVLHGIKTLPLRMRQHMENALAIGRWLEKDPRVEKVLYPDLESYPQHQIHKKQSIGMSGMLSFYIRT

SEQ ID NO: 160352 - protein, 211 aa, Heterodera glycines
  unsure (1)..(211): unsure at all Xaa locations
VFGRNANDRGRFVXLAEVAMNGRKNRLFMSMRICKNIKELLGKFEGHVPASEEVNGKAENVTIQSESIVTERRRYYIDLRENRRGSFLRITQLETHSGIRNSVALPFEGIGQLHDALDSILEEYGEGFIEEEAELPHSQMIRTDGKSFFFDPGHNSRGDFLKITELKSFMGVRNSVVLSIRAIPQFTQVLSKLYDDSQELRAVEEVNVNNV

SEQ ID NO: 160353 - protein, 208 aa, Heterodera glycines
  unsure (1)..(208): unsure at all Xaa locations
DASGRSPALTVPTSRAAAYFGMFAVHPFFQXSGLGKRLLTVAERYARIVWGSDEMHLDVGWSLAELKLGMGRLQRYYKRRGFLSTGILRPFNGAVARFITVDRNDLWIELMVKDIRGALDDIGGDPEKRMKRVNSRGRLAREADKDDGGRDPQKRMERVRSFGRLTIEADRDDIGRDAQKRMERVRSLWRLAREADKSDESKGKDGEE

SEQ ID NO: 160354 - protein, 92 aa, Heterodera glycines
SFLVPAAAAAAAASLVAASDRVSVKGYTADAKGSLDCKFGSGDILKKCGTCAQSITECASSNPNKTEEICISEIASFAGDCGGCAVDILECL

SEQ ID NO: 160355 - protein, 211 aa, Heterodera glycines
RAFAENYRYLSPSDLALSAAGVSRLWRSLSEDKLLWAGKCRQHSINEMFPPNICRKENWARSDTGGESSSELANIYNDSSRAKSVAFPPPNPSPMPLCLHRSRWKAVFLRSLRVSNNWKLRRPTAVCQLRGHDEHVITCLKLRGDLIVTGSDDCTLRVWSAATGTCVHVLNGHIGGVWALQLSQDGKIAVSGSTDRTVRVWDTEKGTLIHC

SEQ ID NO: 160356 - protein, 191 aa, Heterodera glycines
HPPMTRKPRQNDDENHGKRMVQSEPRKPFQRQYQQHQTPASAIKSILKTPNGGDINSNSASAATGGRYQRKHFGPGQKRRVSFGSQSESNDSAIRKHKMPKVEVSTEQMTTPKVGQQKFQTKMNGSASSGKVINGPQKKLAEEQNSVSPVRSNMPKSGGNANIGGGAAPTPIPSPKNQKQNQQKQPSKAGQ

SEQ ID NO: 160357 - protein, 99 aa, Heterodera glycines
MFSRPVSSTSACTQWESSRGGIWAKGAIVQKTAGLIRQKRQKPMHQAKRNSLQRVKGNAHLLVPRATLRQSPVSSRGFPSPAANMAKCTVCTSLGPGSD

SEQ ID NO: 160358 - protein, 152 aa, Heterodera glycines
MAIPLLGEGSVGSAKSSPRKAKAAEGGGTLWRKHSPAMVLRRRKTSSASLRTSASTDVLQISQMQKELDESEVRPSSIGKIFRFNTGNWHLAFVGLIGCSISGLAVPFFALVYAQIFSVFSEPLDQLQSDALFWAAMFLLVGFLNAFGFFIS

SEQ ID NO: 160359 - protein, 110 aa, Heterodera glycines
SNRGAVQSIADSVTKAKFVGTTKLGIDECVLFQILQSLRSLVLSPGGRHLTNETLCEILQCCFRIGLESSLPELLRMAAENALAEMCRYLFASIQTFEQDIRPGLKELMK

SEQ ID NO: 160360 - protein, 199 aa, Heterodera glycines
  unsure (1)..(199): unsure at all Xaa locations
NAPNGLTILLLISVVIGHSLANLGPTIKHNPHFKAVQTAHHLHDAIAKKHEAEVTQIICSISNEQRQALALEFKKQFGTDLIAMLKKEFKSDFEELIISLMQTPAVYDANQMRAALSGSNEAVLIEILATRTNRQITALKQAYERLDRRHQHNQLEEDIKAKTKXTLPKSVGVFAQLLSRRKXPASIVLAHDEAMKLFR

SEQ ID NO: 160361 - protein, 178 aa, Heterodera glycines
  unsure (1)..(178): unsure at all Xaa locations
MVTSSPDIQLIFQSVDRDRSGQISADELNRXLSNGTWKPFNPETCRMMISMFDSNNDGGINFQEFGALWEYINDWTRTFRTFDRDNSGNIDRDELVNAFTQFGYRLSGTFYDMLMRKFDRTQSGRINFDDFIQLCVVLQTLTTAFREKDTDRDGWIRIYYEEFLAMVFSLKMSMMAKQ

SEQ ID NO: 160362 - protein, 139 aa, Heterodera glycines
  unsure (1)..(139): unsure at all Xaa locations
MPNIFKILLIVLLAVVSFRLSASTGDKKXTANDGSGNNSSAGIGTKIKRIVTAGLLFTSLATGGAEAIGRSNAQGGNAAGLVPSHVTNRSMAPPPPPVQFEMGANRLEKMRAHLRELAEKMPVNESKRLSPSGPDPHHH

SEQ ID NO: 160363 - protein, 196 aa, Heterodera glycines
  unsure (1)..(196): unsure at all Xaa locations
ARGGAGGHGNAFYVSNLVRKPLKAEEGGQGEEMSYDIEMRIMATAGLVGIPNVGKSTLLRAISRAKPKVAAYPFTTLSPSVGMVQYGDFFQLAVADIPGLVQGAHRNEGLGFSFLRHIVRCESXMTLYDDELSKKEAAIVINKTDLLDGEMVKSAIVSMFPEQSVFFVSGRHRLGIEPLLMFLREKHERFLKEREA

SEQ ID NO: 160364 - protein, 101 aa, Heterodera glycines
AADKCPLLPLHFVFFVRPFSSELPILRCSVGGCPSSPNPLAAAARGAVGPSARLRRLRRRLHHRGSVACPQGNATRGKNGAEGTANFEQKRSEMRPKISTK

SEQ ID NO: 160365 - protein, 125 aa, Heterodera glycines
MNFGPSFFQVGVISAFNFPAAVYGWNAALALVCGNSVLWKPSPSTPLTSIAITRLVGEVLSKNGLSPDICSLICGGGDVGMCLVKDPRVNLLSFTGSTEVGRVVGQHVQARFGKLLLELGGNNAI

SEQ ID NO: 160366 - protein, 111 aa, Heterodera glycines
MKCRRMEEQPDEIRQQAITEFIGGCPPEFTQILAHIDGLQLEDRPNYEMIETMLREHLTRSRVPEHPYDWEVGRRNAMAQAQSEAARRKKDNTKEGGGGKNNTQGMSPALV

SEQ ID NO: 160367 - protein, 63 aa, Heterodera glycines
  unsure (1)..(63): unsure at all Xaa locations
CRRIRFLMLHTQKNEDGIXQFFQEIYEMYIKFSMNPFYRQDTPIRSPSFEQKAAMYGRKFLGV

SEQ ID NO: 160368 - protein, 195 aa, Heterodera glycines
  unsure (1)..(195): unsure at all Xaa locations
AENGRGQKGRXQSPVPRPXLTEAADNVNKAVDDLSXLNRQKHXKNAAEATAEKTPEEXGKSIERSGRKRRKRTAEDGCQQNFGGKSEKRRGIGKRSENENGNTFXGQQKGQRRVDFDNXRQKDDFGREGEADGRADSQNVGQHEEGAESEQQCRRRRLRQVVLRRRRAGGGHGGQSMINQSDRRIRHCCVMKCSQ

SEQ ID NO: 160369 - protein, 199 aa, Heterodera glycines
LLVIPHGAHIASPNCLALHPIDAPVVRDHCRVHPRTLCAALRLLLLLVVFAAAALRLVALSLGHFLCIFQCLFICVQIRQSKHQQFVVLCSVSQQQAKRSLENRSDCRPKSRTKHQNLNTDSSFRMCKQQIRLLIVYQFFARLQNSANSRHINFLFSRLLLIHEFNCSIFSGFHLSFFHRSIKIAKTKQKNKPQQSRIP

SEQ ID NO: 160370 - protein, 143 aa, Heterodera glycines
YSFAPLTTAPFSAHRTKMARRRRKKEPRKQSYKLYVRRVLKEVHPGKEISMRALNIMNSFVIDALDRIATEATRMAHNDRRKTITLRDMEFSVRLCLPDVMAKDANQKAQKTVTKFYAAKVRDRMRRTEMRRGEFAMMQMAAL

SEQ ID NO: 160371 - protein, 170 aa, Heterodera glycines
SRPLLFIAALLFLFGCCRADGNVVHLSSLNCATKDGGIDGFKAVDDGLILDSSSVTADTSDLPLIGFQKNGKEDLIFKLFVRDGGCVSKANFFTNGQPCTLGESEDVTESDKCPGEGGTSSCTSHEVTCTGIGMANVAEESNGHAFKANLANLTKLTNPCAQWKAHFGGV

SEQ ID NO: 160372 - protein, 152 aa, Heterodera glycines
MNFLNEQIREYSERTKDREEFKGIIEARNKLETAIKPLHGVMESDMASSSLETSMTNSANIARQALEELPVKQVRQMEQIAEEGKSKTVEEQERALREYAEKNSESVKKAVDQVSVAKDRADIALETYLRSHADTFSQEARKANDQMLFVMK

SEQ ID NO: 160373 - protein, 75 aa, Heterodera glycines
NSDDDSLKTLCYQLLVPTSAANIGFAIGDFQIHVQPEMPEIINFVVPELIPLLKHTMKSLNRIFVFFEELLSCRF

SEQ ID NO: 160374 - protein, 213 aa, Heterodera glycines
  unsure (1)..(213): unsure at all Xaa locations
GAFFSIGVRESGEYNPSPALLAIALTLAELALLVFFLPETLVHAKNDDCHKQSGHSLLFLLSPRALFSFDFLSPASASSPPVSVPLLQKYSRVYFLFMLLFSAMEFTLGFLTHLRFNYSSMQQGRLYLFSGFCMLVIQGFVVRRIPSTLKAQSHGALVGLVSIVPAYFVIAFAHCQNGIXTALFMGLLLFSVASATVVPFLTTLFSNQCDQSA

SEQ ID NO: 160375 - protein, 181 aa, Heterodera glycines
  unsure (1)..(181): unsure at all Xaa locations
MALSALLLLLPLLLNVQNIPDESVQSDMKAVYSAISSPEQWKNSQNSLASLESQLTEPQRALAKMHWELETIQKEKPEAPPQFDLGLFSEALEVMVEMDEEAKEVKLRKDKLIXMGRRRGSKKKLKEKMTEEDTVPEVRVNENGKVEVKDGAGGEGRLEVRRTKDEKGREQVVITLMKNGG

SEQ ID NO: 160376 - protein, 117 aa, Heterodera glycines
  unsure (1)..(117): unsure at all Xaa locations
FACTAVPDDYYALRLLYNLPVGFAIALLIYHLAWYRINFADSILINPFWKEFVKWLMIVSAALSYSLNPLVRASLGCALFAGLGSTAHGLLSVSVVXNLNKGPIANVIQNFNISTMI

SEQ ID NO: 160377 - protein, 142 aa, Heterodera glycines; identical to SEQ ID NO: 160319

SEQ ID NO: 160378 - protein, 96 aa, Heterodera glycines
VLKLIPVPNHQESKVAEECLEYQKKFDKKINQIASHWHGVRVSAPKAFGGIMIELSISKGKYNLSDTQNFNIEFGNPKDLMTKITDKKKKKKKKKK

SEQ ID NO: 160379 - protein, 87 aa, Heterodera glycines
  unsure (1)..(87): unsure at all Xaa locations
IDWIVRRLDTQXNIGIESAIGTIPTRESMHLEGLGNIDWDQLMSLPADYWHEDAKEVRKFLEEQVGTDLPEQILSELEQQEKRIMAL

SEQ ID NO: 160380 - protein, 217 aa, Heterodera glycines
QLREKLRSLQEYGDFKQFLRLCHLEPGYGYELLAPVHSDFPAEGSICELQVGRRQLVLIYPDDEGCTVRFALPSKRIRVWRVSHSEHQLLAQMSFQLEYLRQPDEFGLITLRTDQSVLLSLFLQSIADEILQDQQYKTESPFKFVDDAISLKAASDGSSAVASSSIVAGVGDDQKSVKSCSNNSSSSNHANSSSCALDALVNGAGGDGTEYRIKLIS

SEQ ID NO: 160381 - protein, 181 aa, Heterodera glycines
MTMFERCVNKHIQFIMLVDEKRKDTHGLLKLSEAMHKVTTQHVTLEKANDVVRKNQRQTLENILNKLNMKNFGLNYVPVMEPSACRRFSLENGNVLVIGYDVNHPAPMPQQTRRLLASQGESQLSSLDPSCVGICANMAPDFNAFVGDYFFQESRREAIDQMQLVDRMKWILQNVEKHRPG

SEQ ID NO: 160382 - protein, 180 aa, Heterodera glycines
MEPLHQQSFQRKFSISACRRQSSIDLEDNHFLLTIVISNATNHESISYKQDGGRFDSSQFTLKFHANTLYKIYVKTKPAQQFLSLNIAGNVLSLAPIEGGSGEYVAIWNTADKEPTKKGTRQDIEFVLSAKDKTLSKNLQVKFYPHNDTHAGWGQKLDQITWRCSTNDIGHVFVLEEQAL

SEQ ID NO: 160383 - protein, 214 aa, Heterodera glycines
IPVEPTVEVLLAHLRHDRMETRMATLNWIRHLHSVQPNNMFRYMDRFFPILLELLSDPADDVLMLDIMLITEICGQPKQQQQLDIRTLRLGEELNQELKSVSPYLVKFSVALLKMFKDDDKLIDERGIHIVRQVCLLLEPTDVFRSLALLLGTMVNIDGFVLPTAGQQQPQLTTAPSGTKDPFFDLQVAEMVKILNQILMTTSELFPLRQRLRC

SEQ ID NO: 160384 - protein, 67 aa, Heterodera glycines
ASTTSSSKNICRSSPSLSPFGAGGLTWKTFWLTKASTAKICQFLMENHAQLLVSVKNCVPSCCSHSV

SEQ ID NO: 160385 - protein, 219 aa, Heterodera glycines
GPSGGCPVPTVNGFRASFSGVIDMRKKSMADEIVPSIFVPRKRSACDFGTFSALRGMSRQNTAPIKIRATTVRDDSSKRPETEIVHRSQLLAPESVAWAVPTTRQNSAEVPKEKSNAQPLKHQRNCQRHAPASRGTLSFPLVKRIALGREIRVNHYLLNDGEDLTDLIVPDNEDGQKGTKERQNEQQQRPRNGTEVPKTPNGTLFGSASFRGPSLNIPS

SEQ ID NO: 160386 - protein, 204 aa, Heterodera glycines
GQDPDRRASPGPQRLIFAGKQLEDGRTLADYNIQKESTLHLVLRLRGGMQIFVKTLTGKTITLEVEASDTIENVKAKIQDKEGIPPDQQRLIFAGKQLEDGRTLADYNIQKESTLHLVLRLRGGMQIFVKTLTGKTITLEVEASDTIENVKAKIQDKEGIPPDQQRLIFAGKQLEDGRTLADYNIQKESTLHLVLRLRGGMQIF

SEQ ID NO: 160387 - protein, 237 aa, Heterodera glycines
GFGNVGLHSHRYLHRDGAICIGVQEYDCAIYNPNGIHPKELEDWKIANGSIRGFPGAKAFEPFTDLIFEKCDILVPAACEKAIHLGNAHRIQAKVIAEAANGPTTPAADAVLMNRGDCLIVPDMFINSGGVTVSYFEWLKNLNHVSFGRLTFKYERDSNYHLLESVQKSLERTFDRAVPVDPSEEFQLRIAGASEKDIVHSGLEYTMNRSAKQIIATTNKYNLGLDLRTAAYANAIE

SEQ ID NO: 160388 - protein, 192 aa, Heterodera glycines
  unsure (1)..(192): unsure at all Xaa locations
SVKKAKQRLTCXKKFKIQRKVREHSRKLKKMTKEFGRKKSEKSIAVPNKCPFKAEMLMEAEQKRAEAKKMEQERKARQKMAKKGGANAKSVRSFAAEVRRTIENADIVIEASGSEHNICRQRAVKKKGAKQRKTKKKNTDWTDESPPPIVSLLGEEEDNAVASPPSVPISSRAIRKAVKRHKKKPTENCQIC

SEQ ID NO: 160389 - protein, 222 aa, Heterodera glycines
  unsure (1)..(222): unsure at all Xaa locations
KGVAALTLDEDYQXDGECKSLQQPTSIGEGMFRGVRGLGTSVVEGVTGVVSKPVEGVKQGGLLGGIKGIGKGMVGAIARPVSGVVDLVTTTADNVRNAIINVEDVKPIRPPRVISHDKIIRPYVFEEAVGYKIFRETDRGQFAKTDHYLTYGGITKRLVIIVTDKHVIEARQHKLTGNWNATWNPKYAELKRPTRVGSNGKFGIKLRLKKEKRGFSFFSSKD

SEQ ID NO: 160390 - protein, 103 aa, Heterodera glycines
GHTEHRKSPNFADDIFHLPSTFNSDSPSSDRRIPFLNKTLDWALKSAKGKPEMLRACALLQRKFGDVFFSEGQEEQAERYARSAEYLLDEVILMLIGQLLIVL

SEQ ID NO: 160391 - protein, 94 aa, Heterodera glycines
FLSTLLNIPQMRVLPLLFSALLLLSVGLCFAQFDQSPSAALNHVRAKRGYKPWKKQSFSSSSSEMYRRRRPSGNGHYRDYNGYERALGKITRSY

SEQ ID NO: 160392 - protein, 112 aa, Heterodera glycines
KKTANDGSGNNSSAGIGTKIKRIVTAGLLFTSLATGGAEAIGRSNAQGGNAAGLVPSHVTNRSMAPPPPPVQFEMGANRLEKMRAHLRELAEKMPVNESRRLSPSGPDPHHH

SEQ ID NO: 160393 - protein, 72 aa, Heterodera glycines
MSNTASKPKSVVEVTAADVQGPGVVFCPNPKMPLWSNHPRVFIDVAKTGEGMCPYCGTVYKVKEGEHIGHGH

SEQ ID NO: 160394 - protein, 78 aa, Heterodera glycines
MSSSSGHPQTSSASAIRALQMELRSLQSQPLEGFTVTCDDDNMFKWTVGIFGPPGTLYQGGYFKAHLKFPTNYPYSPP

SEQ ID NO: 160395 - protein, 231 aa, Heterodera glycines
  unsure (1)..(231): unsure at all Xaa locations
IDPAMFDAFLRDHLNVTAPRXMAVLEPLRLRITNYRELGFIPAKSTLRVKQFPSSINESTDEWEISFDEFVYIEQADFREVAEKSYRRLTLEQPVGLRHVNLAVKIDKLERDEHGNPIELVVTANPVSSECKPKAFIHWVARPVLCEVRLYDKLFVHKNPEDPAEVPGGFLTDINPNSLHVLSNAMVDGSIIRTIRPLDRFQFERNGFFCLDPNDSWSSEKKFVFNRIVSL

SEQ ID NO: 160396 - protein, 223 aa, Heterodera glycines
IGLRRNRVRGEEYDQLIDNFMNACRKKYGQNVLVQFEDFGNKNAYRLLERYQDEYCMFNDDIQGTASVVVAGLLACTRVTKLRMRDTKYVFFGAGGAALGVAEMCVRQMQSEGLSFEEACGQIYMMDIDRLITTQRKNIEPRHLPFAKNLPDSQSLLEVVLSVRPGALIGASTVRGAFTDDVIRTMAEHNARPIIFALSNPTSKAECTADDAYRVTNGTALFA

SEQ ID NO: 160397 - protein, 202 aa, Heterodera glycines
  unsure (1)..(202): unsure at all Xaa locations
RTVLFEDNGLCRVEIRKQSEPFRLAIRVFKLLDPAVGSFGMLTKVRYEAELSTFHMAPQSLADCPPPVGSVNXPIFSASNLNCGREDGQNENFEECLWADFAKTPGTNTAHWAIGEHTQHWEQIMRTTPSSRPKGQFYFQYAQICTLGSDNVALSCVYLNDADAPGPLTIDVDTADHQPFRFAFNMLRIDRGAXGGAGGGRI

SEQ ID NO: 160398 - protein, 112 aa, Heterodera glycines
  unsure (1)..(112): unsure at all Xaa locations
SRIVHQDIDVFEXHEAFAGQVLANLKALDSDWFCQNYMKRKAKFGLLPLEKVNMWGGSLSLGHPFGATGVRLLAHAANRLQAEGGRFAVIAACAAGGHGMGMLVENYESKQK

SEQ ID NO: 160399 - protein, 210 aa, Heterodera glycines
MEKKIIYFKLMQIGLTLAFMWELLSLHQFCGTFADPKAFIHDISVGHCESFTLIGKDSKSGEFGAVFDQDKWHNQLSMSSTNRQPIEEQDELAAKLPSAERHCIPITISLFDWIGEERNLLNNGTLFFFSLLLWIAFWSLLPLGLTTIIVLHSAEEYEGFPFYFNAFASIFFWCVSAAVSTNFLLYWTSFWTCVNFQADHTNVPMVTLVI

SEQ ID NO: 160400 - protein, 59 aa, Heterodera glycines
LCHEIQNNNLFFMLVKKYNQKEIKPPPSLSPSRHLPTRPLVPHFILTISCAFAPILLIA

SEQ ID NO: 160401 - protein, 166 aa, Heterodera glycines
MAKFVAIALLSLTIVSMALAKTGKSQTADEVEGFRNMNIGDNNKVDAGKEPAADKATKKGKAQKAGTKSAAATNEPAAAKGTKNGKAPKTKAKQEVATNEPAAANEWNDQLMGMGVEKFNEELAVLLPKANTFMENALSFINEQMEKNGIATGAAGDSCSTGIPAN

SEQ ID NO: 160402 - protein, 82 aa, Heterodera glycines
FDCVDRRPSPKGFGFCEFRTTRSSECGYKSERSRAQWACAACQLDQQIRRLCLNWTDDDGWIVIFEDRFDNFHFSLLIGFLK

SEQ ID NO: 160403 - protein, 77 aa, Heterodera glycines
EISSSSSSSSSAMLTASSSRAMAGFFAQNTAPSGFNGSADNANEAAFDQRRQRAQSDQKNKSDQTKEGHLGRRYRRK

SEQ ID NO: 160404 - protein, 199 aa, Heterodera glycines
  unsure (1)..(199): unsure at all Xaa locations
GGVLAGXVTDLLLLDVTPLSLGIETLGGVFTKLITRNTTIPTKKSQVFSTAADGQTQVEIKVFQGERDMALDNKMLGQFSLVGIPPAPRGVPQIEVAFDIDANGIVNVSARDRGTGKEQQIIIQSSGGLNKDQIENMVREAERHAAADAEKKETIEAINHAESVLHDTESKITEYAEHLNADEVNVVKEKLEELKKKLA

SEQ ID NO: 160405 - protein, 207 aa, Heterodera glycines
  unsure (1)..(207): unsure at all Xaa locations
RVGRTGRAGNRGFAXTLVTEKDADFCAHLVKNFESAGLPVSAELLHVALKCAWYKTEREQQLQGQPIAGGAVGFGSGARQRTGLGYTAAPTMMMGQGAGTVAPGITTMAKASVTNPLGQSSGPSFSQQATITKQIDRAKSLVATGNVKGMDRVSMMRSALKSTFKHSFQAATVTGSDYSLPASDPRPEWKIKLDEQAEKINQCINRQ

SEQ ID NO: 160406 - protein, 166 aa, Heterodera glycines
  unsure (1)..(166): unsure at all Xaa locations
ASRMKGIDFETGQQILCPSNXALVGSGSDEQLGGYARHQTVFKSKGLDGVAEELSMEMHRIGARNFGRDDRIGTVNGKSLLAPFLEEPLVCWLNTLPTALKTGFGLPTNDGTANKFLLRNALRSLGVPECFVQRPKRAMQFGTRMVKMENAENGDPKLRGPKFARN

SEQ ID NO: 160407 - protein, 248 aa, Heterodera glycines
  unsure (1)..(248): unsure at all Xaa locations
KFDAWEKVKGXPKADAQHKYAEIVNSLLKNAGINNANTSETESDGIRRTKEGKVYKIELNRSDKYNAITWEMYEGLISALGDASADRETSVTVITGVGSYFCAGNDLSNFTRGVKTSDDLRAMADRGERVLERYVRAFIEHEKPLIGLINGPAIGISVTVLPLFDLVIASDKATFHAPFSSLGQSPEGCSSYTFPLIMGTSKASELLLFDKKMSAEEALERNLVSRVIPNNSFGTETERMVNSLASLP

SEQ ID NO: 160408 - protein, 167 aa, Heterodera glycines
MPSSVGPSSSSDLLIRLFLLLDSAVHFALGAFLFFCPSTCAHFLLKRPSSDGVHWHLLRCVGGQLMASATLSWRCASPRRLPELRSSCLMLRLLGSVLFVFLFLHIRAVHPDLMPFLVLRQLIWFCFSMIALCVALLIVSGWPIGDKLFAANRWGNVLYQIDTIASI

SEQ ID NO: 160409 - protein, 214 aa, Heterodera glycines
  unsure (1)..(214): unsure at all Xaa locations
TCFDVLIPLPDEVFGLLIQAIVWAVKHTMRNVAENGVDILRELLTKVSTTTDKAQAQXFYKKHFMVIMEHVLGVVTDYNQVNFVGLTNLAESVCLLFQAAETIIEVPLNPTNPSQPNMEFVYEAIATLFTTHFKNLTEPQIRVTVKGFFSFNRTVTKMREHIRDFLVQIREEAGDDTADLFLEEKEAEIQRIQSLKQAIPGVRNPNELLEEDMV

SEQ ID NO: 160410 - protein, 59 aa, Heterodera glycines
GFTSGPLLPSLGNGAFMNVECSELGLCSQIQMFGCHYYYVVPRNILHPCSWKVGRWSVF

SEQ ID NO: 160411 - protein, 177 aa, Heterodera glycines
SASTLHTDAEGRMAMADPLAEAKEKAMKAKNPHLFTIATLTGHLILTYGHCSAAMDNGPARAANYAEQLRKTGDEFGQPVEVSRLFSEDFDFHSAKCEAADLMQSNALPSVRTPRGHMGPAAFLMRVSRIDEAGLDSAQPLKYTHLDIGISMGEYPNTSFPSPLLALIAQHVLPKVK

SEQ ID NO: 160412 - protein, 210 aa, Heterodera glycines
MALAEDVGDMASLLDSNGKYRCNTYGLCFEPIDNEICLGSSNRILIDMVLAPADRDVTCLLFATARSFYQEQQHSVGSCPKIVTKCTVNLRPIEFNLSEEGRESMSSPIYNAHWTSTEPIWSLCFNSHHMKICVGMEKCAKILNVLSGQNFYVGSGGKNVISCIFSKDGNTLFLGRKNADVSMLDMRMTSNHKVGELAQSPSTGYMHLLQ

SEQ ID NO: 160413 - protein, 141 aa, Heterodera glycines
  unsure (1)..(141): unsure at all Xaa locations
PLEYATEIWNPLKKENVHKIEAVQKXTRKAFKKCGLVPMPYEKRLKFCGIKTLEIRRKINDITTTFKIIKKHTHLKPSNFFAVAKRAIRKPFLLQNRIYITKIKNNFFNRVINSWNLLPKNIMEINDPKKFREIAKEIIKQ

SEQ ID NO: 160414 - protein, 165 aa, Heterodera glycines; identical to SEQ ID NO: 160043
  unsure (1)..(165): unsure at all Xaa locations

SEQ ID NO: 160415 - protein, 89 aa, Heterodera glycines
LNFPPPHGAPGIFFKRGVPPKGLFFFFFFFFFFFFFFFFFFFFFFFFFFFFFFFFFFFFFFFCFFFFFFFFFFRPINFYIYVTKQKMAR

SEQ ID NO: 160416 - protein, 159 aa, Heterodera glycines
MARAPVFLNVYDMYKLNDIVFSSLGIGVFHSGIEVYDTEYAYGGHPFPFSGIFENTPRDAEELGENFNFRESIPLGETDFSAEDVNKMIQNLGQEYRGDSYHLITKNCNHFSAILSKVLTGQELPPWINRLANISGSLPFVERWIPQEWLTPIALQQSL

SEQ ID NO: 160417 - protein, 173 aa, Heterodera glycines
MAENWWRMAAYQNTFLQQQQSQTDGDTSGATSVTDSNGFDVPSNASSAGLDLIGSAATLILNQQQQMIRQGDTAEPSADDLLRADFSMPKLREFFECQKAMGVPNFPEDFDEFWLLVVKARLFNVFKYRGPEAYNRIVLKIRDIAHQFRAQVEENEHSDGTEKPKRGKKQMTN

SEQ ID NO: 160418 - protein, 130 aa, Heterodera glycines
GHVHMVHLANGGLMHVRAFLQQKCSNFCVSFHNCDQQCKLLSVARVVHLQQGVQLIGAQRVDQRTQSVDVSAVDEVEELAGALRKVIDGTGRSGRTNIIRHWESKKMSAAQFDDEYAAQNRGKGRQWRRN

SEQ ID NO: 160419 - protein, 116 aa, Heterodera glycines
PFSVIKCGHSLSRKPIGSLLCHKRICGPLLHYAELEQSFLQNLGTNRTLVGKFMVLNDGRHQQSQILDNGKGDRIMHKFGMVFENGIEYGIVIVHHICLQLLLKFLAKILVQSSAL

SEQ ID NO: 160420 - protein, 96 aa, Heterodera glycines
  unsure (1)..(96): unsure at all Xaa locations
PKMAAIEEFXTHLLLTLRKGQLSNPTTVVQTQEASLNQQKMWSLLNGPKRKCKSKNTVRSSLLRRNTNGQKWNRIEKKSKRRKCIFFGLIKRSFDD

SEQ ID NO: 160421 - protein, 102 aa, Heterodera glycines
IFFFFFFFFFFFFFFFFFFFFFFFFFFFFFFFCINCLLVLQINHRMIALSIQRKCIFFFCFSFQFCSIFVHLCSFLEGSSERCSSICTFSLAHSKVTTSFAD

SEQ ID NO: 160422 - protein, 156 aa, Heterodera glycines
MVDLDTQLNNLLDRVDTPQFIMAFMSMSQQDPTFLAKAFEVVMEECRTTGFSNPILPQSATIPSLRPVHPRHQSARSPGSLYLPPPLQPKAYVQGSSLLGPSRPTSTVSYTQITPYAAIPESWVVDAPIRKQPKPSSPAREYRTPVNLPFKDFSQS

SEQ ID NO: 160423 - protein, 208 aa, Heterodera glycines
QKRSYGPAEKAPRFSVGQCQFAMAELFLALEHIHALDVIHRDVKPENILLREDGHILLSDFGCAKQIIAKRENVAEENGDKTDGQRADDGQKAEKSADSKSSKKREEEEATKLALRRRCSFVGSGAYVSPEVLNGKEVTGACDWWAFGVTLFQLLVGRLPFSADSEYLLFRQVLALSYKFPDNFPCAAARQLVQALLVLEPTQRIGAA

SEQ ID NO: 160424 - protein, 35 aa, Heterodera glycines
  unsure (1)..(35): unsure at all Xaa locations
NFPFLPAEKKSTAYRERIESLPKVHQSTLKKLLGX

SEQ ID NO: 160425 - protein, 183 aa, Heterodera glycines
WAESEANQLSIWYDIGGIVGSVLGGLASDRLGHRSPIILLMLVLSVPLLFIYSGLGSSRVEHVIGMSLLGVTISGPYNLIVGTIAIDLGSQQALANNAEALSTVTGLIDGIGSAGSALGQLFVPLIQNELGWIWVFHFFILMNFLSSMCLIRRFFHDARLISLSFAPRQNGRRQENEPLISNN

SEQ ID NO: 160426 - protein, 155 aa, Heterodera glycines
PIISQFISLLKHISAPFSADLSRFFFFVLWRQWPNVLFVATQINADIVQIVQICVLPLNHLSNLVSFNHPADGPSIFTCFSDQCQLLVGSFVHLFKRHHGRRRGMNSKLNFVASRRSGTEKCFFEGVDPFVDVNCWLLIINTVKSLGLAIGCRSG

SEQ ID NO: 160427 - protein, 99 aa, Heterodera glycines
MKLLTRIDCCCCCCDGGGGDGLAAATIFVGGVAAAKAATAPLSLLMAEMLFLGLLVVAPALFIFSSMPRFVRVSKTRLHSSSPNTQRPRIQPSSRCTKM

SEQ ID NO: 160428 - protein, 166 aa, Heterodera glycines
TSENLGIIWNDEMEDFSFPDVKNWFGYAISPTNFVAPGKRPMSSFSPMVIYNKHTGKVKFVIGGSGGAKIPSSVAKTVLHVLCLNQTVKEAIDAPVLHNQFTPNHVIYENGTPPKLIKDLNENFGHIMKSYDNNNVVVQAIHVADDGFIYANGDFRRRTYMHPAGF

SEQ ID NO: 160429 - protein, 178 aa, Heterodera glycines
FYYIIAFILFCFVCTKENVIEIVQHKTKPSHLSVLINGQKFDFDKFGAHVSDYRADRNDLIDKPMEFNSMAFLEAKNDPMLVFDELMFKWLAFSEADNVAKTTATTTSSPNGTIRTVDFVIDFVMNVANVDTFLWPKLLYGIDELRNQYNSSSSDRPLSFAYDQNTRKVWLSKGIMSC

SEQ ID NO: 160430 - protein, 218 aa, Heterodera glycines
  unsure (1)..(218): unsure at all Xaa locations
GWKGTVKELKISPDAFMQWLLATYLXEPGSFSLTYEASITRLFREGRTETIRSCTNESCDFVRAMLDPQQKNEERLRLLRLAAERHQNLTRDAMCGKGVDRHLFALYVVMRHLEESSPFFDKIFPPQYLLSTSQTPLNQFDSEQEGISMAQKLKLVSAGGGFGPVTDAGYGVSYIVAGEDQISFHISSKKSATNTSSIRFREDLKKTLLEMKQLLTVE

SEQ ID NO: 160431 - protein, 181 aa, Heterodera glycines
  unsure (1)..(181): unsure at all Xaa locations
SDADFVPFCVLQXLMGGGGSFSAGGPGKGMYTRLYVDVLNQHHWIYNATAFNHSYMDSGLFCIRASADPTKLNDLVDIILAEFGRLTKGVWLDELERAKVQLKSQLLMNLEMRPVQFEDLARQMLAHGQRKTADEYSDLIDRVENTDIIRIAHKMLDSRLSIVGYGDLRNMPTYKSIESRL

SEQ ID NO: 160432 - protein, 246 aa, Heterodera glycines
  unsure (1)..(246): unsure at all Xaa locations
MKASRGLIVRDWKPDVVYLVQFPRTHNVLSPSPFALKLETWLRINGLKYRNVNNEFTKASAKGQIPFIELNGRQFADSNLIIDHLRNHFKVSIDSRLSTHERALGRAFTILIEESLFRCLQYDHSIDFGWLATENGWAVHMSGFQKFLFQKIKLKKFQGFYKSVLMAQGYGRHSETEVEEIAKKDLIALSTLLGDKNFLFGEFPTTLDATXFGHLVQFTDTPLHSKAIKPMLEKNVPNLLAFVKRM

SEQ ID NO: 160433 - protein, 194 aa, Heterodera glycines
  unsure (1)..(194): unsure at all Xaa locations
NPLLMRDDYXLVLQQKVRMALENLEDDPEIGGTDYPLEGMTKETQKQLIADHFLFKEGDRFLEAANSNHFWPAGRGIFHNAKKTFLVWVNEEDHLRIISMQKGGDVGNVLKRLIRGVKGIEKQVPFARDDRLGYLTFCPSNLGTTIRASVHIRLPKISAKPEFKKICEDLKLQVRGIHGEHSESEGGVYDVSNK

SEQ ID NO: 160434 - protein, 209 aa, Heterodera glycines
MNVNKEEERLEKKVTKWAIMLTSEDKIEHALRRLDHVEINLQLLSSTGVGKAVNALRKHHRWGERAAGLVSRWKEVAKAETARAAEEAQRQNENGDGDTTEEEDEREEEERAKSQSEEGTDDDNEESRPNPLVLRIKKEPQEEASPTKHAATPNNSSATKLLSQSARQNEETEAKKRHHFDDDCETFEDEQPIDAFASQLAAADKVQKS

SEQ ID NO: 160435 - protein, 220 aa, Heterodera glycines
  unsure (1)..(220): unsure at all Xaa locations
EKDVEKSLPXQVEQILRVDMTAQQKQYYKLVLTRNYEELSKGVKGSINGFINIMMELKKSCNHCCLVRQYDEIEEEPQARLQQLLKSSGKLILLDKLLCRLRETGHRVLIFSQMVMMLDILEEYMRLRRFPTQRLDGSMRSDLRKQALDHFNAPGSPDFCFLLSTRAGGLGINLATADTVIIYDSDWNPQNDLQAMSRAHRIGQKKQVNIYRLVTKGSVE

SEQ ID NO: 160436 - protein, 203 aa, Heterodera glycines
  unsure (1)..(203): unsure at all Xaa locations
MSDSEKVTTRNAQPKVLDTRDDGKFTAKFIAPRSREPDSVFLHIFGSKKDPHLYLDVSEVQWGNVYIFDLNKTEVIAVRPRRVADELRKLEERDRPPVKREQPKPQPQPQPQPQPVTFQKILSGLVWPTTEKYTLLVSSRDFDLDGRGSPIKQRATNPDPTRAETNYKGTFDVKMALTERPETFYVWVSSAXGGQKRFVIPAY

SEQ ID NO: 160437 - protein, 106 aa, Heterodera glycines; identical to SEQ ID NO: 158795

SEQ ID NO: 160438 - protein, 192 aa, Heterodera glycines
  unsure (1)..(192): unsure at all Xaa locations
IQYHTFGTSFFNCWADYYSRPPPPSLSQSSAVCPRRCHWPRCAPPPRTPPAVVPLPQGGPPRPIXPAECPSLPPQKPRISPPPNDANGPTRRHCFSPLRPAPLAQSAHPVALLLLSLLTPSLLPLLLPTRLLLLLHLPCPPRPHSVVAGAEIATPRTAEPSRARLCRSTAGPSRPERRCNGRHGQAPGSQSR

SEQ ID NO: 160439 - protein, 205 aa, Heterodera glycines
  unsure (1)..(205): unsure at all Xaa locations
MIYREVTASSFVKISVDGRIVDPGSTPLGINXAGYILHTAIHEARPDVKCVLHLHSASGAAVSSMKCGLLPLNQESMVIGPVAYHEYCGMLSAEDEKTEIVKHLGDKKVIFLRNHGFAACGASVEEALHLAYHTLIACETQVSAMAAGEKNLIYPNEIAKKRAYDIAQHGANGMNRTASGQNGTMAHTYEKMGDIEWGVGELEWE

SEQ ID NO: 160440 - protein, 168 aa, Heterodera glycines
  unsure (1)..(168): unsure at all Xaa locations
IPLLKPFFNRESNGFFFVLAVLFLVKVDFLQCKYNEPMARQVLQKHASQFQQHCKNARRGSAVAKCCSAIRSIMGRFTSQKKAMNQMLAKCKAGTTPSEAQQMRRKLEGSNKLKDCGQFKSQIQHKFSELKQYCNNGAENEEENDEXSEREREEERVXEREEQQNSNH

SEQ ID NO: 160441 - protein, 221 aa, Heterodera glycines
  unsure (1)..(221): unsure at all Xaa locations
IVDAYGIVHYREINPAPYTMVTFPFLFALMFGDLGHGLIMFLFALYLVMKEKRLEAQRIKDEIFQMFFGGRYVIFLMGLFSIYTGLIYNDAFSKSFNLFGSSWLNPYPVDILEKADPEQILTLDPWESYASSPYPVGVDPVWNLAETNKLNFLNSMKMKASVIIGISQMTFGVALSYYNHKYFGSDLDIKXTFIPQMVFLSCIXIYLCLQIIAKWIFYDAL

SEQ ID NO: 160442 - protein, 219 aa, Heterodera glycines
GHGSVEGGSPETDPDYWEKLLRHHFEQEQEVERMNLGKGKRVRKQVNYATEALQQDWHAGTPGQDQDYSDSYSGASDHDGSGSNEDEFDSAREERRRKRERDSEKLPPLLARVNGQLEVLGFNPRQRRAFFNAVMRWGMPPHDAYQCQWLVRDLKGKSERAFKAYTSLFMRHLCEPGADSQECFNDGVPREGINRVQVLTRIGIMSLIRKKVQEFEAIN

SEQ ID NO: 160443 - protein, 59 aa, Heterodera glycines
ICSLHPNATFNVWCRNDVVQTERIDLFVTSKCHVQRLGRKDELRGENRLFVHPNATFNV

SEQ ID NO: 160444 - protein, 152 aa, Heterodera glycines
MPLVHNCIAGTRHSLLIVLGLIMIMANCGQAMRQQAVAVRGQLRCGNRPASGVKVKLWDEDDGPDPDDVLDEAFTDSSGSFQMRGSTRELTNIDPVLKIYHDCDDGIMPGQRKVKLRIPSQYITNGGLARRTFEVGVLNLETVFAGEERDFI

SEQ ID NO: 160445 - protein, 240 aa, Heterodera glycines
MTNLPYPNSALPYPTADPPSHIMPQPSSYTPMPQPGNYQAPYPNSYPSDPISYPTPATNVTPQSDGVYPYGTGTIQPTHIHASLLSAVEDRIRQRLRDKIGTPFAELQSIDVNLQELRVGKQNLRDMLDNIARDQRELERVLDIYTDKKEELESALKVVDSNGTTDNGVAFNEEQAIDAQTPVHRQILKCHVQDSAIDDTIYHLGQALHQGAVNLQTYLKYVRQLSKQQFQHRLLMYKCR

SEQ ID NO: 160446 - protein, 194 aa, Heterodera glycines
  unsure (1)..(194): unsure at all Xaa locations
AFLLLVLARDSRLTFSCLDGCECDTDDEAIHCHNRPDRHFVQLPPSRLRGFTVLALTRNNIDVLPSEEVLXLEKLPDLKAVDVEGNEHFDCFTLDHYRTLMVMSDCGKTPEQLEADRAKLPTDTQPNEDCDFECVANRRSRELREYVKHLWEMVKEKVSRLAKKHGLDKVVDDVGNFFDDVGERISNIKLKKKK

SEQ ID NO: 160447 - protein, 226 aa, Heterodera glycines
MRKHRRQLTGAPSAHPSSPCPSSLLPPPVSSLSVPLHHRSSISGGGSRPIAIRKGPQGFGFSIRSVRVYLSEMSEYYSIEHIVAAVREGSPAWEAGLRTNDLITRVHTQSVHNMTHPEMMRRLLSCGNELTVHVVPLSSTSIKEGEPRRNIGKPLRKKPRRPPTAQQKNKQQSRKGSALLRRLSGKRTVGDIVPGTSSQKQMFIPRSVSSQEGRAQPFNSSTSKLE

SEQ ID NO: 160448 - protein, 143 aa, Heterodera glycines
MLQDLNVEANGLSEDFMFDMTKAEIPAETFKKIVSWMEEHKGQPVPEFEEDPNTFERKWLTQNDFQQNFFKCEFAEAAAFLNAANFLDLQSLFRHATQAVAARIKDRSPEEIREMLHLNDKEDKPLTEEEKKAIREKNVWCHY

SEQ ID NO: 160449 - protein, 191 aa, Heterodera glycines
MPILRPNKRNGPSLDELHLADGIGAECFADGTHGERRRTSRHQIPSVSMEKSNLPSNKNTWCTPSRLICNFEESILNGRIPANSVVSGFRLQLTVIGNGVSTDNRLSFPASKRLTLPVLTYFFNDLMSQHSGRFPVAVPPSPLHLARCELAAETVPIPKRCTLQIVLLRPCGSVVKLFMVAVNVLDMPSNS

SEQ ID NO: 160450 - protein, 201 aa, Heterodera glycines
SANSSAITASASLCSTLSSVARFINRFCRSADSVVPPVAEDELVVVPGVTTGADLLSQILFDPGDFLLVPSPFYYRFVNDFGERGSVHIGCVPALSEDGTRTELRAERFEEVYQEIMQHQQQGKVRAIMLVNPQNPEAGYFSLDEIRPVVHWALSRNLFVLLDEIYDLSIYDEDSECPFRSAVELFEDERSRQKLIWLWGL

SEQ ID NO: 160451 - protein, 171 aa, Heterodera glycines
IRCRTKETLKFCFLQSLKEACQLKLGSNIAASMTKDEHGRLFDGLCNDRFNDFWMVNDKLMGLRSSSGEEQFSTIPARFYESSYSFRQLLLHSKKQLDDGNMGEVLLIDALHKVFPDYAIETDFEAVTHGILLPLNTPLIWLARNLVYPDNFVHIVIRRKTAPFDKNSKNL

SEQ ID NO: 160452 - protein, 146 aa, Heterodera glycines; identical to SEQ ID NO: 158796

SEQ ID NO: 160453 - protein, 126 aa, Heterodera glycines
  unsure (1)..(126): unsure at all Xaa locations
MELAIICAQFCPKREPDSNSIIDPYIXCQIFGVPRDERKAHTRTLRNNGFNPVWNECFSFPLCCPELAILRVCVKDFDRTSSDDFVGEFSVPVNSIRPGYSHVRLNTHRQHTPDEAASILIRTAFS

SEQ ID NO: 160454 - protein, 142 aa, Heterodera glycines
LSEMRGNNSGAVRVLEVDESNLLRWSLMLYPDREPYNKGAFRVNVDFPTEYPFKPPSVTFATKIYHPNIDDKGQVCLGIILAENWKPATRAEQVMNALLSLIAEPEIAHPLRSDLAEEFQRDKKKFFKNAEDYTKKYAERRD

SEQ ID NO: 160455 - protein, 144 aa, Heterodera glycines
GESRGTNNRKNIESTLKYLDHREKAGYQLKCVQFYPDNGSNPFELCVYISEAGDNIYHSVPTSIDEIVKQIIRSRGPSGSNLEYALRLADCQRRMAPKVWDEHLFEIEQRLLKECEYLRHEDEILEKLNHNLSYLVRERNNSEA

SEQ ID NO: 160456 - protein, 53 aa, Heterodera glycines
  unsure (1)..(53): unsure at all Xaa locations
TVTHSLSXISEKICGMVSGARCGSAQRRRQVQPGTVPPQCAESHRPTRRTPIC

SEQ ID NO: 160457 - protein, 227 aa, Heterodera glycines
HAQMTAELLRKAMKGFGCDKSKVIQALVNCNNAQRQEVIRTFKQMYGKELIPELKSELTGDFEHLIIALMELPAVYDAAQLRRSMEGLGTKEHILIEIMTTRPNAQIYAVKMAYRQMYNSDLERDIIGETSGYFQRLLISLCSGARDEQMHTDPIKANQDAQRLWRAGEARLGTDEIAFNSILAVQNFAQLRMVFDEYQRQHGHSIEQAISNEFSGDIRDANLALVK

SEQ ID NO: 160458 - protein, 31 aa, Heterodera glycines
YPASGKALSFSYRRPYRKPTLVREMSILRRL

SEQ ID NO: 160459 - protein, 240 aa, Heterodera glycines
GVPLQSPTTHRLFCKARPLPDGLPEAIERGDVNPTDDPKNRAKILTEKFEMDATDSRKIWCFGPEGTGANLLIDVTKGVQYLNEIKDSVVAGFQWATKEGVLCDENMRGVRFDIHDVTLHADAIHRGGGQIIPTARRVFYASVLTAKPRLLEPVYLVEIQCPEAAVGGIYGVLNRRRGVVFEESQIAGTPMFIVKAHLPVNESFGFTADLRSNTGGQAFPQCVFDHWQVLPGDPFDGTSR

SEQ ID NO: 160460 - protein, 169 aa, Heterodera glycines
  unsure (1)..(169): unsure at all Xaa locations
EKSAKRATRGQRQIYEENXQTLLCYVLASICSSVLVFSLXYFLFLPQKGAWIGLALSSASQAFSVILMSMMMKTVRNERNQLVDAGLDLNDPNAFGEYCKDIVILSVSAQLLSLIWTGFFFVLLSIPFFTLYKLWTNILGPWFFRPTLDDDEKEDKKKQKKPKFVHVRR

SEQ ID NO: 160461 - protein, 155 aa, Heterodera glycines
MSFNVEKRGRVSKSKSMSTTLENESNDEEGTMKPAKRDQNHRNSTNDLRTTSTNSVSNGEYADCDEMELDEPFSESEGEDFPQAKGVEKPCLVIPRGRIRSLSGTIPPVGFAPHWGGPTMCLSCFQFFQLPEMICEFSTHLLTEHQIFIDGMDIF

SEQ ID NO: 160462 - protein, 233 aa, Heterodera glycines
  unsure (1)..(233): unsure at all Xaa locations
VWEHTDVKWSSRWDYILDSMPHTNIQWFSIMNSLVIVIFLSGMVGMILLRTLHRDIARYNRLDEEEDAQEEFGWKLVHGDVFRPPRHALLLSVFVGTGSQVLLCAFITLAFACLGFLSPANRGSLMTFALXFFYVLFGVIAGYVSSRIYKTMEGLAWKSNILLTSFLIPGIIFGVFFVSNLMLWSKGSSAAVPFGTLCALLFLWLFISIPXTFVGAYFGFRAKRIQAPVRTNQ

SEQ ID NO: 160463 - protein, 153 aa, Heterodera glycines
RKKQKPVKCRMFGYVPFASFSNDWSAQFSPPFASPTQPKSRPSSSNSPPSAAEEDENPLPAAFRIGNESESSDESGAERSEHEEEVIRRSKQIRNRERWELLKYKMLISSCCTPSKNPSKNDNELPANCKHETAEDEEQWDEEREREFVFSLL

SEQ ID NO: 160464 - protein, 215 aa, Heterodera glycines
MLAWRGIEHIQSLRDNPNLSAQLGVPLGCARSSGLPSLSAKFAAAVRHDTGGMSPSSSAMPTAQQMRAEQSAKLAMAHVRRGAELTRDNKCFEAIQCFNKALNVYEHCADAYVGRGAACAGCRNFPAALADLERAVQLQPNHRNANKYRLEVLHTYAKELERDGKLADARAKFGQLLALCPDHQGALDAIAQLDKNDDNIGDTDIELVELSDDEH

SEQ ID NO: 160465 - protein, 115 aa, Heterodera glycines
VLPLCRLFYSDTRPNFAEFNCVHLLLRPFSSNALIELTLMRRHQILKKNALKILAKFLPNRCFSNNRITDSGKSQKMVQRIDGQKRWEKRQQKRDNKSNEMTEMHFKKLKEQWQK

SEQ ID NO: 160466 - protein, 234 aa, Heterodera glycines
  unsure (1)..(234): unsure at all Xaa locations
GPNLPSSLFPVDEHSLVGPDGESPLFTHRIGKSAPEGQPGENGAAVTLTGEEAAEGRRQMSYWFMNVKASDKMSLDRAVPDVRPNACRSLSYDLANLPSASVVIVFTDEPTSVLLRTVHSVFNRSPMSLLCEVVLVDDFSQREELKAPLVAHLRRFGSRVRLLRANERLGLIRAKIVGAKYARGDVVLFLDSHCETSPGWLEPLLHRIKDXRSAVVCPVIDMTSDSSMQYSGGS

SEQ ID NO: 160467 - protein, 231 aa, Heterodera glycines
YKQTQFHRFRSGVFVLRGDSSEEEQQTQDLSSLIEILCLFHSKTYVPPLSVTESECLAGREKISMHGLELLLPLMTEELLNVPHLCASFFRLLIFVSDIAAEGIAQSPPQMLDDILRCVKAALDYSFGGDRVRSALEIVNGLAANCVEDSVKKTGKYATMTERLLALVPKMFQLAMEYSFELDLLSDASSALFSLILLGPDSFKAFVTHLLNLPSNQENRERRRKRLANFY

SEQ ID NO: 160468 - protein, 151 aa, Heterodera glycines; identical to SEQ ID NO: 141876

SEQ ID NO: 160469 - protein, 171 aa, Heterodera glycines
FSEMRIITSNCPLDQRSLGATDQMIPFFGGFSSSDQSLFVRSLFLTLSALQSEPSPPASADPCPRLFRPPRQRRSIPFQRRRLDESAPRGSARNSANETRVVLRVHEQLGGNGCAAGATGRGRTKADGLAIVAEIEFEGDGEENHRKEKKKRTEKQRKRRRKHRQREGTNG

SEQ ID NO: 160470 - protein, 246 aa, Heterodera glycines
KGPVVVESLKKLDVDLRELALENANIIEIGPKAFAGMRIKKLILDNNKIKTIQKNAFRGLDSVLQELSIASNRLTEVPTAALEGLRALNSLNLRCNRIGNPSNAAFLNTPSLIEVQLECNKICAISDGAFREVKETLQNVILDNNCLEQVPGGALEEMNALISLHMKHNQIEQLDDGHLRNLSSLSLLTLTGNKISQISPNFAQNTPNLRYIYLGDNKLERIDPSSIKQFSAAEIIDLSFNNLAEI

SEQ ID NO: 160471 - protein, 209 aa, Heterodera glycines
MGLILFLSESPRFLISARKMKEAKEAIIRMHKFDGRPYDEKALDALLEKELQQMLELSVTKKKYNYLHLFYNTKFTMYTLSVSFSLFVVTLITYALVYNIEKMSGNIFLNMIWMGMFKYTMNLAIAFADLKFKWLGRKLSHLLSEVLVLAALGLFVTLRLTGFDANFTFLSNGSLVAAVGFCGILFNSDKLAGSELFPTGVRNLSCSFG

SEQ ID NO: 160472 - protein, 185 aa, Heterodera glycines
  unsure (1)..(185): unsure at all Xaa locations
MGQINVCDDVWLDTLAWINRVEVGMKFALVNVRLNALADKHFKQRKWCFGEFHTCERMTEESGAEIMTSIDGSDFSTLPLPTTPLPDSVVGFRSISIWYINEEVVNFLRTIRRLLTKDIALEFSTFFTEYRSWKVMAQHIWPLLKDGISTLCLKKCDXGHAPXNTCRPPCCXDCAGLHRIHTQML

SEQ ID NO: 160473 - protein, 132 aa, Heterodera glycines
SKTSFRLVMRRPKSVPIFRSKKAIIKSEWTAPRRTTFCAAQSVGGRRRHFGAMSCASIRRFAQQQAVAKSVAPIRPANLTSSPGASPATATTQPAKRFRNQCPTRRGPFGEQLFVPPAEAQLRGGQEGMALK

SEQ ID NO: 160474 - protein, 219 aa, Heterodera glycines
TILLLLLVQHVNGGRDRVQEIQEEEGGYSSSGGNGTETPTKNKAVKQWQQARFKIMQEKIAEYLGGLAKATRKSKYVHKLVDDIQYTTPEPFEGTVTRRTEKTKNGTGKEKNAKTNGTGAKTKIKQMATEYGRAHRTSMAKYKEKAPLFGADDETVETMMLYVQMKLDKMANKYEKYVESDDKKNKKLAENFQKKRADLAKLANEMPAEGCKLSVGYNK

SEQ ID NO: 160475 - protein, 241 aa, Heterodera glycines
MTKKRSSISSASFFVEDTGSNSTDVGVKENSAKTNDPNKFEKAGWLYKWTNYVKGYRQRWFVLNAEGILSYYRHPSEVNRACRGSINLSEANIHSNQGESSHSLIITTPSAQTFHLKASNEIDRSQWLKALEYAKHRAIIQAVSLEEDEEESQLLLNKTKGLKESSTGKLENMSKDLRTSGVKFYKELDELMHFIVGHCNAKEAKNCNEIANQLRAIADNFIKNSNELVLNYKNDYTLLRL

SEQ ID NO: 160476 - protein, 204 aa, Heterodera glycines
AMGRDGHIARDISPLHDAFAHFVLVKKRLTSMAPIIPREQAQCLQNVFKHFAHFEINSATKDWTQEELRLYKRLFLGLRLCTLTFPPQLLRNLQILFKCIRQFCFNAKLMRENCWSANLRISNEENSLSICEINDQRIERVLRELFVLFFPQKNLECPKSFSLFKLLVEHVTPCLIQTPKWLADEVQKEMKEFVNSGQTHNKQR

SEQ ID NO: 160477 - protein, 89 aa, Heterodera glycines
  unsure (1)..(89): unsure at all Xaa locations
PRVRCPRWSSXGVDDDVIEFSHGMKIYENCPGSVEPLWVRGAGHNDVELHAAYLDRLRQFIDSEVCNPPTHREQLKNAKRPQTNQQAQN

SEQ ID NO: 160478 - protein, 213 aa, Heterodera glycines
  unsure (1)..(213): unsure at all Xaa locations
MILFLPLLVFIYYALRYLWELIPLQNASKRAVFVTGCDSGFGYXLALKLAQYGMLTYAGCLTKQGRDELIEEAKKXRGVAAKLKTVPLDITQDQSVNDAADFVRKDLNSVGNIELWALVNNAGIFSCFGPDAWTSIDEYKLSMEVNCWGTIRCCQAFLPLLKRSRGRIVSISSVAGRVSVPGGAPYAVAKYGGXAYMDAIRLELKCWGIGCSI

SEQ ID NO: 160479 - protein, 226 aa, Heterodera glycines
  unsure (1)..(226): unsure at all Xaa locations
MANLTLGKDKESSVDSERASKRSSSVYSSSEQDPSCDGQGDTSTDHCANVASTIAAEHVSHSTSSSPSLGSSASDQISKSSGTNEVVNRVQQRGTTNSSSSLYSSDQCVQRTVPISAHSSPSVASSLLSSSNSVNSNSNFNEQQQPSSPASLISSSIGLQTSKSAVLKXPKPSKDCANNCPRIDPNLNPLTMGKSPSPLDPNPRLKSPPGTAPLAQSARNFWNSVH

SEQ ID NO: 160480 - protein, 185 aa, Heterodera glycines
  unsure (1)..(185): unsure at all Xaa locations
VTFNLDSRRPFGMSIVTKNNRSGFAGIYVHEVNPGGLVALDGRIRPGFIILEVNDISLDDLSSKEALNLIISSVRNAXKPGGNSNWSVLPAAEPARPIDPTAWIQHANAARGVGPPIAALSPSPANRSFARATAADLLYYAATMSAERGETDGQQIVNHSKNKPSATGERSMKNNTNLRVLQIVP

SEQ ID NO: 160481 - protein, 236 aa, Heterodera glycines
ILLDCKGPVKLTDFGLCKEAIEGDQKTHTFCGTIEYMAPEILMRTGHGKAVDWWSLGALTFDMLTGGPPFSAENRKRTIDKILKGRLTLPPYLSFEAKDLIKRLLKRHVDTRLGAGPGDAEEIKKHAFFTHHVENWTNVYRREIEAPYKPNITSEEDASLFDSKFTKMTPVDSPTAELPPMSVNPFEGFTYIAPSVLEQVSQPTLVRPRQQRKIHGPAIFHSFHPHQSTTDNGPLE

SEQ ID NO: 160482 - protein, 124 aa, Heterodera glycines
QMMNKIYTTIHFLLLLTVIANKSTNCATNVQGTQTVKTADATYDEAGKISRDSSSSSDEDDSTTAASKMLLNEANHAFSKDNDEPINQQQKMRPEANFSVKYLPPRLNAAQIDNIAQQASSMIT

SEQ ID NO: 160483 - protein, 182 aa, Heterodera glycines
NERKRFNDIPERDAFERLCRGEFDISPANASKLYCYFKRDKPYLKLAPHKVEIVHYEPLVVVFRNVISDEEIAVVKQLATPRLRRATVQNSRTGGLEFASYRISKSAWLKGDEHPIIERINRRIHEMTNLDMESAEELQVANYGIGGHYDPHFDFARSGEKSPYKGKGNRIATVLFYMSQPK

SEQ ID NO: 160484 - protein, 193 aa, Heterodera glycines
DSLAPGTRAGGAPRRTPCKCVVHVFAALQLNHCTYNISIGESSIELEELSREELIRRCNELTERCKMEIRSKNKEKQLKEETIKKLVVLGQQKGIIDTRNKSKKGEKEKRIWELAQHEKNLEINKYEDRYKEMQYALDSTRHELEEEYQNRIKTEEELRQYKDCFGQLPNSYLASANPHNNDRQRNQARRRLK

SEQ ID NO: 160485 - protein, 105 aa, Heterodera glycines
SIHSINSINFQYLSPILHANLSKLDIFSKNSCAFSAVFSIAPDEFVPFVSSPSIGNEMISLKLFLHSSSGHFSTKVIRQKAIERAKRSEREGGILRKYWPTFQQN

SEQ ID NO: 160486 - protein, 203 aa, Heterodera glycines
  unsure (1)..(203): unsure at all Xaa locations
DLCKIRSIARLRTTTPLKKRKRKQLDVEVDENVAGFDRQEASSPVAAKTFRHFSWAIAPPTAPHPVKEAKKRRNNRKRKXRRKGTKRKKQKKSKMIKFKLDEKLRKPNGSKRRKWAEKMREWKKWSNNRKQRQKNPRTQHSQQRNRRKSKRELKREKRRQEQLKREAEKKKKEEDEARRKKKXKRKRGEKVRKQKRENGDMKR

SEQ ID NO: 160487 - protein, 138 aa, Heterodera glycines
MPNIFKILLIVLLAVVSFRLSASTGDKKTANDGSGNNSSAGIGTKIKRIVTAGLLFTSLATGGAEAIGRSNAQGGNAAGLVPSHVTNRSTAPPPPPVQFEMGANRLEKMRAHLRELAEKMPVNESKRLSPSGPDPHHH

SEQ ID NO: 160488 - protein, 76 aa, Heterodera glycines
  unsure (1)..(76): unsure at all Xaa locations
NKKVIIIISRAFLVYRLSSSSALLHNERLLDQHQSGHFLTILLTVLNNGHLSFALALGHVFADKECEILETVFXQQ

SEQ ID NO: 160489 - protein, 138 aa, Heterodera glycines
MPNIFKILLIVLLAVVSFRLSASTGDKKTANDGSGNNSSAGIGTKIKRIVTAGLLFTSLATGGAEAIGRSNALGGNAAGLVPSHVTNRSMAPPPPPVQFEMGANRLEKMRAHLRELAEKMPVNESKRLSPSGPDPHHH

SEQ ID NO: 160490 - protein, 176 aa, Heterodera glycines
TLDISHNHHHHHQQQQKQRTTKRMDQNRLSDFAWMETLAWLGRAEVGMKMALVNTRFNMLVDKQFMLRQWRFGEFHICEREGAQRGGAEIMTSEDGTNFITLPLPTTPMPSSVVGFQSLSIWFINADVIKFLRRIRRLFAEDIALEFSTRHTEFRSWQVIARHVWPLLRDGISTLV

SEQ ID NO: 160491 - protein, 204 aa, Heterodera glycines
  unsure (1)..(204): unsure at all Xaa locations
LRYACRGWQTSFCXKFGTTLAVERTRRDTNAEMMGTKMTANAEREAKKEMNGEMGAKKEMNAEMMNTKKDTNAEVMGTKTNANPERDTKMDAVVMNTKTNANPERDTKTETNAVMVNTKTDFANPERDTKTDAVMVNTKTNVNPERDTKMDTTNAEVMDTKKEANAAAAAPVAASDNTAPAPMTWMMDGIVPRDVNVMVDRTTK

SEQ ID NO: 160492 - protein, 123 aa, Heterodera glycines
  unsure (1)..(123): unsure at all Xaa locations
GDGAADHPNVDTFAFMGNPQKDYLIALVVPNRKNLQALAEKNAVNESSWEXLCANKEMAKLLEKELQNFVSGKLRREEIPRKVIICAEPWTADSGMLTEALKLKRKNIERKFAEEIRQLYEGK

SEQ ID NO: 160493 - protein, 221 aa, Heterodera glycines
  unsure (1)..(221): unsure at all Xaa locations
RRRVFMADFEDANSPXWRNQIEGQINLYDAIRGRIRYVNPVTKQEYTLKQDTAVLKIRPRGWHLPEKHVLINEKPMSASLFDFGLYLFHNAKALQEKGSGPYFYLPKLENAQEAKLWADVFGHAETLLGLPHGTIKCTVLIEHLLATFQMDEIVHALKDYIVGINCGRWDYIFSYIKVFRNHRKFLLPDRFLITMTSDFLRAYTLLSIKIAHQRNIFAMGG

SEQ ID NO: 160494 - protein, 221 aa, Heterodera glycines
NPKNYPISLQIYIKNMRIPIILILLCIVALLIHDACAAGKNTTRKANRNRANKNGNSGTPSRQAAAPGKQNKNTPEARTNGQSPKKGDKSIGNQANPAEVKDVPQLSTPKKLLRAATVGVLLFSSLAGQPIPAGANSHMTEAEQYKMHGQGNNMAAYTKQRSNLYGETAAATKPQITHNNFARHTRTRNPPPPHKKTLRSPNFSALAAERAKQKKEEEERL

SEQ ID NO: 160495 - protein, 66 aa, Heterodera glycines
KKNVAQLNLILYSIYFYKKSKKIIFFLIKKKDKHTENKKKAKMEVSPINYQTPKINYLFQLNSFYL

SEQ ID NO: 160496 - protein, 115 aa, Heterodera glycines
CGPGLCTRMAGISGGIAVAMNAYGAHFVLANADINDERKRAMTYAINHHFINCIGMALAGVGAHYPTLTSSMFLISTVLFSVPSYLFAIRNDRRLRAVTPYGGVLAMLAWFSFVL

SEQ ID NO: 160497 - protein, 166 aa, Heterodera glycines; identical to SEQ ID NO: 159852

SEQ ID NO: 160498 - protein, 205 aa, Heterodera glycines
  unsure (1)..(205): unsure at all Xaa locations
KYFLPCLLCCSPLPMVFLVCCHAMPKFPCCPGSQQVVAVMSKYIDTFSAADADKSTVCSTAKNTVDGIKSDLFSCGGCPSGGEAQIVGEIDRQLKNIAKMEINYEDECPYNLGFARAMFDLAAAAAGHAGTDTKWQNMKGQFEQESQAIKAIGQELNITVTDVHVGHPSKGFSAHQNVPSPSHVVANPGQKSSVGHGKDXRTVVI

SEQ ID NO: 160499 - protein, 202 aa, Heterodera glycines
  unsure (1)..(202): unsure at all Xaa locations
MPKNELGFNEQSIRAAFVRKVFLLVGVMLGVVTLMCVVPFVHPPLMAFTKNNHSLYFISLITFLVVYFVLICCDSVRRSFPTNLICTAILTLSIGFVTMVMTAFYSFESVLMAAGITTVSCVGIALFAMVTKRDITSLLGFVFIATMVLMMLGFLLVLWSSFSYSRPLHIVYACLGALLFMVYLAIDIQXLLGGRKYEISPD

SEQ ID NO: 160500 - protein, 175 aa, Heterodera glycines; identical to SEQ ID NO: 158782

SEQ ID NO: 160501 - protein, 160 aa, Heterodera glycines
  unsure (1)..(160): unsure at all Xaa locations
IPENCWDAFACHEVIEISGDKSLIVQNXGKYNGWRSVFATVFAKYPIVLNKHLSDFFYYEISVMKENEFIWGFNFGFAVKQQTKLDESIRCEKGTYAYENDGELWINGEGKGSNAQYSYDIGDTVGIGINSATRQIIFTKNGLRLDASDFLVDPSFADGS

SEQ ID NO: 160502 - protein, 180 aa, Heterodera glycines
MTILDQQEEEVIVGSDDSHMIVSNIPHRAHNVCGVLNKHTIIVAPADDSLKRDFGIYELFNINDPQTKYFAWFVRPDAPKKSAIETFLAHYEVIKDAEGDVHIPSLMAARPIKKFHFGMDIIQQSEHDADWRRPVMILKMPAHCVFLVAVRTLSPTASAPSWLALAVGYGLVNALNSLHE

SEQ ID NO: 160503 - protein, 125 aa, Heterodera glycines
MLDSNILLETESKSRHSPSEVRHIGQIDGGFASPIILTEDAILAHRNRRQTDEETAETAKVFCEKKFSYNCPTALLTISMDWQQKTTEGPRENNRKTNGNGGEEQRECCAGFVPSNGQCVKRERR

SEQ ID NO: 160504 - protein, 66 aa, Heterodera glycines
KCSNEWKGTTTKSQKTLKFSGPNGHIRHGTTWKTVTTYKGIMGGGMALKEMDSVDLNSIEHLLSCP

SEQ ID NO: 160505 - protein, 221 aa, Heterodera glycines
  unsure (1)..(221): unsure at all Xaa locations
ELVVLPHXIVVDIEFDCHSERFFWSDISGHSIRSAFLNGTGLSSNFSEVLRSPEGIAIDWPSRIIYYVDSIKNELGVLSIDGRFQKALLTEGLNNPRALVIDLESRHLYYSDWSREGPKIGRVSLDGSANEIFISDDVHLPNGMVLLQQRRWLCWVDAGIQQLSCIGLDGTGRRVIYAPLEYPFGLTVNGAEERFYWTDWEDMKIHSVDVFGKGYTQFLPG

SEQ ID NO: 160506 - protein, 217 aa, Heterodera glycines
  unsure (1)..(217): unsure at all Xaa locations
NEPSVFGTMRNXSWYFDTQPAFAGKPPIAPLMCPEPNNKLDYPPYRTWNAYKWDSKNTKRTLNEKTLCMIGKSGRRNWTMYDTHSLYGWSEMVATQKALRVSTGKRGSLTSRSTFPSSGHYGGHWLGDNQSRWPDLRLSIIGVMEFNMFGIPQVGADVCGFIGDSNEELCLRWQQLGAFHSYYRNHNDVNSKVSQDPAQWKSVATATRVANLFRYRH

SEQ ID NO: 160507 - protein, 120 aa, Heterodera glycines
  unsure (1)..(120): unsure at all Xaa locations
AEQITNSVEELDILYTVPHCVPISAHHKWNFDDLLEKIWAYLNLIRVYTKPKGQLPDYNAPIILNAEKKXLDDLCMKIHKSLSKDFKCALVWGSSVKHNPQSVGKTHLLNDEDVVQVIKK

SEQ ID NO: 160508 - protein, 146 aa, Heterodera glycines
VRRRVRFVCAAVGGKGAAASPPSSTMLLDVPVVVVGRHDYDTYRDSVERLKDTGFELGLLNVEAETELVQLRPHIQQMMCEHQILPYDPGPDWRFLDYVSNAEEGTFRVSRHQEQSRTVADVCTLEAEEGTSSRAGIFILDDAFPS

SEQ ID NO: 160509 - protein, 133 aa, Heterodera glycines
MLVDFLFSASLSLQLLPLLMSIVAASVLVIVTQCCGCGKKDAAEQQMAPTGDQMQQGSVAKQGSQMGQSAAQGGASKMGQSAAQGGASKMGQSAAQDSTMANSQMPGLSTYAGVAQSPTPIEVSAWAQPPKPK

SEQ ID NO: 160510 - protein, 220 aa, Heterodera glycines
MLTWPFVDAFVIAPKIALLTGRNDFSFDQLYYRSEIALVDSIDLLAFPQPRATDVLSAGAHCEVPTELPKDYRVFVEDPHSKGTVYVAFGTAVPWDYAPPHIANAFFDAFERLSDHRFIFSFRGTFPNRTLSSHIRLVSWAPQLEVLSHPKTKVFLTHSGLKSIKESLCSGTPMLTMPMFAEQAHNAKMLLEFGIGIGLSKFSIDAQTVFDGLSELLHKP

SEQ ID NO: 160511 - protein, 239 aa, Heterodera glycines
  unsure (1)..(239): unsure at all Xaa locations
QKVLPKESEKAKVRQSKALVPQAKANGNSIDGTNTEKRGSACASSTAAAKNDGSIPMEDFVLPAQIKEIVPKTDAAEAPLLISEVDDGGTAIEEGPKNDGPSEGSGADETEEKRRSAPPQLTKECLPTMVTGRYREDLIFYTPKARAKIREKEMQRLSSGSSRRKQIFSSLELTESDAISLVGSSTSSSKDQQKMDSDDKSVPPPPKPKDLGQVPVYLTEHQRDXFFKPLKPLFNLNTV

SEQ ID NO: 160512 - protein, 225 aa, Heterodera glycines
MTSPPSPNALLILEAQADFALNLLCGVSSVDRSCIVSPFSVAVTLSMVYAGAKEKTGEEMGQLLGNGAPESEVHKYFGTLLKSIASGQNSNTLEMANKVYVKKGIRVKNAFKKKIEENYGGRMETVDFEDIEGTAEKINNFVEEATHEKISDLIAPDTLDKESCLVLINALYFKGAWANKFNKKFTKKATFYVDANTKKELETMHLTSNFIYAENAQLQLLGMPY

SEQ ID NO: 160513 - protein, 243 aa, Heterodera glycines
TLRDWLPTIFSDSSLQTERRRLLTKRVHVARCPLILDGLYCASTRMETALRFRCSVNRLRPSKKNCLDIGKPEMELLQVNGGQWEFVQRITNESQLYFYINRFNLVFGSSSKATGGRRYFNCIERGGSTKCPYRMMYMLERQVLYQTGEHNHSFSLLRRRKPTKINIKGLLPTPEKGGDFELLSLATDVAQLAEELGLEFREERGRFVLISNSDESDKENCPSTSTAIPQNNEVVKWLVLADK

SEQ ID NO: 160514 - protein, 140 aa, Heterodera glycines
  unsure (1)..(140): unsure at all Xaa locations
TIFPAKFGERWLLLIAHPDDETMFFXPTLLFLSSIGVQLHLLCITSGNSEGLGTIRRNELYSSASVYGIQPKYISFVDPEERRFPDGFRDWNITSLSALIYSYIRRLKPDGLITFDEWGISGHPNHRDSFKAILNLNTEG

SEQ ID NO: 160515 - protein, 175 aa, Heterodera glycines
IQILLHPRTVGFVHILKRMRKEKYVDFIYDVSVAYGGRIIQSEFDLLLLGLTPAHVHFLVQKIPISLIPEEDEQLEQWLNNKWAEKEEILRRFYSTGEFLPTDANTEKSFQKTELSPRAFLLRLIISAVWLALTAVWTIIFFGFLSAQIRWSCTLLTIIYFVGLQLYFGGFELFL

SEQ ID NO: 160516 - protein, 33 aa, Heterodera glycines
IKPLNLVIYTNSTLVYEIPEKIWRKFWAKVPRR

SEQ ID NO: 160517 - protein, 205 aa, Heterodera glycines
STTFSRLMRMVGKDTESESRRRPANVDELGDQLARRTTGRKMGKSSIGFRHFVQLQNVFSVRCFGTETQPFKHKVHLLFGILEQHVERVTGITAFEQFTLLLFLLIISTILISGDQCQFQLPFCFANSARVRPSDAFVTHHARAQQRAKSSWNGRTALPKCMEEDFTCSLSAIRMLSKDCVWPEHSTRSPVPNAWHQFSRMELCP

SEQ ID NO: 160518 - protein, 195 aa, Heterodera glycines
  unsure (1)..(195): unsure at all Xaa locations
HQQHANDAKGDDDGKLERIISGCCWRKDHTCADHRWRTDCNHCPARGCCXCCCCCKKRKRRRRHTSADDDKEDNKKRKRRHHTSDDDKKEEDHYHIDQHNKKEGEQHGKEDNKSPIQSELKVSTISAVPSDYNTNKRLGATELDVEAEEVPKTKPVPKKPKSEGGTKRKLSNFFWSTGTTEKRPSAAEHGVEVPE

SEQ ID NO: 160519 - protein, 196 aa, Heterodera glycines
  unsure (1)..(196): unsure at all Xaa locations
MLNTGKFLGKTFXITGASRGIGKEIALKLAKDGANIVICAKTTQDNPKLPGTIYSAAEEIEKLGGKALPLQVDVRDEQQVEEAVEKAVXKFGAIDSLVNNASAISLTNTLDTPMKRYDLMHSVNVRGTFLMSQKCVPYLRQTSNPHILNLSPPLLMDXQWFAPHVACTMSKYGMSMCVLGMHEEFRKDGIAVNALW

SEQ ID NO: 160520 - protein, 184 aa, Heterodera glycines
AYCYSSFSDIRSIDSFVDKILIAVKAPFEPQPRSSIEVPDPCETGRYEMTVRNENGGPLQAYLCREPTQKNASELTPNNCKAETEETKAIDSLGTQSFCGPKIPSNELRSPSKQQRMLSPLKLLFANSQPHPDAVSSNSVGPGGVFFPPPGDSFLSLDPPFEENDPYCPLFMNDQNTSLNSLFG

SEQ ID NO: 160521 - protein, 208 aa, Heterodera glycines
  unsure (1)..(208): unsure at all Xaa locations
MNRRWICNDVWMDIFPSFDRPQLGLKLALLSXFNALVDKHFNGKSELTIWRTIGISKDKGPEPELSVRIDYEFVPFPLPDDRPLPSKIRFKSLQIYYIDHFVIAFLRSNHQIFDKRGTNLDLCIPYSNTTDGQRIWDVFVREIWPIFSANIHHLRFSHRDHLDHLLRRTSPTILTDLNQLTSIHSFDLFPAAIGDDFDVPNATISAGQ

SEQ ID NO: 160522 - protein, 233 aa, Heterodera glycines
  unsure (1)..(233): unsure at all Xaa locations
PNLPSSLFPVDEHSLVGPDGESPLFTHRIGKSAPEGQPGENGAAVTLTGEEAAEGRRQMSYWFMNVKASDKMSLDRAVPDVRPNACRSLSYDLADLPSASVVIVFTDEPTSVLLRTVHSVFNRSPMSLLREVVLVDDFSQREELKAPLVAHLRRFGSRVRLFRANERLGLIRAKIVGAKYARGDVVLFLDSHCETSPGWLEPLLHRIKDXRSAVVCPVIDMISDSSMQYSGGS

SEQ ID NO: 160523 - protein, 162 aa, Heterodera glycines
MTKTPFALVTDGASLHHAVIGEARRIFAELILNCHSVICCRMTPMQKAEIVEIVKSLGNDKTVTAVGDGANDVAMIQAANVGVGISGVEGLQAASASDYSIAQFQFLQRLLLVHGTWNFERSVKVILYSFYKNTCLYSIELWFAFFSAFSGVTIFERWTIAM

SEQ ID NO: 160524 - protein, 141 aa, Heterodera glycines
  unsure (1)..(141): unsure at all Xaa locations
MDVGRAELLTRXDLISTXLMLTLLGRFPFLKVISEEKSEFLPEKETERYRADNYELWLGLREVLSKFPSWRIPLARVTVWIDPLDATQEFTEGLTQFVTVMACVAVDGKPIFGAIHAPFSNETVFGMVDFGLFDSNGLPIN

SEQ ID NO: 160525 - protein, 179 aa, Heterodera glycines
MSSDESTTSSASVVSVQLREVPIKDFKDVLPVLQKTLNELEHPFIKKAEEISGMEREKLFYITSSLVLLVLMLCPGNMLLSTLITVAYPMYASLLTLNTQNTSEYTQWLVYWCVFAEFCQFDYLFGSINGLLLLYVPLKTVFLLYLALPQTYGAHNLYVKHIRKVLAVTNVLDRMKKMF

SEQ ID NO: 160526 - protein, 205 aa, Heterodera glycines
GWSSFRCLYVPGISQSFWSSIYPTTVANTEMFQLNQGVNPKLLLALTAIVQGVGQATSGFFFGILDSRTRRFGRTKIVGFGAALQLCSFLLAYLNLPAHAPLEKTFEHGILNSPSITLALVGGFLLSFGDACWNTQVFATLIAKYPIRASQAFAVFKFFQSLLCCAAFFYATSISLPWHVLILAIGLLIGLIGFLLAERMVRQND

SEQ ID NO: 160527 - protein, 140 aa, Heterodera glycines
MTSKIRRNQLGVNNLNTTIEGEGVLEIMQDGSGFLRSSDYDYLASPDDVYVSPSQIKLFNLKTGDTAHGVIRAPKEGEKYFALLKVVSMNGITVEEGRNRITFEHLVPLSPNKKLNISNGATQYSTRIMDLFSPIGKGQL

SEQ ID NO: 160528 - protein, 63 aa, Heterodera glycines
MMANSSLMLPIFTLLALLIVIQFYATDQSSISRDLSQLDRQISDKKQRADQLRQQIASEKNPA

SEQ ID NO: 160529 - protein, 54 aa, Heterodera glycines
DVTIANGSPPPPVQFEMGANRLEKMRAHLRELAEKMPVNESKRLSPSGPDPHHH

SEQ ID NO: 160530 - protein, 140 aa, Heterodera glycines
MSATEQQQPQSQKRARPAEENGNDDGAVLTKTQKVDNGDIPAATANNEASANNNVLKAKLTNNEKPGGAAAAADEETEEQGHEEEEESEGESGAGGEEDDQDDEEDDEDGAEGDDDDEEGDDDDEDAEGDEGGEEEEEEE

SEQ ID NO: 160531 - protein, 234 aa, Heterodera glycines
EKDVEKSLPAQVEQILRVDMTAQQKQYYKLVLTRNYEELSKGVKGSINGFINIMMELKKSCNHCCLVRQYDEIEEEPQARLQQLLKSSGKLILLDKLLCRLRETGHRVLIFSQMVMMLDILEEYMRLRRFPTQRLDGSMRSDLRKQALDHFNAPGSPDFCFLLSTRAGGLGINLATADTVIIYDSDWNPQNDLQAMSRAHRIGQKKQVNIYRLVTKGSVEEEIVERAKQKLVLD

SEQ ID NO: 160532 - protein, 173 aa, Heterodera glycines
MNRRWICNDILMDLFPFFNRPQLGLKLALLSPRFNLLVDAHFDGKSELTIWRQIRIHKNGPKTQLSVDTANNADSVPFPLPDRSLPNKIRFHFLRIGCIDHSVITFLRSNQQIFDGRGTNLRLWLRPDANDYQPIWDAFVREIWPIFVPNIRRLGIPKGDQLDNLLRRTSPTI

SEQ ID NO: 160533 - protein, 141 aa, Heterodera glycines
TSGCAVSILVRGSSKLVLDEAERSLHDALCVIRCLVKKRALLPGGGAPEMEVSVRVRAAAQTKHGAEQYCWKAFADALEVVPYTLAENAGLSPIETVTEMRSQHAMGNKEHGVNVRMGAITDIREENVVQPLLVSSFAVKQ

SEQ ID NO: 160534 - protein, 145 aa, Heterodera glycines
LGCTPRGNTAAYATRLFSHQFHCRPFRKGANGGDSRASSKHICGSSAGMANSPSLFHRWRKFCQGTTFGVQHNKPQCLALRFGKYNRRQRAANSAILSEVRPFLRLSLSSLWLAFLSGSPNRSFASPAMKFHLSSRMLVNSRSPL

SEQ ID NO: 160535 - protein, 239 aa, Heterodera glycines
  unsure (1)..(239): unsure at all Xaa locations
MPSAGTVGFVNERSLVWEDEEKMIFLFDYVKGAASRGEIXNRVVLKTLKDRGQWRVIRHPLVLNFVNEKLLSCALFYVVHILLYFLFLALLFSYVNGPPSVAKNLLVSTILLFFVFFMLVKAALKLQFGISAVSAWFLISYTWSLITYAITLLYIWSWHLFSFDDYNEELKRTIGWFLPIVATLASWINCLYVLRKAPCGSYILMMSKILFSFLNTTIIWIPTLATFAFAFMLIMRDSG

SEQ ID NO: 160536 - protein, 208 aa, Heterodera glycines
MFKGDPKHIVDRPLLKSATETVAKFKTLFNVTEWRNVKVPELDRATLKTFVREHFGKADDFLESPQPIDWKENPPKLQNIADPELKTFANQLHDLWKELGKKMPESAKENKSTLIYVPNPFVVPGGRFREFYYWDAYLIVRGLLASGMTESVKHMCDNYAEMVKKFGFVPNGGRIYYNKRSQPPFLTFMVNDYFAETGDTEYLKSILP

SEQ ID NO: 160537 - protein, 163 aa, Heterodera glycines; identical to SEQ ID NO: 158802

SEQ ID NO: 160538 - protein, 137 aa, Heterodera glycines
  unsure (1)..(137): unsure at all Xaa locations
MPNIFKILLIVLLAVVSFRLSASTGDKKTANDGSGNNSSAGIGTKIKRIVTAGLLFTSLATGGAEAIGRSNAQGGNAAGLVPSHVTNRSMAPPPPPVQFEMGANRLEKMRAHLHXLAVKMPVNESNRLSPIGPDPHH

SEQ ID NO: 160539 - protein, 92 aa, Heterodera glycines
KKAIIRQHFARRGVMANKSLHFGIIHNFDGERRRVAELDNALMEKQFPFYASLRIFHPIRVDVEAGQIGLGHKSVVHFRTLRSGCTSVSSLT

SEQ ID NO: 160540 - protein, 64 aa, Heterodera glycines
PLLATVRAKDILRPRPPVGLSPVRHVHVSGGGVAGRRGARRRLWRGMLGVVHVGLIGGTCSVEH

SEQ ID NO: 160541 - protein, 109 aa, Heterodera glycines
NASFHCPMILQFPFGDFNVLLLLTISTVLLARCLGTIVQFEDELELMENTGTADESADGPLGAFWEWHRMVTGADKFGSTSQRMLHLRPSLKVPSVSKRIAFPSTAFPN

SEQ ID NO: 160542 - protein, 22 aa, Heterodera glycines
NKCPSVFPSFSFVFSIIFSLFF

SEQ ID NO: 160543 - protein, 217 aa, Heterodera glycines
MPKRRRDAFMGEDSGQTEGSSGGPSVADHQQQKKLQEKCAKMEMELNVTKLELENRALKAELKQREVMDELNALKKKVAKMEEQKEAAEQRFSQFQNEQKKILEIISELEKQQKQQLNRNTTKAIFERFSKIKIDQNTLFEKVRALEKEQEKGKVLLNFRKNCWDAIACPEGIEIVGDKNLTVHHKGIYKFIKGRRPPVFAKHPISLDNSTDNFYFE

SEQ ID NO: 160544 - protein, 114 aa, Heterodera glycines
NDPFAYAYIIAFSTLALSKLNTVNFKSDDIVLLDEIRGVAGNQKENNDKNSELANWAVEKGCETIQSLDKYLENDKIDEYTEEMKKFGQIVLQICKQKEVTNAQLISSNFCSPA

SEQ ID NO: 160545 - protein, 66 aa, Heterodera glycines
TISLVVPYVKFSSIRSLLQRSLPWDRAICMGQTKLLLNVPGVSQNDTDAEYCGVFRDVAAMKLNGI

SEQ ID NO: 160546 - protein, 123 aa, Heterodera glycines
  unsure (1)..(123): unsure at all Xaa locations
MCRLQXTHLLARLFLLLALCTALVSSLTAVAPPFGQLSVSGTNLVGANGQPVQLIGNSLFWHQWYPQFWNADTVKALKCNWNANVIRGAMGVDEGGYLSDANTAYNLMVAVIEAAISNGIYVI

SEQ ID NO: 160547 - protein, 83 aa, Heterodera glycines
MRREMFELIGMIKYYQQISITIIRDSRSESFLLPCLSAGIIEFWRCHGIYPFPNSCNRIWPFSMSTDQQKYSRLVVSSSGTCR

SEQ ID NO: 160548 - protein, 221 aa, Heterodera glycines
PFTAAFLLRLFAYANSDAVGKREKSETSDPNTEKSKAILGKKQQLVDTNDVRSEVVRRKAALTLLKAPFVLKTKHKNIQTPEEQSSDDTLVFMRILKSLTFFNVQLLRRLQMLDEKCFLHGFAQFALHLSQREPGNLLFVSLLQEGIFHRYFAKHGDLFHHDNLSRAKDDWICILAHIFTAKILPFYVNLQGTNESMPVLPPLDESIEAHIEKHNREVNEL

SEQ ID NO: 160549 - protein, 145 aa, Heterodera glycines
MTKTISFLPFFLLAVVFVGFGNAGVIHSQLKKLEERYVHGRAQSPQHPSSSSPAVKPSSPKHSSSSSSDDADNEETDGCACPAEKPQSPHHSSSSSPVMPSSPKHSSLPSSPKHHSSEDETEVKQSPPHHHSSSDSEKEEQKLHA

SEQ ID NO: 160550 - protein, 119 aa, Heterodera glycines
FFFFFFFCEMEQIHFAMHFNVFNTHLNKLGMECGIFVHNDNRSPITFGPSDQSGRPLSSLSLPPFRCRLGCPGAGRASVRCTGAPAASARASRARAALRAHSPAKCWPTPPICALCPPS

SEQ ID NO: 160551 - protein, 162 aa, Heterodera glycines
HPMYVKVIHPYGEVLHVDWTKQYKALRGKIGIAFPGYMIHESGQWSDIHKKWFFLPRRASNDTYSETEDEHMGTNLLLIADEDFEHIQVRHIGPPGDGFRGFSAFQFLPNTEDDIIVAIKSEERGGKPIASYLFVFRLSDGHVLLDDQKFDGPYKFEGVVVY

SEQ ID NO: 160552 - protein, 152 aa, Heterodera glycines
SREAPDNRADEENRQVDSADREKRQDNRADREKRQDNRADEENRQVDSADREKRQDNRADREKRQDNRADREKRQDNRADREKRQDNRADREKRQDNRADREKRQDNRADREKRQDNRADREKRQDNRADREKRQDNRADREKRQDNRAIMY

SEQ ID NO: 160553 - protein, 223 aa, Heterodera glycines
  unsure (1)..(223): unsure at all Xaa locations
LKSAGTLPXELARLYVAETVLAIEYLHSCGIVHRDLKPDNLLITSMGHIKLTDFGLSKIGLMNRTTLVSEGYLLQDDTQQFKDNQLCGTPEYIAPEVILRQGYGKPVDWWALGVILYEFLVGIVPFMGDTPEALFANIINEDVEYPEGDEALDSDAESLIHLLLEKNPLDRLGTVGGAPQVSAHPFFAPLDFDTILRQKAEFVPQLENDEDTSYFDSRSDRYN

SEQ ID NO: 160554 - protein, 193 aa, Heterodera glycines
MPRALINRQPPVISASTKKTGRKRMSASSSAFVPEDEEDAPAAYRLPSNAMGDARGQKRKRSVSSSSSSSSVSSSDSSSSSGSSSSSSASSHTPLKNAKPNASEHPSKRTPNEREKSNDMSGSGGTTISCSTVDQLALKVTKAEQQEVNAQNVAQMDDESGHKQLSKNIATGERKNVKTEKAPCNSSRLADGD

SEQ ID NO: 160555 - protein, 207 aa, Heterodera glycines
MLEWLTEHGKPLRVKVTTMDADLNELSIERDSLGQHLFDTVCKIIGLREIWYFGLCFTNRKGFTCWLQMDKRIKDQSVPKQEDGSLHFLFLVKFFPESVKVELIQDLTRHLFFLQIRQSILSMDLYCPSEAAILLASYAVQALYGDIGQQQQQQQPQQQQQADQQQQQQQQQQLDLAKLLPVSVLQQYELTAEMWEQKIRNWWANNS

SEQ ID NO: 160556 - protein, 108 aa, Heterodera glycines
PYKIRAEEMYDIFGKFGAIRQIRIGNTPESRGTAFVVYEDVFDAKNACDHLSGFNVSNRYLVVLYYQATKAWKRMDTDKARVKLEEVKDRYGLGGDIEKKKKKKKKKK

SEQ ID NO: 160557 - protein, 207 aa, Heterodera glycines
LQSPQNGIYSFEGQVIKRISAFPRPANHSFRLLGFSKSDCLISIPSSSLCHIIKPSDEGVSFSENSDSFHLFAEVLGSENQIAILRDEQTDEEFVLKPYRDDPSKRWMLCLQLLPSATIKWQTVSQQQQSPAKVEFPEVSYKQSASTRIYWTDQHGIQSDVQRLQRLLKRTDRSEQFRQELRRIATYATALGYHNFASVFAEVIERM

SEQ ID NO: 160558 - protein, 179 aa, Heterodera glycines
MPSKMTFLYGVPLFVGCCTILWMFWDRFKKTPKPPADQICLDKMTDNRKEAAEEEMAKVEAKMEKAIFISGDCWLAVFDLLPAYQLGLRISMISHRFNIYVDEHFKTRKWGLDFLRIGSKIDENGTKEMEIVNYDGEELPIPQNEVPHKVIGFECIIISFIDRNAIAFLRRFRQLFATR

SEQ ID NO: 160559 - protein, 39 aa, Heterodera glycines
ESRLFLQLKEGESDRKRRNLLITPLNWQMPSLRFPPPPL

SEQ ID NO: 160560 - protein, 194 aa, Heterodera glycines
LVVAGLIVLLLDELLQKGYGLGSGISLFIATNICETIVWKAFSPATMNTGRGTEFEGAIIALFHLLATRNDKVRALREAFYRQNLPNLMNLLATVLVFAVVIYFQGFRVDLPIKSARYRGQHSSYPIKLFYTSNIPIILQSALVSNLYVISQMLAAKFGGNILVNLLGTWSDSSGTYRSFPTGGICYYLSPPES

SEQ ID NO: 160561 - protein, 72 aa, Heterodera glycines
FGKHFFAKWHFQETLELNSPFEAVSTVNGHQFMLQSSKGRNPYCETCLGTIWRLAQHWRRCKSCGYRTHEKY

SEQ ID NO: 160562 - protein, 204 aa, Heterodera glycines
  unsure (1)..(204): unsure at all Xaa locations
VGVTCDRCAPERXFVAPNPQGCLRCFCSGVTRVCESSHWRRNRVELDYARGDRDQLEATTSDAHSPYKPPTQPQVYDGSISFNGFYEARGQTLYWSLPQKFLGDKVTAYGGKLRYTFRFSGAGPLNPDADAIIRGNNIQLEYVSRQQVHADRPNLVEVPITELGWRHSNGVSASREQLMMVLADLDALLIKMSYMRECSQASLV

SEQ ID NO: 160563 - protein, 196 aa, Heterodera glycines
LLPHGANTGDASYFLSILFSAVHVLKHPESLRRLKNVELARSQCGGVHQSYPFADFMGSQSTLQDFDDSDLLLRVAILNEHEGTIEYHSFPILPKMTVAKLCRMIAHQFSVTNPEDYRLYLIFDDYESPPLEPTQIPHLLRSQMNETERPHHLFVYKRADVNISYPGQAVANFFASNTTVLMNPPPLVVTNMRNHR

SEQ ID NO: 160564 - protein, 222 aa, Heterodera glycines
QPGIALTLTDCVEWFFIDDNTGKFSDRFSDDQFSLFDAIHQPRPLVKSNVREIIDMANNRRLTVAEAVRANVLCQDTGRFINVHGHAESLRDAHQLNMIQKPQTLVEVIESGSLDNDGRFIDGVIPRTLLEAICSGMLDPDVAHIKAGPGDELISIGEALKRGRLTPKGEIVLTLGEVGIHRGEKINLFMAHERGLLTGRVRHTIFDVKGVRNAADGSIMSF

SEQ ID NO: 160565 - protein, 206 aa, Heterodera glycines
  unsure (1)..(206): unsure at all Xaa locations
FTSDRKGEVLVKGPSVTKGYYRDAEKTAELFDENGFLHTGDIGQLLPDGRLKIIDRKKHIFKLAQGEYVAPEKIESVYVQCPLVQQVYVDGDSLERNLVAIVVPPEKTLKRLYKELHGTAQNGDLEKRFQEICTDKKIVEAVLKQMQQMGKEQKLSSIEQVKAIFLEVEPFSVENGLLTPTLKSKRPQLRXKYREQIAALYRTGEK

SEQ ID NO: 160566 - protein, 132 aa, Heterodera glycines
MANAFKNGPTSAKSGGSGGEHQQQRQRAANRRQMGKRGADNGDGNGKADGKIDDDEASTVMEATIMQCRNAIGNMVQRRPCVEPTLVKLLKIIHPFYGSEKDHERARAVDFTVLILHIYSENASDCSLGVAN

SEQ ID NO: 160567 - protein, 207 aa, Heterodera glycines
  unsure (1)..(207): unsure at all Xaa locations
TACLKFXNYAFFFWLPYYLTYNIXWAESEANQLSIWYDIGGIVGSVLGGLASDRLGHRSPIILLMLVLSVPLLFIYSGLGSSRVEHVIGMSLLGVTISGPYNLIVGTIAIDLGSQQALANNAEALPTVTGLIDGIGSAGSALGQLFVPLIQNELGWIWVFHFFILMNFLSSMCLIRRFFHDARLISLSFAPRQNGRRQENEPLISNN

SEQ ID NO: 160568 - protein, 51 aa, Heterodera glycines
DPNLHGSFTQKAHFPASVPSNWHSICFVLKSLQRFSMVSEEAMGRRSINYN

SEQ ID NO: 160569 - protein, 147 aa, Heterodera glycines
MPFNCEFAGGVCAEIGQVLAVWLFQWMFIDFAFVGTALFLLLLLHRSLWPLALLYFCWYCYDFNTPKKGSRHFRWLRNLHLWKSVAEYFTVETVKTAEIPPDRNYIFSAHPHGVLSISSALAFGTNGTDFQRLFPGIEWRVATLPMN

SEQ ID NO: 160570 - protein, 143 aa, Heterodera glycines
MAFLSRLSILPNSPISLLAVSLAVLAFVALASANPPTARETAPNAQQNNANSVATGEIAKNIAEKMERMNEFIKAKKFIDAHNLAFEKGEVSFKVAPNHLMHFTPAQYNRIRGLQMRSNRQRHNMATLAGNSSTLPEKLDWRE

SEQ ID NO: 160571 - protein, 63 aa, Heterodera glycines
GVNPRNTESVQLYFRGQKTAKVVGQLAINVPEDGSIVSGILVRRNFNYHLLHPNELSAYTDLA

SEQ ID NO: 160572 - protein, 236 aa, Heterodera glycines
QEKSPIRLFIKMTGKDQVKNEEEELVELKDDDSSLFRYVQDLLVTSQKCGQSPNVFSADANSLIWENTFTLIYSVNENEAAECPTEDTEEAMTNNLDETNPLVEQALNVIKILHELSRSISNFDQIIGVEVTFPTLPEESFHSTKLSQKLCQELTDPLVVSAKALPNWCNYLVHNFPCLFSMDIRTSFMNTTAFGTSRAIAYLQTAFNMAGLRRDDHYPEYRIGRVKHERIKVHRS

SEQ ID NO: 160573 - protein, 143 aa, Heterodera glycines
SPFLIGNESNGFFFVLAVLFLVKVDFLQCKYNEPMARQVLQKHASQFQQHCKNARRGSAVAKCCSAIRSIMGRFTSQKKAMNQMLAKCKAGTTPSEAQQMRRKLEGSNKLKDCGQFKSQIQHKFSGLKQYCYNGAENAEENDE

SEQ ID NO: 160574 - protein, 177 aa, Heterodera glycines
  unsure (1)..(177): unsure at all Xaa locations
GAFAEEKGDGQNGINXQIILTNAWYQPELNSITVPASILAQPFFDTEWPEAVIFGAIGVVLGHELSHGFDNHGVQWDAEGAANKWMDAHSQRAFDRMAKCVVDEYSQLCPFPPDGIVQPACIDGDKTQAENIADNGGLHAAFRAYRSALEVDGPSKALPGKLVGRFNHDQLFFLFFA

SEQ ID NO: 160575 - protein, 79 aa, Heterodera glycines
LVERTLESCSKCINSKLFEKHSIVAYGLKTYLSVVNWDGLSPEHCYIAPMAHCASLVQMDEDVYEEMKLWMKGLVAMWR

SEQ ID NO: 160576 - protein, 148 aa, Heterodera glycines
MSNFGYDQQQVHSYYVQGDNPYDQHADLDVPHRPKNQQPFNSQHFAEQGKAGMPKNDLGFNDQTIRSRFVRKVFFIVGIMLSVVTLMSAFPFMCQPMMEFVQQHPVYAIVAYLIFIVVYLVLMCCGHGIRRSFPINIILLAILTFSIG

SEQ ID NO: 160577 - protein, 144 aa, Heterodera glycines
TQQEVEQLKQLENREEGAKNGQQTNETVAIEEEWTPTSEWVESWKKKLPLQTIMRVLQILVPQVEKICIDKGLTDESEILKFLQHGTLVGLLPVPHPILIRKYIANSATNNWFRTYLWGFVYCRNIDPPIWFDSNVTLFEIQRL

SEQ ID NO: 160578 - protein, 184 aa, Heterodera glycines
MTGLSENVAFSRFVSEFGGRCKELKIANEFARDPSRANKYTRTLKDGKGSWQLCVDFSKNLIDDDIFHQLISVARFAEVGQWRDKMFTGERINFTEDRPVLHVAARNTSMTPIFVNNNDVMPSVMAVLTQMKMFCDDLISGRWTGWTGERIKDVVNIGIGGSDLGPLMVTEALKPYQQGPNLHL

SEQ ID NO: 160579 - protein, 90 aa, Heterodera glycines
RECDIRIVMDALSSGKALLCLPMFAEQFYVSEKLRRMGAAVVLDPRSGSFTPEGISKSIGEALTKRHAVTFPSNEESLKQTILNAFKKLE

SEQ ID NO: 160580 - protein, 125 aa, Heterodera glycines
VKLSPENFEDLDCAVFVDNHPNAMALSVLVTIEMLNAINSLSENQSILKMPPWTNIWLCAAIALSMSLHFLILYVDIMATIFQITPLNFTEWMAVLKFSIPVILLDEILKFVARRMEAHGRVKAD

SEQ ID NO: 160581 - protein, 171 aa, Heterodera glycines
  unsure (1)..(171): unsure at all Xaa locations
DRVLMEPERIXGRLPDEEETDXTAFHEAGHAIVAHFSDHSNPLHKVTIIPRGTSLGHTSQLPDKDRHQETKAQLLAQLDVTMGGRVAEELVFGQEHISTGATSDLRRATKVAERMVKLFGMSDRAGLRDFTVEPIESEQGFCVERGPSTSETIDREIENLLQQSHERVKEL

SEQ ID NO: 160582 - protein, 164 aa, Heterodera glycines
TLLDKLKREQAELEAEAGGEVQKETAATKSGTVSPEKNAEMDVQDALRRKTRKRAATASSSVSSASSPTRSPKRSNAMDTCDRMEASSSHRTDESPPAINLNESNSLSHRHLAEEANASVAGDSATESTTTACGGTFGQKGTEERVGRTAEDGLWQTLALPDFG

SEQ ID NO: 160583 - protein, 117 aa, Heterodera glycines
  unsure (1)..(117): unsure at all Xaa locations
MAHMTKKASNFLIGDFNSVDFDNMADQLGNHGYVSPCNMLTALVYIMRLKESNERDFLAFNPTELFVSSLVLATKYLNDGTLQEFVWNDXWASVSGLALPKLNELEIRLLTSLRWDA

SEQ ID NO: 160584 - protein, 95 aa, Heterodera glycines
  unsure (1)..(95): unsure at all Xaa locations
GAGAPLFVPEYGXKFVPGDGGPDLVETQNWYDFXNKNSLSYINWAIDDKQEASAALQNTQPPVGPADVCSTDRLTKSGKFVHDHLIGVNQKPDGC

SEQ ID NO: 160585 - protein, 194 aa, Heterodera glycines
MAHIIVVNKFQDRTMIRGTTLGQNMYKIGGEEAVPVREALVNNMQQKNAKTCRAAEDEPKKAAIGGTGDELDLLSLLIKGDRSKTIGEDGFDLELFDQDDNNNNGGEEQGVNKGKTTTAPQKAKRTPSQPKESSLSKAMKEMDLDRSKQTPSSTEKPPSRKGSRKGAHLLEMMDQETAAPKTTQARKGSVKRGN

SEQ ID NO: 160586 - protein, 218 aa, Heterodera glycines
PSLFWAFPRQIVPVHRSIGNFVDEVPKKQNEEVLDEDIFENIGKEKAAQLMADLGLAEEKKTGAQSAEKVAEERTEAHGQQRMGTAPRNLRKEMQKKRPQHLAILTDSEEEAEETEEKPNGIDTAVLGNGGEEKGRGATDLSDKAQPPPKSKGVVGISHAEKYIMRVKQNREDTKQQQKTEQKEEMRKGTGKVQKQGSSDDEEPNEWDKLSGASANGG

SEQ ID NO: 160587 - protein, 108 aa, Heterodera glycines
RRRFFSMMATLFFNDGDFFMEGLYHFKKLLLEAGIFTHYLFPFDDTWQQKFVQQPTGRERIRCGIFGRDERHNFVQKFERKAFGGHCWEMQGAVLLFGVISEQISVLA

SEQ ID NO: 160588 - protein, 92 aa, Heterodera glycines
  unsure (1)..(92): unsure at all Xaa locations
EQLDGTVSTPDRQKAIKTLTAXSDVFAFLLTTKAGGLGLNLTAADTAIFLDWDFNPQNDKQAAARCHRIGQDKPVKIIRLVAKHTVEELIKQ

SEQ ID NO: 160589 - protein, 141 aa, Heterodera glycines
MADDVGPPAPSGAVDDFAQRTGQFFDFIRQGNIDRLRALIDSLSVDELNTLLQMRYNEQQFALLVAVMEGHPEIAALLLDKGADVHQTTVGRVNNVTMGEQFAVTPLWIAVNMRHLEMRRVLIAHGADVDLGSDSSFTPLL

SEQ ID NO: 160590 - protein, 144 aa, Heterodera glycines
MSSAKSTPDFCGWEEKPLWVSLIEKALAKAYGNYAILRAGRTVEGLSTLTGQPTLSIDLEYLDMDQQSRTADLDIAWAKLISAREARFLMGCSCGAGKRTMEEAEFQRVGLSSQHAYSLLDVRQTNDGHRLVLLRNPWGENFVW

SEQ ID NO: 160591 - protein, 86 aa, Heterodera glycines
GLIYKGIGGKERNNKCRVEGGNNSLASFCAACFAGCRLLSAHEIGVLYFEITGWCETRTLKNAVIGSISSVSSSLSLTLSTTGPDA

SEQ ID NO: 160592 - protein, 183 aa, Heterodera glycines
  unsure (1)..(183): unsure at all Xaa locations
GVTRLLNNQLQTSYLPNSTKKVELHQELLVLVWKCCEYNQKFLYYVLKSSDVLELLVPILFHLNDSRTDPTRIGLIHMGVFLILLLSGERNFGVRLNKPFTSRGLIDVPIFTGSHADLLIIVFHKLITSGNHKLQSLFDCLLTLXVNVSPYLKSLSMVTANKLVHLAEAFSTPWFIFSTPTNH

SEQ ID NO: 160593 - protein, 116 aa, Heterodera glycines
ILASLKSYNPSLFLRTDKFRSRNACGNKKSEVSLQIDEFDEFYKRWISNYEQEGAGKSHGEENSEHDGKEESESGDEEEEPPQNSRGPVIKCPRMPKIRINLKRRISTISIEKAKE

SEQ ID NO: 160594 - protein, 166 aa, Heterodera glycines
QHANRVLSIGDAFLYNSAWKMCMPDVVVDWQYELFTRVQLQLDSAEHALTGEGGHDLDFLIRFVINRRNGEKVLLELLQRAILHKSLQFSRITQIFRQILPEIPTENAESSVTKVKWLPHAMPLVPLTVSHNSLLRTVFEPLSQRGDEVDKRNLANLMMEFFLILK

SEQ ID NO: 160595 - protein, 197 aa, Heterodera glycines
MCLSNSVRMLSRTWIVAICFYIFFGTILPFSEAIRFYVASNDKKCLKEEIHKNIVLTGEYELSDSVGHTTTVHVTDTRGHTLYKRENFPEARGKFAFTADEYDIFEICFQMHGPTHQQKLNREVHLVLKHGVEAKNYEDLAKAEKLKPLEVELRRLEDLSDSIVQDFAYMRQREEEMRDTNESTNSRVLYLSIFSML

SEQ ID NO: 160596 - protein, 50 aa, Heterodera glycines
CLPEEEDYFVWSAIDPGIGSIAHSLKHLDDERKLLDRFERFVCKMIEPVA

SEQ ID NO: 160597 - protein, 51 aa, Heterodera glycines
LNTDDRMLNAWAPIKKLNQYQSEEEEHKQLMFFQLKSQHIEKKRKLLEEID

SEQ ID NO: 160598 - protein, 82 aa, Heterodera glycines
CVVCTCCCVCGSSIAVLSLFEVVVAADDEVATSPELRTQCSSAARTFARFSSVSSRMMILNSNSLSEPWTNFICSIIAPSVG

SEQ ID NO: 160599 - protein, 167 aa, Heterodera glycines
TPLGITVYNLVSDQVARRIGAGENLRFVGVALCRAVPGVTEKLQGAATSVKVEAADNPNLRINEPDPMLVTCAHRNNRFYLFTNVEPYAEEADGSTHSRDVYNEKPLKEDMITAIEEEAPQSKLCNKAIVYTTYGDIHIELFPDKTPRTVENFCTHARRGYYNGHAF

SEQ ID NO: 160600 - protein, 152 aa, Heterodera glycines
TRWTPFCLCSFPAIGWRRNGFWPISEIDRHFHRPLYFWARLIIGPHEKNAANRQRIGQTKRNDKNSVGHFCWTGQFANTSGIHRVSGRPFRTFHLCGRLISIYEILVCAYSSRPGVLLLFDGHYFGRCPIFCASNGQWRRITSDQRNCFGQC

SEQ ID NO: 160601 - protein, 194 aa, Heterodera glycines
ELLPHGANTGDASYFLSILFSAVHVLKHPESLRRLKNVELARSQCGGVHQSYPFADFMGSQSTLQDFDDSDLLLRVAILNEHEGTIEYHSFPILPKMTVAKLCRMIAHQFSVTNPEDYRLYLIFDDYESPPLEPTQIPHLLRSQMNETERPHHLFVYKRADVNISYPGQAVANFFASNTTVLMNPPPLVVTNMR

SEQ ID NO: 160602 - protein, 92 aa, Heterodera glycines
  unsure (1)..(92): unsure at all Xaa locations
APLFVPEYGXKFVPGDGGPDLVETQNWYDFFNKTPSXVINWAIDDKQEASAALQNTQPPVGPADVCSTDRLTKSGKFVHDHLIGVNQKPDGC

SEQ ID NO: 160603 - protein, 165 aa, Heterodera glycines
  unsure (1)..(165): unsure at all Xaa locations
SPFLIGNESNGFFFVLAVLFLVKVDFLQCKYNEPMARQVLQKHASQFQQHCKNARRGSAVAKCCSAIRSIMGRFTSQKKAMNQMLAKCKAGTTPSEAQQMRRKLEGSNKLKDCGQFKSQIQHKFSGLKQYCNNGAENAEENDEXSEREREEERVXEREEQQNSNH

SEQ ID NO: 160604 - protein, 173 aa, Heterodera glycines
MTGARCSLFFASPMIRPYNVYKIAEQMVDQSQKESLTRFLARVIPVEESCHANLDEIKTLLSEMVVKHLKGEKKDTPPTYAVEFKASNTKLLSRQQIYDLVAQLMNELSPESAVNLTQPDLLVIVHTIRTVTMLSIVENYYQRRKFALKLATESEPKEKSNEKQNTTHEEGET

SEQ ID NO: 160605 - protein, 206 aa, Heterodera glycines
  unsure (1)..(206): unsure at all Xaa locations
IYFLPCLLCCSPLPIVFLVCCNAMPNFPCCPGSQQVVAVMSKYIDTFSSAADESTVCSTAKSTVDGIKNELSSRGGCQNGGEAQIVDEIDRQLKNIAKMEINYEDECPYNLGFARAMFDLAAAAAGHAGNGTEWQYMKVQFEQESQAIKAIGQEKNFEVTDVHIGVPSKGVSAHQNVPSPSHVIANPGQHSSVXPRKERRTVVIGL

SEQ ID NO: 160606 - protein, 72 aa, Heterodera glycines
TRNGEKCQKGTMDQLEYNAGGIGTVATENETKVVASADTQRGTPLRAISMIMPAIVAILNHLHRTLPNMKDL

SEQ ID NO: 160607 - protein, 84 aa, Heterodera glycines
HMMIGNIGINETKCTIQMINRINDNLISFFCCCAMMLIQCHIRGCRRRRSSRSGRLGVSRRIRRRCRNGRLGLVAASVSSRRSG

SEQ ID NO: 160608 - protein, 144 aa, Heterodera glycines; identical to SEQ ID NO: 154942

SEQ ID NO: 160609 - protein, 139 aa, Heterodera glycines
  unsure (1)..(139): unsure at all Xaa locations
TKRTMRRRVNEVIDEFRLEECRPELVGFSGVEKSIKGGETRPSLXASEWXNNPQIKXAPPPTTGLFFSMADXXISVMRALALSGRTLTRTIVQPPLDIYWMAGNNARLTRDELFRAVERLRESILLMDTERARFRRSNG

SEQ ID NO: 160610 - protein, 205 aa, Heterodera glycines
  unsure (1)..(205): unsure at all Xaa locations
IRRASIRTYGDTIHSLIERHHYSGPFLPGFCLVAASSVPRFLLGQLPSVGLNFIDHCVGNQPELQMESVAQWYERVLLFHRFWSVDDSVIHTDYSALRSIVMSNREETVKMPINEPAKSRKAVSQIQEYVDYYGGAGVQHIALNTSDIVHAIQSLRARGLEFLSIPDSYYASLKQRLSDAGVELKEDXEKLRELKILVDFDEQGY

SEQ ID NO: 160611 - protein, 172 aa, Heterodera glycines
MVVPLQSILPAIISVAYYLFVFFFAEVSRKLVDLSLKKFLLVHLFLIELIATAQMCTCVYENAIIIKHYGPSGFFLVVTFLQIAGAFFNRGAFVSPLAPIELFLRGKMDTEKFLAILLSQTLGGYSAFRLANSLWYYSQSYSTDHHQFYDSLPCALSYKVPFYCALLFELFG

SEQ ID NO: 160612 - protein, 80 aa, Heterodera glycines
CEMKWVTVMDIQHLKMERTARTFEQQNLDQLPSLNQSHLYFFRFNDDGGHDFANDEKVCDRESGSENDDAFERRTARTAT

SEQ ID NO: 160613 - protein, 182 aa, Heterodera glycines
MSSAKSTPDFCGWEEKPLWVSLIEKALAKAYGNYAILRAGRTVEGLSTLTGQPTLSIDLEYLDMDQQSRTADLDIAWAKLISAREARFLMGCSCGAGKRTMEEAEFQRVGLSPQHAYSLLDVRQTNDGHRLVLLRNPWGENFVWRGEFSSEWLGWTHQLRRELAADAVFGPGTFWMPFEQFV

SEQ ID NO: 160614 - protein, 197 aa, Heterodera glycines
GPFQEQCISYSGKIVRRCKSFVRNTTPLLDYDIGSLPKRVKFIGGIDLMQPDHKDALPQVFGQPKPVIVFSMSSLLEPSKMPLDKFKTVIQGLGMCEKEVIWKYAKQEDHGRMSLLQKHAPNVHLVEHYDQATVIGNKKTELVISECDIRIVMDALSSGKALLCLPMFAEQFYVSEKLRRMGAAVVLDPRSGSFTPE

SEQ ID NO: 160615 - protein, 143 aa, Heterodera glycines
PHPLQGIIHCDIAARNCLYSNGVVKISDFGMAHRGPVNKMEPNARVPVKWLSPDALAERCFTAKSDTWAYGVMCWEIFTNGEVPYSQMAGSDVAVSLINGQRLDFPRDAPSKFVEFILQHIWDAETSGRYSMAAVHDWLKRHT

SEQ ID NO: 160616 - protein, 198 aa, Heterodera glycines
  unsure (1)..(198): unsure at all Xaa locations
RHERLVGAPARRQAVTNSENTLYATKRLIGRRFDDPEVQKDIKVVPYKIVKASNGDAWLEAQGKLYSPSQIGAFVLMKMKETAESFLGTSVANSVVTVPAYFNDSQRQATKDAGKIAGLHVLRVINEPTAAALAYGLDKAEDKVIAVYDLGGGTFDISILEIQKGVFEVKSTNGDTFLGGXDFDNVLVHHLVAEFKRE

SEQ ID NO: 160617 - protein, 203 aa, Heterodera glycines
  unsure (1)..(203): unsure at all Xaa locations
LLFFVLFFNAAINFVSSHRIVGYYQGIRPLTNDQAKKLTHLILAFSTPDSQGNLSPLSSVLKQALKAGKSANGALKVMIAIGGGGLDPAIFTSLASNSGTRKSFINNIVSYLKTNELDGCDIDWEFPTSSDKAIFVTFLRDLKKAMAPSGAVLSMASAASAFYLDPGYDXPGIESAVDFINVMCYDYYGSWTKTSTGPNSPLF

SEQ ID NO: 160618 - protein, 182 aa, Heterodera glycines
  unsure (1)..(182): unsure at all Xaa locations
SLLLSVFFSLLLILPSDALHLAGFTIPKIFVNFLGDERLQFVXFHLRRTLLTAFIHSAFFFLCFVGLGLSIDQPVFSHSPNNFIQWLSLFSLLIVAASIAILSFCRSNNYERHPLVHTLRNLSDARNWQTLAREIDDEVRAPLLFTILYKDCSRVLVTRLWLIKVTNYAIQLAPISDSQFLV

SEQ ID NO: 160619 - protein, 160 aa, Heterodera glycines
  unsure (1)..(160): unsure at all Xaa locations
LRVAQRYFSSSRKQTEQYLERQANDQYSRRAREHSYRARSAFKLMQINDKMHFIRXVPIIIDSLRLTRVQVHFCYSFLLKLALCPSPGSWCQVLSELIFPNNFAPKKRTKADERTDECPFDGTEQRQGYILGVDLLVRPLLFLLSHFLRFISPLSDNKSN

SEQ ID NO: 160620 - protein, 82 aa, Heterodera glycines
  unsure (1)..(82): unsure at all Xaa locations
FFFFLXTEETFALKDNDVINNNHTLVIFTNKYTNLVVFTDKCFFYLFTIFPLLFSLLLGTLSPMPSSTLPSRSTIRSSVRYE

SEQ ID NO: 160621 - protein, 189 aa, Heterodera glycines
MSNNENENVMNGEAVGGVEIKVEANEEVNTESQEDGEEAIIPQFSKEQMERSVMCCLYEGEIVNAPWHLMAQSKTFMQMWESLDMEEKTQEDFTDFVFPLNDITSDCFQQILAWMREHHNLPEPIVKEDPVTQERIWFKFTDWERQFFDVDFERVKEYFLASNFLDIRSLYLYCAQECARCIMDKSAED

SEQ ID NO: 160622 - protein, 98 aa, Heterodera glycines
MTTPANAARARSAKAKLRDAKRRMVAVGRAGYTRKAQRGDRLAICMTNVSAITRTTLGCTHPFHRRCLYRWIRYHTNCPVCRYNFARTIPRGERNQPL

SEQ ID NO: 160623 - protein, 101 aa, Heterodera glycines
KKYRFPFFQKFNGEGKELPNWANESVIERIWQLNDLSSNYLYKTTKLVRFRAGVLFTEILQRMKNVQQQQRSAAAGGGGDNNNYDGRQRVQAYSAHDTTRE

SEQ ID NO: 160624 - protein, 201 aa, Heterodera glycines
  unsure (1)..(201): unsure at all Xaa locations
MMLPPAGSSVVIESGPTLYVQPPATLFSNNGKADMPMSFSSSSTSTLHSQPFKTLALPSDVELLAAKKQATKAHENSYLGAVPRGEKKMKRFVRSCGGQVXXEDSSMAEWDPNDFRIFCGDLGNEVSDELLAKAFRKYPSFQKAKVVRDSRTNKSKGFGFVSFKHQDDFIRAMKEMDGKYVGNRPIKLRKSNWKERNLDIV

SEQ ID NO: 160625 - protein, 158 aa, Heterodera glycines
NFVECLRQKDNHNLTNTLVNKEKASIVQESSFVTPGIFRRRKMLTGRQLNDEGNIEAKEKSADFKWSIDQIAKIQPIEFDETEEFSLPPENWDPCAKFKTPQFENIDHFWTHNSLIAPSPGLFATASALRRVQPSANSPTTSPFQLALSPFGSGPSCS

SEQ ID NO: 160626 - protein, 199 aa, Heterodera glycines
PNFTLGLAAIAAVSHLLNSGQHVIVSGDCNGGTKNYFDKICVPHHGLELSFVDLTRLENLENEFKPNTKMVLFETPSNPLLKIVDIEAVCRMVRARSKDCVVVVDNTFMTPYFQRPLELGADVTVQSLTKYINGHTDVLMGTVVTNKEQLDQHIYAQQIYAGAVPSAFDAFLVLRGIKTLPLRMRQHMENALAIGRWLE

SEQ ID NO: 160627 - protein, 112 aa, Heterodera glycines
KRQEAGRFAMSCRRIFAMIERRRRSADNAEHSLDQLFKSHLIWLNEQQLYELKQMKGSGKGRTEMQQRVMEWYGQLEGQDKQKAREHPRDGCRDILAQVLGKEKADQLKQLR

SEQ ID NO: 160628 - protein, 142 aa, Heterodera glycines
  unsure (1)..(142): unsure at all Xaa locations
ERKREVAEELGEHLIXRNREHERHKIYEHEQNFKALLVDSIFSTDLSWHDGRKLMRXSSRYQNCDLLEKDVKERLFKEPVRELERKRRDVFFQLSDEHQDITFTTRWHSAQKIIAEDERLGKSKMDDQKLEQDYREWMDRRR

SEQ ID NO: 160629 - protein, 197 aa, Heterodera glycines
PASARHCSEFRPFILNRRAVPCRPSLHLPYRMPNNNNDSTPKTAFSLRPTRTHCQQPMYIHNPFSCPPPPRHRSNLSKFDPSKVPPQFPAFGNPPSPEGMTLTGRMPRQKTKFHRQCAQFSPFWKCFLASSHCSWVRSCPNALSLSKFARPIRRCAQCESVQLSHPTQRAHLFDPFRHPFDHQWSGTPFPKPFCFSD

SEQ ID NO: 160630 - protein, 112 aa, Heterodera glycines
  unsure (1)..(112): unsure at all Xaa locations
FPSTVTCSXMRLLKQLDFPEGKFSLFFMGYKDLDEIPSDDAAQKKFALSTHSTIELTHNWEHGTDFKGYHNGNSEPRGFGHIGIAVPDVDSACARFEQLGVKFVEKPNDGRM

SEQ ID NO: 160631 - protein, 223 aa, Heterodera glycines
LDKMKKCTAATLSDVLANLHSVKKPEALRTVEMLKMASIRLGMSPARTMAVAEKLYTRGNTSYPRTETSAYHDEFEFERVLSALERSPTFARIVRQIRSDGKLLPENGTNKGDHPPITPLRSFCLDGGAKNQLKSAVNRKNEVDKWLYEDAHALYEQIAYHFLATLMRPCKYMLKSVIFDIGGEQFLCQSRKVEDAGFTEVLSWLAVPESNTNAMDALSKLSI

SEQ ID NO: 160632 - protein, 160 aa, Heterodera glycines
MDNRLRFAQEIKDSIRDCYPQLFIDAPIPTKEDIEKLRDSLNLSDQVLVCDKDEEVDDGEHEEDGEEAAMDKDNANEDEEEDGEEDGEDEEEKEEEDVEKEEEEEEEETEQQSTANDEEEAEEVIGEGEEDEEEEETEQAAEKMEARKYPEEEEDEDEFS

SEQ ID NO: 160633 - protein, 214 aa, Heterodera glycines
MTILDQQEEEVIVGSDDSHMIVSNIPHRAHNVCGVLNKHTIFVAPADDSLKRDFGIYYLFNINDPQTKYFAWFVRPDAPKKSAIETFLAHYEVIKNAEGDVHIPSLMAARPIKKFHFGMDIIQQSEHDADWRRPVMILKMPAHCVFLVAVRTLSPTASAPSWLALAVGYGLVNALNSLHEKGFIHRFVTPWNFMVPMPFTMDNITKKMIIMDLS

SEQ ID NO: 160634 - protein, 184 aa, Heterodera glycines
MSAKSRTLWHMQRHRAGLFRTIPSEQRANKGKSVPLCPLSSSDSNDVFSPDRFVHRIYALLDIIQEAVAVNIFALHFLMPNIAKFGVPNFSFTEFYSRSQLFLHDSIDRLGLPVTTAADIFGVGAHCKTPKDSSALSAKIKQFLEDPSSKGTIYIAFGSHIDWKFAPRKFLDDFVTVFRKLPQY

SEQ ID NO: 160635 - protein, 48 aa, Heterodera glycines
PRQGISSSRTIIAMSDPNHGRFSPVDRPLSGKNKRADFASVARVQPRT

SEQ ID NO: 160636 - protein, 88 aa, Heterodera glycines
RGCAWHCLWYSMSSVLRHLARVILYSSWAPLVGPRPSRAPSVRVSGGSPWPPSGGLVSWMTVSIANSTSRTMPGAMTGVSRRLSSLSP

SEQ ID NO: 160637 - protein, 163 aa, Heterodera glycines
HGSLPLQLIILFVLTLQISTQSPEISVPSDVQILSAVRNVDLTTQIVKVKTDFELKNGRNEELSSFVHAVSAEEAARLSWMSAYESGKESGKLRISRVRVKGVSSDMVFHKIEFLDLLMSGSNIKLSVDYALTEYLVPSPKDILQSENQLVIFSGTANVLSAY

SEQ ID NO: 160638 - protein, 133 aa, Heterodera glycines
  unsure (1)..(133): unsure at all Xaa locations
LGAFGLTEPDXGSNPAGMETKAEWDERNSXRLSGSKSWISNSSAADLFIVWARSPKLGHAVKGFIFERGAKGLSTPKIEGKLSLRTSITGQIVMDEVPVPEANLLPGAQGLSGPFGCLNSARLGISRGALGAA

SEQ ID NO: 160639 - protein, 150 aa, Heterodera glycines
MIIEKFPSYRHPGLLQRLNELKRIYTVYNGGVFILFTIPYRYYEDYASITVNQAVNDINAMDKTGVLQNLKIAYIECNVGYWHEWDTTKKEPKSIFKTDETLGLRQLPTLLEYSLTQGRHVEGRRVDLDEQFLSVEYVINFFLKRQLNLF

SEQ ID NO: 160640 - protein, 64 aa, Heterodera glycines
MLRPHHELAISLSGCGFLCSYHIGAMICFQKHANSLLSRVNFYCGASAGALIASLLVLSPHSLE

SEQ ID NO: 160641 - protein, 117 aa, Heterodera glycines
  unsure (1)..(117): unsure at all Xaa locations
HHRQPSVQCIASGCKSRRRPASRALLLVAPLASAVPAGRTASACTCHHRWGPRSKWXQQKQCXXLREGVFVPIGDGCGLNDSRRSGFESIEGGTIXVTVFFFSMKGKREKEGAALMA

SEQ ID NO: 160642 - protein, 148 aa, Heterodera glycines
SELVLTIGTDHIKPKEDAANTSVKSKAVIIDLGDPKENNVNDRKKTTTDDKAPKVMPFAQTEKSLHKINDQIDQRIKPREENRDHIKQSRANTEHPLPGQRIKPTKFRKPFDPLSTVADTLERTMLGDDDRDQRQEKSRFETGVGNVN

SEQ ID NO: 160643 - protein, 121 aa, Heterodera glycines
GMDAFTGTTSGVLKGLCFSNSSFLNYRTAQLSSSADFSICSVSDEQNQPTKALPSAVTAMSFSGADQMEVLVGRENGRVDHFNSLTDQFNALFALPQPSELKGIHRIDGDRILTAEECGTL

SEQ ID NO: 160644 - protein, 104 aa, Heterodera glycines
FVRLLHHHLVNVLGPVVLGRVFSVLLFKVRECVIGLEQERTAQVFGQNKAFLAPAKLLSPPHFHPDTFPDFLLPFLFHCFQFAHVVPLFFGISVLTWLISSSFV

SEQ ID NO: 160645 - protein, 183 aa, Heterodera glycines
QIADLNLLQLLGSGTAAGLNYGVFRHKEITEKPQTLLIYDVGSTKTLVTIVQFLLVNDSNEGGSSYPQVETIGVGYDRALGGHHLTLRLRDHLVKEFKKQNASLNADISANPQAMAKLLKEADRVKQVLSANAEAFAQVECVFEDRDFRVKVTRDELEAMFRDFEQRHMEPINVALTMAQLTL

SEQ ID NO: 160646 - protein, 74 aa, Heterodera glycines
TTAISFAITAFSELVGKVLRFIRAGFDTHYFLDLWPYSLALISIWLYPIVYRSLNLFNKMMNTKTVDRMDRMPK

SEQ ID NO: 160647 - protein, 201 aa, Heterodera glycines
MVCLVMAVLMEMANSKAVKKDNKKGAVAASPAKGKSSPKGGKSPAKGKAAKKLKPKKDAKGIKAKKAKPAKKSKAAKAVKGAPKTVKKLAIAKTAAQVKEIKSPAKPMVLKAVPPHQMHLMNEKVQTAVSPPAHARSLATVPYSTPMAADRNSLPSYTSDGTNLDMAHENDDYQNYYYGTEDSSREFDASAEEEDELYEEG

SEQ ID NO: 160648 - protein, 149 aa, Heterodera glycines
MDDESHQANMERLREDEDEKIGLMDIKREIKAELNEAIGRQTEDGETEPKAERDRSMKSDRDMERKKKSKRTSRDRSRSKSRERKRSRERRRSRSRSKERHRERERSREKERGEKRSKVKSNKYWDVPPAGYEHMSPKEYKELQVVVVH

SEQ ID NO: 160649 - protein, 84 aa, Heterodera glycines
KHFDGQNGKLIGNDIYESLESLVSFISKNGFGLINDERRTKFVQAIQEIEQIVKKWNFFRKLLSWVPTNWAHSPNNQTSMPFVL

SEQ ID NO: 160650 - protein, 120 aa, Heterodera glycines
SSNEETQHQKRASGETEKKRGTGGEGTEGEAGGDNFQATRDGLEQQRRVDQQHIGANVLLFRWDGYCQQWHQGQCETNRSNTCKCWLWPARLRSATRRRRLPFATRSTTRKRSRWKWHTT

SEQ ID NO: 160651 - protein, 61 aa, Heterodera glycines
  unsure (1)..(61): unsure at all Xaa locations
PSPFSFSLLKMTSPIAYDQLREMTXQFXSQKASVPWKQMPFSRENLAPKILRLFARFTNGE

SEQ ID NO: 160652 - protein, 211 aa, Heterodera glycines
MTILDQQEEEVIVGSDGSHMIVSNIPHRAHNVCGVLNKHTIIVAPADDSLKRDFGIYELFNINDPQTKYFAWFVRPDAPKKSAIETFLAHYEVIKNAEGDVHIPSLMAARPIKKFHFGMDIIQQSEHDADWRRPVMILKMPAHCVFLVAVRTLSPTASAPSWLALAVGYGLVNALNSLHEKGFIHRFVTPWNFMVLMPFTMDNITKKMIIM

SEQ ID NO: 160653 - protein, 101 aa, Heterodera glycines
PPFSTFGLLFHRKINVGCVAVGRPSHFVIFSEETARVALSTDISRMCKIHRGESFPMLDFFFSILVHQRNNYRRARKSLSALPLGKMMNSPRGSVPILLGI

SEQ ID NO: 160654 - protein, 135 aa, Heterodera glycines
  unsure (1)..(135): unsure at all Xaa locations
HLTRDAMCGKGVDRHLFALXVVMRHLEESSPFFDKIFPPQYFFSTSQTPLNQFDSEQDGSSMAQKFFLVSAGGGFGPVTDAGYGVSYIVAGEDQISFHISSKKSATNTSSIRFREDLKKTLLEMKQLLTVEQRMT

SEQ ID NO: 160655 - protein, 170 aa, Heterodera glycines
MLQAHQYQLRQGHRRVSARSILAHFGFEFSNDYRLGCGHYSKVYKGYFKEAQRTFAIKVTDLESVSEKFKQKFLPRELEVWRELDHPNLVYLYKDFQWNNYQFAVMELVVGGDLLSFLQKCGHVSETTCHNWMLQIVAALDYLHRKGIAHRDLKLENVLLCENGVIKVTD

SEQ ID NO: 160656 - protein, 84 aa, Heterodera glycines
PGRTFIWLDVPFCFLSIVILNPFVLSFLPYLLQHLHLHSFINVILNLFNNYFQLMIIYGVDSFCVCHCLSVILSENTNKSRCRP

SEQ ID NO: 160657 - protein, 120 aa, Heterodera glycines
FGPLFVPMKNQNADIEHSVHSLRIGPKPFQKLFIARVLCRDSQFLRNLFFQHSRSLQKAIQHFAICEASAPFLCRPQSSMALRIRCAARNYRIKWPYLGQRFRNGRQRSIHCEHATATFV

SEQ ID NO: 160658 - protein, 134 aa, Heterodera glycines
  unsure (1)..(134): unsure at all Xaa locations
MRAILFLAMVCLVMAVILETANSKAVKNKKGTVATPAKGKAAPKGAAKGGIKKDAKSKGKGKKDAXGKKDIKANPSKGKGVPKNDKKSPAAKANDKKSPFKPMAAVKAVPKAAENAQKGPSSAEVVAEENNLDT

SEQ ID NO: 160659 - protein, 161 aa, Heterodera glycines
AAVKTCLFLGAYIGGFTFTGSLMAYGKLQGLLGSAPTLLPAFYMLNFALLSANVAALGPYLTTDSLAMGLSMLGTTSLLSSLMGVTLTMAIGGADMPVVITALNSYSGWALCAEGLMLNNNLLTIVGALIGRSGALLSHIMCKAMNRTLFNVILGGVGTKS

SEQ ID NO: 160660 - protein, 227 aa, Heterodera glycines
FAYFEDARKLYETRMKNASNGNNEADCRIKNLEKELKVLKRQLSALGDLLDQFLDTSLAMRERTLLMEGELGRRLERLEAQNVQLRANLAAMGQQTHKNGDNEQRNEAEQTIETIHFDELSISDGVPLQQNVQQQPQPPNVSNCPVNDEGGDGDGIGDELAHFLAGLPPVDELGQLVLNKFKYSCEFAQLLYTGGGHVDSVFCNIFSGYPPTFFEELIEYALTTHRP

SEQ ID NO: 160661 - protein, 136 aa, Heterodera glycines
  unsure (1)..(136): unsure at all Xaa locations
MFSSSXLFALFLASSVLAVLIIGIKMDGPTEAKCVAPPNAAGPMGLLLLPSXKQSAAFEKGKAPSGESKPKPGQKPSGERRKRDVLGHAGGYVGGWDHPIDSTLDWAKSQWNDANWLADVVNRNGWENTGTPTGGR

SEQ ID NO: 160662 - protein, 202 aa, Heterodera glycines
MSSGLLWRAVLLLVDCASILWFFLDHAKKRRRPREKEIFICADCWLLVFDFLAPSQLGLEIALISRRFDLRVDEHFKTRKWMLNKQLLIQWKTVGNGPKQMQIDDADGNPLPIPRNPLPNKVIGFRRITIIYIDQNVIAFLRRFHCLFPICSIFLDITMVNDRILDYFLLHIWPMFRDSMRFMILNTNAFHRMRQWAPSSLS

SEQ ID NO: 160663 - protein, 199 aa, Heterodera glycines
  unsure (1)..(199): unsure at all Xaa locations
TAAGRAVLVLFVGLHQSPPNSNNGGGGFSSFTTTTTKYSIFVVNAVVMYVGVRAISLLLAKXHLFSLETIAHSPFMDIFQNLAVSLCNEGRXLLFNAIANQLRYPNSHTHYFSCTLLYLFLGANSKHIQEQITRILFERLVALRPHPWGLLITFIELIRLQRYGSWKHESVYCATEIERLFLSAANPCSASGPKVITQT

SEQ ID NO: 160664 - protein, 188 aa, Heterodera glycines
PSSASIIASLLFLFGCCRADGNVVPLSSLNCATKDGGIDGFNFVDDGLILDSSSVTAVPPDLPLICFQKNGKEDLIFKLFVRDGGCVSKANFFTNGQPCTLGESEDVTESDKCPGEGGTSNCTSHEVTCPGIGMAKVAEESNGHAFKVNLANLTKLTNPCAQWKAHFGGVHQVLKGSSSGEKCASAGF

SEQ ID NO: 160665 - protein, 130 aa, Heterodera glycines
TVGNPSSQPNKEMCRSDLACRPFVTASAASGSGKLSPKMSKAAAPRRLRTGRSVFLSSSPQPPTRPFVAECAASCGDLCGEEQQSVVIIAASDAISVSALPLIKPPPECLFSASSCAFSEWEKCAASEGA

SEQ ID NO: 160666 - protein, 138 aa, Heterodera glycines
HSNSRKTAMAYATKYYDYQIAVVFAILLGGLLLLALVVTAIYYICVVNMRGKKGGITRVPSGRSTVRTRMNPQQYSPSAQPQIFHQQYPQYSPYGGMEGMSSQQTQQQQQQQHPFQAQNYEQAGVRVREMQPEYFQQQ

SEQ ID NO: 160667 - protein, 137 aa, Heterodera glycines
IVVTIHRPSEGMCQKFERDRLLKLLERTQKDVQRLTTANQQLTTANQQLTTANQQLTTTNQQQQNTINHQQQNIQQLQNLLAGQQPLVPSFAPGVFAEQQQHHHAPADFLGDQHALGGQNPHAAPFGPDFFGGQPEN

SEQ ID NO: 160668 - protein, 135 aa, Heterodera glycines
QMLLPVPSVGTFARVPFVTLLRLQNVTNSGHFLLRRGCFGSESPHIRYNNELKPFTSLNECFLILWKDIEYLLGICADSDFCNVCNYWSELAAEKSAAVGIMRAGGENTLRGKKLLMGTAALLPLLALYFIDKII

SEQ ID NO: 160669 - protein, 184 aa, Heterodera glycines
  unsure (1)..(184): unsure at all Xaa locations
IVQRIQQLPHFQWRFFSVRFWSINQVCCSIWARQKVWCVNRLAFFCVHSFAVNRQXHDKCFRNHLFVSGLLSPRCDASAPRHSSFFIANAFDLLFKSLLFWLIRTFPFCVSLFIRFRKLAQISLKKEQSPQTLCSFPPLFRREISDFIPSSNSLAFHHFTPFLHFSDNRLRKCLHWTGFSVRFS

SEQ ID NO: 160670 - protein, 138 aa, Heterodera glycines
  unsure (1)..(138): unsure at all Xaa locations
MPNIFKILLIVLFSVVSFRLSASTGDKKTANDGSGNNSSSGIGTKIKRIVTAGLXLPSLATGVAEAIGRSNAQGGNAAGLVPSHVTNRSMAPPPPPVQFEMGANRLEKMRAHLRELAEKMPVNESKRLSPSGPDPHHH

SEQ ID NO: 160671 - protein, 221 aa, Heterodera glycines
VMTDACACGLTEKHSKVRLHLPLELQCELLSALPFEHAARLLLLSKAIAKNCNSLVQKQTKGWNAFSEKCVDKLMKFFHPFVLPRLESIETEHHSFVHSAAHQEEKLLKEEIRLSRAQLSPLVGANLVRRLEKCGTAGEAMTELLNSVVKMYHIIEMYKKRRKELDERFNEVKRMADAIKPDFVPRDIPPRICPTATVWSAERLRLDYTEHLHSLRVRLRQ

SEQ ID NO: 160672 - protein, 132 aa, Heterodera glycines
PPLPSSAAVVLFRPVRRALPQSSMASAGWLPPGATVGCGGPPQQQQQQTISMMMMHQQQQNGIMVNGNGTVVGIGHLQQQQQYHQFIAANPGMVGATSLPQDLENVNAMPFDQSLLDLNDYEIAPDGQFDFP

SEQ ID NO: 160673 - protein, 208 aa, Heterodera glycines
IRELESPDEHSLVLFNPLRSCFRPTRDELFRAVERLRESILLMDTERARFRRSNGALLRMIVRLSGGIPPNFNHAHFAAAAQPVVNVTAVLANANPTGQNYQRLLNLNADLTETIARLTVEISQLGYMNEQLTEQLEHLTEVPPNANFNLDDVVFHPPLDQQHEVPPNANFNLDDVVFHPPLDQQHEVPPNPNFNPALLEFDDVGLQP

SEQ ID NO: 160674 - protein, 175 aa, Heterodera glycines
MSDDVAPPAPSGAVDDFAQRISQFFFFIHGGNIDRLRALIGSLSADELNTLLQMNDPRNGQQFALLIAIMKGHTEIAALLLEKGADVHQTTVRQVNHVNMAVTPLWVAVNMRQLEMCRVLIAHGANVDLGSDASLTPLLLACDKGSTEIVTLLVENGADVNLGDSEGMMPLMVIC

SEQ ID NO: 160675 - protein, 129 aa, Heterodera glycines
MSPFPPSATDLFSLLDAIDKLKHLKRTGWVLVGISEPETVASHMYRMATVAMTLSAHRTDLDVNKCIRMALVHDIGEAIIGDITPHCGVSNEEKFKIEKDAAETISNWLPETVGDEWKNLWREYDEGKS

SEQ ID NO: 160676 - protein, 203 aa, Heterodera glycines
  unsure (1)..(203): unsure at all Xaa locations
FPYEYVYPEQLLYMEQLKKVLDAPVSSWECXSGHCLLEMPSGTGKTVSLLALVVAYMRKYPERLHKLIYCSRTIPEIEKCVEELKRLFRYYTNVTGSAPDFLALTLSARKNLCINKSVVSFRYGSAVDGACQRLTASYVRAKRRLNPNLPCCSFFEKFDEKRDMTLPKGVYNLSDLRGWGKEHGMCPYFVARHLVNRADIIVY

SEQ ID NO: 160677 - protein, 66 aa, Heterodera glycines
VPQRAQPLSLVATQEHSKETAGDIPEEGGDDVKSSWPLWVGLHTSYNGRSRGLPTREGELIPENRS

SEQ ID NO: 160678 - protein, 48 aa, Heterodera glycines
VERFLQHRKHVIEVFDGHFTQLNAHSTGRRSRRFVRRHCCALCQPKTL

SEQ ID NO: 160679 - protein, 127 aa, Heterodera glycines
QLVARPEQFDVMVMPNLYGSIVDNLAAGLVGGAGVVNGESVGSDYVIFQPGARHTFKEAFGKQIANPTAMILCCANMLNHLHLNSYGTALRHAVEKVLKEGKVRTRDLGGFANTSDFASEVIANFQM

SEQ ID NO: 160680 - protein, 243 aa, Heterodera glycines
  unsure (1)..(243): unsure at all Xaa locations
NIPNGLAVRALEGKIAVVTGASRGIGRGIALQLGQAGATVYVTGRAPAASYSLIEKGLPSLEQTAKEIKSRGGEAHPVYCDHANSDDVRRLFKRVEEEQNGRLHILVNNAYSGVPSLIENAGKKFWECEPEFWDDINEVGLRNVYFCSTLAARLMVPHEDGLIVHISSAGGLQYLFSVPYGVGKAAVDRMASDMGLELKSRGVAVISXWPXFVQTEITTMGENAEQFASAARMSMDAFNAALK

SEQ ID NO: 160681 - protein, 234 aa, Heterodera glycines
  unsure (1)..(234): unsure at all Xaa locations
SPALFKRRVRALAXCFPNVIMGDERPMKSDGEGMMEAVLDCFERLDTPKRKWEYVTLLQNHDTAIKTRVQMAQIFAWMDGANDVQVLVPPPGRVDKIKAMDWSFEALNLFKNATRNSAVAGSASAHGFPAHLELAKGGFHASLTRAMVQFIRLELNLTELVRRMNLIGFGRDEIMLITLHSADQLNAPGGFTQTCFRQKNGRDTRFLTREALWAPHAFCPSHKWRHAVCIFGVE

SEQ ID NO: 160682 - protein, 171 aa, Heterodera glycines
MEKAKKEGEKAPIHPFKMSGHCDGEAVEKEEEEYGSKQLIPCAPYARLLLFGTPSAIQSAQLAQLRALVPGAQLAVANCRPGLDTDEAVEEEIVALGASHLVFVHGADGETRDAWEAGGPANLRENVRVNLFSPWLLSNICDRFGIVFVEFDGEGKNCCNSNGKVPTNADA

SEQ ID NO: 160683 - protein, 207 aa, Heterodera glycines
  unsure (1)..(207): unsure at all Xaa locations
TACLKFXNYAFFFWLPYYLTYKYQWAESEANQLSIWYDIGGIVGSVLGGLASDRLGHRSPIILLMLVLSVPLLFIYSGLGSSRVEHVIGMSLLGVTISGPYNLIVGTIAIDLGSQQALANNAEALSTVTGLIDGIGSAGSALGQLFVPLIQNELGWIWVFHFFILMNFLSSMCLIRRFFHDARLISLSFAPRQNGRRQENEPLISNN

SEQ ID NO: 160684 - protein, 208 aa, Heterodera glycines
  unsure (1)..(208): unsure at all Xaa locations
MNILLKSVLFISLLSLFGDCMKNSDQIGVKRKSAGIRIEEPNDVKGKGKVVETSRKGKEKVGEKISVMNTAERIEKMDLAQDKAKMDIDTNGKPKQNEENAPPKYVFIWSGNNEKKNLEVDLRVIRHSXKKLSELFHAKSDQSVNAKHGKQEALPVPKQEAEKILKEVEEWYAHHKNDKHKNAPVFVFKCKDNVSLVINVHLDAVRLS

SEQ ID NO: 160685 - protein, 95 aa, Heterodera glycines
YIPVDLLVYNHLFVYDGGILLQRREDGVQRGAHVVRLIGYGRVNCTDGRRVKYWLGVNSWNTSWGENGGFFRIKRGENVFGIESRDISFGRVELP

SEQ ID NO: 160686 - protein, 130 aa, Heterodera glycines
  unsure (1)..(130): unsure at all Xaa locations
MCRLQXTHLLARLFLLFALCTAFVSSLTAVAPPFGQLSVSGTNLVGANGQPVQLIGNSLFWHQWYPQFWNADTVKALKCNWNANVIRGAMGVDEGGYLSDANTAYNLMVAVIEAAISNGIYVIVDWHAHN

SEQ ID NO: 160687 - protein, 177 aa, Heterodera glycines
WKIALGKLVGMQLLLLLEFENPLIFSLDIFCDKQLALDYAILFCTNPTVSSDAENRLSIRLYFAKIMAIFTKIFNFIKTSTEKENKQKYLLVFVEIWNKICPRIHTELQQNDISSTVGILYNIWRGIASRYNQIPLGIFQGYEPIRVLSSDNGLLLLDEKGTYSSNVIRAELLRTMW

SEQ ID NO: 160688 - protein, 164 aa, Heterodera glycines
MDIADEQKAEWETVGETAAMVSGPVPPPPLPSEEPTPAQVESPTPVKKTIVTTLQQKQVVPLSKLNGVFQEEEEDEVDTLHQIKKKIKPFEITREDRLQSMTPEERKKLIKDLITRIPTDKAKLFSFEVCWEFVDENLMEQRVRPWVNKIICEYIGEDEQSLVA

SEQ ID NO: 160689 - protein, 202 aa, Heterodera glycines
MDPPDLSETQPTIPKRGHHHRRRVDISASRLPRAVLVRIFGHLSVAELGAVSLVCCSWKFIVDSNDFDLWARHARAQLPESALSDPYLFVNTSSHREMLRAFKHAWNPSDCSRNAFVRTNGFTVHRQPIAQSTDGIRGKVGVSSGAHCWEFCWEGPLGTTAVVGVATKHAALHCPGYLPLIGSDDQSWGWNLVNNTIAHNGE

SEQ ID NO: 160690 - protein, 235 aa, Heterodera glycines
  unsure (1)..(235): unsure at all Xaa locations
KIVPSPKPGKFPKTPTTNNMKYLPPELLDEMTFYIYPNQNCSRILTSSWLLMEFLRPHIERWKKIFKILLNELIDLHKLCKEEIPWRTFTALAEKDKNCNAFVAALLELVKEDAYASIDGSGSNALLIRLRELYPSVIETLAWTGLQTLNAELFPSTQRMVQALRELIETTGLYFGAVPKASSSKEHFYHSVACVGDVPPNVDDHPPPQLKIIDAGXQSTSSSTAPIPKPLDKSM

SEQ ID NO: 160691 - protein, 87 aa, Heterodera glycines
ITTVVSGVFSVIVPLFCLFSSSPPVATTASFTAAEFVDGSVENVRPNTESICCWCCCCCMASTATTVSASYSSTIEVPYIRKVLSVQ

SEQ ID NO: 160692 - protein, 125 aa, Heterodera glycines
DEDTFRVELLVLPCIVLALFVNADFTALEVLWTFSIYLEAVAILPQLFMLQKRGEAETITAHYLFLLGIYRALYIFNWVYRYYTEAFYDPIVIVSGIVQTVLYADFFYLYVTRVVKDGAKLELPI

SEQ ID NO: 160693 - protein, 221 aa, Heterodera glycines
KNGKSQRRKSLQNHRMLRFYILSLSEQLISRAEVDPEICVVQIADTSVNSVVDHLVTETYSTTECASPLRTNPTFLTNVCRINISSKGQQKIFFCDLNEPLLNVINEFAERTNVDPKRVNLYTKQYKRCDPKDTPRTLGLSEKCDEIELDAFEDLEENEGKRLALKYQTKGQRPTIVRVLPDATFASLKELFCTDHALDPAKTRFLLGSIEMIADDETPNS

SEQ ID NO: 160694 - protein, 138 aa, Heterodera glycines
MPNIFKILLIVLLAVVSFRLSASTGDKKTANDGSGNNSSAGIGTKVKRIVTAGLLFTSLATGGAEAIGRSNAQGGNAAGLVPSHVTNRSMAPPPPPVQFEMGANRLEKMRAHLRELAEKMPVNESKRLSPSGPDPHHH

SEQ ID NO: 160695 - protein, 86 aa, Heterodera glycines
GKVRAIMLVNPQNPEAGYFSLDEIRPVVHWALSRNLFVLLDEIYDLSIYDEDSECPFRSAVELFEDERSRQKLIWLWGPSKAKAKK

SEQ ID NO: 160696 - protein, 107 aa, Heterodera glycines
VSSVSSVVSSFVALFSASAASAAPSFGCSSAVTASSSFFSAVWSPPSSSFFCSSSSCSNGTVTPKRVAGDSIRGSVFVSSVGPFSTSASPSPSSSPVPSLFGFINSR

SEQ ID NO: 160697 - protein, 174 aa, Heterodera glycines
CRPPLGLENEKYKVLCRSIHVSKAALYIGYMRLLVSLVSSLFFAYQYMMAVTGQLSSDHWINQVTARFMSQAMMSICLQVIVVVLMVHGVKAEKKSLLLPFIVYAAIAVLAGSIKVMSDLVYLDTSVYKNNEAESRAAKVQFLTNLLRTVLQAWCLSVVWRCYGYLTEKKWHVR

SEQ ID NO: 160698 - protein, 137 aa, Heterodera glycines
RILRRTHSEYQWEKVRIFTAWLSADDYPKFLSCADLGVSLHTSTSGFDLPMKVVDMLGSGVPVLAKNFPAIGELIDGTNGLLFDTPEELENLLADLSLGFPGNSKLTDLTKNVKEEAKKNDWTKNWDDVVWPHFENL

SEQ ID NO: 160699 - protein, 83 aa, Heterodera glycines
IRRALLWMLHLSSPPLFNVRKSLTTSFLSELRTYDVWRCEDGNECASGCCECELGRHWGQWERRVIGGKGNRLAKWRRIYTKL

SEQ ID NO: 160700 - protein, 179 aa, Heterodera glycines
MISKQFNRAQRMTRFSRKHVSVDLLRKLFPDEVPDTDVDNSNNDGTERSVGMLEVMDPLRQHLRSSPPRNIREVDMSKFSTFRESHFVELFRSISNGRELLTEVRRLNVQKCVIELRDMEFLAQLMPKVWYIRCSAQTLVIPEDIDQSKLALSVEQMRQLHAKLDKFDYVARKCTKKHL

SEQ ID NO: 160701 - protein, 160 aa, Heterodera glycines
MAFPDFAAGAMENWGLVTYREKYLLYSPELYTAQQKQAVASVVAHELAHQWFGNLVTMRWWSDLWLNEGFATLMEYLGTNAISDGMFRMDDYFLVEALDSAFDRDSRATSHPLFFEIRKAEDVTEAFDSITYSKGASVLRMIRAVMGEEHFKKGLNVCTN

SEQ ID NO: 160702 - protein, 178 aa, Heterodera glycines
MAREDYGFDATAAAAAEQSRPSATTSTPYWQHDSLDIALQAIIRKVRQSPVHRFTDEITDEELQQLCMAATDVFRMQPTLVRIQPPVVVVGDIHGQFTDLQRIFDTHGYPPEQQYVFLGDYVDRGPQSLETIVLLFCYKVKYPANFMLLRGNHECANINRVYGFFDEFINRYKRPDPC

SEQ ID NO: 160703 - protein, 57 aa, Heterodera glycines
VHCCPLDSKIELIIFVAFHLPISRNFRLHVVAKSAMLHFVCVEQLAKSCAVFGHAVC

SEQ ID NO: 160704 - protein, 189 aa, Heterodera glycines
MRDPLRADLLAGSKLKEVKKTDYNQCKSMLLDLFDGTRVILVGETRDRSGRKRLISCFQLYRQSRAAAYFGMFAVHPFFQASGLGKRLLTVAERYARIVWGSDEMHLDVGGSLAELKLGMGRLQRYYKRRGFLSTGILRPFNGAVARFITVDRNDLWIELMVKDIRGALDDIGGDPEKRMKRVNSRGRL

SEQ ID NO: 160705 - protein, 133 aa, Heterodera glycines
PFYCNVLGMRLLKQLDFPEGKFSLFFMGYKDLDEIPSDDAAQKKFALSTHSTIELTHNWEHGTDFKGYHNGNSEPRGFGHIGIAVPDVDSACARFEQLGVKFVEKPNEGRMRGLAFITDPDGYWIEIFNPNNM

SEQ ID NO: 160706 - protein, 117 aa, Heterodera glycines
MVAANLKLSLIFVAGFCLLFIADSDAGKSCKPGEKGPPGPPGKPGNKGKPGVCKPKYETTSKYGTTTSKYDTTTSKYGTTTPEYDTTTSKYDTTTSKYDTTTSDYGTTTSKYDTTTS

SEQ ID NO: 160707 - protein, 147 aa, Heterodera glycines
CKHACAMAMQMLVMYTPINSYEGSDQLLFPLYRSDLHLFRQKPQEFLANALLSNTDVVHTHPMELLPSTDRSINNNNNPYTLMMKRISTPPIFDEEAIDGEALNARTEQKEEEQNLLRAGRNIEEVTAPKMYARHLGDLGGTMFRFG

SEQ ID NO: 160708 - protein, 213 aa, Heterodera glycines
MVTSYGAPCESDDRILKALQILVYFIPETHKQCLECLLIHLKRVSAHSDKNKMDESNLGLLFSSYVFPVQQQKYESIEKAKDEIAQFCRLFPVLLKHCDALFKLPAELVQTFDASLMKRALEQQNCGDLTISSTPSFAFSPLLPTPNRNTKTPRRDEDDAEVAIVHSCSKRVATPNQNTTDLEVAKLAANIASMDEGSARSRLLNKMMTVQRQ

SEQ ID NO: 160709 - protein, 233 aa, Heterodera glycines
IFGLYLHLQELKHFDGQNGKLIGNDSDESLESLVSFISKNGFGLINDERRTKIDQAIQEIEQIVKKWNRKAKIIVMGSYQLGALTKQSDIDAICVVPELRTWRAAKFFGKAKCQIQWNGFRRCADDSLFCHFCLAAQVTGLNRIQDAWVPLIKFKFEIDPKTSVDFDIGLETFAIHDDIFKSEEPIKYEQCDALSAKMANEIGQLANRRRAFITRGGDYEELMEMNSEREKLR

SEQ ID NO: 160710 - protein, 144 aa, Heterodera glycines
MIALIITQMPFLIAHPMQRISTLKLFRKRMHKRKIGTTRAEIEIENCNVRIPELVQSHLKLIRQIRENVVAPVDTIGCHALADKCADPKTYRFQILVALMLSSQTKDQVTAEAMERLKKEGCTVDNFIGIADKRLEQLLNPVGF

SEQ ID NO: 160711 - protein, 156 aa, Heterodera glycines
HLKNGDADKEEQRKVFRAQIELAKELQLPLNVHSRSAGTPVIEWLAAHGAQNVLLHAFSGNVENAQKGIEKGFFFSIPPSFALSKEKEALIQKIPLSKLCLESDSPVLGPVAEERNEPKNIKLSAEFIARIKNVSTDEVIRVTTENAKKLFPKLKI

SEQ ID NO: 160712 - protein, 113 aa, Heterodera glycines
VRIEGRALQLLDVEQLCGELEEITGLRPLPHRPFVENFVKAFYLPFGELQNWMVNHTEYSLSQTSAILNAAAGAAANSSSSVATNSRKATMSRIMANLLGASGIGEGGNSLFQ

SEQ ID NO: 160713 - protein, 121 aa, Heterodera glycines
  unsure (1)..(121): unsure at all Xaa locations
RLSAFCWPQHNISLTTFDRLRHDAYDERGILLLYFDCCCTELGPNKLPTSGRATEQPCGHAHRQTFAHDFRAVHFRSQCSRHSQAXANVTVGVLQQQSMLIHLQPPVVLCGDIPMANFGTC

SEQ ID NO: 160714 - protein, 228 aa, Heterodera glycines
NLDERIIHRWRQVPPIDHQLPPRLWHCAALLPPDTLLFYGGMNEVPSRDSPFVRTLLVRRLCPPTLRHLSLNALAFQIVIRWSQEMNARKMAGAPESAAGTLGRRMNSESDSDLLNFVSRTFFAHLPNSLHFHLTVLLTIRKHSKALNLMGAGGANIPRVPSPMPSHWNLPPIPLQFHLLHLVDGRNLAGGNEESGGENEISTFSRPPLIALSPKSQRRALADEITAL

SEQ ID NO: 160715 - protein, 73 aa, Heterodera glycines
SPHGIFEEHHLCSCCWCCSPNSLRFPPFLLGHKLSVVRWSSLARGKMPKMAKQIGAKQRQICPQICSLFYFMM

SEQ ID NO: 160716 - protein, 74 aa, Heterodera glycines
SSTFALSMLLAVPPTSNWMAFCSYSCFSCCPLVFEEASDQCQRTIVLFFGLGLYSLLFFSSDNAWSTHYQKIAG

SEQ ID NO: 160717 - protein, 138 aa, Heterodera glycines
MPNIFKILLIVLLAVVSFRLSASTGDKKTANDGSGNNSSAGIGTKIKRIVTAGLLFTSLATGGAEAIGRSNAQGGNAAGLVPSHVTNRSMAPPPPPMQFEMGANRLEKMRAHLRELAEKMPVNESKRLSPSGPDPHHH

SEQ ID NO: 160718 - protein, 206 aa, Heterodera glycines
SIMDISRLRRICAIYASDWINGYPFSLAVIKKALESKLNVCSLLFLHLRRDLPDTLKNNPKFVALECFGFDSLEAIRKRLAKEDISRESLVFIDSLPVLIEQFSLPSTSWFLTQIAELSACVLALVHSSESEDDQNSEDWRRIESIASTVFELRARDKHTLCRTKTKKRNGTAEEKLEQFSIEEDYSITFSPFDYSSDRTDDKFVE

SEQ ID NO: 160719 - protein, 117 aa, Heterodera glycines
  unsure (1)..(117): unsure at all Xaa locations
KKIFFFFSLYIFFYLMNKFLILQLXFYFFFYFFFGYIKTLRQKSIYKVTFFIFFFKFFLFFYXFNIIFRGKKKIFFFFFSLYIFFYLMNKFLILQGNFIFFLFFFGGHKNPAPKIYF

SEQ ID NO: 160720 - protein, 206 aa, Heterodera glycines
DCAFSFHPFSSYCEPFDGYLKFDGESICFSGWVQLPQGMFKHRKRGWAVVRNNTFSISQDDESRTPFFGPVELSKCVFLGKESDSESVVVFILRDLSKRSKNQKHLLNSSGELNTVRFTPEENHEFWLSLMAKCCSPRNDLFGEKLPMVECCGRLWVKQGISGHWNEGWAFVHGHSLTYWVQAPNAIAEVDIRKIFLVKQNDIPSS

SEQ ID NO: 160721 - protein, 212 aa, Heterodera glycines
KDSNEVPLCSEVILYHGLSKLQYDMYRAILSSNRSFFAKNMRTEKQARQSLMSTLVQLCKCCDHPYLFRGIEKEPFEEGEHLVNDSGKALILDRLLAYLHKKGHRVLIFTQMQRFLDIVYDIMSLRGYICEQLDGTVSQPDRQKAIQNFQRPDSDVFAFLLTTKAGGLGLNLTAADTAIFLDWDFNPQNDKQAAARCHRIGQDKPVKIIRLV

SEQ ID NO: 160722 - protein, 205 aa, Heterodera glycines
  unsure (1)..(205): unsure at all Xaa locations
ARHVRLVINVHLDAVRLSXELSNMLEDTADEGYPKPIPSPVQNFKSDIMLKLIKLCEEYKYKFDGLKKTTDVPTGEVAEASASNVQEGDVGEASASKVKAGTIAEEIQKFVPPPHIMQWDVKTDLEMVRAADFYNINRLINDDYIDNVYEIVKVKWINGKTPQEIRKGFGVEEPYPPGHPEWARVEKENEWEESDEEREARHAKE

SEQ ID NO: 160723 - protein, 226 aa, Heterodera glycines
NDHNYHANLSIWLCNDVWMDILPLFDRPQLGLKLAMLSPRFDALVDIHFDAKTELTLWRPIAIRNDGGTDTATPELRVFIDDAYNSVPFPLPDAHSPPMPNNIRFKDLRINCIDHSVIAFLSANQLIFQKGTNLRLSLPFGTFNTNVKQIWDDFARQIWPIFAPTIRHFGFPNGHHLDMLLRLVSPTILTDDQINIHSIDSGRQFPEPIGDDHFDGPTITNFDGSI

SEQ ID NO: 160724 - protein, 235 aa, Heterodera glycines
LFAYFEDARKLYETRMKNASNGNNEADCRIKNLEKELKVLKRQLSALGDLLDQFLDTSLAMRERTLRMEGELGRRLERLEAQNVQLRANLAAMGQQTHKNGDNEQRNEAEQTIETIHFDELSISDGVPLQQNVQQQPQPPNVSNCPVNDEGGDGDGIGDELAHFLAGLPPVDELGQLVLNKFKYSCEFAQLLYTGGGHVDSVFCNIFSGYPPTFFEELIEYALTTHRPDALIRRI

SEQ ID NO: 160725 - protein, 71 aa, Heterodera glycines
FAKNQCVTELEPICSAMNAFAVAIAASFCLFFSPSSSRTAAGALPNSPAVTSQRILSTSSWLILPYVRFGG

SEQ ID NO: 160726 - protein, 223 aa, Heterodera glycines
MYRLLSKVDQYPEASRIVFDRTDVAKPTLSLSGVSEYFLNIKLEKTEREGNWSQRPLRLEQKKYAAQDAHCLNRIFRIVASKLKRLKDNELAKELKRHSLIDFNEEKAKPTMAIPLLSGQLVRVKEGEEDFILNVQKAAVEIERSANGVLDGFRTIGDVRFIVDSMLFGLGKRLRKCGFDTRMIGDREQIVEFCKQSKDEKSVVLSAGKGHKQLALQMPDNEV

SEQ ID NO: 160727 - protein, 138 aa, Heterodera glycines
MPNIFKILLIVLLAVVSFRLSASTGDKKTANDGSGNNSSAGIGTKIKRIATAGLLFTSLATGGAEATGRSNAQGGNAAGLVPSHVTNRSMAPPPPPVQFEMGANRLEKMRAHLRELAEKMPVNESKRLSPSGPDPHHH

SEQ ID NO: 160728 - protein, 139 aa, Heterodera glycines
LSSGAGSNHRNRRRNHQKIGCSPHDGPQRDQRGLGTRRRQLSTEPDRLHRQEPDRPACHHDQSRDIGQVRSLQDRSTQRDEDGAWGRQITLGIEWRLKGLTTDLLALSVQKTCGRHKRNEAEHQRPKQRQILLRVEQKK

SEQ ID NO: 160729 - protein, 215 aa, Heterodera glycines
MLSVWLDLAPKCAIAEAIASGTGTTVGGTARTSASKRGGKAAAAAAAAAAVATQPHDPNREMRDAFKRLDRAYFFSSYSQMISRITHSDAATYALLKEMLSELIVHFPHRCLWLSQSIVRSTRVAVRSKRCLEIFELAKKKARSNNDNNAAVVDLNLLIQQYDYLTTLLIGIAETQIVQQRLSGLSMARFFPNIVDFFENGTMRGGVSTRGTGRL

SEQ ID NO: 160730 - protein, 40 aa, Heterodera glycines
KYLSIRCPTCHGQCRCAVREKGWIQKNRPSSAKFLRESTK

SEQ ID NO: 160731 - protein, 84 aa, Heterodera glycines
MEQIDTFTDQIWLDTLAWLGREEIGWHFALVNARFAALVDTQLQQRRWYLTELHINKRRSRGSGAEVMVLNSEGAFFSLPLATI

SEQ ID NO: 160732 - protein, 190 aa, Heterodera glycines
MDSEVEDANATLFVVGDIGRSPRMGYHAYSLARQGAYVNLVGYMDNQPHGDVFGEQINFVALPKPPISSSSDNPFRRFLIRLVKMVWLLFAIPYAFFVLCRGHRHRQLIMVQNPPGIPAMIVCYLLAKIRFATFVVDWHNYSSSMLDNSWISYLVGLIEGFFGRRASFNFCVSNAMKNDLERRWGVNAIT

SEQ ID NO: 160733 - protein, 115 aa, Heterodera glycines
  unsure (1)..(115): unsure at all Xaa locations
MRTFLXIAVVGLMLAVILENVNATGKNSPTKELIHEQGNLQNHATGQSPPDSPNHKNDHENEISNLQNRATGQSPPDSTKRETEHKIEKGKPSPDSPKYDEQGNQQKNATGCQIL

SEQ ID NO: 160734 - protein, 230 aa, Heterodera glycines
QLDDLNSCLNQLLRTIKEDTSEFPPSDLLDEIKQCLDFLANSPKILAKQRAEYISLSWPADLRVVLNRLLRTFNIPEEYVKLCFELSNCAAQSLGADWLKSSDKQFLRLLASLSSGRLRILLDKPEEIDMAQLIACLQLQEYFCGCVEDEQIWMSDDDATFVSKCCQEAAAFVCSYTAACAHQLSDITSRMDLFFVLYRFICAFLSIGGHEIIDVKLLTDALPILTDVCG

SEQ ID NO: 160735 - protein, 40 aa, Heterodera glycines
FFFFFFFFFLFFFFFFFFFFNFKRFNLYQIKFKPEKIHIK

SEQ ID NO: 160736 - protein, 173 aa, Heterodera glycines
  unsure (1)..(173): unsure at all Xaa locations
MSNREETVKMXPITSPAKSRKAVSQIQEYVDYYGGAGVQHIALNTSDIVHAIQSLRARGLEFLSIPDSYYASLKQRLSDAGVELKEDLEKLRELKILVDFDEQGYLLQIFSKPCQDRPTLFLEIIQRHNHQGFGAGNLKALFESIEAEQNERGNLFYKDVAVGGEKILQKNKK

SEQ ID NO: 160737 - protein, 165 aa, Heterodera glycines
MVGSGGVGKSALTLQFLYDEFVENYEPTKADAHRKQVVLDREYCAVDILDTAGQEDYSAIRDNYYRSGEGFICVFSITDLDSFDQLVEFREQILRVKNADPNVCILLVGNKSDLDAERKVPLEQAQQRAELWGCPFVETSAKTRENVDKVFYDIMREKKKKPNNK

SEQ ID NO: 160738 - protein, 177 aa, Heterodera glycines
  unsure (1)..(177): unsure at all Xaa locations
SARVARRCLSFRQDILEDGADEVLINPNMLENERHKLNVERRKKKDHYNPYEEEVDEFGQVKKQQMLSKYDEGIDGEKERDTFRLDESGQYDLDAETAELETRRQLMMLNKKFESLESTKYTLANEFHTEEEMXHFRRPKKKGGKSTRKRKALKADDLETETTEETEEEKKKKKKKK

SEQ ID NO: 160739 - protein, 239 aa, Heterodera glycines
  unsure (1)..(239): unsure at all Xaa locations
NGKARIERAGGAVAMKSGIFRVIWKRPMRGHRGPVRRSTATENIPFLAVARSLGDFWSLNPISNEYIVSPEPDVDVFELKHTDDFVVVATDGLTTVVGVRAIIEALREAEQRSKHFTCNGKESPSVDENNCDQLIDIDQFDVDLPLNQAQCLLQYAFKRWSTLRADNISIICVKLNANEVPTDRNIVVNDEQSLNVCEAIAEQPMAILVTDNGTQXLRTNAVRLQYLGAMDKCVKTSSQ

SEQ ID NO: 160740 - protein, 211 aa, Heterodera glycines
  unsure (1)..(211): unsure at all Xaa locations
MAKLEVQVRHCFCCGLTPGSVLVGLYTLFLYALLTGLAAWALSDTALNGDKPIYEDCELEVQGNSSGDADNKKLKIHGGQTTIQFEDTSSYHCSIGMYTEEMKWSYGNRYVLLVIALCLYIPLIFASILLLAGVSLSSKWLLMPWLILLPLDILRGLFSSLFIFLFSQSDLARIATGIFFLGLQLFHXISLWIIILAKFQRIHYRKHGNAF

SEQ ID NO: 160741 - protein, 146 aa, Heterodera glycines
CAPAAILRRSGHFSGPFSGVEPLSSVTRHHHGSQIHYHRKLIRQTLERHVAGTRPCDQLSCSESTLDARRALGFVANKCAPLWGDWSFGACISSRITTVIQVRSQGQVNYSWCNEPYAVSLSGRLNLHMHGLIFRMNTSVQAGSTR

SEQ ID NO: 160742 - protein, 61 aa, Heterodera glycines
RRKKRAGRGCTSPFCFCRNDLTLFSNGSANIPYIAYVFRVENIRAFPVLSKFGRRFRKAHC

SEQ ID NO: 160743 - protein, 153 aa, Heterodera glycines
FFFFFFFFFFFFFFFFFFFFFFFFFFFFCTLQFYCPNNLFMYNTKLDIAFVRSQLEMSADHLSTVALFTIRYEHNVSIVVRALKHGVSRMIQFRAKVEQTDGAKQTIFEPTVEADVVEHVVTDGAHLTDLGHFLQADQTNGAPVGSLHFAMNE

SEQ ID NO: 160744 - protein, 165 aa, Heterodera glycines
  unsure (1)..(165): unsure at all Xaa locations
MLCEEVNAMFGKRFLAGSEITVISLRANVSEAQQMTTTTATSEEEEDKTGTENTDNERSAPTMARADLIVPSYEFVRVANALCSALRAAKFWADFVDPRNGRPYRRRKNRRPAEPSLGQQSLNAENDDGPTCKIIERADWTASDFCGQLFTDCPPNSDEMQQXLS

SEQ ID NO: 160745 - protein, 241 aa, Heterodera glycines
  unsure (1)..(241): unsure at all Xaa locations
VDGTSSAAAVRDPSTVSTELAHSIDEGAEGSGEAVAVAEQPSHLAILSSTVKLMGTRRMVFFSLPFMYTGIIQSFWSSIYPTTVANTEMFQLNQGVNPKLLLALTAIVQGVGQATSGFFFGILDSRTRRFGRTKIVGFGAALQLCSFLLAYLNLPAHAPLEKTFEHGILNSPSITLALVGGXLLSFGDACWNTQVFATLIAKYPIIASQAFAVFKFFQSLLCCAAFFYATSISLPWHVLIL

SEQ ID NO: 160746 - protein, 138 aa, Heterodera glycines; identical to SEQ ID NO: 158760

SEQ ID NO: 160747 - protein, 252 aa, Heterodera glycines
  unsure (1)..(252): unsure at all Xaa locations
MCAGSGVRIDGRGQWQGYHALISSVQLFRFGGEVNAGQRIGVARDLECAGTRPKPRGDENFVRMELFREDKPIDPTHHLIDCMCTGQICETNRANALEGLPFKFDSRFNGVRGWEIVCPNVRPEEPNSSGESPEQSDDRQTMSPKIYSPIEGEVIGRVRLSASSNSQSYSGCANEGIFVVGTGKWTDYEVRIYNARFRESLALGKQHIEQGQHIGHRLDCAGEGCXQSVFMDVRFQGIVVDVSEAISAHNCK

SEQ ID NO: 160748 - protein, 55 aa, Heterodera glycines
HWFSFCSIFIIISFLSFLFHPLPNISSKFGRILPDSITKIKKNIINNECHKLFYI

SEQ ID NO: 160749 - protein, 138 aa, Heterodera glycines; identical to SEQ ID NO: 158760

SEQ ID NO: 160750 - protein, 213 aa, Heterodera glycines
MLPLPIGNPAGNEPEKWDMNQVVPPISLATTYKQQFAGMPKGHDYARGGNPTRDVLQQSIAALENARHCRVFSSGLSATAAMANWLHSGDHIIASDDGYGGTQRYFRQISVQHHGMELSFVDLTKLSNLEKEFKPNTKMVWFETPSNPLLKVIDIEAVCRAVQSRSKECIIVVDNTFMTPYFQRPLELGADVVMHSLTKYINGHTDVLMGAMV

SEQ ID NO: 160751 - protein, 200 aa, Heterodera glycines
FRRSTVPDVILFGIPLPLGTVTILCIDLGTDMVPAISLAYEEAESDIMKRLPRDPVRDKLVNERLISLAYGQIGMIQASAGFFTYFWIMADNGFLPKDLYQLRAQWDSRGINNLVDSYGQEWTYMDRKILEHTCQTAYFVSIVIVQWADLIISKTRRNSIVQQGMSNWVLNIGLVFETLLAVFLCYCPGLDKGLRMYGLR

SEQ ID NO: 160752 - protein, 210 aa, Heterodera glycines
MAEDGVLKSVIGLRIERVAELDGVAKFSPDKRIAKLPWRLEVRKSAGGGQHSPPTLAVYVWCNWANKSQCWRCKAIVKFVIKSRELDFVRNFEHIFCARQPFVNWTRLLESTAANSLRRAEDTLEIEAQISVTEIVGYGVPPKEDQLFVNGRAFDVNKYLLAAHSPYFRAFFFHDNFREYQTQTFTINDSAVDAELFGMMLECVYPECGK

SEQ ID NO: 160753 - protein, 163 aa, Heterodera glycines
FTLAWYPAAEFLEFERINKAYSFNVPAFSVDTSTTDGPKYTQIMNALSEQLQQHVAKANLLISLNEKIPQFDVEVGEMMRIAIGRTQLLLNKRMKQFREHLSRHLKPIPGQKVTKLNDLHALWVLIDMQLDDIRSIFNSIEQFRLRCWAVAEPKAAATAASGN

SEQ ID NO: 160754 - protein, 236 aa, Heterodera glycines
EIRGRSVSDWIIEQLKITHYENIGKHRTFTVPKSEFLHDTVFRVDLFSCGIALCGIEFSGHFAGNYDLLSFDAIITDILSNEEILMQNILVDFVDNIYPTATDSLLISNAENKKHNETDGCAFSVSPSKSLSNLLLDDSPSDESADERDDQTDFCGQRQQIGDTHSHSSFVAEVVDSLQGALEDGFLRENEKAKLSGDLLNKIKLEVNASKLAYNIPAEEVPGLLFTAFLSLPGVV

SEQ ID NO: 160755 - protein, 146 aa, Heterodera glycines
VCTDLFTEVMKKVDESGEKGEPAVKKMIIEHCKSVKGVDDKKEKLCFFIGAHPDSSTSVLGDIAKPLSFHKPPNKVCSQLKERDSQICALKYDKPIDWDSLVLEKMRVKQLKELLLKLGDSCKGCTEKVDYITRINELKPKPKGEL

SEQ ID NO: 160756 - protein, 143 aa, Heterodera glycines
MVVGWAFREQSVRLNLAKVGTVAEDGRRNELTETGEHITVHAQLAHIGRRQGPNLLGHDVPCADGLRPNDHFKGNGRVTEEATNAVQKGHDSMINVPYANAFECDESVGRRRMGKCQLFVESNTLDEQKSIFFSNDCCFCCCR

SEQ ID NO: 160757 - protein, 120 aa, Heterodera glycines
KLAFCYIQISSHILLWQLIYVAISNPTTEELSKNEDGGGNADDIQMLVEEAIDMAQNLSMIVSPKALVGRRDTAEIVAFSLFPSPFPRQLFEQAKNVQMDFNLLYFRISNDYKFLVETYE

SEQ ID NO: 160758 - protein, 99 aa, Heterodera glycines
MATKCLPLELLYEIVPLIPAENATPNALSSCRLLHKLLLPRVIKWKESIPFTGQSKYCHNFRPLSLVHNIECSFRVITVFVDGQEEASETFTGRLTRNA

SEQ ID NO: 160759 - protein, 113 aa, Heterodera glycines
LGHKTYGSIGPTQSIDLRLFCRNFIFILGSLDNVDDAQLDTVEKLLKEAENRFDSSGNEVKMRERIIQAETKAVKQKREIDTLAKELENLRQIRDSLPTRCYNYVNLEQEGQR

SEQ ID NO: 160760 - protein, 217 aa, Heterodera glycines
FFFALFVPNVFRFSAQILFFVLLLFSLGFFHHSLSHTEAPTNSLSQIICFFCLTVPLVCFFTILLWPADHVEKGQHFNKKGRIFISADCWLSVFELLPSRQLGLGIALISHRFDCYVDEHFRTRRWALEYVQIWRKKKKNGTKKMQIFKGRGGPMEIPQKSMPKKVIGFQYLLISYIDRNVIEFLRRFSSAFANCGNYLIIQINNDRLLELSLRNIW

SEQ ID NO: 160761 - protein, 100 aa, Heterodera glycines
VILVLSSNDISSGALKLFPRICRYTFLRLFSHRFVHLPNVPNPEHFVLVCGDYVLSARTLTKCQHASAMCLVQLRRLLKLFDFVGLVVPNANARLWGPRP

SEQ ID NO: 160762 - protein, 144 aa, Heterodera glycines
MNILLKSVLFISLLSLFGDCMKNSDQIGVKRKSAGIRIEEPNDVKGKGKVVETSRKGKEKVGEKISVMNTAERIEKMDLAQDKAKMEIDNIDTNAKPKQNEDKGVMNTAERIEKMDLAQDKAKMDIDTNGKPKQNEENAPPKYV

SEQ ID NO: 160763 - protein, 61 aa, Heterodera glycines
PPLSLVATQEHSKETAGDKPEEGGDDVKSSWPLWVGLHTSYNGLNRGLPTREGELIPQIFS

SEQ ID NO: 160764 - protein, 216 aa, Heterodera glycines
REKGLRFGHNAGISGNESWDDWLIPKDYEDVFQVNTLGTIRVTHAFKRLVKRERESRIVIMASSCGRVALPTLGPYSVSKFAVEAYADIIRTELILFGVKVAVIEPGFFRTPITNLDRGNAILEKIWARLPEITKQEYGPNFYKFCQNYLLFFLNPTRLNPPEMVVDAYWHAISSAWPRRRRQVGLDMHFFYWPVSMLCAEFQDLFFLLSTFIFRI

SEQ ID NO: 160765 - protein, 202 aa, Heterodera glycines
MPSPLTMDGTAAVPGTSQQPPFGTATDMAHFSNALQLRQLQLLQLQKQQQAAQVKKNLSFLVQQQQTVRSGEIGYFTQVMGQLTVAYNNDPIYKLCFQVPGMQAKTAYRIFQIKQFLSYFINLIPAEDLGEMNSANAFANYFNGILQNAIKEKQSQESVEEKAMITLATTIEIARSHQRCQAGILFIQQTFPEVMQHLNHSQ

SEQ ID NO: 160766 - protein, 200 aa, Heterodera glycines
GVRLRPALRPLLLPSADATFSLRGFACAKKDAAVHGGTFTVIGDKRLRVDPSQLTTKEGKAKIDALRLDAADKRLVMSVLFPNGGGINCKSSFLSRVQMPDGCDVDERVVALEGRAGQDRFGENCGQGKCAFLNVSCNFLQMTPVEGLPNARHFTMSLWKNISDDDDLLQCEWKAFIDDVVVLLNKAESGAELLVEQCWQ

SEQ ID NO: 160767 - protein, 157 aa, Heterodera glycines
MDQIGGTFSDQIWLDTLAWIGRGEVGWHLALVNARFAALVNMQLQQRRWCLEEFHISERKPKRTGAEVLSLANNGSYFSLPLATSPLPDSVIGFNGTFNIWYLDAEVINFLQRFRRLFNTYISLKFTIPITEFRAWQAVAPHIWPLLKNGLGTLVNV

SEQ ID NO: 160768 - protein, 192 aa, Heterodera glycines
MKAHDFEKNCERSTHAQLKDREEALNRMEKRNDEMGSKVRRLKDKLNDRQALAGDEKRNVERIDKILLGAQCEDDECKKLFAQEEENRKRLDNNIVNSPERIIEELSNMEVEVEDIRRKNDQAVQNDRKLEREYGEQRVTSQCAESLINGMQQLEMMQEQMVEMRAKEEERRKQMDDLEMTRKNLVAEIEVL

SEQ ID NO: 160769 - protein, 133 aa, Heterodera glycines
AELSSILQQTHQQQQLQNAGVPLLGLPAQLLASGIENSNILQPNALRMVPGTQYAIMDGPGGAQNLILLATAASGQMNALANIEQQQHHNGGDGATTASAAAHAAMQFVGQPPDMRSLMTNGLIGANIFHNQQ

SEQ ID NO: 160770 - protein, 89 aa, Heterodera glycines
MRKSLASSELLNRGKPAQIKVLCCSCAIWSIRSKIALSSFVWRSFSSEIPSQFNCTIFLHVVPTNVVLGLFANLLASRRLMDSAVEKRL

SEQ ID NO: 160771 - protein, 52 aa, Heterodera glycines
KWGGKKSRTVGNSSNSQMDNHRPERLIFVRLIKTEHPSITTNDRHSIHSPVF

SEQ ID NO: 160772 - protein, 193 aa, Heterodera glycines
IFFCLSSLLLSIFPIVFLVCCNAMPNFPCCPGSQQVVAVMSIYIDTFSSAADESTVCFFAKSTVDGIKNELSSRGGCQNGGEAQIVDEIDRQLKNIAKMEINYEDECPYNLGFARAMFDLAAAAAGHAGNGTEWQYMKVQFEQESQAIKAIGQEKNFEVTDVHFGVPSKGVSAHQNVPSPSHVIANPGQHSSV

SEQ ID NO: 160773 - protein, 111 aa, Heterodera glycines
FSVLLVTVPSNGSGVVYWMSSTSLCTYLLFLVAFANPPRYSTIFSCIILNRACCHCFTALFFCWCFGTVAATTTVATLFLLNLLHSISSSIYMLDQQQEKNCLRIQKKTLG

SEQ ID NO: 160774 - protein, 185 aa, Heterodera glycines
GSRVYIDDGLLSLIVEEILGDDAAILCKVENGGKLGSRKGVNLPGISVDLPAVSEKDIKDLRFGVEQGVDIIFASFIRNANGIRTIREVLGEAGKNIKIIAKIENQEGVDNVDEIIAASDGVMVARGDLGIEIPAQKVFLAQKMMIAKCNMAGKPVITATQMLESMVNKPRPTRAEVSDVANAVL

SEQ ID NO: 160775 - protein, 132 aa, Heterodera glycines
  unsure (1)..(132): unsure at all Xaa locations
KKTRRKRKMIMKKKKHKXRKEKKQKGKRKKQNKEKAVTKSRCKMKSQVKRLLSQKNHQQSHHLLLVSKRSRIKKYHQLTLWMNRMLDNRKRYSIRCQTLDTVIKYRNRIQLSEMIRSCIQLGHQCYRIRCHL

SEQ ID NO: 160776 - protein, 138 aa, Heterodera glycines; identical to SEQ ID NO: 158760

SEQ ID NO: 160777 - protein, 172 aa, Heterodera glycines
MNVSLSLNGLGEMPLVPIADLNGTKKYTAGEVECRNKLAALYRLIDHFRWSQSIYNHITFRLPGSDNEILINPLGMLYREITASSFAKISVDGCVIDPGSTPLGINQAGYVLHSAIHAARHDVNCVLHLHTASAAAVSAMKCGLLPIIQEAMILGPVAYHEYRGILTDVQER

SEQ ID NO: 160778 - protein, 89 aa, Heterodera glycines
PLDVLVVEISTYITCEGGDLELKRKLQEEERQAQQISQSAVISAPPSSVDDFDKEQQLKLDAKALSNTEEAIELQKQAERAKKKKKKKK

SEQ ID NO: 160779 - protein, 165 aa, Heterodera glycines
TRSQKFLVFFLIFLQFVHIFHCSTEMLSSRQLGMSRNDANGCPQLSAKCTTRPAPNAAFFGISNFLAFRKINDNLCLLNFMADVIVVVADDDNENEDASSSLLLLSESEYDKFYLPILCHLGQIFAFLNRHNSEPTTLLLGWRTTIVLLLVLVTIQTLAHFLIDG

SEQ ID NO: 160780 - protein, 90 aa, Heterodera glycines
FFFFFFFFFFLFFFFFFFFFFFFFFFFFFFFFFFFFFFFFFFFFENVKKFSADCDINCECQKKTQKKINSKNLRQIKKIGWKMGGFSIGA

SEQ ID NO: 160781 - protein, 154 aa, Heterodera glycines
MGQINVCDDVWLDTLAWINRVEVGMKFALVNVRLNALADKHFKQRKWCFGEFHICERMTEESGAEIMTSIDGSDFSTLPLPTTPLPDSVVGFRSISIWCINEEVVNFLRTIRRLLTKDIALEFSTFFTEYRSWKVMAQHIWPLLKDGISTLCLK

SEQ ID NO: 160782 - protein, 73 aa, Heterodera glycines
AFLPLLKRSRGRIVSISSVAGRVSVPGGAPYAVAKYGVEAYMDAIRLELQCWGIGCSILEPGMFRTKLVISPY

SEQ ID NO: 160783 - protein, 66 aa, Heterodera glycines
  unsure (1)..(66): unsure at all Xaa locations
KYKKQVKQHKKEKKQQKQKQXKKKRRSKKKKRRKRNNKRSRKKKRSSSNSRSRKKRSMKKKEKKKK

SEQ ID NO: 160784 - protein, 115 aa, Heterodera glycines
SAHFRLLLPFGFLNFSSNLNLIILLFICFFLFVPFLLISAFYYFFIFFASFTGKWRRWGCNCPRKVSKCLDGNWRRCFLSIKASNILINFNIELLLLSLFRGVVVLGGRGSDFTQ

SEQ ID NO: 160785 - protein, 211 aa, Heterodera glycines
ILLKSVLFISLLSLFGDCMKNSDQIGVKRKSAGIRIEEPNDVKGKGKVVETSRKGKEKVGEKISVMNTAERIEKMDLAQDKAKMEIDNIDTNAKPKQNEDKGVMNTAERIEKMDLAQDKAKMDIDTNGKPKQNEENAPPKYVFIWSGNNEKKNLEVDLRVIRHSKKLSELFHAKSDQSVNAKHGKQEALPVPKQEAKKMLKEVEEWYAHHK

SEQ ID NO: 160786 - protein, 207 aa, Heterodera glycines
MKIQAGHRYEIGDQTGKTYIVTGATSGIGKTIATELAMKNAEVVMACRNRNKCLEVRRDIVLNTRNKKVFCRMCDLSDMESVHEFVRKMTKGKYDFKKIDGVILNAATKSKKYSTNKDGVETNLATNHLGSFLLVGLLLQKLLDQDGQSRIVFVGTDIATKNSLKLELDKLNTAKYTNKFLRSTEKLDIEKCKYDMHGAYKFSKLTQ

SEQ ID NO: 160787 - protein, 190 aa, Heterodera glycines
KTRVQTVHISGEYYEHKLCIPMHSLAFSERSDEFFDIWDVNESVIYAVKTAEERGRAKWLQRLTKITLLYEQKMAESAQEGIPMEPFPPWHSKNNDSSATNNKSSRPQSWTTTSSSEDGGAGTAPSAAGVLSDRSSTASSYSTTVEEKCAQSQGENSAEKNGGRDTQKKKRTEDKPTNSRGREAQQKDDG

SEQ ID NO: 160788 - protein, 134 aa, Heterodera glycines
WKKTTGGSLQIVLKSILCAMAPLLRIGLFAVDIFAIIGSHFYAHLSSDSSLSVITKSPDFNDAAEFVATFKSMTDASADVLDKISNIGNGAFTLLKFAGPIGQMVHIGLSIGLKQQDSPELRAIQALQRQITEQ

SEQ ID NO: 160789 - protein, 197 aa, Heterodera glycines
ENVGQNDVEQLRSCTNFAERVSISEPSDGAETVGRWTQCPSKGMPTAFTDDASVAGEFGMEAANVGQFGKISKECPLSVGEKIGLRVAIRVQQKPQTFYFLFLYFDQNGRSRQFRFSARVRPLSRIFDADHCVLSGSIGLSMLTLRCLPFNSHESDATAKATTAVTLTKLDLLRLSVKVTDGNARTNVRRVENEPIQ

SEQ ID NO: 160790 - protein, 189 aa, Heterodera glycines
MSSSHRETGRSPRSVLMRQYEMLLQNSNDNSGFRAWFDNNNLFKWRILIDGPPGTPYAGCKLTALLHFPASYPNDPPTMTFLTDILHPNIDQSGKVCISILHAPGIDPLGHEQPSERWNPNRSVESILVSIQVLLAEPNFNSPANVDAAILFRNDPAQYRKEVRRRVERASASTPRAMSSSTPPPVAQP

SEQ ID NO: 160791 - protein, 98 aa, Heterodera glycines
MSFAYGKSIQQNGGPNRVTFILRKGAIFFTGMVVGTVVVFKAFKPTRPFDEAAERGKRELLEKYTEEYNALQEELRQAEEQQRNGGMSKRRKRERLSR

SEQ ID NO: 160792 - protein, 119 aa, Heterodera glycines
  unsure (1)..(119): unsure at all Xaa locations
RLVFIAAILCLLGSLVATRLFQKLRFAEKAGVXAWAFMGAIATGATIWCTHFVAMIAYQPGVDVTYEPGLTGVSLGIAICGSALALWFGSRQMRFAAPIGGVLFGLAVTLMHYIGMKAF

SEQ ID NO: 160793 - protein, 193 aa, Heterodera glycines
HSSGPYIRVTDIAPGGGVARDGRIRIGDVILKVNNTDTVDVPHQVAVNALKVAGSVVRLLIKRPKTSQASAFRPSSAEPLSRGSPPEGFGFGPPPPVPTHQQSFGESEAVKELEQMPGVRRMDLIKVESDGIHKGLGFSIAGGTGNQHYPGDDGIFVTRIIKGTPAYYDGRLQKGDQILAVDNTIFKNVSHQF

SEQ ID NO: 160794 - protein, 189 aa, Heterodera glycines
MSNNENENVMNGEAVGGVEIKVEANEEVNTESQEDGEEAKIPQFSKEQMERSVMCCTNEGEIVNAPWHLMAQSKTFMQMWESLDMEEKTQEDFTDFVFPLNDITSDCFQQILAWMREHHNLPEPIVKEDPVTQERIWFKFTDWERQFFDVDFERVKEYFLASNFLDIRSLYLYCAQECARCIMDKSAED

SEQ ID NO: 160795 - protein, 198 aa, Heterodera glycines
FLMFNFFYFFAHKNVLLLNFLLFSFIGSFCALKATTHLNFSPIVSELALKIVEECLDEYGQLVETRPFIKRISSPETSPDSEMENDEQNEFKYLWVVFHSLLKKVLLHNTTKNYVQIAMSCKKWSKNDGKESFLSPFCDFVKCFTFVKWLFVQLKRTSKLDTSELERAQEMFRTMRSAYKIGREEAIQTGKNGLNAER

SEQ ID NO: 160796 - protein, 168 aa, Heterodera glycines
MLQREVFCECLGGERVSVRASLMFQSQTFANMWKSLNVDTNELPDDFVFPMTSVAVPVFKKIINWMESHVGQQVPEFEEDPNTRERKWFVQTDFEKDFFKVEVEELVDFLNASNFLNLQSLYRHSCQAMAALPKDRSPEEIRDLLGIEDDLTEEQKAEIRRKNVWCNY

SEQ ID NO: 160797 - protein, 216 aa, Heterodera glycines
MSSEILWSTVFLLLVDCATILFWFFFGHVKKRRRPHKNEIFICGDCWLLVFDFLAPSQLGLEIALVNRRFNCIVDEHFKTRKWKLGCMRICHKIGENGTKQLQIVNSDAKPLPIPQNPLPNKVLGFRHIQIYYIDQNVIAFLRRFHRRIFDVCSMVLYIHTDNDRILDYFLLNIWPMFRHSMRLMNLNSISLRRLRQLAGPSLLSDCPSLRVSFNE

SEQ ID NO: 160798 - protein, 165 aa, Heterodera glycines
SNCLDSGTNELFMSHGRRKRRNIGGQQLLAQQQQHEQQTEETLSAIIRVLAEGEHEEEVERFYNRTASSISNIDGGPSVPFSYKIAGNGTQHRQNHRRKNHRQEVQRESISPGYVCLSDSWFISTVVSMSMVCLMLSALIVIWGCHSLRKSNAPPEANGAKCQKC

SEQ ID NO: 160799 - protein, 104 aa, Heterodera glycines
SGRPPFCVGCFSSRNFLPLLLALPAFVVCFPCRLAFWQFRAFKTPSKAAAVGQAMMKNGPSLGPITVKKWRQSLCASCCSRRTTNHHSSRSEHQVGPLEGAHRK

SEQ ID NO: 160800 - protein, 164 aa, Heterodera glycines
MPSKIRWRAVPLLLVDCGASILWFFFDRVKKRRRPPKKEIFICADCWLLVFDFLAPSQVGLEIALISRRFDFYVDEHFKTRKWMLNKQLLITWKIVGNGPKQMQIDDADGNPLPIPRNPLPNKVIGFRRIQIIYIDQNVIEFLHRFHRLFGTCATALDITTENV

SEQ ID NO: 160801 - protein, 111 aa, Heterodera glycines
HKKRRRTNSACRRRTNLVKRERRPRIARSTGPLMEERKAAEAGLGRTRICSNPPRRMRAAPLRQRSSRARRRTKQPETHLPPPKKRPMKNRRSRRRRKQPETHLPPPKKRP

SEQ ID NO: 160802 - protein, 195 aa, Heterodera glycines
GCFLVLRFVLPSPLFLLSLSSFVFCHFRPHFPPFLQKASVEQRRQYNRIVTSQNDTKAQINSNVQNWASNAGVASDYNNFTSEQQQRSQQFHDAVSGNLTGQALQLFNNLWSIRQNDQITRLAECQQIRAALNATGRDHVLHLLVPIPPPSIVGPPPSGCFPRPPYSKPFGGGFGPKSGGAAIPGRGGPQTPERR

SEQ ID NO: 160803 - protein, 227 aa, Heterodera glycines
RDALTLDYGLGRIRRRRSNYGAMSPTKSVQEVQPVALSWHGLTAVHAKSGRKILDNVPGMADAGQLVALMGASGAGKTTLLNTLLNRNLKSLSVEGQVLVNGHSLGRSITYVSGYVQQDDLFMGTLTVKEHLMAQAQLRMVGHSKRTMRRRVNEIIDELGLQECRHARIGFSGVKKGISGGEARRLLFASELLNNPQIIFADEPTTGLDSSMAESVISVMRALTLSG

SEQ ID NO: 160804 - protein, 194 aa, Heterodera glycines
MAHIIVVNKFQDRTMIRGTTLGQNMYKIGGEEAVPVREALVIYMQQKNAKTCRAAEYVPKKAAIGCTGDELDLLSLLIKGDRSKTIGEDGFDLELFDQDDNNNNDGEEQGVNKGKTTTAPQKAKRTPSQPKESSLSKAMKEMDLDRSKQTPSSTEKPPSRKGSRKGAHLLEMMDQETAAPKTTQARKGSVKRGN

SEQ ID NO: 160805 - protein, 96 aa, Heterodera glycines
PGRLWSVEARSEHSKALFRRALALNRMGLKGRARDYASRCAKLVGGGDSGLKELLDTLRDENDAPLIDLTVFHRSEALQSQRLLTKKGIILCKGKC

SEQ ID NO: 160806 - protein, 109 aa, Heterodera glycines
MNFLNEQIREYSERTKDREEFKGIIEARNKLETAIKPLHGVMESDMASSSLETSMTNSANIARQALEELPVKQVRQMEQIAEEGKSKTVEEHERALREYAEKNSESVKN

SEQ ID NO: 160807 - protein, 99 aa, Heterodera glycines
HPRPSASMQMLRSLLFAAAFASLLINCYEARTIRLANIFLCANSGFTVEESLTFFEANNIEVKGEDISNTQTEPVPIVLVTANVEFDVVFHTNSKDCKE

SEQ ID NO: 160808 - protein, 147 aa, Heterodera glycines
RAFAVGVRRWFWPRTQIVAQMLSGTEMPSLCWWCCSSVAPANRRSDWRWELGLKNCVLWCQFKSDHLAGIQIVYFSSHYWRVFDQFPKRTLRIRLFVYVRTGTNMWQKRGEVLSRLLNTTVAVVRTAEIEKSDEIVASQQKNMSSES

SEQ ID NO: 160809 - protein, 70 aa, Heterodera glycines
NGNWHCTFFAIASYFSAAHQCFIPLFGMKFLNIQLIHLIFNLKNSFKLIQNFRPCLTGGFTQSHALWAVF

SEQ ID NO: 160810 - protein, 202 aa, Heterodera glycines
SFPCRQFPCFPMDLALFHCKMIDTLVILHRLNGLQHPPFCSSPVILASFRSTPMPTLSLGSSITQNLSIASNHLATFAYDGHFVFVINAFNGTLKTEPLRFSERQKEVVAVGEGGNVLFVGISERGALSVLTPNSPQTIGHSAELPKQKGTAFSHLMAANGRTTKRSGEQSEERGGRTNHAVVLLEMPSIKQFIDGPAHSLP

SEQ ID NO: 160811 - protein, 140 aa, Heterodera glycines
  unsure (1)..(140): unsure at all Xaa locations
TFQFLLLFSACCYLQRKEVYXSPKKTERKIHRAANKKHKEETEGMAEVALFQMAMACMANLMDFQMADLAAPVSIQIAAGRIAFQMVDLAAPVAFHRWDITRADSTALGPAHLLEATDTEAVLVEENEKKTESDRRENDS

SEQ ID NO: 160812 - protein, 155 aa, Heterodera glycines
PYLYLTNEAMEKTEKEHKEKDSAEANSDTTNANSLDKEKQPSAPIQLGNKRKLGDGVIIDNGEEYLMKLSTHNSEEPVDNGNVSYVSSFSSRSSTTTMSSVEDEEDSGTNAGDDGWMVVKKESFKKLCDFYEKRRRVECGGGTVAADPFAEQLER

SEQ ID NO: 160813 - protein, 221 aa, Heterodera glycines
VIDEAGLIPPLYGRIRNWIGAKKDWPNPPLPLPKNRTGVSIQNVFAVKLGDFIALTNSSSLSSSDSRQRCIHSSDGPLNFEAFYRDHGFVWYSASLETDGKTLEVPELRDHAYVFLDGIFQGNLSVNDKTGGQMKMELKGGGKRGQRMDILVENIGRLTYPLTKTDPKGLFSPPFIDGKVISKRWIQCGVNLDNVYAEIEKRMAKSKNRKEPTDTIRSALL

SEQ ID NO: 160814 - protein, 72 aa, Heterodera glycines
MAQRHAQCRVRHALPHRIQYQNSSTHAERFGQCPTDSPRLHAMVVSAAVVAQHFHFHFRCYWLRWLCCCRCC

SEQ ID NO: 160815 - protein, 138 aa, Heterodera glycines
MPNIFKILLIVLLAVVSFRLSASTGDKKTANDGSGNNSSFGIGTKIKRIVTAGLLFTSLATGGAEAIGRSNAQGGNAAGLVPSHVTNRSMAPPPPPVQFEMGANRLEKMRAHLRELAEKMPVNESKRLSPSGPDPHHH

SEQ ID NO: 160816 - protein, 53 aa, Heterodera glycines
VRADQSVPFGRINGPSFSLCATFVSVLPCSLCVSLPPRLSLSILVFHFVSLRR

SEQ ID NO: 160817 - protein, 102 aa, Heterodera glycines
MPSSSGSEKGNGRFGVRGEEEVKGGKEIASKTLNIQSKRFYLDVKQNDRGRFVNLVVVAMNGRMNRLFMSMRICKNIKELLGKFEGHVPASEEVNGKAENVT

SEQ ID NO: 160818 - protein, 113 aa, Heterodera glycines
RCSSDASTSTSNSSCWWMKSARTPIGLLKLSEAMHKVTTHFVTLEKANDVVRKNQRQTLENILNKLNMKNFGLNYVPVMEPSACRRFSLENGNVLVIGYDVNHPAPMPQQTRR

SEQ ID NO: 160819 - protein, 196 aa, Heterodera glycines
DLAALPTVTTFLVPSHAHRDRVVTISSPENSNFIQCAPSYAFRKTGVLEIANFEPRWEQMLYTLFLAEGWIVNAPDHEGPESAFSAGRFGGHMVLDSMRAANNFKPLQLSKRPMHIGHGYSGGSTPNGWAASLHETYANELNVVGWSLGGSMTDPLYTLNSLDGKPTSSLVVAGAIGLMDAYRDEVGNLPDDDVWT

SEQ ID NO: 160820 - protein, 59 aa, Heterodera glycines
WKFARERKIWRGQSAWRRPAAILLTPMRRCRQHSASADRRERKNSNPFIRLSLITLGVK

SEQ ID NO: 160821 - protein, 127 aa, Heterodera glycines; identical to SEQ ID NO: 158789

SEQ ID NO: 160822 - protein, 225 aa, Heterodera glycines
  unsure (1)..(225): unsure at all Xaa locations
LGGDIAGVAETXVESVNDGKTAAWHMHRYLQKLQGYQIERVPKLPLFHTPIDYVDLSVQLCGLRFEHPFGLASAPPTTTGAMCRRAFEQGWAFVLTKTFGMDKDLVTNVSPRIVRGTTSGPIFGPGQGSFLNIELISEKSAEYWLTCVKELKRDFSQKIVIASIMASFNQQDWEFLASRSEEADADALELNLSCPHGMGERGMGLACGQNPEMVKQISEWVRSAV

SEQ ID NO: 160823 - protein, 200 aa, Heterodera glycines
LELNGDNLFAVLYAAKKYGVVGLVKACVNYPKLDPTNVFLVLAQARFYEEEDLSRRCWEYIDLFVGAVLFSKEFLQMEHKLLCEILDRDQLIISGEIVIWNAVLRWSDEQLRQKGKECSVENRRKMLGPAFFKVRIPLIPMQDFAEKLVPSGMLNKDELISVYLFHSHPARALPELYPLQFPTQRRAQPKSHREQLQKPT

SEQ ID NO: 160824 - protein, 33 aa, Heterodera glycines
PLVTKRTLPRSNSHVPCAPSPPGHSLRLPFALL

SEQ ID NO: 160825 - protein, 148 aa, Heterodera glycines
MASSFCSSIISIVAIVCLLCKCCFSAPHPCCPGSQHVVSMMKDHTGTFSASMPKSSLCLSAERVAAAVENQLKTIWCPGNGGQTLINEINAAQSSSDECARSLGFIRAMFEIAASAASHAGANAELANLAVQLREQVGTIDTNCAALG

SEQ ID NO: 160826 - protein, 174 aa, Heterodera glycines
MLSETVKIGFIGAGKMAQALARGLINSGRYPAENLMASCPKTDESLLEQCKKLGIGTTIDNTRIARENDVIILAVKPMNISKVTSEIAPNFRREHLLISIALGITLRYIEQLLPSKSRVVRVMPNTTAVVGAGASAYSMGSACQDGDSKVVQDLLSTVGYSVEVPEIHLDPITG

SEQ ID NO: 160827 - protein, 122 aa, Heterodera glycines
SATTFWWTFSLILTVLSSDSNWHMLSPRFEALVDKYFDGKSELTLWRTISAHMDTEAGKAQLYANNTVTFPLPERPLPRKIRFQALEILYIDHSVIEFLCANNQIFDNKGTNLVFKLSSYLA

SEQ ID NO: 160828 - protein, 199 aa, Heterodera glycines
MVVPPAPQIPKKIAEEHKKNGTQPQKEESKKDIGKKKQPQMAERRESSGYSGKRGRGSGMSRESSKRAQGNSRKRGRERSRESSGDKGRKTMRRSSRSRSVKRRRRDSSSSSYSSTSRSRSRSRSYRRSPKRSPARDRCRDRTRRSTSNSSRSSSSSSASSSSQYSSSERSHSQSRSFTSDRDEEEERIRDRIIARTLS

SEQ ID NO: 160829 - protein, 67 aa, Heterodera glycines
HNDDYYLREGEGHRRRLLNQTEEGRRTDENHSDDSSIRGKARENRRQTNQQHHQPNLEFLPVCATGQ

SEQ ID NO: 160830 - protein, 85 aa, Heterodera glycines
ALLAEKEGGNEERKQRAEELRKRTTELLAKIKRSREEKISLIERADSLDVELNNFHTSIEELIDQIDQVTSEIDRRVEFHATCDA

SEQ ID NO: 160831 - protein, 160 aa, Heterodera glycines
MLLLRQLCLLLFAVFYLIDARTQSVAVKGRLLCGTAPARNVRVKLYDEDAGVDPDDQLDAGYSDPNGNFQLSGHTSELTDIDVVFKVYHDCDDGIKPGSRKLKFKIPNSYVTDSATPKKTFDIGVLNLETVFKDEERELIVTMKKERRSHRYQDFLDILP

SEQ ID NO: 160832 - protein, 86 aa, Heterodera glycines
  unsure (1)..(86): unsure at all Xaa locations
MPSFWXAQADFALNLMRELSKNGNSCIVSPFSVAIALSMVYVGAKEKTGKEMGQLLAKGAPEAEMHKYFGALLNAIKNGQNNYTFG

SEQ ID NO: 160833 - protein, 89 aa, Heterodera glycines
RRRPWNSREDGRGGEAQEKRAGPKEPSSKRKRLRKAVKIQLKRKRTKSQATKELILNAREVIPFGDRVDAPPTFTSELARTIRPLHERA

SEQ ID NO: 160834 - protein, 192 aa, Heterodera glycines
RKCPSAKGLMCECHYGEKGQDMGNEPFVLLPIPNGLMCKLGQFDVNGIGSLLEGKCLHNDHYCFMARCNKGNKYFKTEWGCAVSQDRVSINQQIGETVKAVVACEAMFGQKDVAFSNENFTIDMLDVETSTTTTTTTTRQLEVITTAQPTTTTSSSTTTTTTTTTTTKPTIEESTNSTNGGNIVCVHHTSIS

SEQ ID NO: 160835 - protein, 80 aa, Heterodera glycines
TVGFSGADITEICQRACKLAIRESIEKAVAIEKDRQAKEQRGEEVMDVAEDPVPQLTRKHFEDAMKFARRSVSDNDIRKY

SEQ ID NO: 160836 - protein, 205 aa, Heterodera glycines
FLLLCQWCSVIALLIFGIICLCFGVFSLIFVPKLVNKAIRENVFVGRFPNGSDNFAMEQYRDPIYDVKMQIWVFSVQNPNEIVNKGEKANVTELGPFTYDIRMHKNNVKFGSNDSRLFYRNVKSFFFNPHLSCSECNLSSSVVVPNIIFQKLVHACGNNTFLIPFIEPFLMNKEKVFVSVTLDELLFQGYEDKFVNDICSNPLTK

SEQ ID NO: 160837 - protein, 115 aa, Heterodera glycines
HRMAITTHGILQRLVTARNSAGEVVAAHGAIGVVADPAIQAAAMERMGAAENSPRDGDRRSHADGTSLAPLRFSCRPARPTAALLRLASRSFALALRALAENEGYDVCDVMVRRF

SEQ ID NO: 160838 - protein, 197 aa, Heterodera glycines
GFVEEEGRETILDNHRQIHQNRRAPSICGSKALDCPPKSHYICALKATKLSLKNFSLSVAAFTLLKVFNSLSRSNTKTPRVVSSNKSIRKLFELLRVPTFIGTLPLLCQFSQCFCAHFFPTKSVTICRPIGVGISATVAMAFLWPNNTLALYAFWKMVEFAFFRLADVGTLPVLPWADALLFSVLSSYLLGLAVLEP

SEQ ID NO: 160839 - protein, 190 aa, Heterodera glycines
IWYDFPAHPPDSSASSDFNEPRTHRQALFAAQDPLVGNLIWFPMVAREYEACRDCVGIIDMTCFAKFDISGPDVVPLLQKLCSANIDRAVGTTIYTGMHNEQGGYVSDATVSRMGNDSYFIVAPTVQQVRLALWIQRWADEWAMDVRLQDVTNNFIALDIVGPASRDLMRALTSESVTPHDFPSFAFRTI

SEQ ID NO: 160840 - protein, 165 aa, Heterodera glycines
  unsure (1)..(165): unsure at all Xaa locations
MGHFNLCDDVWLDTLAWIILLXVGMKFSLVNARFNTLVDRHFEQRKWCFGEFHICERMTEESGAEIMTSIDGSDFSTSPLPTTPLPDSVVGFQSISIWYINEEVINFLCTIRRLLAEDIALEFSTYFTEYRSWKVMARHIWPLLRDGISTLFLKKCDLAMLRKHV

SEQ ID NO: 160841 - protein, 151 aa, Heterodera glycines
WPLSLAKLSSDIFTPRLSKEQVRNCSKLPFEYRMDLVKRIVNCLIEIAPGENIDGWRCGGSISLQLLAQKLLTADDRRMLANQDKGLQTFLRNQHQIFCVIKGIVSMRKWSTVNEEFARKSGGKPPRSHCFFHRLHPDGCPLEAHICSYKP

SEQ ID NO: 160842 - protein, 154 aa, Heterodera glycines
SPAAITTSNNNEENGGTTIRQKNATKTSNGILPPKTPKEMRLIVGTTVPQKSQQQQPLKGNSSAISKALTSPAPKKKDDESSILPFYRLQHSKSLPVDRTPTPTNEQEENVTSNIKIAKKINVTADGNCLFRSFAVSLYGRDDGFEHKRLRKQA

SEQ ID NO: 160843 - protein, 95 aa, Heterodera glycines
LLGQALFQLEFGPWHSDGFTPLLIAYDCPADMLIGQDLINEISATLPIKFEYHKNSVNVGGTRVSMLDPMAAEEKFFSVRVVDPRTNEEIGLETW

SEQ ID NO: 160844 - protein, 161 aa, Heterodera glycines
YKRCATTRPKHADPGSVKRSLQLDANIYKRLRRNSSEKKQQQQSANLNYGNSILYHRRVENGAKDGTERTVADTVAPNVNKMLVPKRKVTADALLDSLRAEDGAKKHKQNAKMCPPPPSVPSSLSSSSATLSSALWDHENDENAIVVIDNNTSTTAQSQDA

SEQ ID NO: 160845 - protein, 123 aa, Heterodera glycines
MQVHHHHHHKSHHQRHKRSYSSARHVLINFGFQFPHDFKLGSGRYSKVYKGFYREANRYFAIKITDLEAVSDRFKHKFVPRELKVWRELSHPNHVRLYKDFMKNDFLFEIIDLAVGGDMVGQS

SEQ ID NO: 160846 - protein, 150 aa, Heterodera glycines
MSKRRLRQELQDMVKNPLPDGCTARPLDQRTMNSWTVTIRGRAGTPYANGNFQLSMAFPRDYPFKAPQVTFTTRIFHPNIDTRGKVCLDILQTHWAPTLTIEKVVISIIVLLNDPNPDNSPINAQAASLYRTDRAEFNRRAREMTLAYAR

SEQ ID NO: 160847 - protein, 220 aa, Heterodera glycines
NTFRLSRYLATSAFSKARYGFRPSGGAGQYAFRFKEAFAARQVAPALRERLLGPTTGKPFIVGTYALAGASVFGIGMLCYYGLTTTVDSAAVRSNLWPDYVRQRLQSTYAYLAGSLALTAGAGVAAARSPGILALTSAPSLLVWFGSLAAIIGSGIVVQKIDYHGNSAAEHLAWLAHCGILGAVVAPLCFVGGPALMRAVWCTAGLVGRLSATAICAPSD

SEQ ID NO: 160848 - protein, 126 aa, Heterodera glycines
QFEHRMSPDSVRSLEVNGDVVLHRVNLVNMAQPASAPAPTLQPMAPAPQFGQPMYPFSPSQPFGYAAPPPDVGFSPSIGGGHYPSMPPYPSASVPQPNAPADASQWHQPDYGTPKPNATYPPYGHH

SEQ ID NO: 160849 - protein, 124 aa, Heterodera glycines
HRTAITTHGILQRLVTLTARNGAGEVVAAHGAIGVVADPAIQAAAMERMGAAERRPRDGDHVGHTNGTSSPRCAFLVYPARPTETLLRLASRSFALALRALAAFAGVVMRVMMCVTLWNDAFEN

SEQ ID NO: 160850 - protein, 201 aa, Heterodera glycines
  unsure (1)..(201): unsure at all Xaa locations
MSNFIFVSFLTAAFFSSGLALPAPYDAESVVSFVLNVPLLSADANVEASPPNESDAVFEIQAPSIPVPIEHQTAADITHPTETGNESSIASSSSTPKSEQTPKKVMNMKSALEGAAANVYGGLPLDKQPKTIAEAXAKAKQTPAKLPADYDVNRVAERAAARVYGWLPEDKQPKAIYDAAENAKNTPKPPGDYDVERVAQN

SEQ ID NO: 160851 - protein, 162 aa, Heterodera glycines
MLQAHQYQLRQGHRRVSARSILAHFGFEFSNDYRLGCGHYSKVYKGYFKEAQRTFAIKVTDLESVSEKFKQKFLPRELEVWRELDHPNLVYLYKDFQWNNYQFAVMELVVGGDLLSFLQKCGHVSETTCHNWMLQIVAALDYLHRKGIAHRDLKLENVLLCE

SEQ ID NO: 160852 - protein, 45 aa, Heterodera glycines
ATGGAEAIGRTGAQGGNAAGLVPSHVTNRSLAPPPPTVQLEMGAN

SEQ ID NO: 160853 - protein, 210 aa, Heterodera glycines
MSSAQILLCAMFLLLLVVCAIILWILFDHVKKRLRPHKEIFICGDCWLLVFDFLAPSQLGLEIALVNRRFNCIVDEHFKTRKWKLGGIRICHKIGENGTNQMQIVNSDGNPLPIPQNPLSNKVIGFRGIQINYIDQNAVAFLRRFRRIFAFSSIYLVITENVCVSEFVLLNVLPMLRDSIVVMMLNTIAFRRFRQLAPSMLNDCPSLHTV

SEQ ID NO: 160854 - protein, 221 aa, Heterodera glycines
MLNFPVKLSPFFLFHSQFRHIFLRPLSSSVKSANKFRKDVRITTEKDKNNITSGSATSSPSDDNFAHFVGARLSLTVDPKFAAVELISRDSFDGTSSKPLRIPLVWLRDHCRSNASYNSRTNQRRSDCTNLFAGATLADDCYPIHFDADRQRLTLSWADGHESAFGVRELLSWAMFSQKHYGEEWEAGAECPSRSLWDARRLREVPSVSSSEFDFALFARL

SEQ ID NO: 160855 - protein, 71 aa, Heterodera glycines
YSHKHKTEQKFIPKAYVLQTKNQLGTPFKAIAIAKVFSSGQCLPPPNLSFPSLPLPFPSSFRQISFEFPFV

SEQ ID NO: 160856 - protein, 219 aa, Heterodera glycines
RRCRLLLGVRVLVEKRRRSRREPSDAEPVTLDLVQLRTQTIFIQQTVTIKTHSQLILLFQIEHGLFTGFTSHPHLVQILNSSVHFQAGPRVSFSAVHFVLSNLTKEEAIVYTVALIEPDNPYSPTDLAPIAITANYHQLTLGQLIALPDNLDFVSTSAEMDSLDSLLKRAPRHRRSKKHRRSRGHHHAEHQHQRGGCVRRGKPTKMDNLLHLDPTRSHF

SEQ ID NO: 160857 - protein, 214 aa, Heterodera glycines
STHMRSPPPFPPSGADQQSPSNQQTFFVSSAAQSLNAGKQPDKMPFLHKFYEYYTLGCISMRTESLALCVAVQFLLTNAFLIWLSLQGWHPYWRLALPAVFNAGASLSLIYAWWADKSSYSLLFLIVNGLSICALALSLFALLLAETDPALLKQLINNNDETETEQHQWDNYAYEEKTVVKTKDGSEHEHVRQNTIATAWRHYARRLELSGWLR

SEQ ID NO: 160858 - protein, 71 aa, Heterodera glycines
LPTWTRSSEKEGTPKGTPFLRKGRNGEREERRQSMTKMEGEGTAMVSHPPVEVNERTNEEPSLRFCCCYVY

SEQ ID NO: 160859 - protein, 119 aa, Heterodera glycines
  unsure (1)..(119): unsure at all Xaa locations
RYLMDTNRAGTLIGEDQFGNRYFEDXTYFVPRNRYVVYAERVWLDYDASQIPPEWHRWLHHICDKPPTVEPPPERKKWMLEHEPNNSIVMSKKYVPYSTTRPKVEGWVPGRKRSEEGTH

SEQ ID NO: 160860 - protein, 174 aa, Heterodera glycines
SKQKTLVSKVERSETTGKLTVHMTDESKLEDVDKLIWAIGRDPLTAELNLADVGVKLIAGDYIKVDDYQNTTKEGIYAVGDVCTPKFELTPVAIAAGRRLAHRLFNKEAENRLTYENIPTVVFSHPPLATTGLSEKEAVERFGRDQVKTYNAGFTNMYFAMTQHKEKTHMKIVC

SEQ ID NO: 160861 - protein, 161 aa, Heterodera glycines
KGIYGHLTGFRQRRGVPEWGLLHEAENHNACGTFALFHALTNNTDRIDIGNGVFYDWFKAAKQLNVEQRSDLLANDSELAHLHEHCALRESETDVPRNVAHHFISYFTHGGRLFEFDSGQEFPRDCGPSSEETLLTDAGKICKELMGQLEDISCNAIALCA

SEQ ID NO: 160862 - protein, 197 aa, Heterodera glycines
MTKKQVTIVGSGNWGTAIARIVGKTVQMHNSEFDDSAVKMWVFEEVVEGRKLSEIINEKHENVKYLPGKKLPTNVIAVTDVVEASKNADVLIFIIPHQFLHKVCEQLKGNIKKSAIAISLIKGLATFHEKDIGLRLISNEIATSLGIDTSVLMGANLANEVAEDHFCEATIGTKNPQHGNELKKLFHTDNFRINVVE

SEQ ID NO: 160863 - protein, 94 aa, Heterodera glycines
MFAPKFLLALLVCVAFAIGTKHGKTARKMAKNNVAKDELEQAFSPLVPVELAQKKFERRIDQMEKQLSEVINSVRGDCMPKKGDDEEEEEEEKK

SEQ ID NO: 160864 - protein, 86 aa, Heterodera glycines
DECARSLGFVRAMFEIAASAASHAGANADLAVQFREQVGTIDSNCAALGIHVGQISLDAPRGDHPQVHDSESVLSNPGTSGSHKRF

SEQ ID NO: 160865 - protein, 208 aa, Heterodera glycines
IDLFLETEQNEQQQLTEQCQNEGEAMLSKTALQRVAKRCTLEEITSQLLMFLLAGFDTSANTLSLVCHALALHAEVQEKVQEEIDSVCFDEDPTYEQLSQLKYTEAVVKETLRLLPIATNVMNRTCCQTTTLGDITVEKGTVVMCDILSLHHDKTVWGEDADEFRPERWLEAGHQLPPFYAFGGGPRICIGMRFAMIEEKLALVRILR

SEQ ID NO: 160866 - protein, 85 aa, Heterodera glycines
DFFFFFFFFFCFFFFFFFFFFKKESVRTNKTITKSSIRLLLFIFAWIICFLFQFTCALRFPPCHTTQAHIEHRCLNRHSFGASEE

SEQ ID NO: 160867 - protein, 202 aa, Heterodera glycines
MCVTFAQVYGTLALTMLSAILGIVVNAVMDFSSLLPIFSLMELGFLIALMVTNPSHQNENKRLGFMYAFAFLFGCEVGPLIEYVGIDDPTIVFNAIFVTMLVFGSFTMSALYADSTKYLHLGGILSSALFCMLIVLLFAPYTPFVRSFMLWAGLAINSAFVLYDTQLIVERCRRGDNDYIWHTVMLFQDLAYIFRYVLILLK

SEQ ID NO: 160868 - protein, 88 aa, Heterodera glycines
  unsure (1)..(88): unsure at all Xaa locations
LQCAGDSAGLWQSYVTRSAFSSQMLNNSQNIEELRHNTEGFAKALGFSSTAHHRISSKMAGSPQTVRXSLSTKTFQXRFRPVFXLPTR

SEQ ID NO: 160869 - protein, 67 aa, Heterodera glycines
ASSEALAFCSAASDALAFCCWIAGSDALAFCCALAFCCWIAGSDALAFCCALAFCCWIAGSDALAFC

SEQ ID NO: 160870 - protein, 164 aa, Heterodera glycines
MAKIKIKWGTKELNVDANPEEPPLLLKAQLFGLTNVPPERQKLIVKGKTISDEAWNGIKIKDGTVIMLIGSTESMLIKAENAESSGHTNSTETEPRQQFPIGLRNLGNTCYMNSSLQCLKIVPEFETALKQYNPNQSVDGSNQRIKLFTNSMKKLYNEMNVLAK

SEQ ID NO: 160871 - protein, 171 aa, Heterodera glycines
DVNAELPPDFEWYQNQIAGHLPSVIRNGVRQIGILHERGRTDVILKLVQEGIRGQREIGFYRRIAAICEGQGINCEETDEVEGTLLKELAMFIPRFYGCRQILLDENGPPKEFIQLEDVTEKFKCPCIMDVKMGRVSADPLASEEKRMAEEVKSPLQKKIGFRILGHRVQN

SEQ ID NO: 160872 - protein, 181 aa, Heterodera glycines
MERCRSCNCAVELGASPDVLMVFSCPDCRLKFCRLCDEPWQDEHKGVSCEQFAKKQNRERLLEKRLSEAVVHCCAKCKMSFVKHDGCNKVTCPCGATHCYICRQNNITYAHFCACLQEKAPKHPFKCAKCGKSCLLWQNSVTVEKQQMDNIRKEMVEEEKREKAKQKRPTTGNTPNANKKK

SEQ ID NO: 160873 - protein, 100 aa, Heterodera glycines
FEQDCERMAAHKTFIIKRKLAKGCQTKSSASPLGSNEDGQSHSLQRKASSLAQNQTEVVSDGRRERKSENIGRRRTDDDFRLFCLFMELIFIHFCVDYCW

SEQ ID NO: 160874 - protein, 207 aa, Heterodera glycines
FFCCRNEHGTLFLLSTTFSPSGKLMQIEYALNAVKGSAPSVGTRAKDCVVFATENKHSVLTQPVSKISKLSDHIACVYSGMGPDAQLLVKKARKIAMDYQVLYGYEIPVPQLVSRVAAVMQEYTQSGGVRPFGVSLLIGGWDSEKGALLFQADPAGSYFGWKSTAIGKNDQLAKKLLEKRYNEDIEKVDAIHMALLAMRETYDVAMT

SEQ ID NO: 160875 - protein, 201 aa, Heterodera glycines
MNRRRWICGDVWMDILPSFDHAQLGLKMALLSDRFDVLVDKHFDGKTTGFTIWRRIRIRKDKGPKAKVSVRIDGKFVDFPFPDNPLPNKIRFKNLQIRYINYSVIKFLRSNKPIWDRNGTKLEVFVPLYMTDVKLIWDVFTREIWPIFAKSIRHLSFHNADALDNLRRRTSPTILTDSIQLNSICSYGLFPDGIADDGPNA

SEQ ID NO: 160876 - protein, 161 aa, Heterodera glycines
MRRFGKTYLCSYSRLCIDAKLRCNGEDNCGENDDSDEAHCSRIEALASPTTIVVAYIVSGIIFFFILSLFCFLFKSKLEKKNNAKGEEKRSRREREKRKRAQRKRREGRKSGRKAEGEAQRQTARQPSRQPRPRRTVADGHKLSGIYGGVGGTQSVFGRRG

SEQ ID NO: 160877 - protein, 166 aa, Heterodera glycines
  unsure (1)..(166): unsure at all Xaa locations
MALLSIFCLLLALCPVLSINSTGHFLHITDVHIDPNYDLSGDPQKWCHGSGDSRNKSPKLGVFGDHNCDSPMALLEFMLKEAKAKVPNPNLIIWTGDSLPHDKYDKKVLFDILQKVTNAISAQFPDAVLLPVLGNHDSAPGNSFTDHPAXQQIYEKMFIIWKQWIG

SEQ ID NO: 160878 - protein, 192 aa, Heterodera glycines
WRFVLNEQKKFPDATGDLTTLLTSLLTAVKAISSAVRKAGLAQLYGVAGNVNVQGEDVKKLDVLSNELMINMLKSSYTVSTLVSEENEQVIEVEVSGTQGKYIATFDPLDGSSNIDCLVSIGTIFGIFRKASNTSTKEEDTLQTGRKMVAAGYALYGSATMVVLSTPGRVDGFTLDPSIGEFILTNPAMRVP

SEQ ID NO: 160879 - protein, 132 aa, Heterodera glycines
PASGLSWNATIPFKEGIKPMWEDKGNLDGGRWLVLVDKQKRQTKLDMYWQEMMMCMIGEQFEKWSDHICGAVVNIRQKGDKVSLWTRDAKDDSANMQIGHILNAKLNIPDTENLRYEVHAEYSARTGSAVKS

SEQ ID NO: 160880 - protein, 185 aa, Heterodera glycines
RRHLYILRQFVVDCCILLFVVFITHSSSCWLSAMSKRRLRQELKDMEKNPLPEGCTARPLDQRTMTPWTVTIRGRAGTPYENGNFQLSMAFPRDYPFKAPQVTFTTRIFHPNIDTRGKVCLDILQTHWAPTLTIEKVVISIIVLLNDPNPDNSPINAQAASLYRTDRAEFNRRAREMTLAYAWRR

SEQ ID NO: 160881 - protein, 70 aa, Heterodera glycines
HCANHYCKLANFSDFFGNDLGETVGTIRADHLQTRIRGNPKKESEQTEGGGEVIDHIAIILFKHLIISNR

SEQ ID NO: 160882 - protein, 198 aa, Heterodera glycines
LNFGDGSGFCALKTLILQDNPISRWESLDGLARLPALAKLILRGAPLPGARGADSREMIIAKLPQITDLDRCDVSPVARRSAELLFLSRFGADPVPAEHRAAIARLATIYSISNDGDPSSAVSVPRPAQPFSTIHSKKVRLEHAGRSMERSLSLALPIHKVVGLGARLFGFAPDTLTGVELRRADPAYPSELLCRTRD

SEQ ID NO: 160883 - protein, 84 aa, Heterodera glycines
CLFQLQQVSVCVCLLFSDLTVTDIIYFFFSLPLFFNFCSFSLSLYYFHNLRALSPPLLFLLHLHKIQVVITFYVFSITQAFSSI

SEQ ID NO: 160884 - protein, 165 aa, Heterodera glycines
  unsure (1)..(165): unsure at all Xaa locations
MSKELKITREDELLLQDFSSAVSKKGTLIFYGISAFVGLTPVYLFYGAHQMEIADSWFIWLAAAIGVAYLLAQSYKNMKHVLKHQIVIKRGDAIAREMNRILSDDKKMSKKEKDERILWKKNEVGDYEATXFAIFYNNLLFFVLLVXLSFFILYSISPIFNCLVS

SEQ ID NO: 160885 - protein, 144 aa, Heterodera glycines
MSSEILWSTVTLLLVDCATILFWFFLDNAKKRRRPHKKEIFICGDCWLLVFDFLAPSQLGLGIALISRRFDFYVDEHFKTRKWKLNKQFLIQWDIQENGTKKMQIVNSDGNPLPIPQNPLPNKVIGFRHIQIIYIDQNVITFLR

SEQ ID NO: 160886 - protein, 142 aa, Heterodera glycines
IFRLKKLEGEATANNRKAKLIFFFEWSIDVNFIATVSGSETEYKGSVEILNLSDENEAHEIEISVHIETAGPHENEIRHILSTDGLSFVRSKVGTYVRELKEEFSKGIILPVDSKGAIRSQAVTTQGKTVVDKRRFQNDIIQ

SEQ ID NO: 160887 - protein, 153 aa, Heterodera glycines
  unsure (1)..(153): unsure at all Xaa locations
PWQASLETICLLLAYKIKYPENFFLLRGNHECASINRIYXFYDECKRRFSIKLWKTFTDCFNCLPIAALIGEKIFCCHGGLSPDLQNMEQIRRIMRPTDVPDTGLLCDLLWSDPDKYVQGWGENDRGVSFTFGPDVVAKFLNRHDLDLICRAH

SEQ ID NO: 160888 - protein, 186 aa, Heterodera glycines
WLCNDVWMDILPFFDRPQLGLKLAMLSPRFDALVDIHFDGKTELTLWRPIAIRNSAAAVPELHVFFDGANNSVPFPLPDVHSPPMPNNIRFKDLRINCIDHSVIAFLRANQLIFQKGTNLRLSVPFGPFNIDDVQPILDDFARQIWPIFASTIRHFWFPDCRILDTLLRLVSPTILTDDQINIHSI

SEQ ID NO: 160889 - protein, 84 aa, Heterodera glycines
  unsure (1)..(84): unsure at all Xaa locations
MASSGFSVYVXQXPYNATEADIGNLFSQCGVVTNVRIVYDRETNRPKGFGFCEFQDQQGAQNAVTNLNGAELNGRXLRVNWTNK

SEQ ID NO: 160890 - protein, 64 aa, Heterodera glycines
  unsure (1)..(64): unsure at all Xaa locations
MEEEEQREKEQKGREEEEEETDDDEIIVIEQSKXHRGREDEKRKRKKSKSMRRKKSKKKKKKKK

SEQ ID NO: 160891 - protein, 150 aa, Heterodera glycines
  unsure (1)..(150): unsure at all Xaa locations
TDPLAVLDGGGLLPXGGVSEEDGSHKGTGIAMMGELFCGLLGGASFGKXTVRSWREVQKAANLGQCFVAIDPECFAPTFVDNLQLFLDQTRGLNPRDPSKSVLVPGDPERMNIERSAKAGGVIYSERQIRDLEKLAKKQNVGMFPYKANL

SEQ ID NO: 160892 - protein, 129 aa, Heterodera glycines
YSRRRSAGPSLTAFLSLPGVVDKFSEFTKMYNHWRGLWKMFYRTTFAQSQMLFAIEEKASDSDRFRRVLPKVLYFLSQEVKAMDDALIVDWYSNLEEKSQLKKEEKLAELVTWFQNAEESSETDDEGED

SEQ ID NO: 160893 - protein, 96 aa, Heterodera glycines
  unsure (1)..(96): unsure at all Xaa locations
MGECCRQMNLIFEIFAFGMDDFSSEKNVSLLRLFLFFFSTVVLFGSAHPMVNKLCEDLDKPEGWQLLKKXTIEKCRMSIMWNSPNGKTATKALKSL

SEQ ID NO: 160894 - protein, 144 aa, Heterodera glycines
QRLIFAGKQLEDGRTLADYNIQKESTLHLVLRLRGGMQIFVKTLTGRTITLEVEASDTIENVKAKIQDKEGIPPDQQRLIFAGKQLEDGRTLADYNIQKESTLHLVLRLRGGMQIFVKTLTGKTITLEVEASDTIENVKAKIQD

SEQ ID NO: 160895 - protein, 169 aa, Heterodera glycines
SGRNFSTQAEWLLETDGTALLRVLSEPDVDFIRTHSNDICEIFEVLGIEAVRKAIEREMNQVISFDGSYVNYRHLALLCEVMTARGYLMAITRHGINRQEVGALMRCSFEETVDILMEAAVHAETDPVKGVSENIMLGQMAKAGTGCFDLVLDSDKCKLAMDIPDFIMA

SEQ ID NO: 160896 - protein, 186 aa, Heterodera glycines
LESYVPRHSRNYRGIQPTIDSVHNHQQVDPFLPLSTIPPASTVENADFERQPIPLGMPIQLLPTSQKTPPSSQQVLLMSAQPTPNQPLVLPVSSVPTFQFVQQHMFPSMSQQQPLMPIRLQPSSMLHHQINQQAEHSQQDGTVSDSPDSGHVVTPSSYPLQQIGNGIDCIDLTHHRHSERMGSDAM

SEQ ID NO: 160897 - protein, 143 aa, Heterodera glycines
  unsure (1)..(143): unsure at all Xaa locations
MFETSNNXGLYVAIQAVLSLYASGRTTGIVLDSGDGVTHTVPIYEGYALPHAILRLDLAGRDLTDYLMKILTERGYSFTTTAEREIVRDIKEKLCYVALDFEQEMATAASSSSLEKSYELPDGQVITVGNERFRCPEALFQPS

SEQ ID NO: 160898 - protein, 185 aa, Heterodera glycines
MMNSMLGDAWDMLNGFGMMGPPFPNHPMLTDGLNRQNQALRRQQPPQHHFGPDTMMSPFGGFGLFGGMMQQMQNMHNHAISDPNSVVFSESTMVSYDGNGQPKVVQHSTRKAGDVKETRNALRDGVREEMTVGHSIGDRSHVIEKKRDKDGKVRQQQKFFNLAEDEAEDFNRQFQTRARENMGGL

SEQ ID NO: 160899 - protein, 98 aa, Heterodera glycines
AFLFLSFLCISHFSLPFFLTWSKMLMIVFVTKLQIVQMRHFSFIVNYFVLVLDQFGQIVYVLMMRDAILVDDDGDPFLGLNLPLFVLVFFIIHYFSFC

SEQ ID NO: 160900 - protein, 77 aa, Heterodera glycines
IVLSPNDSVYTSESSSSSMPPFSISSPRVLFPSICPCPKSPPLMPCQSADCAWHSSVLFPPPLWGPFPPVLHVHSDH

SEQ ID NO: 160901 - protein, 92 aa, Heterodera glycines
MMMGHPHAHGPSVPLSSALSVAASDQQDHCCAVCGCVGATIYCSVFSCRPCASFFRRSIKDQREYKCRANGDCPIDKGEREKAKSMNGKWLF

SEQ ID NO: 160902 - protein, 141 aa, Heterodera glycines
  unsure (1)..(141): unsure at all Xaa locations
AGTLFLLSTTFSPSGKLMQIEYALNAVKGSAPSVGTRAKDCVVFATENKHSVLHSPSXKISKLSDHIACVYSGMGPDAQLLVKKARKIAMDYQVLYGYEIPVPQLVSRVAAVMQEYTQSGGVRTFGVSLLIGGWDSEKGAL

SEQ ID NO: 160903 - protein, 90 aa, Heterodera glycines
LCTIFIAKPTVYPWNISFFVPFSVEFEPFAHADRVHHMLLYGCSTPAYADRNFWQGMATCGGNSHILYAWARNAPPLELPKDVAFAVGNE

SEQ ID NO: 160904 - protein, 163 aa, Heterodera glycines
TDKTCGVGRINQRASEGGYGYLKEWLWWMGVITMGVGEACNFAAYAFAPASLVTPMGALSVLVTAVLSSKLLKERLNLLGKIGCAICLLGSTSIVIHSPKEEEVSTMAELAEKMKASVFILYVVLVLLFTFVLVVYVAPRYGHTNILVYIAVCSLIGSLSVIS

SEQ ID NO: 160905 - protein, 57 aa, Heterodera glycines
IREDIVRQIAGGMDGQIAIHRRRQPKLAAATSRETGPSSRVSDRSGRLGREKSAEDG

SEQ ID NO: 160906 - protein, 170 aa, Heterodera glycines
MPSEMRFISADCWLLVFDFLAPSQLGLGIALISRRFDFYVDEHFKTRKWMLNKQLLITWDIEENGTKKMQIIDADRKETLPIPQKPLPNKVIGFSGRIQIIYIDQNVLTFLGHFHRFFATSAMDLDIVIENGRILEFVLLNIWPMFRDSIRRLFLNAIAFRCLRQLAPSM

SEQ ID NO: 160907 - protein, 188 aa, Heterodera glycines
MSFTVVHILFCFFLPALSIYKPNWDSIDSRPLPNWYDEAKFGIFSHWGVYSVPAFGSEWFWWYWKGQRDAKFERFAQKHYPNGTTYADFAESFTAVDFDANNFAEIVKSSGARYFVLTSKHHEGFTLWPSATSWNWNAVDIGPHRDLVKALSDSIRAQNIRFGLYFSLFDWFHPLFLNDVKKHRTDFV

SEQ ID NO: 160908 - protein, 180 aa, Heterodera glycines
MSDNRGASVASTGTTNSQESQVASPVKAGKATTKTTASGKGGKAKADGKVKAGGKGAKKAGGKGGKVKIAASGTYSTRSARAGVAFPVGRIHRLLRHGRHAQRIGAGAPVYMASVLEYLAAEVLELAGNAARENKKLRITPRHLQLAVRNDEELNKLLSEVTISRGGVLPNIHTELLSKM

SEQ ID NO: 160909 - protein, 174 aa, Heterodera glycines
  unsure (1)..(174): unsure at all Xaa locations
VASRMKGIDFETGQQILCPSNXALVGSGSDEQLGGYARHQTVFKSKGLDGVAEELSMEMHRIGARNFGRDDRIGTVNGKSLLAPFLEEPLVCWLNTLPTALKTGFGLPTNDGTANKFLLRNALRSLGVPECFVQRPKRAMQFGTRMVKMENAENGDPKLRGPKFARNWCYDLLC

SEQ ID NO: 160910 - protein, 65 aa, Heterodera glycines
SGVDFASLSCLSTITQSTSDELGKKSKGSPTIELLRAESDCLPPEWLLPNSSDIILKPLIPMAEH

SEQ ID NO: 160911 - protein, 127 aa, Heterodera glycines
MPKYTQIMNALSEQLQQHVAKANLLISLNEKIPQFDVEVEEMMRIAIGRTQLLLNKRMKQFREHLSRHLKPIPGQKVTKLNDLHALWVPIDMQLDDIRSIFNSIEQFRLRCWAVAEPKAAATAASGN

SEQ ID NO: 160912 - protein, 169 aa, Heterodera glycines
ASYLLHILLFSPNQTCKCATHKVSNQLWYKSAENDELINLMVSDKIEEGGNGEFFVGFTLSEHRLENLPRNKCVAVKKMKCANQDQFCNPKYRNAKYCNAKYCNGKHCDANYCNTTRVLKWLQRHIDGTKRGHIAKLFDTGFEEATNSFVIVSELGDETLKHRLYAENR

SEQ ID NO: 160913 - protein, 149 aa, Heterodera glycines
MNRRWICNDILMDLFPFFNRPQLGLKLALLSPRFNLLVDAHFDGKSELTIWRQIRIHKNGPKTQLSVDTANNADSVPFPLPDRSLPNKIRFHFLRIGCIDHSVITFLRSNQQIFDGRGTNLRLWLRPDANDYQPIWDAFVREIWPIFVP

SEQ ID NO: 160914 - protein, 138 aa, Heterodera glycines; identical to SEQ ID NO: 158760

SEQ ID NO: 160915 - protein, 134 aa, Heterodera glycines
FKILLIVLLAVVSFRLSASTGDKKTANDGSGNNSSAGIGTKIKRIVTAGLLFTSLATGGAEAIGRSNAQGGNAAGLVPSHVTNRSMAPPPPPVQFEMGANRLEKMRAHLRELAEKMPVNESKRLSPSGPDPHHH

SEQ ID NO: 160916 - protein, 162 aa, Heterodera glycines
  unsure (1)..(162): unsure at all Xaa locations
MHEMPQIKFGGNVMGYFQDRVNPGVRFLETSTLMKAWVVGFTRQVGEGDVRNFIQQIVVMGRKRGMNLPDPQYECIELENISERMQQLSDRRIQFLLYIDKKFVKSHAILKLNEKKYGLLTQHVTFEVASKARAMTLSNVLNKMNMKXFGFNYMPMFPQASK

SEQ ID NO: 160917 - protein, 165 aa, Heterodera glycines
SASVCYLFGNKRRVERIGLVDQFIMGYGGIRGAVCYGLVMSLDPELVECRNMLATTTIIVILFTVFVQGGSIEKLVTYLKVKQFEAHKKTVFEMIADNVSSHMVGGMESIAGLRGDYWFRMKLERYNKKYIKPFIMLNPNDKDMKIVRHNEEIQVKEAVIYLKST

SEQ ID NO: 160918 - protein, 107 aa, Heterodera glycines
RTVTFSSMTVTFFSMTVTRELSSATSPWRAFTISRICCWKPVFSLIISFHLMTRGSKSLCSSRQDESAFGAAFSAGMKGTISNKSSSGRHLVAIVGRCRGSFVIWGN

SEQ ID NO: 160919 - protein, 106 aa, Heterodera glycines
NSKCLISNVILLQRIYNPSTQIDHYYCHRLSLSRFRLFDIPPFRCCSSACLSSSCNALYSSVYFSNSSLLPRSAASSKGHVGLNALKTTTVPTTIPVKKIAPFRRM

SEQ ID NO: 160920 - protein, 212 aa, Heterodera glycines
  unsure (1)..(212): unsure at all Xaa locations
PNCWXPEPADRPDMRYVLAVLQQIGNDAELQREVAQFLVFRKDEWREMIREQTFALEELKLDLARQMEDLRRREAIVRKRENSHRNFLHLVDVMNVEDVCEWNEDCVCEWVQNIAASAMEDFSEAIVDQLISCILQYEINGCRLLKITEKDLECLGIESVAVRRYFGLKLDELRAMNVQLCNFGCSSLADEQNDSFSSPVEKPILLHVGLYS

SEQ ID NO: 160921 - protein, 194 aa, Heterodera glycines
NKGYTIQSNVPGNLKLKWTSNTLNNPYSRPNLDIEVQYQKMGDGIYVRIGTEDRWLPPLNELRNPSNFEQVISSNSLSFELGNANEPFSFKIQRNDSNKQSIWDTSIGGLVFGDQFIQIATFLSSDRLYGLGENMHHELKHDFSIYKTWSAFSRDQGNEYYVPGSYNGYGVHPFYVGLEPSGKAHGVLILNSNA

SEQ ID NO: 160922 - protein, 203 aa, Heterodera glycines
MEKLAPQNYCLADSTASSLAKAAQMELDFIQSVLLGPQRGNLTAIECLLAQNFSKQSSMMPNYGTERKNAKVPKLEMEKAGGGDEAKLDNGSETDQSDQKQKRKGVGRPKRHPSECKVCGRKSFYCYYSVRCCESCKQFFRRIVAKRTLLNCFGAKNCQIGKDGIRCRGCRLDKCLLAGMDPTMINAMQQEGMAQYLDRLELR

SEQ ID NO: 160923 - protein, 174 aa, Heterodera glycines
NIQFHKSHKKGKKESDGDKEGEVPSQTEDNGTGLMSNILKKTAVALALQSPFITGSAIRLPSSSTSKAPPMFNQRTNTKNNVLENAVKIPPFKELHANPLGNGIELAKHGQMENEMAAHFHDQRKLSTKSSVAEGKFNPKMRTIDPKFYPQAPRGNVKDTYKSQSGKEVKKVNV

SEQ ID NO: 160924 - protein, 143 aa, Heterodera glycines
LKDPKKCQHFKILLIVLLAVVSFRLSASTGDKKTANDGSGNNSSAGIGTKIKRIVTAGLLFTSLATGGAEAIGRSNAQGGNAAGLVPSHVTNRSMAPPPPPVQFEMGANRLEKMRAHLRELAEKMPVNESKRLSPSGPDPHHH

SEQ ID NO: 160925 - protein, 101 aa, Heterodera glycines
FCNWHCGGAATVAEIAKTVLNEEHRLFLSGIRRGLLTFLHIQRQLFVLSNGTLSLRFWHSDYQRFEKEIGREKLRTFQCLFHQNHPNGCPIGPEECPFKHN

SEQ ID NO: 160926 - protein, 151 aa, Heterodera glycines
  unsure (1)..(151): unsure at all Xaa locations
MELRVGGRNRXLGRKIGGGSFGDIYLRENIMTHEEVALKLECVKTKHPQLHIEAKLHKMMSGGVGIPQVRRCGCEGEYNETVMELLGPXVYDLYHNCSQKFTLKTVLLLAHQMLARIHYSHSXDVIHQYIXSYNCLMGLGKRGNLVYIIDX

SEQ ID NO: 160927 - protein, 57 aa, Heterodera glycines
FAQLKVKVNLICPFQRFKRTSSPSFTQRLNSYWLTGEWQIHSRENYPTKSDKLTGNK

SEQ ID NO: 160928 - protein, 106 aa, Heterodera glycines
LPQITKLPLHLPTMATKCLPLELLFEIVPFIPAENAAPNALSSCRLLHKLLLPRVIKWKEIMSENTGFQQQILEMVKALQGDVAELSSRVTVIEKKSHPSLTKKSP

SEQ ID NO: 160929 - protein, 216 aa, Heterodera glycines
EFAVGLSDFDKNAGKDAINRGLSVEQAIEKRIYAAIEATQEIAKNPSEKLTAHANSFLDIANSLSESILGLPRAVEDPEWGLKERVTFLASRIGHRISSKTNERIVEPLLQQMCVLTEQLSKCIVLVDYAKQRQEWTFNKVSQLSTSVVELRNKIETEATRTRKNPGEVLLKIIRFYSSKLNVQMSKLRDRSSELLSSSMQKQILTLTAYVQQLDD

SEQ ID NO: 160930 - protein, 176 aa, Heterodera glycines
AIVARAIVVAVASVAGAIVVAVSVAPESPPSVSSNRCFNELRLYTTRPSAAAADSPGTPNSLGCCRPHANTTCLQRSVKVRCSAVFGTVSVPCSSQWHVPTKEGWQIFFPLLLCDEKMTFISQKTMNECEKNGRQLNDWGRERDRRESEKERKKGKGRDERTAEECTIKGVNYMCN

SEQ ID NO: 160931 - protein, 99 aa, Heterodera glycines
MKLLTRIDCCCCCCDGGGGDGLAAATIFVGGVAAAKAATAPLSLLMAEMLFLGLLVVAPALFIFSSMLRFARVSKTRLHSSSPNTQRPRIQPSSRCTKM

SEQ ID NO: 160932 - protein, 128 aa, Heterodera glycines
  unsure (1)..(128): unsure at all Xaa locations
FRPITHFLLSVLSSNCCHFQLPFTAMADTPPPPPPPXPAAAAAAGGGDEAVDLEQRVRQLIMSIGLRNEDALREISILIESFNREHLLHFVEIMARMHAESGTSIDMPGGQNGTTMLMIAAASGRVDF

SEQ ID NO: 160933 - protein, 95 aa, Heterodera glycines
  unsure (1)..(95): unsure at all Xaa locations
NEFSGDIRDANLALVKSIRNRASYFAELLXNSMKGIGTRDTDLIRLVVTRSEVDLADIRQAYQNMYGTSLENAIASDCSGAYKDGLVAIVKGYYH

SEQ ID NO: 160934 - protein, 95 aa, Heterodera glycines
NEFSGDIRDANLALVKSIRNRASYFAELLHNSMKGIGTRDTDLIRLVVTRSEVDLADIRQAYQNMYGTSLENAIASDCSGAYKDGLVAIVKGYYH

SEQ ID NO: 160935 - protein, 120 aa, Heterodera glycines
MEPNDGITDQPTDQDGSDTEATDSTTVGSDSGPNDNDQNATGPTDEDETGTEATNSTTTTTESNAIGEEGTDQDATNSSDQGESDAEAEATDSTTNGSDLEPNDQDENGADADSTTTNGI

SEQ ID NO: 160936 - protein, 153 aa, Heterodera glycines
TTKMVPWWSSNPSTLNSSMESIEAAAAGEQHRHVRPVHATPPPADEFDGIVIVGQGVTADVTAAGDFVPCSTSTLAQSIERVFGNLQHQQIHPESYEEAKRLLVFAGLFFLLMCAFVLIKFQVAFDDVFRRSPAVWLVGVIICALLMNMSVQI

SEQ ID NO: 160937 - protein, 200 aa, Heterodera glycines
KFSGFLLHLQELKHFDGQNGKLIGNDSDESLESLVSFISKNGFGLINDERRTKIDQAIQEIEQIVKKWNRKAKIIVMGSYQLGALTKQSDIDAICVVPELRTWRAAKFFGKAKCQIQWNGFRRCADDSLFCHFCLAAQVTGLNRIQDAWVPLIKFKFEIDPKTSVDFDIGLETFAIRDDIFKSEEPIKYEQCDALSAKMA

SEQ ID NO: 160938 - protein, 169 aa, Heterodera glycines
RNWHSFDKVDSTIEKKLPDEYAVKGFPTLKILRNGRRFDYNGPREADGIVSYMLDQAKPAAKRLNSAKEVLKFMSPSDVTVVGFFSSESGAFYEAFADAAERTRGDFAVGYALDGAIAQHFGAKFGEVVLFWPEIFHSEYEPKRKIFPRETATSEELVSFWRDNAIPLV

SEQ ID NO: 160939 - protein, 178 aa, Heterodera glycines
  unsure (1)..(178): unsure at all Xaa locations
FATEERGKGMALIGGSFSLAFLIGPSIGAFFSIGARESGEFDPSPALLAIALTLAELALLVFFLPETLAKAKNDDCHKQSGHSLRHLLSPRALFSFDFLSPASASSPPVSVPLLQKYSRVYFLFMLLFSAMEFTLGFLTHLRFNYSSMQQGRXYLFSGXCMLVIQGFVVRRIPSTLKA

SEQ ID NO: 160940 - protein, 117 aa, Heterodera glycines
FFFFFFLFGKNKNLYGKNPVHRKEGIKLNKNRKWGRERELNHKICTIILSNGQCAGRPMFVPEGIVTECQQFDRAKQQRDDEQHTGHAHAELVRNVPCSGTARSHSDLAGTQVQRAL

SEQ ID NO: 160941 - protein, 213 aa, Heterodera glycines
VDLIFYTRNTAMLSRPLLFIAALLFLFGCCRADGNVVHLSSLNCATKDGGIDGFKAVDDGLILDSSSVTADTSDLPLIGFQKNGKEDLIFKLFVRDGGCVSKANFFTNGQPCTLGESEDMTESDKCPGEGGTSNCTSHEVTCTGIGMAKVAEESNGHAFKVNLANLTKLTNPCAQWKAHFGGVHQVLKGSSSGEKCASAGFPVWIIVVIVIIA

SEQ ID NO: 160942 - protein, 203 aa, Heterodera glycines
QSPTGTGKTLAFMLPTLQILVQKKLTGAGEGKEQPTSVSDSCRILALVVAPGRDLIVQLFHLFSPLCKKLGLSTLKLHGAGGKQKKKSPKKHMKGKCILICTPGSFEHFLEKEAELKQYLKHLEVLIIDEADRYSDRESMSSLTTLLAALPKQRRTALFSATQSSSIEQLLRFGLRNPTRVHMAADTGEVCTDSTGFDVKVAE

SEQ ID NO: 160943 - protein, 162 aa, Heterodera glycines
SVRTREHAFVHKIMANREDMMELMVRVKKKDEDIGEQERQMILKGLAVLTEEKLRCHRCSRVDLSVAEASKIRLCPNCNAIYCIDCFTIRKNCMRKECRAPLQALTEDIDFYVDSSCEEDDDGDIVLEPPVAAETEPEESQKEDEQREEGKAEEEAANSKAI

SEQ ID NO: 160944 - protein, 146 aa, Heterodera glycines
YGTPPKQCADRSGRQVNKLFIMPPNRPTRIKKAMNILFGRTEEEKRVTGNFVSRIAERNPRREDMSTTQDWPSVWPTAQSFRSSVVPLPVRMGFRRRPERFAPKGPYGNLELMKIPNFLHLTPAHVHRHGQAIKKFCTKFPEELKH

SEQ ID NO: 160945 - protein, 127 aa, Heterodera glycines
CIRLTRERGNINKGNWGGGESLEATRRVRWCQSRYVPSACSCAVHSSAHTAAAGRNQRKVGTANASDRSSSSGDGGTLRRPSPLHKLPSHRQISWTSICPGIWSSTISRHWPTFSPNSTKSCRKARR

SEQ ID NO: 160946 - protein, 184 aa, Heterodera glycines
RGVLFYGPPGCGKTLLAKAIARECQANFISIKGPELLTMWFGESEANVRDVFDKARAAAPCVLFFDELDSIAKSRGGNVGDAGGAADRVINQVLTEMDGMGSKKNVFIIGATNRPDIIDSAILRPGRLDQLIYIPLPDEPSRLQIYRASLRKTPIAKDVELEYLAKVTVGFSGADITEICQRAC

SEQ ID NO: 160947 - protein, 150 aa, Heterodera glycines
SASPNVGRFEAVEFIIQSFRGWLFSSRMILPAFYSFTFGLTSCTSATFRDEDDSWNWIAASAICGLAHATIRNNIPQGFALAAIGSLLGVSFQAVRISHNGFGMVHNRMTQGFLPFTGPLDWKHIPTDAVDVFFEFGAESFTFRHFLPKA

SEQ ID NO: 160948 - protein, 130 aa, Heterodera glycines
CIRLTRERGNINKGNWGGGESLEATRRVRWCQSRYVPSACSCAVHSSAHTAAAGRNQRKVGTANASDRSSSSGDGGTLRRPSPLHKLPSHRQISWTSICPGIWSSTISRHWPTFSPNSTKSCRKARRKQD

SEQ ID NO: 160949 - protein, 171 aa, Heterodera glycines
GEDKRFPQEQFALQLASMPEFAACGALFKSCAAVELTETITEYNVSCVKHIFNDDFVLLQFDCRNTLNDQLLEEVFVEIEPQDEGEDCPWHVQSVHPLAQLPFGQPCTTYVLLKMPEDGRIAGTFGAKLKFKICDVDPATGEPESNDLYDEVYTLEPIEVGLADFLLATAP

SEQ ID NO: 160950 - protein, 149 aa, Heterodera glycines
  unsure (1)..(149): unsure at all Xaa locations
MGAMPPHMQPGMPPPGMMRPPHGSFMLXLRPPGASVGDEPPNKRPREETLEPEERWLQKVHGQIAVQIATPQNDEWNLKGNTVQIQLDISPSVTALKSLIQEQIGVPATKQKLVYEGIFMKDSQSLAYYNFMPNASVQLQLKERGGRKK

SEQ ID NO: 160951 - protein, 188 aa, Heterodera glycines
GFTCVACSYKVVHALLSWDQFEKIILYAKKVNFEPDYLFQMRQVLRTHPENSSKFALMLLNEGPSGEPLADINQIVDCFAEAGNIQQCTAFLLEALKSDDESQGHLQTRLLEMNLMSNPQVADAILGNRMFNHYDRASIGQLCEKAGLPQRALEHFTDLYDIKRTVVHTQHFNSEWLVSYFGRLNVQD

SEQ ID NO: 160952 - protein, 86 aa, Heterodera glycines
QRMFHEWMSSLRSVLPEPLCHFEDTGLIVLAFVITALVVHLVNLLFASNSGPAPFNHRLLHDCITRLKEQELIIEKANKKKKKKKK

SEQ ID NO: 160953 - protein, 126 aa, Heterodera glycines
MHLFPLLLVTFAVAGFLSLASGQQNANSTDGPADDDDEAAPVDAEEQFRQLFQAVDADDNGSISGAEALQFWQNKSKTMDPAELKKKLDTFNAKTLDEAVERGFKKVDKNGDSAVSPEELKAYIQS

SEQ ID NO: 160954 - protein, 160 aa, Heterodera glycines
TCSFSNENYKRTQTFPILLEKMEEINQWVPTYFIEFGTEEQKSSIREKASTEKIIGKSDKRNSAIGNILNEIEPEKVNDKWAKVIHFVPASDDENMLIFFQIENPKFSKSISKNTDLLPYENDPERFESLSMCELYGDDCQPIRELLVKIEELEYCGNEA

SEQ ID NO: 160955 - protein, 137 aa, Heterodera glycines
MPTFQILLIVLLAVVSFRLSASTGDKKTANDGSGNNSSAGIGTKIKRIVTAGLLFTSLATGGAEAIGRSNAQGGNAAGLVPSHVTNRSMAPPPPPVQFEMGANRLEKMRAHLRELAEKMPVNESKRLSPSGPDPHHH

SEQ ID NO: 160956 - protein, 138 aa, Heterodera glycines; identical to SEQ ID NO: 158760

SEQ ID NO: 160957 - protein, 82 aa, Heterodera glycines
KITKKQPKKIIYFKFLFFGPPIRSSDSQFNCQSVEAIQFVHGASLKAATPGRTLPSSSSRLAPPPVLTWLTLSSAPHFSAAV

SEQ ID NO: 160958 - protein, 192 aa, Heterodera glycines
MSIDQIDDPLIRELVVKERQFLKLLTSTTAPIHPSVTDALSKPSCFRQFVQHEHNQMKFGDQMNFSYWRAKILSTSIEWAKSFEEIERMDDSDKEAMVVNSAFSILVFSEAFHTPERFTDRIMFPDGLSGFRNFSANIIKERSGLIPTVVAVINNILVPIRRMQMTEIEYVLLLAIVLFDSECLSLSKSAVA

SEQ ID NO: 160959 - protein, 41 aa, Heterodera glycines
  unsure (1)..(41): unsure at all Xaa locations
PPPPXXGKGEXKNRXFFSXXKHSSMSLLNILCLIISAFGGC

SEQ ID NO: 160960 - protein, 154 aa, Heterodera glycines
MRAVLFLAMVCLVMAVILETANSKAVKKDNKKGAITTPAKGKAAPKGAAKGGIKKDAKSKGKGKKDAKGKKDKKAKPAKGKASPKNDKKPPAAKANDKKSPTKPMAAVKAVPKAAENAQKGPSSAEVVAEESNLDTEAVDDLGAEESDFDQLAE

SEQ ID NO: 160961 - protein, 167 aa, Heterodera glycines
  unsure (1)..(167): unsure at all Xaa locations
FKALFTIGNESNGFFFVLAVLFLVKVDFLQCKYNEPMARQVLQKHASQFQQHCKNARRGSAVAKCCSAIRSIMGRFTSQKKAMNQMLAKCKAGTTPSEAQQMRRKLEGSNKLKDCGQFKSQIQHKFSELKQYCNNGAENEEENDEXSEREREEERVXEREEQQNSNH

SEQ ID NO: 160962 - protein, 42 aa, Heterodera glycines
  unsure (1)..(42): unsure at all Xaa locations
XKGRDRKRHNTIERVVWRFIVKSRSPPPNECLFFVLRLLFVP

SEQ ID NO: 160963 - protein, 214 aa, Heterodera glycines
MVVFISTPLYSWCVAIALVLMIISQCCGCSKKKQKKAKEPLKAMPTQKAEEASTGSEKTGQSVVSVRPPNVPTTAPVASNPPISAEQNIASITLTPSDVKTPAPVGGKTGQSVVSDTPPNVPTTVTSKTPIKAGQNAASVRPPVPANTSTSSKHVKAQGTVSKKPSKASSSHTSLKVPDDLVSAIKSHVPSFLHDLASQITGRMDQSSASAMSS

SEQ ID NO: 160964 - protein, 156 aa, Heterodera glycines
  unsure (1)..(156): unsure at all Xaa locations
RPSQTTHHAMSRDRIXGPRLDVNDSKGGISRTTPPELAPRFHSLPPILHIRSLTPRRSYSKGSXGSFRLXREPRILTGNSISLSLCWRQWGSRYAIRAGRNLPDKEFRYLRTVIVTAAVYLGFSSELSLLPLTFRHRAGVRPYTSHCCFAEPLCFC

SEQ ID NO: 160965 - protein, 170 aa, Heterodera glycines
MCRVPVANCPPFSLFYPHRCPEPKMLYPAQANIVNRLLSRPSPSYRCTMDTLRRADRRLVFSRFRHWKSFSEESEALTCCAFSPTDNHAFLGTYAGDIFVFNIHTGTVETNYNAQHSAIRTIQPSKDRLMLTSSAYVKPYCILWKMDEKGISIHERLIDFNEEESVEFAN

SEQ ID NO: 160966 - protein, 163 aa, Heterodera glycines
MNFLPGVPNLPDPFVRILHFCNSEEGETIELPEFRIFVPDTYDLGILVLDQKTLPNSTVNFPVPENPRRRLQQAKRPTEVGTLDESNGKKGAEDGFVTVDAPKSHNAKGLDDLLPPGKTVTKTNGDLLWETQSVEMEEVPAEYDTSIRQSQQHNWEEESNDGN

SEQ ID NO: 160967 - protein, 180 aa, Heterodera glycines
GRRCTKREHSEEGREIEQTQNTTGEEEEEDNETDDNVGMSSTESDGQDKMKANNGKGTCKNEDESKPSPTVETEQNKVHQSASETVISQKANANNSEECKESNGENGTRISMKRQRRSHSVDSSPQQKRVFSRKNFTAEDKPSTNKNSAEHSNSRDEPAKCDGDEQKCSVSDEQVAADNC

SEQ ID NO: 160968 - protein, 138 aa, Heterodera glycines; identical to SEQ ID NO: 158760

SEQ ID NO: 160969 - protein, 184 aa, Heterodera glycines
  unsure (1)..(184): unsure at all Xaa locations
STDTVESASLFLRFSLFCXSXFVEFFSPKCAVVVVQLFPRFAFFVSLKGMDDALLLLLLVIFDDQLTVFSSPKCCRCFCFNNNNTFCPSSFLSVAFIFLKSAVSFASFCPFEVELDSAFKRTVWWWTIRAITALKITKLAQCKKIFSEFINLFEESANGGQRNKWTNQKKSGKRKKQRTTDATT

SEQ ID NO: 160970 - protein, 191 aa, Heterodera glycines
FEPFRAYGLWDGRFLGVVLADSSQPKLWHNLTTAGTIDAIITDPPYGIRERGQRLGSDKRKTPKETEIENDLHKNGQTESAEKDKKGNPSESLTKSAIKKNVGNEDQIDHFGVGFPEKQKYAMSNVFLDLMDLSARLLRPGGRLAFWFPVCRSEYSERILPRMDCMRLVCNCEQTLAKDSSRRLLVYEKLR

SEQ ID NO: 160971 - protein, 223 aa, Heterodera glycines
CASPIANNTPFVLKARPLPEGLPEAIERGDVNSTDDPKNRAKILTEKFEMDATDSRKIWCFGPEGTGANLLIDVTKGVQYLNEIKDSVVAGFQWATKEGVLCDENMRGVRFDIHDVTLHADAIHRGGGQIIPTARRVFYASVLTAKPRLLEPVYLVEIQCPEAAVGGIYGVLNRRRGVVFEESQIAGTPMFIVKAHLPVNESFGFTADLRFNTGGQAFPQCVF

SEQ ID NO: 160972 - protein, 205 aa, Heterodera glycines
  unsure (1)..(205): unsure at all Xaa locations
YRILSRDELLSSMHKTGNLKALFPCSEQLILMLDDRPDVWMHSDALIRVNPYRFFCGXIGDINAPPQELLDSVQASEEMENTQADKWTLKQKVKSKTEEDKKEGEKSLLTTKNGEENAQKKGETEEKERGDGGGNGEERTENALAEPIAAIVDDDNALEHVERVLAEVHSLFYQQYDKDKKIPDVKRILGCLRSKVLRGERIVFS

SEQ ID NO: 160973 - protein, 201 aa, Heterodera glycines
NLRNFLGLPSFDESLFPPKSIALLKVLDSEKNRLEAKREEIVGSQARLTGKYKALCDRVGTTARQIEGVHDRIMSEDELDKLKGEVDALQTFVNKRLEKALQLQAESKRIFETIRPSINSFNEDYLHFLRVDLDSQSTVLSSDFLKKMETLNERLKDHHDLWAKQVVFRYDELLVKLDELSAKCFQPSTEFPAKPNLKNLS

SEQ ID NO: 160974 - protein, 161 aa, Heterodera glycines
MNRRLRKIWICGDVWMDILPSFERGELGLKIALLSYRYDVLVDTHFDGKKELTIWRTIKICDGIGPEPKLSVQIKDKWVEFPFPDCPLPNKIRFKHLWITYIDHSVIEFLRSNKQIWDRSGTDLLIQIESDTNVIKPIWDVFTSEIWPIFATSIRHLSIAN

SEQ ID NO: 160975 - protein, 134 aa, Heterodera glycines
  unsure (1)..(134): unsure at all Xaa locations
MPNIFKILLIVLLAVVSFRLSASTGDKKTANDGSGNNSSAGIGTKIKRIVTAGLLFTSLATGGAEAIGRSNAQGGNAAGLVXXSHVTNRSMAPPPPPVQFEMGANRLEKMRAHLRELAEKMPVNESKRLSPSGP

SEQ ID NO: 160976 - protein, 192 aa, Heterodera glycines
  unsure (1)..(192): unsure at all Xaa locations
NFDDVFDEFDPRPXGAASLAQVHRAKLKSSDEYVAVKIQHLHVXDRSFVDMATMEFFVNVASFVFPELKLKWLVRETKLNLPQELDFLREAANADKVRRMFSHMRFVKIPKIHYNYSSDKVLTMEFCEGGQIDDLDYFQVHQLDRHKICRLLGALYSEMIFRRGYVHSDPHPGNVLVRRSANTGREEIVLLD

SEQ ID NO: 160977 - protein, 191 aa, Heterodera glycines
  unsure (1)..(191): unsure at all Xaa locations
LSGEFRPHSVVLTPPRVSHSALSVPSGANFGSDMVQFRQMAHSPPILSVPLATSVHQSSAGRLINSPQAENTTEESNGRLSGQLKHSPTVGSAATSPLASSSTIGVHEISLSYVRPNTFSPSAGDDRRSLPTYLSSPPARSSAFFPSGSVHMHFSAGKAEDARLLYTIGRXEAEWSFGAGESIQISDSETK

SEQ ID NO: 160978 - protein, 131 aa, Heterodera glycines
MSSTTFTLISVPSLIVLLVGYYVQRYGMPPPPPKIAGIDLGTTFSSVAIFQPQTGETIVLKDPLGKRSIPSVVGFLENGEIVVGTRAVEQQEMNPENTIYDAKRFIGRRFSSDDLQFESDRKRYPFTIKLD

SEQ ID NO: 160979 - protein, 181 aa, Heterodera glycines
MAEEAERMSARELASHGVSIGIPAVHDRSIDFPRICKKEEKLSRGLVSNSVDVGISGFYDRFVAPRLRTGVDSVDNLAKWAENYLKRVLFNPESVGSAAERAAKIAAEHKRDGHIMCHFLDDWLTHSSEANTNFFSYVAMEKFHNGVAKAMKGACPDDVQRKLEDVRRRVLSAPMNVHFGG

SEQ ID NO: 160980 - protein, 118 aa, Heterodera glycines
  unsure (1)..(118): unsure at all Xaa locations
VTGLTLLVLSCALPSXSNWWPLFVLFFYFLAPLPISIAKHSRYESSGTSPAIEFAQFATAGIVLSAFALPFVLAHAGVIAFGAFVVASLGSLVIFCTIFAYFYLHQLEENGGWSASVI

SEQ ID NO: 160981 - protein, 92 aa, Heterodera glycines
QEPKWDQHNNDPALSTLKSCPRCWQAFLRFGYKYQNVRLFHRHLFRHKVDGHSLTTESSGPTDSLKRHTHVFLIALLEKANRWKKKKKKKKK

SEQ ID NO: 160982 - protein, 105 aa, Heterodera glycines
SRLRPAANRRRLRRRTSCERWNHQVLTVTTFLGLSPFLPPLSLWFFIYLCYWYFSDLDSVFVFFWIYPISFLDRVVVWICTVLLTILCSVIYKFCDKKKKKKKKK

SEQ ID NO: 160983 - protein, 94 aa, Heterodera glycines
KLGAATTFVVRLLADEFNCKSLSDHGPMRQSFARLRRSASHGPAETGEPPRLRKGAKKEFDLIRSLVNVLFKFVLILFSMRIKSYQKKKKTTNK

SEQ ID NO: 160984 - protein, 140 aa, Heterodera glycines
  unsure (1)..(140): unsure at all Xaa locations
MSSSHRETGRSPRSVLMRQYEMLLQNSNDNSGFRAWFDNNNLFKWRILIDGPPGTPYAGCKLTALLHFPASYPNDPPTMTFLTDILHPNIDQSGKVCISILHAPGIDPLGHEQPSERWNPNRSVESXLVSIQVLLAEPNL

SEQ ID NO: 160985 - protein, 161 aa, Heterodera glycines
MLSPFSYDPFYRRSLWPMTTVGNVLSPFRQLERELDHFFDGMQPMLRDHAAQLNVTDKGELTYKVDVSGFRPEEINVEVIGNEIIVNGEHREQNDSESVHRQFSRRVLIPEGIQKESIKCELDGGRLCICGMKTAGEGGRTIPIEMKKKAAVEQQPQAEKK

SEQ ID NO: 160986 - protein, 215 aa, Heterodera glycines
LGWQRCNGMQNILRRTIVSEHSFVCQYSGNCDVTKNVRCACRHCRFAKCAAVGMDAKAIQNDRDRIGPTKRVRLSPGPDGKRSSMDEDQLSLSSLSPQARYQDEKLVDHTMTVEALCNVLRKCVLVENKSVQEALAQPSLIFQARDLPIDERTEFKELYPASMNDIQMWNIRELRLCLEWAKTFEEFQRMTYSDQFALVRHFAFTFNILNRVFYS

SEQ ID NO: 160987 - protein, 107 aa, Heterodera glycines
FHCTFSINRLLFALFLCPSLFLFTLLSANVISSLRCLWSSSSRNGCSAGLWPKSPAKWLRVRRPRKTSGRRRANNRWRRNGDEKVKDVVPSGGIQSGTNLLALGKAR

SEQ ID NO: 160988 - protein, 165 aa, Heterodera glycines
LGRCLLVKELLLPKLKAKPVRTASGIVIVAVMCKPHRCPHINFTGNICVYCPGGPDSDFEYSTQSYTGYEPTSMRAIRARYNPYLQAVGRISQLQSLGHSIDKVEFIVMGGTFVSLPEDYRDYFIRNLHDALSGHRSCNVKEAVAYGEHSRTKCIGITTETRPDY

SEQ ID NO: 160989 - protein, 177 aa, Heterodera glycines
MLTWPFVDAFVIAPKIALLTGRNDFSFDQLYYRSEIALVDSIDLPAFPQPRATDVLSAGAHCEVPTELPKDYRVFVEDPHSKGTVYVAFGTAVPWDYAPPHIANAFFDAFERLSDHRFIFSFRGTFPNRTLSSHIRLVSWAPQLEVLSHPKTKVFLTHSGLKSIKESLCSGTPMLTM

SEQ ID NO: 160990 - protein, 168 aa, Heterodera glycines
TTNAGGYKQLEDLTNTKKTLQLELDEMLTNKDDVGKNTFELEKSKRAMEKEMEDLRMQVEELEEAVQLAEDQRLRMEVNIQAERNEFKQQLEQKDQEGENRRRLLQSQLREKEMQLEDELRARTRQRTVVTSLEVKVQQLQDQVDQLNTERATFQRRLRALANQFGRD

SEQ ID NO: 160991 - protein, 163 aa, Heterodera glycines
VPLLPFAPLFPDNGPLGGRHFRQTTVGGMAPIGRTGPAGGIGAMGDCPVAHTGKDSKFGCCCCWFVCCRFSRALPRIDESSEWFSSCAVPPPFGFAVVVDVPPPPCVVVVVVSLSLLPMPKMPKVPSTIRRKVKRAQKVLKFASWVILILCSLYGGLFLSFCE

SEQ ID NO: 160992 - protein, 187 aa, Heterodera glycines
KEKKVQQIFRERDILRLLSTPANACPFVVHLFCTFQDDESLFFVLSYAPKKDPMARLKKLQRFSVGQCQFAMAELFLALEHIHALDVIHRDVKPENILLREDGHILLSDFGCAKQIIAKRENVAEENAKKREEEEATKLALRRRCSFVGSGAYVSPEVLNGKEVTGACDWWAFGVTLFQLLVGRLPF

SEQ ID NO: 160993 - protein, 85 aa, Heterodera glycines
MTFHGVDYDIFVCEKTISGLKDDRSENVFNRRQGACASGDDRCDNVFNRGQVASARNGEGRDSILIQGLAFVIVKVVNAVYDMIV

SEQ ID NO: 160994 - protein, 87 aa, Heterodera glycines
  unsure (1)..(87): unsure at all Xaa locations
GNRRSFTPTEFDPIGTAKLLILKDLRRAIVNLNQFAEKALDSCSNPTIVCSPTIGAGGXAADRFHEDGNKKTSAMVMSTGGPHSNLG

SEQ ID NO: 160995 - protein, 75 aa, Heterodera glycines
KLFLTFLAVKKMNYAKICFIFLQLFPILFHSSEGRVELWQVSQGNPDYYTRGAILNEDAVPNENYNGGGQHYATF

SEQ ID NO: 160996 - protein, 142 aa, Heterodera glycines
MDDEELEDESESDEEEEQQMVKPKKAGTPTVAQTQQHQLVNAKSAVPPKKGQLANAKTAVPPKKEQLSTQTDKYKGIAAEEERRRAERDKVTLFLRCETLQKMTDGEIKALHPDALAVRTNNRAFCWMVFASEPTADKAFAV

SEQ ID NO: 160997 - protein, 89 aa, Heterodera glycines; identical to SEQ ID NO: 158809

SEQ ID NO: 160998 - protein, 187 aa, Heterodera glycines
CFPKPAWSHFKTTNVSDSEIDDIVQKGLKKMRNKSDFLSSPWDDLMVVDAFQTISSLNSMEVETNPTVFAMTVQKIGQTQRMANVRKMWQKWNDAVAQRDVTFDEFRQKVGSETVKRSLKNFQRMGGGANWRPIQDVKITWISLRQMCFQPLYSPDEFKDIEEQDQFFKMLIVHGKEYESLDCMSID

SEQ ID NO: 160999 - protein, 200 aa, Heterodera glycines
LSSLLALFLLSLLCFVFCHFRPHFPPFLQKASVEQRRQYNRIVTSQNDTKAQINSNVQNWASNAGVASDYNNFTSEQQQRSQQFHDAVSGNLTGQALQLFNNLWSIRQNDQITRLAECQQIRAALNATGRDHVLHLLVPIPPPSIVGPPPSGCFPRPPYSKPFGGGFGPKSGGAAIPGRGGPQTPERRNNIGTEEGEEKK

SEQ ID NO: 161000 - protein, 46 aa, Heterodera glycines
SASTLTHFRVCRPLLNRPLTNWAKSRKALPQLNCSVPSRTVFLPNG

SEQ ID NO: 161001 - protein, 165 aa, Heterodera glycines
MSSEILWSTVFLLLVDCATILFWFFFGHVKKRQRPHKNEIFICGDCWLLVFDFLAPSQLGLEIALINRRFNCIVDEHFKTRKWKLGCMRICHKIGENGTKQLQIVNSDAKPLPIPQNPLPNKVIGFRHIQIHYIDQNVIAFLRRFHRRIFDVCSMVLYIHTDNDR

SEQ ID NO: 161002 - protein, 157 aa, Heterodera glycines
MIGELNSIADLISNFFLAAFAITNFACFDASAAKSPGFRPGFRFYNKWLSLFGSALCVLIMFVLHWPTSLVTFFVFIVLFVFIKHNKSHINWGTSTEANRYRRALNSLLKISRTEDHVKNYRPQLLVLSGNPVARQALVDYAYCISNGRSLLLCGHI

SEQ ID NO: 161003 - protein, 51 aa, Heterodera glycines
SHQLINSFLLLSTWPGRSGVGKTVVESAISDPNVNWVLSSTQFFPHIFPFS

SEQ ID NO: 161004 - protein, 194 aa, Heterodera glycines
MSHMYKYMEKAGWQTENSELFNYQKQILDKGVPELFSAVINDKNVGKAGAYKEKHNESSDIFSKVYEIADQKFKDLFKNNAFPTLEKLFGDAKALFVNTTPLLDYDIGSLPKRVKFIGGIDLMQPDHKDALPQVFGQPKPVIVFSMSSLLEPSKMPLDKFKTVIQGLGMCEKEVIWKYAKQEDHGRMSLLKHAP

SEQ ID NO: 161005 - protein, 182 aa, Heterodera glycines
  unsure (1)..(182): unsure at all Xaa locations
AFFFWLPXYLTYNIXWAESEANQLSIWYDIGGIVGSVLGGLASDRLGHRSPIILLMLVLSVPLLFIYSGLGSSRVEHVIGMSLLGVTISGPYNLIVGTIAIDLGSQQALANNAEALSTVTGLIDGIGSAGSALGQLFVPLIQNELGWIWVFHFFILMNFLSSMCLIRRFFHDARLISLSFAP

SEQ ID NO: 161006 - protein, 168 aa, Heterodera glycines
  unsure (1)..(168): unsure at all Xaa locations
IAPPFRARDEAELLLLPFFXCFGFTQLNMALLNGSTGVVLSKFEQNSFCRVVEQYRIRLLLLVPPILVFLAKSPLVANFDMSHVRAILSGAAPAGADLCEELKQRFPNLQHICQGYGMTEMCVAIALPILDKERHESSGKLLANLEMKVVDLLTRKEVELGMPGELFV

SEQ ID NO: 161007 - protein, 103 aa, Heterodera glycines
MVESRIKCYVCNSGTKGQADCTEDDHDKLKTFIKQCNPLTFGTFAGEEAKACRKVRQTVEDETTIVRECAYTGEELDGKRRTGNKGVTVLIDQCINDQNATFP

SEQ ID NO: 161008 - protein, 98 aa, Heterodera glycines
NTQIKMFFLCPPIVLLPSALFCVASHGLTNHSKAFGNESESNRTDFFGTEPMEIPCHKSADGFDPMVDDVFALLSAGEEGEEEGNGTKVGITVEEEEE

SEQ ID NO: 161009 - protein, 110 aa, Heterodera glycines
KTDKKLKLKYTKVEERRGKKERNGRHKEEKKGGQKGRKRWRTKRNNNNNTLIVRETQLLLALLYLGIYTFINPFSSAPRAIHRCFLCRGIIQRRADLHRLCTKSPSSSFS

SEQ ID NO: 161010 - protein, 35 aa, Heterodera glycines
SPPPPPPPTTCCCCCYLCCGCSSGRGSSTTAETSI

SEQ ID NO: 161011 - protein, 238 aa, Heterodera glycines
  unsure (1)..(238): unsure at all Xaa locations
VYGRVSXTGRGLWKGLAVFINDEKFMTKLGLTTGFKGKTFIVQGFGNVGLHSHRYLHRDGAICIGVQEYDCAIYNPNGIHPKELEDWKIANGSIRGFPGAKAFEPFTDLIFEKCDILVPAACEKAIHLGNAHRIQAKVIAEAANGPTTPAADAVLMNRGDCLIVPDMFINSGGVTVSYFEWLKNLNHVSFGRLTFKYERDSNYHLLESVQKSLERTFDRAVPVDPSEEFQLRIAGASE

SEQ ID NO: 161012 - protein, 167 aa, Heterodera glycines
  unsure (1)..(167): unsure at all Xaa locations
FPYEYVYPEHFXYMEQLKKVLDAPVSSWECXSGHCLLEMPSGTGKTVSLLALVVAYMRKYPERLHKLIYCSRTIPEIEKCVEELKRLFRYYTNVTGSAPDFLALTLSARKNLCINKSVVSFRYGSAVDGACQRLTASYVRAKRRLNPNLPCCSFFEKFDEKRDMTLP

SEQ ID NO: 161013 - protein, 159 aa, Heterodera glycines
GIKPASVAGILQRYEMQQFRLSCANFESESSCCSTSQQMEIIVDSESDSNLTRCPCCRCAQVNLICANCLNTNVVRIGKVREDKRRLLRSKSAICHLIQNALADEIKFEGEFHQLSRSIEEIRAKIAHKKDQVGRLRPRISHTESQSERNRQNVLLLEK

SEQ ID NO: 161014 - protein, 124 aa, Heterodera glycines
NGHLAIESMQKYNNTPFDYVGFSFPWFGIHFLEPFISWSGILRKDPLIILRKQLMDELKARKKLRESGEQQQQQRAKVDFIDLFLETEQNEQQQLTEQCQNEGEAMLSKTALQRVAKRCTLEEI

SEQ ID NO: 161015 - protein, 117 aa, Heterodera glycines
SLSTSNSMSDTYGFINNISDRISRRVRRKRPTESGVSGVSGAPPETRKDDKAKGGCCSKKCACIIVCSILTLIVLVIGGLVLAAVLTPETFKNAPLLSLIAGKKNGGADGEGEDTND

SEQ ID NO: 161016 - protein, 168 aa, Heterodera glycines
  unsure (1)..(168): unsure at all Xaa locations
MEHEMETDTQLIRGLVLDXGGRHPDMPKSVRNVHILTCNVSLEFEKTEVNSGLFYKTAAERERLLQAEREYITRRVLKIVELKETVCAGGDQGFVVINQKGIDPPSLDLLVQHGILALRRAKRRNMERLQLACGGEAVNSVDDLTPDVLGWAGSVYEHVLGEDKYTFV

SEQ ID NO: 161017 - protein, 170 aa, Heterodera glycines
SGSRPGPPSYRHPTIRESHSVFIKSLEERGHSVIIAMADDPNLSLIKFGEFLYDHLIIFAPSVDDFGGNINVDEITKFIDGGGNVLVAADKNLGDAIRDLAAEVGFEFGEDQSMVIDHRNYDTVLDDGSHTTIAVPNAQLIKAPLITGESALLAPVLYRGIALVADELGP

SEQ ID NO: 161018 - protein, 194 aa, Heterodera glycines
AGVLAKLTLHVDAGQRAVIFDRFTGVKPNVTGEGTHFLIPWVQRPIMFDIRSTPRAVNTITGSKDLQNVSITLRILHRPDPSKLPQIYLNIGTDYAERVLPSITNEILKAVVAQFDAHEMITQRESVSHRVSVELAERAKQFGFILDDISITHLSFGREFTEAVEMKQVAQREAEKARYLVEKAEQMKLAAITT

SEQ ID NO: 161019 - protein, 171 aa, Heterodera glycines
APTGSGKTLSFAIPLIVRVLSARKERSPANGQQKCADIHSLCAVVIEPTKILAKQTYENFVRFCDGLDINCEYLRENGIGDKCDILVTTPNRFIFALEKLSDDGQKRAKLVENLQWLLLDECDRMFDRTEGEASFRVQLSKILRLCNGKETRRGFYSATFSYEVEEWCKEH

SEQ ID NO: 161020 - protein, 120 aa, Heterodera glycines
MDNVTLAKTDQFIEYEFHELALLLEGPANLEWAKEDTRVSYIYVFEPDTVLERGIRPAFISNAARFPDVREGYHFRPPLGWMNDPNGFSKFGDHFHLFYQHYPHALHWSAMFWGHAVSRD

SEQ ID NO: 161021 - protein, 179 aa, Heterodera glycines
RMNVQPPPTATHSQPTILPMPIQNWSHELGIEFGDVLIADLLRRMCSPDFSSPLAPSARWHDIPFFEQFRSDLQFQWTLLRSVLVGGNRGKLNAKLLSILFWTVSDREEWQKRTVARLIYAAKDDKELANLVSLVIAVLPQLCQHRQQSSGELGLMSAAILLALADARRFGTEWDQFVM

SEQ ID NO: 161022 - protein, 138 aa, Heterodera glycines; identical to SEQ ID NO: 158760

SEQ ID NO: 161023 - protein, 216 aa, Heterodera glycines
  unsure (1)..(216): unsure at all Xaa locations
AHINLFVYQKQQKKMIAPLITIIVITSLVIGGHAFSADLTEIVENANEYVEKLDQEFITALDVGPFDHYTGPLGTRPEPITAVMAGGYACGSDEAPGSKAGSIALGLLCFPLMGLFHKCCEDHDACYDKCGAVFGDCEGNFCECLTWSLLMGPHCIVVGLSHCTATTYGGRAAFDKAQNIACCKEKLSPCLDQQRTCYSXCGKTRQKCDDECNKCA

SEQ ID NO: 161024 - protein, 167 aa, Heterodera glycines
TIQSESLEERSQPALSVEKKERPKTAGMIDMGGASAQIAYELPLGHSDAATGGQENVQLLNLGCRDDESRFRFRLFVTTFLGFGVNEGAKAYEKFLWKRLNNKRQAANSTETDNGKDGAKVPTVVDGCLPVNMLKLSHAEENYDQFVRKGNGDWDSCVSDIASLLFE

SEQ ID NO: 161025 - protein, 174 aa, Heterodera glycines
RRLRGRTSSKSHENYLRLWAKSLNCPIVSIDYSLAPEHPFPRPTEEVLYVYAWILNNPEKFGWTGSRICMVGDSAGGNLIVSVNLKLVELGVKRIPDGLVPIYTPFLFQYLPSPSRVLSFMDPLLHMGVVIRCAAAYSGSYSDEELDKNCSFHVKSDSAVGNGHLSLQDYVNRV

SEQ ID NO: 161026 - protein, 174 aa, Heterodera glycines
ADELKKFPSLTDAFKKKRGNILNFEEEEFDEIISNGTSKRDNSPYTDHDYAGTRQLATAKGATGKHQRQKGGGGTAKEPKKKTALVNGTDSVVRSSARPHRPTKRFVEETNESFIRGTSKVRRTSPRKHGKKSTAEGGSEGEESEDDGKEYSVEKVFKKRVKGGKMEYFVKWAG

SEQ ID NO: 161027 - protein, 69 aa, Heterodera glycines
MMDGRTADEAIVATVSKVGENIQLARASVISSSPANKLFGQTHPKEEFNGVQLGRFISLVSLGHKSDES

SEQ ID NO: 161028 - protein, 140 aa, Heterodera glycines
MAHFDLVVLFLCCFELVHSDVFGPFALFCLCSFASSATLLAHFALLRSSDLFQISSSDFVEYCRTFVTILAFGYAFTPVIRTLTTSISTDTIYACAILLFFASLFVHDYGINVPVVSLPLSANLCLAASVFLISRLQSDL

SEQ ID NO: 161029 - protein, 44 aa, Heterodera glycines
RIQAASLRSTHDQMRACINIDLLITCQREVNSSRMTDRKAPVLY

SEQ ID NO: 161030 - protein, 160 aa, Heterodera glycines
  unsure (1)..(160): unsure at all Xaa locations
STPSCCPGSXHVVSMMKDXTGTFSASMPKSSLCLSAERVAAAGENQLKTIWCPGNGGQTLINEINAAQSSSDECARSLGFVRAMFEIAASAASHVGANAELANLAVQFREQVGTIDTNCAALGIHVGQISLGTPKGDHPQVHDSESVLSNPGTSGSHKRI

SEQ ID NO: 161031 - protein, 138 aa, Heterodera glycines
MSFRLLGILCVLLFVAQLTNGDAAWNDANDVNPFKGHQERALAFNEKLKHAEENTPENVSPTPTPSINATETPDTNATMTTSEVTGTSTEGPTIKTTAKPAPPSTSSFQMTILNIVLTGLIAVILLVDIVLAVVKCKK

SEQ ID NO: 161032 - protein, 138 aa, Heterodera glycines; identical to SEQ ID NO: 158760

SEQ ID NO: 161033 - protein, 62 aa, Heterodera glycines
SGRNFSTQAEWLLETDGTALLRVLSEPDVDFIRTHSNDICEIFEVLGIEAVRKAIEREMNHS

SEQ ID NO: 161034 - protein, 156 aa, Heterodera glycines
MRTFLFIAVVGLVLAVIMESVNATGNNSPTKGQTPPGSPKGGHGSNKSPTTPHSAGSPHGTQHGNQQNHAAGQTPPGSPKGGHGSNKSPTTPHSAGSPHGTQHGNQQKNATGQTPPGSPKGGHGSNKSPTTPHSAGSPHGTQHGNQQKNATGQTPP

SEQ ID NO: 161035 - protein, 90 aa, Heterodera glycines
QRIGAGAPVYMASVLEYLAAEVLELAGNAARENKKLRITPRHLQLAVRNDEELNKLLAEVTISRGGVLPNIHTELLSKMQQKKQQNDDSQ

SEQ ID NO: 161036 - protein, 172 aa, Heterodera glycines
MQNLFPGKFGQAAQAANTAQMQMKAEHDPSAGFPWWVRFLAKGLGIVGGFVAIFFGVLALFTIHPMCMVAALLQLAAGFLTIALEAPFCCAFVDFIERIAQFSESRAYWQKAALYGGMGIVPILLCAGTETILGAGMICASGVAYGFMALGKKADRTTMLGGANTAGQDPAW

SEQ ID NO: 161037 - protein, 202 aa, Heterodera glycines
PEKWDMNTVVPPISLATTYKQQFAGMPKGHDYARGGNPTRDVLQQSIAALENARHCRVFSSGLSATAAMANWLHSGDHIIASDDGYGGTQRYFRQISVQHHGMELSFVDLTKLSNLEKEFKPNTKMVWFETPSNPLLKVIDIEAVCRAVQSRSKECIIVVDNTFMTPYFQRPLELGADVAMHSLTKYINGHTDVLMGAMVTN

SEQ ID NO: 161038 - protein, 148 aa, Heterodera glycines
WQFLRSVEYFAENEIDNFAILFVALFIAIAEADGNVRAKRHEERLKRQDNRADEENRQVDSADREKRQDNRADREKRQEDSADREKRQDNRADREKRQDNRADEENRQVDSADREKRQDNRADREKRQDNRTDREKRQDNRADREKRQ

SEQ ID NO: 161039 - protein, 128 aa, Heterodera glycines
QMSFRLLGILCVLLFVAQLTNGDAAWNDANDVNPFKGHQERALAFNEKLKHAEENTPENVSPTPTPSINATETPDTNATMTTSEVTGTSTEGPTIKTTAKPAPPSTSSFQMTILNIVLTGLIAVILLV

SEQ ID NO: 161040 - protein, 146 aa, Heterodera glycines
MFFALDFVLFGLFLLLSLLVGLWHNLPRFVRPSLAASSSNKSDPTGDPSTLKHSSANDFLDGGRRLPVLPVCLSLLTTFVSGIGLLSTPAEIYSRGSAFALFNLCGSFAFALIGIFFLPIFFKLKCLNAYEYFELRFQSQSLRRLA

SEQ ID NO: 161041 - protein, 178 aa, Heterodera glycines
  unsure (1)..(178): unsure at all Xaa locations
KSTTGESEESGEEGEAFDLDEYIGRGGLEDEDPNRYIANTVAKVPKEAAENESDEIGILRTRTYDLHITYDKYHQVPRFWLIGYDENGTPLTVQQMKEDFSQDHKDRTITLESHPHVVNLCLATIHPCHHASVMKHLIEQYSESGKELNVLDYLFIFLKXVQAVIPTIEYDYTRSIHF

SEQ ID NO: 161042 - protein, 72 aa, Heterodera glycines
FFDDGSVPKPFGHFTVQSAFRKKIHIVFRDREESNDLSFVRFGEVQVSLNFNPNSFLRVIWNCLTSRFCTPT

SEQ ID NO: 161043 - protein, 186 aa, Heterodera glycines
DLVHPPNSSIASNFVTLSSTTDATIGGDLKRWSLLHGVDCSTNWPHFEEYSAELRHFSVSKSRRMQQKEQQKPETGVVLTKKVVKDEDESPQNGSRFRSYLGEGAEDAGTIASSGSGGNLLRSAAKHHSIDSQLSAISSSKSAWSKNEKTSQNNAIPTGNCQQRQKWTKNAETGMILVDNSNLTQQ

SEQ ID NO: 161044 - protein, 107 aa, Heterodera glycines
RISETDVRQDILMDHSLRSISYIADIGDLVVLMARRVPSQQEQTEDEAGGETIRKSPRVICHIFESEESAFIAQSIGQAFQVAYVEFLRANGIEDPNYLRDIDYQEV

SEQ ID NO: 161045 - protein, 152 aa, Heterodera glycines
MPLVHNCIARTRHSLLIVLGLIMIMANCGQAMRQQAVAVRGQLRCGNRPASGVKVKLWDEDDGPDPDDVLDEAFTDSSGSFQMRGSTRELTNIDPVLKIYHDCDDGIMPGQRKVKLRIPSQYITNGGLARRTFEVGVLNLETVFAGEERDFI

SEQ ID NO: 161046 - protein, 155 aa, Heterodera glycines
VSFFRYIFQLALLTLDVLFLQEISSLKNLRELSLRNNLLENLPKEFQRLQCLRELNISGNLLEHFPRELLQIKSLRVLYLGANRLQSFPSDICRLSNLQVLYLGGNALVDVPDTIGQLSELTSLGLADNRLEQIPTAIASLRNLRNLALHNNRLK

SEQ ID NO: 161047 - protein, 140 aa, Heterodera glycines
MSSILWTLTSCSCSTIGVEMHSKQVIGSSFSLFSFASFVFMALVTLAEHPEFLRRRRIPLRTYLQIVGIFFVVSLLNNRVLGFGLPFPLIIVFRSSTLLANVLLSWLLQNRTFSPARLFSVLLVSVGIALFTPFSRKSAT

SEQ ID NO: 161048 - protein, 187 aa, Heterodera glycines
TFGPYSISRNASIHREKNRKRPFSPLENDLGSVCSIAKIKSPKTPRHAVKILKKIDYEDRASCYLVQWNCGSAEEKGPSTTWEWANKLSPNCRKLAKVFEQSIAKDAKKAWEFTDYEVEAILDRTVQGELRYLVKWVGWRVPTWEKVKYLLPDYSELVERFEQLNAKDIQFWTDTKNTGEGKRPMED

SEQ ID NO: 161049 - protein, 158 aa, Heterodera glycines
KVDSTIEKKLSDEYAVKGFPTLKILRNGRRFDYNGPREADGIVSYMLDQAKPAAKRLNSAKEVLKFMSPSDVTAVGFFSSESGAFYEAFADAAERTRGDFAVGYALGGAIAQHFGAKFGEVVLFWPEIFHSEYEPKRKIFPRETATSEELVSFWRDNA

SEQ ID NO: 161050 - protein, 161 aa, Heterodera glycines
TVAREIVHSNGWGTEGLYRGIGANLWRHGVWNSCYFGMYHNLRLFLCSIPSKNSQSSADRLETASLTVRLTIASLSAIVANLANIPFDVAKSRIQGPQPTTGRLYFSTWQSIGLLQRQHGFCSIYRMLFPFAFIFGPGGGMMLVIYEGIYEWLIRRSMALE

SEQ ID NO: 161051 - protein, 62 aa, Heterodera glycines
RIMSQYQNFNDANLCIAFKDSYLSCVFLNCLASLVCSSFASASSPGSISGVCAQNWVLDRRW

SEQ ID NO: 161052 - protein, 171 aa, Heterodera glycines
QEKASIVTESSFVTPGIFRRRKMLTGRQLNDEGNNEAKEKSADFKWSIDQIAKIQPIEFDETEEFSLPPENWDPCAKFKTPQFENIDHFWTHNNLIAPSPGLFATASALRRVQPSANSPTTSPFQLALSPFGSGPSCSSKCSLSDSTFMSPTMMLTHSQMSESTKAKMFTA

SEQ ID NO: 161053 - protein, 191 aa, Heterodera glycines
MNRRWICNDVWMDMFPFFDRLQLGLKLALLSPRFEFLVDKHFDGTSELPILKNIVLCKNKATAVPELRVFIDNANYVPFPVPDHSLPKKIRFMHLRICYIDHSVIAFIRANQQMFDKGTNLEFFYVSWNETFFVQPIWNALIRHILPIFVPNIRQLKFPSADHLYCLLRFTSPKVLSDLNIHSIDADRLFP

SEQ ID NO: 161054 - protein, 196 aa, Heterodera glycines
  unsure (1)..(196): unsure at all Xaa locations
PRRFVWEAQPVLARSTFVSSGHYGTHWTGDNSARWVDLRASIIGLIEXNIFGIPHVGADVCGFNLNSNEELCLRWQQLGAFYPFFRNHNSDGEPAQDPTQWQSVANASRVSNLFRYHLVPHLYTLHFLASLRGGTVVRPLFFEFPHDFLTHRLDTQFLWGSDLLVVPVLDPLVDSVRAYFPPDSEWYSISNAHKCA

SEQ ID NO: 161055 - protein, 78 aa, Heterodera glycines
LEEQMAQKSDLAEQMGTLQTKIDLLETEQRQRVELNACPNAHKHYWDNNCCYHDLKIIDCLTGHRESKRPGDRSLYAK

SEQ ID NO: 161056 - protein, 193 aa, Heterodera glycines
TSRLKPGIENSERRFDVHKFTCAALELPDFSDFARLRPLIDALIAELDLNDFLGCTAALEMLAETAATAPKCVPFFGQIGLLDKVYALFIRTKEEPDMGIIHIACIRFFAYLCTTDDNALTKFPKFTADVFDAVFRFDAFDVTRRQLAFETLAVISSTSGAKQIFSQNETLYNMQRAMSNLAVAVATAAEPSL

SEQ ID NO: 161057 - protein, 171 aa, Heterodera glycines
LDKLPQKLKPKALMSTLRMPETRDCYQCNVERSINDENLYLCCAVPHAVLLFQWYEPLPRFVHLKRVQLDKLSSPYTDLQHPHKPFNLVFRSGAANSDLPMVCIGISRALTSPVGTAQELLRELRTNLQKDKFELQLVDNGTDSTVNNMNDMYSAALFGDCSSDDEIIGSW

SEQ ID NO: 161058 - protein, 153 aa, Heterodera glycines
FKIVVLGSGGVGKSALTVQFVQGIFVEKYDPTIEDSYRKQLEFDGQQCMLEILDTAGTEQFTAMRDLYMKNGQGFVLVYSITAQSTFNDLMDLRDQILRVKDTDDVPMILVGNKYDLEDERVVAKEQGMNLARQFNSSFLETSAKHKINVHEV

SEQ ID NO: 161059 - protein, 198 aa, Heterodera glycines
NHHLEAQNGNSPEGEEESNCGGSASPSSLRDCHSRASTNEHTNISHHSLHDDNAPPSPSLANISTNIELHPHNNALGGSSSHKFIKRPLNAYMIWTRQERKRILTDDPKMKMNEVSKAIQMGEKWKKMSDKEKKPYFEMAKKFSEEHKLVLQEHPELQYAPSKKKVVKKLADGKQLSVVDSSSVKSCTITPDASRSTT

SEQ ID NO: 161060 - protein, 179 aa, Heterodera glycines
PSNGCFLVLRFVLPSPLFLLSLSSFVFCHFRPHFPPFLQKASVEQRRQYNRIVTSQNDTKAQINSNVQNWASNAGVASDYNNFTSEQQQRSQQFHDAVSGNLTGQALQLFNNLWSIRQNDQITRLAECQQIRAALNATGRDHVLHLLVPIPPPSIVGPPPSGCFPRPPYSKPFGGGFGP

SEQ ID NO: 161061 - protein, 173 aa, Heterodera glycines
  unsure (1)..(173): unsure at all Xaa locations
PAEREIVRDXKEKLCYVALDFEQEMATAASSSSLEKSYELPDGQVITVGNERFRCPEALFQPSFLGMESAGIHETSYNSIMKCDIDIRKDLYANTVLSGGSTMYPGIADRMQKEITALAPSAMKIKIIAPPERKYSVWIGGSILASLPTFQQMWISKSEYDESGPSIVHRKCF

SEQ ID NO: 161062 - protein, 197 aa, Heterodera glycines
  unsure (1)..(197): unsure at all Xaa locations
MQISTLELGPTTSLTLLMDTAPNLDLSSSIGHPSIDWPVGACSTGNDSADEEQWVKLSSDQFAENAVNFSDESAFSAFFVFCKSCVSLECAKLRAYCRTCESSAIIFLNEPQQWDDVKENNSIRIXCHYCDKESCVSFRFKCVKCGEPASPLQHISRNFSLPPSECVICGSNSFPLGVRLRDCTHLSCVQCFVAYAE

SEQ ID NO: 161063 - protein, 207 aa, Heterodera glycines
  unsure (1)..(207): unsure at all Xaa locations
IRKDLVFRXSWGLDKIVNWEAPEILEKYCGYGFLSDHDGNPILMSLLGNTDVEGMLRSVQSKDYIKFSLAAIEKGITLCRERALQTGRPFEQMMLVFDLDHISSAHYSSKQFASSFTTLVLLFQEHFPLVLRKILVIRAPEMGRIAFNSMTPFLSNAIKSMIEMPSEEGWQSALSKYVNLDAWPVHWGGRMMDPNGDPKCPSKIRYG

SEQ ID NO: 161064 - protein, 120 aa, Heterodera glycines
MQPMLRDHAAQLNVTDKGELTYKVDVSGFRPEEINVEVIGNEIIVNGEHREQNDSESVHRQFSRRVLIPEGIQKESIKCELDGGRLCICGMKTAGEGGRTIPIEMKKKAAVEQQPQVEKK

SEQ ID NO: 161065 - protein, 84 aa, Heterodera glycines
MKKVPAAKVVHFKSAQETAPPARICGDSIGSLSAAHRQRISICERNEKCCRHRDGENRKKIGCCPFEDGQCCAHSAHCCPAGFA

SEQ ID NO: 161066 - protein, 162 aa, Heterodera glycines
MSSAEILLCALSLILLVEYAIILWIIFDHVKKRLRPHKEIFICGDCWLLVFDFLAPSQLGLGIALISRRFDFYVDEHFKTRKWTLGKMRICHKIEKNGTKKMQIVKSDGNPLPIPQNPLSNKVIGFRGIQINYIDQNAVAFLRRFRRIFAFSSIYLVITEKC

SEQ ID NO: 161067 - protein, 131 aa, Heterodera glycines
MTTVGNVLSPLRQLERELDHFFDGMQPMLRDHAAQLNVTDKGELTYKVDVSGFRPEEINVEVIGNEIIVNGEHREQNDSESVHRQFSRRVLIPEGIQKESIKCELDGGRLCICGMKRAGEGGRTIPIEMKK

SEQ ID NO: 161068 - protein, 166 aa, Heterodera glycines
MYMNSMGSRGASSAAVVASAAALCLFSAMAVVVYGAESAGPKADQAMAAKQFNPSAFPAMPPELEKILPADVVQKLKAVHADMSLNIMQKQDKIDRIMSSLPGEVLDQIPAPPGFERLPDDVKNRLKQINRQTNKAWADKQKELQEYVKTLPHEQRAILMMGPMGG

SEQ ID NO: 161069 - protein, 109 aa, Heterodera glycines
LCPTRSPNGTAFLPFNALVDAHFDGKPELTLWKTTKIRKQIGVPKSVLANYADSVQFPLADHPLPNKIRFKDLRISYIDHSVIAFLRSNQQIFDNKGTNFGLFSHVNYV

SEQ ID NO: 161070 - protein, 196 aa, Heterodera glycines
RFDFAHRLTAVLLWWRRRHHLLGLLLLLVVHHHILIKWHSTTLPFVAARLHFWRCRRLLLLSLFGLHHQRIEQLTSQRFIRAQIKGRFDFAHRLSAVLLWRRRWHHPSAVCAGRSRQLGHVCCCCCSSPLLALAVVAVLSNWRSVACGGCCLLLLRLMLPNRCCCCFCWCCCDSSSAVCWSVCVRCLAQDGHVRRT

SEQ ID NO: 161071 - protein, 189 aa, Heterodera glycines
DEPATQVHIFAPALSLDNLILFLLATPVQFFGGRNFYMQSWKALKHRTANMDVLVVLATSIAYAYSVSVLILAFLLQWSSSPMTFFDVPPMLFVFISLGRWLENKAKGKTSEALSKLMSMQAKVAILITRDEKTGQITSERGIDTELVQRGDLIKVMAGEKIPVDGIVVEGKSSADESLITGESMHVVK

SEQ ID NO: 161072 - protein, 140 aa, Heterodera glycines
  unsure (1)..(140): unsure at all Xaa locations
EMALHFXRKMKIMVIKDIERDDIEFYAKILGCRPVASVDHFVPESLGTADLVEEIETADGKVLKVTGLKQSGCAVSILVRGSSKLVLDEAERSLHDALCVIRCLVKKRALLPGGGAPEMEVSVRVRAAAHTKHGAEQYCW

SEQ ID NO: 161073 - protein, 157 aa, Heterodera glycines
SGTTGAPKAAIIRHYRYYLMSIGCGNAFGIVPSDRLYLTLPMYHTAGGILGTSQVVFKGCTACIRTKFSASNFWKDCIRFECTVSQYIGEICRYLLAQPPSPIDRKHPIRLLTGNGLRPQIWRAFVQRFGIAKIGEFYGSTECNSNLLNLDNRPGSC

SEQ ID NO: 161074 - protein, 89 aa, Heterodera glycines
  unsure (1)..(89): unsure at all Xaa locations
FLLIVLWAVVSFRLSASTXVTKKTANDGXGNNSSAGIGTKIKRIVTAGLLFTSLATGGAEAIGRSNAQGGNAAGLVPSHVTNRSMAPPP

SEQ ID NO: 161075 - protein, 114 aa, Heterodera glycines
  unsure (1)..(114): unsure at all Xaa locations
RAFHFNRMEMLAFIACGRXSPTTTTSAVSSINCADIGTQTMKHQQQRHQLTNKMPTSMPATTTTRDKPSSSSSRRSSPLPVQVGQDYVSTIELSKRGGGAAAGGGDQRGWPLKS

SEQ ID NO: 161076 - protein, 57 aa, Heterodera glycines
TCFAFLGLIFTAWFFVHGVTSTKKTRNLVKELFIGTLASLFLGFGTLFLMLWVGIYV

SEQ ID NO: 161077 - protein, 172 aa, Heterodera glycines
PVKETEEIGSGEGTSNNSQENTDKPKRKRRTKEEIEQEKLNKEVNRICRQIQSAKNSKCEQFLFCHFSSKILDLDDKLSDELRKRFEERGIEQQIVYDKSPKNPMQIFWRKKKLEAYLDGEQLHKTERMELQNVFCCVLSGETFSVLVKSRGNSMMDYLDEQMASIRKQIGG

SEQ ID NO: 161078 - protein, 129 aa, Heterodera glycines
ALADTLKENSTFTDFGLEGNCFGNEGIKEFSKELEINDTITDIYLSSNYFKSEVVEELLKALEVNKTITNIDLSKNKIGIKGAIALARVLEKNKNIKYINLEDNVIGALGIEALTKVSRRKGIEIGLGS

SEQ ID NO: 161079 - protein, 138 aa, Heterodera glycines
MRTFLFIAVVGLMLAVILENVNATGKNSPTKGQSPPGSPKHEKDRKNEHGNQQNHATGKSPPGSPRVQSPPGSPRGKSPPGSPRVQSPPGSPRGQSPPGSPKHEKDHKNEHGNQQNHATVPNVVQKVEVHNQPTPSAA

SEQ ID NO: 161080 - protein, 151 aa, Heterodera glycines
DNIHHWLLHTAAVVVEVALLPPSATLTYTVGCPFHRTRKGLFWHSIRYMPSSNICSILSMTPPSPPPAASFAPNGTVFGVVPILVACGRAGVVAVEPPPPPSFDNSNSLRLLVLFRCCALFAASLAIGWIGLNGFLDDAFAPSLPSTAPFS

SEQ ID NO: 161081 - protein, 143 aa, Heterodera glycines
RLGFAWVGPSSSLVSLSLDGNNISRIGCHAFASVGRLSVLSLQHNRITSLSCAATHDPISLTVFLDQSFLQPLQRLSRLSLSHNALQLLGEDDLAGLGALRELLLDHNNISKIARNAFVDLQLRKLFLNNNQLYYLPRGVFSG

SEQ ID NO: 161082 - protein, 165 aa, Heterodera glycines
  unsure (1)..(165): unsure at all Xaa locations
GNEKNRKLLDLLDALEFNXVVIFLRSVSRCRALNQLLIEQNFPSIAIHRAMAQEERLARYQQFKDFQKRILVATNLFGRGMDIERVNIVFNYDMPEDTDTYLHRVARAGRFGTKGLAITFVSDETDAQTLNSVQDRFDVTISELPDQIDVGSYIETRTGNNAAAE

SEQ ID NO: 161083 - protein, 141 aa, Heterodera glycines
PSPKPAKFPKTPTTNNTKYLPPELLDEMTFYIYPNQNCSRILTSSWLLMEFLRPHIERWKKIFKILLNELIDLHKLCKEGIPWRTFTALAEKDKNCNAFVAALLELVKEDAYASIDGSGSNALFIRFRELYPSVIETLAWT

SEQ ID NO: 161084 - protein, 121 aa, Heterodera glycines
HAAHGNGDGTGQHFALLVKDELFSGVGRVSYGCKGTVDNAQLFRNEVPQLERNQAEIAENFLTKSGRPANGVDGPCSTCGRDGLGLVNGQVLDGDKFWRWRRFGGTAAHFFFVCLLKVSML

SEQ ID NO: 161085 - protein, 85 aa, Heterodera glycines
MSNFIFVAFLTAAFFSSGLALPAPYDAESVVSSELNVPLLSADANVEAAITNESDAAAAIQAPSIAVPIEHQTAADITHPTETGN

SEQ ID NO: 161086 - protein, 150 aa, Heterodera glycines
LWTSEPATEADTWIPIGGLVGPQTSVMFAGDPKQLGPVVRPENLKWFGFDNSLMKRIMYGDVYSQAGDRVFVTLKQTYRSHYAILRPCSYLFYDNILQVDDGQGDFHKLTEWEGLPTKGFPVIFHSSRGSKDEQGFNRSHHNLFEAELVR

SEQ ID NO: 161087 - protein, 76 aa, Heterodera glycines
  unsure (1)..(76): unsure at all Xaa locations
QLARLPXSIVISCELSLNLDYMLEKLWEYLALLRIYTKKPGNAPDLGPEDGIILRGNSTVEHACHALYRTLAAQFR

SEQ ID NO: 161088 - protein, 120 aa, Heterodera glycines
HDIPDKKPSQPYGLQGTNHLLPGFGKIASKLPTKTILKKDKVYAWCNCGYSHSQPLCDGTHLSVRTPAWAGKLRPVRYIPDKDMEVWLCNCKQTKNRPFCDGSHKKFIEQEKKDVLADDY

SEQ ID NO: 161089 - protein, 103 aa, Heterodera glycines
SLLAPSFLTVSPLWPFPFRPNSASSHARVFDSEFPSSHSPKLRCVLSANNKTNSRARRYHHPRPQLVIFDKDGTLICFHSLWVPWVRSFAEKVEEAGIDGIAP

SEQ ID NO: 161090 - protein, 112 aa, Heterodera glycines
MAFLSRLSILPNSPISLLAVSLAVLAFVALASANPPTARETAPNAQQNNANSVATGEIAKNIAEKMERMNEFINYFRAKKFIDAHNLAFEKGEVSFKVAPNHLMHFTPAQYN
